United States Patent Application Publication US 2011/0177960 A1 - sequence listing, part 16

SEQ ID NO: 267864 - DNA, 25 bp, Artificial
  probe
  misc_feature (1)..(25): SEQ ID NO: 610; WAN024FRC; Start 709; Stop 733
gatatagtggttaagcgtcctctat

SEQ ID NO: 267865 - DNA, 25 bp, Artificial
  probe
  misc_feature (1)..(25): SEQ ID NO: 610; WAN024FRC; Start 320; Stop 344
acacagatgtcttactaggtgatat

SEQ ID NO: 267866 - DNA, 25 bp, Artificial
  probe
  misc_feature (1)..(25): SEQ ID NO: 610; WAN024FRC; Start 838; Stop 862
caagagctagtagaggtgacaagaa

SEQ ID NO: 267867 - DNA, 25 bp, Artificial
  probe
  misc_feature (1)..(25): SEQ ID NO: 610; WAN024FRC; Start 749; Stop 773
agagaatgattaaatgccctgactt

SEQ ID NO: 267868 - DNA, 25 bp, Artificial
  probe
  misc_feature (1)..(25): SEQ ID NO: 610; WAN024FRC; Start 748; Stop 772
aagagaatgattaaatgccctgact

SEQ ID NO: 267869 - DNA, 25 bp, Artificial
  probe
  misc_feature (1)..(25): SEQ ID NO: 610; WAN024FRC; Start 747; Stop 771
aaagagaatgattaaatgccctgac

SEQ ID NO: 267870 - DNA, 25 bp, Artificial
  probe
  misc_feature (1)..(25): SEQ ID NO: 610; WAN024FRC; Start 750; Stop 774
gagaatgattaaatgccctgacttt

SEQ ID NO: 267871 - DNA, 25 bp, Artificial
  probe
  misc_feature (1)..(25): SEQ ID NO: 610; WAN024FRC; Start 611; Stop 635
gtcatttctcatttcgggaatatgg

SEQ ID NO: 267872 - DNA, 25 bp, Artificial
  probe
  misc_feature (1)..(25): SEQ ID NO: 610; WAN024FRC; Start 253; Stop 277
tatagacctgcttatgggcttatct

SEQ ID NO: 267873 - DNA, 25 bp, Artificial
  probe
  misc_feature (1)..(25): SEQ ID NO: 610; WAN024FRC; Start 610; Stop 634
agtcatttctcatttcgggaatatg

SEQ ID NO: 267874 - DNA, 25 bp, Artificial
  probe
  misc_feature (1)..(25): SEQ ID NO: 610; WAN024FRC; Start 711; Stop 735
tatagtggttaagcgtcctctatac

SEQ ID NO: 267875 - DNA, 25 bp, Artificial
  probe
  misc_feature (1)..(25): SEQ ID NO: 610; WAN024FRC; Start 254; Stop 278
atagacctgcttatgggcttatctt

SEQ ID NO: 267876 - DNA, 25 bp, Artificial
  probe
  misc_feature (1)..(25): SEQ ID NO: 610; WAN024FRC; Start 255; Stop 279
tagacctgcttatgggcttatcttt

SEQ ID NO: 267877 - DNA, 25 bp, Artificial
  probe
  misc_feature (1)..(25): SEQ ID NO: 610; WAN024FRC; Start 612; Stop 636
tcatttctcatttcgggaatatggc

SEQ ID NO: 267878 - DNA, 25 bp, Artificial
  probe
  misc_feature (1)..(25): SEQ ID NO: 610; WAN024FRC; Start 321; Stop 345
cacagatgtcttactaggtgatatt

SEQ ID NO: 267879 - DNA, 25 bp, Artificial
  probe
  misc_feature (1)..(25): SEQ ID NO: 610; WAN024FRC; Start 262; Stop 286
gcttatgggcttatctttgaagaag

SEQ ID NO: 267880 - DNA, 25 bp, Artificial
  probe
  misc_feature (1)..(25): SEQ ID NO: 610; WAN024FRC; Start 607; Stop 631
attagtcatttctcatttcgggaat

SEQ ID NO: 267881 - DNA, 25 bp, Artificial
  probe
  misc_feature (1)..(25): SEQ ID NO: 610; WAN024FRC; Start 261; Stop 285
tgcttatgggcttatctttgaagaa

SEQ ID NO: 267882 - DNA, 25 bp, Artificial
  probe
  misc_feature (1)..(25): SEQ ID NO: 610; WAN024FRC; Start 260; Stop 284
ctgcttatgggcttatctttgaaga

SEQ ID NO: 267883 - DNA, 25 bp, Artificial
  probe
  misc_feature (1)..(25): SEQ ID NO: 610; WAN024FRC; Start 259; Stop 283
cctgcttatgggcttatctttgaag

SEQ ID NO: 267884 - DNA, 25 bp, Artificial
  probe
  misc_feature (1)..(25): SEQ ID NO: 610; WAN024FRC; Start 751; Stop 775
agaatgattaaatgccctgacttta

SEQ ID NO: 267885 - DNA, 25 bp, Artificial
  probe
  misc_feature (1)..(25): SEQ ID NO: 610; WAN024FRC; Start 118; Stop 142
aaggtggatgaattcgctatgttaa

SEQ ID NO: 267886 - DNA, 25 bp, Artificial
  probe
  misc_feature (1)..(25): SEQ ID NO: 610; WAN024FRC; Start 710; Stop 734
atatagtggttaagcgtcctctata

SEQ ID NO: 267887 - DNA, 25 bp, Artificial
  probe
  misc_feature (1)..(25): SEQ ID NO: 610; WAN024FRC; Start 843; Stop 867
gctagtagaggtgacaagaaataaa

SEQ ID NO: 267888 - DNA, 25 bp, Artificial
  probe
  misc_feature (1)..(25): SEQ ID NO: 610; WAN024FRC; Start 258; Stop 282
acctgcttatgggcttatctttgaa

SEQ ID NO: 267889 - DNA, 25 bp, Artificial
  probe
  misc_feature (1)..(25): SEQ ID NO: 611; WAN024G2B; Start 371; Stop 395
tagatggtcaggaagcagatagtaa

SEQ ID NO: 267890 - DNA, 25 bp, Artificial
  probe
  misc_feature (1)..(25): SEQ ID NO: 611; WAN024G2B; Start 123; Stop 147
tgaagcagagcaaccagatattatt

SEQ ID NO: 267891 - DNA, 25 bp, Artificial
  probe
  misc_feature (1)..(25): SEQ ID NO: 611; WAN024G2B; Start 370; Stop 394
gtagatggtcaggaagcagatagta

SEQ ID NO: 267892 - DNA, 25 bp, Artificial
  probe
  misc_feature (1)..(25): SEQ ID NO: 611; WAN024G2B; Start 182; Stop 206
tagaagttgctaagaccattcgtaa

SEQ ID NO: 267893 - DNA, 25 bp, Artificial
  probe
  misc_feature (1)..(25): SEQ ID NO: 611; WAN024G2B; Start 185; Stop 209
aagttgctaagaccattcgtaagac

SEQ ID NO: 267894 - DNA, 25 bp, Artificial
  probe
  misc_feature (1)..(25): SEQ ID NO: 611; WAN024G2B; Start 183; Stop 207
agaagttgctaagaccattcgtaag

SEQ ID NO: 267895 - DNA, 25 bp, Artificial
  probe
  misc_feature (1)..(25): SEQ ID NO: 611; WAN024G2B; Start 184; Stop 208
gaagttgctaagaccattcgtaaga

SEQ ID NO: 267896 - DNA, 25 bp, Artificial
  probe
  misc_feature (1)..(25): SEQ ID NO: 611; WAN024G2B; Start 124; Stop 148
gaagcagagcaaccagatattatta

SEQ ID NO: 267897 - DNA, 25 bp, Artificial
  probe
  misc_feature (1)..(25): SEQ ID NO: 611; WAN024G2B; Start 122; Stop 146
ttgaagcagagcaaccagatattat

SEQ ID NO: 267898 - DNA, 25 bp, Artificial
  probe
  misc_feature (1)..(25): SEQ ID NO: 611; WAN024G2B; Start 191; Stop 215
ctaagaccattcgtaagacaagcag

SEQ ID NO: 267899 - DNA, 25 bp, Artificial
  probe
  misc_feature (1)..(25): SEQ ID NO: 611; WAN024G2B; Start 456; Stop 480
atatggcgaagaactagacttaacc

SEQ ID NO: 267900 - DNA, 25 bp, Artificial
  probe
  misc_feature (1)..(25): SEQ ID NO: 611; WAN024G2B; Start 188; Stop 212
ttgctaagaccattcgtaagacaag

SEQ ID NO: 267901 - DNA, 25 bp, Artificial
  probe
  misc_feature (1)..(25): SEQ ID NO: 611; WAN024G2B; Start 187; Stop 211
gttgctaagaccattcgtaagacaa

SEQ ID NO: 267902 - DNA, 25 bp, Artificial
  probe
  misc_feature (1)..(25): SEQ ID NO: 611; WAN024G2B; Start 614; Stop 638
gtctgcgtgagaagattgaagatac

SEQ ID NO: 267903 - DNA, 25 bp, Artificial
  probe
  misc_feature (1)..(25): SEQ ID NO: 611; WAN024G2B; Start 126; Stop 150
agcagagcaaccagatattattatt

SEQ ID NO: 267904 - DNA, 25 bp, Artificial
  probe
  misc_feature (1)..(25): SEQ ID NO: 611; WAN024G2B; Start 125; Stop 149
aagcagagcaaccagatattattat

SEQ ID NO: 267905 - DNA, 25 bp, Artificial
  probe
  misc_feature (1)..(25): SEQ ID NO: 611; WAN024G2B; Start 455; Stop 479
aatatggcgaagaactagacttaac

SEQ ID NO: 267906 - DNA, 25 bp, Artificial
  probe
  misc_feature (1)..(25): SEQ ID NO: 611; WAN024G2B; Start 368; Stop 392
cagtagatggtcaggaagcagatag

SEQ ID NO: 267907 - DNA, 25 bp, Artificial
  probe
  misc_feature (1)..(25): SEQ ID NO: 611; WAN024G2B; Start 192; Stop 216
taagaccattcgtaagacaagcagt

SEQ ID NO: 267908 - DNA, 25 bp, Artificial
  probe
  misc_feature (1)..(25): SEQ ID NO: 611; WAN024G2B; Start 186; Stop 210
agttgctaagaccattcgtaagaca

SEQ ID NO: 267909 - DNA, 25 bp, Artificial
  probe
  misc_feature (1)..(25): SEQ ID NO: 611; WAN024G2B; Start 181; Stop 205
ttagaagttgctaagaccattcgta

SEQ ID NO: 267910 - DNA, 25 bp, Artificial
  probe
  misc_feature (1)..(25): SEQ ID NO: 611; WAN024G2B; Start 127; Stop 151
gcagagcaaccagatattattattc

SEQ ID NO: 267911 - DNA, 25 bp, Artificial
  probe
  misc_feature (1)..(25): SEQ ID NO: 611; WAN024G2B; Start 369; Stop 393
agtagatggtcaggaagcagatagt

SEQ ID NO: 267912 - DNA, 25 bp, Artificial
  probe
  misc_feature (1)..(25): SEQ ID NO: 611; WAN024G2B; Start 32; Stop 56
aaccaatctcggatattatcaagtt

SEQ ID NO: 267913 - DNA, 25 bp, Artificial
  probe
  misc_feature (1)..(25): SEQ ID NO: 611; WAN024G2B; Start 382; Stop 406
gaagcagatagtaaacctcaaccta

SEQ ID NO: 267914 - DNA, 25 bp, Artificial
  probe
  misc_feature (1)..(25): SEQ ID NO: 611; WAN024G2B; Start 613; Stop 637
cgtctgcgtgagaagattgaagata

SEQ ID NO: 267915 - DNA, 25 bp, Artificial
  probe
  misc_feature (1)..(25): SEQ ID NO: 611; WAN024G2B; Start 470; Stop 494
tagacttaacccatcgtgaatttga

SEQ ID NO: 267916 - DNA, 25 bp, Artificial
  probe
  misc_feature (1)..(25): SEQ ID NO: 611; WAN024G2B; Start 373; Stop 397
gatggtcaggaagcagatagtaaac

SEQ ID NO: 267917 - DNA, 25 bp, Artificial
  probe
  misc_feature (1)..(25): SEQ ID NO: 611; WAN024G2B; Start 372; Stop 396
agatggtcaggaagcagatagtaaa

SEQ ID NO: 267918 - DNA, 25 bp, Artificial
  probe
  misc_feature (1)..(25): SEQ ID NO: 611; WAN024G2B; Start 167; Stop 191
cagaaattgatggtttagaagttgc

SEQ ID NO: 267919 - DNA, 25 bp, Artificial
  probe
  misc_feature (1)..(25): SEQ ID NO: 611; WAN024G2B; Start 468; Stop 492
actagacttaacccatcgtgaattt

SEQ ID NO: 267920 - DNA, 25 bp, Artificial
  probe
  misc_feature (1)..(25): SEQ ID NO: 611; WAN024G2B; Start 467; Stop 491
aactagacttaacccatcgtgaatt

SEQ ID NO: 267921 - DNA, 25 bp, Artificial
  probe
  misc_feature (1)..(25): SEQ ID NO: 611; WAN024G2B; Start 168; Stop 192
agaaattgatggtttagaagttgct

SEQ ID NO: 267922 - DNA, 25 bp, Artificial
  probe
  misc_feature (1)..(25): SEQ ID NO: 612; WAN024FQJ; Start 626; Stop 650
aagtattatcacaacatccagactg

SEQ ID NO: 267923 - DNA, 25 bp, Artificial
  probe
  misc_feature (1)..(25): SEQ ID NO: 612; WAN024FQJ; Start 916; Stop 940
aacggatttctgattgattgctatg

SEQ ID NO: 267924 - DNA, 25 bp, Artificial
  probe
  misc_feature (1)..(25): SEQ ID NO: 612; WAN024FQJ; Start 187; Stop 211
ggtgatcttagaattagaactgcta

SEQ ID NO: 267925 - DNA, 25 bp, Artificial
  probe
  misc_feature (1)..(25): SEQ ID NO: 612; WAN024FQJ; Start 917; Stop 941
acggatttctgattgattgctatga

SEQ ID NO: 267926 - DNA, 25 bp, Artificial
  probe
  misc_feature (1)..(25): SEQ ID NO: 612; WAN024FQJ; Start 915; Stop 939
caacggatttctgattgattgctat

SEQ ID NO: 267927 - DNA, 25 bp, Artificial
  probe
  misc_feature (1)..(25): SEQ ID NO: 612; WAN024FQJ; Start 189; Stop 213
tgatcttagaattagaactgctaca

SEQ ID NO: 267928 - DNA, 25 bp, Artificial
  probe
  misc_feature (1)..(25): SEQ ID NO: 612; WAN024FQJ; Start 627; Stop 651
agtattatcacaacatccagactgg

SEQ ID NO: 267929 - DNA, 25 bp, Artificial
  probe
  misc_feature (1)..(25): SEQ ID NO: 612; WAN024FQJ; Start 186; Stop 210
gggtgatcttagaattagaactgct

SEQ ID NO: 267930 - DNA, 25 bp, Artificial
  probe
  misc_feature (1)..(25): SEQ ID NO: 612; WAN024FQJ; Start 185; Stop 209
agggtgatcttagaattagaactgc

SEQ ID NO: 267931 - DNA, 25 bp, Artificial
  probe
  misc_feature (1)..(25): SEQ ID NO: 612; WAN024FQJ; Start 188; Stop 212
gtgatcttagaattagaactgctac

SEQ ID NO: 267932 - DNA, 25 bp, Artificial
  probe
  misc_feature (1)..(25): SEQ ID NO: 612; WAN024FQJ; Start 65; Stop 89
ttaatatggctaatgaattgtcaca

SEQ ID NO: 267933 - DNA, 25 bp, Artificial
  probe
  misc_feature (1)..(25): SEQ ID NO: 612; WAN024FQJ; Start 628; Stop 652
gtattatcacaacatccagactggc

SEQ ID NO: 267934 - DNA, 25 bp, Artificial
  probe
  misc_feature (1)..(25): SEQ ID NO: 612; WAN024FQJ; Start 629; Stop 653
tattatcacaacatccagactggca

SEQ ID NO: 267935 - DNA, 25 bp, Artificial
  probe
  misc_feature (1)..(25): SEQ ID NO: 612; WAN024FQJ; Start 182; Stop 206
acaagggtgatcttagaattagaac

SEQ ID NO: 267936 - DNA, 25 bp, Artificial
  probe
  misc_feature (1)..(25): SEQ ID NO: 612; WAN024FQJ; Start 625; Stop 649
aaagtattatcacaacatccagact

SEQ ID NO: 267937 - DNA, 25 bp, Artificial
  probe
  misc_feature (1)..(25): SEQ ID NO: 612; WAN024FQJ; Start 70; Stop 94
atggctaatgaattgtcacaatact

SEQ ID NO: 267938 - DNA, 25 bp, Artificial
  probe
  misc_feature (1)..(25): SEQ ID NO: 612; WAN024FQJ; Start 66; Stop 90
taatatggctaatgaattgtcacaa

SEQ ID NO: 267939 - DNA, 25 bp, Artificial
  probe
  misc_feature (1)..(25): SEQ ID NO: 612; WAN024FQJ; Start 184; Stop 208
aagggtgatcttagaattagaactg

SEQ ID NO: 267940 - DNA, 25 bp, Artificial
  probe
  misc_feature (1)..(25): SEQ ID NO: 612; WAN024FQJ; Start 183; Stop 207
caagggtgatcttagaattagaact

SEQ ID NO: 267941 - DNA, 25 bp, Artificial
  probe
  misc_feature (1)..(25): SEQ ID NO: 612; WAN024FQJ; Start 71; Stop 95
tggctaatgaattgtcacaatacta

SEQ ID NO: 267942 - DNA, 25 bp, Artificial
  probe
  misc_feature (1)..(25): SEQ ID NO: 612; WAN024FQJ; Start 181; Stop 205
cacaagggtgatcttagaattagaa

SEQ ID NO: 267943 - DNA, 25 bp, Artificial
  probe
  misc_feature (1)..(25): SEQ ID NO: 612; WAN024FQJ; Start 190; Stop 214
gatcttagaattagaactgctacat

SEQ ID NO: 267944 - DNA, 25 bp, Artificial
  probe
  misc_feature (1)..(25): SEQ ID NO: 612; WAN024FQJ; Start 390; Stop 414
gcagagatttgtaggagctaaattt

SEQ ID NO: 267945 - DNA, 25 bp, Artificial
  probe
  misc_feature (1)..(25): SEQ ID NO: 612; WAN024FQJ; Start 389; Stop 413
tgcagagatttgtaggagctaaatt

SEQ ID NO: 267946 - DNA, 25 bp, Artificial
  probe
  misc_feature (1)..(25): SEQ ID NO: 612; WAN024FQJ; Start 387; Stop 411
agtgcagagatttgtaggagctaaa

SEQ ID NO: 267947 - DNA, 25 bp, Artificial
  probe
  misc_feature (1)..(25): SEQ ID NO: 612; WAN024FQJ; Start 386; Stop 410
aagtgcagagatttgtaggagctaa

SEQ ID NO: 267948 - DNA, 25 bp, Artificial
  probe
  misc_feature (1)..(25): SEQ ID NO: 612; WAN024FQJ; Start 388; Stop 412
gtgcagagatttgtaggagctaaat

SEQ ID NO: 267949 - DNA, 25 bp, Artificial
  probe
  misc_feature (1)..(25): SEQ ID NO: 612; WAN024FQJ; Start 903; Stop 927
tgaagatagaatcaacggatttctg

SEQ ID NO: 267950 - DNA, 25 bp, Artificial
  probe
  misc_feature (1)..(25): SEQ ID NO: 612; WAN024FQJ; Start 630; Stop 654
attatcacaacatccagactggcag

SEQ ID NO: 267951 - DNA, 25 bp, Artificial
  probe
  misc_feature (1)..(25): SEQ ID NO: 612; WAN024FQJ; Start 191; Stop 215
atcttagaattagaactgctacatt

SEQ ID NO: 267952 - DNA, 25 bp, Artificial
  probe
  misc_feature (1)..(25): SEQ ID NO: 612; WAN024FQJ; Start 904; Stop 928
gaagatagaatcaacggatttctga

SEQ ID NO: 267953 - DNA, 25 bp, Artificial
  probe
  misc_feature (1)..(25): SEQ ID NO: 612; WAN024FQJ; Start 69; Stop 93
tatggctaatgaattgtcacaatac

SEQ ID NO: 267954 - DNA, 25 bp, Artificial
  probe
  misc_feature (1)..(25): SEQ ID NO: 612; WAN024FQJ; Start 649; Stop 673
tggcagtgggatatatatggttcag

SEQ ID NO: 267955 - DNA, 25 bp, Artificial
  probe
  misc_feature (1)..(25): SEQ ID NO: 613; WAN024CGZ; Start 279; Stop 303
ttatgaaggtcggattgtcaacatt

SEQ ID NO: 267956 - DNA, 25 bp, Artificial
  probe
  misc_feature (1)..(25): SEQ ID NO: 613; WAN024CGZ; Start 280; Stop 304
tatgaaggtcggattgtcaacattc

SEQ ID NO: 267957 - DNA, 25 bp, Artificial
  probe
  misc_feature (1)..(25): SEQ ID NO: 613; WAN024CGZ; Start 278; Stop 302
cttatgaaggtcggattgtcaacat

SEQ ID NO: 267958 - DNA, 25 bp, Artificial
  probe
  misc_feature (1)..(25): SEQ ID NO: 613; WAN024CGZ; Start 291; Stop 315
gattgtcaacattcatccagcctac

SEQ ID NO: 267959 - DNA, 25 bp, Artificial
  probe
  misc_feature (1)..(25): SEQ ID NO: 613; WAN024CGZ; Start 262; Stop 286
ccaaccttattgtcggcttatgaag

SEQ ID NO: 267960 - DNA, 25 bp, Artificial
  probe
  misc_feature (1)..(25): SEQ ID NO: 613; WAN024CGZ; Start 292; Stop 316
attgtcaacattcatccagcctact

SEQ ID NO: 267961 - DNA, 25 bp, Artificial
  probe
  misc_feature (1)..(25): SEQ ID NO: 613; WAN024CGZ; Start 283; Stop 307
gaaggtcggattgtcaacattcatc

SEQ ID NO: 267962 - DNA, 25 bp, Artificial
  probe
  misc_feature (1)..(25): SEQ ID NO: 613; WAN024CGZ; Start 293; Stop 317
ttgtcaacattcatccagcctactt

SEQ ID NO: 267963 - DNA, 25 bp, Artificial
  probe
  misc_feature (1)..(25): SEQ ID NO: 613; WAN024CGZ; Start 261; Stop 285
accaaccttattgtcggcttatgaa

SEQ ID NO: 267964 - DNA, 25 bp, Artificial
  probe
  misc_feature (1)..(25): SEQ ID NO: 613; WAN024CGZ; Start 516; Stop 540
ggaagtagtgaaggctctatttaca

SEQ ID NO: 267965 - DNA, 25 bp, Artificial
  probe
  misc_feature (1)..(25): SEQ ID NO: 613; WAN024CGZ; Start 515; Stop 539
cggaagtagtgaaggctctatttac

SEQ ID NO: 267966 - DNA, 25 bp, Artificial
  probe
  misc_feature (1)..(25): SEQ ID NO: 613; WAN024CGZ; Start 458; Stop 482
atgataccattgacagatttgaagc

SEQ ID NO: 267967 - DNA, 25 bp, Artificial
  probe
  misc_feature (1)..(25): SEQ ID NO: 613; WAN024CGZ; Start 451; Stop 475
ctagctgatgataccattgacagat

SEQ ID NO: 267968 - DNA, 25 bp, Artificial
  probe
  misc_feature (1)..(25): SEQ ID NO: 613; WAN024CGZ; Start 452; Stop 476
tagctgatgataccattgacagatt

SEQ ID NO: 267969 - DNA, 25 bp, Artificial
  probe
  misc_feature (1)..(25): SEQ ID NO: 613; WAN024CGZ; Start 517; Stop 541
gaagtagtgaaggctctatttacag

SEQ ID NO: 267970 - DNA, 25 bp, Artificial
  probe
  misc_feature (1)..(25): SEQ ID NO: 613; WAN024CGZ; Start 449; Stop 473
gactagctgatgataccattgacag

SEQ ID NO: 267971 - DNA, 25 bp, Artificial
  probe
  misc_feature (1)..(25): SEQ ID NO: 613; WAN024CGZ; Start 450; Stop 474
actagctgatgataccattgacaga

SEQ ID NO: 267972 - DNA, 25 bp, Artificial
  probe
  misc_feature (1)..(25): SEQ ID NO: 613; WAN024CGZ; Start 518; Stop 542
aagtagtgaaggctctatttacaga

SEQ ID NO: 267973 - DNA, 25 bp, Artificial
  probe
  misc_feature (1)..(25): SEQ ID NO: 613; WAN024CGZ; Start 199; Stop 223
gaactcttggaagaacaccagattg

SEQ ID NO: 267974 - DNA, 25 bp, Artificial
  probe
  misc_feature (1)..(25): SEQ ID NO: 613; WAN024CGZ; Start 519; Stop 543
agtagtgaaggctctatttacagat

SEQ ID NO: 267975 - DNA, 25 bp, Artificial
  probe
  misc_feature (1)..(25): SEQ ID NO: 613; WAN024CGZ; Start 204; Stop 228
cttggaagaacaccagattgacttg

SEQ ID NO: 267976 - DNA, 25 bp, Artificial
  probe
  misc_feature (1)..(25): SEQ ID NO: 613; WAN024CGZ; Start 456; Stop 480
tgatgataccattgacagatttgaa

SEQ ID NO: 267977 - DNA, 25 bp, Artificial
  probe
  misc_feature (1)..(25): SEQ ID NO: 613; WAN024CGZ; Start 294; Stop 318
tgtcaacattcatccagcctacttg

SEQ ID NO: 267978 - DNA, 25 bp, Artificial
  probe
  misc_feature (1)..(25): SEQ ID NO: 613; WAN024CGZ; Start 448; Stop 472
cgactagctgatgataccattgaca

SEQ ID NO: 267979 - DNA, 25 bp, Artificial
  probe
  misc_feature (1)..(25): SEQ ID NO: 613; WAN024CGZ; Start 447; Stop 471
acgactagctgatgataccattgac

SEQ ID NO: 267980 - DNA, 25 bp, Artificial
  probe
  misc_feature (1)..(25): SEQ ID NO: 613; WAN024CGZ; Start 446; Stop 470
cacgactagctgatgataccattga

SEQ ID NO: 267981 - DNA, 25 bp, Artificial
  probe
  misc_feature (1)..(25): SEQ ID NO: 613; WAN024CGZ; Start 203; Stop 227
tcttggaagaacaccagattgactt

SEQ ID NO: 267982 - DNA, 25 bp, Artificial
  probe
  misc_feature (1)..(25): SEQ ID NO: 613; WAN024CGZ; Start 200; Stop 224
aactcttggaagaacaccagattga

SEQ ID NO: 267983 - DNA, 25 bp, Artificial
  probe
  misc_feature (1)..(25): SEQ ID NO: 613; WAN024CGZ; Start 260; Stop 284
gaccaaccttattgtcggcttatga

SEQ ID NO: 267984 - DNA, 25 bp, Artificial
  probe
  misc_feature (1)..(25): SEQ ID NO: 613; WAN024CGZ; Start 454; Stop 478
gctgatgataccattgacagatttg

SEQ ID NO: 267985 - DNA, 25 bp, Artificial
  probe
  misc_feature (1)..(25): SEQ ID NO: 613; WAN024CGZ; Start 457; Stop 481
gatgataccattgacagatttgaag

SEQ ID NO: 267986 - DNA, 25 bp, Artificial
  probe
  misc_feature (1)..(25): SEQ ID NO: 613; WAN024CGZ; Start 267; Stop 291
cttattgtcggcttatgaaggtcgg

SEQ ID NO: 267987 - DNA, 25 bp, Artificial
  probe
  misc_feature (1)..(25): SEQ ID NO: 613; WAN024CGZ; Start 455; Stop 479
ctgatgataccattgacagatttga

SEQ ID NO: 267988 - DNA, 25 bp, Artificial
  probe
  misc_feature (1)..(25): SEQ ID NO: 614; WAN024FQK; Start 935; Stop 959
atgataccgataagatgagtgagaa

SEQ ID NO: 267989 - DNA, 25 bp, Artificial
  probe
  misc_feature (1)..(25): SEQ ID NO: 614; WAN024FQK; Start 1057; Stop 1081
cagtggatagagttgattgagacaa

SEQ ID NO: 267990 - DNA, 25 bp, Artificial
  probe
  misc_feature (1)..(25): SEQ ID NO: 614; WAN024FQK; Start 478; Stop 502
tctgagaataggattgcttacatct

SEQ ID NO: 267991 - DNA, 25 bp, Artificial
  probe
  misc_feature (1)..(25): SEQ ID NO: 614; WAN024FQK; Start 344; Stop 368
atcataccaattcaattacggctaa

SEQ ID NO: 267992 - DNA, 25 bp, Artificial
  probe
  misc_feature (1)..(25): SEQ ID NO: 614; WAN024FQK; Start 349; Stop 373
accaattcaattacggctaatagag

SEQ ID NO: 267993 - DNA, 25 bp, Artificial
  probe
  misc_feature (1)..(25): SEQ ID NO: 614; WAN024FQK; Start 1056; Stop 1080
tcagtggatagagttgattgagaca

SEQ ID NO: 267994 - DNA, 25 bp, Artificial
  probe
  misc_feature (1)..(25): SEQ ID NO: 614; WAN024FQK; Start 350; Stop 374
ccaattcaattacggctaatagaga

SEQ ID NO: 267995 - DNA, 25 bp, Artificial
  probe
  misc_feature (1)..(25): SEQ ID NO: 614; WAN024FQK; Start 343; Stop 367
gatcataccaattcaattacggcta

SEQ ID NO: 267996 - DNA, 25 bp, Artificial
  probe
  misc_feature (1)..(25): SEQ ID NO: 614; WAN024FQK; Start 345; Stop 369
tcataccaattcaattacggctaat

SEQ ID NO: 267997 - DNA, 25 bp, Artificial
  probe
  misc_feature (1)..(25): SEQ ID NO: 614; WAN024FQK; Start 477; Stop 501
ttctgagaataggattgcttacatc

SEQ ID NO: 267998 - DNA, 25 bp, Artificial
  probe
  misc_feature (1)..(25): SEQ ID NO: 614; WAN024FQK; Start 354; Stop 378
ttcaattacggctaatagagaactt

SEQ ID NO: 267999 - DNA, 25 bp, Artificial
  probe
  misc_feature (1)..(25): SEQ ID NO: 614; WAN024FQK; Start 243; Stop 267
cctagataatgagatagaggttgcc

SEQ ID NO: 268000 - DNA, 25 bp, Artificial
  probe
  misc_feature (1)..(25): SEQ ID NO: 614; WAN024FQK; Start 353; Stop 377
attcaattacggctaatagagaact

SEQ ID NO: 268001 - DNA, 25 bp, Artificial
  probe
  misc_feature (1)..(25): SEQ ID NO: 614; WAN024FQK; Start 348; Stop 372
taccaattcaattacggctaataga

SEQ ID NO: 268002 - DNA, 25 bp, Artificial
  probe
  misc_feature (1)..(25): SEQ ID NO: 614; WAN024FQK; Start 479; Stop 503
ctgagaataggattgcttacatcta

SEQ ID NO: 268003 - DNA, 25 bp, Artificial
  probe
  misc_feature (1)..(25): SEQ ID NO: 614; WAN024FQK; Start 242; Stop 266
tcctagataatgagatagaggttgc

SEQ ID NO: 268004 - DNA, 25 bp, Artificial
  probe
  misc_feature (1)..(25): SEQ ID NO: 614; WAN024FQK; Start 244; Stop 268
ctagataatgagatagaggttgcct

SEQ ID NO: 268005 - DNA, 25 bp, Artificial
  probe
  misc_feature (1)..(25): SEQ ID NO: 614; WAN024FQK; Start 487; Stop 511
aggattgcttacatctataattgga

SEQ ID NO: 268006 - DNA, 25 bp, Artificial
  probe
  misc_feature (1)..(25): SEQ ID NO: 614; WAN024FQK; Start 245; Stop 269
tagataatgagatagaggttgcctt

SEQ ID NO: 268007 - DNA, 25 bp, Artificial
  probe
  misc_feature (1)..(25): SEQ ID NO: 614; WAN024FQK; Start 936; Stop 960
tgataccgataagatgagtgagaaa

SEQ ID NO: 268008 - DNA, 25 bp, Artificial
  probe
  misc_feature (1)..(25): SEQ ID NO: 614; WAN024FQK; Start 352; Stop 376
aattcaattacggctaatagagaac

SEQ ID NO: 268009 - DNA, 25 bp, Artificial
  probe
  misc_feature (1)..(25): SEQ ID NO: 614; WAN024FQK; Start 351; Stop 375
caattcaattacggctaatagagaa

SEQ ID NO: 268010 - DNA, 25 bp, Artificial
  probe
  misc_feature (1)..(25): SEQ ID NO: 614; WAN024FQK; Start 346; Stop 370
cataccaattcaattacggctaata

SEQ ID NO: 268011 - DNA, 25 bp, Artificial
  probe
  misc_feature (1)..(25): SEQ ID NO: 614; WAN024FQK; Start 1058; Stop 1082
agtggatagagttgattgagacaat

SEQ ID NO: 268012 - DNA, 25 bp, Artificial
  probe
  misc_feature (1)..(25): SEQ ID NO: 614; WAN024FQK; Start 303; Stop 327
cttgtcgggaataggaatttctact

SEQ ID NO: 268013 - DNA, 25 bp, Artificial
  probe
  misc_feature (1)..(25): SEQ ID NO: 614; WAN024FQK; Start 941; Stop 965
ccgataagatgagtgagaaattgct

SEQ ID NO: 268014 - DNA, 25 bp, Artificial
  probe
  misc_feature (1)..(25): SEQ ID NO: 614; WAN024FQK; Start 942; Stop 966
cgataagatgagtgagaaattgctt

SEQ ID NO: 268015 - DNA, 25 bp, Artificial
  probe
  misc_feature (1)..(25): SEQ ID NO: 614; WAN024FQK; Start 946; Stop 970
aagatgagtgagaaattgcttgaat

SEQ ID NO: 268016 - DNA, 25 bp, Artificial
  probe
  misc_feature (1)..(25): SEQ ID NO: 614; WAN024FQK; Start 940; Stop 964
accgataagatgagtgagaaattgc

SEQ ID NO: 268017 - DNA, 25 bp, Artificial
  probe
  misc_feature (1)..(25): SEQ ID NO: 614; WAN024FQK; Start 488; Stop 512
ggattgcttacatctataattggaa

SEQ ID NO: 268018 - DNA, 25 bp, Artificial
  probe
  misc_feature (1)..(25): SEQ ID NO: 614; WAN024FQK; Start 1048; Stop 1072
attcttaatcagtggatagagttga

SEQ ID NO: 268019 - DNA, 25 bp, Artificial
  probe
  misc_feature (1)..(25): SEQ ID NO: 614; WAN024FQK; Start 415; Stop 439
gcagacaagattattactcttacgc

SEQ ID NO: 268020 - DNA, 25 bp, Artificial
  probe
  misc_feature (1)..(25): SEQ ID NO: 614; WAN024FQK; Start 347; Stop 371
ataccaattcaattacggctaatag

SEQ ID NO: 268021 - DNA, 25 bp, Artificial
  probe
  misc_feature (1)..(25): SEQ ID NO: 615; WAN024DT2; Start 471; Stop 495
gttggaacatctgaagaatattggt

SEQ ID NO: 268022 - DNA, 25 bp, Artificial
  probe
  misc_feature (1)..(25): SEQ ID NO: 615; WAN024DT2; Start 470; Stop 494
agttggaacatctgaagaatattgg

SEQ ID NO: 268023 - DNA, 25 bp, Artificial
  probe
  misc_feature (1)..(25): SEQ ID NO: 615; WAN024DT2; Start 132; Stop 156
tgctgagaagaatacagttgtaact

SEQ ID NO: 268024 - DNA, 25 bp, Artificial
  probe
  misc_feature (1)..(25): SEQ ID NO: 615; WAN024DT2; Start 131; Stop 155
atgctgagaagaatacagttgtaac

SEQ ID NO: 268025 - DNA, 25 bp, Artificial
  probe
  misc_feature (1)..(25): SEQ ID NO: 615; WAN024DT2; Start 270; Stop 294
tgagttgaagacttatattgaccaa

SEQ ID NO: 268026 - DNA, 25 bp, Artificial
  probe
  misc_feature (1)..(25): SEQ ID NO: 615; WAN024DT2; Start 130; Stop 154
aatgctgagaagaatacagttgtaa

SEQ ID NO: 268027 - DNA, 25 bp, Artificial
  probe
  misc_feature (1)..(25): SEQ ID NO: 615; WAN024DT2; Start 269; Stop 293
atgagttgaagacttatattgacca

SEQ ID NO: 268028 - DNA, 25 bp, Artificial
  probe
  misc_feature (1)..(25): SEQ ID NO: 615; WAN024DT2; Start 472; Stop 496
ttggaacatctgaagaatattggtt

SEQ ID NO: 268029 - DNA, 25 bp, Artificial
  probe
  misc_feature (1)..(25): SEQ ID NO: 615; WAN024DT2; Start 133; Stop 157
gctgagaagaatacagttgtaacta

SEQ ID NO: 268030 - DNA, 25 bp, Artificial
  probe
  misc_feature (1)..(25): SEQ ID NO: 615; WAN024DT2; Start 193; Stop 217
cagcagacacaaacaattacttaca

SEQ ID NO: 268031 - DNA, 25 bp, Artificial
  probe
  misc_feature (1)..(25): SEQ ID NO: 615; WAN024DT2; Start 194; Stop 218
agcagacacaaacaattacttacaa

SEQ ID NO: 268032 - DNA, 25 bp, Artificial
  probe
  misc_feature (1)..(25): SEQ ID NO: 615; WAN024DT2; Start 192; Stop 216
ccagcagacacaaacaattacttac

SEQ ID NO: 268033 - DNA, 25 bp, Artificial
  probe
  misc_feature (1)..(25): SEQ ID NO: 615; WAN024DT2; Start 468; Stop 492
ccagttggaacatctgaagaatatt

SEQ ID NO: 268034 - DNA, 25 bp, Artificial
  probe
  misc_feature (1)..(25): SEQ ID NO: 615; WAN024DT2; Start 268; Stop 292
gatgagttgaagacttatattgacc

SEQ ID NO: 268035 - DNA, 25 bp, Artificial
  probe
  misc_feature (1)..(25): SEQ ID NO: 615; WAN024DT2; Start 195; Stop 219
gcagacacaaacaattacttacaaa

SEQ ID NO: 268036 - DNA, 25 bp, Artificial
  probe
  misc_feature (1)..(25): SEQ ID NO: 615; WAN024DT2; Start 275; Stop 299
tgaagacttatattgaccaacatgg

SEQ ID NO: 268037 - DNA, 25 bp, Artificial
  probe
  misc_feature (1)..(25): SEQ ID NO: 615; WAN024DT2; Start 277; Stop 301
aagacttatattgaccaacatggag

SEQ ID NO: 268038 - DNA, 25 bp, Artificial
  probe
  misc_feature (1)..(25): SEQ ID NO: 615; WAN024DT2; Start 276; Stop 300
gaagacttatattgaccaacatgga

SEQ ID NO: 268039 - DNA, 25 bp, Artificial
  probe
  misc_feature (1)..(25): SEQ ID NO: 615; WAN024DT2; Start 344; Stop 368
ataagtctatcattgaagctcgtaa

SEQ ID NO: 268040 - DNA, 25 bp, Artificial
  probe
  misc_feature (1)..(25): SEQ ID NO: 615; WAN024DT2; Start 469; Stop 493
cagttggaacatctgaagaatattg

SEQ ID NO: 268041 - DNA, 25 bp, Artificial
  probe
  misc_feature (1)..(25): SEQ ID NO: 615; WAN024DT2; Start 274; Stop 298
ttgaagacttatattgaccaacatg

SEQ ID NO: 268042 - DNA, 25 bp, Artificial
  probe
  misc_feature (1)..(25): SEQ ID NO: 615; WAN024DT2; Start 343; Stop 367
gataagtctatcattgaagctcgta

SEQ ID NO: 268043 - DNA, 25 bp, Artificial
  probe
  misc_feature (1)..(25): SEQ ID NO: 615; WAN024DT2; Start 191; Stop 215
gccagcagacacaaacaattactta

SEQ ID NO: 268044 - DNA, 25 bp, Artificial
  probe
  misc_feature (1)..(25): SEQ ID NO: 615; WAN024DT2; Start 365; Stop 389
gtaaattggcaggtttcaaacttga

SEQ ID NO: 268045 - DNA, 25 bp, Artificial
  probe
  misc_feature (1)..(25): SEQ ID NO: 615; WAN024DT2; Start 467; Stop 491
cccagttggaacatctgaagaatat

SEQ ID NO: 268046 - DNA, 25 bp, Artificial
  probe
  misc_feature (1)..(25): SEQ ID NO: 615; WAN024DT2; Start 263; Stop 287
tctctgatgagttgaagacttatat

SEQ ID NO: 268047 - DNA, 25 bp, Artificial
  probe
  misc_feature (1)..(25): SEQ ID NO: 615; WAN024DT2; Start 267; Stop 291
tgatgagttgaagacttatattgac

SEQ ID NO: 268048 - DNA, 25 bp, Artificial
  probe
  misc_feature (1)..(25): SEQ ID NO: 615; WAN024DT2; Start 12; Stop 36
agttcttgttagtctagctttcctt

SEQ ID NO: 268049 - DNA, 25 bp, Artificial
  probe
  misc_feature (1)..(25): SEQ ID NO: 615; WAN024DT2; Start 350; Stop 374
ctatcattgaagctcgtaaattggc

SEQ ID NO: 268050 - DNA, 25 bp, Artificial
  probe
  misc_feature (1)..(25): SEQ ID NO: 615; WAN024DT2; Start 349; Stop 373
tctatcattgaagctcgtaaattgg

SEQ ID NO: 268051 - DNA, 25 bp, Artificial
  probe
  misc_feature (1)..(25): SEQ ID NO: 615; WAN024DT2; Start 364; Stop 388
cgtaaattggcaggtttcaaacttg

SEQ ID NO: 268052 - DNA, 25 bp, Artificial
  probe
  misc_feature (1)..(25): SEQ ID NO: 615; WAN024DT2; Start 363; Stop 387
tcgtaaattggcaggtttcaaactt

SEQ ID NO: 268053 - DNA, 25 bp, Artificial
  probe
  misc_feature (1)..(25): SEQ ID NO: 615; WAN024DT2; Start 477; Stop 501
acatctgaagaatattggtttggaa

SEQ ID NO: 268054 - DNA, 25 bp, Artificial
  probe
  misc_feature (1)..(25): SEQ ID NO: 616; WAN024CKC; Start 667; Stop 691
cgtatcattgaagaacattcggata

SEQ ID NO: 268055 - DNA, 25 bp, Artificial
  probe
  misc_feature (1)..(25): SEQ ID NO: 616; WAN024CKC; Start 713; Stop 737
atatgaatcctctagttcgtcagat

SEQ ID NO: 268056 - DNA, 25 bp, Artificial
  probe
  misc_feature (1)..(25): SEQ ID NO: 616; WAN024CKC; Start 598; Stop 622
atattaattactgctcatcgtcgtg

SEQ ID NO: 268057 - DNA, 25 bp, Artificial
  probe
  misc_feature (1)..(25): SEQ ID NO: 616; WAN024CKC; Start 599; Stop 623
tattaattactgctcatcgtcgtga

SEQ ID NO: 268058 - DNA, 25 bp, Artificial
  probe
  misc_feature (1)..(25): SEQ ID NO: 616; WAN024CKC; Start 835; Stop 859
ttaacagatagtggtggtatccaag

SEQ ID NO: 268059 - DNA, 25 bp, Artificial
  probe
  misc_feature (1)..(25): SEQ ID NO: 616; WAN024CKC; Start 836; Stop 860
taacagatagtggtggtatccaaga

SEQ ID NO: 268060 - DNA, 25 bp, Artificial
  probe
  misc_feature (1)..(25): SEQ ID NO: 616; WAN024CKC; Start 600; Stop 624
attaattactgctcatcgtcgtgaa

SEQ ID NO: 268061 - DNA, 25 bp, Artificial
  probe
  misc_feature (1)..(25): SEQ ID NO: 616; WAN024CKC; Start 597; Stop 621
aatattaattactgctcatcgtcgt

SEQ ID NO: 268062 - DNA, 25 bp, Artificial
  probe
  misc_feature (1)..(25): SEQ ID NO: 616; WAN024CKC; Start 715; Stop 739
atgaatcctctagttcgtcagattg

SEQ ID NO: 268063 - DNA, 25 bp, Artificial
  probe
  misc_feature (1)..(25): SEQ ID NO: 616; WAN024CKC; Start 840; Stop 864
agatagtggtggtatccaagaagag

SEQ ID NO: 268064 - DNA, 25 bp, Artificial
  probe
  misc_feature (1)..(25): SEQ ID NO: 616; WAN024CKC; Start 661; Stop 685
atccgacgtatcattgaagaacatt

SEQ ID NO: 268065 - DNA, 25 bp, Artificial
  probe
  misc_feature (1)..(25): SEQ ID NO: 616; WAN024CKC; Start 660; Stop 684
aatccgacgtatcattgaagaacat

SEQ ID NO: 268066 - DNA, 25 bp, Artificial
  probe
  misc_feature (1)..(25): SEQ ID NO: 616; WAN024CKC; Start 837; Stop 861
aacagatagtggtggtatccaagaa

SEQ ID NO: 268067 - DNA, 25 bp, Artificial
  probe
  misc_feature (1)..(25): SEQ ID NO: 616; WAN024CKC; Start 714; Stop 738
tatgaatcctctagttcgtcagatt

SEQ ID NO: 268068 - DNA, 25 bp, Artificial
  probe
  misc_feature (1)..(25): SEQ ID NO: 616; WAN024CKC; Start 839; Stop 863
cagatagtggtggtatccaagaaga

SEQ ID NO: 268069 - DNA, 25 bp, Artificial
  probe
  misc_feature (1)..(25): SEQ ID NO: 616; WAN024CKC; Start 666; Stop 690
acgtatcattgaagaacattcggat

SEQ ID NO: 268070 - DNA, 25 bp, Artificial
  probe
  misc_feature (1)..(25): SEQ ID NO: 616; WAN024CKC; Start 397; Stop 421
gaatttaatcgtcaagcagtaggtg

SEQ ID NO: 268071 - DNA, 25 bp, Artificial
  probe
  misc_feature (1)..(25): SEQ ID NO: 616; WAN024CKC; Start 396; Stop 420
agaatttaatcgtcaagcagtaggt

SEQ ID NO: 268072 - DNA, 25 bp, Artificial
  probe
  misc_feature (1)..(25): SEQ ID NO: 616; WAN024CKC; Start 675; Stop 699
tgaagaacattcggatataaaggct

SEQ ID NO: 268073 - DNA, 25 bp, Artificial
  probe
  misc_feature (1)..(25): SEQ ID NO: 616; WAN024CKC; Start 676; Stop 700
gaagaacattcggatataaaggctc

SEQ ID NO: 268074 - DNA, 25 bp, Artificial
  probe
  misc_feature (1)..(25): SEQ ID NO: 616; WAN024CKC; Start 395; Stop 419
aagaatttaatcgtcaagcagtagg

SEQ ID NO: 268075 - DNA, 25 bp, Artificial
  probe
  misc_feature (1)..(25): SEQ ID NO: 616; WAN024CKC; Start 674; Stop 698
ttgaagaacattcggatataaaggc

SEQ ID NO: 268076 - DNA, 25 bp, Artificial
  probe
  misc_feature (1)..(25): SEQ ID NO: 616; WAN024CKC; Start 838; Stop 862
acagatagtggtggtatccaagaag

SEQ ID NO: 268077 - DNA, 25 bp, Artificial
  probe
  misc_feature (1)..(25): SEQ ID NO: 616; WAN024CKC; Start 678; Stop 702
agaacattcggatataaaggctctt

SEQ ID NO: 268078 - DNA, 25 bp, Artificial
  probe
  misc_feature (1)..(25): SEQ ID NO: 616; WAN024CKC; Start 677; Stop 701
aagaacattcggatataaaggctct

SEQ ID NO: 268079 - DNA, 25 bp, Artificial
  probe
  misc_feature (1)..(25): SEQ ID NO: 616; WAN024CKC; Start 948; Stop 972
tgtaggtactgatgaggacaatatt

SEQ ID NO: 268080 - DNA, 25 bp, Artificial
  probe
  misc_feature (1)..(25): SEQ ID NO: 616; WAN024CKC; Start 501; Stop 525
atttatcacaggtaacacagcaatt

SEQ ID NO: 268081 - DNA, 25 bp, Artificial
  probe
  misc_feature (1)..(25): SEQ ID NO: 616; WAN024CKC; Start 80; Stop 104
gtgagaatcttgaaacattggtctg

SEQ ID NO: 268082 - DNA, 25 bp, Artificial
  probe
  misc_feature (1)..(25): SEQ ID NO: 616; WAN024CKC; Start 665; Stop 689
gacgtatcattgaagaacattcgga

SEQ ID NO: 268083 - DNA, 25 bp, Artificial
  probe
  misc_feature (1)..(25): SEQ ID NO: 616; WAN024CKC; Start 662; Stop 686
tccgacgtatcattgaagaacattc

SEQ ID NO: 268084 - DNA, 25 bp, Artificial
  probe
  misc_feature (1)..(25): SEQ ID NO: 616; WAN024CKC; Start 852; Stop 876
tatccaagaagaggcacctagttta

SEQ ID NO: 268085 - DNA, 25 bp, Artificial
  probe
  misc_feature (1)..(25): SEQ ID NO: 616; WAN024CKC; Start 500; Stop 524
tatttatcacaggtaacacagcaat

SEQ ID NO: 268086 - DNA, 25 bp, Artificial
  probe
  misc_feature (1)..(25): SEQ ID NO: 616; WAN024CKC; Start 1003; Stop 1027
gatttagtttatcaagcgatgagcc

SEQ ID NO: 268087 - DNA, 25 bp, Artificial
  probe
  misc_feature (1)..(25): SEQ ID NO: 617; WAN024DEB; Start 808; Stop 832
catcaagacaataatccttacgctc

SEQ ID NO: 268088 - DNA, 25 bp, Artificial
  probe
  misc_feature (1)..(25): SEQ ID NO: 617; WAN024DEB; Start 807; Stop 831
tcatcaagacaataatccttacgct

SEQ ID NO: 268089 - DNA, 25 bp, Artificial
  probe
  misc_feature (1)..(25): SEQ ID NO: 617; WAN024DEB; Start 806; Stop 830
atcatcaagacaataatccttacgc

SEQ ID NO: 268090 - DNA, 25 bp, Artificial
  probe
  misc_feature (1)..(25): SEQ ID NO: 617; WAN024DEB; Start 809; Stop 833
atcaagacaataatccttacgctcg

SEQ ID NO: 268091 - DNA, 25 bp, Artificial
  probe
  misc_feature (1)..(25): SEQ ID NO: 617; WAN024DEB; Start 802; Stop 826
gcagatcatcaagacaataatcctt

SEQ ID NO: 268092 - DNA, 25 bp, Artificial
  probe
  misc_feature (1)..(25): SEQ ID NO: 617; WAN024DEB; Start 334; Stop 358
cttgaagcaactctggtatctagtg

SEQ ID NO: 268093 - DNA, 25 bp, Artificial
  probe
  misc_feature (1)..(25): SEQ ID NO: 617; WAN024DEB; Start 801; Stop 825
tgcagatcatcaagacaataatcct

SEQ ID NO: 268094 - DNA, 25 bp, Artificial
  probe
  misc_feature (1)..(25): SEQ ID NO: 617; WAN024DEB; Start 866; Stop 890
tttcttctacatttacacttcgcaa

SEQ ID NO: 268095 - DNA, 25 bp, Artificial
  probe
  misc_feature (1)..(25): SEQ ID NO: 617; WAN024DEB; Start 867; Stop 891
ttcttctacatttacacttcgcaaa

SEQ ID NO: 268096 - DNA, 25 bp, Artificial
  probe
  misc_feature (1)..(25): SEQ ID NO: 617; WAN024DEB; Start 805; Stop 829
gatcatcaagacaataatccttacg

SEQ ID NO: 268097 - DNA, 25 bp, Artificial
  probe
  misc_feature (1)..(25): SEQ ID NO: 617; WAN024DEB; Start 865; Stop 889
atttcttctacatttacacttcgca

SEQ ID NO: 268098 - DNA, 25 bp, Artificial
  probe
  misc_feature (1)..(25): SEQ ID NO: 617; WAN024DEB; Start 800; Stop 824
atgcagatcatcaagacaataatcc

SEQ ID NO: 268099 - DNA, 25 bp, Artificial
  probe
  misc_feature (1)..(25): SEQ ID NO: 617; WAN024DEB; Start 669; Stop 693
catgttagaaggtatgcctgcttac

SEQ ID NO: 268100 - DNA, 25 bp, Artificial
  probe
  misc_feature (1)..(25): SEQ ID NO: 617; WAN024DEB; Start 722; Stop 746
gaacaacagataaggctggagagtc

SEQ ID NO: 268101 - DNA, 25 bp, Artificial
  probe
  misc_feature (1)..(25): SEQ ID NO: 617; WAN024DEB; Start 799; Stop 823
aatgcagatcatcaagacaataatc

SEQ ID NO: 268102 - DNA, 25 bp, Artificial
  probe
  misc_feature (1)..(25): SEQ ID NO: 617; WAN024DEB; Start 968; Stop 992
tggctccagaggatatctatctaat

SEQ ID NO: 268103 - DNA, 25 bp, Artificial
  probe
  misc_feature (1)..(25): SEQ ID NO: 617; WAN024DEB; Start 967; Stop 991
gtggctccagaggatatctatctaa

SEQ ID NO: 268104 - DNA, 25 bp, Artificial
  probe
  misc_feature (1)..(25): SEQ ID NO: 617; WAN024DEB; Start 724; Stop 748
acaacagataaggctggagagtctt

SEQ ID NO: 268105 - DNA, 25 bp, Artificial
  probe
  misc_feature (1)..(25): SEQ ID NO: 617; WAN024DEB; Start 723; Stop 747
aacaacagataaggctggagagtct

SEQ ID NO: 268106 - DNA, 25 bp, Artificial
  probe
  misc_feature (1)..(25): SEQ ID NO: 617; WAN024DEB; Start 864; Stop 888
tatttcttctacatttacacttcgc

SEQ ID NO: 268107 - DNA, 25 bp, Artificial
  probe
  misc_feature (1)..(25): SEQ ID NO: 617; WAN024DEB; Start 966; Stop 990
agtggctccagaggatatctatcta

SEQ ID NO: 268108 - DNA, 25 bp, Artificial
  probe
  misc_feature (1)..(25): SEQ ID NO: 617; WAN024DEB; Start 270; Stop 294
gacgacaaattctgaagccagtaat

SEQ ID NO: 268109 - DNA, 25 bp, Artificial
  probe
  misc_feature (1)..(25): SEQ ID NO: 617; WAN024DEB; Start 341; Stop 365
caactctggtatctagtgccaacag

SEQ ID NO: 268110 - DNA, 25 bp, Artificial
  probe
  misc_feature (1)..(25): SEQ ID NO: 617; WAN024DEB; Start 804; Stop 828
agatcatcaagacaataatccttac

SEQ ID NO: 268111 - DNA, 25 bp, Artificial
  probe
  misc_feature (1)..(25): SEQ ID NO: 617; WAN024DEB; Start 803; Stop 827
cagatcatcaagacaataatcctta

SEQ ID NO: 268112 - DNA, 25 bp, Artificial
  probe
  misc_feature (1)..(25): SEQ ID NO: 617; WAN024DEB; Start 725; Stop 749
caacagataaggctggagagtcttt

SEQ ID NO: 268113 - DNA, 25 bp, Artificial
  probe
  misc_feature (1)..(25): SEQ ID NO: 617; WAN024DEB; Start 266; Stop 290
aattgacgacaaattctgaagccag

SEQ ID NO: 268114 - DNA, 25 bp, Artificial
  probe
  misc_feature (1)..(25): SEQ ID NO: 617; WAN024DEB; Start 720; Stop 744
aggaacaacagataaggctggagag

SEQ ID NO: 268115 - DNA, 25 bp, Artificial
  probe
  misc_feature (1)..(25): SEQ ID NO: 617; WAN024DEB; Start 1195; Stop 1219
aaagtttggtggaatcagtttgtcc

SEQ ID NO: 268116 - DNA, 25 bp, Artificial
  probe
  misc_feature (1)..(25): SEQ ID NO: 617; WAN024DEB; Start 653; Stop 677
tcacttcaaccaactacatgttaga

SEQ ID NO: 268117 - DNA, 25 bp, Artificial
  probe
  misc_feature (1)..(25): SEQ ID NO: 617; WAN024DEB; Start 650; Stop 674
caatcacttcaaccaactacatgtt

SEQ ID NO: 268118 - DNA, 25 bp, Artificial
  probe
  misc_feature (1)..(25): SEQ ID NO: 617; WAN024DEB; Start 717; Stop 741
aacaggaacaacagataaggctgga

SEQ ID NO: 268119 - DNA, 25 bp, Artificial
  probe
  misc_feature (1)..(25): SEQ ID NO: 617; WAN024DEB; Start 335; Stop 359
ttgaagcaactctggtatctagtgc

SEQ ID NO: 268120 - DNA, 25 bp, Artificial
  probe
  misc_feature (1)..(25): SEQ ID NO: 618; WAN024CCH; Start 467; Stop 491
ctacacaagagatggacaaggatag

SEQ ID NO: 268121 - DNA, 25 bp, Artificial
  probe
  misc_feature (1)..(25): SEQ ID NO: 618; WAN024CCH; Start 1723; Stop 1747
tcatctattcaagccattcaacaag

SEQ ID NO: 268122 - DNA, 25 bp, Artificial
  probe
  misc_feature (1)..(25): SEQ ID NO: 618; WAN024CCH; Start 1722; Stop 1746
ttcatctattcaagccattcaacaa

SEQ ID NO: 268123 - DNA, 25 bp, Artificial
  probe
  misc_feature (1)..(25): SEQ ID NO: 618; WAN024CCH; Start 471; Stop 495
acaagagatggacaaggataggatt

SEQ ID NO: 268124 - DNA, 25 bp, Artificial
  probe
  misc_feature (1)..(25): SEQ ID NO: 618; WAN024CCH; Start 1249; Stop 1273
tcagaacagattcagcaatatcagt

SEQ ID NO: 268125 - DNA, 25 bp, Artificial
  probe
  misc_feature (1)..(25): SEQ ID NO: 618; WAN024CCH; Start 1727; Stop 1751
ctattcaagccattcaacaagagaa

SEQ ID NO: 268126 - DNA, 25 bp, Artificial
  probe
  misc_feature (1)..(25): SEQ ID NO: 618; WAN024CCH; Start 1726; Stop 1750
tctattcaagccattcaacaagaga

SEQ ID NO: 268127 - DNA, 25 bp, Artificial
  probe
  misc_feature (1)..(25): SEQ ID NO: 618; WAN024CCH; Start 1107; Stop 1131
caatgataatctgtggcaagaagag

SEQ ID NO: 268128 - DNA, 25 bp, Artificial
  probe
  misc_feature (1)..(25): SEQ ID NO: 618; WAN024CCH; Start 458; Stop 482
cgataacttctacacaagagatgga

SEQ ID NO: 268129 - DNA, 25 bp, Artificial
  probe
  misc_feature (1)..(25): SEQ ID NO: 618; WAN024CCH; Start 457; Stop 481
acgataacttctacacaagagatgg

SEQ ID NO: 268130 - DNA, 25 bp, Artificial
  probe
  misc_feature (1)..(25): SEQ ID NO: 618; WAN024CCH; Start 1724; Stop 1748
catctattcaagccattcaacaaga

SEQ ID NO: 268131 - DNA, 25 bp, Artificial
  probe
  misc_feature (1)..(25): SEQ ID NO: 618; WAN024CCH; Start 466; Stop 490
tctacacaagagatggacaaggata

SEQ ID NO: 268132 - DNA, 25 bp, Artificial
  probe
  misc_feature (1)..(25): SEQ ID NO: 618; WAN024CCH; Start 451; Stop 475
cgctatacgataacttctacacaag

SEQ ID NO: 268133 - DNA, 25 bp, Artificial
  probe
  misc_feature (1)..(25): SEQ ID NO: 618; WAN024CCH; Start 1105; Stop 1129
ctcaatgataatctgtggcaagaag

SEQ ID NO: 268134 - DNA, 25 bp, Artificial
  probe
  misc_feature (1)..(25): SEQ ID NO: 618; WAN024CCH; Start 1106; Stop 1130
tcaatgataatctgtggcaagaaga

SEQ ID NO: 268135 - DNA, 25 bp, Artificial
  probe
  misc_feature (1)..(25): SEQ ID NO: 618; WAN024CCH; Start 462; Stop 486
aacttctacacaagagatggacaag

SEQ ID NO: 268136 - DNA, 25 bp, Artificial
  probe
  misc_feature (1)..(25): SEQ ID NO: 618; WAN024CCH; Start 1725; Stop 1749
atctattcaagccattcaacaagag

SEQ ID NO: 268137 - DNA, 25 bp, Artificial
  probe
  misc_feature (1)..(25): SEQ ID NO: 618; WAN024CCH; Start 1250; Stop 1274
cagaacagattcagcaatatcagtt

SEQ ID NO: 268138 - DNA, 25 bp, Artificial
  probe
  misc_feature (1)..(25): SEQ ID NO: 618; WAN024CCH; Start 461; Stop 485
taacttctacacaagagatggacaa

SEQ ID NO: 268139 - DNA, 25 bp, Artificial
  probe
  misc_feature (1)..(25): SEQ ID NO: 618; WAN024CCH; Start 22; Stop 46
tgtatgttactcctgcttctgtgta

SEQ ID NO: 268140 - DNA, 25 bp, Artificial
  probe
  misc_feature (1)..(25): SEQ ID NO: 618; WAN024CCH; Start 468; Stop 492
tacacaagagatggacaaggatagg

SEQ ID NO: 268141 - DNA, 25 bp, Artificial
  probe
  misc_feature (1)..(25): SEQ ID NO: 618; WAN024CCH; Start 1104; Stop 1128
actcaatgataatctgtggcaagaa

SEQ ID NO: 268142 - DNA, 25 bp, Artificial
  probe
  misc_feature (1)..(25): SEQ ID NO: 618; WAN024CCH; Start 1103; Stop 1127
aactcaatgataatctgtggcaaga

SEQ ID NO: 268143 - DNA, 25 bp, Artificial
  probe
  misc_feature (1)..(25): SEQ ID NO: 618; WAN024CCH; Start 1248; Stop 1272
atcagaacagattcagcaatatcag

SEQ ID NO: 268144 - DNA, 25 bp, Artificial
  probe
  misc_feature (1)..(25): SEQ ID NO: 618; WAN024CCH; Start 460; Stop 484
ataacttctacacaagagatggaca

SEQ ID NO: 268145 - DNA, 25 bp, Artificial
  probe
  misc_feature (1)..(25): SEQ ID NO: 618; WAN024CCH; Start 472; Stop 496
caagagatggacaaggataggattg

SEQ ID NO: 268146 - DNA, 25 bp, Artificial
  probe
  misc_feature (1)..(25): SEQ ID NO: 618; WAN024CCH; Start 1572; Stop 1596
ggtcaatgattctgatatgatgtgg

SEQ ID NO: 268147 - DNA, 25 bp, Artificial
  probe
  misc_feature (1)..(25): SEQ ID NO: 618; WAN024CCH; Start 465; Stop 489
ttctacacaagagatggacaaggat

SEQ ID NO: 268148 - DNA, 25 bp, Artificial
  probe
  misc_feature (1)..(25): SEQ ID NO: 618; WAN024CCH; Start 470; Stop 494
cacaagagatggacaaggataggat

SEQ ID NO: 268149 - DNA, 25 bp, Artificial
  probe
  misc_feature (1)..(25): SEQ ID NO: 618; WAN024CCH; Start 1568; Stop 1592
gcttggtcaatgattctgatatgat

SEQ ID NO: 268150 - DNA, 25 bp, Artificial
  probe
  misc_feature (1)..(25): SEQ ID NO: 618; WAN024CCH; Start 459; Stop 483
gataacttctacacaagagatggac

SEQ ID NO: 268151 - DNA, 25 bp, Artificial
  probe
  misc_feature (1)..(25): SEQ ID NO: 618; WAN024CCH; Start 1571; Stop 1595
tggtcaatgattctgatatgatgtg

SEQ ID NO: 268152 - DNA, 25 bp, Artificial
  probe
  misc_feature (1)..(25): SEQ ID NO: 618; WAN024CCH; Start 1108; Stop 1132
aatgataatctgtggcaagaagagc

SEQ ID NO: 268153 - DNA, 25 bp, Artificial
  probe
  misc_feature (1)..(25): SEQ ID NO: 619; WAN024DNY; Start 132; Stop 156
tcatcctgtgctattgacctatctt

SEQ ID NO: 268154 - DNA, 25 bp, Artificial
  probe
  misc_feature (1)..(25): SEQ ID NO: 619; WAN024DNY; Start 131; Stop 155
ttcatcctgtgctattgacctatct

SEQ ID NO: 268155 - DNA, 25 bp, Artificial
  probe
  misc_feature (1)..(25): SEQ ID NO: 619; WAN024DNY; Start 134; Stop 158
atcctgtgctattgacctatctttc

SEQ ID NO: 268156 - DNA, 25 bp, Artificial
  probe
  misc_feature (1)..(25): SEQ ID NO: 619; WAN024DNY; Start 133; Stop 157
catcctgtgctattgacctatcttt

SEQ ID NO: 268157 - DNA, 25 bp, Artificial
  probe
  misc_feature (1)..(25): SEQ ID NO: 619; WAN024DNY; Start 130; Stop 154
tttcatcctgtgctattgacctatc

SEQ ID NO: 268158 - DNA, 25 bp, Artificial
  probe
  misc_feature (1)..(25): SEQ ID NO: 619; WAN024DNY; Start 129; Stop 153
ctttcatcctgtgctattgacctat

SEQ ID NO: 268159 - DNA, 25 bp, Artificial
  probe
  misc_feature (1)..(25): SEQ ID NO: 619; WAN024DNY; Start 32; Stop 56
aactccttgtcattgatggaatcat

SEQ ID NO: 268160 - DNA, 25 bp, Artificial
  probe
  misc_feature (1)..(25): SEQ ID NO: 619; WAN024DNY; Start 135; Stop 159
tcctgtgctattgacctatctttca

SEQ ID NO: 268161 - DNA, 25 bp, Artificial
  probe
  misc_feature (1)..(25): SEQ ID NO: 619; WAN024DNY; Start 128; Stop 152
tctttcatcctgtgctattgaccta

SEQ ID NO: 268162 - DNA, 25 bp, Artificial
  probe
  misc_feature (1)..(25): SEQ ID NO: 619; WAN024DNY; Start 126; Stop 150
tttctttcatcctgtgctattgacc

SEQ ID NO: 268163 - DNA, 25 bp, Artificial
  probe
  misc_feature (1)..(25): SEQ ID NO: 619; WAN024DNY; Start 159; Stop 183
aaaccaactttgtgaccactttagt

SEQ ID NO: 268164 - DNA, 25 bp, Artificial
  probe
  misc_feature (1)..(25): SEQ ID NO: 619; WAN024DNY; Start 165; Stop 189
actttgtgaccactttagtctaact

SEQ ID NO: 268165 - DNA, 25 bp, Artificial
  probe
  misc_feature (1)..(25): SEQ ID NO: 619; WAN024DNY; Start 162; Stop 186
ccaactttgtgaccactttagtcta

SEQ ID NO: 268166 - DNA, 25 bp, Artificial
  probe
  misc_feature (1)..(25): SEQ ID NO: 619; WAN024DNY; Start 164; Stop 188
aactttgtgaccactttagtctaac

SEQ ID NO: 268167 - DNA, 25 bp, Artificial
  probe
  misc_feature (1)..(25): SEQ ID NO: 619; WAN024DNY; Start 163; Stop 187
caactttgtgaccactttagtctaa

SEQ ID NO: 268168 - DNA, 25 bp, Artificial
  probe
  misc_feature (1)..(25): SEQ ID NO: 619; WAN024DNY; Start 29; Stop 53
ttcaactccttgtcattgatggaat

SEQ ID NO: 268169 - DNA, 25 bp, Artificial
  probe
  misc_feature (1)..(25): SEQ ID NO: 619; WAN024DNY; Start 28; Stop 52
attcaactccttgtcattgatggaa

SEQ ID NO: 268170 - DNA, 25 bp, Artificial
  probe
  misc_feature (1)..(25): SEQ ID NO: 619; WAN024DNY; Start 31; Stop 55
caactccttgtcattgatggaatca

SEQ ID NO: 268171 - DNA, 25 bp, Artificial
  probe
  misc_feature (1)..(25): SEQ ID NO: 619; WAN024DNY; Start 24; Stop 48
aaccattcaactccttgtcattgat

SEQ ID NO: 268172 - DNA, 25 bp, Artificial
  probe
  misc_feature (1)..(25): SEQ ID NO: 619; WAN024DNY; Start 30; Stop 54
tcaactccttgtcattgatggaatc

SEQ ID NO: 268173 - DNA, 25 bp, Artificial
  probe
  misc_feature (1)..(25): SEQ ID NO: 619; WAN024DNY; Start 33; Stop 57
actccttgtcattgatggaatcatg

SEQ ID NO: 268174 - DNA, 25 bp, Artificial
  probe
  misc_feature (1)..(25): SEQ ID NO: 619; WAN024DNY; Start 127; Stop 151
ttctttcatcctgtgctattgacct

SEQ ID NO: 268175 - DNA, 25 bp, Artificial
  probe
  misc_feature (1)..(25): SEQ ID NO: 619; WAN024DNY; Start 27; Stop 51
cattcaactccttgtcattgatgga

SEQ ID NO: 268176 - DNA, 25 bp, Artificial
  probe
  misc_feature (1)..(25): SEQ ID NO: 619; WAN024DNY; Start 160; Stop 184
aaccaactttgtgaccactttagtc

SEQ ID NO: 268177 - DNA, 25 bp, Artificial
  probe
  misc_feature (1)..(25): SEQ ID NO: 619; WAN024DNY; Start 25; Stop 49
accattcaactccttgtcattgatg

SEQ ID NO: 268178 - DNA, 25 bp, Artificial
  probe
  misc_feature (1)..(25): SEQ ID NO: 619; WAN024DNY; Start 161; Stop 185
accaactttgtgaccactttagtct

SEQ ID NO: 268179 - DNA, 25 bp, Artificial
  probe
  misc_feature (1)..(25): SEQ ID NO: 619; WAN024DNY; Start 34; Stop 58
ctccttgtcattgatggaatcatgc

SEQ ID NO: 268180 - DNA, 25 bp, Artificial
  probe
  misc_feature (1)..(25): SEQ ID NO: 619; WAN024DNY; Start 166; Stop 190
ctttgtgaccactttagtctaacta

SEQ ID NO: 268181 - DNA, 25 bp, Artificial
  probe
  misc_feature (1)..(25): SEQ ID NO: 619; WAN024DNY; Start 37; Stop 61
cttgtcattgatggaatcatgctgg

SEQ ID NO: 268182 - DNA, 25 bp, Artificial
  probe
  misc_feature (1)..(25): SEQ ID NO: 619; WAN024DNY; Start 36; Stop 60
ccttgtcattgatggaatcatgctg

SEQ ID NO: 268183 - DNA, 25 bp, Artificial
  probe
  misc_feature (1)..(25): SEQ ID NO: 619; WAN024DNY; Start 35; Stop 59
tccttgtcattgatggaatcatgct

SEQ ID NO: 268184 - DNA, 25 bp, Artificial
  probe
  misc_feature (1)..(25): SEQ ID NO: 619; WAN024DNY; Start 15; Stop 39
cttcatcaaaaccattcaactcctt

SEQ ID NO: 268185 - DNA, 25 bp, Artificial
  probe
  misc_feature (1)..(25): SEQ ID NO: 619; WAN024DNY; Start 13; Stop 37
atcttcatcaaaaccattcaactcc

SEQ ID NO: 268186 - DNA, 25 bp, Artificial
  probe
  misc_feature (1)..(25): SEQ ID NO: 620; WAN024CBD; Start 172; Stop 196
gaattgactggttacgagattgaag

SEQ ID NO: 268187 - DNA, 25 bp, Artificial
  probe
  misc_feature (1)..(25): SEQ ID NO: 620; WAN024CBD; Start 173; Stop 197
aattgactggttacgagattgaagt

SEQ ID NO: 268188 - DNA, 25 bp, Artificial
  probe
  misc_feature (1)..(25): SEQ ID NO: 620; WAN024CBD; Start 171; Stop 195
cgaattgactggttacgagattgaa

SEQ ID NO: 268189 - DNA, 25 bp, Artificial
  probe
  misc_feature (1)..(25): SEQ ID NO: 620; WAN024CBD; Start 290; Stop 314
gttacaatatggctgtcaacaatct

SEQ ID NO: 268190 - DNA, 25 bp, Artificial
  probe
  misc_feature (1)..(25): SEQ ID NO: 620; WAN024CBD; Start 371; Stop 395
atcctaatgtccttgtcgtgaagaa

SEQ ID NO: 268191 - DNA, 25 bp, Artificial
  probe
  misc_feature (1)..(25): SEQ ID NO: 620; WAN024CBD; Start 370; Stop 394
aatcctaatgtccttgtcgtgaaga

SEQ ID NO: 268192 - DNA, 25 bp, Artificial
  probe
  misc_feature (1)..(25): SEQ ID NO: 620; WAN024CBD; Start 293; Stop 317
acaatatggctgtcaacaatcttag

SEQ ID NO: 268193 - DNA, 25 bp, Artificial
  probe
  misc_feature (1)..(25): SEQ ID NO: 620; WAN024CBD; Start 289; Stop 313
cgttacaatatggctgtcaacaatc

SEQ ID NO: 268194 - DNA, 25 bp, Artificial
  probe
  misc_feature (1)..(25): SEQ ID NO: 620; WAN024CBD; Start 291; Stop 315
ttacaatatggctgtcaacaatctt

SEQ ID NO: 268195 - DNA, 25 bp, Artificial
  probe
  misc_feature (1)..(25): SEQ ID NO: 620; WAN024CBD; Start 292; Stop 316
tacaatatggctgtcaacaatctta

SEQ ID NO: 268196 - DNA, 25 bp, Artificial
  probe
  misc_feature (1)..(25): SEQ ID NO: 620; WAN024CBD; Start 401; Stop 425
actctagtatcaagtctctcgatga

SEQ ID NO: 268197 - DNA, 25 bp, Artificial
  probe
  misc_feature (1)..(25): SEQ ID NO: 620; WAN024CBD; Start 375; Stop 399
taatgtccttgtcgtgaagaaagat

SEQ ID NO: 268198 - DNA, 25 bp, Artificial
  probe
  misc_feature (1)..(25): SEQ ID NO: 620; WAN024CBD; Start 460; Stop 484
actacatcagctaagcagttagaag

SEQ ID NO: 268199 - DNA, 25 bp, Artificial
  probe
  misc_feature (1)..(25): SEQ ID NO: 620; WAN024CBD; Start 374; Stop 398
ctaatgtccttgtcgtgaagaaaga

SEQ ID NO: 268200 - DNA, 25 bp, Artificial
  probe
  misc_feature (1)..(25): SEQ ID NO: 620; WAN024CBD; Start 459; Stop 483
cactacatcagctaagcagttagaa

SEQ ID NO: 268201 - DNA, 25 bp, Artificial
  probe
  misc_feature (1)..(25): SEQ ID NO: 620; WAN024CBD; Start 778; Stop 802
tctaaacaattcttcggagacactt

SEQ ID NO: 268202 - DNA, 25 bp, Artificial
  probe
  misc_feature (1)..(25): SEQ ID NO: 620; WAN024CBD; Start 369; Stop 393
aaatcctaatgtccttgtcgtgaag

SEQ ID NO: 268203 - DNA, 25 bp, Artificial
  probe
  misc_feature (1)..(25): SEQ ID NO: 620; WAN024CBD; Start 469; Stop 493
gctaagcagttagaagcatacaatg

SEQ ID NO: 268204 - DNA, 25 bp, Artificial
  probe
  misc_feature (1)..(25): SEQ ID NO: 620; WAN024CBD; Start 294; Stop 318
caatatggctgtcaacaatcttagc

SEQ ID NO: 268205 - DNA, 25 bp, Artificial
  probe
  misc_feature (1)..(25): SEQ ID NO: 620; WAN024CBD; Start 779; Stop 803
ctaaacaattcttcggagacactta

SEQ ID NO: 268206 - DNA, 25 bp, Artificial
  probe
  misc_feature (1)..(25): SEQ ID NO: 620; WAN024CBD; Start 376; Stop 400
aatgtccttgtcgtgaagaaagatg

SEQ ID NO: 268207 - DNA, 25 bp, Artificial
  probe
  misc_feature (1)..(25): SEQ ID NO: 620; WAN024CBD; Start 373; Stop 397
cctaatgtccttgtcgtgaagaaag

SEQ ID NO: 268208 - DNA, 25 bp, Artificial
  probe
  misc_feature (1)..(25): SEQ ID NO: 620; WAN024CBD; Start 386; Stop 410
tcgtgaagaaagatgactctagtat

SEQ ID NO: 268209 - DNA, 25 bp, Artificial
  probe
  misc_feature (1)..(25): SEQ ID NO: 620; WAN024CBD; Start 382; Stop 406
cttgtcgtgaagaaagatgactcta

SEQ ID NO: 268210 - DNA, 25 bp, Artificial
  probe
  misc_feature (1)..(25): SEQ ID NO: 620; WAN024CBD; Start 372; Stop 396
tcctaatgtccttgtcgtgaagaaa

SEQ ID NO: 268211 - DNA, 25 bp, Artificial
  probe
  misc_feature (1)..(25): SEQ ID NO: 620; WAN024CBD; Start 170; Stop 194
gcgaattgactggttacgagattga

SEQ ID NO: 268212 - DNA, 25 bp, Artificial
  probe
  misc_feature (1)..(25): SEQ ID NO: 620; WAN024CBD; Start 387; Stop 411
cgtgaagaaagatgactctagtatc

SEQ ID NO: 268213 - DNA, 25 bp, Artificial
  probe
  misc_feature (1)..(25): SEQ ID NO: 620; WAN024CBD; Start 458; Stop 482
ccactacatcagctaagcagttaga

SEQ ID NO: 268214 - DNA, 25 bp, Artificial
  probe
  misc_feature (1)..(25): SEQ ID NO: 620; WAN024CBD; Start 385; Stop 409
gtcgtgaagaaagatgactctagta

SEQ ID NO: 268215 - DNA, 25 bp, Artificial
  probe
  misc_feature (1)..(25): SEQ ID NO: 620; WAN024CBD; Start 383; Stop 407
ttgtcgtgaagaaagatgactctag

SEQ ID NO: 268216 - DNA, 25 bp, Artificial
  probe
  misc_feature (1)..(25): SEQ ID NO: 620; WAN024CBD; Start 506; Stop 530
acaacccaactatccttaactatac

SEQ ID NO: 268217 - DNA, 25 bp, Artificial
  probe
  misc_feature (1)..(25): SEQ ID NO: 620; WAN024CBD; Start 8; Stop 32
aaatcgttaaatactcatctcttgc

SEQ ID NO: 268218 - DNA, 25 bp, Artificial
  probe
  misc_feature (1)..(25): SEQ ID NO: 620; WAN024CBD; Start 560; Stop 584
gtttgagcgatggacaatttgacta

SEQ ID NO: 268219 - DNA, 25 bp, Artificial
  probe
  misc_feature (1)..(25): SEQ ID NO: 621; WAN024D95; Start 278; Stop 302
tgattaacaagatgaaggacgaaga

SEQ ID NO: 268220 - DNA, 25 bp, Artificial
  probe
  misc_feature (1)..(25): SEQ ID NO: 621; WAN024D95; Start 279; Stop 303
gattaacaagatgaaggacgaagac

SEQ ID NO: 268221 - DNA, 25 bp, Artificial
  probe
  misc_feature (1)..(25): SEQ ID NO: 621; WAN024D95; Start 1028; Stop 1052
aatatagcgacctcttcctacagtt

SEQ ID NO: 268222 - DNA, 25 bp, Artificial
  probe
  misc_feature (1)..(25): SEQ ID NO: 621; WAN024D95; Start 280; Stop 304
attaacaagatgaaggacgaagacc

SEQ ID NO: 268223 - DNA, 25 bp, Artificial
  probe
  misc_feature (1)..(25): SEQ ID NO: 621; WAN024D95; Start 277; Stop 301
atgattaacaagatgaaggacgaag

SEQ ID NO: 268224 - DNA, 25 bp, Artificial
  probe
  misc_feature (1)..(25): SEQ ID NO: 621; WAN024D95; Start 249; Stop 273
ctacgatattgccattccaagtgaa

SEQ ID NO: 268225 - DNA, 25 bp, Artificial
  probe
  misc_feature (1)..(25): SEQ ID NO: 621; WAN024D95; Start 275; Stop 299
acatgattaacaagatgaaggacga

SEQ ID NO: 268226 - DNA, 25 bp, Artificial
  probe
  misc_feature (1)..(25): SEQ ID NO: 621; WAN024D95; Start 276; Stop 300
catgattaacaagatgaaggacgaa

SEQ ID NO: 268227 - DNA, 25 bp, Artificial
  probe
  misc_feature (1)..(25): SEQ ID NO: 621; WAN024D95; Start 417; Stop 441
aaccttaggaattgtctacaacgaa

SEQ ID NO: 268228 - DNA, 25 bp, Artificial
  probe
  misc_feature (1)..(25): SEQ ID NO: 621; WAN024D95; Start 416; Stop 440
gaaccttaggaattgtctacaacga

SEQ ID NO: 268229 - DNA, 25 bp, Artificial
  probe
  misc_feature (1)..(25): SEQ ID NO: 621; WAN024D95; Start 274; Stop 298
tacatgattaacaagatgaaggacg

SEQ ID NO: 268230 - DNA, 25 bp, Artificial
  probe
  misc_feature (1)..(25): SEQ ID NO: 621; WAN024D95; Start 415; Stop 439
ggaaccttaggaattgtctacaacg

SEQ ID NO: 268231 - DNA, 25 bp, Artificial
  probe
  misc_feature (1)..(25): SEQ ID NO: 621; WAN024D95; Start 252; Stop 276
cgatattgccattccaagtgaatac

SEQ ID NO: 268232 - DNA, 25 bp, Artificial
  probe
  misc_feature (1)..(25): SEQ ID NO: 621; WAN024D95; Start 253; Stop 277
gatattgccattccaagtgaataca

SEQ ID NO: 268233 - DNA, 25 bp, Artificial
  probe
  misc_feature (1)..(25): SEQ ID NO: 621; WAN024D95; Start 251; Stop 275
acgatattgccattccaagtgaata

SEQ ID NO: 268234 - DNA, 25 bp, Artificial
  probe
  misc_feature (1)..(25): SEQ ID NO: 621; WAN024D95; Start 250; Stop 274
tacgatattgccattccaagtgaat

SEQ ID NO: 268235 - DNA, 25 bp, Artificial
  probe
  misc_feature (1)..(25): SEQ ID NO: 621; WAN024D95; Start 281; Stop 305
ttaacaagatgaaggacgaagacct

SEQ ID NO: 268236 - DNA, 25 bp, Artificial
  probe
  misc_feature (1)..(25): SEQ ID NO: 621; WAN024D95; Start 826; Stop 850
tcagcctatgcctttatcaacttta

SEQ ID NO: 268237 - DNA, 25 bp, Artificial
  probe
  misc_feature (1)..(25): SEQ ID NO: 621; WAN024D95; Start 1030; Stop 1054
tatagcgacctcttcctacagttta

SEQ ID NO: 268238 - DNA, 25 bp, Artificial
  probe
  misc_feature (1)..(25): SEQ ID NO: 621; WAN024D95; Start 1013; Stop 1037
ataaatggacagggaaatatagcga

SEQ ID NO: 268239 - DNA, 25 bp, Artificial
  probe
  misc_feature (1)..(25): SEQ ID NO: 621; WAN024D95; Start 1014; Stop 1038
taaatggacagggaaatatagcgac

SEQ ID NO: 268240 - DNA, 25 bp, Artificial
  probe
  misc_feature (1)..(25): SEQ ID NO: 621; WAN024D95; Start 1012; Stop 1036
cataaatggacagggaaatatagcg

SEQ ID NO: 268241 - DNA, 25 bp, Artificial
  probe
  misc_feature (1)..(25): SEQ ID NO: 621; WAN024D95; Start 829; Stop 853
gcctatgcctttatcaactttatgt

SEQ ID NO: 268242 - DNA, 25 bp, Artificial
  probe
  misc_feature (1)..(25): SEQ ID NO: 621; WAN024D95; Start 612; Stop 636
gctctacaaactgactccaaatatc

SEQ ID NO: 268243 - DNA, 25 bp, Artificial
  probe
  misc_feature (1)..(25): SEQ ID NO: 621; WAN024D95; Start 254; Stop 278
atattgccattccaagtgaatacat

SEQ ID NO: 268244 - DNA, 25 bp, Artificial
  probe
  misc_feature (1)..(25): SEQ ID NO: 621; WAN024D95; Start 828; Stop 852
agcctatgcctttatcaactttatg

SEQ ID NO: 268245 - DNA, 25 bp, Artificial
  probe
  misc_feature (1)..(25): SEQ ID NO: 621; WAN024D95; Start 827; Stop 851
cagcctatgcctttatcaactttat

SEQ ID NO: 268246 - DNA, 25 bp, Artificial
  probe
  misc_feature (1)..(25): SEQ ID NO: 621; WAN024D95; Start 624; Stop 648
gactccaaatatcaaggctatcgtt

SEQ ID NO: 268247 - DNA, 25 bp, Artificial
  probe
  misc_feature (1)..(25): SEQ ID NO: 621; WAN024D95; Start 248; Stop 272
cctacgatattgccattccaagtga

SEQ ID NO: 268248 - DNA, 25 bp, Artificial
  probe
  misc_feature (1)..(25): SEQ ID NO: 621; WAN024D95; Start 246; Stop 270
gacctacgatattgccattccaagt

SEQ ID NO: 268249 - DNA, 25 bp, Artificial
  probe
  misc_feature (1)..(25): SEQ ID NO: 621; WAN024D95; Start 1029; Stop 1053
atatagcgacctcttcctacagttt

SEQ ID NO: 268250 - DNA, 25 bp, Artificial
  probe
  misc_feature (1)..(25): SEQ ID NO: 621; WAN024D95; Start 1027; Stop 1051
aaatatagcgacctcttcctacagt

SEQ ID NO: 268251 - DNA, 25 bp, Artificial
  probe
  misc_feature (1)..(25): SEQ ID NO: 621; WAN024D95; Start 1026; Stop 1050
gaaatatagcgacctcttcctacag

SEQ ID NO: 268252 - DNA, 25 bp, Artificial
  probe
  misc_feature (1)..(25): SEQ ID NO: 622; WAN024D4I; Start 82; Stop 106
aattctacgactgcttcttcatctg

SEQ ID NO: 268253 - DNA, 25 bp, Artificial
  probe
  misc_feature (1)..(25): SEQ ID NO: 622; WAN024D4I; Start 247; Stop 271
gaccgtgttattgctgagaagaata

SEQ ID NO: 268254 - DNA, 25 bp, Artificial
  probe
  misc_feature (1)..(25): SEQ ID NO: 622; WAN024D4I; Start 771; Stop 795
agttatgactcctgagattggtgta

SEQ ID NO: 268255 - DNA, 25 bp, Artificial
  probe
  misc_feature (1)..(25): SEQ ID NO: 622; WAN024D4I; Start 772; Stop 796
gttatgactcctgagattggtgtac

SEQ ID NO: 268256 - DNA, 25 bp, Artificial
  probe
  misc_feature (1)..(25): SEQ ID NO: 622; WAN024D4I; Start 83; Stop 107
attctacgactgcttcttcatctga

SEQ ID NO: 268257 - DNA, 25 bp, Artificial
  probe
  misc_feature (1)..(25): SEQ ID NO: 622; WAN024D4I; Start 770; Stop 794
aagttatgactcctgagattggtgt

SEQ ID NO: 268258 - DNA, 25 bp, Artificial
  probe
  misc_feature (1)..(25): SEQ ID NO: 622; WAN024D4I; Start 773; Stop 797
ttatgactcctgagattggtgtacc

SEQ ID NO: 268259 - DNA, 25 bp, Artificial
  probe
  misc_feature (1)..(25): SEQ ID NO: 622; WAN024D4I; Start 246; Stop 270
agaccgtgttattgctgagaagaat

SEQ ID NO: 268260 - DNA, 25 bp, Artificial
  probe
  misc_feature (1)..(25): SEQ ID NO: 622; WAN024D4I; Start 84; Stop 108
ttctacgactgcttcttcatctgaa

SEQ ID NO: 268261 - DNA, 25 bp, Artificial
  probe
  misc_feature (1)..(25): SEQ ID NO: 622; WAN024D4I; Start 282; Stop 306
agatatggtatttggaattggtgct

SEQ ID NO: 268262 - DNA, 25 bp, Artificial
  probe
  misc_feature (1)..(25): SEQ ID NO: 622; WAN024D4I; Start 283; Stop 307
gatatggtatttggaattggtgctg

SEQ ID NO: 268263 - DNA, 25 bp, Artificial
  probe
  misc_feature (1)..(25): SEQ ID NO: 622; WAN024D4I; Start 281; Stop 305
cagatatggtatttggaattggtgc

SEQ ID NO: 268264 - DNA, 25 bp, Artificial
  probe
  misc_feature (1)..(25): SEQ ID NO: 622; WAN024D4I; Start 280; Stop 304
gcagatatggtatttggaattggtg

SEQ ID NO: 268265 - DNA, 25 bp, Artificial
  probe
  misc_feature (1)..(25): SEQ ID NO: 622; WAN024D4I; Start 81; Stop 105
aaattctacgactgcttcttcatct

SEQ ID NO: 268266 - DNA, 25 bp, Artificial
  probe
  misc_feature (1)..(25): SEQ ID NO: 622; WAN024D4I; Start 80; Stop 104
caaattctacgactgcttcttcatc

SEQ ID NO: 268267 - DNA, 25 bp, Artificial
  probe
  misc_feature (1)..(25): SEQ ID NO: 622; WAN024D4I; Start 79; Stop 103
tcaaattctacgactgcttcttcat

SEQ ID NO: 268268 - DNA, 25 bp, Artificial
  probe
  misc_feature (1)..(25): SEQ ID NO: 622; WAN024D4I; Start 77; Stop 101
gttcaaattctacgactgcttcttc

SEQ ID NO: 268269 - DNA, 25 bp, Artificial
  probe
  misc_feature (1)..(25): SEQ ID NO: 622; WAN024D4I; Start 284; Stop 308
atatggtatttggaattggtgctgt

SEQ ID NO: 268270 - DNA, 25 bp, Artificial
  probe
  misc_feature (1)..(25): SEQ ID NO: 622; WAN024D4I; Start 78; Stop 102
ttcaaattctacgactgcttcttca

SEQ ID NO: 268271 - DNA, 25 bp, Artificial
  probe
  misc_feature (1)..(25): SEQ ID NO: 622; WAN024D4I; Start 285; Stop 309
tatggtatttggaattggtgctgtt

SEQ ID NO: 268272 - DNA, 25 bp, Artificial
  probe
  misc_feature (1)..(25): SEQ ID NO: 622; WAN024D4I; Start 869; Stop 893
ggtttggtcaatcagaaattcaagt

SEQ ID NO: 268273 - DNA, 25 bp, Artificial
  probe
  misc_feature (1)..(25): SEQ ID NO: 622; WAN024D4I; Start 868; Stop 892
tggtttggtcaatcagaaattcaag

SEQ ID NO: 268274 - DNA, 25 bp, Artificial
  probe
  misc_feature (1)..(25): SEQ ID NO: 622; WAN024D4I; Start 867; Stop 891
ttggtttggtcaatcagaaattcaa

SEQ ID NO: 268275 - DNA, 25 bp, Artificial
  probe
  misc_feature (1)..(25): SEQ ID NO: 622; WAN024D4I; Start 767; Stop 791
tcaaagttatgactcctgagattgg

SEQ ID NO: 268276 - DNA, 25 bp, Artificial
  probe
  misc_feature (1)..(25): SEQ ID NO: 622; WAN024D4I; Start 249; Stop 273
ccgtgttattgctgagaagaataat

SEQ ID NO: 268277 - DNA, 25 bp, Artificial
  probe
  misc_feature (1)..(25): SEQ ID NO: 622; WAN024D4I; Start 248; Stop 272
accgtgttattgctgagaagaataa

SEQ ID NO: 268278 - DNA, 25 bp, Artificial
  probe
  misc_feature (1)..(25): SEQ ID NO: 622; WAN024D4I; Start 769; Stop 793
aaagttatgactcctgagattggtg

SEQ ID NO: 268279 - DNA, 25 bp, Artificial
  probe
  misc_feature (1)..(25): SEQ ID NO: 622; WAN024D4I; Start 768; Stop 792
caaagttatgactcctgagattggt

SEQ ID NO: 268280 - DNA, 25 bp, Artificial
  probe
  misc_feature (1)..(25): SEQ ID NO: 622; WAN024D4I; Start 340; Stop 364
ctagtacagtacaagcctaaatggt

SEQ ID NO: 268281 - DNA, 25 bp, Artificial
  probe
  misc_feature (1)..(25): SEQ ID NO: 622; WAN024D4I; Start 342; Stop 366
agtacagtacaagcctaaatggtta

SEQ ID NO: 268282 - DNA, 25 bp, Artificial
  probe
  misc_feature (1)..(25): SEQ ID NO: 622; WAN024D4I; Start 341; Stop 365
tagtacagtacaagcctaaatggtt

SEQ ID NO: 268283 - DNA, 25 bp, Artificial
  probe
  misc_feature (1)..(25): SEQ ID NO: 622; WAN024D4I; Start 76; Stop 100
ggttcaaattctacgactgcttctt

SEQ ID NO: 268284 - DNA, 25 bp, Artificial
  probe
  misc_feature (1)..(25): SEQ ID NO: 622; WAN024D4I; Start 251; Stop 275
gtgttattgctgagaagaataatgc

SEQ ID NO: 268285 - DNA, 25 bp, Artificial
  probe
  misc_feature (1)..(25): SEQ ID NO: 623; WAN024FG9; Start 366; Stop 390
ttctatcaagcgtattggacaagat

SEQ ID NO: 268286 - DNA, 25 bp, Artificial
  probe
  misc_feature (1)..(25): SEQ ID NO: 623; WAN024FG9; Start 365; Stop 389
attctatcaagcgtattggacaaga

SEQ ID NO: 268287 - DNA, 25 bp, Artificial
  probe
  misc_feature (1)..(25): SEQ ID NO: 623; WAN024FG9; Start 364; Stop 388
gattctatcaagcgtattggacaag

SEQ ID NO: 268288 - DNA, 25 bp, Artificial
  probe
  misc_feature (1)..(25): SEQ ID NO: 623; WAN024FG9; Start 1217; Stop 1241
tgactaaccaacacattattgaaca

SEQ ID NO: 268289 - DNA, 25 bp, Artificial
  probe
  misc_feature (1)..(25): SEQ ID NO: 623; WAN024FG9; Start 424; Stop 448
atcggagatgattactactctgttc

SEQ ID NO: 268290 - DNA, 25 bp, Artificial
  probe
  misc_feature (1)..(25): SEQ ID NO: 623; WAN024FG9; Start 429; Stop 453
agatgattactactctgttcctctt

SEQ ID NO: 268291 - DNA, 25 bp, Artificial
  probe
  misc_feature (1)..(25): SEQ ID NO: 623; WAN024FG9; Start 367; Stop 391
tctatcaagcgtattggacaagata

SEQ ID NO: 268292 - DNA, 25 bp, Artificial
  probe
  misc_feature (1)..(25): SEQ ID NO: 623; WAN024FG9; Start 1039; Stop 1063
cttgattcaactccagtaggtatgt

SEQ ID NO: 268293 - DNA, 25 bp, Artificial
  probe
  misc_feature (1)..(25): SEQ ID NO: 623; WAN024FG9; Start 1040; Stop 1064
ttgattcaactccagtaggtatgtt

SEQ ID NO: 268294 - DNA, 25 bp, Artificial
  probe
  misc_feature (1)..(25): SEQ ID NO: 623; WAN024FG9; Start 428; Stop 452
gagatgattactactctgttcctct

SEQ ID NO: 268295 - DNA, 25 bp, Artificial
  probe
  misc_feature (1)..(25): SEQ ID NO: 623; WAN024FG9; Start 96; Stop 120
tactgaaccaccaacagaattatct

SEQ ID NO: 268296 - DNA, 25 bp, Artificial
  probe
  misc_feature (1)..(25): SEQ ID NO: 623; WAN024FG9; Start 368; Stop 392
ctatcaagcgtattggacaagataa

SEQ ID NO: 268297 - DNA, 25 bp, Artificial
  probe
  misc_feature (1)..(25): SEQ ID NO: 623; WAN024FG9; Start 1051; Stop 1075
ccagtaggtatgttgccaactatta

SEQ ID NO: 268298 - DNA, 25 bp, Artificial
  probe
  misc_feature (1)..(25): SEQ ID NO: 623; WAN024FG9; Start 1218; Stop 1242
gactaaccaacacattattgaacaa

SEQ ID NO: 268299 - DNA, 25 bp, Artificial
  probe
  misc_feature (1)..(25): SEQ ID NO: 623; WAN024FG9; Start 1216; Stop 1240
ttgactaaccaacacattattgaac

SEQ ID NO: 268300 - DNA, 25 bp, Artificial
  probe
  misc_feature (1)..(25): SEQ ID NO: 623; WAN024FG9; Start 836; Stop 860
atatcggaggaattaatgccaacag

SEQ ID NO: 268301 - DNA, 25 bp, Artificial
  probe
  misc_feature (1)..(25): SEQ ID NO: 623; WAN024FG9; Start 427; Stop 451
ggagatgattactactctgttcctc

SEQ ID NO: 268302 - DNA, 25 bp, Artificial
  probe
  misc_feature (1)..(25): SEQ ID NO: 623; WAN024FG9; Start 95; Stop 119
gtactgaaccaccaacagaattatc

SEQ ID NO: 268303 - DNA, 25 bp, Artificial
  probe
  misc_feature (1)..(25): SEQ ID NO: 623; WAN024FG9; Start 296; Stop 320
atatcagtacagctcttcctaacca

SEQ ID NO: 268304 - DNA, 25 bp, Artificial
  probe
  misc_feature (1)..(25): SEQ ID NO: 623; WAN024FG9; Start 297; Stop 321
tatcagtacagctcttcctaaccaa

SEQ ID NO: 268305 - DNA, 25 bp, Artificial
  probe
  misc_feature (1)..(25): SEQ ID NO: 623; WAN024FG9; Start 876; Stop 900
ttcgattgatgcttatcctattcca

SEQ ID NO: 268306 - DNA, 25 bp, Artificial
  probe
  misc_feature (1)..(25): SEQ ID NO: 623; WAN024FG9; Start 303; Stop 327
tacagctcttcctaaccaagtaatg

SEQ ID NO: 268307 - DNA, 25 bp, Artificial
  probe
  misc_feature (1)..(25): SEQ ID NO: 623; WAN024FG9; Start 302; Stop 326
gtacagctcttcctaaccaagtaat

SEQ ID NO: 268308 - DNA, 25 bp, Artificial
  probe
  misc_feature (1)..(25): SEQ ID NO: 623; WAN024FG9; Start 869; Stop 893
tgattgattcgattgatgcttatcc

SEQ ID NO: 268309 - DNA, 25 bp, Artificial
  probe
  misc_feature (1)..(25): SEQ ID NO: 623; WAN024FG9; Start 1034; Stop 1058
aattccttgattcaactccagtagg

SEQ ID NO: 268310 - DNA, 25 bp, Artificial
  probe
  misc_feature (1)..(25): SEQ ID NO: 623; WAN024FG9; Start 835; Stop 859
catatcggaggaattaatgccaaca

SEQ ID NO: 268311 - DNA, 25 bp, Artificial
  probe
  misc_feature (1)..(25): SEQ ID NO: 623; WAN024FG9; Start 1038; Stop 1062
ccttgattcaactccagtaggtatg

SEQ ID NO: 268312 - DNA, 25 bp, Artificial
  probe
  misc_feature (1)..(25): SEQ ID NO: 623; WAN024FG9; Start 1037; Stop 1061
tccttgattcaactccagtaggtat

SEQ ID NO: 268313 - DNA, 25 bp, Artificial
  probe
  misc_feature (1)..(25): SEQ ID NO: 623; WAN024FG9; Start 870; Stop 894
gattgattcgattgatgcttatcct

SEQ ID NO: 268314 - DNA, 25 bp, Artificial
  probe
  misc_feature (1)..(25): SEQ ID NO: 623; WAN024FG9; Start 426; Stop 450
cggagatgattactactctgttcct

SEQ ID NO: 268315 - DNA, 25 bp, Artificial
  probe
  misc_feature (1)..(25): SEQ ID NO: 623; WAN024FG9; Start 1036; Stop 1060
ttccttgattcaactccagtaggta

SEQ ID NO: 268316 - DNA, 25 bp, Artificial
  probe
  misc_feature (1)..(25): SEQ ID NO: 623; WAN024FG9; Start 425; Stop 449
tcggagatgattactactctgttcc

SEQ ID NO: 268317 - DNA, 25 bp, Artificial
  probe
  misc_feature (1)..(25): SEQ ID NO: 623; WAN024FG9; Start 301; Stop 325
agtacagctcttcctaaccaagtaa

SEQ ID NO: 268318 - DNA, 25 bp, Artificial
  probe
  misc_feature (1)..(25): SEQ ID NO: 624; WAN024E27; Start 95; Stop 119
tcttgctctttgtacctaatctgac

SEQ ID NO: 268319 - DNA, 25 bp, Artificial
  probe
  misc_feature (1)..(25): SEQ ID NO: 624; WAN024E27; Start 94; Stop 118
ttcttgctctttgtacctaatctga

SEQ ID NO: 268320 - DNA, 25 bp, Artificial
  probe
  misc_feature (1)..(25): SEQ ID NO: 624; WAN024E27; Start 93; Stop 117
tttcttgctctttgtacctaatctg

SEQ ID NO: 268321 - DNA, 25 bp, Artificial
  probe
  misc_feature (1)..(25): SEQ ID NO: 624; WAN024E27; Start 96; Stop 120
cttgctctttgtacctaatctgacc

SEQ ID NO: 268322 - DNA, 25 bp, Artificial
  probe
  misc_feature (1)..(25): SEQ ID NO: 624; WAN024E27; Start 102; Stop 126
ctttgtacctaatctgaccaagcaa

SEQ ID NO: 268323 - DNA, 25 bp, Artificial
  probe
  misc_feature (1)..(25): SEQ ID NO: 624; WAN024E27; Start 100; Stop 124
ctctttgtacctaatctgaccaagc

SEQ ID NO: 268324 - DNA, 25 bp, Artificial
  probe
  misc_feature (1)..(25): SEQ ID NO: 624; WAN024E27; Start 99; Stop 123
gctctttgtacctaatctgaccaag

SEQ ID NO: 268325 - DNA, 25 bp, Artificial
  probe
  misc_feature (1)..(25): SEQ ID NO: 624; WAN024E27; Start 97; Stop 121
ttgctctttgtacctaatctgacca

SEQ ID NO: 268326 - DNA, 25 bp, Artificial
  probe
  misc_feature (1)..(25): SEQ ID NO: 624; WAN024E27; Start 101; Stop 125
tctttgtacctaatctgaccaagca

SEQ ID NO: 268327 - DNA, 25 bp, Artificial
  probe
  misc_feature (1)..(25): SEQ ID NO: 624; WAN024E27; Start 98; Stop 122
tgctctttgtacctaatctgaccaa

SEQ ID NO: 268328 - DNA, 25 bp, Artificial
  probe
  misc_feature (1)..(25): SEQ ID NO: 624; WAN024E27; Start 103; Stop 127
tttgtacctaatctgaccaagcaaa

SEQ ID NO: 268329 - DNA, 25 bp, Artificial
  probe
  misc_feature (1)..(25): SEQ ID NO: 624; WAN024E27; Start 304; Stop 328
gcaaatcgtaaagtcaatgattaac

SEQ ID NO: 268330 - DNA, 25 bp, Artificial
  probe
  misc_feature (1)..(25): SEQ ID NO: 624; WAN024E27; Start 90; Stop 114
gcttttcttgctctttgtacctaat

SEQ ID NO: 268331 - DNA, 25 bp, Artificial
  probe
  misc_feature (1)..(25): SEQ ID NO: 624; WAN024E27; Start 89; Stop 113
tgcttttcttgctctttgtacctaa

SEQ ID NO: 268332 - DNA, 25 bp, Artificial
  probe
  misc_feature (1)..(25): SEQ ID NO: 624; WAN024E27; Start 104; Stop 128
ttgtacctaatctgaccaagcaaaa

SEQ ID NO: 268333 - DNA, 25 bp, Artificial
  probe
  misc_feature (1)..(25): SEQ ID NO: 624; WAN024E27; Start 88; Stop 112
gtgcttttcttgctctttgtaccta

SEQ ID NO: 268334 - DNA, 25 bp, Artificial
  probe
  misc_feature (1)..(25): SEQ ID NO: 624; WAN024E27; Start 92; Stop 116
ttttcttgctctttgtacctaatct

SEQ ID NO: 268335 - DNA, 25 bp, Artificial
  probe
  misc_feature (1)..(25): SEQ ID NO: 624; WAN024E27; Start 91; Stop 115
cttttcttgctctttgtacctaatc

SEQ ID NO: 268336 - DNA, 25 bp, Artificial
  probe
  misc_feature (1)..(25): SEQ ID NO: 624; WAN024E27; Start 173; Stop 197
tggaaagccaggcagaactttatag

SEQ ID NO: 268337 - DNA, 25 bp, Artificial
  probe
  misc_feature (1)..(25): SEQ ID NO: 624; WAN024E27; Start 172; Stop 196
gtggaaagccaggcagaactttata

SEQ ID NO: 268338 - DNA, 25 bp, Artificial
  probe
  misc_feature (1)..(25): SEQ ID NO: 624; WAN024E27; Start 305; Stop 329
caaatcgtaaagtcaatgattaact

SEQ ID NO: 268339 - DNA, 25 bp, Artificial
  probe
  misc_feature (1)..(25): SEQ ID NO: 624; WAN024E27; Start 175; Stop 199
gaaagccaggcagaactttatagct

SEQ ID NO: 268340 - DNA, 25 bp, Artificial
  probe
  misc_feature (1)..(25): SEQ ID NO: 624; WAN024E27; Start 174; Stop 198
ggaaagccaggcagaactttatagc

SEQ ID NO: 268341 - DNA, 25 bp, Artificial
  probe
  misc_feature (1)..(25): SEQ ID NO: 624; WAN024E27; Start 87; Stop 111
cgtgcttttcttgctctttgtacct

SEQ ID NO: 268342 - DNA, 25 bp, Artificial
  probe
  misc_feature (1)..(25): SEQ ID NO: 624; WAN024E27; Start 134; Stop 158
cagtcaatgacaaaggaaaagcagc

SEQ ID NO: 268343 - DNA, 25 bp, Artificial
  probe
  misc_feature (1)..(25): SEQ ID NO: 624; WAN024E27; Start 133; Stop 157
gcagtcaatgacaaaggaaaagcag

SEQ ID NO: 268344 - DNA, 25 bp, Artificial
  probe
  misc_feature (1)..(25): SEQ ID NO: 624; WAN024E27; Start 78; Stop 102
gattatcagcgtgcttttcttgctc

SEQ ID NO: 268345 - DNA, 25 bp, Artificial
  probe
  misc_feature (1)..(25): SEQ ID NO: 624; WAN024E27; Start 135; Stop 159
agtcaatgacaaaggaaaagcagct

SEQ ID NO: 268346 - DNA, 25 bp, Artificial
  probe
  misc_feature (1)..(25): SEQ ID NO: 624; WAN024E27; Start 79; Stop 103
attatcagcgtgcttttcttgctct

SEQ ID NO: 268347 - DNA, 25 bp, Artificial
  probe
  misc_feature (1)..(25): SEQ ID NO: 624; WAN024E27; Start 81; Stop 105
tatcagcgtgcttttcttgctcttt

SEQ ID NO: 268348 - DNA, 25 bp, Artificial
  probe
  misc_feature (1)..(25): SEQ ID NO: 624; WAN024E27; Start 80; Stop 104
ttatcagcgtgcttttcttgctctt

SEQ ID NO: 268349 - DNA, 25 bp, Artificial
  probe
  misc_feature (1)..(25): SEQ ID NO: 624; WAN024E27; Start 77; Stop 101
tgattatcagcgtgcttttcttgct

SEQ ID NO: 268350 - DNA, 25 bp, Artificial
  probe
  misc_feature (1)..(25): SEQ ID NO: 624; WAN024E27; Start 176; Stop 200
aaagccaggcagaactttatagctt

SEQ ID NO: 268351 - DNA, 25 bp, Artificial
  probe
  misc_feature (1)..(25): SEQ ID NO: 625; WAN024FKC; Start 423; Stop 447
aagtattagagatgagagtgtgtgc

SEQ ID NO: 268352 - DNA, 25 bp, Artificial
  probe
  misc_feature (1)..(25): SEQ ID NO: 625; WAN024FKC; Start 425; Stop 449
gtattagagatgagagtgtgtgcta

SEQ ID NO: 268353 - DNA, 25 bp, Artificial
  probe
  misc_feature (1)..(25): SEQ ID NO: 625; WAN024FKC; Start 427; Stop 451
attagagatgagagtgtgtgctatc

SEQ ID NO: 268354 - DNA, 25 bp, Artificial
  probe
  misc_feature (1)..(25): SEQ ID NO: 625; WAN024FKC; Start 424; Stop 448
agtattagagatgagagtgtgtgct

SEQ ID NO: 268355 - DNA, 25 bp, Artificial
  probe
  misc_feature (1)..(25): SEQ ID NO: 625; WAN024FKC; Start 426; Stop 450
tattagagatgagagtgtgtgctat

SEQ ID NO: 268356 - DNA, 25 bp, Artificial
  probe
  misc_feature (1)..(25): SEQ ID NO: 625; WAN024FKC; Start 422; Stop 446
gaagtattagagatgagagtgtgtg

SEQ ID NO: 268357 - DNA, 25 bp, Artificial
  probe
  misc_feature (1)..(25): SEQ ID NO: 625; WAN024FKC; Start 421; Stop 445
agaagtattagagatgagagtgtgt

SEQ ID NO: 268358 - DNA, 25 bp, Artificial
  probe
  misc_feature (1)..(25): SEQ ID NO: 625; WAN024FKC; Start 429; Stop 453
tagagatgagagtgtgtgctatcaa

SEQ ID NO: 268359 - DNA, 25 bp, Artificial
  probe
  misc_feature (1)..(25): SEQ ID NO: 625; WAN024FKC; Start 428; Stop 452
ttagagatgagagtgtgtgctatca

SEQ ID NO: 268360 - DNA, 25 bp, Artificial
  probe
  misc_feature (1)..(25): SEQ ID NO: 625; WAN024FKC; Start 746; Stop 770
atcagattgagattctaggtgagca

SEQ ID NO: 268361 - DNA, 25 bp, Artificial
  probe
  misc_feature (1)..(25): SEQ ID NO: 625; WAN024FKC; Start 747; Stop 771
tcagattgagattctaggtgagcaa

SEQ ID NO: 268362 - DNA, 25 bp, Artificial
  probe
  misc_feature (1)..(25): SEQ ID NO: 625; WAN024FKC; Start 617; Stop 641
cagtaggaagattggcagaagtgaa

SEQ ID NO: 268363 - DNA, 25 bp, Artificial
  probe
  misc_feature (1)..(25): SEQ ID NO: 625; WAN024FKC; Start 863; Stop 887
ttagttatgttctagctgaagcgtc

SEQ ID NO: 268364 - DNA, 25 bp, Artificial
  probe
  misc_feature (1)..(25): SEQ ID NO: 625; WAN024FKC; Start 745; Stop 769
aatcagattgagattctaggtgagc

SEQ ID NO: 268365 - DNA, 25 bp, Artificial
  probe
  misc_feature (1)..(25): SEQ ID NO: 625; WAN024FKC; Start 868; Stop 892
tatgttctagctgaagcgtcaatat

SEQ ID NO: 268366 - DNA, 25 bp, Artificial
  probe
  misc_feature (1)..(25): SEQ ID NO: 625; WAN024FKC; Start 867; Stop 891
ttatgttctagctgaagcgtcaata

SEQ ID NO: 268367 - DNA, 25 bp, Artificial
  probe
  misc_feature (1)..(25): SEQ ID NO: 625; WAN024FKC; Start 869; Stop 893
atgttctagctgaagcgtcaatatt

SEQ ID NO: 268368 - DNA, 25 bp, Artificial
  probe
  misc_feature (1)..(25): SEQ ID NO: 625; WAN024FKC; Start 984; Stop 1008
actggctaagggaatggaatttatt

SEQ ID NO: 268369 - DNA, 25 bp, Artificial
  probe
  misc_feature (1)..(25): SEQ ID NO: 625; WAN024FKC; Start 1037; Stop 1061
cggatttcaatgaggaagcaataaa

SEQ ID NO: 268370 - DNA, 25 bp, Artificial
  probe
  misc_feature (1)..(25): SEQ ID NO: 625; WAN024FKC; Start 1035; Stop 1059
tacggatttcaatgaggaagcaata

SEQ ID NO: 268371 - DNA, 25 bp, Artificial
  probe
  misc_feature (1)..(25): SEQ ID NO: 625; WAN024FKC; Start 983; Stop 1007
cactggctaagggaatggaatttat

SEQ ID NO: 268372 - DNA, 25 bp, Artificial
  probe
  misc_feature (1)..(25): SEQ ID NO: 625; WAN024FKC; Start 866; Stop 890
gttatgttctagctgaagcgtcaat

SEQ ID NO: 268373 - DNA, 25 bp, Artificial
  probe
  misc_feature (1)..(25): SEQ ID NO: 625; WAN024FKC; Start 1034; Stop 1058
atacggatttcaatgaggaagcaat

SEQ ID NO: 268374 - DNA, 25 bp, Artificial
  probe
  misc_feature (1)..(25): SEQ ID NO: 625; WAN024FKC; Start 911; Stop 935
ctactagaactcaagggtcagaatt

SEQ ID NO: 268375 - DNA, 25 bp, Artificial
  probe
  misc_feature (1)..(25): SEQ ID NO: 625; WAN024FKC; Start 420; Stop 444
tagaagtattagagatgagagtgtg

SEQ ID NO: 268376 - DNA, 25 bp, Artificial
  probe
  misc_feature (1)..(25): SEQ ID NO: 625; WAN024FKC; Start 1036; Stop 1060
acggatttcaatgaggaagcaataa

SEQ ID NO: 268377 - DNA, 25 bp, Artificial
  probe
  misc_feature (1)..(25): SEQ ID NO: 625; WAN024FKC; Start 1033; Stop 1057
aatacggatttcaatgaggaagcaa

SEQ ID NO: 268378 - DNA, 25 bp, Artificial
  probe
  misc_feature (1)..(25): SEQ ID NO: 625; WAN024FKC; Start 304; Stop 328
gcgtatatagaaggaaagccaacta

SEQ ID NO: 268379 - DNA, 25 bp, Artificial
  probe
  misc_feature (1)..(25): SEQ ID NO: 625; WAN024FKC; Start 913; Stop 937
actagaactcaagggtcagaattaa

SEQ ID NO: 268380 - DNA, 25 bp, Artificial
  probe
  misc_feature (1)..(25): SEQ ID NO: 625; WAN024FKC; Start 864; Stop 888
tagttatgttctagctgaagcgtca

SEQ ID NO: 268381 - DNA, 25 bp, Artificial
  probe
  misc_feature (1)..(25): SEQ ID NO: 625; WAN024FKC; Start 300; Stop 324
atttgcgtatatagaaggaaagcca

SEQ ID NO: 268382 - DNA, 25 bp, Artificial
  probe
  misc_feature (1)..(25): SEQ ID NO: 625; WAN024FKC; Start 910; Stop 934
tctactagaactcaagggtcagaat

SEQ ID NO: 268383 - DNA, 25 bp, Artificial
  probe
  misc_feature (1)..(25): SEQ ID NO: 625; WAN024FKC; Start 299; Stop 323
aatttgcgtatatagaaggaaagcc

SEQ ID NO: 268384 - DNA, 25 bp, Artificial
  probe
  misc_feature (1)..(25): SEQ ID NO: 626; WAN024FM9; Start 155; Stop 179
catctgatgttgaagttgagtcctt

SEQ ID NO: 268385 - DNA, 25 bp, Artificial
  probe
  misc_feature (1)..(25): SEQ ID NO: 626; WAN024FM9; Start 153; Stop 177
atcatctgatgttgaagttgagtcc

SEQ ID NO: 268386 - DNA, 25 bp, Artificial
  probe
  misc_feature (1)..(25): SEQ ID NO: 626; WAN024FM9; Start 551; Stop 575
gcaagagcattataacagttggaag

SEQ ID NO: 268387 - DNA, 25 bp, Artificial
  probe
  misc_feature (1)..(25): SEQ ID NO: 626; WAN024FM9; Start 550; Stop 574
agcaagagcattataacagttggaa

SEQ ID NO: 268388 - DNA, 25 bp, Artificial
  probe
  misc_feature (1)..(25): SEQ ID NO: 626; WAN024FM9; Start 549; Stop 573
aagcaagagcattataacagttgga

SEQ ID NO: 268389 - DNA, 25 bp, Artificial
  probe
  misc_feature (1)..(25): SEQ ID NO: 626; WAN024FM9; Start 552; Stop 576
caagagcattataacagttggaaga

SEQ ID NO: 268390 - DNA, 25 bp, Artificial
  probe
  misc_feature (1)..(25): SEQ ID NO: 626; WAN024FM9; Start 152; Stop 176
tatcatctgatgttgaagttgagtc

SEQ ID NO: 268391 - DNA, 25 bp, Artificial
  probe
  misc_feature (1)..(25): SEQ ID NO: 626; WAN024FM9; Start 553; Stop 577
aagagcattataacagttggaagaa

SEQ ID NO: 268392 - DNA, 25 bp, Artificial
  probe
  misc_feature (1)..(25): SEQ ID NO: 626; WAN024FM9; Start 844; Stop 868
cagtatggactaccgattgttagtt

SEQ ID NO: 268393 - DNA, 25 bp, Artificial
  probe
  misc_feature (1)..(25): SEQ ID NO: 626; WAN024FM9; Start 154; Stop 178
tcatctgatgttgaagttgagtcct

SEQ ID NO: 268394 - DNA, 25 bp, Artificial
  probe
  misc_feature (1)..(25): SEQ ID NO: 626; WAN024FM9; Start 554; Stop 578
agagcattataacagttggaagaat

SEQ ID NO: 268395 - DNA, 25 bp, Artificial
  probe
  misc_feature (1)..(25): SEQ ID NO: 626; WAN024FM9; Start 843; Stop 867
acagtatggactaccgattgttagt

SEQ ID NO: 268396 - DNA, 25 bp, Artificial
  probe
  misc_feature (1)..(25): SEQ ID NO: 626; WAN024FM9; Start 347; Stop 371
accaccatagtttagagtttcaaga

SEQ ID NO: 268397 - DNA, 25 bp, Artificial
  probe
  misc_feature (1)..(25): SEQ ID NO: 626; WAN024FM9; Start 634; Stop 658
aaatataaagactgggaatgggaca

SEQ ID NO: 268398 - DNA, 25 bp, Artificial
  probe
  misc_feature (1)..(25): SEQ ID NO: 626; WAN024FM9; Start 348; Stop 372
ccaccatagtttagagtttcaagac

SEQ ID NO: 268399 - DNA, 25 bp, Artificial
  probe
  misc_feature (1)..(25): SEQ ID NO: 626; WAN024FM9; Start 346; Stop 370
gaccaccatagtttagagtttcaag

SEQ ID NO: 268400 - DNA, 25 bp, Artificial
  probe
  misc_feature (1)..(25): SEQ ID NO: 626; WAN024FM9; Start 696; Stop 720
gattactgaattggataaaggtggc

SEQ ID NO: 268401 - DNA, 25 bp, Artificial
  probe
  misc_feature (1)..(25): SEQ ID NO: 626; WAN024FM9; Start 151; Stop 175
atatcatctgatgttgaagttgagt

SEQ ID NO: 268402 - DNA, 25 bp, Artificial
  probe
  misc_feature (1)..(25): SEQ ID NO: 626; WAN024FM9; Start 156; Stop 180
atctgatgttgaagttgagtccttt

SEQ ID NO: 268403 - DNA, 25 bp, Artificial
  probe
  misc_feature (1)..(25): SEQ ID NO: 626; WAN024FM9; Start 639; Stop 663
taaagactgggaatgggacatatac

SEQ ID NO: 268404 - DNA, 25 bp, Artificial
  probe
  misc_feature (1)..(25): SEQ ID NO: 626; WAN024FM9; Start 342; Stop 366
ttgtgaccaccatagtttagagttt

SEQ ID NO: 268405 - DNA, 25 bp, Artificial
  probe
  misc_feature (1)..(25): SEQ ID NO: 626; WAN024FM9; Start 341; Stop 365
tttgtgaccaccatagtttagagtt

SEQ ID NO: 268406 - DNA, 25 bp, Artificial
  probe
  misc_feature (1)..(25): SEQ ID NO: 626; WAN024FM9; Start 150; Stop 174
catatcatctgatgttgaagttgag

SEQ ID NO: 268407 - DNA, 25 bp, Artificial
  probe
  misc_feature (1)..(25): SEQ ID NO: 626; WAN024FM9; Start 635; Stop 659
aatataaagactgggaatgggacat

SEQ ID NO: 268408 - DNA, 25 bp, Artificial
  probe
  misc_feature (1)..(25): SEQ ID NO: 626; WAN024FM9; Start 343; Stop 367
tgtgaccaccatagtttagagtttc

SEQ ID NO: 268409 - DNA, 25 bp, Artificial
  probe
  misc_feature (1)..(25): SEQ ID NO: 626; WAN024FM9; Start 350; Stop 374
accatagtttagagtttcaagacac

SEQ ID NO: 268410 - DNA, 25 bp, Artificial
  probe
  misc_feature (1)..(25): SEQ ID NO: 626; WAN024FM9; Start 349; Stop 373
caccatagtttagagtttcaagaca

SEQ ID NO: 268411 - DNA, 25 bp, Artificial
  probe
  misc_feature (1)..(25): SEQ ID NO: 626; WAN024FM9; Start 695; Stop 719
tgattactgaattggataaaggtgg

SEQ ID NO: 268412 - DNA, 25 bp, Artificial
  probe
  misc_feature (1)..(25): SEQ ID NO: 626; WAN024FM9; Start 345; Stop 369
tgaccaccatagtttagagtttcaa

SEQ ID NO: 268413 - DNA, 25 bp, Artificial
  probe
  misc_feature (1)..(25): SEQ ID NO: 626; WAN024FM9; Start 1065; Stop 1089
agacttaattgaagaaatgacaggg

SEQ ID NO: 268414 - DNA, 25 bp, Artificial
  probe
  misc_feature (1)..(25): SEQ ID NO: 626; WAN024FM9; Start 1052; Stop 1076
taaagcagtgggaagacttaattga

SEQ ID NO: 268415 - DNA, 25 bp, Artificial
  probe
  misc_feature (1)..(25): SEQ ID NO: 626; WAN024FM9; Start 638; Stop 662
ataaagactgggaatgggacatata

SEQ ID NO: 268416 - DNA, 25 bp, Artificial
  probe
  misc_feature (1)..(25): SEQ ID NO: 626; WAN024FM9; Start 637; Stop 661
tataaagactgggaatgggacatat

SEQ ID NO: 268417 - DNA, 25 bp, Artificial
  probe
  misc_feature (1)..(25): SEQ ID NO: 627; WAN024FL7; Start 68; Stop 92
atgttctaccagtcaatctcatctt

SEQ ID NO: 268418 - DNA, 25 bp, Artificial
  probe
  misc_feature (1)..(25): SEQ ID NO: 627; WAN024FL7; Start 64; Stop 88
aatgatgttctaccagtcaatctca

SEQ ID NO: 268419 - DNA, 25 bp, Artificial
  probe
  misc_feature (1)..(25): SEQ ID NO: 627; WAN024FL7; Start 55; Stop 79
cgtgctattaatgatgttctaccag

SEQ ID NO: 268420 - DNA, 25 bp, Artificial
  probe
  misc_feature (1)..(25): SEQ ID NO: 627; WAN024FL7; Start 63; Stop 87
taatgatgttctaccagtcaatctc

SEQ ID NO: 268421 - DNA, 25 bp, Artificial
  probe
  misc_feature (1)..(25): SEQ ID NO: 627; WAN024FL7; Start 479; Stop 503
ttgaagatgagatattgaaccaaga

SEQ ID NO: 268422 - DNA, 25 bp, Artificial
  probe
  misc_feature (1)..(25): SEQ ID NO: 627; WAN024FL7; Start 56; Stop 80
gtgctattaatgatgttctaccagt

SEQ ID NO: 268423 - DNA, 25 bp, Artificial
  probe
  misc_feature (1)..(25): SEQ ID NO: 627; WAN024FL7; Start 480; Stop 504
tgaagatgagatattgaaccaagat

SEQ ID NO: 268424 - DNA, 25 bp, Artificial
  probe
  misc_feature (1)..(25): SEQ ID NO: 627; WAN024FL7; Start 194; Stop 218
gcgatattatctggtggctatggtt

SEQ ID NO: 268425 - DNA, 25 bp, Artificial
  probe
  misc_feature (1)..(25): SEQ ID NO: 627; WAN024FL7; Start 57; Stop 81
tgctattaatgatgttctaccagtc

SEQ ID NO: 268426 - DNA, 25 bp, Artificial
  probe
  misc_feature (1)..(25): SEQ ID NO: 627; WAN024FL7; Start 62; Stop 86
ttaatgatgttctaccagtcaatct

SEQ ID NO: 268427 - DNA, 25 bp, Artificial
  probe
  misc_feature (1)..(25): SEQ ID NO: 627; WAN024FL7; Start 54; Stop 78
acgtgctattaatgatgttctacca

SEQ ID NO: 268428 - DNA, 25 bp, Artificial
  probe
  misc_feature (1)..(25): SEQ ID NO: 627; WAN024FL7; Start 71; Stop 95
ttctaccagtcaatctcatctttcc

SEQ ID NO: 268429 - DNA, 25 bp, Artificial
  probe
  misc_feature (1)..(25): SEQ ID NO: 627; WAN024FL7; Start 264; Stop 288
gtcggtagataaatatgctaaacgc

SEQ ID NO: 268430 - DNA, 25 bp, Artificial
  probe
  misc_feature (1)..(25): SEQ ID NO: 627; WAN024FL7; Start 198; Stop 222
tattatctggtggctatggtttcaa

SEQ ID NO: 268431 - DNA, 25 bp, Artificial
  probe
  misc_feature (1)..(25): SEQ ID NO: 627; WAN024FL7; Start 69; Stop 93
tgttctaccagtcaatctcatcttt

SEQ ID NO: 268432 - DNA, 25 bp, Artificial
  probe
  misc_feature (1)..(25): SEQ ID NO: 627; WAN024FL7; Start 197; Stop 221
atattatctggtggctatggtttca

SEQ ID NO: 268433 - DNA, 25 bp, Artificial
  probe
  misc_feature (1)..(25): SEQ ID NO: 627; WAN024FL7; Start 199; Stop 223
attatctggtggctatggtttcaag

SEQ ID NO: 268434 - DNA, 25 bp, Artificial
  probe
  misc_feature (1)..(25): SEQ ID NO: 627; WAN024FL7; Start 165; Stop 189
ttcggattcaatcaagagtgaggag

SEQ ID NO: 268435 - DNA, 25 bp, Artificial
  probe
  misc_feature (1)..(25): SEQ ID NO: 627; WAN024FL7; Start 70; Stop 94
gttctaccagtcaatctcatctttc

SEQ ID NO: 268436 - DNA, 25 bp, Artificial
  probe
  misc_feature (1)..(25): SEQ ID NO: 627; WAN024FL7; Start 195; Stop 219
cgatattatctggtggctatggttt

SEQ ID NO: 268437 - DNA, 25 bp, Artificial
  probe
  misc_feature (1)..(25): SEQ ID NO: 627; WAN024FL7; Start 58; Stop 82
gctattaatgatgttctaccagtca

SEQ ID NO: 268438 - DNA, 25 bp, Artificial
  probe
  misc_feature (1)..(25): SEQ ID NO: 627; WAN024FL7; Start 363; Stop 387
gaaatataagtcaggtagtttgcca

SEQ ID NO: 268439 - DNA, 25 bp, Artificial
  probe
  misc_feature (1)..(25): SEQ ID NO: 627; WAN024FL7; Start 196; Stop 220
gatattatctggtggctatggtttc

SEQ ID NO: 268440 - DNA, 25 bp, Artificial
  probe
  misc_feature (1)..(25): SEQ ID NO: 627; WAN024FL7; Start 53; Stop 77
tacgtgctattaatgatgttctacc

SEQ ID NO: 268441 - DNA, 25 bp, Artificial
  probe
  misc_feature (1)..(25): SEQ ID NO: 627; WAN024FL7; Start 263; Stop 287
agtcggtagataaatatgctaaacg

SEQ ID NO: 268442 - DNA, 25 bp, Artificial
  probe
  misc_feature (1)..(25): SEQ ID NO: 627; WAN024FL7; Start 478; Stop 502
attgaagatgagatattgaaccaag

SEQ ID NO: 268443 - DNA, 25 bp, Artificial
  probe
  misc_feature (1)..(25): SEQ ID NO: 627; WAN024FL7; Start 257; Stop 281
gtagagagtcggtagataaatatgc

SEQ ID NO: 268444 - DNA, 25 bp, Artificial
  probe
  misc_feature (1)..(25): SEQ ID NO: 627; WAN024FL7; Start 259; Stop 283
agagagtcggtagataaatatgcta

SEQ ID NO: 268445 - DNA, 25 bp, Artificial
  probe
  misc_feature (1)..(25): SEQ ID NO: 627; WAN024FL7; Start 258; Stop 282
tagagagtcggtagataaatatgct

SEQ ID NO: 268446 - DNA, 25 bp, Artificial
  probe
  misc_feature (1)..(25): SEQ ID NO: 627; WAN024FL7; Start 362; Stop 386
tgaaatataagtcaggtagtttgcc

SEQ ID NO: 268447 - DNA, 25 bp, Artificial
  probe
  misc_feature (1)..(25): SEQ ID NO: 627; WAN024FL7; Start 65; Stop 89
atgatgttctaccagtcaatctcat

SEQ ID NO: 268448 - DNA, 25 bp, Artificial
  probe
  misc_feature (1)..(25): SEQ ID NO: 627; WAN024FL7; Start 193; Stop 217
tgcgatattatctggtggctatggt

SEQ ID NO: 268449 - DNA, 25 bp, Artificial
  probe
  misc_feature (1)..(25): SEQ ID NO: 627; WAN024FL7; Start 419; Stop 443
gccttctttctaactatggaggatt

SEQ ID NO: 268450 - DNA, 25 bp, Artificial
  probe
  misc_feature (1)..(25): SEQ ID NO: 628; WAN024GEK; Start 962; Stop 986
taagtcacaaggaagattaccaagc

SEQ ID NO: 268451 - DNA, 25 bp, Artificial
  probe
  misc_feature (1)..(25): SEQ ID NO: 628; WAN024GEK; Start 960; Stop 984
actaagtcacaaggaagattaccaa

SEQ ID NO: 268452 - DNA, 25 bp, Artificial
  probe
  misc_feature (1)..(25): SEQ ID NO: 628; WAN024GEK; Start 961; Stop 985
ctaagtcacaaggaagattaccaag

SEQ ID NO: 268453 - DNA, 25 bp, Artificial
  probe
  misc_feature (1)..(25): SEQ ID NO: 628; WAN024GEK; Start 959; Stop 983
tactaagtcacaaggaagattacca

SEQ ID NO: 268454 - DNA, 25 bp, Artificial
  probe
  misc_feature (1)..(25): SEQ ID NO: 628; WAN024GEK; Start 413; Stop 437
ttgcgactaagatgtattcaacctt

SEQ ID NO: 268455 - DNA, 25 bp, Artificial
  probe
  misc_feature (1)..(25): SEQ ID NO: 628; WAN024GEK; Start 709; Stop 733
gttgactatgtgaccgatctctatc

SEQ ID NO: 268456 - DNA, 25 bp, Artificial
  probe
  misc_feature (1)..(25): SEQ ID NO: 628; WAN024GEK; Start 708; Stop 732
tgttgactatgtgaccgatctctat

SEQ ID NO: 268457 - DNA, 25 bp, Artificial
  probe
  misc_feature (1)..(25): SEQ ID NO: 628; WAN024GEK; Start 360; Stop 384
tattcacgaatctgacctgtctatg

SEQ ID NO: 268458 - DNA, 25 bp, Artificial
  probe
  misc_feature (1)..(25): SEQ ID NO: 628; WAN024GEK; Start 359; Stop 383
ttattcacgaatctgacctgtctat

SEQ ID NO: 268459 - DNA, 25 bp, Artificial
  probe
  misc_feature (1)..(25): SEQ ID NO: 628; WAN024GEK; Start 743; Stop 767
tggaattggctgatattgttgtgac

SEQ ID NO: 268460 - DNA, 25 bp, Artificial
  probe
  misc_feature (1)..(25): SEQ ID NO: 628; WAN024GEK; Start 958; Stop 982
ttactaagtcacaaggaagattacc

SEQ ID NO: 268461 - DNA, 25 bp, Artificial
  probe
  misc_feature (1)..(25): SEQ ID NO: 628; WAN024GEK; Start 712; Stop 736
gactatgtgaccgatctctatcaac

SEQ ID NO: 268462 - DNA, 25 bp, Artificial
  probe
  misc_feature (1)..(25): SEQ ID NO: 628; WAN024GEK; Start 745; Stop 769
gaattggctgatattgttgtgacac

SEQ ID NO: 268463 - DNA, 25 bp, Artificial
  probe
  misc_feature (1)..(25): SEQ ID NO: 628; WAN024GEK; Start 711; Stop 735
tgactatgtgaccgatctctatcaa

SEQ ID NO: 268464 - DNA, 25 bp, Artificial
  probe
  misc_feature (1)..(25): SEQ ID NO: 628; WAN024GEK; Start 710; Stop 734
ttgactatgtgaccgatctctatca

SEQ ID NO: 268465 - DNA, 25 bp, Artificial
  probe
  misc_feature (1)..(25): SEQ ID NO: 628; WAN024GEK; Start 707; Stop 731
gtgttgactatgtgaccgatctcta

SEQ ID NO: 268466 - DNA, 25 bp, Artificial
  probe
  misc_feature (1)..(25): SEQ ID NO: 628; WAN024GEK; Start 968; Stop 992
acaaggaagattaccaagctaagat

SEQ ID NO: 268467 - DNA, 25 bp, Artificial
  probe
  misc_feature (1)..(25): SEQ ID NO: 628; WAN024GEK; Start 969; Stop 993
caaggaagattaccaagctaagatg

SEQ ID NO: 268468 - DNA, 25 bp, Artificial
  probe
  misc_feature (1)..(25): SEQ ID NO: 628; WAN024GEK; Start 967; Stop 991
cacaaggaagattaccaagctaaga

SEQ ID NO: 268469 - DNA, 25 bp, Artificial
  probe
  misc_feature (1)..(25): SEQ ID NO: 628; WAN024GEK; Start 966; Stop 990
tcacaaggaagattaccaagctaag

SEQ ID NO: 268470 - DNA, 25 bp, Artificial
  probe
  misc_feature (1)..(25): SEQ ID NO: 628; WAN024GEK; Start 971; Stop 995
aggaagattaccaagctaagatgaa

SEQ ID NO: 268471 - DNA, 25 bp, Artificial
  probe
  misc_feature (1)..(25): SEQ ID NO: 628; WAN024GEK; Start 970; Stop 994
aaggaagattaccaagctaagatga

SEQ ID NO: 268472 - DNA, 25 bp, Artificial
  probe
  misc_feature (1)..(25): SEQ ID NO: 628; WAN024GEK; Start 713; Stop 737
actatgtgaccgatctctatcaacc

SEQ ID NO: 268473 - DNA, 25 bp, Artificial
  probe
  misc_feature (1)..(25): SEQ ID NO: 628; WAN024GEK; Start 965; Stop 989
gtcacaaggaagattaccaagctaa

SEQ ID NO: 268474 - DNA, 25 bp, Artificial
  probe
  misc_feature (1)..(25): SEQ ID NO: 628; WAN024GEK; Start 744; Stop 768
ggaattggctgatattgttgtgaca

SEQ ID NO: 268475 - DNA, 25 bp, Artificial
  probe
  misc_feature (1)..(25): SEQ ID NO: 628; WAN024GEK; Start 361; Stop 385
attcacgaatctgacctgtctatgg

SEQ ID NO: 268476 - DNA, 25 bp, Artificial
  probe
  misc_feature (1)..(25): SEQ ID NO: 628; WAN024GEK; Start 964; Stop 988
agtcacaaggaagattaccaagcta

SEQ ID NO: 268477 - DNA, 25 bp, Artificial
  probe
  misc_feature (1)..(25): SEQ ID NO: 628; WAN024GEK; Start 619; Stop 643
gaccataagaaagaactaacagagc

SEQ ID NO: 268478 - DNA, 25 bp, Artificial
  probe
  misc_feature (1)..(25): SEQ ID NO: 628; WAN024GEK; Start 620; Stop 644
accataagaaagaactaacagagcg

SEQ ID NO: 268479 - DNA, 25 bp, Artificial
  probe
  misc_feature (1)..(25): SEQ ID NO: 628; WAN024GEK; Start 920; Stop 944
atttgaccttggatagtttggaaga

SEQ ID NO: 268480 - DNA, 25 bp, Artificial
  probe
  misc_feature (1)..(25): SEQ ID NO: 628; WAN024GEK; Start 919; Stop 943
gatttgaccttggatagtttggaag

SEQ ID NO: 268481 - DNA, 25 bp, Artificial
  probe
  misc_feature (1)..(25): SEQ ID NO: 628; WAN024GEK; Start 414; Stop 438
tgcgactaagatgtattcaaccttt

SEQ ID NO: 268482 - DNA, 25 bp, Artificial
  probe
  misc_feature (1)..(25): SEQ ID NO: 628; WAN024GEK; Start 746; Stop 770
aattggctgatattgttgtgacacg

SEQ ID NO: 268483 - DNA, 25 bp, Artificial
  probe
  misc_feature (1)..(25): SEQ ID NO: 629; WAN024CIO; Start 1269; Stop 1293
agaagatagagttattgctggacct

SEQ ID NO: 268484 - DNA, 25 bp, Artificial
  probe
  misc_feature (1)..(25): SEQ ID NO: 629; WAN024CIO; Start 404; Stop 428
ttaatctactcgtatccattgtgcc

SEQ ID NO: 268485 - DNA, 25 bp, Artificial
  probe
  misc_feature (1)..(25): SEQ ID NO: 629; WAN024CIO; Start 1271; Stop 1295
aagatagagttattgctggaccttc

SEQ ID NO: 268486 - DNA, 25 bp, Artificial
  probe
  misc_feature (1)..(25): SEQ ID NO: 629; WAN024CIO; Start 1270; Stop 1294
gaagatagagttattgctggacctt

SEQ ID NO: 268487 - DNA, 25 bp, Artificial
  probe
  misc_feature (1)..(25): SEQ ID NO: 629; WAN024CIO; Start 1272; Stop 1296
agatagagttattgctggaccttct

SEQ ID NO: 268488 - DNA, 25 bp, Artificial
  probe
  misc_feature (1)..(25): SEQ ID NO: 629; WAN024CIO; Start 405; Stop 429
taatctactcgtatccattgtgcca

SEQ ID NO: 268489 - DNA, 25 bp, Artificial
  probe
  misc_feature (1)..(25): SEQ ID NO: 629; WAN024CIO; Start 1276; Stop 1300
agagttattgctggaccttctaaga

SEQ ID NO: 268490 - DNA, 25 bp, Artificial
  probe
  misc_feature (1)..(25): SEQ ID NO: 629; WAN024CIO; Start 1186; Stop 1210
ttagagaatgtcttgaatgaagcag

SEQ ID NO: 268491 - DNA, 25 bp, Artificial
  probe
  misc_feature (1)..(25): SEQ ID NO: 629; WAN024CIO; Start 1187; Stop 1211
tagagaatgtcttgaatgaagcagc

SEQ ID NO: 268492 - DNA, 25 bp, Artificial
  probe
  misc_feature (1)..(25): SEQ ID NO: 629; WAN024CIO; Start 1277; Stop 1301
gagttattgctggaccttctaagaa

SEQ ID NO: 268493 - DNA, 25 bp, Artificial
  probe
  misc_feature (1)..(25): SEQ ID NO: 629; WAN024CIO; Start 1604; Stop 1628
caatggttacagagtacggtatgag

SEQ ID NO: 268494 - DNA, 25 bp, Artificial
  probe
  misc_feature (1)..(25): SEQ ID NO: 629; WAN024CIO; Start 1605; Stop 1629
aatggttacagagtacggtatgagt

SEQ ID NO: 268495 - DNA, 25 bp, Artificial
  probe
  misc_feature (1)..(25): SEQ ID NO: 629; WAN024CIO; Start 407; Stop 431
atctactcgtatccattgtgccatt

SEQ ID NO: 268496 - DNA, 25 bp, Artificial
  probe
  misc_feature (1)..(25): SEQ ID NO: 629; WAN024CIO; Start 406; Stop 430
aatctactcgtatccattgtgccat

SEQ ID NO: 268497 - DNA, 25 bp, Artificial
  probe
  misc_feature (1)..(25): SEQ ID NO: 629; WAN024CIO; Start 1887; Stop 1911
tgaagcagtagaagaggaatctcat

SEQ ID NO: 268498 - DNA, 25 bp, Artificial
  probe
  misc_feature (1)..(25): SEQ ID NO: 629; WAN024CIO; Start 266; Stop 290
cgccatctgttactaaggtagagaa

SEQ ID NO: 268499 - DNA, 25 bp, Artificial
  probe
  misc_feature (1)..(25): SEQ ID NO: 629; WAN024CIO; Start 262; Stop 286
ttcacgccatctgttactaaggtag

SEQ ID NO: 268500 - DNA, 25 bp, Artificial
  probe
  misc_feature (1)..(25): SEQ ID NO: 629; WAN024CIO; Start 1268; Stop 1292
cagaagatagagttattgctggacc

SEQ ID NO: 268501 - DNA, 25 bp, Artificial
  probe
  misc_feature (1)..(25): SEQ ID NO: 629; WAN024CIO; Start 1608; Stop 1632
ggttacagagtacggtatgagtgaa

SEQ ID NO: 268502 - DNA, 25 bp, Artificial
  probe
  misc_feature (1)..(25): SEQ ID NO: 629; WAN024CIO; Start 1606; Stop 1630
atggttacagagtacggtatgagtg

SEQ ID NO: 268503 - DNA, 25 bp, Artificial
  probe
  misc_feature (1)..(25): SEQ ID NO: 629; WAN024CIO; Start 1275; Stop 1299
tagagttattgctggaccttctaag

SEQ ID NO: 268504 - DNA, 25 bp, Artificial
  probe
  misc_feature (1)..(25): SEQ ID NO: 629; WAN024CIO; Start 1888; Stop 1912
gaagcagtagaagaggaatctcatg

SEQ ID NO: 268505 - DNA, 25 bp, Artificial
  probe
  misc_feature (1)..(25): SEQ ID NO: 629; WAN024CIO; Start 403; Stop 427
attaatctactcgtatccattgtgc

SEQ ID NO: 268506 - DNA, 25 bp, Artificial
  probe
  misc_feature (1)..(25): SEQ ID NO: 629; WAN024CIO; Start 1273; Stop 1297
gatagagttattgctggaccttcta

SEQ ID NO: 268507 - DNA, 25 bp, Artificial
  probe
  misc_feature (1)..(25): SEQ ID NO: 629; WAN024CIO; Start 1260; Stop 1284
tgatgaagcagaagatagagttatt

SEQ ID NO: 268508 - DNA, 25 bp, Artificial
  probe
  misc_feature (1)..(25): SEQ ID NO: 629; WAN024CIO; Start 1259; Stop 1283
ttgatgaagcagaagatagagttat

SEQ ID NO: 268509 - DNA, 25 bp, Artificial
  probe
  misc_feature (1)..(25): SEQ ID NO: 629; WAN024CIO; Start 1258; Stop 1282
attgatgaagcagaagatagagtta

SEQ ID NO: 268510 - DNA, 25 bp, Artificial
  probe
  misc_feature (1)..(25): SEQ ID NO: 629; WAN024CIO; Start 1257; Stop 1281
tattgatgaagcagaagatagagtt

SEQ ID NO: 268511 - DNA, 25 bp, Artificial
  probe
  misc_feature (1)..(25): SEQ ID NO: 629; WAN024CIO; Start 1886; Stop 1910
ctgaagcagtagaagaggaatctca

SEQ ID NO: 268512 - DNA, 25 bp, Artificial
  probe
  misc_feature (1)..(25): SEQ ID NO: 629; WAN024CIO; Start 1261; Stop 1285
gatgaagcagaagatagagttattg

SEQ ID NO: 268513 - DNA, 25 bp, Artificial
  probe
  misc_feature (1)..(25): SEQ ID NO: 629; WAN024CIO; Start 442; Stop 466
ttcttcttcctattctctatgatgg

SEQ ID NO: 268514 - DNA, 25 bp, Artificial
  probe
  misc_feature (1)..(25): SEQ ID NO: 629; WAN024CIO; Start 1274; Stop 1298
atagagttattgctggaccttctaa

SEQ ID NO: 268515 - DNA, 25 bp, Artificial
  probe
  misc_feature (1)..(25): SEQ ID NO: 629; WAN024CIO; Start 96; Stop 120
gaataactcaggaggaagtcagcaa

SEQ ID NO: 268516 - DNA, 25 bp, Artificial
  probe
  misc_feature (1)..(25): SEQ ID NO: 630; WAN024D7B; Start 15; Stop 39
ctatgtcattattgctctcacctcc

SEQ ID NO: 268517 - DNA, 25 bp, Artificial
  probe
  misc_feature (1)..(25): SEQ ID NO: 630; WAN024D7B; Start 14; Stop 38
cctatgtcattattgctctcacctc

SEQ ID NO: 268518 - DNA, 25 bp, Artificial
  probe
  misc_feature (1)..(25): SEQ ID NO: 630; WAN024D7B; Start 16; Stop 40
tatgtcattattgctctcacctcct

SEQ ID NO: 268519 - DNA, 25 bp, Artificial
  probe
  misc_feature (1)..(25): SEQ ID NO: 630; WAN024D7B; Start 788; Stop 812
tctacctctatcagacagatgttga

SEQ ID NO: 268520 - DNA, 25 bp, Artificial
  probe
  misc_feature (1)..(25): SEQ ID NO: 630; WAN024D7B; Start 793; Stop 817
ctctatcagacagatgttgaattgc

SEQ ID NO: 268521 - DNA, 25 bp, Artificial
  probe
  misc_feature (1)..(25): SEQ ID NO: 630; WAN024D7B; Start 861; Stop 885
cttagacgacttgagttatggactg

SEQ ID NO: 268522 - DNA, 25 bp, Artificial
  probe
  misc_feature (1)..(25): SEQ ID NO: 630; WAN024D7B; Start 791; Stop 815
acctctatcagacagatgttgaatt

SEQ ID NO: 268523 - DNA, 25 bp, Artificial
  probe
  misc_feature (1)..(25): SEQ ID NO: 630; WAN024D7B; Start 789; Stop 813
ctacctctatcagacagatgttgaa

SEQ ID NO: 268524 - DNA, 25 bp, Artificial
  probe
  misc_feature (1)..(25): SEQ ID NO: 630; WAN024D7B; Start 17; Stop 41
atgtcattattgctctcacctcctt

SEQ ID NO: 268525 - DNA, 25 bp, Artificial
  probe
  misc_feature (1)..(25): SEQ ID NO: 630; WAN024D7B; Start 792; Stop 816
cctctatcagacagatgttgaattg

SEQ ID NO: 268526 - DNA, 25 bp, Artificial
  probe
  misc_feature (1)..(25): SEQ ID NO: 630; WAN024D7B; Start 790; Stop 814
tacctctatcagacagatgttgaat

SEQ ID NO: 268527 - DNA, 25 bp, Artificial
  probe
  misc_feature (1)..(25): SEQ ID NO: 630; WAN024D7B; Start 671; Stop 695
ttagtctcaagcagaatatgacgaa

SEQ ID NO: 268528 - DNA, 25 bp, Artificial
  probe
  misc_feature (1)..(25): SEQ ID NO: 630; WAN024D7B; Start 670; Stop 694
gttagtctcaagcagaatatgacga

SEQ ID NO: 268529 - DNA, 25 bp, Artificial
  probe
  misc_feature (1)..(25): SEQ ID NO: 630; WAN024D7B; Start 18; Stop 42
tgtcattattgctctcacctccttc

SEQ ID NO: 268530 - DNA, 25 bp, Artificial
  probe
  misc_feature (1)..(25): SEQ ID NO: 630; WAN024D7B; Start 669; Stop 693
ggttagtctcaagcagaatatgacg

SEQ ID NO: 268531 - DNA, 25 bp, Artificial
  probe
  misc_feature (1)..(25): SEQ ID NO: 630; WAN024D7B; Start 13; Stop 37
gcctatgtcattattgctctcacct

SEQ ID NO: 268532 - DNA, 25 bp, Artificial
  probe
  misc_feature (1)..(25): SEQ ID NO: 630; WAN024D7B; Start 775; Stop 799
tcttgcctagatgtctacctctatc

SEQ ID NO: 268533 - DNA, 25 bp, Artificial
  probe
  misc_feature (1)..(25): SEQ ID NO: 630; WAN024D7B; Start 777; Stop 801
ttgcctagatgtctacctctatcag

SEQ ID NO: 268534 - DNA, 25 bp, Artificial
  probe
  misc_feature (1)..(25): SEQ ID NO: 630; WAN024D7B; Start 776; Stop 800
cttgcctagatgtctacctctatca

SEQ ID NO: 268535 - DNA, 25 bp, Artificial
  probe
  misc_feature (1)..(25): SEQ ID NO: 630; WAN024D7B; Start 860; Stop 884
gcttagacgacttgagttatggact

SEQ ID NO: 268536 - DNA, 25 bp, Artificial
  probe
  misc_feature (1)..(25): SEQ ID NO: 630; WAN024D7B; Start 862; Stop 886
ttagacgacttgagttatggactgc

SEQ ID NO: 268537 - DNA, 25 bp, Artificial
  probe
  misc_feature (1)..(25): SEQ ID NO: 630; WAN024D7B; Start 778; Stop 802
tgcctagatgtctacctctatcaga

SEQ ID NO: 268538 - DNA, 25 bp, Artificial
  probe
  misc_feature (1)..(25): SEQ ID NO: 630; WAN024D7B; Start 20; Stop 44
tcattattgctctcacctccttcct

SEQ ID NO: 268539 - DNA, 25 bp, Artificial
  probe
  misc_feature (1)..(25): SEQ ID NO: 630; WAN024D7B; Start 19; Stop 43
gtcattattgctctcacctccttcc

SEQ ID NO: 268540 - DNA, 25 bp, Artificial
  probe
  misc_feature (1)..(25): SEQ ID NO: 630; WAN024D7B; Start 875; Stop 899
gttatggactgcgaaatatcaagga

SEQ ID NO: 268541 - DNA, 25 bp, Artificial
  probe
  misc_feature (1)..(25): SEQ ID NO: 630; WAN024D7B; Start 481; Stop 505
caggctttgaaattggatagagaaa

SEQ ID NO: 268542 - DNA, 25 bp, Artificial
  probe
  misc_feature (1)..(25): SEQ ID NO: 630; WAN024D7B; Start 774; Stop 798
atcttgcctagatgtctacctctat

SEQ ID NO: 268543 - DNA, 25 bp, Artificial
  probe
  misc_feature (1)..(25): SEQ ID NO: 630; WAN024D7B; Start 682; Stop 706
cagaatatgacgaaattgcctaaga

SEQ ID NO: 268544 - DNA, 25 bp, Artificial
  probe
  misc_feature (1)..(25): SEQ ID NO: 630; WAN024D7B; Start 666; Stop 690
tagggttagtctcaagcagaatatg

SEQ ID NO: 268545 - DNA, 25 bp, Artificial
  probe
  misc_feature (1)..(25): SEQ ID NO: 630; WAN024D7B; Start 664; Stop 688
cttagggttagtctcaagcagaata

SEQ ID NO: 268546 - DNA, 25 bp, Artificial
  probe
  misc_feature (1)..(25): SEQ ID NO: 630; WAN024D7B; Start 858; Stop 882
gagcttagacgacttgagttatgga

SEQ ID NO: 268547 - DNA, 25 bp, Artificial
  probe
  misc_feature (1)..(25): SEQ ID NO: 630; WAN024D7B; Start 794; Stop 818
tctatcagacagatgttgaattgca

SEQ ID NO: 268548 - DNA, 25 bp, Artificial
  probe
  misc_feature (1)..(25): SEQ ID NO: 630; WAN024D7B; Start 663; Stop 687
tcttagggttagtctcaagcagaat

SEQ ID NO: 268549 - DNA, 25 bp, Artificial
  probe
  misc_feature (1)..(25): SEQ ID NO: 631; WAN024C5A; Start 1451; Stop 1475
catactaccaatacgaccgcttata

SEQ ID NO: 268550 - DNA, 25 bp, Artificial
  probe
  misc_feature (1)..(25): SEQ ID NO: 631; WAN024C5A; Start 1453; Stop 1477
tactaccaatacgaccgcttatatc

SEQ ID NO: 268551 - DNA, 25 bp, Artificial
  probe
  misc_feature (1)..(25): SEQ ID NO: 631; WAN024C5A; Start 1452; Stop 1476
atactaccaatacgaccgcttatat

SEQ ID NO: 268552 - DNA, 25 bp, Artificial
  probe
  misc_feature (1)..(25): SEQ ID NO: 631; WAN024C5A; Start 1450; Stop 1474
ccatactaccaatacgaccgcttat

SEQ ID NO: 268553 - DNA, 25 bp, Artificial
  probe
  misc_feature (1)..(25): SEQ ID NO: 631; WAN024C5A; Start 1465; Stop 1489
gaccgcttatatcgtaagtaactaa

SEQ ID NO: 268554 - DNA, 25 bp, Artificial
  probe
  misc_feature (1)..(25): SEQ ID NO: 631; WAN024C5A; Start 561; Stop 585
tatgtccaatatgtaccacgaccaa

SEQ ID NO: 268555 - DNA, 25 bp, Artificial
  probe
  misc_feature (1)..(25): SEQ ID NO: 631; WAN024C5A; Start 197; Stop 221
aggttgaggttgtgattgccattaa

SEQ ID NO: 268556 - DNA, 25 bp, Artificial
  probe
  misc_feature (1)..(25): SEQ ID NO: 631; WAN024C5A; Start 558; Stop 582
gtgtatgtccaatatgtaccacgac

SEQ ID NO: 268557 - DNA, 25 bp, Artificial
  probe
  misc_feature (1)..(25): SEQ ID NO: 631; WAN024C5A; Start 554; Stop 578
caacgtgtatgtccaatatgtacca

SEQ ID NO: 268558 - DNA, 25 bp, Artificial
  probe
  misc_feature (1)..(25): SEQ ID NO: 631; WAN024C5A; Start 198; Stop 222
ggttgaggttgtgattgccattaat

SEQ ID NO: 268559 - DNA, 25 bp, Artificial
  probe
  misc_feature (1)..(25): SEQ ID NO: 631; WAN024C5A; Start 256; Stop 280
gacttaggcatttcttatgaccaag

SEQ ID NO: 268560 - DNA, 25 bp, Artificial
  probe
  misc_feature (1)..(25): SEQ ID NO: 631; WAN024C5A; Start 1440; Stop 1464
aacctttgacccatactaccaatac

SEQ ID NO: 268561 - DNA, 25 bp, Artificial
  probe
  misc_feature (1)..(25): SEQ ID NO: 631; WAN024C5A; Start 1438; Stop 1462
gtaacctttgacccatactaccaat

SEQ ID NO: 268562 - DNA, 25 bp, Artificial
  probe
  misc_feature (1)..(25): SEQ ID NO: 631; WAN024C5A; Start 853; Stop 877
atggttggtttcgctattacagatg

SEQ ID NO: 268563 - DNA, 25 bp, Artificial
  probe
  misc_feature (1)..(25): SEQ ID NO: 631; WAN024C5A; Start 255; Stop 279
cgacttaggcatttcttatgaccaa

SEQ ID NO: 268564 - DNA, 25 bp, Artificial
  probe
  misc_feature (1)..(25): SEQ ID NO: 631; WAN024C5A; Start 1464; Stop 1488
cgaccgcttatatcgtaagtaacta

SEQ ID NO: 268565 - DNA, 25 bp, Artificial
  probe
  misc_feature (1)..(25): SEQ ID NO: 631; WAN024C5A; Start 1410; Stop 1434
gaatgtccttcgtaaactgggtatc

SEQ ID NO: 268566 - DNA, 25 bp, Artificial
  probe
  misc_feature (1)..(25): SEQ ID NO: 631; WAN024C5A; Start 560; Stop 584
gtatgtccaatatgtaccacgacca

SEQ ID NO: 268567 - DNA, 25 bp, Artificial
  probe
  misc_feature (1)..(25): SEQ ID NO: 631; WAN024C5A; Start 559; Stop 583
tgtatgtccaatatgtaccacgacc

SEQ ID NO: 268568 - DNA, 25 bp, Artificial
  probe
  misc_feature (1)..(25): SEQ ID NO: 631; WAN024C5A; Start 1466; Stop 1490
accgcttatatcgtaagtaactaat

SEQ ID NO: 268569 - DNA, 25 bp, Artificial
  probe
  misc_feature (1)..(25): SEQ ID NO: 631; WAN024C5A; Start 568; Stop 592
aatatgtaccacgaccaaatcaatg

SEQ ID NO: 268570 - DNA, 25 bp, Artificial
  probe
  misc_feature (1)..(25): SEQ ID NO: 631; WAN024C5A; Start 567; Stop 591
caatatgtaccacgaccaaatcaat

SEQ ID NO: 268571 - DNA, 25 bp, Artificial
  probe
  misc_feature (1)..(25): SEQ ID NO: 631; WAN024C5A; Start 1443; Stop 1467
ctttgacccatactaccaatacgac

SEQ ID NO: 268572 - DNA, 25 bp, Artificial
  probe
  misc_feature (1)..(25): SEQ ID NO: 631; WAN024C5A; Start 1412; Stop 1436
atgtccttcgtaaactgggtatcaa

SEQ ID NO: 268573 - DNA, 25 bp, Artificial
  probe
  misc_feature (1)..(25): SEQ ID NO: 631; WAN024C5A; Start 1411; Stop 1435
aatgtccttcgtaaactgggtatca

SEQ ID NO: 268574 - DNA, 25 bp, Artificial
  probe
  misc_feature (1)..(25): SEQ ID NO: 631; WAN024C5A; Start 1409; Stop 1433
agaatgtccttcgtaaactgggtat

SEQ ID NO: 268575 - DNA, 25 bp, Artificial
  probe
  misc_feature (1)..(25): SEQ ID NO: 631; WAN024C5A; Start 1439; Stop 1463
taacctttgacccatactaccaata

SEQ ID NO: 268576 - DNA, 25 bp, Artificial
  probe
  misc_feature (1)..(25): SEQ ID NO: 631; WAN024C5A; Start 1408; Stop 1432
aagaatgtccttcgtaaactgggta

SEQ ID NO: 268577 - DNA, 25 bp, Artificial
  probe
  misc_feature (1)..(25): SEQ ID NO: 631; WAN024C5A; Start 743; Stop 767
ccactgtcaactacaaccgtgatat

SEQ ID NO: 268578 - DNA, 25 bp, Artificial
  probe
  misc_feature (1)..(25): SEQ ID NO: 631; WAN024C5A; Start 397; Stop 421
aacggaattgattcttatcttcatt

SEQ ID NO: 268579 - DNA, 25 bp, Artificial
  probe
  misc_feature (1)..(25): SEQ ID NO: 631; WAN024C5A; Start 196; Stop 220
caggttgaggttgtgattgccatta

SEQ ID NO: 268580 - DNA, 25 bp, Artificial
  probe
  misc_feature (1)..(25): SEQ ID NO: 631; WAN024C5A; Start 553; Stop 577
gcaacgtgtatgtccaatatgtacc

SEQ ID NO: 268581 - DNA, 25 bp, Artificial
  probe
  misc_feature (1)..(25): SEQ ID NO: 631; WAN024C5A; Start 552; Stop 576
ggcaacgtgtatgtccaatatgtac

SEQ ID NO: 268582 - DNA, 25 bp, Artificial
  probe
  misc_feature (1)..(25): SEQ ID NO: 632; WAN024DT7; Start 365; Stop 389
ttgcgattgtctatctcatcatctg

SEQ ID NO: 268583 - DNA, 25 bp, Artificial
  probe
  misc_feature (1)..(25): SEQ ID NO: 632; WAN024DT7; Start 430; Stop 454
atcaatcaactcttggagcatagaa

SEQ ID NO: 268584 - DNA, 25 bp, Artificial
  probe
  misc_feature (1)..(25): SEQ ID NO: 632; WAN024DT7; Start 429; Stop 453
catcaatcaactcttggagcataga

SEQ ID NO: 268585 - DNA, 25 bp, Artificial
  probe
  misc_feature (1)..(25): SEQ ID NO: 632; WAN024DT7; Start 428; Stop 452
acatcaatcaactcttggagcatag

SEQ ID NO: 268586 - DNA, 25 bp, Artificial
  probe
  misc_feature (1)..(25): SEQ ID NO: 632; WAN024DT7; Start 427; Stop 451
cacatcaatcaactcttggagcata

SEQ ID NO: 268587 - DNA, 25 bp, Artificial
  probe
  misc_feature (1)..(25): SEQ ID NO: 632; WAN024DT7; Start 422; Stop 446
tagatcacatcaatcaactcttgga

SEQ ID NO: 268588 - DNA, 25 bp, Artificial
  probe
  misc_feature (1)..(25): SEQ ID NO: 632; WAN024DT7; Start 421; Stop 445
gtagatcacatcaatcaactcttgg

SEQ ID NO: 268589 - DNA, 25 bp, Artificial
  probe
  misc_feature (1)..(25): SEQ ID NO: 632; WAN024DT7; Start 423; Stop 447
agatcacatcaatcaactcttggag

SEQ ID NO: 268590 - DNA, 25 bp, Artificial
  probe
  misc_feature (1)..(25): SEQ ID NO: 632; WAN024DT7; Start 366; Stop 390
tgcgattgtctatctcatcatctgg

SEQ ID NO: 268591 - DNA, 25 bp, Artificial
  probe
  misc_feature (1)..(25): SEQ ID NO: 632; WAN024DT7; Start 420; Stop 444
agtagatcacatcaatcaactcttg

SEQ ID NO: 268592 - DNA, 25 bp, Artificial
  probe
  misc_feature (1)..(25): SEQ ID NO: 632; WAN024DT7; Start 378; Stop 402
tctcatcatctgggctattctctat

SEQ ID NO: 268593 - DNA, 25 bp, Artificial
  probe
  misc_feature (1)..(25): SEQ ID NO: 632; WAN024DT7; Start 377; Stop 401
atctcatcatctgggctattctcta

SEQ ID NO: 268594 - DNA, 25 bp, Artificial
  probe
  misc_feature (1)..(25): SEQ ID NO: 632; WAN024DT7; Start 376; Stop 400
tatctcatcatctgggctattctct

SEQ ID NO: 268595 - DNA, 25 bp, Artificial
  probe
  misc_feature (1)..(25): SEQ ID NO: 632; WAN024DT7; Start 375; Stop 399
ctatctcatcatctgggctattctc

SEQ ID NO: 268596 - DNA, 25 bp, Artificial
  probe
  misc_feature (1)..(25): SEQ ID NO: 632; WAN024DT7; Start 374; Stop 398
tctatctcatcatctgggctattct

SEQ ID NO: 268597 - DNA, 25 bp, Artificial
  probe
  misc_feature (1)..(25): SEQ ID NO: 632; WAN024DT7; Start 373; Stop 397
gtctatctcatcatctgggctattc

SEQ ID NO: 268598 - DNA, 25 bp, Artificial
  probe
  misc_feature (1)..(25): SEQ ID NO: 632; WAN024DT7; Start 372; Stop 396
tgtctatctcatcatctgggctatt

SEQ ID NO: 268599 - DNA, 25 bp, Artificial
  probe
  misc_feature (1)..(25): SEQ ID NO: 632; WAN024DT7; Start 371; Stop 395
ttgtctatctcatcatctgggctat

SEQ ID NO: 268600 - DNA, 25 bp, Artificial
  probe
  misc_feature (1)..(25): SEQ ID NO: 632; WAN024DT7; Start 370; Stop 394
attgtctatctcatcatctgggcta

SEQ ID NO: 268601 - DNA, 25 bp, Artificial
  probe
  misc_feature (1)..(25): SEQ ID NO: 632; WAN024DT7; Start 364; Stop 388
tttgcgattgtctatctcatcatct

SEQ ID NO: 268602 - DNA, 25 bp, Artificial
  probe
  misc_feature (1)..(25): SEQ ID NO: 632; WAN024DT7; Start 363; Stop 387
gtttgcgattgtctatctcatcatc

SEQ ID NO: 268603 - DNA, 25 bp, Artificial
  probe
  misc_feature (1)..(25): SEQ ID NO: 632; WAN024DT7; Start 257; Stop 281
ccactctgactcatttcttccttat

SEQ ID NO: 268604 - DNA, 25 bp, Artificial
  probe
  misc_feature (1)..(25): SEQ ID NO: 632; WAN024DT7; Start 419; Stop 443
aagtagatcacatcaatcaactctt

SEQ ID NO: 268605 - DNA, 25 bp, Artificial
  probe
  misc_feature (1)..(25): SEQ ID NO: 632; WAN024DT7; Start 362; Stop 386
agtttgcgattgtctatctcatcat

SEQ ID NO: 268606 - DNA, 25 bp, Artificial
  probe
  misc_feature (1)..(25): SEQ ID NO: 632; WAN024DT7; Start 424; Stop 448
gatcacatcaatcaactcttggagc

SEQ ID NO: 268607 - DNA, 25 bp, Artificial
  probe
  misc_feature (1)..(25): SEQ ID NO: 632; WAN024DT7; Start 426; Stop 450
tcacatcaatcaactcttggagcat

SEQ ID NO: 268608 - DNA, 25 bp, Artificial
  probe
  misc_feature (1)..(25): SEQ ID NO: 632; WAN024DT7; Start 425; Stop 449
atcacatcaatcaactcttggagca

SEQ ID NO: 268609 - DNA, 25 bp, Artificial
  probe
  misc_feature (1)..(25): SEQ ID NO: 632; WAN024DT7; Start 98; Stop 122
caccactaaatccctactctctcat

SEQ ID NO: 268610 - DNA, 25 bp, Artificial
  probe
  misc_feature (1)..(25): SEQ ID NO: 632; WAN024DT7; Start 260; Stop 284
ctctgactcatttcttccttatgct

SEQ ID NO: 268611 - DNA, 25 bp, Artificial
  probe
  misc_feature (1)..(25): SEQ ID NO: 632; WAN024DT7; Start 379; Stop 403
ctcatcatctgggctattctctata

SEQ ID NO: 268612 - DNA, 25 bp, Artificial
  probe
  misc_feature (1)..(25): SEQ ID NO: 632; WAN024DT7; Start 261; Stop 285
tctgactcatttcttccttatgctg

SEQ ID NO: 268613 - DNA, 25 bp, Artificial
  probe
  misc_feature (1)..(25): SEQ ID NO: 632; WAN024DT7; Start 259; Stop 283
actctgactcatttcttccttatgc

SEQ ID NO: 268614 - DNA, 25 bp, Artificial
  probe
  misc_feature (1)..(25): SEQ ID NO: 632; WAN024DT7; Start 258; Stop 282
cactctgactcatttcttccttatg

SEQ ID NO: 268615 - DNA, 25 bp, Artificial
  probe
  misc_feature (1)..(25): SEQ ID NO: 633; WAN024G68; Start 477; Stop 501
aatctctcatatcaactccttccac

SEQ ID NO: 268616 - DNA, 25 bp, Artificial
  probe
  misc_feature (1)..(25): SEQ ID NO: 633; WAN024G68; Start 478; Stop 502
atctctcatatcaactccttccacc

SEQ ID NO: 268617 - DNA, 25 bp, Artificial
  probe
  misc_feature (1)..(25): SEQ ID NO: 633; WAN024G68; Start 557; Stop 581
aagatggtatcattgaggctgtcat

SEQ ID NO: 268618 - DNA, 25 bp, Artificial
  probe
  misc_feature (1)..(25): SEQ ID NO: 633; WAN024G68; Start 480; Stop 504
ctctcatatcaactccttccaccac

SEQ ID NO: 268619 - DNA, 25 bp, Artificial
  probe
  misc_feature (1)..(25): SEQ ID NO: 633; WAN024G68; Start 479; Stop 503
tctctcatatcaactccttccacca

SEQ ID NO: 268620 - DNA, 25 bp, Artificial
  probe
  misc_feature (1)..(25): SEQ ID NO: 633; WAN024G68; Start 400; Stop 424
caggattcttctgttgagtacacaa

SEQ ID NO: 268621 - DNA, 25 bp, Artificial
  probe
  misc_feature (1)..(25): SEQ ID NO: 633; WAN024G68; Start 395; Stop 419
attggcaggattcttctgttgagta

SEQ ID NO: 268622 - DNA, 25 bp, Artificial
  probe
  misc_feature (1)..(25): SEQ ID NO: 633; WAN024G68; Start 476; Stop 500
aaatctctcatatcaactccttcca

SEQ ID NO: 268623 - DNA, 25 bp, Artificial
  probe
  misc_feature (1)..(25): SEQ ID NO: 633; WAN024G68; Start 12; Stop 36
agttattgggattacaggaaacgaa

SEQ ID NO: 268624 - DNA, 25 bp, Artificial
  probe
  misc_feature (1)..(25): SEQ ID NO: 633; WAN024G68; Start 555; Stop 579
taaagatggtatcattgaggctgtc

SEQ ID NO: 268625 - DNA, 25 bp, Artificial
  probe
  misc_feature (1)..(25): SEQ ID NO: 633; WAN024G68; Start 554; Stop 578
ctaaagatggtatcattgaggctgt

SEQ ID NO: 268626 - DNA, 25 bp, Artificial
  probe
  misc_feature (1)..(25): SEQ ID NO: 633; WAN024G68; Start 13; Stop 37
gttattgggattacaggaaacgaaa

SEQ ID NO: 268627 - DNA, 25 bp, Artificial
  probe
  misc_feature (1)..(25): SEQ ID NO: 633; WAN024G68; Start 11; Stop 35
cagttattgggattacaggaaacga

SEQ ID NO: 268628 - DNA, 25 bp, Artificial
  probe
  misc_feature (1)..(25): SEQ ID NO: 633; WAN024G68; Start 373; Stop 397
ttgtaccaagatatcgaagaccatt

SEQ ID NO: 268629 - DNA, 25 bp, Artificial
  probe
  misc_feature (1)..(25): SEQ ID NO: 633; WAN024G68; Start 374; Stop 398
tgtaccaagatatcgaagaccattg

SEQ ID NO: 268630 - DNA, 25 bp, Artificial
  probe
  misc_feature (1)..(25): SEQ ID NO: 633; WAN024G68; Start 475; Stop 499
gaaatctctcatatcaactccttcc

SEQ ID NO: 268631 - DNA, 25 bp, Artificial
  probe
  misc_feature (1)..(25): SEQ ID NO: 633; WAN024G68; Start 558; Stop 582
agatggtatcattgaggctgtcatg

SEQ ID NO: 268632 - DNA, 25 bp, Artificial
  probe
  misc_feature (1)..(25): SEQ ID NO: 633; WAN024G68; Start 481; Stop 505
tctcatatcaactccttccaccacc

SEQ ID NO: 268633 - DNA, 25 bp, Artificial
  probe
  misc_feature (1)..(25): SEQ ID NO: 633; WAN024G68; Start 551; Stop 575
atcctaaagatggtatcattgaggc

SEQ ID NO: 268634 - DNA, 25 bp, Artificial
  probe
  misc_feature (1)..(25): SEQ ID NO: 633; WAN024G68; Start 399; Stop 423
gcaggattcttctgttgagtacaca

SEQ ID NO: 268635 - DNA, 25 bp, Artificial
  probe
  misc_feature (1)..(25): SEQ ID NO: 633; WAN024G68; Start 396; Stop 420
ttggcaggattcttctgttgagtac

SEQ ID NO: 268636 - DNA, 25 bp, Artificial
  probe
  misc_feature (1)..(25): SEQ ID NO: 633; WAN024G68; Start 474; Stop 498
agaaatctctcatatcaactccttc

SEQ ID NO: 268637 - DNA, 25 bp, Artificial
  probe
  misc_feature (1)..(25): SEQ ID NO: 633; WAN024G68; Start 553; Stop 577
cctaaagatggtatcattgaggctg

SEQ ID NO: 268638 - DNA, 25 bp, Artificial
  probe
  misc_feature (1)..(25): SEQ ID NO: 633; WAN024G68; Start 552; Stop 576
tcctaaagatggtatcattgaggct

SEQ ID NO: 268639 - DNA, 25 bp, Artificial
  probe
  misc_feature (1)..(25): SEQ ID NO: 633; WAN024G68; Start 484; Stop 508
catatcaactccttccaccaccaga

SEQ ID NO: 268640 - DNA, 25 bp, Artificial
  probe
  misc_feature (1)..(25): SEQ ID NO: 633; WAN024G68; Start 483; Stop 507
tcatatcaactccttccaccaccag

SEQ ID NO: 268641 - DNA, 25 bp, Artificial
  probe
  misc_feature (1)..(25): SEQ ID NO: 633; WAN024G68; Start 482; Stop 506
ctcatatcaactccttccaccacca

SEQ ID NO: 268642 - DNA, 25 bp, Artificial
  probe
  misc_feature (1)..(25): SEQ ID NO: 633; WAN024G68; Start 556; Stop 580
aaagatggtatcattgaggctgtca

SEQ ID NO: 268643 - DNA, 25 bp, Artificial
  probe
  misc_feature (1)..(25): SEQ ID NO: 633; WAN024G68; Start 383; Stop 407
atatcgaagaccattggcaggattc

SEQ ID NO: 268644 - DNA, 25 bp, Artificial
  probe
  misc_feature (1)..(25): SEQ ID NO: 633; WAN024G68; Start 394; Stop 418
cattggcaggattcttctgttgagt

SEQ ID NO: 268645 - DNA, 25 bp, Artificial
  probe
  misc_feature (1)..(25): SEQ ID NO: 633; WAN024G68; Start 8; Stop 32
aaccagttattgggattacaggaaa

SEQ ID NO: 268646 - DNA, 25 bp, Artificial
  probe
  misc_feature (1)..(25): SEQ ID NO: 633; WAN024G68; Start 7; Stop 31
aaaccagttattgggattacaggaa

SEQ ID NO: 268647 - DNA, 25 bp, Artificial
  probe
  misc_feature (1)..(25): SEQ ID NO: 633; WAN024G68; Start 662; Stop 686
tctttgactatgtcgttaatgaact

SEQ ID NO: 268648 - DNA, 25 bp, Artificial
  probe
  misc_feature (1)..(25): SEQ ID NO: 634; WAN024DCA; Start 292; Stop 316
gtaacccaatttcctcacatcatag

SEQ ID NO: 268649 - DNA, 25 bp, Artificial
  probe
  misc_feature (1)..(25): SEQ ID NO: 634; WAN024DCA; Start 284; Stop 308
ttctctttgtaacccaatttcctca

SEQ ID NO: 268650 - DNA, 25 bp, Artificial
  probe
  misc_feature (1)..(25): SEQ ID NO: 634; WAN024DCA; Start 283; Stop 307
tttctctttgtaacccaatttcctc

SEQ ID NO: 268651 - DNA, 25 bp, Artificial
  probe
  misc_feature (1)..(25): SEQ ID NO: 634; WAN024DCA; Start 310; Stop 334
atcatagggcaattcgtaactgaaa

SEQ ID NO: 268652 - DNA, 25 bp, Artificial
  probe
  misc_feature (1)..(25): SEQ ID NO: 634; WAN024DCA; Start 109; Stop 133
ctaagtcatcaggaactccttgcta

SEQ ID NO: 268653 - DNA, 25 bp, Artificial
  probe
  misc_feature (1)..(25): SEQ ID NO: 634; WAN024DCA; Start 285; Stop 309
tctctttgtaacccaatttcctcac

SEQ ID NO: 268654 - DNA, 25 bp, Artificial
  probe
  misc_feature (1)..(25): SEQ ID NO: 634; WAN024DCA; Start 291; Stop 315
tgtaacccaatttcctcacatcata

SEQ ID NO: 268655 - DNA, 25 bp, Artificial
  probe
  misc_feature (1)..(25): SEQ ID NO: 634; WAN024DCA; Start 288; Stop 312
ctttgtaacccaatttcctcacatc

SEQ ID NO: 268656 - DNA, 25 bp, Artificial
  probe
  misc_feature (1)..(25): SEQ ID NO: 634; WAN024DCA; Start 110; Stop 134
taagtcatcaggaactccttgctac

SEQ ID NO: 268657 - DNA, 25 bp, Artificial
  probe
  misc_feature (1)..(25): SEQ ID NO: 634; WAN024DCA; Start 290; Stop 314
ttgtaacccaatttcctcacatcat

SEQ ID NO: 268658 - DNA, 25 bp, Artificial
  probe
  misc_feature (1)..(25): SEQ ID NO: 634; WAN024DCA; Start 287; Stop 311
tctttgtaacccaatttcctcacat

SEQ ID NO: 268659 - DNA, 25 bp, Artificial
  probe
  misc_feature (1)..(25): SEQ ID NO: 634; WAN024DCA; Start 309; Stop 333
catcatagggcaattcgtaactgaa

SEQ ID NO: 268660 - DNA, 25 bp, Artificial
  probe
  misc_feature (1)..(25): SEQ ID NO: 634; WAN024DCA; Start 305; Stop 329
ctcacatcatagggcaattcgtaac

SEQ ID NO: 268661 - DNA, 25 bp, Artificial
  probe
  misc_feature (1)..(25): SEQ ID NO: 634; WAN024DCA; Start 289; Stop 313
tttgtaacccaatttcctcacatca

SEQ ID NO: 268662 - DNA, 25 bp, Artificial
  probe
  misc_feature (1)..(25): SEQ ID NO: 634; WAN024DCA; Start 307; Stop 331
cacatcatagggcaattcgtaactg

SEQ ID NO: 268663 - DNA, 25 bp, Artificial
  probe
  misc_feature (1)..(25): SEQ ID NO: 634; WAN024DCA; Start 286; Stop 310
ctctttgtaacccaatttcctcaca

SEQ ID NO: 268664 - DNA, 25 bp, Artificial
  probe
  misc_feature (1)..(25): SEQ ID NO: 634; WAN024DCA; Start 306; Stop 330
tcacatcatagggcaattcgtaact

SEQ ID NO: 268665 - DNA, 25 bp, Artificial
  probe
  misc_feature (1)..(25): SEQ ID NO: 634; WAN024DCA; Start 293; Stop 317
taacccaatttcctcacatcatagg

SEQ ID NO: 268666 - DNA, 25 bp, Artificial
  probe
  misc_feature (1)..(25): SEQ ID NO: 634; WAN024DCA; Start 29; Stop 53
acaatgaaatcttagcctatctctt

SEQ ID NO: 268667 - DNA, 25 bp, Artificial
  probe
  misc_feature (1)..(25): SEQ ID NO: 634; WAN024DCA; Start 28; Stop 52
aacaatgaaatcttagcctatctct

SEQ ID NO: 268668 - DNA, 25 bp, Artificial
  probe
  misc_feature (1)..(25): SEQ ID NO: 634; WAN024DCA; Start 299; Stop 323
aatttcctcacatcatagggcaatt

SEQ ID NO: 268669 - DNA, 25 bp, Artificial
  probe
  misc_feature (1)..(25): SEQ ID NO: 634; WAN024DCA; Start 300; Stop 324
atttcctcacatcatagggcaattc

SEQ ID NO: 268670 - DNA, 25 bp, Artificial
  probe
  misc_feature (1)..(25): SEQ ID NO: 634; WAN024DCA; Start 308; Stop 332
acatcatagggcaattcgtaactga

SEQ ID NO: 268671 - DNA, 25 bp, Artificial
  probe
  misc_feature (1)..(25): SEQ ID NO: 634; WAN024DCA; Start 298; Stop 322
caatttcctcacatcatagggcaat

SEQ ID NO: 268672 - DNA, 25 bp, Artificial
  probe
  misc_feature (1)..(25): SEQ ID NO: 634; WAN024DCA; Start 30; Stop 54
caatgaaatcttagcctatctcttt

SEQ ID NO: 268673 - DNA, 25 bp, Artificial
  probe
  misc_feature (1)..(25): SEQ ID NO: 634; WAN024DCA; Start 304; Stop 328
cctcacatcatagggcaattcgtaa

SEQ ID NO: 268674 - DNA, 25 bp, Artificial
  probe
  misc_feature (1)..(25): SEQ ID NO: 634; WAN024DCA; Start 27; Stop 51
taacaatgaaatcttagcctatctc

SEQ ID NO: 268675 - DNA, 25 bp, Artificial
  probe
  misc_feature (1)..(25): SEQ ID NO: 634; WAN024DCA; Start 312; Stop 336
catagggcaattcgtaactgaaaac

SEQ ID NO: 268676 - DNA, 25 bp, Artificial
  probe
  misc_feature (1)..(25): SEQ ID NO: 634; WAN024DCA; Start 314; Stop 338
tagggcaattcgtaactgaaaacat

SEQ ID NO: 268677 - DNA, 25 bp, Artificial
  probe
  misc_feature (1)..(25): SEQ ID NO: 634; WAN024DCA; Start 313; Stop 337
atagggcaattcgtaactgaaaaca

SEQ ID NO: 268678 - DNA, 25 bp, Artificial
  probe
  misc_feature (1)..(25): SEQ ID NO: 634; WAN024DCA; Start 311; Stop 335
tcatagggcaattcgtaactgaaaa

SEQ ID NO: 268679 - DNA, 25 bp, Artificial
  probe
  misc_feature (1)..(25): SEQ ID NO: 634; WAN024DCA; Start 297; Stop 321
ccaatttcctcacatcatagggcaa

SEQ ID NO: 268680 - DNA, 25 bp, Artificial
  probe
  misc_feature (1)..(25): SEQ ID NO: 634; WAN024DCA; Start 282; Stop 306
ttttctctttgtaacccaatttcct

SEQ ID NO: 268681 - DNA, 25 bp, Artificial
  probe
  misc_feature (1)..(25): SEQ ID NO: 635; WAN024DA5; Start 118; Stop 142
gttcatattcctgtcattattgcca

SEQ ID NO: 268682 - DNA, 25 bp, Artificial
  probe
  misc_feature (1)..(25): SEQ ID NO: 635; WAN024DA5; Start 117; Stop 141
tgttcatattcctgtcattattgcc

SEQ ID NO: 268683 - DNA, 25 bp, Artificial
  probe
  misc_feature (1)..(25): SEQ ID NO: 635; WAN024DA5; Start 209; Stop 233
ttaacacgattacgattctaccgac

SEQ ID NO: 268684 - DNA, 25 bp, Artificial
  probe
  misc_feature (1)..(25): SEQ ID NO: 635; WAN024DA5; Start 210; Stop 234
taacacgattacgattctaccgaca

SEQ ID NO: 268685 - DNA, 25 bp, Artificial
  probe
  misc_feature (1)..(25): SEQ ID NO: 635; WAN024DA5; Start 112; Stop 136
accattgttcatattcctgtcatta

SEQ ID NO: 268686 - DNA, 25 bp, Artificial
  probe
  misc_feature (1)..(25): SEQ ID NO: 635; WAN024DA5; Start 116; Stop 140
ttgttcatattcctgtcattattgc

SEQ ID NO: 268687 - DNA, 25 bp, Artificial
  probe
  misc_feature (1)..(25): SEQ ID NO: 635; WAN024DA5; Start 111; Stop 135
gaccattgttcatattcctgtcatt

SEQ ID NO: 268688 - DNA, 25 bp, Artificial
  probe
  misc_feature (1)..(25): SEQ ID NO: 635; WAN024DA5; Start 119; Stop 143
ttcatattcctgtcattattgccag

SEQ ID NO: 268689 - DNA, 25 bp, Artificial
  probe
  misc_feature (1)..(25): SEQ ID NO: 635; WAN024DA5; Start 211; Stop 235
aacacgattacgattctaccgacaa

SEQ ID NO: 268690 - DNA, 25 bp, Artificial
  probe
  misc_feature (1)..(25): SEQ ID NO: 635; WAN024DA5; Start 120; Stop 144
tcatattcctgtcattattgccagc

SEQ ID NO: 268691 - DNA, 25 bp, Artificial
  probe
  misc_feature (1)..(25): SEQ ID NO: 635; WAN024DA5; Start 110; Stop 134
cgaccattgttcatattcctgtcat

SEQ ID NO: 268692 - DNA, 25 bp, Artificial
  probe
  misc_feature (1)..(25): SEQ ID NO: 635; WAN024DA5; Start 122; Stop 146
atattcctgtcattattgccagcat

SEQ ID NO: 268693 - DNA, 25 bp, Artificial
  probe
  misc_feature (1)..(25): SEQ ID NO: 635; WAN024DA5; Start 126; Stop 150
tcctgtcattattgccagcattatt

SEQ ID NO: 268694 - DNA, 25 bp, Artificial
  probe
  misc_feature (1)..(25): SEQ ID NO: 635; WAN024DA5; Start 125; Stop 149
ttcctgtcattattgccagcattat

SEQ ID NO: 268695 - DNA, 25 bp, Artificial
  probe
  misc_feature (1)..(25): SEQ ID NO: 635; WAN024DA5; Start 124; Stop 148
attcctgtcattattgccagcatta

SEQ ID NO: 268696 - DNA, 25 bp, Artificial
  probe
  misc_feature (1)..(25): SEQ ID NO: 635; WAN024DA5; Start 123; Stop 147
tattcctgtcattattgccagcatt

SEQ ID NO: 268697 - DNA, 25 bp, Artificial
  probe
  misc_feature (1)..(25): SEQ ID NO: 635; WAN024DA5; Start 216; Stop 240
gattacgattctaccgacaagctac

SEQ ID NO: 268698 - DNA, 25 bp, Artificial
  probe
  misc_feature (1)..(25): SEQ ID NO: 635; WAN024DA5; Start 107; Stop 131
aaccgaccattgttcatattcctgt

SEQ ID NO: 268699 - DNA, 25 bp, Artificial
  probe
  misc_feature (1)..(25): SEQ ID NO: 635; WAN024DA5; Start 212; Stop 236
acacgattacgattctaccgacaag

SEQ ID NO: 268700 - DNA, 25 bp, Artificial
  probe
  misc_feature (1)..(25): SEQ ID NO: 635; WAN024DA5; Start 121; Stop 145
catattcctgtcattattgccagca

SEQ ID NO: 268701 - DNA, 25 bp, Artificial
  probe
  misc_feature (1)..(25): SEQ ID NO: 635; WAN024DA5; Start 113; Stop 137
ccattgttcatattcctgtcattat

SEQ ID NO: 268702 - DNA, 25 bp, Artificial
  probe
  misc_feature (1)..(25): SEQ ID NO: 635; WAN024DA5; Start 269; Stop 293
acatctactcagctatcattgccat

SEQ ID NO: 268703 - DNA, 25 bp, Artificial
  probe
  misc_feature (1)..(25): SEQ ID NO: 635; WAN024DA5; Start 268; Stop 292
aacatctactcagctatcattgcca

SEQ ID NO: 268704 - DNA, 25 bp, Artificial
  probe
  misc_feature (1)..(25): SEQ ID NO: 635; WAN024DA5; Start 460; Stop 484
cttcttctggcaaccgttatctcaa

SEQ ID NO: 268705 - DNA, 25 bp, Artificial
  probe
  misc_feature (1)..(25): SEQ ID NO: 635; WAN024DA5; Start 103; Stop 127
atcaaaccgaccattgttcatattc

SEQ ID NO: 268706 - DNA, 25 bp, Artificial
  probe
  misc_feature (1)..(25): SEQ ID NO: 635; WAN024DA5; Start 102; Stop 126
aatcaaaccgaccattgttcatatt

SEQ ID NO: 268707 - DNA, 25 bp, Artificial
  probe
  misc_feature (1)..(25): SEQ ID NO: 635; WAN024DA5; Start 469; Stop 493
gcaaccgttatctcaacaaattcaa

SEQ ID NO: 268708 - DNA, 25 bp, Artificial
  probe
  misc_feature (1)..(25): SEQ ID NO: 635; WAN024DA5; Start 458; Stop 482
aacttcttctggcaaccgttatctc

SEQ ID NO: 268709 - DNA, 25 bp, Artificial
  probe
  misc_feature (1)..(25): SEQ ID NO: 635; WAN024DA5; Start 217; Stop 241
attacgattctaccgacaagctacc

SEQ ID NO: 268710 - DNA, 25 bp, Artificial
  probe
  misc_feature (1)..(25): SEQ ID NO: 635; WAN024DA5; Start 215; Stop 239
cgattacgattctaccgacaagcta

SEQ ID NO: 268711 - DNA, 25 bp, Artificial
  probe
  misc_feature (1)..(25): SEQ ID NO: 635; WAN024DA5; Start 470; Stop 494
caaccgttatctcaacaaattcaat

SEQ ID NO: 268712 - DNA, 25 bp, Artificial
  probe
  misc_feature (1)..(25): SEQ ID NO: 635; WAN024DA5; Start 461; Stop 485
ttcttctggcaaccgttatctcaac

SEQ ID NO: 268713 - DNA, 25 bp, Artificial
  probe
  misc_feature (1)..(25): SEQ ID NO: 635; WAN024DA5; Start 457; Stop 481
caacttcttctggcaaccgttatct

SEQ ID NO: 268714 - DNA, 25 bp, Artificial
  probe
  misc_feature (1)..(25): SEQ ID NO: 636; WAN024DDG; Start 283; Stop 307
tcgtatttcatatccctgtcttcaa

SEQ ID NO: 268715 - DNA, 25 bp, Artificial
  probe
  misc_feature (1)..(25): SEQ ID NO: 636; WAN024DDG; Start 282; Stop 306
ttcgtatttcatatccctgtcttca

SEQ ID NO: 268716 - DNA, 25 bp, Artificial
  probe
  misc_feature (1)..(25): SEQ ID NO: 636; WAN024DDG; Start 284; Stop 308
cgtatttcatatccctgtcttcaaa

SEQ ID NO: 268717 - DNA, 25 bp, Artificial
  probe
  misc_feature (1)..(25): SEQ ID NO: 636; WAN024DDG; Start 281; Stop 305
tttcgtatttcatatccctgtcttc

SEQ ID NO: 268718 - DNA, 25 bp, Artificial
  probe
  misc_feature (1)..(25): SEQ ID NO: 636; WAN024DDG; Start 392; Stop 416
ctattgctgaggaattgatttatcg

SEQ ID NO: 268719 - DNA, 25 bp, Artificial
  probe
  misc_feature (1)..(25): SEQ ID NO: 636; WAN024DDG; Start 390; Stop 414
ccctattgctgaggaattgatttat

SEQ ID NO: 268720 - DNA, 25 bp, Artificial
  probe
  misc_feature (1)..(25): SEQ ID NO: 636; WAN024DDG; Start 287; Stop 311
atttcatatccctgtcttcaaatca

SEQ ID NO: 268721 - DNA, 25 bp, Artificial
  probe
  misc_feature (1)..(25): SEQ ID NO: 636; WAN024DDG; Start 391; Stop 415
cctattgctgaggaattgatttatc

SEQ ID NO: 268722 - DNA, 25 bp, Artificial
  probe
  misc_feature (1)..(25): SEQ ID NO: 636; WAN024DDG; Start 469; Stop 493
ttgctttctgctattattttcggtt

SEQ ID NO: 268723 - DNA, 25 bp, Artificial
  probe
  misc_feature (1)..(25): SEQ ID NO: 636; WAN024DDG; Start 507; Stop 531
ttttgctttaactcctcttgctttt

SEQ ID NO: 268724 - DNA, 25 bp, Artificial
  probe
  misc_feature (1)..(25): SEQ ID NO: 636; WAN024DDG; Start 506; Stop 530
attttgctttaactcctcttgcttt

SEQ ID NO: 268725 - DNA, 25 bp, Artificial
  probe
  misc_feature (1)..(25): SEQ ID NO: 636; WAN024DDG; Start 505; Stop 529
aattttgctttaactcctcttgctt

SEQ ID NO: 268726 - DNA, 25 bp, Artificial
  probe
  misc_feature (1)..(25): SEQ ID NO: 636; WAN024DDG; Start 470; Stop 494
tgctttctgctattattttcggtta

SEQ ID NO: 268727 - DNA, 25 bp, Artificial
  probe
  misc_feature (1)..(25): SEQ ID NO: 636; WAN024DDG; Start 279; Stop 303
cttttcgtatttcatatccctgtct

SEQ ID NO: 268728 - DNA, 25 bp, Artificial
  probe
  misc_feature (1)..(25): SEQ ID NO: 636; WAN024DDG; Start 278; Stop 302
tcttttcgtatttcatatccctgtc

SEQ ID NO: 268729 - DNA, 25 bp, Artificial
  probe
  misc_feature (1)..(25): SEQ ID NO: 636; WAN024DDG; Start 277; Stop 301
ctcttttcgtatttcatatccctgt

SEQ ID NO: 268730 - DNA, 25 bp, Artificial
  probe
  misc_feature (1)..(25): SEQ ID NO: 636; WAN024DDG; Start 285; Stop 309
gtatttcatatccctgtcttcaaat

SEQ ID NO: 268731 - DNA, 25 bp, Artificial
  probe
  misc_feature (1)..(25): SEQ ID NO: 636; WAN024DDG; Start 504; Stop 528
caattttgctttaactcctcttgct

SEQ ID NO: 268732 - DNA, 25 bp, Artificial
  probe
  misc_feature (1)..(25): SEQ ID NO: 636; WAN024DDG; Start 503; Stop 527
tcaattttgctttaactcctcttgc

SEQ ID NO: 268733 - DNA, 25 bp, Artificial
  probe
  misc_feature (1)..(25): SEQ ID NO: 636; WAN024DDG; Start 280; Stop 304
ttttcgtatttcatatccctgtctt

SEQ ID NO: 268734 - DNA, 25 bp, Artificial
  probe
  misc_feature (1)..(25): SEQ ID NO: 636; WAN024DDG; Start 562; Stop 586
gctctattgtatcgcatgactaaaa

SEQ ID NO: 268735 - DNA, 25 bp, Artificial
  probe
  misc_feature (1)..(25): SEQ ID NO: 636; WAN024DDG; Start 471; Stop 495
gctttctgctattattttcggttat

SEQ ID NO: 268736 - DNA, 25 bp, Artificial
  probe
  misc_feature (1)..(25): SEQ ID NO: 636; WAN024DDG; Start 286; Stop 310
tatttcatatccctgtcttcaaatc

SEQ ID NO: 268737 - DNA, 25 bp, Artificial
  probe
  misc_feature (1)..(25): SEQ ID NO: 636; WAN024DDG; Start 502; Stop 526
atcaattttgctttaactcctcttg

SEQ ID NO: 268738 - DNA, 25 bp, Artificial
  probe
  misc_feature (1)..(25): SEQ ID NO: 636; WAN024DDG; Start 120; Stop 144
ttttcagattctgcttttgatggag

SEQ ID NO: 268739 - DNA, 25 bp, Artificial
  probe
  misc_feature (1)..(25): SEQ ID NO: 636; WAN024DDG; Start 121; Stop 145
tttcagattctgcttttgatggaga

SEQ ID NO: 268740 - DNA, 25 bp, Artificial
  probe
  misc_feature (1)..(25): SEQ ID NO: 636; WAN024DDG; Start 122; Stop 146
ttcagattctgcttttgatggagag

SEQ ID NO: 268741 - DNA, 25 bp, Artificial
  probe
  misc_feature (1)..(25): SEQ ID NO: 636; WAN024DDG; Start 498; Stop 522
tcatatcaattttgctttaactcct

SEQ ID NO: 268742 - DNA, 25 bp, Artificial
  probe
  misc_feature (1)..(25): SEQ ID NO: 636; WAN024DDG; Start 501; Stop 525
tatcaattttgctttaactcctctt

SEQ ID NO: 268743 - DNA, 25 bp, Artificial
  probe
  misc_feature (1)..(25): SEQ ID NO: 636; WAN024DDG; Start 499; Stop 523
catatcaattttgctttaactcctc

SEQ ID NO: 268744 - DNA, 25 bp, Artificial
  probe
  misc_feature (1)..(25): SEQ ID NO: 636; WAN024DDG; Start 500; Stop 524
atatcaattttgctttaactcctct

SEQ ID NO: 268745 - DNA, 25 bp, Artificial
  probe
  misc_feature (1)..(25): SEQ ID NO: 636; WAN024DDG; Start 47; Stop 71
tttacaaatcaacttggttttggag

SEQ ID NO: 268746 - DNA, 25 bp, Artificial
  probe
  misc_feature (1)..(25): SEQ ID NO: 636; WAN024DDG; Start 497; Stop 521
ttcatatcaattttgctttaactcc

SEQ ID NO: 268747 - DNA, 25 bp, Artificial
  probe
  misc_feature (1)..(25): SEQ ID NO: 637; WAN024DXL; Start 1168; Stop 1192
tacacaggaacacacgataacaata

SEQ ID NO: 268748 - DNA, 25 bp, Artificial
  probe
  misc_feature (1)..(25): SEQ ID NO: 637; WAN024DXL; Start 566; Stop 590
tgactcaatacttcttcttccaaca

SEQ ID NO: 268749 - DNA, 25 bp, Artificial
  probe
  misc_feature (1)..(25): SEQ ID NO: 637; WAN024DXL; Start 564; Stop 588
tgtgactcaatacttcttcttccaa

SEQ ID NO: 268750 - DNA, 25 bp, Artificial
  probe
  misc_feature (1)..(25): SEQ ID NO: 637; WAN024DXL; Start 565; Stop 589
gtgactcaatacttcttcttccaac

SEQ ID NO: 268751 - DNA, 25 bp, Artificial
  probe
  misc_feature (1)..(25): SEQ ID NO: 637; WAN024DXL; Start 563; Stop 587
gtgtgactcaatacttcttcttcca

SEQ ID NO: 268752 - DNA, 25 bp, Artificial
  probe
  misc_feature (1)..(25): SEQ ID NO: 637; WAN024DXL; Start 659; Stop 683
tagcggaagattcaagtgatatgtg

SEQ ID NO: 268753 - DNA, 25 bp, Artificial
  probe
  misc_feature (1)..(25): SEQ ID NO: 637; WAN024DXL; Start 658; Stop 682
gtagcggaagattcaagtgatatgt

SEQ ID NO: 268754 - DNA, 25 bp, Artificial
  probe
  misc_feature (1)..(25): SEQ ID NO: 637; WAN024DXL; Start 567; Stop 591
gactcaatacttcttcttccaacaa

SEQ ID NO: 268755 - DNA, 25 bp, Artificial
  probe
  misc_feature (1)..(25): SEQ ID NO: 637; WAN024DXL; Start 1169; Stop 1193
acacaggaacacacgataacaatac

SEQ ID NO: 268756 - DNA, 25 bp, Artificial
  probe
  misc_feature (1)..(25): SEQ ID NO: 637; WAN024DXL; Start 1184; Stop 1208
ataacaatacggttcttggttggta

SEQ ID NO: 268757 - DNA, 25 bp, Artificial
  probe
  misc_feature (1)..(25): SEQ ID NO: 637; WAN024DXL; Start 711; Stop 735
tgtcaatggtaaggctacttgtatc

SEQ ID NO: 268758 - DNA, 25 bp, Artificial
  probe
  misc_feature (1)..(25): SEQ ID NO: 637; WAN024DXL; Start 710; Stop 734
atgtcaatggtaaggctacttgtat

SEQ ID NO: 268759 - DNA, 25 bp, Artificial
  probe
  misc_feature (1)..(25): SEQ ID NO: 637; WAN024DXL; Start 709; Stop 733
gatgtcaatggtaaggctacttgta

SEQ ID NO: 268760 - DNA, 25 bp, Artificial
  probe
  misc_feature (1)..(25): SEQ ID NO: 637; WAN024DXL; Start 1176; Stop 1200
aacacacgataacaatacggttctt

SEQ ID NO: 268761 - DNA, 25 bp, Artificial
  probe
  misc_feature (1)..(25): SEQ ID NO: 637; WAN024DXL; Start 562; Stop 586
cgtgtgactcaatacttcttcttcc

SEQ ID NO: 268762 - DNA, 25 bp, Artificial
  probe
  misc_feature (1)..(25): SEQ ID NO: 637; WAN024DXL; Start 561; Stop 585
ccgtgtgactcaatacttcttcttc

SEQ ID NO: 268763 - DNA, 25 bp, Artificial
  probe
  misc_feature (1)..(25): SEQ ID NO: 637; WAN024DXL; Start 568; Stop 592
actcaatacttcttcttccaacaat

SEQ ID NO: 268764 - DNA, 25 bp, Artificial
  probe
  misc_feature (1)..(25): SEQ ID NO: 637; WAN024DXL; Start 569; Stop 593
ctcaatacttcttcttccaacaatg

SEQ ID NO: 268765 - DNA, 25 bp, Artificial
  probe
  misc_feature (1)..(25): SEQ ID NO: 637; WAN024DXL; Start 657; Stop 681
cgtagcggaagattcaagtgatatg

SEQ ID NO: 268766 - DNA, 25 bp, Artificial
  probe
  misc_feature (1)..(25): SEQ ID NO: 637; WAN024DXL; Start 1183; Stop 1207
gataacaatacggttcttggttggt

SEQ ID NO: 268767 - DNA, 25 bp, Artificial
  probe
  misc_feature (1)..(25): SEQ ID NO: 637; WAN024DXL; Start 712; Stop 736
gtcaatggtaaggctacttgtatcg

SEQ ID NO: 268768 - DNA, 25 bp, Artificial
  probe
  misc_feature (1)..(25): SEQ ID NO: 637; WAN024DXL; Start 707; Stop 731
cagatgtcaatggtaaggctacttg

SEQ ID NO: 268769 - DNA, 25 bp, Artificial
  probe
  misc_feature (1)..(25): SEQ ID NO: 637; WAN024DXL; Start 705; Stop 729
aacagatgtcaatggtaaggctact

SEQ ID NO: 268770 - DNA, 25 bp, Artificial
  probe
  misc_feature (1)..(25): SEQ ID NO: 637; WAN024DXL; Start 1207; Stop 1231
taccgtaatgagattgatgatgcga

SEQ ID NO: 268771 - DNA, 25 bp, Artificial
  probe
  misc_feature (1)..(25): SEQ ID NO: 637; WAN024DXL; Start 560; Stop 584
accgtgtgactcaatacttcttctt

SEQ ID NO: 268772 - DNA, 25 bp, Artificial
  probe
  misc_feature (1)..(25): SEQ ID NO: 637; WAN024DXL; Start 1167; Stop 1191
gtacacaggaacacacgataacaat

SEQ ID NO: 268773 - DNA, 25 bp, Artificial
  probe
  misc_feature (1)..(25): SEQ ID NO: 637; WAN024DXL; Start 1181; Stop 1205
acgataacaatacggttcttggttg

SEQ ID NO: 268774 - DNA, 25 bp, Artificial
  probe
  misc_feature (1)..(25): SEQ ID NO: 637; WAN024DXL; Start 1180; Stop 1204
cacgataacaatacggttcttggtt

SEQ ID NO: 268775 - DNA, 25 bp, Artificial
  probe
  misc_feature (1)..(25): SEQ ID NO: 637; WAN024DXL; Start 1177; Stop 1201
acacacgataacaatacggttcttg

SEQ ID NO: 268776 - DNA, 25 bp, Artificial
  probe
  misc_feature (1)..(25): SEQ ID NO: 637; WAN024DXL; Start 706; Stop 730
acagatgtcaatggtaaggctactt

SEQ ID NO: 268777 - DNA, 25 bp, Artificial
  probe
  misc_feature (1)..(25): SEQ ID NO: 637; WAN024DXL; Start 708; Stop 732
agatgtcaatggtaaggctacttgt

SEQ ID NO: 268778 - DNA, 25 bp, Artificial
  probe
  misc_feature (1)..(25): SEQ ID NO: 637; WAN024DXL; Start 1185; Stop 1209
taacaatacggttcttggttggtac

SEQ ID NO: 268779 - DNA, 25 bp, Artificial
  probe
  misc_feature (1)..(25): SEQ ID NO: 637; WAN024DXL; Start 1170; Stop 1194
cacaggaacacacgataacaatacg

SEQ ID NO: 268780 - DNA, 25 bp, Artificial
  probe
  misc_feature (1)..(25): SEQ ID NO: 638; WAN024GCI; Start 691; Stop 715
atggatgttgtggataagattgcta

SEQ ID NO: 268781 - DNA, 25 bp, Artificial
  probe
  misc_feature (1)..(25): SEQ ID NO: 638; WAN024GCI; Start 690; Stop 714
tatggatgttgtggataagattgct

SEQ ID NO: 268782 - DNA, 25 bp, Artificial
  probe
  misc_feature (1)..(25): SEQ ID NO: 638; WAN024GCI; Start 689; Stop 713
gtatggatgttgtggataagattgc

SEQ ID NO: 268783 - DNA, 25 bp, Artificial
  probe
  misc_feature (1)..(25): SEQ ID NO: 638; WAN024GCI; Start 692; Stop 716
tggatgttgtggataagattgctaa

SEQ ID NO: 268784 - DNA, 25 bp, Artificial
  probe
  misc_feature (1)..(25): SEQ ID NO: 638; WAN024GCI; Start 79; Stop 103
ggtgatgattatgttgattccagtc

SEQ ID NO: 268785 - DNA, 25 bp, Artificial
  probe
  misc_feature (1)..(25): SEQ ID NO: 638; WAN024GCI; Start 83; Stop 107
atgattatgttgattccagtcttgc

SEQ ID NO: 268786 - DNA, 25 bp, Artificial
  probe
  misc_feature (1)..(25): SEQ ID NO: 638; WAN024GCI; Start 688; Stop 712
ggtatggatgttgtggataagattg

SEQ ID NO: 268787 - DNA, 25 bp, Artificial
  probe
  misc_feature (1)..(25): SEQ ID NO: 638; WAN024GCI; Start 84; Stop 108
tgattatgttgattccagtcttgct

SEQ ID NO: 268788 - DNA, 25 bp, Artificial
  probe
  misc_feature (1)..(25): SEQ ID NO: 638; WAN024GCI; Start 687; Stop 711
cggtatggatgttgtggataagatt

SEQ ID NO: 268789 - DNA, 25 bp, Artificial
  probe
  misc_feature (1)..(25): SEQ ID NO: 638; WAN024GCI; Start 80; Stop 104
gtgatgattatgttgattccagtct

SEQ ID NO: 268790 - DNA, 25 bp, Artificial
  probe
  misc_feature (1)..(25): SEQ ID NO: 638; WAN024GCI; Start 196; Stop 220
tctaaggaagttgctgaagatgaag

SEQ ID NO: 268791 - DNA, 25 bp, Artificial
  probe
  misc_feature (1)..(25): SEQ ID NO: 638; WAN024GCI; Start 81; Stop 105
tgatgattatgttgattccagtctt

SEQ ID NO: 268792 - DNA, 25 bp, Artificial
  probe
  misc_feature (1)..(25): SEQ ID NO: 638; WAN024GCI; Start 500; Stop 524
ctcttgctatggctaatactggtca

SEQ ID NO: 268793 - DNA, 25 bp, Artificial
  probe
  misc_feature (1)..(25): SEQ ID NO: 638; WAN024GCI; Start 82; Stop 106
gatgattatgttgattccagtcttg

SEQ ID NO: 268794 - DNA, 25 bp, Artificial
  probe
  misc_feature (1)..(25): SEQ ID NO: 638; WAN024GCI; Start 74; Stop 98
tgcgtggtgatgattatgttgattc

SEQ ID NO: 268795 - DNA, 25 bp, Artificial
  probe
  misc_feature (1)..(25): SEQ ID NO: 638; WAN024GCI; Start 73; Stop 97
ctgcgtggtgatgattatgttgatt

SEQ ID NO: 268796 - DNA, 25 bp, Artificial
  probe
  misc_feature (1)..(25): SEQ ID NO: 638; WAN024GCI; Start 502; Stop 526
cttgctatggctaatactggtcaac

SEQ ID NO: 268797 - DNA, 25 bp, Artificial
  probe
  misc_feature (1)..(25): SEQ ID NO: 638; WAN024GCI; Start 501; Stop 525
tcttgctatggctaatactggtcaa

SEQ ID NO: 268798 - DNA, 25 bp, Artificial
  probe
  misc_feature (1)..(25): SEQ ID NO: 638; WAN024GCI; Start 239; Stop 263
caagccaaggtgatattcgcattaa

SEQ ID NO: 268799 - DNA, 25 bp, Artificial
  probe
  misc_feature (1)..(25): SEQ ID NO: 638; WAN024GCI; Start 85; Stop 109
gattatgttgattccagtcttgctg

SEQ ID NO: 268800 - DNA, 25 bp, Artificial
  probe
  misc_feature (1)..(25): SEQ ID NO: 638; WAN024GCI; Start 317; Stop 341
aagaaggctactataacggtattac

SEQ ID NO: 268801 - DNA, 25 bp, Artificial
  probe
  misc_feature (1)..(25): SEQ ID NO: 638; WAN024GCI; Start 75; Stop 99
gcgtggtgatgattatgttgattcc

SEQ ID NO: 268802 - DNA, 25 bp, Artificial
  probe
  misc_feature (1)..(25): SEQ ID NO: 638; WAN024GCI; Start 72; Stop 96
tctgcgtggtgatgattatgttgat

SEQ ID NO: 268803 - DNA, 25 bp, Artificial
  probe
  misc_feature (1)..(25): SEQ ID NO: 638; WAN024GCI; Start 77; Stop 101
gtggtgatgattatgttgattccag

SEQ ID NO: 268804 - DNA, 25 bp, Artificial
  probe
  misc_feature (1)..(25): SEQ ID NO: 638; WAN024GCI; Start 78; Stop 102
tggtgatgattatgttgattccagt

SEQ ID NO: 268805 - DNA, 25 bp, Artificial
  probe
  misc_feature (1)..(25): SEQ ID NO: 638; WAN024GCI; Start 457; Stop 481
ttcaagaacgagattactccttatt

SEQ ID NO: 268806 - DNA, 25 bp, Artificial
  probe
  misc_feature (1)..(25): SEQ ID NO: 638; WAN024GCI; Start 86; Stop 110
attatgttgattccagtcttgctgc

SEQ ID NO: 268807 - DNA, 25 bp, Artificial
  probe
  misc_feature (1)..(25): SEQ ID NO: 638; WAN024GCI; Start 238; Stop 262
acaagccaaggtgatattcgcatta

SEQ ID NO: 268808 - DNA, 25 bp, Artificial
  probe
  misc_feature (1)..(25): SEQ ID NO: 638; WAN024GCI; Start 314; Stop 338
ccaaagaaggctactataacggtat

SEQ ID NO: 268809 - DNA, 25 bp, Artificial
  probe
  misc_feature (1)..(25): SEQ ID NO: 638; WAN024GCI; Start 433; Stop 457
aagactaaagacaaaggaactggtt

SEQ ID NO: 268810 - DNA, 25 bp, Artificial
  probe
  misc_feature (1)..(25): SEQ ID NO: 638; WAN024GCI; Start 432; Stop 456
taagactaaagacaaaggaactggt

SEQ ID NO: 268811 - DNA, 25 bp, Artificial
  probe
  misc_feature (1)..(25): SEQ ID NO: 638; WAN024GCI; Start 434; Stop 458
agactaaagacaaaggaactggttt

SEQ ID NO: 268812 - DNA, 25 bp, Artificial
  probe
  misc_feature (1)..(25): SEQ ID NO: 638; WAN024GCI; Start 249; Stop 273
tgatattcgcattaaactcttccct

SEQ ID NO: 268813 - DNA, 25 bp, Artificial
  probe
  misc_feature (1)..(25): SEQ ID NO: 639; WAN024D6L; Start 261; Stop 285
tctcttagccttcattagttctcag

SEQ ID NO: 268814 - DNA, 25 bp, Artificial
  probe
  misc_feature (1)..(25): SEQ ID NO: 639; WAN024D6L; Start 258; Stop 282
tgttctcttagccttcattagttct

SEQ ID NO: 268815 - DNA, 25 bp, Artificial
  probe
  misc_feature (1)..(25): SEQ ID NO: 639; WAN024D6L; Start 260; Stop 284
ttctcttagccttcattagttctca

SEQ ID NO: 268816 - DNA, 25 bp, Artificial
  probe
  misc_feature (1)..(25): SEQ ID NO: 639; WAN024D6L; Start 262; Stop 286
ctcttagccttcattagttctcagc

SEQ ID NO: 268817 - DNA, 25 bp, Artificial
  probe
  misc_feature (1)..(25): SEQ ID NO: 639; WAN024D6L; Start 259; Stop 283
gttctcttagccttcattagttctc

SEQ ID NO: 268818 - DNA, 25 bp, Artificial
  probe
  misc_feature (1)..(25): SEQ ID NO: 639; WAN024D6L; Start 257; Stop 281
ttgttctcttagccttcattagttc

SEQ ID NO: 268819 - DNA, 25 bp, Artificial
  probe
  misc_feature (1)..(25): SEQ ID NO: 639; WAN024D6L; Start 265; Stop 289
ttagccttcattagttctcagcgtt

SEQ ID NO: 268820 - DNA, 25 bp, Artificial
  probe
  misc_feature (1)..(25): SEQ ID NO: 639; WAN024D6L; Start 263; Stop 287
tcttagccttcattagttctcagcg

SEQ ID NO: 268821 - DNA, 25 bp, Artificial
  probe
  misc_feature (1)..(25): SEQ ID NO: 639; WAN024D6L; Start 264; Stop 288
cttagccttcattagttctcagcgt

SEQ ID NO: 268822 - DNA, 25 bp, Artificial
  probe
  misc_feature (1)..(25): SEQ ID NO: 639; WAN024D6L; Start 256; Stop 280
tttgttctcttagccttcattagtt

SEQ ID NO: 268823 - DNA, 25 bp, Artificial
  probe
  misc_feature (1)..(25): SEQ ID NO: 639; WAN024D6L; Start 170; Stop 194
aacatcaattcgctgagatttatcc

SEQ ID NO: 268824 - DNA, 25 bp, Artificial
  probe
  misc_feature (1)..(25): SEQ ID NO: 639; WAN024D6L; Start 171; Stop 195
acatcaattcgctgagatttatcct

SEQ ID NO: 268825 - DNA, 25 bp, Artificial
  probe
  misc_feature (1)..(25): SEQ ID NO: 639; WAN024D6L; Start 172; Stop 196
catcaattcgctgagatttatcctc

SEQ ID NO: 268826 - DNA, 25 bp, Artificial
  probe
  misc_feature (1)..(25): SEQ ID NO: 639; WAN024D6L; Start 167; Stop 191
tcaaacatcaattcgctgagattta

SEQ ID NO: 268827 - DNA, 25 bp, Artificial
  probe
  misc_feature (1)..(25): SEQ ID NO: 639; WAN024D6L; Start 207; Stop 231
aaagattcgcttctactatttaggg

SEQ ID NO: 268828 - DNA, 25 bp, Artificial
  probe
  misc_feature (1)..(25): SEQ ID NO: 639; WAN024D6L; Start 168; Stop 192
caaacatcaattcgctgagatttat

SEQ ID NO: 268829 - DNA, 25 bp, Artificial
  probe
  misc_feature (1)..(25): SEQ ID NO: 639; WAN024D6L; Start 266; Stop 290
tagccttcattagttctcagcgttt

SEQ ID NO: 268830 - DNA, 25 bp, Artificial
  probe
  misc_feature (1)..(25): SEQ ID NO: 639; WAN024D6L; Start 169; Stop 193
aaacatcaattcgctgagatttatc

SEQ ID NO: 268831 - DNA, 25 bp, Artificial
  probe
  misc_feature (1)..(25): SEQ ID NO: 639; WAN024D6L; Start 366; Stop 390
ctatccagacttttacgacaaacac

SEQ ID NO: 268832 - DNA, 25 bp, Artificial
  probe
  misc_feature (1)..(25): SEQ ID NO: 639; WAN024D6L; Start 365; Stop 389
actatccagacttttacgacaaaca

SEQ ID NO: 268833 - DNA, 25 bp, Artificial
  probe
  misc_feature (1)..(25): SEQ ID NO: 639; WAN024D6L; Start 211; Stop 235
attcgcttctactatttaggggttc

SEQ ID NO: 268834 - DNA, 25 bp, Artificial
  probe
  misc_feature (1)..(25): SEQ ID NO: 639; WAN024D6L; Start 210; Stop 234
gattcgcttctactatttaggggtt

SEQ ID NO: 268835 - DNA, 25 bp, Artificial
  probe
  misc_feature (1)..(25): SEQ ID NO: 639; WAN024D6L; Start 367; Stop 391
tatccagacttttacgacaaacaca

SEQ ID NO: 268836 - DNA, 25 bp, Artificial
  probe
  misc_feature (1)..(25): SEQ ID NO: 639; WAN024D6L; Start 215; Stop 239
gcttctactatttaggggttctcac

SEQ ID NO: 268837 - DNA, 25 bp, Artificial
  probe
  misc_feature (1)..(25): SEQ ID NO: 639; WAN024D6L; Start 364; Stop 388
aactatccagacttttacgacaaac

SEQ ID NO: 268838 - DNA, 25 bp, Artificial
  probe
  misc_feature (1)..(25): SEQ ID NO: 639; WAN024D6L; Start 131; Stop 155
ctcaaggactcctgctatttctctt

SEQ ID NO: 268839 - DNA, 25 bp, Artificial
  probe
  misc_feature (1)..(25): SEQ ID NO: 639; WAN024D6L; Start 110; Stop 134
ctggtttaattttcttccttgctca

SEQ ID NO: 268840 - DNA, 25 bp, Artificial
  probe
  misc_feature (1)..(25): SEQ ID NO: 639; WAN024D6L; Start 109; Stop 133
tctggtttaattttcttccttgctc

SEQ ID NO: 268841 - DNA, 25 bp, Artificial
  probe
  misc_feature (1)..(25): SEQ ID NO: 639; WAN024D6L; Start 108; Stop 132
ctctggtttaattttcttccttgct

SEQ ID NO: 268842 - DNA, 25 bp, Artificial
  probe
  misc_feature (1)..(25): SEQ ID NO: 639; WAN024D6L; Start 107; Stop 131
tctctggtttaattttcttccttgc

SEQ ID NO: 268843 - DNA, 25 bp, Artificial
  probe
  misc_feature (1)..(25): SEQ ID NO: 639; WAN024D6L; Start 104; Stop 128
tgctctctggtttaattttcttcct

SEQ ID NO: 268844 - DNA, 25 bp, Artificial
  probe
  misc_feature (1)..(25): SEQ ID NO: 639; WAN024D6L; Start 103; Stop 127
ttgctctctggtttaattttcttcc

SEQ ID NO: 268845 - DNA, 25 bp, Artificial
  probe
  misc_feature (1)..(25): SEQ ID NO: 639; WAN024D6L; Start 368; Stop 392
atccagacttttacgacaaacacat

SEQ ID NO: 268846 - DNA, 25 bp, Artificial
  probe
  misc_feature (1)..(25): SEQ ID NO: 640; WAN024DJP; Start 78; Stop 102
aattccactcattgataccctaaca

SEQ ID NO: 268847 - DNA, 25 bp, Artificial
  probe
  misc_feature (1)..(25): SEQ ID NO: 640; WAN024DJP; Start 80; Stop 104
ttccactcattgataccctaacaag

SEQ ID NO: 268848 - DNA, 25 bp, Artificial
  probe
  misc_feature (1)..(25): SEQ ID NO: 640; WAN024DJP; Start 79; Stop 103
attccactcattgataccctaacaa

SEQ ID NO: 268849 - DNA, 25 bp, Artificial
  probe
  misc_feature (1)..(25): SEQ ID NO: 640; WAN024DJP; Start 84; Stop 108
actcattgataccctaacaagtgaa

SEQ ID NO: 268850 - DNA, 25 bp, Artificial
  probe
  misc_feature (1)..(25): SEQ ID NO: 640; WAN024DJP; Start 81; Stop 105
tccactcattgataccctaacaagt

SEQ ID NO: 268851 - DNA, 25 bp, Artificial
  probe
  misc_feature (1)..(25): SEQ ID NO: 640; WAN024DJP; Start 85; Stop 109
ctcattgataccctaacaagtgaaa

SEQ ID NO: 268852 - DNA, 25 bp, Artificial
  probe
  misc_feature (1)..(25): SEQ ID NO: 640; WAN024DJP; Start 77; Stop 101
taattccactcattgataccctaac

SEQ ID NO: 268853 - DNA, 25 bp, Artificial
  probe
  misc_feature (1)..(25): SEQ ID NO: 640; WAN024DJP; Start 177; Stop 201
tttcggagtgatgatacatattgtc

SEQ ID NO: 268854 - DNA, 25 bp, Artificial
  probe
  misc_feature (1)..(25): SEQ ID NO: 640; WAN024DJP; Start 17; Stop 41
aacagttacgttatcctggtctgaa

SEQ ID NO: 268855 - DNA, 25 bp, Artificial
  probe
  misc_feature (1)..(25): SEQ ID NO: 640; WAN024DJP; Start 76; Stop 100
ataattccactcattgataccctaa

SEQ ID NO: 268856 - DNA, 25 bp, Artificial
  probe
  misc_feature (1)..(25): SEQ ID NO: 640; WAN024DJP; Start 12; Stop 36
aaagaaacagttacgttatcctggt

SEQ ID NO: 268857 - DNA, 25 bp, Artificial
  probe
  misc_feature (1)..(25): SEQ ID NO: 640; WAN024DJP; Start 90; Stop 114
tgataccctaacaagtgaaaatcca

SEQ ID NO: 268858 - DNA, 25 bp, Artificial
  probe
  misc_feature (1)..(25): SEQ ID NO: 640; WAN024DJP; Start 13; Stop 37
aagaaacagttacgttatcctggtc

SEQ ID NO: 268859 - DNA, 25 bp, Artificial
  probe
  misc_feature (1)..(25): SEQ ID NO: 640; WAN024DJP; Start 74; Stop 98
ttataattccactcattgataccct

SEQ ID NO: 268860 - DNA, 25 bp, Artificial
  probe
  misc_feature (1)..(25): SEQ ID NO: 640; WAN024DJP; Start 94; Stop 118
accctaacaagtgaaaatccaaatt

SEQ ID NO: 268861 - DNA, 25 bp, Artificial
  probe
  misc_feature (1)..(25): SEQ ID NO: 640; WAN024DJP; Start 91; Stop 115
gataccctaacaagtgaaaatccaa

SEQ ID NO: 268862 - DNA, 25 bp, Artificial
  probe
  misc_feature (1)..(25): SEQ ID NO: 640; WAN024DJP; Start 37; Stop 61
ctgaaagcaggttcgatttatggaa

SEQ ID NO: 268863 - DNA, 25 bp, Artificial
  probe
  misc_feature (1)..(25): SEQ ID NO: 640; WAN024DJP; Start 19; Stop 43
cagttacgttatcctggtctgaaag

SEQ ID NO: 268864 - DNA, 25 bp, Artificial
  probe
  misc_feature (1)..(25): SEQ ID NO: 640; WAN024DJP; Start 93; Stop 117
taccctaacaagtgaaaatccaaat

SEQ ID NO: 268865 - DNA, 25 bp, Artificial
  probe
  misc_feature (1)..(25): SEQ ID NO: 640; WAN024DJP; Start 92; Stop 116
ataccctaacaagtgaaaatccaaa

SEQ ID NO: 268866 - DNA, 25 bp, Artificial
  probe
  misc_feature (1)..(25): SEQ ID NO: 640; WAN024DJP; Start 75; Stop 99
tataattccactcattgatacccta

SEQ ID NO: 268867 - DNA, 25 bp, Artificial
  probe
  misc_feature (1)..(25): SEQ ID NO: 640; WAN024DJP; Start 15; Stop 39
gaaacagttacgttatcctggtctg

SEQ ID NO: 268868 - DNA, 25 bp, Artificial
  probe
  misc_feature (1)..(25): SEQ ID NO: 640; WAN024DJP; Start 14; Stop 38
agaaacagttacgttatcctggtct

SEQ ID NO: 268869 - DNA, 25 bp, Artificial
  probe
  misc_feature (1)..(25): SEQ ID NO: 640; WAN024DJP; Start 18; Stop 42
acagttacgttatcctggtctgaaa

SEQ ID NO: 268870 - DNA, 25 bp, Artificial
  probe
  misc_feature (1)..(25): SEQ ID NO: 640; WAN024DJP; Start 16; Stop 40
aaacagttacgttatcctggtctga

SEQ ID NO: 268871 - DNA, 25 bp, Artificial
  probe
  misc_feature (1)..(25): SEQ ID NO: 640; WAN024DJP; Start 89; Stop 113
ttgataccctaacaagtgaaaatcc

SEQ ID NO: 268872 - DNA, 25 bp, Artificial
  probe
  misc_feature (1)..(25): SEQ ID NO: 640; WAN024DJP; Start 20; Stop 44
agttacgttatcctggtctgaaagc

SEQ ID NO: 268873 - DNA, 25 bp, Artificial
  probe
  misc_feature (1)..(25): SEQ ID NO: 640; WAN024DJP; Start 36; Stop 60
tctgaaagcaggttcgatttatgga

SEQ ID NO: 268874 - DNA, 25 bp, Artificial
  probe
  misc_feature (1)..(25): SEQ ID NO: 640; WAN024DJP; Start 35; Stop 59
gtctgaaagcaggttcgatttatgg

SEQ ID NO: 268875 - DNA, 25 bp, Artificial
  probe
  misc_feature (1)..(25): SEQ ID NO: 640; WAN024DJP; Start 34; Stop 58
ggtctgaaagcaggttcgatttatg

SEQ ID NO: 268876 - DNA, 25 bp, Artificial
  probe
  misc_feature (1)..(25): SEQ ID NO: 640; WAN024DJP; Start 21; Stop 45
gttacgttatcctggtctgaaagca

SEQ ID NO: 268877 - DNA, 25 bp, Artificial
  probe
  misc_feature (1)..(25): SEQ ID NO: 640; WAN024DJP; Start 73; Stop 97
tttataattccactcattgataccc

SEQ ID NO: 268878 - DNA, 25 bp, Artificial
  probe
  misc_feature (1)..(25): SEQ ID NO: 640; WAN024DJP; Start 86; Stop 110
tcattgataccctaacaagtgaaaa

SEQ ID NO: 268879 - DNA, 25 bp, Artificial
  probe
  misc_feature (1)..(25): SEQ ID NO: 641; WAN024CWA; Start 439; Stop 463
aatggtgtatcaagtattctcggtt

SEQ ID NO: 268880 - DNA, 25 bp, Artificial
  probe
  misc_feature (1)..(25): SEQ ID NO: 641; WAN024CWA; Start 442; Stop 466
ggtgtatcaagtattctcggttcta

SEQ ID NO: 268881 - DNA, 25 bp, Artificial
  probe
  misc_feature (1)..(25): SEQ ID NO: 641; WAN024CWA; Start 440; Stop 464
atggtgtatcaagtattctcggttc

SEQ ID NO: 268882 - DNA, 25 bp, Artificial
  probe
  misc_feature (1)..(25): SEQ ID NO: 641; WAN024CWA; Start 178; Stop 202
caagaagtggctctaatctatcctc

SEQ ID NO: 268883 - DNA, 25 bp, Artificial
  probe
  misc_feature (1)..(25): SEQ ID NO: 641; WAN024CWA; Start 176; Stop 200
ctcaagaagtggctctaatctatcc

SEQ ID NO: 268884 - DNA, 25 bp, Artificial
  probe
  misc_feature (1)..(25): SEQ ID NO: 641; WAN024CWA; Start 175; Stop 199
cctcaagaagtggctctaatctatc

SEQ ID NO: 268885 - DNA, 25 bp, Artificial
  probe
  misc_feature (1)..(25): SEQ ID NO: 641; WAN024CWA; Start 441; Stop 465
tggtgtatcaagtattctcggttct

SEQ ID NO: 268886 - DNA, 25 bp, Artificial
  probe
  misc_feature (1)..(25): SEQ ID NO: 641; WAN024CWA; Start 177; Stop 201
tcaagaagtggctctaatctatcct

SEQ ID NO: 268887 - DNA, 25 bp, Artificial
  probe
  misc_feature (1)..(25): SEQ ID NO: 641; WAN024CWA; Start 267; Stop 291
catcacagtcattgaaccagatatg

SEQ ID NO: 268888 - DNA, 25 bp, Artificial
  probe
  misc_feature (1)..(25): SEQ ID NO: 641; WAN024CWA; Start 181; Stop 205
gaagtggctctaatctatcctcctc

SEQ ID NO: 268889 - DNA, 25 bp, Artificial
  probe
  misc_feature (1)..(25): SEQ ID NO: 641; WAN024CWA; Start 179; Stop 203
aagaagtggctctaatctatcctcc

SEQ ID NO: 268890 - DNA, 25 bp, Artificial
  probe
  misc_feature (1)..(25): SEQ ID NO: 641; WAN024CWA; Start 185; Stop 209
tggctctaatctatcctcctctgat

SEQ ID NO: 268891 - DNA, 25 bp, Artificial
  probe
  misc_feature (1)..(25): SEQ ID NO: 641; WAN024CWA; Start 182; Stop 206
aagtggctctaatctatcctcctct

SEQ ID NO: 268892 - DNA, 25 bp, Artificial
  probe
  misc_feature (1)..(25): SEQ ID NO: 641; WAN024CWA; Start 268; Stop 292
atcacagtcattgaaccagatatgc

SEQ ID NO: 268893 - DNA, 25 bp, Artificial
  probe
  misc_feature (1)..(25): SEQ ID NO: 641; WAN024CWA; Start 266; Stop 290
gcatcacagtcattgaaccagatat

SEQ ID NO: 268894 - DNA, 25 bp, Artificial
  probe
  misc_feature (1)..(25): SEQ ID NO: 641; WAN024CWA; Start 443; Stop 467
gtgtatcaagtattctcggttctat

SEQ ID NO: 268895 - DNA, 25 bp, Artificial
  probe
  misc_feature (1)..(25): SEQ ID NO: 641; WAN024CWA; Start 388; Stop 412
atactcatagatgaaggtcaggact

SEQ ID NO: 268896 - DNA, 25 bp, Artificial
  probe
  misc_feature (1)..(25): SEQ ID NO: 641; WAN024CWA; Start 180; Stop 204
agaagtggctctaatctatcctcct

SEQ ID NO: 268897 - DNA, 25 bp, Artificial
  probe
  misc_feature (1)..(25): SEQ ID NO: 641; WAN024CWA; Start 277; Stop 301
attgaaccagatatgctgaatgaga

SEQ ID NO: 268898 - DNA, 25 bp, Artificial
  probe
  misc_feature (1)..(25): SEQ ID NO: 641; WAN024CWA; Start 389; Stop 413
tactcatagatgaaggtcaggacta

SEQ ID NO: 268899 - DNA, 25 bp, Artificial
  probe
  misc_feature (1)..(25): SEQ ID NO: 641; WAN024CWA; Start 278; Stop 302
ttgaaccagatatgctgaatgagaa

SEQ ID NO: 268900 - DNA, 25 bp, Artificial
  probe
  misc_feature (1)..(25): SEQ ID NO: 641; WAN024CWA; Start 273; Stop 297
agtcattgaaccagatatgctgaat

SEQ ID NO: 268901 - DNA, 25 bp, Artificial
  probe
  misc_feature (1)..(25): SEQ ID NO: 641; WAN024CWA; Start 390; Stop 414
actcatagatgaaggtcaggactat

SEQ ID NO: 268902 - DNA, 25 bp, Artificial
  probe
  misc_feature (1)..(25): SEQ ID NO: 641; WAN024CWA; Start 272; Stop 296
cagtcattgaaccagatatgctgaa

SEQ ID NO: 268903 - DNA, 25 bp, Artificial
  probe
  misc_feature (1)..(25): SEQ ID NO: 641; WAN024CWA; Start 184; Stop 208
gtggctctaatctatcctcctctga

SEQ ID NO: 268904 - DNA, 25 bp, Artificial
  probe
  misc_feature (1)..(25): SEQ ID NO: 641; WAN024CWA; Start 183; Stop 207
agtggctctaatctatcctcctctg

SEQ ID NO: 268905 - DNA, 25 bp, Artificial
  probe
  misc_feature (1)..(25): SEQ ID NO: 641; WAN024CWA; Start 391; Stop 415
ctcatagatgaaggtcaggactatt

SEQ ID NO: 268906 - DNA, 25 bp, Artificial
  probe
  misc_feature (1)..(25): SEQ ID NO: 641; WAN024CWA; Start 269; Stop 293
tcacagtcattgaaccagatatgct

SEQ ID NO: 268907 - DNA, 25 bp, Artificial
  probe
  misc_feature (1)..(25): SEQ ID NO: 641; WAN024CWA; Start 444; Stop 468
tgtatcaagtattctcggttctatt

SEQ ID NO: 268908 - DNA, 25 bp, Artificial
  probe
  misc_feature (1)..(25): SEQ ID NO: 641; WAN024CWA; Start 186; Stop 210
ggctctaatctatcctcctctgatt

SEQ ID NO: 268909 - DNA, 25 bp, Artificial
  probe
  misc_feature (1)..(25): SEQ ID NO: 641; WAN024CWA; Start 438; Stop 462
aaatggtgtatcaagtattctcggt

SEQ ID NO: 268910 - DNA, 25 bp, Artificial
  probe
  misc_feature (1)..(25): SEQ ID NO: 641; WAN024CWA; Start 294; Stop 318
gaatgagaaagaaagcaagcaacta

SEQ ID NO: 268911 - DNA, 25 bp, Artificial
  probe
  misc_feature (1)..(25): SEQ ID NO: 641; WAN024CWA; Start 270; Stop 294
cacagtcattgaaccagatatgctg

SEQ ID NO: 268912 - DNA, 25 bp, Artificial
  probe
  misc_feature (1)..(25): SEQ ID NO: 642; WAN024CXF; Start 246; Stop 270
tatgttgattgagttaggtatggct

SEQ ID NO: 268913 - DNA, 25 bp, Artificial
  probe
  misc_feature (1)..(25): SEQ ID NO: 642; WAN024CXF; Start 245; Stop 269
ttatgttgattgagttaggtatggc

SEQ ID NO: 268914 - DNA, 25 bp, Artificial
  probe
  misc_feature (1)..(25): SEQ ID NO: 642; WAN024CXF; Start 474; Stop 498
cactatctactctggctatgactat

SEQ ID NO: 268915 - DNA, 25 bp, Artificial
  probe
  misc_feature (1)..(25): SEQ ID NO: 642; WAN024CXF; Start 472; Stop 496
ttcactatctactctggctatgact

SEQ ID NO: 268916 - DNA, 25 bp, Artificial
  probe
  misc_feature (1)..(25): SEQ ID NO: 642; WAN024CXF; Start 473; Stop 497
tcactatctactctggctatgacta

SEQ ID NO: 268917 - DNA, 25 bp, Artificial
  probe
  misc_feature (1)..(25): SEQ ID NO: 642; WAN024CXF; Start 247; Stop 271
atgttgattgagttaggtatggctc

SEQ ID NO: 268918 - DNA, 25 bp, Artificial
  probe
  misc_feature (1)..(25): SEQ ID NO: 642; WAN024CXF; Start 475; Stop 499
actatctactctggctatgactatt

SEQ ID NO: 268919 - DNA, 25 bp, Artificial
  probe
  misc_feature (1)..(25): SEQ ID NO: 642; WAN024CXF; Start 287; Stop 311
cagtgattatctgtcgtgagttagc

SEQ ID NO: 268920 - DNA, 25 bp, Artificial
  probe
  misc_feature (1)..(25): SEQ ID NO: 642; WAN024CXF; Start 286; Stop 310
gcagtgattatctgtcgtgagttag

SEQ ID NO: 268921 - DNA, 25 bp, Artificial
  probe
  misc_feature (1)..(25): SEQ ID NO: 642; WAN024CXF; Start 291; Stop 315
gattatctgtcgtgagttagctgtg

SEQ ID NO: 268922 - DNA, 25 bp, Artificial
  probe
  misc_feature (1)..(25): SEQ ID NO: 642; WAN024CXF; Start 289; Stop 313
gtgattatctgtcgtgagttagctg

SEQ ID NO: 268923 - DNA, 25 bp, Artificial
  probe
  misc_feature (1)..(25): SEQ ID NO: 642; WAN024CXF; Start 288; Stop 312
agtgattatctgtcgtgagttagct

SEQ ID NO: 268924 - DNA, 25 bp, Artificial
  probe
  misc_feature (1)..(25): SEQ ID NO: 642; WAN024CXF; Start 417; Stop 441
cttgctattacattggactttgctt

SEQ ID NO: 268925 - DNA, 25 bp, Artificial
  probe
  misc_feature (1)..(25): SEQ ID NO: 642; WAN024CXF; Start 415; Stop 439
ttcttgctattacattggactttgc

SEQ ID NO: 268926 - DNA, 25 bp, Artificial
  probe
  misc_feature (1)..(25): SEQ ID NO: 642; WAN024CXF; Start 90; Stop 114
gatagagagtcatatagttgcagct

SEQ ID NO: 268927 - DNA, 25 bp, Artificial
  probe
  misc_feature (1)..(25): SEQ ID NO: 642; WAN024CXF; Start 418; Stop 442
ttgctattacattggactttgcttg

SEQ ID NO: 268928 - DNA, 25 bp, Artificial
  probe
  misc_feature (1)..(25): SEQ ID NO: 642; WAN024CXF; Start 165; Stop 189
tcgtaaatggaatgtggtcagtaat

SEQ ID NO: 268929 - DNA, 25 bp, Artificial
  probe
  misc_feature (1)..(25): SEQ ID NO: 642; WAN024CXF; Start 20; Stop 44
ccaatctcttaacaataggtcgaat

SEQ ID NO: 268930 - DNA, 25 bp, Artificial
  probe
  misc_feature (1)..(25): SEQ ID NO: 642; WAN024CXF; Start 248; Stop 272
tgttgattgagttaggtatggctcc

SEQ ID NO: 268931 - DNA, 25 bp, Artificial
  probe
  misc_feature (1)..(25): SEQ ID NO: 642; WAN024CXF; Start 89; Stop 113
cgatagagagtcatatagttgcagc

SEQ ID NO: 268932 - DNA, 25 bp, Artificial
  probe
  misc_feature (1)..(25): SEQ ID NO: 642; WAN024CXF; Start 88; Stop 112
tcgatagagagtcatatagttgcag

SEQ ID NO: 268933 - DNA, 25 bp, Artificial
  probe
  misc_feature (1)..(25): SEQ ID NO: 642; WAN024CXF; Start 17; Stop 41
ttcccaatctcttaacaataggtcg

SEQ ID NO: 268934 - DNA, 25 bp, Artificial
  probe
  misc_feature (1)..(25): SEQ ID NO: 642; WAN024CXF; Start 416; Stop 440
tcttgctattacattggactttgct

SEQ ID NO: 268935 - DNA, 25 bp, Artificial
  probe
  misc_feature (1)..(25): SEQ ID NO: 642; WAN024CXF; Start 292; Stop 316
attatctgtcgtgagttagctgtga

SEQ ID NO: 268936 - DNA, 25 bp, Artificial
  probe
  misc_feature (1)..(25): SEQ ID NO: 642; WAN024CXF; Start 290; Stop 314
tgattatctgtcgtgagttagctgt

SEQ ID NO: 268937 - DNA, 25 bp, Artificial
  probe
  misc_feature (1)..(25): SEQ ID NO: 642; WAN024CXF; Start 164; Stop 188
ctcgtaaatggaatgtggtcagtaa

SEQ ID NO: 268938 - DNA, 25 bp, Artificial
  probe
  misc_feature (1)..(25): SEQ ID NO: 642; WAN024CXF; Start 166; Stop 190
cgtaaatggaatgtggtcagtaatt

SEQ ID NO: 268939 - DNA, 25 bp, Artificial
  probe
  misc_feature (1)..(25): SEQ ID NO: 642; WAN024CXF; Start 87; Stop 111
ttcgatagagagtcatatagttgca

SEQ ID NO: 268940 - DNA, 25 bp, Artificial
  probe
  misc_feature (1)..(25): SEQ ID NO: 642; WAN024CXF; Start 126; Stop 150
tgttgccagtattaccgactattta

SEQ ID NO: 268941 - DNA, 25 bp, Artificial
  probe
  misc_feature (1)..(25): SEQ ID NO: 642; WAN024CXF; Start 91; Stop 115
atagagagtcatatagttgcagcta

SEQ ID NO: 268942 - DNA, 25 bp, Artificial
  probe
  misc_feature (1)..(25): SEQ ID NO: 642; WAN024CXF; Start 481; Stop 505
tactctggctatgactatttcaagg

SEQ ID NO: 268943 - DNA, 25 bp, Artificial
  probe
  misc_feature (1)..(25): SEQ ID NO: 642; WAN024CXF; Start 485; Stop 509
ctggctatgactatttcaagggtag

SEQ ID NO: 268944 - DNA, 25 bp, Artificial
  probe
  misc_feature (1)..(25): SEQ ID NO: 642; WAN024CXF; Start 471; Stop 495
tttcactatctactctggctatgac

SEQ ID NO: 268945 - DNA, 25 bp, Artificial
  probe
  misc_feature (1)..(25): SEQ ID NO: 643; WAN024D9G; Start 259; Stop 283
cttgatactgtgaagctgcttgata

SEQ ID NO: 268946 - DNA, 25 bp, Artificial
  probe
  misc_feature (1)..(25): SEQ ID NO: 643; WAN024D9G; Start 260; Stop 284
ttgatactgtgaagctgcttgatac

SEQ ID NO: 268947 - DNA, 25 bp, Artificial
  probe
  misc_feature (1)..(25): SEQ ID NO: 643; WAN024D9G; Start 116; Stop 140
ctctctttgtcaactatctgggaat

SEQ ID NO: 268948 - DNA, 25 bp, Artificial
  probe
  misc_feature (1)..(25): SEQ ID NO: 643; WAN024D9G; Start 158; Stop 182
ttgtcaagggctatctggtctataa

SEQ ID NO: 268949 - DNA, 25 bp, Artificial
  probe
  misc_feature (1)..(25): SEQ ID NO: 643; WAN024D9G; Start 117; Stop 141
tctctttgtcaactatctgggaatt

SEQ ID NO: 268950 - DNA, 25 bp, Artificial
  probe
  misc_feature (1)..(25): SEQ ID NO: 643; WAN024D9G; Start 159; Stop 183
tgtcaagggctatctggtctataag

SEQ ID NO: 268951 - DNA, 25 bp, Artificial
  probe
  misc_feature (1)..(25): SEQ ID NO: 643; WAN024D9G; Start 115; Stop 139
actctctttgtcaactatctgggaa

SEQ ID NO: 268952 - DNA, 25 bp, Artificial
  probe
  misc_feature (1)..(25): SEQ ID NO: 643; WAN024D9G; Start 118; Stop 142
ctctttgtcaactatctgggaattt

SEQ ID NO: 268953 - DNA, 25 bp, Artificial
  probe
  misc_feature (1)..(25): SEQ ID NO: 643; WAN024D9G; Start 160; Stop 184
gtcaagggctatctggtctataagg

SEQ ID NO: 268954 - DNA, 25 bp, Artificial
  probe
  misc_feature (1)..(25): SEQ ID NO: 643; WAN024D9G; Start 114; Stop 138
cactctctttgtcaactatctggga

SEQ ID NO: 268955 - DNA, 25 bp, Artificial
  probe
  misc_feature (1)..(25): SEQ ID NO: 643; WAN024D9G; Start 261; Stop 285
tgatactgtgaagctgcttgataca

SEQ ID NO: 268956 - DNA, 25 bp, Artificial
  probe
  misc_feature (1)..(25): SEQ ID NO: 643; WAN024D9G; Start 249; Stop 273
cagcctaatgcttgatactgtgaag

SEQ ID NO: 268957 - DNA, 25 bp, Artificial
  probe
  misc_feature (1)..(25): SEQ ID NO: 643; WAN024D9G; Start 157; Stop 181
cttgtcaagggctatctggtctata

SEQ ID NO: 268958 - DNA, 25 bp, Artificial
  probe
  misc_feature (1)..(25): SEQ ID NO: 643; WAN024D9G; Start 161; Stop 185
tcaagggctatctggtctataaggg

SEQ ID NO: 268959 - DNA, 25 bp, Artificial
  probe
  misc_feature (1)..(25): SEQ ID NO: 643; WAN024D9G; Start 65; Stop 89
gatatctagtttccacctggttacc

SEQ ID NO: 268960 - DNA, 25 bp, Artificial
  probe
  misc_feature (1)..(25): SEQ ID NO: 643; WAN024D9G; Start 64; Stop 88
cgatatctagtttccacctggttac

SEQ ID NO: 268961 - DNA, 25 bp, Artificial
  probe
  misc_feature (1)..(25): SEQ ID NO: 643; WAN024D9G; Start 113; Stop 137
gcactctctttgtcaactatctggg

SEQ ID NO: 268962 - DNA, 25 bp, Artificial
  probe
  misc_feature (1)..(25): SEQ ID NO: 643; WAN024D9G; Start 112; Stop 136
ggcactctctttgtcaactatctgg

SEQ ID NO: 268963 - DNA, 25 bp, Artificial
  probe
  misc_feature (1)..(25): SEQ ID NO: 643; WAN024D9G; Start 111; Stop 135
gggcactctctttgtcaactatctg

SEQ ID NO: 268964 - DNA, 25 bp, Artificial
  probe
  misc_feature (1)..(25): SEQ ID NO: 643; WAN024D9G; Start 248; Stop 272
ccagcctaatgcttgatactgtgaa

SEQ ID NO: 268965 - DNA, 25 bp, Artificial
  probe
  misc_feature (1)..(25): SEQ ID NO: 643; WAN024D9G; Start 246; Stop 270
ttccagcctaatgcttgatactgtg

SEQ ID NO: 268966 - DNA, 25 bp, Artificial
  probe
  misc_feature (1)..(25): SEQ ID NO: 643; WAN024D9G; Start 156; Stop 180
tcttgtcaagggctatctggtctat

SEQ ID NO: 268967 - DNA, 25 bp, Artificial
  probe
  misc_feature (1)..(25): SEQ ID NO: 643; WAN024D9G; Start 63; Stop 87
ccgatatctagtttccacctggtta

SEQ ID NO: 268968 - DNA, 25 bp, Artificial
  probe
  misc_feature (1)..(25): SEQ ID NO: 643; WAN024D9G; Start 56; Stop 80
gacttgtccgatatctagtttccac

SEQ ID NO: 268969 - DNA, 25 bp, Artificial
  probe
  misc_feature (1)..(25): SEQ ID NO: 643; WAN024D9G; Start 58; Stop 82
cttgtccgatatctagtttccacct

SEQ ID NO: 268970 - DNA, 25 bp, Artificial
  probe
  misc_feature (1)..(25): SEQ ID NO: 643; WAN024D9G; Start 66; Stop 90
atatctagtttccacctggttacca

SEQ ID NO: 268971 - DNA, 25 bp, Artificial
  probe
  misc_feature (1)..(25): SEQ ID NO: 643; WAN024D9G; Start 127; Stop 151
aactatctgggaattttctgcttga

SEQ ID NO: 268972 - DNA, 25 bp, Artificial
  probe
  misc_feature (1)..(25): SEQ ID NO: 643; WAN024D9G; Start 125; Stop 149
tcaactatctgggaattttctgctt

SEQ ID NO: 268973 - DNA, 25 bp, Artificial
  probe
  misc_feature (1)..(25): SEQ ID NO: 643; WAN024D9G; Start 59; Stop 83
ttgtccgatatctagtttccacctg

SEQ ID NO: 268974 - DNA, 25 bp, Artificial
  probe
  misc_feature (1)..(25): SEQ ID NO: 643; WAN024D9G; Start 128; Stop 152
actatctgggaattttctgcttgat

SEQ ID NO: 268975 - DNA, 25 bp, Artificial
  probe
  misc_feature (1)..(25): SEQ ID NO: 643; WAN024D9G; Start 122; Stop 146
ttgtcaactatctgggaattttctg

SEQ ID NO: 268976 - DNA, 25 bp, Artificial
  probe
  misc_feature (1)..(25): SEQ ID NO: 643; WAN024D9G; Start 129; Stop 153
ctatctgggaattttctgcttgatt

SEQ ID NO: 268977 - DNA, 25 bp, Artificial
  probe
  misc_feature (1)..(25): SEQ ID NO: 643; WAN024D9G; Start 124; Stop 148
gtcaactatctgggaattttctgct

SEQ ID NO: 268978 - DNA, 25 bp, Artificial
  probe
  misc_feature (1)..(25): SEQ ID NO: 644; WAN024DY8; Start 69; Stop 93
caagttggatgaggtaattcttcaa

SEQ ID NO: 268979 - DNA, 25 bp, Artificial
  probe
  misc_feature (1)..(25): SEQ ID NO: 644; WAN024DY8; Start 535; Stop 559
atccatcaagtcatcaccaagcata

SEQ ID NO: 268980 - DNA, 25 bp, Artificial
  probe
  misc_feature (1)..(25): SEQ ID NO: 644; WAN024DY8; Start 534; Stop 558
tatccatcaagtcatcaccaagcat

SEQ ID NO: 268981 - DNA, 25 bp, Artificial
  probe
  misc_feature (1)..(25): SEQ ID NO: 644; WAN024DY8; Start 533; Stop 557
atatccatcaagtcatcaccaagca

SEQ ID NO: 268982 - DNA, 25 bp, Artificial
  probe
  misc_feature (1)..(25): SEQ ID NO: 644; WAN024DY8; Start 537; Stop 561
ccatcaagtcatcaccaagcataac

SEQ ID NO: 268983 - DNA, 25 bp, Artificial
  probe
  misc_feature (1)..(25): SEQ ID NO: 644; WAN024DY8; Start 536; Stop 560
tccatcaagtcatcaccaagcataa

SEQ ID NO: 268984 - DNA, 25 bp, Artificial
  probe
  misc_feature (1)..(25): SEQ ID NO: 644; WAN024DY8; Start 539; Stop 563
atcaagtcatcaccaagcataacga

SEQ ID NO: 268985 - DNA, 25 bp, Artificial
  probe
  misc_feature (1)..(25): SEQ ID NO: 644; WAN024DY8; Start 538; Stop 562
catcaagtcatcaccaagcataacg

SEQ ID NO: 268986 - DNA, 25 bp, Artificial
  probe
  misc_feature (1)..(25): SEQ ID NO: 644; WAN024DY8; Start 68; Stop 92
ccaagttggatgaggtaattcttca

SEQ ID NO: 268987 - DNA, 25 bp, Artificial
  probe
  misc_feature (1)..(25): SEQ ID NO: 644; WAN024DY8; Start 532; Stop 556
gatatccatcaagtcatcaccaagc

SEQ ID NO: 268988 - DNA, 25 bp, Artificial
  probe
  misc_feature (1)..(25): SEQ ID NO: 644; WAN024DY8; Start 362; Stop 386
acaaaggtttcaacactgtaaagac

SEQ ID NO: 268989 - DNA, 25 bp, Artificial
  probe
  misc_feature (1)..(25): SEQ ID NO: 644; WAN024DY8; Start 359; Stop 383
tcaacaaaggtttcaacactgtaaa

SEQ ID NO: 268990 - DNA, 25 bp, Artificial
  probe
  misc_feature (1)..(25): SEQ ID NO: 644; WAN024DY8; Start 358; Stop 382
ttcaacaaaggtttcaacactgtaa

SEQ ID NO: 268991 - DNA, 25 bp, Artificial
  probe
  misc_feature (1)..(25): SEQ ID NO: 644; WAN024DY8; Start 357; Stop 381
tttcaacaaaggtttcaacactgta

SEQ ID NO: 268992 - DNA, 25 bp, Artificial
  probe
  misc_feature (1)..(25): SEQ ID NO: 644; WAN024DY8; Start 361; Stop 385
aacaaaggtttcaacactgtaaaga

SEQ ID NO: 268993 - DNA, 25 bp, Artificial
  probe
  misc_feature (1)..(25): SEQ ID NO: 644; WAN024DY8; Start 360; Stop 384
caacaaaggtttcaacactgtaaag

SEQ ID NO: 268994 - DNA, 25 bp, Artificial
  probe
  misc_feature (1)..(25): SEQ ID NO: 644; WAN024DY8; Start 70; Stop 94
aagttggatgaggtaattcttcaaa

SEQ ID NO: 268995 - DNA, 25 bp, Artificial
  probe
  misc_feature (1)..(25): SEQ ID NO: 644; WAN024DY8; Start 542; Stop 566
aagtcatcaccaagcataacgacaa

SEQ ID NO: 268996 - DNA, 25 bp, Artificial
  probe
  misc_feature (1)..(25): SEQ ID NO: 644; WAN024DY8; Start 73; Stop 97
ttggatgaggtaattcttcaaatca

SEQ ID NO: 268997 - DNA, 25 bp, Artificial
  probe
  misc_feature (1)..(25): SEQ ID NO: 644; WAN024DY8; Start 71; Stop 95
agttggatgaggtaattcttcaaat

SEQ ID NO: 268998 - DNA, 25 bp, Artificial
  probe
  misc_feature (1)..(25): SEQ ID NO: 644; WAN024DY8; Start 72; Stop 96
gttggatgaggtaattcttcaaatc

SEQ ID NO: 268999 - DNA, 25 bp, Artificial
  probe
  misc_feature (1)..(25): SEQ ID NO: 644; WAN024DY8; Start 540; Stop 564
tcaagtcatcaccaagcataacgac

SEQ ID NO: 269000 - DNA, 25 bp, Artificial
  probe
  misc_feature (1)..(25): SEQ ID NO: 644; WAN024DY8; Start 363; Stop 387
caaaggtttcaacactgtaaagacc

SEQ ID NO: 269001 - DNA, 25 bp, Artificial
  probe
  misc_feature (1)..(25): SEQ ID NO: 644; WAN024DY8; Start 365; Stop 389
aaggtttcaacactgtaaagaccat

SEQ ID NO: 269002 - DNA, 25 bp, Artificial
  probe
  misc_feature (1)..(25): SEQ ID NO: 644; WAN024DY8; Start 364; Stop 388
aaaggtttcaacactgtaaagacca

SEQ ID NO: 269003 - DNA, 25 bp, Artificial
  probe
  misc_feature (1)..(25): SEQ ID NO: 644; WAN024DY8; Start 367; Stop 391
ggtttcaacactgtaaagaccatct

SEQ ID NO: 269004 - DNA, 25 bp, Artificial
  probe
  misc_feature (1)..(25): SEQ ID NO: 644; WAN024DY8; Start 366; Stop 390
aggtttcaacactgtaaagaccatc

SEQ ID NO: 269005 - DNA, 25 bp, Artificial
  probe
  misc_feature (1)..(25): SEQ ID NO: 644; WAN024DY8; Start 541; Stop 565
caagtcatcaccaagcataacgaca

SEQ ID NO: 269006 - DNA, 25 bp, Artificial
  probe
  misc_feature (1)..(25): SEQ ID NO: 644; WAN024DY8; Start 485; Stop 509
tagtcatccatgagttgtttggtaa

SEQ ID NO: 269007 - DNA, 25 bp, Artificial
  probe
  misc_feature (1)..(25): SEQ ID NO: 644; WAN024DY8; Start 484; Stop 508
gtagtcatccatgagttgtttggta

SEQ ID NO: 269008 - DNA, 25 bp, Artificial
  probe
  misc_feature (1)..(25): SEQ ID NO: 644; WAN024DY8; Start 526; Stop 550
gtctgtgatatccatcaagtcatca

SEQ ID NO: 269009 - DNA, 25 bp, Artificial
  probe
  misc_feature (1)..(25): SEQ ID NO: 644; WAN024DY8; Start 486; Stop 510
agtcatccatgagttgtttggtaag

SEQ ID NO: 269010 - DNA, 25 bp, Artificial
  probe
  misc_feature (1)..(25): SEQ ID NO: 644; WAN024DY8; Start 531; Stop 555
tgatatccatcaagtcatcaccaag

SEQ ID NO: 269011 - DNA, 25 bp, Artificial
  probe
  misc_feature (1)..(25): SEQ ID NO: 645; WAN024G86; Start 688; Stop 712
cagacagaacatccagaccattata

SEQ ID NO: 269012 - DNA, 25 bp, Artificial
  probe
  misc_feature (1)..(25): SEQ ID NO: 645; WAN024G86; Start 689; Stop 713
agacagaacatccagaccattatat

SEQ ID NO: 269013 - DNA, 25 bp, Artificial
  probe
  misc_feature (1)..(25): SEQ ID NO: 645; WAN024G86; Start 687; Stop 711
acagacagaacatccagaccattat

SEQ ID NO: 269014 - DNA, 25 bp, Artificial
  probe
  misc_feature (1)..(25): SEQ ID NO: 645; WAN024G86; Start 857; Stop 881
tggtcaatacagttagagtcaatga

SEQ ID NO: 269015 - DNA, 25 bp, Artificial
  probe
  misc_feature (1)..(25): SEQ ID NO: 645; WAN024G86; Start 686; Stop 710
aacagacagaacatccagaccatta

SEQ ID NO: 269016 - DNA, 25 bp, Artificial
  probe
  misc_feature (1)..(25): SEQ ID NO: 645; WAN024G86; Start 690; Stop 714
gacagaacatccagaccattatatt

SEQ ID NO: 269017 - DNA, 25 bp, Artificial
  probe
  misc_feature (1)..(25): SEQ ID NO: 645; WAN024G86; Start 856; Stop 880
ttggtcaatacagttagagtcaatg

SEQ ID NO: 269018 - DNA, 25 bp, Artificial
  probe
  misc_feature (1)..(25): SEQ ID NO: 645; WAN024G86; Start 923; Stop 947
ttgatgagttagttccttcagacga

SEQ ID NO: 269019 - DNA, 25 bp, Artificial
  probe
  misc_feature (1)..(25): SEQ ID NO: 645; WAN024G86; Start 858; Stop 882
ggtcaatacagttagagtcaatgaa

SEQ ID NO: 269020 - DNA, 25 bp, Artificial
  probe
  misc_feature (1)..(25): SEQ ID NO: 645; WAN024G86; Start 675; Stop 699
gtatctcagagaacagacagaacat

SEQ ID NO: 269021 - DNA, 25 bp, Artificial
  probe
  misc_feature (1)..(25): SEQ ID NO: 645; WAN024G86; Start 732; Stop 756
catcagtgagcatattgaggtcttg

SEQ ID NO: 269022 - DNA, 25 bp, Artificial
  probe
  misc_feature (1)..(25): SEQ ID NO: 645; WAN024G86; Start 731; Stop 755
tcatcagtgagcatattgaggtctt

SEQ ID NO: 269023 - DNA, 25 bp, Artificial
  probe
  misc_feature (1)..(25): SEQ ID NO: 645; WAN024G86; Start 730; Stop 754
ttcatcagtgagcatattgaggtct

SEQ ID NO: 269024 - DNA, 25 bp, Artificial
  probe
  misc_feature (1)..(25): SEQ ID NO: 645; WAN024G86; Start 676; Stop 700
tatctcagagaacagacagaacatc

SEQ ID NO: 269025 - DNA, 25 bp, Artificial
  probe
  misc_feature (1)..(25): SEQ ID NO: 645; WAN024G86; Start 674; Stop 698
agtatctcagagaacagacagaaca

SEQ ID NO: 269026 - DNA, 25 bp, Artificial
  probe
  misc_feature (1)..(25): SEQ ID NO: 645; WAN024G86; Start 925; Stop 949
gatgagttagttccttcagacgaga

SEQ ID NO: 269027 - DNA, 25 bp, Artificial
  probe
  misc_feature (1)..(25): SEQ ID NO: 645; WAN024G86; Start 733; Stop 757
atcagtgagcatattgaggtcttgt

SEQ ID NO: 269028 - DNA, 25 bp, Artificial
  probe
  misc_feature (1)..(25): SEQ ID NO: 645; WAN024G86; Start 593; Stop 617
gcttgagttcagaacaatataccaa

SEQ ID NO: 269029 - DNA, 25 bp, Artificial
  probe
  misc_feature (1)..(25): SEQ ID NO: 645; WAN024G86; Start 596; Stop 620
tgagttcagaacaatataccaacac

SEQ ID NO: 269030 - DNA, 25 bp, Artificial
  probe
  misc_feature (1)..(25): SEQ ID NO: 645; WAN024G86; Start 592; Stop 616
ggcttgagttcagaacaatatacca

SEQ ID NO: 269031 - DNA, 25 bp, Artificial
  probe
  misc_feature (1)..(25): SEQ ID NO: 645; WAN024G86; Start 926; Stop 950
atgagttagttccttcagacgagac

SEQ ID NO: 269032 - DNA, 25 bp, Artificial
  probe
  misc_feature (1)..(25): SEQ ID NO: 645; WAN024G86; Start 924; Stop 948
tgatgagttagttccttcagacgag

SEQ ID NO: 269033 - DNA, 25 bp, Artificial
  probe
  misc_feature (1)..(25): SEQ ID NO: 645; WAN024G86; Start 673; Stop 697
gagtatctcagagaacagacagaac

SEQ ID NO: 269034 - DNA, 25 bp, Artificial
  probe
  misc_feature (1)..(25): SEQ ID NO: 645; WAN024G86; Start 734; Stop 758
tcagtgagcatattgaggtcttgtt

SEQ ID NO: 269035 - DNA, 25 bp, Artificial
  probe
  misc_feature (1)..(25): SEQ ID NO: 645; WAN024G86; Start 672; Stop 696
ggagtatctcagagaacagacagaa

SEQ ID NO: 269036 - DNA, 25 bp, Artificial
  probe
  misc_feature (1)..(25): SEQ ID NO: 645; WAN024G86; Start 597; Stop 621
gagttcagaacaatataccaacact

SEQ ID NO: 269037 - DNA, 25 bp, Artificial
  probe
  misc_feature (1)..(25): SEQ ID NO: 645; WAN024G86; Start 599; Stop 623
gttcagaacaatataccaacacttg

SEQ ID NO: 269038 - DNA, 25 bp, Artificial
  probe
  misc_feature (1)..(25): SEQ ID NO: 645; WAN024G86; Start 595; Stop 619
ttgagttcagaacaatataccaaca

SEQ ID NO: 269039 - DNA, 25 bp, Artificial
  probe
  misc_feature (1)..(25): SEQ ID NO: 645; WAN024G86; Start 685; Stop 709
gaacagacagaacatccagaccatt

SEQ ID NO: 269040 - DNA, 25 bp, Artificial
  probe
  misc_feature (1)..(25): SEQ ID NO: 645; WAN024G86; Start 679; Stop 703
ctcagagaacagacagaacatccag

SEQ ID NO: 269041 - DNA, 25 bp, Artificial
  probe
  misc_feature (1)..(25): SEQ ID NO: 645; WAN024G86; Start 670; Stop 694
ttggagtatctcagagaacagacag

SEQ ID NO: 269042 - DNA, 25 bp, Artificial
  probe
  misc_feature (1)..(25): SEQ ID NO: 645; WAN024G86; Start 677; Stop 701
atctcagagaacagacagaacatcc

SEQ ID NO: 269043 - DNA, 25 bp, Artificial
  probe
  misc_feature (1)..(25): SEQ ID NO: 645; WAN024G86; Start 598; Stop 622
agttcagaacaatataccaacactt

SEQ ID NO: 269044 - DNA, 25 bp, Artificial
  probe
  misc_feature (1)..(25): SEQ ID NO: 646; WAN024FW9; Start 813; Stop 837
ttatgctcttcaacatcctcagatt

SEQ ID NO: 269045 - DNA, 25 bp, Artificial
  probe
  misc_feature (1)..(25): SEQ ID NO: 646; WAN024FW9; Start 812; Stop 836
attatgctcttcaacatcctcagat

SEQ ID NO: 269046 - DNA, 25 bp, Artificial
  probe
  misc_feature (1)..(25): SEQ ID NO: 646; WAN024FW9; Start 815; Stop 839
atgctcttcaacatcctcagattaa

SEQ ID NO: 269047 - DNA, 25 bp, Artificial
  probe
  misc_feature (1)..(25): SEQ ID NO: 646; WAN024FW9; Start 811; Stop 835
gattatgctcttcaacatcctcaga

SEQ ID NO: 269048 - DNA, 25 bp, Artificial
  probe
  misc_feature (1)..(25): SEQ ID NO: 646; WAN024FW9; Start 814; Stop 838
tatgctcttcaacatcctcagatta

SEQ ID NO: 269049 - DNA, 25 bp, Artificial
  probe
  misc_feature (1)..(25): SEQ ID NO: 646; WAN024FW9; Start 810; Stop 834
tgattatgctcttcaacatcctcag

SEQ ID NO: 269050 - DNA, 25 bp, Artificial
  probe
  misc_feature (1)..(25): SEQ ID NO: 646; WAN024FW9; Start 486; Stop 510
aatgcctgttagatatgaagatgtt

SEQ ID NO: 269051 - DNA, 25 bp, Artificial
  probe
  misc_feature (1)..(25): SEQ ID NO: 646; WAN024FW9; Start 701; Stop 725
tgacagatgctattgatacattgaa

SEQ ID NO: 269052 - DNA, 25 bp, Artificial
  probe
  misc_feature (1)..(25): SEQ ID NO: 646; WAN024FW9; Start 700; Stop 724
ttgacagatgctattgatacattga

SEQ ID NO: 269053 - DNA, 25 bp, Artificial
  probe
  misc_feature (1)..(25): SEQ ID NO: 646; WAN024FW9; Start 714; Stop 738
tgatacattgaataagacacagagt

SEQ ID NO: 269054 - DNA, 25 bp, Artificial
  probe
  misc_feature (1)..(25): SEQ ID NO: 646; WAN024FW9; Start 485; Stop 509
taatgcctgttagatatgaagatgt

SEQ ID NO: 269055 - DNA, 25 bp, Artificial
  probe
  misc_feature (1)..(25): SEQ ID NO: 646; WAN024FW9; Start 878; Stop 902
aattggagaagctagatgactgttc

SEQ ID NO: 269056 - DNA, 25 bp, Artificial
  probe
  misc_feature (1)..(25): SEQ ID NO: 646; WAN024FW9; Start 484; Stop 508
gtaatgcctgttagatatgaagatg

SEQ ID NO: 269057 - DNA, 25 bp, Artificial
  probe
  misc_feature (1)..(25): SEQ ID NO: 646; WAN024FW9; Start 377; Stop 401
ttgtaatgcttggtgatgaccttat

SEQ ID NO: 269058 - DNA, 25 bp, Artificial
  probe
  misc_feature (1)..(25): SEQ ID NO: 646; WAN024FW9; Start 699; Stop 723
attgacagatgctattgatacattg

SEQ ID NO: 269059 - DNA, 25 bp, Artificial
  probe
  misc_feature (1)..(25): SEQ ID NO: 646; WAN024FW9; Start 483; Stop 507
agtaatgcctgttagatatgaagat

SEQ ID NO: 269060 - DNA, 25 bp, Artificial
  probe
  misc_feature (1)..(25): SEQ ID NO: 646; WAN024FW9; Start 482; Stop 506
cagtaatgcctgttagatatgaaga

SEQ ID NO: 269061 - DNA, 25 bp, Artificial
  probe
  misc_feature (1)..(25): SEQ ID NO: 646; WAN024FW9; Start 510; Stop 534
ttcttcttatggtgtgatttctcct

SEQ ID NO: 269062 - DNA, 25 bp, Artificial
  probe
  misc_feature (1)..(25): SEQ ID NO: 646; WAN024FW9; Start 378; Stop 402
tgtaatgcttggtgatgaccttatg

SEQ ID NO: 269063 - DNA, 25 bp, Artificial
  probe
  misc_feature (1)..(25): SEQ ID NO: 646; WAN024FW9; Start 702; Stop 726
gacagatgctattgatacattgaat

SEQ ID NO: 269064 - DNA, 25 bp, Artificial
  probe
  misc_feature (1)..(25): SEQ ID NO: 646; WAN024FW9; Start 376; Stop 400
gttgtaatgcttggtgatgacctta

SEQ ID NO: 269065 - DNA, 25 bp, Artificial
  probe
  misc_feature (1)..(25): SEQ ID NO: 646; WAN024FW9; Start 509; Stop 533
tttcttcttatggtgtgatttctcc

SEQ ID NO: 269066 - DNA, 25 bp, Artificial
  probe
  misc_feature (1)..(25): SEQ ID NO: 646; WAN024FW9; Start 511; Stop 535
tcttcttatggtgtgatttctccta

SEQ ID NO: 269067 - DNA, 25 bp, Artificial
  probe
  misc_feature (1)..(25): SEQ ID NO: 646; WAN024FW9; Start 372; Stop 396
ctttgttgtaatgcttggtgatgac

SEQ ID NO: 269068 - DNA, 25 bp, Artificial
  probe
  misc_feature (1)..(25): SEQ ID NO: 646; WAN024FW9; Start 383; Stop 407
tgcttggtgatgaccttatggatat

SEQ ID NO: 269069 - DNA, 25 bp, Artificial
  probe
  misc_feature (1)..(25): SEQ ID NO: 646; WAN024FW9; Start 382; Stop 406
atgcttggtgatgaccttatggata

SEQ ID NO: 269070 - DNA, 25 bp, Artificial
  probe
  misc_feature (1)..(25): SEQ ID NO: 646; WAN024FW9; Start 397; Stop 421
cttatggatatcaccgactcaactg

SEQ ID NO: 269071 - DNA, 25 bp, Artificial
  probe
  misc_feature (1)..(25): SEQ ID NO: 646; WAN024FW9; Start 817; Stop 841
gctcttcaacatcctcagattaaag

SEQ ID NO: 269072 - DNA, 25 bp, Artificial
  probe
  misc_feature (1)..(25): SEQ ID NO: 646; WAN024FW9; Start 816; Stop 840
tgctcttcaacatcctcagattaaa

SEQ ID NO: 269073 - DNA, 25 bp, Artificial
  probe
  misc_feature (1)..(25): SEQ ID NO: 646; WAN024FW9; Start 713; Stop 737
ttgatacattgaataagacacagag

SEQ ID NO: 269074 - DNA, 25 bp, Artificial
  probe
  misc_feature (1)..(25): SEQ ID NO: 646; WAN024FW9; Start 380; Stop 404
taatgcttggtgatgaccttatgga

SEQ ID NO: 269075 - DNA, 25 bp, Artificial
  probe
  misc_feature (1)..(25): SEQ ID NO: 646; WAN024FW9; Start 379; Stop 403
gtaatgcttggtgatgaccttatgg

SEQ ID NO: 269076 - DNA, 25 bp, Artificial
  probe
  misc_feature (1)..(25): SEQ ID NO: 646; WAN024FW9; Start 507; Stop 531
tgtttcttcttatggtgtgatttct

SEQ ID NO: 269077 - DNA, 25 bp, Artificial
  probe
  misc_feature (1)..(25): SEQ ID NO: 647; WAN024DCH; Start 32; Stop 56
tcttgtcattagttgtattgatggc

SEQ ID NO: 269078 - DNA, 25 bp, Artificial
  probe
  misc_feature (1)..(25): SEQ ID NO: 647; WAN024DCH; Start 31; Stop 55
ctcttgtcattagttgtattgatgg

SEQ ID NO: 269079 - DNA, 25 bp, Artificial
  probe
  misc_feature (1)..(25): SEQ ID NO: 647; WAN024DCH; Start 28; Stop 52
agtctcttgtcattagttgtattga

SEQ ID NO: 269080 - DNA, 25 bp, Artificial
  probe
  misc_feature (1)..(25): SEQ ID NO: 647; WAN024DCH; Start 500; Stop 524
ttcaatttggtgctatcagtaatgc

SEQ ID NO: 269081 - DNA, 25 bp, Artificial
  probe
  misc_feature (1)..(25): SEQ ID NO: 647; WAN024DCH; Start 170; Stop 194
tggatggcaaagaagttaagttatc

SEQ ID NO: 269082 - DNA, 25 bp, Artificial
  probe
  misc_feature (1)..(25): SEQ ID NO: 647; WAN024DCH; Start 493; Stop 517
ggaaagattcaatttggtgctatca

SEQ ID NO: 269083 - DNA, 25 bp, Artificial
  probe
  misc_feature (1)..(25): SEQ ID NO: 647; WAN024DCH; Start 492; Stop 516
tggaaagattcaatttggtgctatc

SEQ ID NO: 269084 - DNA, 25 bp, Artificial
  probe
  misc_feature (1)..(25): SEQ ID NO: 647; WAN024DCH; Start 27; Stop 51
aagtctcttgtcattagttgtattg

SEQ ID NO: 269085 - DNA, 25 bp, Artificial
  probe
  misc_feature (1)..(25): SEQ ID NO: 647; WAN024DCH; Start 495; Stop 519
aaagattcaatttggtgctatcagt

SEQ ID NO: 269086 - DNA, 25 bp, Artificial
  probe
  misc_feature (1)..(25): SEQ ID NO: 647; WAN024DCH; Start 407; Stop 431
tttatgataccaaagcaaccacctt

SEQ ID NO: 269087 - DNA, 25 bp, Artificial
  probe
  misc_feature (1)..(25): SEQ ID NO: 647; WAN024DCH; Start 169; Stop 193
atggatggcaaagaagttaagttat

SEQ ID NO: 269088 - DNA, 25 bp, Artificial
  probe
  misc_feature (1)..(25): SEQ ID NO: 647; WAN024DCH; Start 171; Stop 195
ggatggcaaagaagttaagttatct

SEQ ID NO: 269089 - DNA, 25 bp, Artificial
  probe
  misc_feature (1)..(25): SEQ ID NO: 647; WAN024DCH; Start 491; Stop 515
ttggaaagattcaatttggtgctat

SEQ ID NO: 269090 - DNA, 25 bp, Artificial
  probe
  misc_feature (1)..(25): SEQ ID NO: 647; WAN024DCH; Start 408; Stop 432
ttatgataccaaagcaaccaccttc

SEQ ID NO: 269091 - DNA, 25 bp, Artificial
  probe
  misc_feature (1)..(25): SEQ ID NO: 647; WAN024DCH; Start 494; Stop 518
gaaagattcaatttggtgctatcag

SEQ ID NO: 269092 - DNA, 25 bp, Artificial
  probe
  misc_feature (1)..(25): SEQ ID NO: 647; WAN024DCH; Start 21; Stop 45
tggcttaagtctcttgtcattagtt

SEQ ID NO: 269093 - DNA, 25 bp, Artificial
  probe
  misc_feature (1)..(25): SEQ ID NO: 647; WAN024DCH; Start 22; Stop 46
ggcttaagtctcttgtcattagttg

SEQ ID NO: 269094 - DNA, 25 bp, Artificial
  probe
  misc_feature (1)..(25): SEQ ID NO: 647; WAN024DCH; Start 20; Stop 44
ctggcttaagtctcttgtcattagt

SEQ ID NO: 269095 - DNA, 25 bp, Artificial
  probe
  misc_feature (1)..(25): SEQ ID NO: 647; WAN024DCH; Start 497; Stop 521
agattcaatttggtgctatcagtaa

SEQ ID NO: 269096 - DNA, 25 bp, Artificial
  probe
  misc_feature (1)..(25): SEQ ID NO: 647; WAN024DCH; Start 496; Stop 520
aagattcaatttggtgctatcagta

SEQ ID NO: 269097 - DNA, 25 bp, Artificial
  probe
  misc_feature (1)..(25): SEQ ID NO: 647; WAN024DCH; Start 168; Stop 192
catggatggcaaagaagttaagtta

SEQ ID NO: 269098 - DNA, 25 bp, Artificial
  probe
  misc_feature (1)..(25): SEQ ID NO: 647; WAN024DCH; Start 23; Stop 47
gcttaagtctcttgtcattagttgt

SEQ ID NO: 269099 - DNA, 25 bp, Artificial
  probe
  misc_feature (1)..(25): SEQ ID NO: 647; WAN024DCH; Start 174; Stop 198
tggcaaagaagttaagttatctgat

SEQ ID NO: 269100 - DNA, 25 bp, Artificial
  probe
  misc_feature (1)..(25): SEQ ID NO: 647; WAN024DCH; Start 173; Stop 197
atggcaaagaagttaagttatctga

SEQ ID NO: 269101 - DNA, 25 bp, Artificial
  probe
  misc_feature (1)..(25): SEQ ID NO: 647; WAN024DCH; Start 30; Stop 54
tctcttgtcattagttgtattgatg

SEQ ID NO: 269102 - DNA, 25 bp, Artificial
  probe
  misc_feature (1)..(25): SEQ ID NO: 647; WAN024DCH; Start 29; Stop 53
gtctcttgtcattagttgtattgat

SEQ ID NO: 269103 - DNA, 25 bp, Artificial
  probe
  misc_feature (1)..(25): SEQ ID NO: 647; WAN024DCH; Start 501; Stop 525
tcaatttggtgctatcagtaatgcg

SEQ ID NO: 269104 - DNA, 25 bp, Artificial
  probe
  misc_feature (1)..(25): SEQ ID NO: 647; WAN024DCH; Start 172; Stop 196
gatggcaaagaagttaagttatctg

SEQ ID NO: 269105 - DNA, 25 bp, Artificial
  probe
  misc_feature (1)..(25): SEQ ID NO: 647; WAN024DCH; Start 19; Stop 43
gctggcttaagtctcttgtcattag

SEQ ID NO: 269106 - DNA, 25 bp, Artificial
  probe
  misc_feature (1)..(25): SEQ ID NO: 647; WAN024DCH; Start 499; Stop 523
attcaatttggtgctatcagtaatg

SEQ ID NO: 269107 - DNA, 25 bp, Artificial
  probe
  misc_feature (1)..(25): SEQ ID NO: 647; WAN024DCH; Start 498; Stop 522
gattcaatttggtgctatcagtaat

SEQ ID NO: 269108 - DNA, 25 bp, Artificial
  probe
  misc_feature (1)..(25): SEQ ID NO: 647; WAN024DCH; Start 18; Stop 42
tgctggcttaagtctcttgtcatta

SEQ ID NO: 269109 - DNA, 25 bp, Artificial
  probe
  misc_feature (1)..(25): SEQ ID NO: 647; WAN024DCH; Start 258; Stop 282
aagtatgccagagttgatggaacta

SEQ ID NO: 269110 - DNA, 25 bp, Artificial
  probe
  misc_feature (1)..(25): SEQ ID NO: 648; WAN024CKB; Start 836; Stop 860
taacagatagtggtggtattcagga

SEQ ID NO: 269111 - DNA, 25 bp, Artificial
  probe
  misc_feature (1)..(25): SEQ ID NO: 648; WAN024CKB; Start 835; Stop 859
ttaacagatagtggtggtattcagg

SEQ ID NO: 269112 - DNA, 25 bp, Artificial
  probe
  misc_feature (1)..(25): SEQ ID NO: 648; WAN024CKB; Start 539; Stop 563
ctacaattcaagaggactatacgca

SEQ ID NO: 269113 - DNA, 25 bp, Artificial
  probe
  misc_feature (1)..(25): SEQ ID NO: 648; WAN024CKB; Start 538; Stop 562
actacaattcaagaggactatacgc

SEQ ID NO: 269114 - DNA, 25 bp, Artificial
  probe
  misc_feature (1)..(25): SEQ ID NO: 648; WAN024CKB; Start 540; Stop 564
tacaattcaagaggactatacgcat

SEQ ID NO: 269115 - DNA, 25 bp, Artificial
  probe
  misc_feature (1)..(25): SEQ ID NO: 648; WAN024CKB; Start 840; Stop 864
agatagtggtggtattcaggaagag

SEQ ID NO: 269116 - DNA, 25 bp, Artificial
  probe
  misc_feature (1)..(25): SEQ ID NO: 648; WAN024CKB; Start 541; Stop 565
acaattcaagaggactatacgcatc

SEQ ID NO: 269117 - DNA, 25 bp, Artificial
  probe
  misc_feature (1)..(25): SEQ ID NO: 648; WAN024CKB; Start 555; Stop 579
ctatacgcatcctgagttagaatgg

SEQ ID NO: 269118 - DNA, 25 bp, Artificial
  probe
  misc_feature (1)..(25): SEQ ID NO: 648; WAN024CKB; Start 890; Stop 914
tggttatgagagatacaactgaacg

SEQ ID NO: 269119 - DNA, 25 bp, Artificial
  probe
  misc_feature (1)..(25): SEQ ID NO: 648; WAN024CKB; Start 837; Stop 861
aacagatagtggtggtattcaggaa

SEQ ID NO: 269120 - DNA, 25 bp, Artificial
  probe
  misc_feature (1)..(25): SEQ ID NO: 648; WAN024CKB; Start 839; Stop 863
cagatagtggtggtattcaggaaga

SEQ ID NO: 269121 - DNA, 25 bp, Artificial
  probe
  misc_feature (1)..(25): SEQ ID NO: 648; WAN024CKB; Start 554; Stop 578
actatacgcatcctgagttagaatg

SEQ ID NO: 269122 - DNA, 25 bp, Artificial
  probe
  misc_feature (1)..(25): SEQ ID NO: 648; WAN024CKB; Start 553; Stop 577
gactatacgcatcctgagttagaat

SEQ ID NO: 269123 - DNA, 25 bp, Artificial
  probe
  misc_feature (1)..(25): SEQ ID NO: 648; WAN024CKB; Start 838; Stop 862
acagatagtggtggtattcaggaag

SEQ ID NO: 269124 - DNA, 25 bp, Artificial
  probe
  misc_feature (1)..(25): SEQ ID NO: 648; WAN024CKB; Start 1074; Stop 1098
agacatactagaaggagaagtgcta

SEQ ID NO: 269125 - DNA, 25 bp, Artificial
  probe
  misc_feature (1)..(25): SEQ ID NO: 648; WAN024CKB; Start 1076; Stop 1100
acatactagaaggagaagtgctaac

SEQ ID NO: 269126 - DNA, 25 bp, Artificial
  probe
  misc_feature (1)..(25): SEQ ID NO: 648; WAN024CKB; Start 1075; Stop 1099
gacatactagaaggagaagtgctaa

SEQ ID NO: 269127 - DNA, 25 bp, Artificial
  probe
  misc_feature (1)..(25): SEQ ID NO: 648; WAN024CKB; Start 889; Stop 913
ttggttatgagagatacaactgaac

SEQ ID NO: 269128 - DNA, 25 bp, Artificial
  probe
  misc_feature (1)..(25): SEQ ID NO: 648; WAN024CKB; Start 841; Stop 865
gatagtggtggtattcaggaagagg

SEQ ID NO: 269129 - DNA, 25 bp, Artificial
  probe
  misc_feature (1)..(25): SEQ ID NO: 648; WAN024CKB; Start 1077; Stop 1101
catactagaaggagaagtgctaact

SEQ ID NO: 269130 - DNA, 25 bp, Artificial
  probe
  misc_feature (1)..(25): SEQ ID NO: 648; WAN024CKB; Start 537; Stop 561
aactacaattcaagaggactatacg

SEQ ID NO: 269131 - DNA, 25 bp, Artificial
  probe
  misc_feature (1)..(25): SEQ ID NO: 648; WAN024CKB; Start 626; Stop 650
atcttggtgaaccgatgagacatat

SEQ ID NO: 269132 - DNA, 25 bp, Artificial
  probe
  misc_feature (1)..(25): SEQ ID NO: 648; WAN024CKB; Start 1080; Stop 1104
actagaaggagaagtgctaactaat

SEQ ID NO: 269133 - DNA, 25 bp, Artificial
  probe
  misc_feature (1)..(25): SEQ ID NO: 648; WAN024CKB; Start 1073; Stop 1097
cagacatactagaaggagaagtgct

SEQ ID NO: 269134 - DNA, 25 bp, Artificial
  probe
  misc_feature (1)..(25): SEQ ID NO: 648; WAN024CKB; Start 625; Stop 649
aatcttggtgaaccgatgagacata

SEQ ID NO: 269135 - DNA, 25 bp, Artificial
  probe
  misc_feature (1)..(25): SEQ ID NO: 648; WAN024CKB; Start 1041; Stop 1065
atatggagatggaacggcttgtaag

SEQ ID NO: 269136 - DNA, 25 bp, Artificial
  probe
  misc_feature (1)..(25): SEQ ID NO: 648; WAN024CKB; Start 597; Stop 621
tattctaattacagctcatcgtcgt

SEQ ID NO: 269137 - DNA, 25 bp, Artificial
  probe
  misc_feature (1)..(25): SEQ ID NO: 648; WAN024CKB; Start 1079; Stop 1103
tactagaaggagaagtgctaactaa

SEQ ID NO: 269138 - DNA, 25 bp, Artificial
  probe
  misc_feature (1)..(25): SEQ ID NO: 648; WAN024CKB; Start 556; Stop 580
tatacgcatcctgagttagaatgga

SEQ ID NO: 269139 - DNA, 25 bp, Artificial
  probe
  misc_feature (1)..(25): SEQ ID NO: 648; WAN024CKB; Start 598; Stop 622
attctaattacagctcatcgtcgtg

SEQ ID NO: 269140 - DNA, 25 bp, Artificial
  probe
  misc_feature (1)..(25): SEQ ID NO: 648; WAN024CKB; Start 596; Stop 620
ttattctaattacagctcatcgtcg

SEQ ID NO: 269141 - DNA, 25 bp, Artificial
  probe
  misc_feature (1)..(25): SEQ ID NO: 648; WAN024CKB; Start 1078; Stop 1102
atactagaaggagaagtgctaacta

SEQ ID NO: 269142 - DNA, 25 bp, Artificial
  probe
  misc_feature (1)..(25): SEQ ID NO: 648; WAN024CKB; Start 542; Stop 566
caattcaagaggactatacgcatcc

SEQ ID NO: 269143 - DNA, 25 bp, Artificial
  probe
  misc_feature (1)..(25): SEQ ID NO: 649; WAN024FNO; Start 697; Stop 721
ttggtattgattggtaaggatgagg

SEQ ID NO: 269144 - DNA, 25 bp, Artificial
  probe
  misc_feature (1)..(25): SEQ ID NO: 649; WAN024FNO; Start 923; Stop 947
gagagacactgattcaagatggtat

SEQ ID NO: 269145 - DNA, 25 bp, Artificial
  probe
  misc_feature (1)..(25): SEQ ID NO: 649; WAN024FNO; Start 536; Stop 560
aagaggaacctacggagaatactat

SEQ ID NO: 269146 - DNA, 25 bp, Artificial
  probe
  misc_feature (1)..(25): SEQ ID NO: 649; WAN024FNO; Start 535; Stop 559
gaagaggaacctacggagaatacta

SEQ ID NO: 269147 - DNA, 25 bp, Artificial
  probe
  misc_feature (1)..(25): SEQ ID NO: 649; WAN024FNO; Start 537; Stop 561
agaggaacctacggagaatactata

SEQ ID NO: 269148 - DNA, 25 bp, Artificial
  probe
  misc_feature (1)..(25): SEQ ID NO: 649; WAN024FNO; Start 857; Stop 881
ttggtatggtattacttgaggcaat

SEQ ID NO: 269149 - DNA, 25 bp, Artificial
  probe
  misc_feature (1)..(25): SEQ ID NO: 649; WAN024FNO; Start 696; Stop 720
attggtattgattggtaaggatgag

SEQ ID NO: 269150 - DNA, 25 bp, Artificial
  probe
  misc_feature (1)..(25): SEQ ID NO: 649; WAN024FNO; Start 859; Stop 883
ggtatggtattacttgaggcaatgt

SEQ ID NO: 269151 - DNA, 25 bp, Artificial
  probe
  misc_feature (1)..(25): SEQ ID NO: 649; WAN024FNO; Start 858; Stop 882
tggtatggtattacttgaggcaatg

SEQ ID NO: 269152 - DNA, 25 bp, Artificial
  probe
  misc_feature (1)..(25): SEQ ID NO: 649; WAN024FNO; Start 924; Stop 948
agagacactgattcaagatggtata

SEQ ID NO: 269153 - DNA, 25 bp, Artificial
  probe
  misc_feature (1)..(25): SEQ ID NO: 649; WAN024FNO; Start 922; Stop 946
ggagagacactgattcaagatggta

SEQ ID NO: 269154 - DNA, 25 bp, Artificial
  probe
  misc_feature (1)..(25): SEQ ID NO: 649; WAN024FNO; Start 533; Stop 557
aagaagaggaacctacggagaatac

SEQ ID NO: 269155 - DNA, 25 bp, Artificial
  probe
  misc_feature (1)..(25): SEQ ID NO: 649; WAN024FNO; Start 532; Stop 556
caagaagaggaacctacggagaata

SEQ ID NO: 269156 - DNA, 25 bp, Artificial
  probe
  misc_feature (1)..(25): SEQ ID NO: 649; WAN024FNO; Start 407; Stop 431
gaatgctcaataagagaaccaagac

SEQ ID NO: 269157 - DNA, 25 bp, Artificial
  probe
  misc_feature (1)..(25): SEQ ID NO: 649; WAN024FNO; Start 406; Stop 430
agaatgctcaataagagaaccaaga

SEQ ID NO: 269158 - DNA, 25 bp, Artificial
  probe
  misc_feature (1)..(25): SEQ ID NO: 649; WAN024FNO; Start 408; Stop 432
aatgctcaataagagaaccaagaca

SEQ ID NO: 269159 - DNA, 25 bp, Artificial
  probe
  misc_feature (1)..(25): SEQ ID NO: 649; WAN024FNO; Start 405; Stop 429
aagaatgctcaataagagaaccaag

SEQ ID NO: 269160 - DNA, 25 bp, Artificial
  probe
  misc_feature (1)..(25): SEQ ID NO: 649; WAN024FNO; Start 409; Stop 433
atgctcaataagagaaccaagacag

SEQ ID NO: 269161 - DNA, 25 bp, Artificial
  probe
  misc_feature (1)..(25): SEQ ID NO: 649; WAN024FNO; Start 411; Stop 435
gctcaataagagaaccaagacagtt

SEQ ID NO: 269162 - DNA, 25 bp, Artificial
  probe
  misc_feature (1)..(25): SEQ ID NO: 649; WAN024FNO; Start 695; Stop 719
aattggtattgattggtaaggatga

SEQ ID NO: 269163 - DNA, 25 bp, Artificial
  probe
  misc_feature (1)..(25): SEQ ID NO: 649; WAN024FNO; Start 403; Stop 427
gtaagaatgctcaataagagaacca

SEQ ID NO: 269164 - DNA, 25 bp, Artificial
  probe
  misc_feature (1)..(25): SEQ ID NO: 649; WAN024FNO; Start 402; Stop 426
tgtaagaatgctcaataagagaacc

SEQ ID NO: 269165 - DNA, 25 bp, Artificial
  probe
  misc_feature (1)..(25): SEQ ID NO: 649; WAN024FNO; Start 925; Stop 949
gagacactgattcaagatggtataa

SEQ ID NO: 269166 - DNA, 25 bp, Artificial
  probe
  misc_feature (1)..(25): SEQ ID NO: 649; WAN024FNO; Start 860; Stop 884
gtatggtattacttgaggcaatgta

SEQ ID NO: 269167 - DNA, 25 bp, Artificial
  probe
  misc_feature (1)..(25): SEQ ID NO: 649; WAN024FNO; Start 862; Stop 886
atggtattacttgaggcaatgtatt

SEQ ID NO: 269168 - DNA, 25 bp, Artificial
  probe
  misc_feature (1)..(25): SEQ ID NO: 649; WAN024FNO; Start 534; Stop 558
agaagaggaacctacggagaatact

SEQ ID NO: 269169 - DNA, 25 bp, Artificial
  probe
  misc_feature (1)..(25): SEQ ID NO: 649; WAN024FNO; Start 404; Stop 428
taagaatgctcaataagagaaccaa

SEQ ID NO: 269170 - DNA, 25 bp, Artificial
  probe
  misc_feature (1)..(25): SEQ ID NO: 649; WAN024FNO; Start 920; Stop 944
gaggagagacactgattcaagatgg

SEQ ID NO: 269171 - DNA, 25 bp, Artificial
  probe
  misc_feature (1)..(25): SEQ ID NO: 649; WAN024FNO; Start 919; Stop 943
ggaggagagacactgattcaagatg

SEQ ID NO: 269172 - DNA, 25 bp, Artificial
  probe
  misc_feature (1)..(25): SEQ ID NO: 649; WAN024FNO; Start 410; Stop 434
tgctcaataagagaaccaagacagt

SEQ ID NO: 269173 - DNA, 25 bp, Artificial
  probe
  misc_feature (1)..(25): SEQ ID NO: 649; WAN024FNO; Start 861; Stop 885
tatggtattacttgaggcaatgtat

SEQ ID NO: 269174 - DNA, 25 bp, Artificial
  probe
  misc_feature (1)..(25): SEQ ID NO: 649; WAN024FNO; Start 539; Stop 563
aggaacctacggagaatactataga

SEQ ID NO: 269175 - DNA, 25 bp, Artificial
  probe
  misc_feature (1)..(25): SEQ ID NO: 649; WAN024FNO; Start 918; Stop 942
tggaggagagacactgattcaagat

SEQ ID NO: 269176 - DNA, 25 bp, Artificial
  probe
  misc_feature (1)..(25): SEQ ID NO: 650; WAN024CKD; Start 415; Stop 439
acttctatcattgccgactatcatt

SEQ ID NO: 269177 - DNA, 25 bp, Artificial
  probe
  misc_feature (1)..(25): SEQ ID NO: 650; WAN024CKD; Start 1033; Stop 1057
ccttatggagatggaatgacttgta

SEQ ID NO: 269178 - DNA, 25 bp, Artificial
  probe
  misc_feature (1)..(25): SEQ ID NO: 650; WAN024CKD; Start 1034; Stop 1058
cttatggagatggaatgacttgtaa

SEQ ID NO: 269179 - DNA, 25 bp, Artificial
  probe
  misc_feature (1)..(25): SEQ ID NO: 650; WAN024CKD; Start 102; Stop 126
gtgtgtaactggtcaacataaggaa

SEQ ID NO: 269180 - DNA, 25 bp, Artificial
  probe
  misc_feature (1)..(25): SEQ ID NO: 650; WAN024CKD; Start 99; Stop 123
tgtgtgtgtaactggtcaacataag

SEQ ID NO: 269181 - DNA, 25 bp, Artificial
  probe
  misc_feature (1)..(25): SEQ ID NO: 650; WAN024CKD; Start 101; Stop 125
tgtgtgtaactggtcaacataagga

SEQ ID NO: 269182 - DNA, 25 bp, Artificial
  probe
  misc_feature (1)..(25): SEQ ID NO: 650; WAN024CKD; Start 100; Stop 124
gtgtgtgtaactggtcaacataagg

SEQ ID NO: 269183 - DNA, 25 bp, Artificial
  probe
  misc_feature (1)..(25): SEQ ID NO: 650; WAN024CKD; Start 323; Stop 347
tttatatgggaatcaaagtgggaca

SEQ ID NO: 269184 - DNA, 25 bp, Artificial
  probe
  misc_feature (1)..(25): SEQ ID NO: 650; WAN024CKD; Start 582; Stop 606
tagtaagttaatcatgctaacggct

SEQ ID NO: 269185 - DNA, 25 bp, Artificial
  probe
  misc_feature (1)..(25): SEQ ID NO: 650; WAN024CKD; Start 581; Stop 605
gtagtaagttaatcatgctaacggc

SEQ ID NO: 269186 - DNA, 25 bp, Artificial
  probe
  misc_feature (1)..(25): SEQ ID NO: 650; WAN024CKD; Start 569; Stop 593
aatgggcaaagggtagtaagttaat

SEQ ID NO: 269187 - DNA, 25 bp, Artificial
  probe
  misc_feature (1)..(25): SEQ ID NO: 650; WAN024CKD; Start 585; Stop 609
taagttaatcatgctaacggctcat

SEQ ID NO: 269188 - DNA, 25 bp, Artificial
  probe
  misc_feature (1)..(25): SEQ ID NO: 650; WAN024CKD; Start 572; Stop 596
gggcaaagggtagtaagttaatcat

SEQ ID NO: 269189 - DNA, 25 bp, Artificial
  probe
  misc_feature (1)..(25): SEQ ID NO: 650; WAN024CKD; Start 570; Stop 594
atgggcaaagggtagtaagttaatc

SEQ ID NO: 269190 - DNA, 25 bp, Artificial
  probe
  misc_feature (1)..(25): SEQ ID NO: 650; WAN024CKD; Start 580; Stop 604
ggtagtaagttaatcatgctaacgg

SEQ ID NO: 269191 - DNA, 25 bp, Artificial
  probe
  misc_feature (1)..(25): SEQ ID NO: 650; WAN024CKD; Start 416; Stop 440
cttctatcattgccgactatcattt

SEQ ID NO: 269192 - DNA, 25 bp, Artificial
  probe
  misc_feature (1)..(25): SEQ ID NO: 650; WAN024CKD; Start 568; Stop 592
gaatgggcaaagggtagtaagttaa

SEQ ID NO: 269193 - DNA, 25 bp, Artificial
  probe
  misc_feature (1)..(25): SEQ ID NO: 650; WAN024CKD; Start 504; Stop 528
gggaaatacagtcattgatgctttg

SEQ ID NO: 269194 - DNA, 25 bp, Artificial
  probe
  misc_feature (1)..(25): SEQ ID NO: 650; WAN024CKD; Start 1037; Stop 1061
atggagatggaatgacttgtaaacg

SEQ ID NO: 269195 - DNA, 25 bp, Artificial
  probe
  misc_feature (1)..(25): SEQ ID NO: 650; WAN024CKD; Start 583; Stop 607
agtaagttaatcatgctaacggctc

SEQ ID NO: 269196 - DNA, 25 bp, Artificial
  probe
  misc_feature (1)..(25): SEQ ID NO: 650; WAN024CKD; Start 584; Stop 608
gtaagttaatcatgctaacggctca

SEQ ID NO: 269197 - DNA, 25 bp, Artificial
  probe
  misc_feature (1)..(25): SEQ ID NO: 650; WAN024CKD; Start 1036; Stop 1060
tatggagatggaatgacttgtaaac

SEQ ID NO: 269198 - DNA, 25 bp, Artificial
  probe
  misc_feature (1)..(25): SEQ ID NO: 650; WAN024CKD; Start 505; Stop 529
ggaaatacagtcattgatgctttga

SEQ ID NO: 269199 - DNA, 25 bp, Artificial
  probe
  misc_feature (1)..(25): SEQ ID NO: 650; WAN024CKD; Start 586; Stop 610
aagttaatcatgctaacggctcatc

SEQ ID NO: 269200 - DNA, 25 bp, Artificial
  probe
  misc_feature (1)..(25): SEQ ID NO: 650; WAN024CKD; Start 571; Stop 595
tgggcaaagggtagtaagttaatca

SEQ ID NO: 269201 - DNA, 25 bp, Artificial
  probe
  misc_feature (1)..(25): SEQ ID NO: 650; WAN024CKD; Start 508; Stop 532
aatacagtcattgatgctttgaaga

SEQ ID NO: 269202 - DNA, 25 bp, Artificial
  probe
  misc_feature (1)..(25): SEQ ID NO: 650; WAN024CKD; Start 573; Stop 597
ggcaaagggtagtaagttaatcatg

SEQ ID NO: 269203 - DNA, 25 bp, Artificial
  probe
  misc_feature (1)..(25): SEQ ID NO: 650; WAN024CKD; Start 491; Stop 515
atatctttgtgacgggaaatacagt

SEQ ID NO: 269204 - DNA, 25 bp, Artificial
  probe
  misc_feature (1)..(25): SEQ ID NO: 650; WAN024CKD; Start 103; Stop 127
tgtgtaactggtcaacataaggaaa

SEQ ID NO: 269205 - DNA, 25 bp, Artificial
  probe
  misc_feature (1)..(25): SEQ ID NO: 650; WAN024CKD; Start 503; Stop 527
cgggaaatacagtcattgatgcttt

SEQ ID NO: 269206 - DNA, 25 bp, Artificial
  probe
  misc_feature (1)..(25): SEQ ID NO: 650; WAN024CKD; Start 490; Stop 514
aatatctttgtgacgggaaatacag

SEQ ID NO: 269207 - DNA, 25 bp, Artificial
  probe
  misc_feature (1)..(25): SEQ ID NO: 650; WAN024CKD; Start 105; Stop 129
tgtaactggtcaacataaggaaatg

SEQ ID NO: 269208 - DNA, 25 bp, Artificial
  probe
  misc_feature (1)..(25): SEQ ID NO: 650; WAN024CKD; Start 104; Stop 128
gtgtaactggtcaacataaggaaat

SEQ ID NO: 269209 - DNA, 25 bp, Artificial
  probe
  misc_feature (1)..(25): SEQ ID NO: 651; WAN024DE7; Start 239; Stop 263
cgctacttaatcaacgtgtctgtaa

SEQ ID NO: 269210 - DNA, 25 bp, Artificial
  probe
  misc_feature (1)..(25): SEQ ID NO: 651; WAN024DE7; Start 183; Stop 207
cttattgattacaatggatggcagt

SEQ ID NO: 269211 - DNA, 25 bp, Artificial
  probe
  misc_feature (1)..(25): SEQ ID NO: 651; WAN024DE7; Start 182; Stop 206
acttattgattacaatggatggcag

SEQ ID NO: 269212 - DNA, 25 bp, Artificial
  probe
  misc_feature (1)..(25): SEQ ID NO: 651; WAN024DE7; Start 181; Stop 205
gacttattgattacaatggatggca

SEQ ID NO: 269213 - DNA, 25 bp, Artificial
  probe
  misc_feature (1)..(25): SEQ ID NO: 651; WAN024DE7; Start 180; Stop 204
agacttattgattacaatggatggc

SEQ ID NO: 269214 - DNA, 25 bp, Artificial
  probe
  misc_feature (1)..(25): SEQ ID NO: 651; WAN024DE7; Start 184; Stop 208
ttattgattacaatggatggcagtt

SEQ ID NO: 269215 - DNA, 25 bp, Artificial
  probe
  misc_feature (1)..(25): SEQ ID NO: 651; WAN024DE7; Start 127; Stop 151
tctgatacctactttgaaggaactt

SEQ ID NO: 269216 - DNA, 25 bp, Artificial
  probe
  misc_feature (1)..(25): SEQ ID NO: 651; WAN024DE7; Start 126; Stop 150
ttctgatacctactttgaaggaact

SEQ ID NO: 269217 - DNA, 25 bp, Artificial
  probe
  misc_feature (1)..(25): SEQ ID NO: 651; WAN024DE7; Start 139; Stop 163
tttgaaggaacttatcccgaagaat

SEQ ID NO: 269218 - DNA, 25 bp, Artificial
  probe
  misc_feature (1)..(25): SEQ ID NO: 651; WAN024DE7; Start 136; Stop 160
tactttgaaggaacttatcccgaag

SEQ ID NO: 269219 - DNA, 25 bp, Artificial
  probe
  misc_feature (1)..(25): SEQ ID NO: 651; WAN024DE7; Start 135; Stop 159
ctactttgaaggaacttatcccgaa

SEQ ID NO: 269220 - DNA, 25 bp, Artificial
  probe
  misc_feature (1)..(25): SEQ ID NO: 651; WAN024DE7; Start 140; Stop 164
ttgaaggaacttatcccgaagaata

SEQ ID NO: 269221 - DNA, 25 bp, Artificial
  probe
  misc_feature (1)..(25): SEQ ID NO: 651; WAN024DE7; Start 132; Stop 156
tacctactttgaaggaacttatccc

SEQ ID NO: 269222 - DNA, 25 bp, Artificial
  probe
  misc_feature (1)..(25): SEQ ID NO: 651; WAN024DE7; Start 141; Stop 165
tgaaggaacttatcccgaagaatat

SEQ ID NO: 269223 - DNA, 25 bp, Artificial
  probe
  misc_feature (1)..(25): SEQ ID NO: 651; WAN024DE7; Start 138; Stop 162
ctttgaaggaacttatcccgaagaa

SEQ ID NO: 269224 - DNA, 25 bp, Artificial
  probe
  misc_feature (1)..(25): SEQ ID NO: 651; WAN024DE7; Start 177; Stop 201
tggagacttattgattacaatggat

SEQ ID NO: 269225 - DNA, 25 bp, Artificial
  probe
  misc_feature (1)..(25): SEQ ID NO: 651; WAN024DE7; Start 176; Stop 200
atggagacttattgattacaatgga

SEQ ID NO: 269226 - DNA, 25 bp, Artificial
  probe
  misc_feature (1)..(25): SEQ ID NO: 651; WAN024DE7; Start 179; Stop 203
gagacttattgattacaatggatgg

SEQ ID NO: 269227 - DNA, 25 bp, Artificial
  probe
  misc_feature (1)..(25): SEQ ID NO: 651; WAN024DE7; Start 178; Stop 202
ggagacttattgattacaatggatg

SEQ ID NO: 269228 - DNA, 25 bp, Artificial
  probe
  misc_feature (1)..(25): SEQ ID NO: 651; WAN024DE7; Start 143; Stop 167
aaggaacttatcccgaagaatatct

SEQ ID NO: 269229 - DNA, 25 bp, Artificial
  probe
  misc_feature (1)..(25): SEQ ID NO: 651; WAN024DE7; Start 125; Stop 149
tttctgatacctactttgaaggaac

SEQ ID NO: 269230 - DNA, 25 bp, Artificial
  probe
  misc_feature (1)..(25): SEQ ID NO: 651; WAN024DE7; Start 142; Stop 166
gaaggaacttatcccgaagaatatc

SEQ ID NO: 269231 - DNA, 25 bp, Artificial
  probe
  misc_feature (1)..(25): SEQ ID NO: 651; WAN024DE7; Start 240; Stop 264
gctacttaatcaacgtgtctgtaaa

SEQ ID NO: 269232 - DNA, 25 bp, Artificial
  probe
  misc_feature (1)..(25): SEQ ID NO: 651; WAN024DE7; Start 137; Stop 161
actttgaaggaacttatcccgaaga

SEQ ID NO: 269233 - DNA, 25 bp, Artificial
  probe
  misc_feature (1)..(25): SEQ ID NO: 651; WAN024DE7; Start 294; Stop 318
aggttatatatcttggttgattcct

SEQ ID NO: 269234 - DNA, 25 bp, Artificial
  probe
  misc_feature (1)..(25): SEQ ID NO: 651; WAN024DE7; Start 293; Stop 317
aaggttatatatcttggttgattcc

SEQ ID NO: 269235 - DNA, 25 bp, Artificial
  probe
  misc_feature (1)..(25): SEQ ID NO: 651; WAN024DE7; Start 134; Stop 158
cctactttgaaggaacttatcccga

SEQ ID NO: 269236 - DNA, 25 bp, Artificial
  probe
  misc_feature (1)..(25): SEQ ID NO: 651; WAN024DE7; Start 175; Stop 199
aatggagacttattgattacaatgg

SEQ ID NO: 269237 - DNA, 25 bp, Artificial
  probe
  misc_feature (1)..(25): SEQ ID NO: 651; WAN024DE7; Start 128; Stop 152
ctgatacctactttgaaggaactta

SEQ ID NO: 269238 - DNA, 25 bp, Artificial
  probe
  misc_feature (1)..(25): SEQ ID NO: 651; WAN024DE7; Start 185; Stop 209
tattgattacaatggatggcagttt

SEQ ID NO: 269239 - DNA, 25 bp, Artificial
  probe
  misc_feature (1)..(25): SEQ ID NO: 651; WAN024DE7; Start 133; Stop 157
acctactttgaaggaacttatcccg

SEQ ID NO: 269240 - DNA, 25 bp, Artificial
  probe
  misc_feature (1)..(25): SEQ ID NO: 651; WAN024DE7; Start 289; Stop 313
gatgaaggttatatatcttggttga

SEQ ID NO: 269241 - DNA, 25 bp, Artificial
  probe
  misc_feature (1)..(25): SEQ ID NO: 651; WAN024DE7; Start 131; Stop 155
atacctactttgaaggaacttatcc

SEQ ID NO: 269242 - DNA, 25 bp, Artificial
  probe
  misc_feature (1)..(25): SEQ ID NO: 652; WAN024FOK; Start 178; Stop 202
gtagaggctgttaggtatgttgatt

SEQ ID NO: 269243 - DNA, 25 bp, Artificial
  probe
  misc_feature (1)..(25): SEQ ID NO: 652; WAN024FOK; Start 313; Stop 337
aaggaaggagttgaagtggtctatt

SEQ ID NO: 269244 - DNA, 25 bp, Artificial
  probe
  misc_feature (1)..(25): SEQ ID NO: 652; WAN024FOK; Start 307; Stop 331
ttagagaaggaaggagttgaagtgg

SEQ ID NO: 269245 - DNA, 25 bp, Artificial
  probe
  misc_feature (1)..(25): SEQ ID NO: 652; WAN024FOK; Start 312; Stop 336
gaaggaaggagttgaagtggtctat

SEQ ID NO: 269246 - DNA, 25 bp, Artificial
  probe
  misc_feature (1)..(25): SEQ ID NO: 652; WAN024FOK; Start 177; Stop 201
cgtagaggctgttaggtatgttgat

SEQ ID NO: 269247 - DNA, 25 bp, Artificial
  probe
  misc_feature (1)..(25): SEQ ID NO: 652; WAN024FOK; Start 308; Stop 332
tagagaaggaaggagttgaagtggt

SEQ ID NO: 269248 - DNA, 25 bp, Artificial
  probe
  misc_feature (1)..(25): SEQ ID NO: 652; WAN024FOK; Start 176; Stop 200
tcgtagaggctgttaggtatgttga

SEQ ID NO: 269249 - DNA, 25 bp, Artificial
  probe
  misc_feature (1)..(25): SEQ ID NO: 652; WAN024FOK; Start 311; Stop 335
agaaggaaggagttgaagtggtcta

SEQ ID NO: 269250 - DNA, 25 bp, Artificial
  probe
  misc_feature (1)..(25): SEQ ID NO: 652; WAN024FOK; Start 233; Stop 257
aagtgacagatgtccatgaatatca

SEQ ID NO: 269251 - DNA, 25 bp, Artificial
  probe
  misc_feature (1)..(25): SEQ ID NO: 652; WAN024FOK; Start 315; Stop 339
ggaaggagttgaagtggtctattta

SEQ ID NO: 269252 - DNA, 25 bp, Artificial
  probe
  misc_feature (1)..(25): SEQ ID NO: 652; WAN024FOK; Start 306; Stop 330
tttagagaaggaaggagttgaagtg

SEQ ID NO: 269253 - DNA, 25 bp, Artificial
  probe
  misc_feature (1)..(25): SEQ ID NO: 652; WAN024FOK; Start 182; Stop 206
aggctgttaggtatgttgatttagt

SEQ ID NO: 269254 - DNA, 25 bp, Artificial
  probe
  misc_feature (1)..(25): SEQ ID NO: 652; WAN024FOK; Start 180; Stop 204
agaggctgttaggtatgttgattta

SEQ ID NO: 269255 - DNA, 25 bp, Artificial
  probe
  misc_feature (1)..(25): SEQ ID NO: 652; WAN024FOK; Start 179; Stop 203
tagaggctgttaggtatgttgattt

SEQ ID NO: 269256 - DNA, 25 bp, Artificial
  probe
  misc_feature (1)..(25): SEQ ID NO: 652; WAN024FOK; Start 181; Stop 205
gaggctgttaggtatgttgatttag

SEQ ID NO: 269257 - DNA, 25 bp, Artificial
  probe
  misc_feature (1)..(25): SEQ ID NO: 652; WAN024FOK; Start 175; Stop 199
ctcgtagaggctgttaggtatgttg

SEQ ID NO: 269258 - DNA, 25 bp, Artificial
  probe
  misc_feature (1)..(25): SEQ ID NO: 652; WAN024FOK; Start 314; Stop 338
aggaaggagttgaagtggtctattt

SEQ ID NO: 269259 - DNA, 25 bp, Artificial
  probe
  misc_feature (1)..(25): SEQ ID NO: 652; WAN024FOK; Start 174; Stop 198
actcgtagaggctgttaggtatgtt

SEQ ID NO: 269260 - DNA, 25 bp, Artificial
  probe
  misc_feature (1)..(25): SEQ ID NO: 652; WAN024FOK; Start 183; Stop 207
ggctgttaggtatgttgatttagta

SEQ ID NO: 269261 - DNA, 25 bp, Artificial
  probe
  misc_feature (1)..(25): SEQ ID NO: 652; WAN024FOK; Start 77; Stop 101
cgttaggcgattatttaattgttgt

SEQ ID NO: 269262 - DNA, 25 bp, Artificial
  probe
  misc_feature (1)..(25): SEQ ID NO: 652; WAN024FOK; Start 317; Stop 341
aaggagttgaagtggtctatttatc

SEQ ID NO: 269263 - DNA, 25 bp, Artificial
  probe
  misc_feature (1)..(25): SEQ ID NO: 652; WAN024FOK; Start 316; Stop 340
gaaggagttgaagtggtctatttat

SEQ ID NO: 269264 - DNA, 25 bp, Artificial
  probe
  misc_feature (1)..(25): SEQ ID NO: 652; WAN024FOK; Start 318; Stop 342
aggagttgaagtggtctatttatca

SEQ ID NO: 269265 - DNA, 25 bp, Artificial
  probe
  misc_feature (1)..(25): SEQ ID NO: 652; WAN024FOK; Start 35; Stop 59
tgttgcactatggtcatattaatct

SEQ ID NO: 269266 - DNA, 25 bp, Artificial
  probe
  misc_feature (1)..(25): SEQ ID NO: 652; WAN024FOK; Start 243; Stop 267
tgtccatgaatatcacatagatacc

SEQ ID NO: 269267 - DNA, 25 bp, Artificial
  probe
  misc_feature (1)..(25): SEQ ID NO: 652; WAN024FOK; Start 334; Stop 358
tatttatcacggactcctgaaatca

SEQ ID NO: 269268 - DNA, 25 bp, Artificial
  probe
  misc_feature (1)..(25): SEQ ID NO: 652; WAN024FOK; Start 259; Stop 283
atagatacctttgtcatgggagatg

SEQ ID NO: 269269 - DNA, 25 bp, Artificial
  probe
  misc_feature (1)..(25): SEQ ID NO: 652; WAN024FOK; Start 258; Stop 282
catagatacctttgtcatgggagat

SEQ ID NO: 269270 - DNA, 25 bp, Artificial
  probe
  misc_feature (1)..(25): SEQ ID NO: 652; WAN024FOK; Start 332; Stop 356
tctatttatcacggactcctgaaat

SEQ ID NO: 269271 - DNA, 25 bp, Artificial
  probe
  misc_feature (1)..(25): SEQ ID NO: 652; WAN024FOK; Start 331; Stop 355
gtctatttatcacggactcctgaaa

SEQ ID NO: 269272 - DNA, 25 bp, Artificial
  probe
  misc_feature (1)..(25): SEQ ID NO: 652; WAN024FOK; Start 244; Stop 268
gtccatgaatatcacatagatacct

SEQ ID NO: 269273 - DNA, 25 bp, Artificial
  probe
  misc_feature (1)..(25): SEQ ID NO: 652; WAN024FOK; Start 333; Stop 357
ctatttatcacggactcctgaaatc

SEQ ID NO: 269274 - DNA, 25 bp, Artificial
  probe
  misc_feature (1)..(25): SEQ ID NO: 652; WAN024FOK; Start 91; Stop 115
ttaattgttgtgatttccactgacg

SEQ ID NO: 269275 - DNA, 25 bp, Artificial
  probe
  misc_feature (1)..(25): SEQ ID NO: 653; WAN024FB2; Start 622; Stop 646
tatgctaatacaccagttcttcagg

SEQ ID NO: 269276 - DNA, 25 bp, Artificial
  probe
  misc_feature (1)..(25): SEQ ID NO: 653; WAN024FB2; Start 620; Stop 644
cctatgctaatacaccagttcttca

SEQ ID NO: 269277 - DNA, 25 bp, Artificial
  probe
  misc_feature (1)..(25): SEQ ID NO: 653; WAN024FB2; Start 619; Stop 643
acctatgctaatacaccagttcttc

SEQ ID NO: 269278 - DNA, 25 bp, Artificial
  probe
  misc_feature (1)..(25): SEQ ID NO: 653; WAN024FB2; Start 641; Stop 665
ttcaggttattactcaaggtcaagg

SEQ ID NO: 269279 - DNA, 25 bp, Artificial
  probe
  misc_feature (1)..(25): SEQ ID NO: 653; WAN024FB2; Start 642; Stop 666
tcaggttattactcaaggtcaagga

SEQ ID NO: 269280 - DNA, 25 bp, Artificial
  probe
  misc_feature (1)..(25): SEQ ID NO: 653; WAN024FB2; Start 67; Stop 91
acctacacgattatctataccttgg

SEQ ID NO: 269281 - DNA, 25 bp, Artificial
  probe
  misc_feature (1)..(25): SEQ ID NO: 653; WAN024FB2; Start 400; Stop 424
cacttctatgctaacttgattgaca

SEQ ID NO: 269282 - DNA, 25 bp, Artificial
  probe
  misc_feature (1)..(25): SEQ ID NO: 653; WAN024FB2; Start 621; Stop 645
ctatgctaatacaccagttcttcag

SEQ ID NO: 269283 - DNA, 25 bp, Artificial
  probe
  misc_feature (1)..(25): SEQ ID NO: 653; WAN024FB2; Start 1361; Stop 1385
aagcatctaataactctatggtcgt

SEQ ID NO: 269284 - DNA, 25 bp, Artificial
  probe
  misc_feature (1)..(25): SEQ ID NO: 653; WAN024FB2; Start 1367; Stop 1391
ctaataactctatggtcgttggtct

SEQ ID NO: 269285 - DNA, 25 bp, Artificial
  probe
  misc_feature (1)..(25): SEQ ID NO: 653; WAN024FB2; Start 1366; Stop 1390
tctaataactctatggtcgttggtc

SEQ ID NO: 269286 - DNA, 25 bp, Artificial
  probe
  misc_feature (1)..(25): SEQ ID NO: 653; WAN024FB2; Start 618; Stop 642
aacctatgctaatacaccagttctt

SEQ ID NO: 269287 - DNA, 25 bp, Artificial
  probe
  misc_feature (1)..(25): SEQ ID NO: 653; WAN024FB2; Start 617; Stop 641
caacctatgctaatacaccagttct

SEQ ID NO: 269288 - DNA, 25 bp, Artificial
  probe
  misc_feature (1)..(25): SEQ ID NO: 653; WAN024FB2; Start 639; Stop 663
tcttcaggttattactcaaggtcaa

SEQ ID NO: 269289 - DNA, 25 bp, Artificial
  probe
  misc_feature (1)..(25): SEQ ID NO: 653; WAN024FB2; Start 638; Stop 662
ttcttcaggttattactcaaggtca

SEQ ID NO: 269290 - DNA, 25 bp, Artificial
  probe
  misc_feature (1)..(25): SEQ ID NO: 653; WAN024FB2; Start 71; Stop 95
acacgattatctataccttggttcc

SEQ ID NO: 269291 - DNA, 25 bp, Artificial
  probe
  misc_feature (1)..(25): SEQ ID NO: 653; WAN024FB2; Start 72; Stop 96
cacgattatctataccttggttcct

SEQ ID NO: 269292 - DNA, 25 bp, Artificial
  probe
  misc_feature (1)..(25): SEQ ID NO: 653; WAN024FB2; Start 1369; Stop 1393
aataactctatggtcgttggtcttg

SEQ ID NO: 269293 - DNA, 25 bp, Artificial
  probe
  misc_feature (1)..(25): SEQ ID NO: 653; WAN024FB2; Start 1363; Stop 1387
gcatctaataactctatggtcgttg

SEQ ID NO: 269294 - DNA, 25 bp, Artificial
  probe
  misc_feature (1)..(25): SEQ ID NO: 653; WAN024FB2; Start 1362; Stop 1386
agcatctaataactctatggtcgtt

SEQ ID NO: 269295 - DNA, 25 bp, Artificial
  probe
  misc_feature (1)..(25): SEQ ID NO: 653; WAN024FB2; Start 640; Stop 664
cttcaggttattactcaaggtcaag

SEQ ID NO: 269296 - DNA, 25 bp, Artificial
  probe
  misc_feature (1)..(25): SEQ ID NO: 653; WAN024FB2; Start 637; Stop 661
gttcttcaggttattactcaaggtc

SEQ ID NO: 269297 - DNA, 25 bp, Artificial
  probe
  misc_feature (1)..(25): SEQ ID NO: 653; WAN024FB2; Start 1368; Stop 1392
taataactctatggtcgttggtctt

SEQ ID NO: 269298 - DNA, 25 bp, Artificial
  probe
  misc_feature (1)..(25): SEQ ID NO: 653; WAN024FB2; Start 73; Stop 97
acgattatctataccttggttcctc

SEQ ID NO: 269299 - DNA, 25 bp, Artificial
  probe
  misc_feature (1)..(25): SEQ ID NO: 653; WAN024FB2; Start 68; Stop 92
cctacacgattatctataccttggt

SEQ ID NO: 269300 - DNA, 25 bp, Artificial
  probe
  misc_feature (1)..(25): SEQ ID NO: 653; WAN024FB2; Start 1365; Stop 1389
atctaataactctatggtcgttggt

SEQ ID NO: 269301 - DNA, 25 bp, Artificial
  probe
  misc_feature (1)..(25): SEQ ID NO: 653; WAN024FB2; Start 1364; Stop 1388
catctaataactctatggtcgttgg

SEQ ID NO: 269302 - DNA, 25 bp, Artificial
  probe
  misc_feature (1)..(25): SEQ ID NO: 653; WAN024FB2; Start 636; Stop 660
agttcttcaggttattactcaaggt

SEQ ID NO: 269303 - DNA, 25 bp, Artificial
  probe
  misc_feature (1)..(25): SEQ ID NO: 653; WAN024FB2; Start 616; Stop 640
ccaacctatgctaatacaccagttc

SEQ ID NO: 269304 - DNA, 25 bp, Artificial
  probe
  misc_feature (1)..(25): SEQ ID NO: 653; WAN024FB2; Start 65; Stop 89
tgacctacacgattatctatacctt

SEQ ID NO: 269305 - DNA, 25 bp, Artificial
  probe
  misc_feature (1)..(25): SEQ ID NO: 653; WAN024FB2; Start 64; Stop 88
ttgacctacacgattatctatacct

SEQ ID NO: 269306 - DNA, 25 bp, Artificial
  probe
  misc_feature (1)..(25): SEQ ID NO: 653; WAN024FB2; Start 635; Stop 659
cagttcttcaggttattactcaagg

SEQ ID NO: 269307 - DNA, 25 bp, Artificial
  probe
  misc_feature (1)..(25): SEQ ID NO: 653; WAN024FB2; Start 634; Stop 658
ccagttcttcaggttattactcaag

SEQ ID NO: 269308 - DNA, 25 bp, Artificial
  probe
  misc_feature (1)..(25): SEQ ID NO: 654; WAN024DGR; Start 590; Stop 614
attctcttcttcgttggttgattag

SEQ ID NO: 269309 - DNA, 25 bp, Artificial
  probe
  misc_feature (1)..(25): SEQ ID NO: 654; WAN024DGR; Start 591; Stop 615
ttctcttcttcgttggttgattagc

SEQ ID NO: 269310 - DNA, 25 bp, Artificial
  probe
  misc_feature (1)..(25): SEQ ID NO: 654; WAN024DGR; Start 588; Stop 612
caattctcttcttcgttggttgatt

SEQ ID NO: 269311 - DNA, 25 bp, Artificial
  probe
  misc_feature (1)..(25): SEQ ID NO: 654; WAN024DGR; Start 585; Stop 609
ttacaattctcttcttcgttggttg

SEQ ID NO: 269312 - DNA, 25 bp, Artificial
  probe
  misc_feature (1)..(25): SEQ ID NO: 654; WAN024DGR; Start 586; Stop 610
tacaattctcttcttcgttggttga

SEQ ID NO: 269313 - DNA, 25 bp, Artificial
  probe
  misc_feature (1)..(25): SEQ ID NO: 654; WAN024DGR; Start 589; Stop 613
aattctcttcttcgttggttgatta

SEQ ID NO: 269314 - DNA, 25 bp, Artificial
  probe
  misc_feature (1)..(25): SEQ ID NO: 654; WAN024DGR; Start 587; Stop 611
acaattctcttcttcgttggttgat

SEQ ID NO: 269315 - DNA, 25 bp, Artificial
  probe
  misc_feature (1)..(25): SEQ ID NO: 654; WAN024DGR; Start 593; Stop 617
ctcttcttcgttggttgattagctt

SEQ ID NO: 269316 - DNA, 25 bp, Artificial
  probe
  misc_feature (1)..(25): SEQ ID NO: 654; WAN024DGR; Start 697; Stop 721
ggtttgatgttgatttctctggttt

SEQ ID NO: 269317 - DNA, 25 bp, Artificial
  probe
  misc_feature (1)..(25): SEQ ID NO: 654; WAN024DGR; Start 459; Stop 483
tgcgaccttgatttatacttctctt

SEQ ID NO: 269318 - DNA, 25 bp, Artificial
  probe
  misc_feature (1)..(25): SEQ ID NO: 654; WAN024DGR; Start 458; Stop 482
ttgcgaccttgatttatacttctct

SEQ ID NO: 269319 - DNA, 25 bp, Artificial
  probe
  misc_feature (1)..(25): SEQ ID NO: 654; WAN024DGR; Start 309; Stop 333
catcaatcctctctttcacatccta

SEQ ID NO: 269320 - DNA, 25 bp, Artificial
  probe
  misc_feature (1)..(25): SEQ ID NO: 654; WAN024DGR; Start 457; Stop 481
tttgcgaccttgatttatacttctc

SEQ ID NO: 269321 - DNA, 25 bp, Artificial
  probe
  misc_feature (1)..(25): SEQ ID NO: 654; WAN024DGR; Start 696; Stop 720
aggtttgatgttgatttctctggtt

SEQ ID NO: 269322 - DNA, 25 bp, Artificial
  probe
  misc_feature (1)..(25): SEQ ID NO: 654; WAN024DGR; Start 143; Stop 167
ttcaacatattccattcctagaagg

SEQ ID NO: 269323 - DNA, 25 bp, Artificial
  probe
  misc_feature (1)..(25): SEQ ID NO: 654; WAN024DGR; Start 690; Stop 714
cgtaggaggtttgatgttgatttct

SEQ ID NO: 269324 - DNA, 25 bp, Artificial
  probe
  misc_feature (1)..(25): SEQ ID NO: 654; WAN024DGR; Start 739; Stop 763
aaactttgggataagggcttagatt

SEQ ID NO: 269325 - DNA, 25 bp, Artificial
  probe
  misc_feature (1)..(25): SEQ ID NO: 654; WAN024DGR; Start 313; Stop 337
aatcctctctttcacatcctagttg

SEQ ID NO: 269326 - DNA, 25 bp, Artificial
  probe
  misc_feature (1)..(25): SEQ ID NO: 654; WAN024DGR; Start 312; Stop 336
caatcctctctttcacatcctagtt

SEQ ID NO: 269327 - DNA, 25 bp, Artificial
  probe
  misc_feature (1)..(25): SEQ ID NO: 654; WAN024DGR; Start 592; Stop 616
tctcttcttcgttggttgattagct

SEQ ID NO: 269328 - DNA, 25 bp, Artificial
  probe
  misc_feature (1)..(25): SEQ ID NO: 654; WAN024DGR; Start 737; Stop 761
ttaaactttgggataagggcttaga

SEQ ID NO: 269329 - DNA, 25 bp, Artificial
  probe
  misc_feature (1)..(25): SEQ ID NO: 654; WAN024DGR; Start 310; Stop 334
atcaatcctctctttcacatcctag

SEQ ID NO: 269330 - DNA, 25 bp, Artificial
  probe
  misc_feature (1)..(25): SEQ ID NO: 654; WAN024DGR; Start 740; Stop 764
aactttgggataagggcttagattc

SEQ ID NO: 269331 - DNA, 25 bp, Artificial
  probe
  misc_feature (1)..(25): SEQ ID NO: 654; WAN024DGR; Start 738; Stop 762
taaactttgggataagggcttagat

SEQ ID NO: 269332 - DNA, 25 bp, Artificial
  probe
  misc_feature (1)..(25): SEQ ID NO: 654; WAN024DGR; Start 311; Stop 335
tcaatcctctctttcacatcctagt

SEQ ID NO: 269333 - DNA, 25 bp, Artificial
  probe
  misc_feature (1)..(25): SEQ ID NO: 654; WAN024DGR; Start 460; Stop 484
gcgaccttgatttatacttctctta

SEQ ID NO: 269334 - DNA, 25 bp, Artificial
  probe
  misc_feature (1)..(25): SEQ ID NO: 654; WAN024DGR; Start 584; Stop 608
tttacaattctcttcttcgttggtt

SEQ ID NO: 269335 - DNA, 25 bp, Artificial
  probe
  misc_feature (1)..(25): SEQ ID NO: 654; WAN024DGR; Start 692; Stop 716
taggaggtttgatgttgatttctct

SEQ ID NO: 269336 - DNA, 25 bp, Artificial
  probe
  misc_feature (1)..(25): SEQ ID NO: 654; WAN024DGR; Start 691; Stop 715
gtaggaggtttgatgttgatttctc

SEQ ID NO: 269337 - DNA, 25 bp, Artificial
  probe
  misc_feature (1)..(25): SEQ ID NO: 654; WAN024DGR; Start 122; Stop 146
tcttgtttctcaatgtcatctttca

SEQ ID NO: 269338 - DNA, 25 bp, Artificial
  probe
  misc_feature (1)..(25): SEQ ID NO: 654; WAN024DGR; Start 136; Stop 160
gtcatctttcaacatattccattcc

SEQ ID NO: 269339 - DNA, 25 bp, Artificial
  probe
  misc_feature (1)..(25): SEQ ID NO: 654; WAN024DGR; Start 583; Stop 607
atttacaattctcttcttcgttggt

SEQ ID NO: 269340 - DNA, 25 bp, Artificial
  probe
  misc_feature (1)..(25): SEQ ID NO: 654; WAN024DGR; Start 137; Stop 161
tcatctttcaacatattccattcct

SEQ ID NO: 269341 - DNA, 25 bp, Artificial
  probe
  misc_feature (1)..(25): SEQ ID NO: 655; WAN024DDR; Start 61; Stop 85
caagaactagattcgcaggtctatt

SEQ ID NO: 269342 - DNA, 25 bp, Artificial
  probe
  misc_feature (1)..(25): SEQ ID NO: 655; WAN024DDR; Start 60; Stop 84
tcaagaactagattcgcaggtctat

SEQ ID NO: 269343 - DNA, 25 bp, Artificial
  probe
  misc_feature (1)..(25): SEQ ID NO: 655; WAN024DDR; Start 543; Stop 567
cttgtttattagtcctcgctatcct

SEQ ID NO: 269344 - DNA, 25 bp, Artificial
  probe
  misc_feature (1)..(25): SEQ ID NO: 655; WAN024DDR; Start 541; Stop 565
accttgtttattagtcctcgctatc

SEQ ID NO: 269345 - DNA, 25 bp, Artificial
  probe
  misc_feature (1)..(25): SEQ ID NO: 655; WAN024DDR; Start 538; Stop 562
gataccttgtttattagtcctcgct

SEQ ID NO: 269346 - DNA, 25 bp, Artificial
  probe
  misc_feature (1)..(25): SEQ ID NO: 655; WAN024DDR; Start 537; Stop 561
agataccttgtttattagtcctcgc

SEQ ID NO: 269347 - DNA, 25 bp, Artificial
  probe
  misc_feature (1)..(25): SEQ ID NO: 655; WAN024DDR; Start 59; Stop 83
ttcaagaactagattcgcaggtcta

SEQ ID NO: 269348 - DNA, 25 bp, Artificial
  probe
  misc_feature (1)..(25): SEQ ID NO: 655; WAN024DDR; Start 520; Stop 544
tttaagagagaagtgggagatacct

SEQ ID NO: 269349 - DNA, 25 bp, Artificial
  probe
  misc_feature (1)..(25): SEQ ID NO: 655; WAN024DDR; Start 542; Stop 566
ccttgtttattagtcctcgctatcc

SEQ ID NO: 269350 - DNA, 25 bp, Artificial
  probe
  misc_feature (1)..(25): SEQ ID NO: 655; WAN024DDR; Start 217; Stop 241
gcatcggaatttgaagaagtaaaga

SEQ ID NO: 269351 - DNA, 25 bp, Artificial
  probe
  misc_feature (1)..(25): SEQ ID NO: 655; WAN024DDR; Start 540; Stop 564
taccttgtttattagtcctcgctat

SEQ ID NO: 269352 - DNA, 25 bp, Artificial
  probe
  misc_feature (1)..(25): SEQ ID NO: 655; WAN024DDR; Start 539; Stop 563
ataccttgtttattagtcctcgcta

SEQ ID NO: 269353 - DNA, 25 bp, Artificial
  probe
  misc_feature (1)..(25): SEQ ID NO: 655; WAN024DDR; Start 527; Stop 551
gagaagtgggagataccttgtttat

SEQ ID NO: 269354 - DNA, 25 bp, Artificial
  probe
  misc_feature (1)..(25): SEQ ID NO: 655; WAN024DDR; Start 521; Stop 545
ttaagagagaagtgggagatacctt

SEQ ID NO: 269355 - DNA, 25 bp, Artificial
  probe
  misc_feature (1)..(25): SEQ ID NO: 655; WAN024DDR; Start 531; Stop 555
agtgggagataccttgtttattagt

SEQ ID NO: 269356 - DNA, 25 bp, Artificial
  probe
  misc_feature (1)..(25): SEQ ID NO: 655; WAN024DDR; Start 526; Stop 550
agagaagtgggagataccttgttta

SEQ ID NO: 269357 - DNA, 25 bp, Artificial
  probe
  misc_feature (1)..(25): SEQ ID NO: 655; WAN024DDR; Start 528; Stop 552
agaagtgggagataccttgtttatt

SEQ ID NO: 269358 - DNA, 25 bp, Artificial
  probe
  misc_feature (1)..(25): SEQ ID NO: 655; WAN024DDR; Start 522; Stop 546
taagagagaagtgggagataccttg

SEQ ID NO: 269359 - DNA, 25 bp, Artificial
  probe
  misc_feature (1)..(25): SEQ ID NO: 655; WAN024DDR; Start 544; Stop 568
ttgtttattagtcctcgctatccta

SEQ ID NO: 269360 - DNA, 25 bp, Artificial
  probe
  misc_feature (1)..(25): SEQ ID NO: 655; WAN024DDR; Start 532; Stop 556
gtgggagataccttgtttattagtc

SEQ ID NO: 269361 - DNA, 25 bp, Artificial
  probe
  misc_feature (1)..(25): SEQ ID NO: 655; WAN024DDR; Start 655; Stop 679
tatactcaagcacctaaagaaatcg

SEQ ID NO: 269362 - DNA, 25 bp, Artificial
  probe
  misc_feature (1)..(25): SEQ ID NO: 655; WAN024DDR; Start 656; Stop 680
atactcaagcacctaaagaaatcgc

SEQ ID NO: 269363 - DNA, 25 bp, Artificial
  probe
  misc_feature (1)..(25): SEQ ID NO: 655; WAN024DDR; Start 216; Stop 240
cgcatcggaatttgaagaagtaaag

SEQ ID NO: 269364 - DNA, 25 bp, Artificial
  probe
  misc_feature (1)..(25): SEQ ID NO: 655; WAN024DDR; Start 215; Stop 239
tcgcatcggaatttgaagaagtaaa

SEQ ID NO: 269365 - DNA, 25 bp, Artificial
  probe
  misc_feature (1)..(25): SEQ ID NO: 655; WAN024DDR; Start 290; Stop 314
ctttggatacagagttagaggaaac

SEQ ID NO: 269366 - DNA, 25 bp, Artificial
  probe
  misc_feature (1)..(25): SEQ ID NO: 655; WAN024DDR; Start 429; Stop 453
tcactggaatgttgagtataataga

SEQ ID NO: 269367 - DNA, 25 bp, Artificial
  probe
  misc_feature (1)..(25): SEQ ID NO: 655; WAN024DDR; Start 686; Stop 710
taatgaatgagtggctcgcttattt

SEQ ID NO: 269368 - DNA, 25 bp, Artificial
  probe
  misc_feature (1)..(25): SEQ ID NO: 655; WAN024DDR; Start 525; Stop 549
gagagaagtgggagataccttgttt

SEQ ID NO: 269369 - DNA, 25 bp, Artificial
  probe
  misc_feature (1)..(25): SEQ ID NO: 655; WAN024DDR; Start 441; Stop 465
tgagtataatagatatgagttggct

SEQ ID NO: 269370 - DNA, 25 bp, Artificial
  probe
  misc_feature (1)..(25): SEQ ID NO: 655; WAN024DDR; Start 220; Stop 244
tcggaatttgaagaagtaaagaaac

SEQ ID NO: 269371 - DNA, 25 bp, Artificial
  probe
  misc_feature (1)..(25): SEQ ID NO: 655; WAN024DDR; Start 536; Stop 560
gagataccttgtttattagtcctcg

SEQ ID NO: 269372 - DNA, 25 bp, Artificial
  probe
  misc_feature (1)..(25): SEQ ID NO: 655; WAN024DDR; Start 285; Stop 309
tttacctttggatacagagttagag

SEQ ID NO: 269373 - DNA, 25 bp, Artificial
  probe
  misc_feature (1)..(25): SEQ ID NO: 655; WAN024DDR; Start 530; Stop 554
aagtgggagataccttgtttattag

SEQ ID NO: 269374 - DNA, 25 bp, Artificial
  probe
  misc_feature (1)..(25): SEQ ID NO: 656; WAN024ESU; Start 367; Stop 391
atgaagaatgagcaggtattggtta

SEQ ID NO: 269375 - DNA, 25 bp, Artificial
  probe
  misc_feature (1)..(25): SEQ ID NO: 656; WAN024ESU; Start 366; Stop 390
tatgaagaatgagcaggtattggtt

SEQ ID NO: 269376 - DNA, 25 bp, Artificial
  probe
  misc_feature (1)..(25): SEQ ID NO: 656; WAN024ESU; Start 8; Stop 32
aatggatgcttgtattagtcagtct

SEQ ID NO: 269377 - DNA, 25 bp, Artificial
  probe
  misc_feature (1)..(25): SEQ ID NO: 656; WAN024ESU; Start 365; Stop 389
atatgaagaatgagcaggtattggt

SEQ ID NO: 269378 - DNA, 25 bp, Artificial
  probe
  misc_feature (1)..(25): SEQ ID NO: 656; WAN024ESU; Start 368; Stop 392
tgaagaatgagcaggtattggttac

SEQ ID NO: 269379 - DNA, 25 bp, Artificial
  probe
  misc_feature (1)..(25): SEQ ID NO: 656; WAN024ESU; Start 9; Stop 33
atggatgcttgtattagtcagtctg

SEQ ID NO: 269380 - DNA, 25 bp, Artificial
  probe
  misc_feature (1)..(25): SEQ ID NO: 656; WAN024ESU; Start 515; Stop 539
ctaataaggaagcgaatcaatacca

SEQ ID NO: 269381 - DNA, 25 bp, Artificial
  probe
  misc_feature (1)..(25): SEQ ID NO: 656; WAN024ESU; Start 516; Stop 540
taataaggaagcgaatcaataccaa

SEQ ID NO: 269382 - DNA, 25 bp, Artificial
  probe
  misc_feature (1)..(25): SEQ ID NO: 656; WAN024ESU; Start 372; Stop 396
gaatgagcaggtattggttacgaag

SEQ ID NO: 269383 - DNA, 25 bp, Artificial
  probe
  misc_feature (1)..(25): SEQ ID NO: 656; WAN024ESU; Start 369; Stop 393
gaagaatgagcaggtattggttacg

SEQ ID NO: 269384 - DNA, 25 bp, Artificial
  probe
  misc_feature (1)..(25): SEQ ID NO: 656; WAN024ESU; Start 364; Stop 388
tatatgaagaatgagcaggtattgg

SEQ ID NO: 269385 - DNA, 25 bp, Artificial
  probe
  misc_feature (1)..(25): SEQ ID NO: 656; WAN024ESU; Start 374; Stop 398
atgagcaggtattggttacgaagaa

SEQ ID NO: 269386 - DNA, 25 bp, Artificial
  probe
  misc_feature (1)..(25): SEQ ID NO: 656; WAN024ESU; Start 373; Stop 397
aatgagcaggtattggttacgaaga

SEQ ID NO: 269387 - DNA, 25 bp, Artificial
  probe
  misc_feature (1)..(25): SEQ ID NO: 656; WAN024ESU; Start 371; Stop 395
agaatgagcaggtattggttacgaa

SEQ ID NO: 269388 - DNA, 25 bp, Artificial
  probe
  misc_feature (1)..(25): SEQ ID NO: 656; WAN024ESU; Start 370; Stop 394
aagaatgagcaggtattggttacga

SEQ ID NO: 269389 - DNA, 25 bp, Artificial
  probe
  misc_feature (1)..(25): SEQ ID NO: 656; WAN024ESU; Start 11; Stop 35
ggatgcttgtattagtcagtctgat

SEQ ID NO: 269390 - DNA, 25 bp, Artificial
  probe
  misc_feature (1)..(25): SEQ ID NO: 656; WAN024ESU; Start 13; Stop 37
atgcttgtattagtcagtctgatga

SEQ ID NO: 269391 - DNA, 25 bp, Artificial
  probe
  misc_feature (1)..(25): SEQ ID NO: 656; WAN024ESU; Start 12; Stop 36
gatgcttgtattagtcagtctgatg

SEQ ID NO: 269392 - DNA, 25 bp, Artificial
  probe
  misc_feature (1)..(25): SEQ ID NO: 656; WAN024ESU; Start 587; Stop 611
gtctattgattgaccgtgtctatgc

SEQ ID NO: 269393 - DNA, 25 bp, Artificial
  probe
  misc_feature (1)..(25): SEQ ID NO: 656; WAN024ESU; Start 10; Stop 34
tggatgcttgtattagtcagtctga

SEQ ID NO: 269394 - DNA, 25 bp, Artificial
  probe
  misc_feature (1)..(25): SEQ ID NO: 656; WAN024ESU; Start 518; Stop 542
ataaggaagcgaatcaataccaaac

SEQ ID NO: 269395 - DNA, 25 bp, Artificial
  probe
  misc_feature (1)..(25): SEQ ID NO: 656; WAN024ESU; Start 250; Stop 274
ccgattgattgggatttgaaagaag

SEQ ID NO: 269396 - DNA, 25 bp, Artificial
  probe
  misc_feature (1)..(25): SEQ ID NO: 656; WAN024ESU; Start 7; Stop 31
aaatggatgcttgtattagtcagtc

SEQ ID NO: 269397 - DNA, 25 bp, Artificial
  probe
  misc_feature (1)..(25): SEQ ID NO: 656; WAN024ESU; Start 526; Stop 550
gcgaatcaataccaaacctttaatg

SEQ ID NO: 269398 - DNA, 25 bp, Artificial
  probe
  misc_feature (1)..(25): SEQ ID NO: 656; WAN024ESU; Start 525; Stop 549
agcgaatcaataccaaacctttaat

SEQ ID NO: 269399 - DNA, 25 bp, Artificial
  probe
  misc_feature (1)..(25): SEQ ID NO: 656; WAN024ESU; Start 523; Stop 547
gaagcgaatcaataccaaaccttta

SEQ ID NO: 269400 - DNA, 25 bp, Artificial
  probe
  misc_feature (1)..(25): SEQ ID NO: 656; WAN024ESU; Start 425; Stop 449
atatgactggaaagacattaggagc

SEQ ID NO: 269401 - DNA, 25 bp, Artificial
  probe
  misc_feature (1)..(25): SEQ ID NO: 656; WAN024ESU; Start 517; Stop 541
aataaggaagcgaatcaataccaaa

SEQ ID NO: 269402 - DNA, 25 bp, Artificial
  probe
  misc_feature (1)..(25): SEQ ID NO: 656; WAN024ESU; Start 423; Stop 447
ggatatgactggaaagacattagga

SEQ ID NO: 269403 - DNA, 25 bp, Artificial
  probe
  misc_feature (1)..(25): SEQ ID NO: 656; WAN024ESU; Start 422; Stop 446
aggatatgactggaaagacattagg

SEQ ID NO: 269404 - DNA, 25 bp, Artificial
  probe
  misc_feature (1)..(25): SEQ ID NO: 656; WAN024ESU; Start 532; Stop 556
caataccaaacctttaatgaagcct

SEQ ID NO: 269405 - DNA, 25 bp, Artificial
  probe
  misc_feature (1)..(25): SEQ ID NO: 656; WAN024ESU; Start 575; Stop 599
atcgaattgatggtctattgattga

SEQ ID NO: 269406 - DNA, 25 bp, Artificial
  probe
  misc_feature (1)..(25): SEQ ID NO: 656; WAN024ESU; Start 524; Stop 548
aagcgaatcaataccaaacctttaa

SEQ ID NO: 269407 - DNA, 25 bp, Artificial
  probe
  misc_feature (1)..(25): SEQ ID NO: 657; WAN024DGK; Start 307; Stop 331
gatgactatgtggtcttgacagtag

SEQ ID NO: 269408 - DNA, 25 bp, Artificial
  probe
  misc_feature (1)..(25): SEQ ID NO: 657; WAN024DGK; Start 306; Stop 330
tgatgactatgtggtcttgacagta

SEQ ID NO: 269409 - DNA, 25 bp, Artificial
  probe
  misc_feature (1)..(25): SEQ ID NO: 657; WAN024DGK; Start 267; Stop 291
tagtcttccagatacggatgagatt

SEQ ID NO: 269410 - DNA, 25 bp, Artificial
  probe
  misc_feature (1)..(25): SEQ ID NO: 657; WAN024DGK; Start 266; Stop 290
ctagtcttccagatacggatgagat

SEQ ID NO: 269411 - DNA, 25 bp, Artificial
  probe
  misc_feature (1)..(25): SEQ ID NO: 657; WAN024DGK; Start 272; Stop 296
ttccagatacggatgagattgctaa

SEQ ID NO: 269412 - DNA, 25 bp, Artificial
  probe
  misc_feature (1)..(25): SEQ ID NO: 657; WAN024DGK; Start 308; Stop 332
atgactatgtggtcttgacagtagt

SEQ ID NO: 269413 - DNA, 25 bp, Artificial
  probe
  misc_feature (1)..(25): SEQ ID NO: 657; WAN024DGK; Start 83; Stop 107
aacaccaaacgaaagatgaaatgaa

SEQ ID NO: 269414 - DNA, 25 bp, Artificial
  probe
  misc_feature (1)..(25): SEQ ID NO: 657; WAN024DGK; Start 275; Stop 299
cagatacggatgagattgctaaaga

SEQ ID NO: 269415 - DNA, 25 bp, Artificial
  probe
  misc_feature (1)..(25): SEQ ID NO: 657; WAN024DGK; Start 86; Stop 110
accaaacgaaagatgaaatgaagac

SEQ ID NO: 269416 - DNA, 25 bp, Artificial
  probe
  misc_feature (1)..(25): SEQ ID NO: 657; WAN024DGK; Start 85; Stop 109
caccaaacgaaagatgaaatgaaga

SEQ ID NO: 269417 - DNA, 25 bp, Artificial
  probe
  misc_feature (1)..(25): SEQ ID NO: 657; WAN024DGK; Start 276; Stop 300
agatacggatgagattgctaaagaa

SEQ ID NO: 269418 - DNA, 25 bp, Artificial
  probe
  misc_feature (1)..(25): SEQ ID NO: 657; WAN024DGK; Start 84; Stop 108
acaccaaacgaaagatgaaatgaag

SEQ ID NO: 269419 - DNA, 25 bp, Artificial
  probe
  misc_feature (1)..(25): SEQ ID NO: 657; WAN024DGK; Start 82; Stop 106
gaacaccaaacgaaagatgaaatga

SEQ ID NO: 269420 - DNA, 25 bp, Artificial
  probe
  misc_feature (1)..(25): SEQ ID NO: 657; WAN024DGK; Start 277; Stop 301
gatacggatgagattgctaaagaag

SEQ ID NO: 269421 - DNA, 25 bp, Artificial
  probe
  misc_feature (1)..(25): SEQ ID NO: 657; WAN024DGK; Start 81; Stop 105
tgaacaccaaacgaaagatgaaatg

SEQ ID NO: 269422 - DNA, 25 bp, Artificial
  probe
  misc_feature (1)..(25): SEQ ID NO: 657; WAN024DGK; Start 271; Stop 295
cttccagatacggatgagattgcta

SEQ ID NO: 269423 - DNA, 25 bp, Artificial
  probe
  misc_feature (1)..(25): SEQ ID NO: 657; WAN024DGK; Start 268; Stop 292
agtcttccagatacggatgagattg

SEQ ID NO: 269424 - DNA, 25 bp, Artificial
  probe
  misc_feature (1)..(25): SEQ ID NO: 657; WAN024DGK; Start 223; Stop 247
gtctatctcaaattctgggcttctt

SEQ ID NO: 269425 - DNA, 25 bp, Artificial
  probe
  misc_feature (1)..(25): SEQ ID NO: 657; WAN024DGK; Start 189; Stop 213
gacctaccgtttatctgattacaag

SEQ ID NO: 269426 - DNA, 25 bp, Artificial
  probe
  misc_feature (1)..(25): SEQ ID NO: 657; WAN024DGK; Start 274; Stop 298
ccagatacggatgagattgctaaag

SEQ ID NO: 269427 - DNA, 25 bp, Artificial
  probe
  misc_feature (1)..(25): SEQ ID NO: 657; WAN024DGK; Start 211; Stop 235
aagggcaagaaagtctatctcaaat

SEQ ID NO: 269428 - DNA, 25 bp, Artificial
  probe
  misc_feature (1)..(25): SEQ ID NO: 657; WAN024DGK; Start 204; Stop 228
tgattacaagggcaagaaagtctat

SEQ ID NO: 269429 - DNA, 25 bp, Artificial
  probe
  misc_feature (1)..(25): SEQ ID NO: 657; WAN024DGK; Start 200; Stop 224
tatctgattacaagggcaagaaagt

SEQ ID NO: 269430 - DNA, 25 bp, Artificial
  probe
  misc_feature (1)..(25): SEQ ID NO: 657; WAN024DGK; Start 207; Stop 231
ttacaagggcaagaaagtctatctc

SEQ ID NO: 269431 - DNA, 25 bp, Artificial
  probe
  misc_feature (1)..(25): SEQ ID NO: 657; WAN024DGK; Start 206; Stop 230
attacaagggcaagaaagtctatct

SEQ ID NO: 269432 - DNA, 25 bp, Artificial
  probe
  misc_feature (1)..(25): SEQ ID NO: 657; WAN024DGK; Start 364; Stop 388
gcggactttaagaattggtataagg

SEQ ID NO: 269433 - DNA, 25 bp, Artificial
  probe
  misc_feature (1)..(25): SEQ ID NO: 657; WAN024DGK; Start 220; Stop 244
aaagtctatctcaaattctgggctt

SEQ ID NO: 269434 - DNA, 25 bp, Artificial
  probe
  misc_feature (1)..(25): SEQ ID NO: 657; WAN024DGK; Start 185; Stop 209
gcaagacctaccgtttatctgatta

SEQ ID NO: 269435 - DNA, 25 bp, Artificial
  probe
  misc_feature (1)..(25): SEQ ID NO: 657; WAN024DGK; Start 89; Stop 113
aaacgaaagatgaaatgaagacgga

SEQ ID NO: 269436 - DNA, 25 bp, Artificial
  probe
  misc_feature (1)..(25): SEQ ID NO: 657; WAN024DGK; Start 88; Stop 112
caaacgaaagatgaaatgaagacgg

SEQ ID NO: 269437 - DNA, 25 bp, Artificial
  probe
  misc_feature (1)..(25): SEQ ID NO: 657; WAN024DGK; Start 87; Stop 111
ccaaacgaaagatgaaatgaagacg

SEQ ID NO: 269438 - DNA, 25 bp, Artificial
  probe
  misc_feature (1)..(25): SEQ ID NO: 657; WAN024DGK; Start 205; Stop 229
gattacaagggcaagaaagtctatc

SEQ ID NO: 269439 - DNA, 25 bp, Artificial
  probe
  misc_feature (1)..(25): SEQ ID NO: 657; WAN024DGK; Start 203; Stop 227
ctgattacaagggcaagaaagtcta

SEQ ID NO: 269440 - DNA, 25 bp, Artificial
  probe
  misc_feature (1)..(25): SEQ ID NO: 658; WAN024AUF; Start 159; Stop 183
aattgaccttcatagtatcgttccg

SEQ ID NO: 269441 - DNA, 25 bp, Artificial
  probe
  misc_feature (1)..(25): SEQ ID NO: 658; WAN024AUF; Start 17; Stop 41
cattactcgttctctttctttctgc

SEQ ID NO: 269442 - DNA, 25 bp, Artificial
  probe
  misc_feature (1)..(25): SEQ ID NO: 658; WAN024AUF; Start 478; Stop 502
gccaaagaccctaacaataaagaat

SEQ ID NO: 269443 - DNA, 25 bp, Artificial
  probe
  misc_feature (1)..(25): SEQ ID NO: 658; WAN024AUF; Start 16; Stop 40
acattactcgttctctttctttctg

SEQ ID NO: 269444 - DNA, 25 bp, Artificial
  probe
  misc_feature (1)..(25): SEQ ID NO: 658; WAN024AUF; Start 678; Stop 702
tactgaagaagaaggaactcctgaa

SEQ ID NO: 269445 - DNA, 25 bp, Artificial
  probe
  misc_feature (1)..(25): SEQ ID NO: 658; WAN024AUF; Start 751; Stop 775
ctctttgtagaatcaagtgtggatg

SEQ ID NO: 269446 - DNA, 25 bp, Artificial
  probe
  misc_feature (1)..(25): SEQ ID NO: 658; WAN024AUF; Start 591; Stop 615
aaagaaactcattgtaaccagcgaa

SEQ ID NO: 269447 - DNA, 25 bp, Artificial
  probe
  misc_feature (1)..(25): SEQ ID NO: 658; WAN024AUF; Start 360; Stop 384
cggcgttgatgttatctaccttgaa

SEQ ID NO: 269448 - DNA, 25 bp, Artificial
  probe
  misc_feature (1)..(25): SEQ ID NO: 658; WAN024AUF; Start 755; Stop 779
ttgtagaatcaagtgtggatgaccg

SEQ ID NO: 269449 - DNA, 25 bp, Artificial
  probe
  misc_feature (1)..(25): SEQ ID NO: 658; WAN024AUF; Start 752; Stop 776
tctttgtagaatcaagtgtggatga

SEQ ID NO: 269450 - DNA, 25 bp, Artificial
  probe
  misc_feature (1)..(25): SEQ ID NO: 658; WAN024AUF; Start 750; Stop 774
actctttgtagaatcaagtgtggat

SEQ ID NO: 269451 - DNA, 25 bp, Artificial
  probe
  misc_feature (1)..(25): SEQ ID NO: 658; WAN024AUF; Start 477; Stop 501
cgccaaagaccctaacaataaagaa

SEQ ID NO: 269452 - DNA, 25 bp, Artificial
  probe
  misc_feature (1)..(25): SEQ ID NO: 658; WAN024AUF; Start 744; Stop 768
tccatcactctttgtagaatcaagt

SEQ ID NO: 269453 - DNA, 25 bp, Artificial
  probe
  misc_feature (1)..(25): SEQ ID NO: 658; WAN024AUF; Start 741; Stop 765
agttccatcactctttgtagaatca

SEQ ID NO: 269454 - DNA, 25 bp, Artificial
  probe
  misc_feature (1)..(25): SEQ ID NO: 658; WAN024AUF; Start 742; Stop 766
gttccatcactctttgtagaatcaa

SEQ ID NO: 269455 - DNA, 25 bp, Artificial
  probe
  misc_feature (1)..(25): SEQ ID NO: 658; WAN024AUF; Start 743; Stop 767
ttccatcactctttgtagaatcaag

SEQ ID NO: 269456 - DNA, 25 bp, Artificial
  probe
  misc_feature (1)..(25): SEQ ID NO: 658; WAN024AUF; Start 754; Stop 778
tttgtagaatcaagtgtggatgacc

SEQ ID NO: 269457 - DNA, 25 bp, Artificial
  probe
  misc_feature (1)..(25): SEQ ID NO: 658; WAN024AUF; Start 592; Stop 616
aagaaactcattgtaaccagcgaag

SEQ ID NO: 269458 - DNA, 25 bp, Artificial
  probe
  misc_feature (1)..(25): SEQ ID NO: 658; WAN024AUF; Start 881; Stop 905
gcatgatgaaatacaaccttgacaa

SEQ ID NO: 269459 - DNA, 25 bp, Artificial
  probe
  misc_feature (1)..(25): SEQ ID NO: 658; WAN024AUF; Start 692; Stop 716
gaactcctgaacaaatcaagacctt

SEQ ID NO: 269460 - DNA, 25 bp, Artificial
  probe
  misc_feature (1)..(25): SEQ ID NO: 658; WAN024AUF; Start 681; Stop 705
tgaagaagaaggaactcctgaacaa

SEQ ID NO: 269461 - DNA, 25 bp, Artificial
  probe
  misc_feature (1)..(25): SEQ ID NO: 658; WAN024AUF; Start 740; Stop 764
aagttccatcactctttgtagaatc

SEQ ID NO: 269462 - DNA, 25 bp, Artificial
  probe
  misc_feature (1)..(25): SEQ ID NO: 658; WAN024AUF; Start 158; Stop 182
aaattgaccttcatagtatcgttcc

SEQ ID NO: 269463 - DNA, 25 bp, Artificial
  probe
  misc_feature (1)..(25): SEQ ID NO: 658; WAN024AUF; Start 879; Stop 903
cagcatgatgaaatacaaccttgac

SEQ ID NO: 269464 - DNA, 25 bp, Artificial
  probe
  misc_feature (1)..(25): SEQ ID NO: 658; WAN024AUF; Start 160; Stop 184
attgaccttcatagtatcgttccga

SEQ ID NO: 269465 - DNA, 25 bp, Artificial
  probe
  misc_feature (1)..(25): SEQ ID NO: 658; WAN024AUF; Start 880; Stop 904
agcatgatgaaatacaaccttgaca

SEQ ID NO: 269466 - DNA, 25 bp, Artificial
  probe
  misc_feature (1)..(25): SEQ ID NO: 658; WAN024AUF; Start 757; Stop 781
gtagaatcaagtgtggatgaccgtc

SEQ ID NO: 269467 - DNA, 25 bp, Artificial
  probe
  misc_feature (1)..(25): SEQ ID NO: 658; WAN024AUF; Start 680; Stop 704
ctgaagaagaaggaactcctgaaca

SEQ ID NO: 269468 - DNA, 25 bp, Artificial
  probe
  misc_feature (1)..(25): SEQ ID NO: 658; WAN024AUF; Start 679; Stop 703
actgaagaagaaggaactcctgaac

SEQ ID NO: 269469 - DNA, 25 bp, Artificial
  probe
  misc_feature (1)..(25): SEQ ID NO: 658; WAN024AUF; Start 15; Stop 39
tacattactcgttctctttctttct

SEQ ID NO: 269470 - DNA, 25 bp, Artificial
  probe
  misc_feature (1)..(25): SEQ ID NO: 658; WAN024AUF; Start 479; Stop 503
ccaaagaccctaacaataaagaatt

SEQ ID NO: 269471 - DNA, 25 bp, Artificial
  probe
  misc_feature (1)..(25): SEQ ID NO: 658; WAN024AUF; Start 693; Stop 717
aactcctgaacaaatcaagaccttg

SEQ ID NO: 269472 - DNA, 25 bp, Artificial
  probe
  misc_feature (1)..(25): SEQ ID NO: 658; WAN024AUF; Start 24; Stop 48
cgttctctttctttctgcaatcatt

SEQ ID NO: 269473 - DNA, 25 bp, Artificial
  probe
  misc_feature (1)..(25): SEQ ID NO: 659; WAN024AUE; Start 627; Stop 651
atacttctctaaagcctatggtgtc

SEQ ID NO: 269474 - DNA, 25 bp, Artificial
  probe
  misc_feature (1)..(25): SEQ ID NO: 659; WAN024AUE; Start 681; Stop 705
tgaagaagaaggaacacctgaacaa

SEQ ID NO: 269475 - DNA, 25 bp, Artificial
  probe
  misc_feature (1)..(25): SEQ ID NO: 659; WAN024AUE; Start 653; Stop 677
caagtgcttacatctgggaaatcaa

SEQ ID NO: 269476 - DNA, 25 bp, Artificial
  probe
  misc_feature (1)..(25): SEQ ID NO: 659; WAN024AUE; Start 628; Stop 652
tacttctctaaagcctatggtgtcc

SEQ ID NO: 269477 - DNA, 25 bp, Artificial
  probe
  misc_feature (1)..(25): SEQ ID NO: 659; WAN024AUE; Start 740; Stop 764
aagttccttcactctttgtagaatc

SEQ ID NO: 269478 - DNA, 25 bp, Artificial
  probe
  misc_feature (1)..(25): SEQ ID NO: 659; WAN024AUE; Start 680; Stop 704
ctgaagaagaaggaacacctgaaca

SEQ ID NO: 269479 - DNA, 25 bp, Artificial
  probe
  misc_feature (1)..(25): SEQ ID NO: 659; WAN024AUE; Start 679; Stop 703
actgaagaagaaggaacacctgaac

SEQ ID NO: 269480 - DNA, 25 bp, Artificial
  probe
  misc_feature (1)..(25): SEQ ID NO: 659; WAN024AUE; Start 692; Stop 716
gaacacctgaacaaatcaagacctt

SEQ ID NO: 269481 - DNA, 25 bp, Artificial
  probe
  misc_feature (1)..(25): SEQ ID NO: 659; WAN024AUE; Start 683; Stop 707
aagaagaaggaacacctgaacaaat

SEQ ID NO: 269482 - DNA, 25 bp, Artificial
  probe
  misc_feature (1)..(25): SEQ ID NO: 659; WAN024AUE; Start 686; Stop 710
aagaaggaacacctgaacaaatcaa

SEQ ID NO: 269483 - DNA, 25 bp, Artificial
  probe
  misc_feature (1)..(25): SEQ ID NO: 659; WAN024AUE; Start 682; Stop 706
gaagaagaaggaacacctgaacaaa

SEQ ID NO: 269484 - DNA, 25 bp, Artificial
  probe
  misc_feature (1)..(25): SEQ ID NO: 659; WAN024AUE; Start 688; Stop 712
gaaggaacacctgaacaaatcaaga

SEQ ID NO: 269485 - DNA, 25 bp, Artificial
  probe
  misc_feature (1)..(25): SEQ ID NO: 659; WAN024AUE; Start 687; Stop 711
agaaggaacacctgaacaaatcaag

SEQ ID NO: 269486 - DNA, 25 bp, Artificial
  probe
  misc_feature (1)..(25): SEQ ID NO: 659; WAN024AUE; Start 685; Stop 709
gaagaaggaacacctgaacaaatca

SEQ ID NO: 269487 - DNA, 25 bp, Artificial
  probe
  misc_feature (1)..(25): SEQ ID NO: 659; WAN024AUE; Start 689; Stop 713
aaggaacacctgaacaaatcaagac

SEQ ID NO: 269488 - DNA, 25 bp, Artificial
  probe
  misc_feature (1)..(25): SEQ ID NO: 659; WAN024AUE; Start 693; Stop 717
aacacctgaacaaatcaagaccttg

SEQ ID NO: 269489 - DNA, 25 bp, Artificial
  probe
  misc_feature (1)..(25): SEQ ID NO: 659; WAN024AUE; Start 574; Stop 598
aataacatccctgctgaaaagaaac

SEQ ID NO: 269490 - DNA, 25 bp, Artificial
  probe
  misc_feature (1)..(25): SEQ ID NO: 659; WAN024AUE; Start 575; Stop 599
ataacatccctgctgaaaagaaact

SEQ ID NO: 269491 - DNA, 25 bp, Artificial
  probe
  misc_feature (1)..(25): SEQ ID NO: 659; WAN024AUE; Start 739; Stop 763
aaagttccttcactctttgtagaat

SEQ ID NO: 269492 - DNA, 25 bp, Artificial
  probe
  misc_feature (1)..(25): SEQ ID NO: 659; WAN024AUE; Start 691; Stop 715
ggaacacctgaacaaatcaagacct

SEQ ID NO: 269493 - DNA, 25 bp, Artificial
  probe
  misc_feature (1)..(25): SEQ ID NO: 659; WAN024AUE; Start 576; Stop 600
taacatccctgctgaaaagaaactc

SEQ ID NO: 269494 - DNA, 25 bp, Artificial
  probe
  misc_feature (1)..(25): SEQ ID NO: 659; WAN024AUE; Start 573; Stop 597
taataacatccctgctgaaaagaaa

SEQ ID NO: 269495 - DNA, 25 bp, Artificial
  probe
  misc_feature (1)..(25): SEQ ID NO: 659; WAN024AUE; Start 629; Stop 653
acttctctaaagcctatggtgtccc

SEQ ID NO: 269496 - DNA, 25 bp, Artificial
  probe
  misc_feature (1)..(25): SEQ ID NO: 659; WAN024AUE; Start 572; Stop 596
ttaataacatccctgctgaaaagaa

SEQ ID NO: 269497 - DNA, 25 bp, Artificial
  probe
  misc_feature (1)..(25): SEQ ID NO: 659; WAN024AUE; Start 571; Stop 595
tttaataacatccctgctgaaaaga

SEQ ID NO: 269498 - DNA, 25 bp, Artificial
  probe
  misc_feature (1)..(25): SEQ ID NO: 659; WAN024AUE; Start 568; Stop 592
aaatttaataacatccctgctgaaa

SEQ ID NO: 269499 - DNA, 25 bp, Artificial
  probe
  misc_feature (1)..(25): SEQ ID NO: 659; WAN024AUE; Start 690; Stop 714
aggaacacctgaacaaatcaagacc

SEQ ID NO: 269500 - DNA, 25 bp, Artificial
  probe
  misc_feature (1)..(25): SEQ ID NO: 659; WAN024AUE; Start 652; Stop 676
ccaagtgcttacatctgggaaatca

SEQ ID NO: 269501 - DNA, 25 bp, Artificial
  probe
  misc_feature (1)..(25): SEQ ID NO: 659; WAN024AUE; Start 694; Stop 718
acacctgaacaaatcaagaccttgg

SEQ ID NO: 269502 - DNA, 25 bp, Artificial
  probe
  misc_feature (1)..(25): SEQ ID NO: 659; WAN024AUE; Start 696; Stop 720
acctgaacaaatcaagaccttggtt

SEQ ID NO: 269503 - DNA, 25 bp, Artificial
  probe
  misc_feature (1)..(25): SEQ ID NO: 659; WAN024AUE; Start 570; Stop 594
atttaataacatccctgctgaaaag

SEQ ID NO: 269504 - DNA, 25 bp, Artificial
  probe
  misc_feature (1)..(25): SEQ ID NO: 659; WAN024AUE; Start 642; Stop 666
ctatggtgtcccaagtgcttacatc

SEQ ID NO: 269505 - DNA, 25 bp, Artificial
  probe
  misc_feature (1)..(25): SEQ ID NO: 659; WAN024AUE; Start 631; Stop 655
ttctctaaagcctatggtgtcccaa

SEQ ID NO: 269506 - DNA, 25 bp, Artificial
  probe
  misc_feature (1)..(25): SEQ ID NO: 660; WAN024CZQ; Start 231; Stop 255
tgattatattatcggaatggacgct

SEQ ID NO: 269507 - DNA, 25 bp, Artificial
  probe
  misc_feature (1)..(25): SEQ ID NO: 660; WAN024CZQ; Start 235; Stop 259
tatattatcggaatggacgcttcaa

SEQ ID NO: 269508 - DNA, 25 bp, Artificial
  probe
  misc_feature (1)..(25): SEQ ID NO: 660; WAN024CZQ; Start 234; Stop 258
ttatattatcggaatggacgcttca

SEQ ID NO: 269509 - DNA, 25 bp, Artificial
  probe
  misc_feature (1)..(25): SEQ ID NO: 660; WAN024CZQ; Start 188; Stop 212
acaagacatcgcttcagattagtaa

SEQ ID NO: 269510 - DNA, 25 bp, Artificial
  probe
  misc_feature (1)..(25): SEQ ID NO: 660; WAN024CZQ; Start 187; Stop 211
aacaagacatcgcttcagattagta

SEQ ID NO: 269511 - DNA, 25 bp, Artificial
  probe
  misc_feature (1)..(25): SEQ ID NO: 660; WAN024CZQ; Start 230; Stop 254
ttgattatattatcggaatggacgc

SEQ ID NO: 269512 - DNA, 25 bp, Artificial
  probe
  misc_feature (1)..(25): SEQ ID NO: 660; WAN024CZQ; Start 192; Stop 216
gacatcgcttcagattagtaaggaa

SEQ ID NO: 269513 - DNA, 25 bp, Artificial
  probe
  misc_feature (1)..(25): SEQ ID NO: 660; WAN024CZQ; Start 190; Stop 214
aagacatcgcttcagattagtaagg

SEQ ID NO: 269514 - DNA, 25 bp, Artificial
  probe
  misc_feature (1)..(25): SEQ ID NO: 660; WAN024CZQ; Start 189; Stop 213
caagacatcgcttcagattagtaag

SEQ ID NO: 269515 - DNA, 25 bp, Artificial
  probe
  misc_feature (1)..(25): SEQ ID NO: 660; WAN024CZQ; Start 184; Stop 208
aagaacaagacatcgcttcagatta

SEQ ID NO: 269516 - DNA, 25 bp, Artificial
  probe
  misc_feature (1)..(25): SEQ ID NO: 660; WAN024CZQ; Start 232; Stop 256
gattatattatcggaatggacgctt

SEQ ID NO: 269517 - DNA, 25 bp, Artificial
  probe
  misc_feature (1)..(25): SEQ ID NO: 660; WAN024CZQ; Start 174; Stop 198
tccttatgacaagaacaagacatcg

SEQ ID NO: 269518 - DNA, 25 bp, Artificial
  probe
  misc_feature (1)..(25): SEQ ID NO: 660; WAN024CZQ; Start 185; Stop 209
agaacaagacatcgcttcagattag

SEQ ID NO: 269519 - DNA, 25 bp, Artificial
  probe
  misc_feature (1)..(25): SEQ ID NO: 660; WAN024CZQ; Start 233; Stop 257
attatattatcggaatggacgcttc

SEQ ID NO: 269520 - DNA, 25 bp, Artificial
  probe
  misc_feature (1)..(25): SEQ ID NO: 660; WAN024CZQ; Start 177; Stop 201
ttatgacaagaacaagacatcgctt

SEQ ID NO: 269521 - DNA, 25 bp, Artificial
  probe
  misc_feature (1)..(25): SEQ ID NO: 660; WAN024CZQ; Start 173; Stop 197
ttccttatgacaagaacaagacatc

SEQ ID NO: 269522 - DNA, 25 bp, Artificial
  probe
  misc_feature (1)..(25): SEQ ID NO: 660; WAN024CZQ; Start 171; Stop 195
gattccttatgacaagaacaagaca

SEQ ID NO: 269523 - DNA, 25 bp, Artificial
  probe
  misc_feature (1)..(25): SEQ ID NO: 660; WAN024CZQ; Start 191; Stop 215
agacatcgcttcagattagtaagga

SEQ ID NO: 269524 - DNA, 25 bp, Artificial
  probe
  misc_feature (1)..(25): SEQ ID NO: 660; WAN024CZQ; Start 186; Stop 210
gaacaagacatcgcttcagattagt

SEQ ID NO: 269525 - DNA, 25 bp, Artificial
  probe
  misc_feature (1)..(25): SEQ ID NO: 660; WAN024CZQ; Start 170; Stop 194
agattccttatgacaagaacaagac

SEQ ID NO: 269526 - DNA, 25 bp, Artificial
  probe
  misc_feature (1)..(25): SEQ ID NO: 660; WAN024CZQ; Start 168; Stop 192
tgagattccttatgacaagaacaag

SEQ ID NO: 269527 - DNA, 25 bp, Artificial
  probe
  misc_feature (1)..(25): SEQ ID NO: 660; WAN024CZQ; Start 178; Stop 202
tatgacaagaacaagacatcgcttc

SEQ ID NO: 269528 - DNA, 25 bp, Artificial
  probe
  misc_feature (1)..(25): SEQ ID NO: 660; WAN024CZQ; Start 176; Stop 200
cttatgacaagaacaagacatcgct

SEQ ID NO: 269529 - DNA, 25 bp, Artificial
  probe
  misc_feature (1)..(25): SEQ ID NO: 660; WAN024CZQ; Start 169; Stop 193
gagattccttatgacaagaacaaga

SEQ ID NO: 269530 - DNA, 25 bp, Artificial
  probe
  misc_feature (1)..(25): SEQ ID NO: 660; WAN024CZQ; Start 172; Stop 196
attccttatgacaagaacaagacat

SEQ ID NO: 269531 - DNA, 25 bp, Artificial
  probe
  misc_feature (1)..(25): SEQ ID NO: 660; WAN024CZQ; Start 183; Stop 207
caagaacaagacatcgcttcagatt

SEQ ID NO: 269532 - DNA, 25 bp, Artificial
  probe
  misc_feature (1)..(25): SEQ ID NO: 660; WAN024CZQ; Start 167; Stop 191
atgagattccttatgacaagaacaa

SEQ ID NO: 269533 - DNA, 25 bp, Artificial
  probe
  misc_feature (1)..(25): SEQ ID NO: 660; WAN024CZQ; Start 175; Stop 199
ccttatgacaagaacaagacatcgc

SEQ ID NO: 269534 - DNA, 25 bp, Artificial
  probe
  misc_feature (1)..(25): SEQ ID NO: 660; WAN024CZQ; Start 166; Stop 190
tatgagattccttatgacaagaaca

SEQ ID NO: 269535 - DNA, 25 bp, Artificial
  probe
  misc_feature (1)..(25): SEQ ID NO: 660; WAN024CZQ; Start 283; Stop 307
tgtccagtagactgtcaagataaga

SEQ ID NO: 269536 - DNA, 25 bp, Artificial
  probe
  misc_feature (1)..(25): SEQ ID NO: 660; WAN024CZQ; Start 282; Stop 306
gtgtccagtagactgtcaagataag

SEQ ID NO: 269537 - DNA, 25 bp, Artificial
  probe
  misc_feature (1)..(25): SEQ ID NO: 660; WAN024CZQ; Start 9; Stop 33
attagtctttgtctgtctgggaaat

SEQ ID NO: 269538 - DNA, 25 bp, Artificial
  probe
  misc_feature (1)..(25): SEQ ID NO: 660; WAN024CZQ; Start 182; Stop 206
acaagaacaagacatcgcttcagat

SEQ ID NO: 269539 - DNA, 25 bp, Artificial
  probe
  misc_feature (1)..(25): SEQ ID NO: 661; WAN024C9M; Start 346; Stop 370
ggacacctagatattcacttgctaa

SEQ ID NO: 269540 - DNA, 25 bp, Artificial
  probe
  misc_feature (1)..(25): SEQ ID NO: 661; WAN024C9M; Start 345; Stop 369
tggacacctagatattcacttgcta

SEQ ID NO: 269541 - DNA, 25 bp, Artificial
  probe
  misc_feature (1)..(25): SEQ ID NO: 661; WAN024C9M; Start 342; Stop 366
cgatggacacctagatattcacttg

SEQ ID NO: 269542 - DNA, 25 bp, Artificial
  probe
  misc_feature (1)..(25): SEQ ID NO: 661; WAN024C9M; Start 14; Stop 38
ttatactcatatccaacctgcttgc

SEQ ID NO: 269543 - DNA, 25 bp, Artificial
  probe
  misc_feature (1)..(25): SEQ ID NO: 661; WAN024C9M; Start 343; Stop 367
gatggacacctagatattcacttgc

SEQ ID NO: 269544 - DNA, 25 bp, Artificial
  probe
  misc_feature (1)..(25): SEQ ID NO: 661; WAN024C9M; Start 199; Stop 223
attcaacaccaagatcctaactcag

SEQ ID NO: 269545 - DNA, 25 bp, Artificial
  probe
  misc_feature (1)..(25): SEQ ID NO: 661; WAN024C9M; Start 198; Stop 222
gattcaacaccaagatcctaactca

SEQ ID NO: 269546 - DNA, 25 bp, Artificial
  probe
  misc_feature (1)..(25): SEQ ID NO: 661; WAN024C9M; Start 344; Stop 368
atggacacctagatattcacttgct

SEQ ID NO: 269547 - DNA, 25 bp, Artificial
  probe
  misc_feature (1)..(25): SEQ ID NO: 661; WAN024C9M; Start 16; Stop 40
atactcatatccaacctgcttgcta

SEQ ID NO: 269548 - DNA, 25 bp, Artificial
  probe
  misc_feature (1)..(25): SEQ ID NO: 661; WAN024C9M; Start 15; Stop 39
tatactcatatccaacctgcttgct

SEQ ID NO: 269549 - DNA, 25 bp, Artificial
  probe
  misc_feature (1)..(25): SEQ ID NO: 661; WAN024C9M; Start 347; Stop 371
gacacctagatattcacttgctaag

SEQ ID NO: 269550 - DNA, 25 bp, Artificial
  probe
  misc_feature (1)..(25): SEQ ID NO: 661; WAN024C9M; Start 202; Stop 226
caacaccaagatcctaactcagaag

SEQ ID NO: 269551 - DNA, 25 bp, Artificial
  probe
  misc_feature (1)..(25): SEQ ID NO: 661; WAN024C9M; Start 201; Stop 225
tcaacaccaagatcctaactcagaa

SEQ ID NO: 269552 - DNA, 25 bp, Artificial
  probe
  misc_feature (1)..(25): SEQ ID NO: 661; WAN024C9M; Start 200; Stop 224
ttcaacaccaagatcctaactcaga

SEQ ID NO: 269553 - DNA, 25 bp, Artificial
  probe
  misc_feature (1)..(25): SEQ ID NO: 661; WAN024C9M; Start 197; Stop 221
cgattcaacaccaagatcctaactc

SEQ ID NO: 269554 - DNA, 25 bp, Artificial
  probe
  misc_feature (1)..(25): SEQ ID NO: 661; WAN024C9M; Start 348; Stop 372
acacctagatattcacttgctaagg

SEQ ID NO: 269555 - DNA, 25 bp, Artificial
  probe
  misc_feature (1)..(25): SEQ ID NO: 661; WAN024C9M; Start 339; Stop 363
attcgatggacacctagatattcac

SEQ ID NO: 269556 - DNA, 25 bp, Artificial
  probe
  misc_feature (1)..(25): SEQ ID NO: 661; WAN024C9M; Start 212; Stop 236
atcctaactcagaaggtactacagt

SEQ ID NO: 269557 - DNA, 25 bp, Artificial
  probe
  misc_feature (1)..(25): SEQ ID NO: 661; WAN024C9M; Start 17; Stop 41
tactcatatccaacctgcttgctag

SEQ ID NO: 269558 - DNA, 25 bp, Artificial
  probe
  misc_feature (1)..(25): SEQ ID NO: 661; WAN024C9M; Start 210; Stop 234
agatcctaactcagaaggtactaca

SEQ ID NO: 269559 - DNA, 25 bp, Artificial
  probe
  misc_feature (1)..(25): SEQ ID NO: 661; WAN024C9M; Start 341; Stop 365
tcgatggacacctagatattcactt

SEQ ID NO: 269560 - DNA, 25 bp, Artificial
  probe
  misc_feature (1)..(25): SEQ ID NO: 661; WAN024C9M; Start 340; Stop 364
ttcgatggacacctagatattcact

SEQ ID NO: 269561 - DNA, 25 bp, Artificial
  probe
  misc_feature (1)..(25): SEQ ID NO: 661; WAN024C9M; Start 211; Stop 235
gatcctaactcagaaggtactacag

SEQ ID NO: 269562 - DNA, 25 bp, Artificial
  probe
  misc_feature (1)..(25): SEQ ID NO: 661; WAN024C9M; Start 191; Stop 215
ttattgcgattcaacaccaagatcc

SEQ ID NO: 269563 - DNA, 25 bp, Artificial
  probe
  misc_feature (1)..(25): SEQ ID NO: 661; WAN024C9M; Start 207; Stop 231
ccaagatcctaactcagaaggtact

SEQ ID NO: 269564 - DNA, 25 bp, Artificial
  probe
  misc_feature (1)..(25): SEQ ID NO: 661; WAN024C9M; Start 852; Stop 876
cggtcaactattagcgattattatt

SEQ ID NO: 269565 - DNA, 25 bp, Artificial
  probe
  misc_feature (1)..(25): SEQ ID NO: 661; WAN024C9M; Start 297; Stop 321
agaagatgctcaaagtagtagtgtt

SEQ ID NO: 269566 - DNA, 25 bp, Artificial
  probe
  misc_feature (1)..(25): SEQ ID NO: 661; WAN024C9M; Start 209; Stop 233
aagatcctaactcagaaggtactac

SEQ ID NO: 269567 - DNA, 25 bp, Artificial
  probe
  misc_feature (1)..(25): SEQ ID NO: 661; WAN024C9M; Start 208; Stop 232
caagatcctaactcagaaggtacta

SEQ ID NO: 269568 - DNA, 25 bp, Artificial
  probe
  misc_feature (1)..(25): SEQ ID NO: 661; WAN024C9M; Start 713; Stop 737
tgctcagttataatctcatcttgtt

SEQ ID NO: 269569 - DNA, 25 bp, Artificial
  probe
  misc_feature (1)..(25): SEQ ID NO: 661; WAN024C9M; Start 440; Stop 464
tggctatctttagtaacggatttca

SEQ ID NO: 269570 - DNA, 25 bp, Artificial
  probe
  misc_feature (1)..(25): SEQ ID NO: 661; WAN024C9M; Start 338; Stop 362
tattcgatggacacctagatattca

SEQ ID NO: 269571 - DNA, 25 bp, Artificial
  probe
  misc_feature (1)..(25): SEQ ID NO: 661; WAN024C9M; Start 714; Stop 738
gctcagttataatctcatcttgttg

SEQ ID NO: 269572 - DNA, 25 bp, Artificial
  probe
  misc_feature (1)..(25): SEQ ID NO: 662; WAN024D2K; Start 20; Stop 44
atattattgagaagccttgcgattc

SEQ ID NO: 269573 - DNA, 25 bp, Artificial
  probe
  misc_feature (1)..(25): SEQ ID NO: 662; WAN024D2K; Start 32; Stop 56
agccttgcgattctaattcagataa

SEQ ID NO: 269574 - DNA, 25 bp, Artificial
  probe
  misc_feature (1)..(25): SEQ ID NO: 662; WAN024D2K; Start 31; Stop 55
aagccttgcgattctaattcagata

SEQ ID NO: 269575 - DNA, 25 bp, Artificial
  probe
  misc_feature (1)..(25): SEQ ID NO: 662; WAN024D2K; Start 19; Stop 43
tatattattgagaagccttgcgatt

SEQ ID NO: 269576 - DNA, 25 bp, Artificial
  probe
  misc_feature (1)..(25): SEQ ID NO: 662; WAN024D2K; Start 18; Stop 42
ttatattattgagaagccttgcgat

SEQ ID NO: 269577 - DNA, 25 bp, Artificial
  probe
  misc_feature (1)..(25): SEQ ID NO: 662; WAN024D2K; Start 17; Stop 41
attatattattgagaagccttgcga

SEQ ID NO: 269578 - DNA, 25 bp, Artificial
  probe
  misc_feature (1)..(25): SEQ ID NO: 662; WAN024D2K; Start 30; Stop 54
gaagccttgcgattctaattcagat

SEQ ID NO: 269579 - DNA, 25 bp, Artificial
  probe
  misc_feature (1)..(25): SEQ ID NO: 662; WAN024D2K; Start 16; Stop 40
aattatattattgagaagccttgcg

SEQ ID NO: 269580 - DNA, 25 bp, Artificial
  probe
  misc_feature (1)..(25): SEQ ID NO: 662; WAN024D2K; Start 33; Stop 57
gccttgcgattctaattcagataaa

SEQ ID NO: 269581 - DNA, 25 bp, Artificial
  probe
  misc_feature (1)..(25): SEQ ID NO: 662; WAN024D2K; Start 24; Stop 48
tattgagaagccttgcgattctaat

SEQ ID NO: 269582 - DNA, 25 bp, Artificial
  probe
  misc_feature (1)..(25): SEQ ID NO: 662; WAN024D2K; Start 22; Stop 46
attattgagaagccttgcgattcta

SEQ ID NO: 269583 - DNA, 25 bp, Artificial
  probe
  misc_feature (1)..(25): SEQ ID NO: 662; WAN024D2K; Start 21; Stop 45
tattattgagaagccttgcgattct

SEQ ID NO: 269584 - DNA, 25 bp, Artificial
  probe
  misc_feature (1)..(25): SEQ ID NO: 662; WAN024D2K; Start 23; Stop 47
ttattgagaagccttgcgattctaa

SEQ ID NO: 269585 - DNA, 25 bp, Artificial
  probe
  misc_feature (1)..(25): SEQ ID NO: 662; WAN024D2K; Start 215; Stop 239
aagatgatgataaagttgagtggaa

SEQ ID NO: 269586 - DNA, 25 bp, Artificial
  probe
  misc_feature (1)..(25): SEQ ID NO: 662; WAN024D2K; Start 214; Stop 238
aaagatgatgataaagttgagtgga

SEQ ID NO: 269587 - DNA, 25 bp, Artificial
  probe
  misc_feature (1)..(25): SEQ ID NO: 662; WAN024D2K; Start 25; Stop 49
attgagaagccttgcgattctaatt

SEQ ID NO: 269588 - DNA, 25 bp, Artificial
  probe
  misc_feature (1)..(25): SEQ ID NO: 662; WAN024D2K; Start 216; Stop 240
agatgatgataaagttgagtggaat

SEQ ID NO: 269589 - DNA, 25 bp, Artificial
  probe
  misc_feature (1)..(25): SEQ ID NO: 662; WAN024D2K; Start 37; Stop 61
tgcgattctaattcagataaactgc

SEQ ID NO: 269590 - DNA, 25 bp, Artificial
  probe
  misc_feature (1)..(25): SEQ ID NO: 662; WAN024D2K; Start 34; Stop 58
ccttgcgattctaattcagataaac

SEQ ID NO: 269591 - DNA, 25 bp, Artificial
  probe
  misc_feature (1)..(25): SEQ ID NO: 662; WAN024D2K; Start 113; Stop 137
tcagaatcaataatagtgtaggaga

SEQ ID NO: 269592 - DNA, 25 bp, Artificial
  probe
  misc_feature (1)..(25): SEQ ID NO: 662; WAN024D2K; Start 111; Stop 135
tctcagaatcaataatagtgtagga

SEQ ID NO: 269593 - DNA, 25 bp, Artificial
  probe
  misc_feature (1)..(25): SEQ ID NO: 662; WAN024D2K; Start 192; Stop 216
tgaggaagatattgtgaaagtcaaa

SEQ ID NO: 269594 - DNA, 25 bp, Artificial
  probe
  misc_feature (1)..(25): SEQ ID NO: 662; WAN024D2K; Start 190; Stop 214
tttgaggaagatattgtgaaagtca

SEQ ID NO: 269595 - DNA, 25 bp, Artificial
  probe
  misc_feature (1)..(25): SEQ ID NO: 662; WAN024D2K; Start 213; Stop 237
caaagatgatgataaagttgagtgg

SEQ ID NO: 269596 - DNA, 25 bp, Artificial
  probe
  misc_feature (1)..(25): SEQ ID NO: 662; WAN024D2K; Start 26; Stop 50
ttgagaagccttgcgattctaattc

SEQ ID NO: 269597 - DNA, 25 bp, Artificial
  probe
  misc_feature (1)..(25): SEQ ID NO: 662; WAN024D2K; Start 220; Stop 244
gatgataaagttgagtggaatttgt

SEQ ID NO: 269598 - DNA, 25 bp, Artificial
  probe
  misc_feature (1)..(25): SEQ ID NO: 662; WAN024D2K; Start 219; Stop 243
tgatgataaagttgagtggaatttg

SEQ ID NO: 269599 - DNA, 25 bp, Artificial
  probe
  misc_feature (1)..(25): SEQ ID NO: 662; WAN024D2K; Start 194; Stop 218
aggaagatattgtgaaagtcaaaga

SEQ ID NO: 269600 - DNA, 25 bp, Artificial
  probe
  misc_feature (1)..(25): SEQ ID NO: 662; WAN024D2K; Start 114; Stop 138
cagaatcaataatagtgtaggagag

SEQ ID NO: 269601 - DNA, 25 bp, Artificial
  probe
  misc_feature (1)..(25): SEQ ID NO: 662; WAN024D2K; Start 110; Stop 134
ctctcagaatcaataatagtgtagg

SEQ ID NO: 269602 - DNA, 25 bp, Artificial
  probe
  misc_feature (1)..(25): SEQ ID NO: 662; WAN024D2K; Start 28; Stop 52
gagaagccttgcgattctaattcag

SEQ ID NO: 269603 - DNA, 25 bp, Artificial
  probe
  misc_feature (1)..(25): SEQ ID NO: 662; WAN024D2K; Start 193; Stop 217
gaggaagatattgtgaaagtcaaag

SEQ ID NO: 269604 - DNA, 25 bp, Artificial
  probe
  misc_feature (1)..(25): SEQ ID NO: 662; WAN024D2K; Start 115; Stop 139
agaatcaataatagtgtaggagaga

SEQ ID NO: 269605 - DNA, 25 bp, Artificial
  probe
  misc_feature (1)..(25): SEQ ID NO: 663; WAN024FT8; Start 287; Stop 311
cactcaataatatcctcatggttgc

SEQ ID NO: 269606 - DNA, 25 bp, Artificial
  probe
  misc_feature (1)..(25): SEQ ID NO: 663; WAN024FT8; Start 288; Stop 312
actcaataatatcctcatggttgcg

SEQ ID NO: 269607 - DNA, 25 bp, Artificial
  probe
  misc_feature (1)..(25): SEQ ID NO: 663; WAN024FT8; Start 286; Stop 310
tcactcaataatatcctcatggttg

SEQ ID NO: 269608 - DNA, 25 bp, Artificial
  probe
  misc_feature (1)..(25): SEQ ID NO: 663; WAN024FT8; Start 80; Stop 104
cctttaatgctggtgatgatatgaa

SEQ ID NO: 269609 - DNA, 25 bp, Artificial
  probe
  misc_feature (1)..(25): SEQ ID NO: 663; WAN024FT8; Start 258; Stop 282
tcgtaagaaataccaagaagccttt

SEQ ID NO: 269610 - DNA, 25 bp, Artificial
  probe
  misc_feature (1)..(25): SEQ ID NO: 663; WAN024FT8; Start 250; Stop 274
taccagtctcgtaagaaataccaag

SEQ ID NO: 269611 - DNA, 25 bp, Artificial
  probe
  misc_feature (1)..(25): SEQ ID NO: 663; WAN024FT8; Start 249; Stop 273
ctaccagtctcgtaagaaataccaa

SEQ ID NO: 269612 - DNA, 25 bp, Artificial
  probe
  misc_feature (1)..(25): SEQ ID NO: 663; WAN024FT8; Start 252; Stop 276
ccagtctcgtaagaaataccaagaa

SEQ ID NO: 269613 - DNA, 25 bp, Artificial
  probe
  misc_feature (1)..(25): SEQ ID NO: 663; WAN024FT8; Start 603; Stop 627
cttctttgtaacaggaaatggcttt

SEQ ID NO: 269614 - DNA, 25 bp, Artificial
  probe
  misc_feature (1)..(25): SEQ ID NO: 663; WAN024FT8; Start 257; Stop 281
ctcgtaagaaataccaagaagcctt

SEQ ID NO: 269615 - DNA, 25 bp, Artificial
  probe
  misc_feature (1)..(25): SEQ ID NO: 663; WAN024FT8; Start 248; Stop 272
tctaccagtctcgtaagaaatacca

SEQ ID NO: 269616 - DNA, 25 bp, Artificial
  probe
  misc_feature (1)..(25): SEQ ID NO: 663; WAN024FT8; Start 254; Stop 278
agtctcgtaagaaataccaagaagc

SEQ ID NO: 269617 - DNA, 25 bp, Artificial
  probe
  misc_feature (1)..(25): SEQ ID NO: 663; WAN024FT8; Start 247; Stop 271
atctaccagtctcgtaagaaatacc

SEQ ID NO: 269618 - DNA, 25 bp, Artificial
  probe
  misc_feature (1)..(25): SEQ ID NO: 663; WAN024FT8; Start 528; Stop 552
tccttacctgactccgtctatcatt

SEQ ID NO: 269619 - DNA, 25 bp, Artificial
  probe
  misc_feature (1)..(25): SEQ ID NO: 663; WAN024FT8; Start 527; Stop 551
ttccttacctgactccgtctatcat

SEQ ID NO: 269620 - DNA, 25 bp, Artificial
  probe
  misc_feature (1)..(25): SEQ ID NO: 663; WAN024FT8; Start 285; Stop 309
atcactcaataatatcctcatggtt

SEQ ID NO: 269621 - DNA, 25 bp, Artificial
  probe
  misc_feature (1)..(25): SEQ ID NO: 663; WAN024FT8; Start 79; Stop 103
gcctttaatgctggtgatgatatga

SEQ ID NO: 269622 - DNA, 25 bp, Artificial
  probe
  misc_feature (1)..(25): SEQ ID NO: 663; WAN024FT8; Start 253; Stop 277
cagtctcgtaagaaataccaagaag

SEQ ID NO: 269623 - DNA, 25 bp, Artificial
  probe
  misc_feature (1)..(25): SEQ ID NO: 663; WAN024FT8; Start 336; Stop 360
cttcttgattctctttacccaactc

SEQ ID NO: 269624 - DNA, 25 bp, Artificial
  probe
  misc_feature (1)..(25): SEQ ID NO: 663; WAN024FT8; Start 337; Stop 361
ttcttgattctctttacccaactca

SEQ ID NO: 269625 - DNA, 25 bp, Artificial
  probe
  misc_feature (1)..(25): SEQ ID NO: 663; WAN024FT8; Start 335; Stop 359
gcttcttgattctctttacccaact

SEQ ID NO: 269626 - DNA, 25 bp, Artificial
  probe
  misc_feature (1)..(25): SEQ ID NO: 663; WAN024FT8; Start 251; Stop 275
accagtctcgtaagaaataccaaga

SEQ ID NO: 269627 - DNA, 25 bp, Artificial
  probe
  misc_feature (1)..(25): SEQ ID NO: 663; WAN024FT8; Start 245; Stop 269
acatctaccagtctcgtaagaaata

SEQ ID NO: 269628 - DNA, 25 bp, Artificial
  probe
  misc_feature (1)..(25): SEQ ID NO: 663; WAN024FT8; Start 244; Stop 268
tacatctaccagtctcgtaagaaat

SEQ ID NO: 269629 - DNA, 25 bp, Artificial
  probe
  misc_feature (1)..(25): SEQ ID NO: 663; WAN024FT8; Start 83; Stop 107
ttaatgctggtgatgatatgaatag

SEQ ID NO: 269630 - DNA, 25 bp, Artificial
  probe
  misc_feature (1)..(25): SEQ ID NO: 663; WAN024FT8; Start 255; Stop 279
gtctcgtaagaaataccaagaagcc

SEQ ID NO: 269631 - DNA, 25 bp, Artificial
  probe
  misc_feature (1)..(25): SEQ ID NO: 663; WAN024FT8; Start 246; Stop 270
catctaccagtctcgtaagaaatac

SEQ ID NO: 269632 - DNA, 25 bp, Artificial
  probe
  misc_feature (1)..(25): SEQ ID NO: 663; WAN024FT8; Start 256; Stop 280
tctcgtaagaaataccaagaagcct

SEQ ID NO: 269633 - DNA, 25 bp, Artificial
  probe
  misc_feature (1)..(25): SEQ ID NO: 663; WAN024FT8; Start 84; Stop 108
taatgctggtgatgatatgaatagc

SEQ ID NO: 269634 - DNA, 25 bp, Artificial
  probe
  misc_feature (1)..(25): SEQ ID NO: 663; WAN024FT8; Start 238; Stop 262
gccatttacatctaccagtctcgta

SEQ ID NO: 269635 - DNA, 25 bp, Artificial
  probe
  misc_feature (1)..(25): SEQ ID NO: 663; WAN024FT8; Start 342; Stop 366
gattctctttacccaactcaagttt

SEQ ID NO: 269636 - DNA, 25 bp, Artificial
  probe
  misc_feature (1)..(25): SEQ ID NO: 663; WAN024FT8; Start 526; Stop 550
cttccttacctgactccgtctatca

SEQ ID NO: 269637 - DNA, 25 bp, Artificial
  probe
  misc_feature (1)..(25): SEQ ID NO: 663; WAN024FT8; Start 341; Stop 365
tgattctctttacccaactcaagtt

SEQ ID NO: 269638 - DNA, 25 bp, Artificial
  probe
  misc_feature (1)..(25): SEQ ID NO: 664; WAN024CXU; Start 1705; Stop 1729
gttgttattagtaaggcagcagatg

SEQ ID NO: 269639 - DNA, 25 bp, Artificial
  probe
  misc_feature (1)..(25): SEQ ID NO: 664; WAN024CXU; Start 1704; Stop 1728
agttgttattagtaaggcagcagat

SEQ ID NO: 269640 - DNA, 25 bp, Artificial
  probe
  misc_feature (1)..(25): SEQ ID NO: 664; WAN024CXU; Start 1309; Stop 1333
accattgttattgaccaccatagaa

SEQ ID NO: 269641 - DNA, 25 bp, Artificial
  probe
  misc_feature (1)..(25): SEQ ID NO: 664; WAN024CXU; Start 1311; Stop 1335
cattgttattgaccaccatagaagg

SEQ ID NO: 269642 - DNA, 25 bp, Artificial
  probe
  misc_feature (1)..(25): SEQ ID NO: 664; WAN024CXU; Start 1310; Stop 1334
ccattgttattgaccaccatagaag

SEQ ID NO: 269643 - DNA, 25 bp, Artificial
  probe
  misc_feature (1)..(25): SEQ ID NO: 664; WAN024CXU; Start 1185; Stop 1209
tacgaagttgttgtctgttaaggat

SEQ ID NO: 269644 - DNA, 25 bp, Artificial
  probe
  misc_feature (1)..(25): SEQ ID NO: 664; WAN024CXU; Start 1184; Stop 1208
ttacgaagttgttgtctgttaagga

SEQ ID NO: 269645 - DNA, 25 bp, Artificial
  probe
  misc_feature (1)..(25): SEQ ID NO: 664; WAN024CXU; Start 1183; Stop 1207
gttacgaagttgttgtctgttaagg

SEQ ID NO: 269646 - DNA, 25 bp, Artificial
  probe
  misc_feature (1)..(25): SEQ ID NO: 664; WAN024CXU; Start 1182; Stop 1206
agttacgaagttgttgtctgttaag

SEQ ID NO: 269647 - DNA, 25 bp, Artificial
  probe
  misc_feature (1)..(25): SEQ ID NO: 664; WAN024CXU; Start 1181; Stop 1205
gagttacgaagttgttgtctgttaa

SEQ ID NO: 269648 - DNA, 25 bp, Artificial
  probe
  misc_feature (1)..(25): SEQ ID NO: 664; WAN024CXU; Start 1703; Stop 1727
cagttgttattagtaaggcagcaga

SEQ ID NO: 269649 - DNA, 25 bp, Artificial
  probe
  misc_feature (1)..(25): SEQ ID NO: 664; WAN024CXU; Start 1701; Stop 1725
tacagttgttattagtaaggcagca

SEQ ID NO: 269650 - DNA, 25 bp, Artificial
  probe
  misc_feature (1)..(25): SEQ ID NO: 664; WAN024CXU; Start 1180; Stop 1204
ggagttacgaagttgttgtctgtta

SEQ ID NO: 269651 - DNA, 25 bp, Artificial
  probe
  misc_feature (1)..(25): SEQ ID NO: 664; WAN024CXU; Start 1829; Stop 1853
tacaacggattatggaagagttagg

SEQ ID NO: 269652 - DNA, 25 bp, Artificial
  probe
  misc_feature (1)..(25): SEQ ID NO: 664; WAN024CXU; Start 1308; Stop 1332
aaccattgttattgaccaccataga

SEQ ID NO: 269653 - DNA, 25 bp, Artificial
  probe
  misc_feature (1)..(25): SEQ ID NO: 664; WAN024CXU; Start 1175; Stop 1199
aagaaggagttacgaagttgttgtc

SEQ ID NO: 269654 - DNA, 25 bp, Artificial
  probe
  misc_feature (1)..(25): SEQ ID NO: 664; WAN024CXU; Start 990; Stop 1014
ttcagataagattcggagtgtagat

SEQ ID NO: 269655 - DNA, 25 bp, Artificial
  probe
  misc_feature (1)..(25): SEQ ID NO: 664; WAN024CXU; Start 1702; Stop 1726
acagttgttattagtaaggcagcag

SEQ ID NO: 269656 - DNA, 25 bp, Artificial
  probe
  misc_feature (1)..(25): SEQ ID NO: 664; WAN024CXU; Start 1700; Stop 1724
atacagttgttattagtaaggcagc

SEQ ID NO: 269657 - DNA, 25 bp, Artificial
  probe
  misc_feature (1)..(25): SEQ ID NO: 664; WAN024CXU; Start 363; Stop 387
aacgattatcaaggcttcagtagga

SEQ ID NO: 269658 - DNA, 25 bp, Artificial
  probe
  misc_feature (1)..(25): SEQ ID NO: 664; WAN024CXU; Start 480; Stop 504
ggaacaagccataacagatgaattg

SEQ ID NO: 269659 - DNA, 25 bp, Artificial
  probe
  misc_feature (1)..(25): SEQ ID NO: 664; WAN024CXU; Start 1654; Stop 1678
ggttcagatgtactaatagcagagg

SEQ ID NO: 269660 - DNA, 25 bp, Artificial
  probe
  misc_feature (1)..(25): SEQ ID NO: 664; WAN024CXU; Start 1186; Stop 1210
acgaagttgttgtctgttaaggatg

SEQ ID NO: 269661 - DNA, 25 bp, Artificial
  probe
  misc_feature (1)..(25): SEQ ID NO: 664; WAN024CXU; Start 1401; Stop 1425
gttggtaacggaattgattcagttc

SEQ ID NO: 269662 - DNA, 25 bp, Artificial
  probe
  misc_feature (1)..(25): SEQ ID NO: 664; WAN024CXU; Start 1653; Stop 1677
aggttcagatgtactaatagcagag

SEQ ID NO: 269663 - DNA, 25 bp, Artificial
  probe
  misc_feature (1)..(25): SEQ ID NO: 664; WAN024CXU; Start 992; Stop 1016
cagataagattcggagtgtagatca

SEQ ID NO: 269664 - DNA, 25 bp, Artificial
  probe
  misc_feature (1)..(25): SEQ ID NO: 664; WAN024CXU; Start 1655; Stop 1679
gttcagatgtactaatagcagaggc

SEQ ID NO: 269665 - DNA, 25 bp, Artificial
  probe
  misc_feature (1)..(25): SEQ ID NO: 664; WAN024CXU; Start 364; Stop 388
acgattatcaaggcttcagtaggaa

SEQ ID NO: 269666 - DNA, 25 bp, Artificial
  probe
  misc_feature (1)..(25): SEQ ID NO: 664; WAN024CXU; Start 1400; Stop 1424
agttggtaacggaattgattcagtt

SEQ ID NO: 269667 - DNA, 25 bp, Artificial
  probe
  misc_feature (1)..(25): SEQ ID NO: 664; WAN024CXU; Start 1471; Stop 1495
ttgatggctggtatgatgttggata

SEQ ID NO: 269668 - DNA, 25 bp, Artificial
  probe
  misc_feature (1)..(25): SEQ ID NO: 664; WAN024CXU; Start 1177; Stop 1201
gaaggagttacgaagttgttgtctg

SEQ ID NO: 269669 - DNA, 25 bp, Artificial
  probe
  misc_feature (1)..(25): SEQ ID NO: 664; WAN024CXU; Start 991; Stop 1015
tcagataagattcggagtgtagatc

SEQ ID NO: 269670 - DNA, 25 bp, Artificial
  probe
  misc_feature (1)..(25): SEQ ID NO: 664; WAN024CXU; Start 172; Stop 196
acaaggagtgatgtagaacagatac

SEQ ID NO: 269671 - DNA, 25 bp, Artificial
  probe
  misc_feature (1)..(25): SEQ ID NO: 665; WAN024G7J; Start 913; Stop 937
attccagataatacaccgttagcag

SEQ ID NO: 269672 - DNA, 25 bp, Artificial
  probe
  misc_feature (1)..(25): SEQ ID NO: 665; WAN024G7J; Start 912; Stop 936
aattccagataatacaccgttagca

SEQ ID NO: 269673 - DNA, 25 bp, Artificial
  probe
  misc_feature (1)..(25): SEQ ID NO: 665; WAN024G7J; Start 911; Stop 935
taattccagataatacaccgttagc

SEQ ID NO: 269674 - DNA, 25 bp, Artificial
  probe
  misc_feature (1)..(25): SEQ ID NO: 665; WAN024G7J; Start 902; Stop 926
ccgttgctgtaattccagataatac

SEQ ID NO: 269675 - DNA, 25 bp, Artificial
  probe
  misc_feature (1)..(25): SEQ ID NO: 665; WAN024G7J; Start 381; Stop 405
tgttatcttagcaggttattctggt

SEQ ID NO: 269676 - DNA, 25 bp, Artificial
  probe
  misc_feature (1)..(25): SEQ ID NO: 665; WAN024G7J; Start 901; Stop 925
gccgttgctgtaattccagataata

SEQ ID NO: 269677 - DNA, 25 bp, Artificial
  probe
  misc_feature (1)..(25): SEQ ID NO: 665; WAN024G7J; Start 919; Stop 943
gataatacaccgttagcagcctcat

SEQ ID NO: 269678 - DNA, 25 bp, Artificial
  probe
  misc_feature (1)..(25): SEQ ID NO: 665; WAN024G7J; Start 380; Stop 404
atgttatcttagcaggttattctgg

SEQ ID NO: 269679 - DNA, 25 bp, Artificial
  probe
  misc_feature (1)..(25): SEQ ID NO: 665; WAN024G7J; Start 914; Stop 938
ttccagataatacaccgttagcagc

SEQ ID NO: 269680 - DNA, 25 bp, Artificial
  probe
  misc_feature (1)..(25): SEQ ID NO: 665; WAN024G7J; Start 321; Stop 345
taacctatttgacgatttggatgga

SEQ ID NO: 269681 - DNA, 25 bp, Artificial
  probe
  misc_feature (1)..(25): SEQ ID NO: 665; WAN024G7J; Start 320; Stop 344
ctaacctatttgacgatttggatgg

SEQ ID NO: 269682 - DNA, 25 bp, Artificial
  probe
  misc_feature (1)..(25): SEQ ID NO: 665; WAN024G7J; Start 319; Stop 343
gctaacctatttgacgatttggatg

SEQ ID NO: 269683 - DNA, 25 bp, Artificial
  probe
  misc_feature (1)..(25): SEQ ID NO: 665; WAN024G7J; Start 472; Stop 496
tggcaaactttatggagagatatga

SEQ ID NO: 269684 - DNA, 25 bp, Artificial
  probe
  misc_feature (1)..(25): SEQ ID NO: 665; WAN024G7J; Start 327; Stop 351
atttgacgatttggatggacttaac

SEQ ID NO: 269685 - DNA, 25 bp, Artificial
  probe
  misc_feature (1)..(25): SEQ ID NO: 665; WAN024G7J; Start 333; Stop 357
cgatttggatggacttaactttgaa

SEQ ID NO: 269686 - DNA, 25 bp, Artificial
  probe
  misc_feature (1)..(25): SEQ ID NO: 665; WAN024G7J; Start 448; Stop 472
gtagcagcatacaaatctaaacctt

SEQ ID NO: 269687 - DNA, 25 bp, Artificial
  probe
  misc_feature (1)..(25): SEQ ID NO: 665; WAN024G7J; Start 331; Stop 355
gacgatttggatggacttaactttg

SEQ ID NO: 269688 - DNA, 25 bp, Artificial
  probe
  misc_feature (1)..(25): SEQ ID NO: 665; WAN024G7J; Start 469; Stop 493
ccttggcaaactttatggagagata

SEQ ID NO: 269689 - DNA, 25 bp, Artificial
  probe
  misc_feature (1)..(25): SEQ ID NO: 665; WAN024G7J; Start 947; Stop 971
ctccaacaccactttcaataaacta

SEQ ID NO: 269690 - DNA, 25 bp, Artificial
  probe
  misc_feature (1)..(25): SEQ ID NO: 665; WAN024G7J; Start 946; Stop 970
actccaacaccactttcaataaact

SEQ ID NO: 269691 - DNA, 25 bp, Artificial
  probe
  misc_feature (1)..(25): SEQ ID NO: 665; WAN024G7J; Start 945; Stop 969
cactccaacaccactttcaataaac

SEQ ID NO: 269692 - DNA, 25 bp, Artificial
  probe
  misc_feature (1)..(25): SEQ ID NO: 665; WAN024G7J; Start 382; Stop 406
gttatcttagcaggttattctggta

SEQ ID NO: 269693 - DNA, 25 bp, Artificial
  probe
  misc_feature (1)..(25): SEQ ID NO: 665; WAN024G7J; Start 910; Stop 934
gtaattccagataatacaccgttag

SEQ ID NO: 269694 - DNA, 25 bp, Artificial
  probe
  misc_feature (1)..(25): SEQ ID NO: 665; WAN024G7J; Start 332; Stop 356
acgatttggatggacttaactttga

SEQ ID NO: 269695 - DNA, 25 bp, Artificial
  probe
  misc_feature (1)..(25): SEQ ID NO: 665; WAN024G7J; Start 330; Stop 354
tgacgatttggatggacttaacttt

SEQ ID NO: 269696 - DNA, 25 bp, Artificial
  probe
  misc_feature (1)..(25): SEQ ID NO: 665; WAN024G7J; Start 329; Stop 353
ttgacgatttggatggacttaactt

SEQ ID NO: 269697 - DNA, 25 bp, Artificial
  probe
  misc_feature (1)..(25): SEQ ID NO: 665; WAN024G7J; Start 328; Stop 352
tttgacgatttggatggacttaact

SEQ ID NO: 269698 - DNA, 25 bp, Artificial
  probe
  misc_feature (1)..(25): SEQ ID NO: 665; WAN024G7J; Start 335; Stop 359
atttggatggacttaactttgaagc

SEQ ID NO: 269699 - DNA, 25 bp, Artificial
  probe
  misc_feature (1)..(25): SEQ ID NO: 665; WAN024G7J; Start 253; Stop 277
ggtgtaagtgctgataaaggagttt

SEQ ID NO: 269700 - DNA, 25 bp, Artificial
  probe
  misc_feature (1)..(25): SEQ ID NO: 665; WAN024G7J; Start 917; Stop 941
cagataatacaccgttagcagcctc

SEQ ID NO: 269701 - DNA, 25 bp, Artificial
  probe
  misc_feature (1)..(25): SEQ ID NO: 665; WAN024G7J; Start 471; Stop 495
ttggcaaactttatggagagatatg

SEQ ID NO: 269702 - DNA, 25 bp, Artificial
  probe
  misc_feature (1)..(25): SEQ ID NO: 665; WAN024G7J; Start 325; Stop 349
ctatttgacgatttggatggactta

SEQ ID NO: 269703 - DNA, 25 bp, Artificial
  probe
  misc_feature (1)..(25): SEQ ID NO: 665; WAN024G7J; Start 324; Stop 348
cctatttgacgatttggatggactt

SEQ ID NO: 269704 - DNA, 25 bp, Artificial
  probe
  misc_feature (1)..(25): SEQ ID NO: 666; WAN024ATU; Start 52; Stop 76
ttacaaaagattaaaggtggggaga

SEQ ID NO: 269705 - DNA, 25 bp, Artificial
  probe
  misc_feature (1)..(25): SEQ ID NO: 666; WAN024ATU; Start 56; Stop 80
aaaagattaaaggtggggagatgag

SEQ ID NO: 269706 - DNA, 25 bp, Artificial
  probe
  misc_feature (1)..(25): SEQ ID NO: 666; WAN024ATU; Start 53; Stop 77
tacaaaagattaaaggtggggagat

SEQ ID NO: 269707 - DNA, 25 bp, Artificial
  probe
  misc_feature (1)..(25): SEQ ID NO: 666; WAN024ATU; Start 55; Stop 79
caaaagattaaaggtggggagatga

SEQ ID NO: 269708 - DNA, 25 bp, Artificial
  probe
  misc_feature (1)..(25): SEQ ID NO: 666; WAN024ATU; Start 50; Stop 74
acttacaaaagattaaaggtgggga

SEQ ID NO: 269709 - DNA, 25 bp, Artificial
  probe
  misc_feature (1)..(25): SEQ ID NO: 666; WAN024ATU; Start 49; Stop 73
gacttacaaaagattaaaggtgggg

SEQ ID NO: 269710 - DNA, 25 bp, Artificial
  probe
  misc_feature (1)..(25): SEQ ID NO: 666; WAN024ATU; Start 54; Stop 78
acaaaagattaaaggtggggagatg

SEQ ID NO: 269711 - DNA, 25 bp, Artificial
  probe
  misc_feature (1)..(25): SEQ ID NO: 666; WAN024ATU; Start 51; Stop 75
cttacaaaagattaaaggtggggag

SEQ ID NO: 269712 - DNA, 25 bp, Artificial
  probe
  misc_feature (1)..(25): SEQ ID NO: 666; WAN024ATU; Start 48; Stop 72
agacttacaaaagattaaaggtggg

SEQ ID NO: 269713 - DNA, 25 bp, Artificial
  probe
  misc_feature (1)..(25): SEQ ID NO: 666; WAN024ATU; Start 57; Stop 81
aaagattaaaggtggggagatgagg

SEQ ID NO: 269714 - DNA, 25 bp, Artificial
  probe
  misc_feature (1)..(25): SEQ ID NO: 666; WAN024ATU; Start 47; Stop 71
aagacttacaaaagattaaaggtgg

SEQ ID NO: 269715 - DNA, 25 bp, Artificial
  probe
  misc_feature (1)..(25): SEQ ID NO: 666; WAN024ATU; Start 93; Stop 117
cttccgtgattttattttacaaaga

SEQ ID NO: 269716 - DNA, 25 bp, Artificial
  probe
  misc_feature (1)..(25): SEQ ID NO: 666; WAN024ATU; Start 92; Stop 116
tcttccgtgattttattttacaaag

SEQ ID NO: 269717 - DNA, 25 bp, Artificial
  probe
  misc_feature (1)..(25): SEQ ID NO: 666; WAN024ATU; Start 95; Stop 119
tccgtgattttattttacaaagaaa

SEQ ID NO: 269718 - DNA, 25 bp, Artificial
  probe
  misc_feature (1)..(25): SEQ ID NO: 666; WAN024ATU; Start 91; Stop 115
ttcttccgtgattttattttacaaa

SEQ ID NO: 269719 - DNA, 25 bp, Artificial
  probe
  misc_feature (1)..(25): SEQ ID NO: 666; WAN024ATU; Start 94; Stop 118
ttccgtgattttattttacaaagaa

SEQ ID NO: 269720 - DNA, 25 bp, Artificial
  probe
  misc_feature (1)..(25): SEQ ID NO: 666; WAN024ATU; Start 46; Stop 70
aaagacttacaaaagattaaaggtg

SEQ ID NO: 269721 - DNA, 25 bp, Artificial
  probe
  misc_feature (1)..(25): SEQ ID NO: 666; WAN024ATU; Start 90; Stop 114
attcttccgtgattttattttacaa

SEQ ID NO: 269722 - DNA, 25 bp, Artificial
  probe
  misc_feature (1)..(25): SEQ ID NO: 666; WAN024ATU; Start 89; Stop 113
aattcttccgtgattttattttaca

SEQ ID NO: 269723 - DNA, 25 bp, Artificial
  probe
  misc_feature (1)..(25): SEQ ID NO: 666; WAN024ATU; Start 83; Stop 107
tgtcaaaattcttccgtgattttat

SEQ ID NO: 269724 - DNA, 25 bp, Artificial
  probe
  misc_feature (1)..(25): SEQ ID NO: 666; WAN024ATU; Start 45; Stop 69
aaaagacttacaaaagattaaaggt

SEQ ID NO: 269725 - DNA, 25 bp, Artificial
  probe
  misc_feature (1)..(25): SEQ ID NO: 666; WAN024ATU; Start 84; Stop 108
gtcaaaattcttccgtgattttatt

SEQ ID NO: 269726 - DNA, 25 bp, Artificial
  probe
  misc_feature (1)..(25): SEQ ID NO: 666; WAN024ATU; Start 96; Stop 120
ccgtgattttattttacaaagaaaa

SEQ ID NO: 269727 - DNA, 25 bp, Artificial
  probe
  misc_feature (1)..(25): SEQ ID NO: 666; WAN024ATU; Start 88; Stop 112
aaattcttccgtgattttattttac

SEQ ID NO: 269728 - DNA, 25 bp, Artificial
  probe
  misc_feature (1)..(25): SEQ ID NO: 666; WAN024ATU; Start 85; Stop 109
tcaaaattcttccgtgattttattt

SEQ ID NO: 269729 - DNA, 25 bp, Artificial
  probe
  misc_feature (1)..(25): SEQ ID NO: 666; WAN024ATU; Start 86; Stop 110
caaaattcttccgtgattttatttt

SEQ ID NO: 269730 - DNA, 25 bp, Artificial
  probe
  misc_feature (1)..(25): SEQ ID NO: 667; WAN024ATT; Start 71; Stop 95
gggagatgaggatttcaagaatcat

SEQ ID NO: 269731 - DNA, 25 bp, Artificial
  probe
  misc_feature (1)..(25): SEQ ID NO: 667; WAN024ATT; Start 93; Stop 117
catccttgattttcttttcctacga

SEQ ID NO: 269732 - DNA, 25 bp, Artificial
  probe
  misc_feature (1)..(25): SEQ ID NO: 667; WAN024ATT; Start 61; Stop 85
attaaaggtggggagatgaggattt

SEQ ID NO: 269733 - DNA, 25 bp, Artificial
  probe
  misc_feature (1)..(25): SEQ ID NO: 667; WAN024ATT; Start 94; Stop 118
atccttgattttcttttcctacgaa

SEQ ID NO: 269734 - DNA, 25 bp, Artificial
  probe
  misc_feature (1)..(25): SEQ ID NO: 667; WAN024ATT; Start 92; Stop 116
tcatccttgattttcttttcctacg

SEQ ID NO: 269735 - DNA, 25 bp, Artificial
  probe
  misc_feature (1)..(25): SEQ ID NO: 667; WAN024ATT; Start 62; Stop 86
ttaaaggtggggagatgaggatttc

SEQ ID NO: 269736 - DNA, 25 bp, Artificial
  probe
  misc_feature (1)..(25): SEQ ID NO: 667; WAN024ATT; Start 68; Stop 92
gtggggagatgaggatttcaagaat

SEQ ID NO: 269737 - DNA, 25 bp, Artificial
  probe
  misc_feature (1)..(25): SEQ ID NO: 667; WAN024ATT; Start 63; Stop 87
taaaggtggggagatgaggatttca

SEQ ID NO: 269738 - DNA, 25 bp, Artificial
  probe
  misc_feature (1)..(25): SEQ ID NO: 667; WAN024ATT; Start 70; Stop 94
ggggagatgaggatttcaagaatca

SEQ ID NO: 269739 - DNA, 25 bp, Artificial
  probe
  misc_feature (1)..(25): SEQ ID NO: 667; WAN024ATT; Start 69; Stop 93
tggggagatgaggatttcaagaatc

SEQ ID NO: 269740 - DNA, 25 bp, Artificial
  probe
  misc_feature (1)..(25): SEQ ID NO: 667; WAN024ATT; Start 64; Stop 88
aaaggtggggagatgaggatttcaa

SEQ ID NO: 269741 - DNA, 25 bp, Artificial
  probe
  misc_feature (1)..(25): SEQ ID NO: 667; WAN024ATT; Start 67; Stop 91
ggtggggagatgaggatttcaagaa

SEQ ID NO: 269742 - DNA, 25 bp, Artificial
  probe
  misc_feature (1)..(25): SEQ ID NO: 667; WAN024ATT; Start 65; Stop 89
aaggtggggagatgaggatttcaag

SEQ ID NO: 269743 - DNA, 25 bp, Artificial
  probe
  misc_feature (1)..(25): SEQ ID NO: 667; WAN024ATT; Start 91; Stop 115
atcatccttgattttcttttcctac

SEQ ID NO: 269744 - DNA, 25 bp, Artificial
  probe
  misc_feature (1)..(25): SEQ ID NO: 667; WAN024ATT; Start 66; Stop 90
aggtggggagatgaggatttcaaga

SEQ ID NO: 269745 - DNA, 25 bp, Artificial
  probe
  misc_feature (1)..(25): SEQ ID NO: 667; WAN024ATT; Start 89; Stop 113
gaatcatccttgattttcttttcct

SEQ ID NO: 269746 - DNA, 25 bp, Artificial
  probe
  misc_feature (1)..(25): SEQ ID NO: 667; WAN024ATT; Start 88; Stop 112
agaatcatccttgattttcttttcc

SEQ ID NO: 269747 - DNA, 25 bp, Artificial
  probe
  misc_feature (1)..(25): SEQ ID NO: 667; WAN024ATT; Start 90; Stop 114
aatcatccttgattttcttttccta

SEQ ID NO: 269748 - DNA, 25 bp, Artificial
  probe
  misc_feature (1)..(25): SEQ ID NO: 667; WAN024ATT; Start 86; Stop 110
caagaatcatccttgattttctttt

SEQ ID NO: 269749 - DNA, 25 bp, Artificial
  probe
  misc_feature (1)..(25): SEQ ID NO: 667; WAN024ATT; Start 87; Stop 111
aagaatcatccttgattttcttttc

SEQ ID NO: 269750 - DNA, 25 bp, Artificial
  probe
  misc_feature (1)..(25): SEQ ID NO: 668; WAN024FU7; Start 71; Stop 95
gggagatgaggaaaatgaatgaaaa

SEQ ID NO: 269751 - DNA, 25 bp, Artificial
  probe
  misc_feature (1)..(25): SEQ ID NO: 668; WAN024FU7; Start 70; Stop 94
ggggagatgaggaaaatgaatgaaa

SEQ ID NO: 269752 - DNA, 25 bp, Artificial
  probe
  misc_feature (1)..(25): SEQ ID NO: 668; WAN024FU7; Start 72; Stop 96
ggagatgaggaaaatgaatgaaaag

SEQ ID NO: 269753 - DNA, 25 bp, Artificial
  probe
  misc_feature (1)..(25): SEQ ID NO: 668; WAN024FU7; Start 69; Stop 93
tggggagatgaggaaaatgaatgaa

SEQ ID NO: 269754 - DNA, 25 bp, Artificial
  probe
  misc_feature (1)..(25): SEQ ID NO: 668; WAN024FU7; Start 74; Stop 98
agatgaggaaaatgaatgaaaagtc

SEQ ID NO: 269755 - DNA, 25 bp, Artificial
  probe
  misc_feature (1)..(25): SEQ ID NO: 668; WAN024FU7; Start 73; Stop 97
gagatgaggaaaatgaatgaaaagt

SEQ ID NO: 269756 - DNA, 25 bp, Artificial
  probe
  misc_feature (1)..(25): SEQ ID NO: 668; WAN024FU7; Start 68; Stop 92
gtggggagatgaggaaaatgaatga

SEQ ID NO: 269757 - DNA, 25 bp, Artificial
  probe
  misc_feature (1)..(25): SEQ ID NO: 668; WAN024FU7; Start 56; Stop 80
aaaatattcaaggtggggagatgag

SEQ ID NO: 269758 - DNA, 25 bp, Artificial
  probe
  misc_feature (1)..(25): SEQ ID NO: 668; WAN024FU7; Start 55; Stop 79
caaaatattcaaggtggggagatga

SEQ ID NO: 269759 - DNA, 25 bp, Artificial
  probe
  misc_feature (1)..(25): SEQ ID NO: 668; WAN024FU7; Start 75; Stop 99
gatgaggaaaatgaatgaaaagtcc

SEQ ID NO: 269760 - DNA, 25 bp, Artificial
  probe
  misc_feature (1)..(25): SEQ ID NO: 668; WAN024FU7; Start 54; Stop 78
gcaaaatattcaaggtggggagatg

SEQ ID NO: 269761 - DNA, 25 bp, Artificial
  probe
  misc_feature (1)..(25): SEQ ID NO: 668; WAN024FU7; Start 59; Stop 83
atattcaaggtggggagatgaggaa

SEQ ID NO: 269762 - DNA, 25 bp, Artificial
  probe
  misc_feature (1)..(25): SEQ ID NO: 668; WAN024FU7; Start 57; Stop 81
aaatattcaaggtggggagatgagg

SEQ ID NO: 269763 - DNA, 25 bp, Artificial
  probe
  misc_feature (1)..(25): SEQ ID NO: 668; WAN024FU7; Start 60; Stop 84
tattcaaggtggggagatgaggaaa

SEQ ID NO: 269764 - DNA, 25 bp, Artificial
  probe
  misc_feature (1)..(25): SEQ ID NO: 668; WAN024FU7; Start 67; Stop 91
ggtggggagatgaggaaaatgaatg

SEQ ID NO: 269765 - DNA, 25 bp, Artificial
  probe
  misc_feature (1)..(25): SEQ ID NO: 668; WAN024FU7; Start 66; Stop 90
aggtggggagatgaggaaaatgaat

SEQ ID NO: 269766 - DNA, 25 bp, Artificial
  probe
  misc_feature (1)..(25): SEQ ID NO: 668; WAN024FU7; Start 65; Stop 89
aaggtggggagatgaggaaaatgaa

SEQ ID NO: 269767 - DNA, 25 bp, Artificial
  probe
  misc_feature (1)..(25): SEQ ID NO: 668; WAN024FU7; Start 53; Stop 77
tgcaaaatattcaaggtggggagat

SEQ ID NO: 269768 - DNA, 25 bp, Artificial
  probe
  misc_feature (1)..(25): SEQ ID NO: 668; WAN024FU7; Start 58; Stop 82
aatattcaaggtggggagatgagga

SEQ ID NO: 269769 - DNA, 25 bp, Artificial
  probe
  misc_feature (1)..(25): SEQ ID NO: 668; WAN024FU7; Start 62; Stop 86
ttcaaggtggggagatgaggaaaat

SEQ ID NO: 269770 - DNA, 25 bp, Artificial
  probe
  misc_feature (1)..(25): SEQ ID NO: 668; WAN024FU7; Start 61; Stop 85
attcaaggtggggagatgaggaaaa

SEQ ID NO: 269771 - DNA, 25 bp, Artificial
  probe
  misc_feature (1)..(25): SEQ ID NO: 668; WAN024FU7; Start 64; Stop 88
caaggtggggagatgaggaaaatga

SEQ ID NO: 269772 - DNA, 25 bp, Artificial
  probe
  misc_feature (1)..(25): SEQ ID NO: 668; WAN024FU7; Start 80; Stop 104
ggaaaatgaatgaaaagtcctttaa

SEQ ID NO: 269773 - DNA, 25 bp, Artificial
  probe
  misc_feature (1)..(25): SEQ ID NO: 668; WAN024FU7; Start 63; Stop 87
tcaaggtggggagatgaggaaaatg

SEQ ID NO: 269774 - DNA, 25 bp, Artificial
  probe
  misc_feature (1)..(25): SEQ ID NO: 668; WAN024FU7; Start 77; Stop 101
tgaggaaaatgaatgaaaagtcctt

SEQ ID NO: 269775 - DNA, 25 bp, Artificial
  probe
  misc_feature (1)..(25): SEQ ID NO: 668; WAN024FU7; Start 76; Stop 100
atgaggaaaatgaatgaaaagtcct

SEQ ID NO: 269776 - DNA, 25 bp, Artificial
  probe
  misc_feature (1)..(25): SEQ ID NO: 668; WAN024FU7; Start 78; Stop 102
gaggaaaatgaatgaaaagtccttt

SEQ ID NO: 269777 - DNA, 25 bp, Artificial
  probe
  misc_feature (1)..(25): SEQ ID NO: 668; WAN024FU7; Start 52; Stop 76
ttgcaaaatattcaaggtggggaga

SEQ ID NO: 269778 - DNA, 25 bp, Artificial
  probe
  misc_feature (1)..(25): SEQ ID NO: 668; WAN024FU7; Start 79; Stop 103
aggaaaatgaatgaaaagtccttta

SEQ ID NO: 269779 - DNA, 25 bp, Artificial
  probe
  misc_feature (1)..(25): SEQ ID NO: 668; WAN024FU7; Start 47; Stop 71
aagacttgcaaaatattcaaggtgg

SEQ ID NO: 269780 - DNA, 25 bp, Artificial
  probe
  misc_feature (1)..(25): SEQ ID NO: 668; WAN024FU7; Start 46; Stop 70
aaagacttgcaaaatattcaaggtg

SEQ ID NO: 269781 - DNA, 25 bp, Artificial
  probe
  misc_feature (1)..(25): SEQ ID NO: 668; WAN024FU7; Start 48; Stop 72
agacttgcaaaatattcaaggtggg

SEQ ID NO: 269782 - DNA, 25 bp, Artificial
  probe
  misc_feature (1)..(25): SEQ ID NO: 668; WAN024FU7; Start 45; Stop 69
aaaagacttgcaaaatattcaaggt

SEQ ID NO: 269783 - DNA, 25 bp, Artificial
  probe
  misc_feature (1)..(25): SEQ ID NO: 669; WAN024ERK; Start 767; Stop 791
gtgccatcctagaaccattactatt

SEQ ID NO: 269784 - DNA, 25 bp, Artificial
  probe
  misc_feature (1)..(25): SEQ ID NO: 669; WAN024ERK; Start 238; Stop 262
atgattattgctgtaatggttggtt

SEQ ID NO: 269785 - DNA, 25 bp, Artificial
  probe
  misc_feature (1)..(25): SEQ ID NO: 669; WAN024ERK; Start 975; Stop 999
tggacctggtatcttcaatatcaat

SEQ ID NO: 269786 - DNA, 25 bp, Artificial
  probe
  misc_feature (1)..(25): SEQ ID NO: 669; WAN024ERK; Start 1195; Stop 1219
gcagttctagttcaattcatcatct

SEQ ID NO: 269787 - DNA, 25 bp, Artificial
  probe
  misc_feature (1)..(25): SEQ ID NO: 669; WAN024ERK; Start 1194; Stop 1218
agcagttctagttcaattcatcatc

SEQ ID NO: 269788 - DNA, 25 bp, Artificial
  probe
  misc_feature (1)..(25): SEQ ID NO: 669; WAN024ERK; Start 1193; Stop 1217
gagcagttctagttcaattcatcat

SEQ ID NO: 269789 - DNA, 25 bp, Artificial
  probe
  misc_feature (1)..(25): SEQ ID NO: 669; WAN024ERK; Start 976; Stop 1000
ggacctggtatcttcaatatcaatg

SEQ ID NO: 269790 - DNA, 25 bp, Artificial
  probe
  misc_feature (1)..(25): SEQ ID NO: 669; WAN024ERK; Start 1222; Stop 1246
gcacttggagttcttctatacattc

SEQ ID NO: 269791 - DNA, 25 bp, Artificial
  probe
  misc_feature (1)..(25): SEQ ID NO: 669; WAN024ERK; Start 1192; Stop 1216
agagcagttctagttcaattcatca

SEQ ID NO: 269792 - DNA, 25 bp, Artificial
  probe
  misc_feature (1)..(25): SEQ ID NO: 669; WAN024ERK; Start 1191; Stop 1215
gagagcagttctagttcaattcatc

SEQ ID NO: 269793 - DNA, 25 bp, Artificial
  probe
  misc_feature (1)..(25): SEQ ID NO: 669; WAN024ERK; Start 239; Stop 263
tgattattgctgtaatggttggtta

SEQ ID NO: 269794 - DNA, 25 bp, Artificial
  probe
  misc_feature (1)..(25): SEQ ID NO: 669; WAN024ERK; Start 768; Stop 792
tgccatcctagaaccattactatta

SEQ ID NO: 269795 - DNA, 25 bp, Artificial
  probe
  misc_feature (1)..(25): SEQ ID NO: 669; WAN024ERK; Start 762; Stop 786
ttacagtgccatcctagaaccatta

SEQ ID NO: 269796 - DNA, 25 bp, Artificial
  probe
  misc_feature (1)..(25): SEQ ID NO: 669; WAN024ERK; Start 974; Stop 998
ttggacctggtatcttcaatatcaa

SEQ ID NO: 269797 - DNA, 25 bp, Artificial
  probe
  misc_feature (1)..(25): SEQ ID NO: 669; WAN024ERK; Start 1190; Stop 1214
tgagagcagttctagttcaattcat

SEQ ID NO: 269798 - DNA, 25 bp, Artificial
  probe
  misc_feature (1)..(25): SEQ ID NO: 669; WAN024ERK; Start 237; Stop 261
tatgattattgctgtaatggttggt

SEQ ID NO: 269799 - DNA, 25 bp, Artificial
  probe
  misc_feature (1)..(25): SEQ ID NO: 669; WAN024ERK; Start 1189; Stop 1213
gtgagagcagttctagttcaattca

SEQ ID NO: 269800 - DNA, 25 bp, Artificial
  probe
  misc_feature (1)..(25): SEQ ID NO: 669; WAN024ERK; Start 766; Stop 790
agtgccatcctagaaccattactat

SEQ ID NO: 269801 - DNA, 25 bp, Artificial
  probe
  misc_feature (1)..(25): SEQ ID NO: 669; WAN024ERK; Start 236; Stop 260
gtatgattattgctgtaatggttgg

SEQ ID NO: 269802 - DNA, 25 bp, Artificial
  probe
  misc_feature (1)..(25): SEQ ID NO: 669; WAN024ERK; Start 235; Stop 259
ggtatgattattgctgtaatggttg

SEQ ID NO: 269803 - DNA, 25 bp, Artificial
  probe
  misc_feature (1)..(25): SEQ ID NO: 669; WAN024ERK; Start 234; Stop 258
aggtatgattattgctgtaatggtt

SEQ ID NO: 269804 - DNA, 25 bp, Artificial
  probe
  misc_feature (1)..(25): SEQ ID NO: 669; WAN024ERK; Start 763; Stop 787
tacagtgccatcctagaaccattac

SEQ ID NO: 269805 - DNA, 25 bp, Artificial
  probe
  misc_feature (1)..(25): SEQ ID NO: 669; WAN024ERK; Start 233; Stop 257
caggtatgattattgctgtaatggt

SEQ ID NO: 269806 - DNA, 25 bp, Artificial
  probe
  misc_feature (1)..(25): SEQ ID NO: 669; WAN024ERK; Start 622; Stop 646
actggaatgaacttaatctcaatca

SEQ ID NO: 269807 - DNA, 25 bp, Artificial
  probe
  misc_feature (1)..(25): SEQ ID NO: 669; WAN024ERK; Start 765; Stop 789
cagtgccatcctagaaccattacta

SEQ ID NO: 269808 - DNA, 25 bp, Artificial
  probe
  misc_feature (1)..(25): SEQ ID NO: 669; WAN024ERK; Start 232; Stop 256
tcaggtatgattattgctgtaatgg

SEQ ID NO: 269809 - DNA, 25 bp, Artificial
  probe
  misc_feature (1)..(25): SEQ ID NO: 669; WAN024ERK; Start 769; Stop 793
gccatcctagaaccattactattaa

SEQ ID NO: 269810 - DNA, 25 bp, Artificial
  probe
  misc_feature (1)..(25): SEQ ID NO: 669; WAN024ERK; Start 1188; Stop 1212
cgtgagagcagttctagttcaattc

SEQ ID NO: 269811 - DNA, 25 bp, Artificial
  probe
  misc_feature (1)..(25): SEQ ID NO: 669; WAN024ERK; Start 977; Stop 1001
gacctggtatcttcaatatcaatga

SEQ ID NO: 269812 - DNA, 25 bp, Artificial
  probe
  misc_feature (1)..(25): SEQ ID NO: 669; WAN024ERK; Start 240; Stop 264
gattattgctgtaatggttggttat

SEQ ID NO: 269813 - DNA, 25 bp, Artificial
  probe
  misc_feature (1)..(25): SEQ ID NO: 669; WAN024ERK; Start 1138; Stop 1162
ccttggactacaccagtattcttaa

SEQ ID NO: 269814 - DNA, 25 bp, Artificial
  probe
  misc_feature (1)..(25): SEQ ID NO: 669; WAN024ERK; Start 1137; Stop 1161
tccttggactacaccagtattctta

SEQ ID NO: 269815 - DNA, 25 bp, Artificial
  probe
  misc_feature (1)..(25): SEQ ID NO: 669; WAN024ERK; Start 1223; Stop 1247
cacttggagttcttctatacattcc

SEQ ID NO: 269816 - DNA, 25 bp, Artificial
  probe
  misc_feature (1)..(25): SEQ ID NO: 670; WAN024BFW; Start 825; Stop 849
agatacttggttcgttcgtgaagaa

SEQ ID NO: 269817 - DNA, 25 bp, Artificial
  probe
  misc_feature (1)..(25): SEQ ID NO: 670; WAN024BFW; Start 824; Stop 848
aagatacttggttcgttcgtgaaga

SEQ ID NO: 269818 - DNA, 25 bp, Artificial
  probe
  misc_feature (1)..(25): SEQ ID NO: 670; WAN024BFW; Start 758; Stop 782
aattctatgaagctggctacattcc

SEQ ID NO: 269819 - DNA, 25 bp, Artificial
  probe
  misc_feature (1)..(25): SEQ ID NO: 670; WAN024BFW; Start 1008; Stop 1032
ggaaatcttgaacctcttgaatacg

SEQ ID NO: 269820 - DNA, 25 bp, Artificial
  probe
  misc_feature (1)..(25): SEQ ID NO: 670; WAN024BFW; Start 499; Stop 523
actctccttgctaaatatggtatcg

SEQ ID NO: 269821 - DNA, 25 bp, Artificial
  probe
  misc_feature (1)..(25): SEQ ID NO: 670; WAN024BFW; Start 1009; Stop 1033
gaaatcttgaacctcttgaatacga

SEQ ID NO: 269822 - DNA, 25 bp, Artificial
  probe
  misc_feature (1)..(25): SEQ ID NO: 670; WAN024BFW; Start 1007; Stop 1031
tggaaatcttgaacctcttgaatac

SEQ ID NO: 269823 - DNA, 25 bp, Artificial
  probe
  misc_feature (1)..(25): SEQ ID NO: 670; WAN024BFW; Start 1005; Stop 1029
aatggaaatcttgaacctcttgaat

SEQ ID NO: 269824 - DNA, 25 bp, Artificial
  probe
  misc_feature (1)..(25): SEQ ID NO: 670; WAN024BFW; Start 532; Stop 556
ggtgttacttcttacgaaactcttg

SEQ ID NO: 269825 - DNA, 25 bp, Artificial
  probe
  misc_feature (1)..(25): SEQ ID NO: 670; WAN024BFW; Start 531; Stop 555
aggtgttacttcttacgaaactctt

SEQ ID NO: 269826 - DNA, 25 bp, Artificial
  probe
  misc_feature (1)..(25): SEQ ID NO: 670; WAN024BFW; Start 528; Stop 552
ttcaggtgttacttcttacgaaact

SEQ ID NO: 269827 - DNA, 25 bp, Artificial
  probe
  misc_feature (1)..(25): SEQ ID NO: 670; WAN024BFW; Start 530; Stop 554
caggtgttacttcttacgaaactct

SEQ ID NO: 269828 - DNA, 25 bp, Artificial
  probe
  misc_feature (1)..(25): SEQ ID NO: 670; WAN024BFW; Start 529; Stop 553
tcaggtgttacttcttacgaaactc

SEQ ID NO: 269829 - DNA, 25 bp, Artificial
  probe
  misc_feature (1)..(25): SEQ ID NO: 670; WAN024BFW; Start 535; Stop 559
gttacttcttacgaaactcttgagc

SEQ ID NO: 269830 - DNA, 25 bp, Artificial
  probe
  misc_feature (1)..(25): SEQ ID NO: 670; WAN024BFW; Start 1365; Stop 1389
agataaagcgattccagaattgatg

SEQ ID NO: 269831 - DNA, 25 bp, Artificial
  probe
  misc_feature (1)..(25): SEQ ID NO: 670; WAN024BFW; Start 1364; Stop 1388
cagataaagcgattccagaattgat

SEQ ID NO: 269832 - DNA, 25 bp, Artificial
  probe
  misc_feature (1)..(25): SEQ ID NO: 670; WAN024BFW; Start 1010; Stop 1034
aaatcttgaacctcttgaatacgaa

SEQ ID NO: 269833 - DNA, 25 bp, Artificial
  probe
  misc_feature (1)..(25): SEQ ID NO: 670; WAN024BFW; Start 1004; Stop 1028
caatggaaatcttgaacctcttgaa

SEQ ID NO: 269834 - DNA, 25 bp, Artificial
  probe
  misc_feature (1)..(25): SEQ ID NO: 670; WAN024BFW; Start 1333; Stop 1357
gatacagctatcaacactggtactg

SEQ ID NO: 269835 - DNA, 25 bp, Artificial
  probe
  misc_feature (1)..(25): SEQ ID NO: 670; WAN024BFW; Start 1279; Stop 1303
actgacaatgtgaaatctgaaatct

SEQ ID NO: 269836 - DNA, 25 bp, Artificial
  probe
  misc_feature (1)..(25): SEQ ID NO: 670; WAN024BFW; Start 536; Stop 560
ttacttcttacgaaactcttgagcc

SEQ ID NO: 269837 - DNA, 25 bp, Artificial
  probe
  misc_feature (1)..(25): SEQ ID NO: 670; WAN024BFW; Start 533; Stop 557
gtgttacttcttacgaaactcttga

SEQ ID NO: 269838 - DNA, 25 bp, Artificial
  probe
  misc_feature (1)..(25): SEQ ID NO: 670; WAN024BFW; Start 970; Stop 994
gtcatctcaaacaactctaagaaca

SEQ ID NO: 269839 - DNA, 25 bp, Artificial
  probe
  misc_feature (1)..(25): SEQ ID NO: 670; WAN024BFW; Start 689; Stop 713
gcgatactactaaagttgtaaaccg

SEQ ID NO: 269840 - DNA, 25 bp, Artificial
  probe
  misc_feature (1)..(25): SEQ ID NO: 670; WAN024BFW; Start 683; Stop 707
ttgaaggcgatactactaaagttgt

SEQ ID NO: 269841 - DNA, 25 bp, Artificial
  probe
  misc_feature (1)..(25): SEQ ID NO: 670; WAN024BFW; Start 688; Stop 712
ggcgatactactaaagttgtaaacc

SEQ ID NO: 269842 - DNA, 25 bp, Artificial
  probe
  misc_feature (1)..(25): SEQ ID NO: 670; WAN024BFW; Start 682; Stop 706
cttgaaggcgatactactaaagttg

SEQ ID NO: 269843 - DNA, 25 bp, Artificial
  probe
  misc_feature (1)..(25): SEQ ID NO: 670; WAN024BFW; Start 1038; Stop 1062
agaactcttgaacggtcttgtttac

SEQ ID NO: 269844 - DNA, 25 bp, Artificial
  probe
  misc_feature (1)..(25): SEQ ID NO: 670; WAN024BFW; Start 1037; Stop 1061
cagaactcttgaacggtcttgttta

SEQ ID NO: 269845 - DNA, 25 bp, Artificial
  probe
  misc_feature (1)..(25): SEQ ID NO: 670; WAN024BFW; Start 684; Stop 708
tgaaggcgatactactaaagttgta

SEQ ID NO: 269846 - DNA, 25 bp, Artificial
  probe
  misc_feature (1)..(25): SEQ ID NO: 670; WAN024BFW; Start 1363; Stop 1387
ccagataaagcgattccagaattga

SEQ ID NO: 269847 - DNA, 25 bp, Artificial
  probe
  misc_feature (1)..(25): SEQ ID NO: 670; WAN024BFW; Start 1259; Stop 1283
cgcttggatttatcttcaatactga

SEQ ID NO: 269848 - DNA, 25 bp, Artificial
  probe
  misc_feature (1)..(25): SEQ ID NO: 670; WAN024BFW; Start 411; Stop 435
catcaagggtaatactgtaaatggt

SEQ ID NO: 269849 - DNA, 25 bp, Artificial
  probe
  misc_feature (1)..(25): SEQ ID NO: 671; WAN024D4H; Start 189; Stop 213
gactgtaattgaattgttgtgccat

SEQ ID NO: 269850 - DNA, 25 bp, Artificial
  probe
  misc_feature (1)..(25): SEQ ID NO: 671; WAN024D4H; Start 187; Stop 211
atgactgtaattgaattgttgtgcc

SEQ ID NO: 269851 - DNA, 25 bp, Artificial
  probe
  misc_feature (1)..(25): SEQ ID NO: 671; WAN024D4H; Start 188; Stop 212
tgactgtaattgaattgttgtgcca

SEQ ID NO: 269852 - DNA, 25 bp, Artificial
  probe
  misc_feature (1)..(25): SEQ ID NO: 671; WAN024D4H; Start 192; Stop 216
tgtaattgaattgttgtgccatgaa

SEQ ID NO: 269853 - DNA, 25 bp, Artificial
  probe
  misc_feature (1)..(25): SEQ ID NO: 671; WAN024D4H; Start 186; Stop 210
catgactgtaattgaattgttgtgc

SEQ ID NO: 269854 - DNA, 25 bp, Artificial
  probe
  misc_feature (1)..(25): SEQ ID NO: 671; WAN024D4H; Start 191; Stop 215
ctgtaattgaattgttgtgccatga

SEQ ID NO: 269855 - DNA, 25 bp, Artificial
  probe
  misc_feature (1)..(25): SEQ ID NO: 671; WAN024D4H; Start 190; Stop 214
actgtaattgaattgttgtgccatg

SEQ ID NO: 269856 - DNA, 25 bp, Artificial
  probe
  misc_feature (1)..(25): SEQ ID NO: 671; WAN024D4H; Start 506; Stop 530
taaccgaagaggaggaagaagagtt

SEQ ID NO: 269857 - DNA, 25 bp, Artificial
  probe
  misc_feature (1)..(25): SEQ ID NO: 671; WAN024D4H; Start 185; Stop 209
acatgactgtaattgaattgttgtg

SEQ ID NO: 269858 - DNA, 25 bp, Artificial
  probe
  misc_feature (1)..(25): SEQ ID NO: 671; WAN024D4H; Start 184; Stop 208
cacatgactgtaattgaattgttgt

SEQ ID NO: 269859 - DNA, 25 bp, Artificial
  probe
  misc_feature (1)..(25): SEQ ID NO: 671; WAN024D4H; Start 504; Stop 528
tctaaccgaagaggaggaagaagag

SEQ ID NO: 269860 - DNA, 25 bp, Artificial
  probe
  misc_feature (1)..(25): SEQ ID NO: 671; WAN024D4H; Start 525; Stop 549
agagtttactaaagtcagagcagaa

SEQ ID NO: 269861 - DNA, 25 bp, Artificial
  probe
  misc_feature (1)..(25): SEQ ID NO: 671; WAN024D4H; Start 524; Stop 548
aagagtttactaaagtcagagcaga

SEQ ID NO: 269862 - DNA, 25 bp, Artificial
  probe
  misc_feature (1)..(25): SEQ ID NO: 671; WAN024D4H; Start 522; Stop 546
agaagagtttactaaagtcagagca

SEQ ID NO: 269863 - DNA, 25 bp, Artificial
  probe
  misc_feature (1)..(25): SEQ ID NO: 671; WAN024D4H; Start 523; Stop 547
gaagagtttactaaagtcagagcag

SEQ ID NO: 269864 - DNA, 25 bp, Artificial
  probe
  misc_feature (1)..(25): SEQ ID NO: 671; WAN024D4H; Start 505; Stop 529
ctaaccgaagaggaggaagaagagt

SEQ ID NO: 269865 - DNA, 25 bp, Artificial
  probe
  misc_feature (1)..(25): SEQ ID NO: 671; WAN024D4H; Start 183; Stop 207
tcacatgactgtaattgaattgttg

SEQ ID NO: 269866 - DNA, 25 bp, Artificial
  probe
  misc_feature (1)..(25): SEQ ID NO: 671; WAN024D4H; Start 511; Stop 535
gaagaggaggaagaagagtttacta

SEQ ID NO: 269867 - DNA, 25 bp, Artificial
  probe
  misc_feature (1)..(25): SEQ ID NO: 671; WAN024D4H; Start 515; Stop 539
aggaggaagaagagtttactaaagt

SEQ ID NO: 269868 - DNA, 25 bp, Artificial
  probe
  misc_feature (1)..(25): SEQ ID NO: 671; WAN024D4H; Start 484; Stop 508
attgggtatcttcggattcctctaa

SEQ ID NO: 269869 - DNA, 25 bp, Artificial
  probe
  misc_feature (1)..(25): SEQ ID NO: 671; WAN024D4H; Start 483; Stop 507
aattgggtatcttcggattcctcta

SEQ ID NO: 269870 - DNA, 25 bp, Artificial
  probe
  misc_feature (1)..(25): SEQ ID NO: 671; WAN024D4H; Start 332; Stop 356
atatgcgtataactgaaatgggaaa

SEQ ID NO: 269871 - DNA, 25 bp, Artificial
  probe
  misc_feature (1)..(25): SEQ ID NO: 671; WAN024D4H; Start 573; Stop 597
gattccaactattactgtaaaccgt

SEQ ID NO: 269872 - DNA, 25 bp, Artificial
  probe
  misc_feature (1)..(25): SEQ ID NO: 671; WAN024D4H; Start 526; Stop 550
gagtttactaaagtcagagcagaat

SEQ ID NO: 269873 - DNA, 25 bp, Artificial
  probe
  misc_feature (1)..(25): SEQ ID NO: 671; WAN024D4H; Start 516; Stop 540
ggaggaagaagagtttactaaagtc

SEQ ID NO: 269874 - DNA, 25 bp, Artificial
  probe
  misc_feature (1)..(25): SEQ ID NO: 671; WAN024D4H; Start 521; Stop 545
aagaagagtttactaaagtcagagc

SEQ ID NO: 269875 - DNA, 25 bp, Artificial
  probe
  misc_feature (1)..(25): SEQ ID NO: 671; WAN024D4H; Start 513; Stop 537
agaggaggaagaagagtttactaaa

SEQ ID NO: 269876 - DNA, 25 bp, Artificial
  probe
  misc_feature (1)..(25): SEQ ID NO: 671; WAN024D4H; Start 512; Stop 536
aagaggaggaagaagagtttactaa

SEQ ID NO: 269877 - DNA, 25 bp, Artificial
  probe
  misc_feature (1)..(25): SEQ ID NO: 671; WAN024D4H; Start 510; Stop 534
cgaagaggaggaagaagagtttact

SEQ ID NO: 269878 - DNA, 25 bp, Artificial
  probe
  misc_feature (1)..(25): SEQ ID NO: 671; WAN024D4H; Start 572; Stop 596
agattccaactattactgtaaaccg

SEQ ID NO: 269879 - DNA, 25 bp, Artificial
  probe
  misc_feature (1)..(25): SEQ ID NO: 671; WAN024D4H; Start 567; Stop 591
agagaagattccaactattactgta

SEQ ID NO: 269880 - DNA, 25 bp, Artificial
  probe
  misc_feature (1)..(25): SEQ ID NO: 671; WAN024D4H; Start 566; Stop 590
tagagaagattccaactattactgt

SEQ ID NO: 269881 - DNA, 25 bp, Artificial
  probe
  misc_feature (1)..(25): SEQ ID NO: 671; WAN024D4H; Start 57; Stop 81
tgggaatacagttgtagcaaatctt

SEQ ID NO: 269882 - DNA, 25 bp, Artificial
  probe
  misc_feature (1)..(25): SEQ ID NO: 672; WAN024D3F; Start 221; Stop 245
tgttaccagttaccaatcattctct

SEQ ID NO: 269883 - DNA, 25 bp, Artificial
  probe
  misc_feature (1)..(25): SEQ ID NO: 672; WAN024D3F; Start 205; Stop 229
aattacgcttatgacttgttaccag

SEQ ID NO: 269884 - DNA, 25 bp, Artificial
  probe
  misc_feature (1)..(25): SEQ ID NO: 672; WAN024D3F; Start 222; Stop 246
gttaccagttaccaatcattctctt

SEQ ID NO: 269885 - DNA, 25 bp, Artificial
  probe
  misc_feature (1)..(25): SEQ ID NO: 672; WAN024D3F; Start 283; Stop 307
tatctgacgcattcaagtaagttct

SEQ ID NO: 269886 - DNA, 25 bp, Artificial
  probe
  misc_feature (1)..(25): SEQ ID NO: 672; WAN024D3F; Start 216; Stop 240
tgacttgttaccagttaccaatcat

SEQ ID NO: 269887 - DNA, 25 bp, Artificial
  probe
  misc_feature (1)..(25): SEQ ID NO: 672; WAN024D3F; Start 215; Stop 239
atgacttgttaccagttaccaatca

SEQ ID NO: 269888 - DNA, 25 bp, Artificial
  probe
  misc_feature (1)..(25): SEQ ID NO: 672; WAN024D3F; Start 208; Stop 232
tacgcttatgacttgttaccagtta

SEQ ID NO: 269889 - DNA, 25 bp, Artificial
  probe
  misc_feature (1)..(25): SEQ ID NO: 672; WAN024D3F; Start 281; Stop 305
gttatctgacgcattcaagtaagtt

SEQ ID NO: 269890 - DNA, 25 bp, Artificial
  probe
  misc_feature (1)..(25): SEQ ID NO: 672; WAN024D3F; Start 206; Stop 230
attacgcttatgacttgttaccagt

SEQ ID NO: 269891 - DNA, 25 bp, Artificial
  probe
  misc_feature (1)..(25): SEQ ID NO: 672; WAN024D3F; Start 282; Stop 306
ttatctgacgcattcaagtaagttc

SEQ ID NO: 269892 - DNA, 25 bp, Artificial
  probe
  misc_feature (1)..(25): SEQ ID NO: 672; WAN024D3F; Start 207; Stop 231
ttacgcttatgacttgttaccagtt

SEQ ID NO: 269893 - DNA, 25 bp, Artificial
  probe
  misc_feature (1)..(25): SEQ ID NO: 672; WAN024D3F; Start 220; Stop 244
ttgttaccagttaccaatcattctc

SEQ ID NO: 269894 - DNA, 25 bp, Artificial
  probe
  misc_feature (1)..(25): SEQ ID NO: 672; WAN024D3F; Start 219; Stop 243
cttgttaccagttaccaatcattct

SEQ ID NO: 269895 - DNA, 25 bp, Artificial
  probe
  misc_feature (1)..(25): SEQ ID NO: 672; WAN024D3F; Start 278; Stop 302
ttggttatctgacgcattcaagtaa

SEQ ID NO: 269896 - DNA, 25 bp, Artificial
  probe
  misc_feature (1)..(25): SEQ ID NO: 672; WAN024D3F; Start 218; Stop 242
acttgttaccagttaccaatcattc

SEQ ID NO: 269897 - DNA, 25 bp, Artificial
  probe
  misc_feature (1)..(25): SEQ ID NO: 672; WAN024D3F; Start 217; Stop 241
gacttgttaccagttaccaatcatt

SEQ ID NO: 269898 - DNA, 25 bp, Artificial
  probe
  misc_feature (1)..(25): SEQ ID NO: 672; WAN024D3F; Start 211; Stop 235
gcttatgacttgttaccagttacca

SEQ ID NO: 269899 - DNA, 25 bp, Artificial
  probe
  misc_feature (1)..(25): SEQ ID NO: 672; WAN024D3F; Start 280; Stop 304
ggttatctgacgcattcaagtaagt

SEQ ID NO: 269900 - DNA, 25 bp, Artificial
  probe
  misc_feature (1)..(25): SEQ ID NO: 672; WAN024D3F; Start 279; Stop 303
tggttatctgacgcattcaagtaag

SEQ ID NO: 269901 - DNA, 25 bp, Artificial
  probe
  misc_feature (1)..(25): SEQ ID NO: 672; WAN024D3F; Start 209; Stop 233
acgcttatgacttgttaccagttac

SEQ ID NO: 269902 - DNA, 25 bp, Artificial
  probe
  misc_feature (1)..(25): SEQ ID NO: 672; WAN024D3F; Start 380; Stop 404
ggaccttctataagcaagatcaaga

SEQ ID NO: 269903 - DNA, 25 bp, Artificial
  probe
  misc_feature (1)..(25): SEQ ID NO: 672; WAN024D3F; Start 212; Stop 236
cttatgacttgttaccagttaccaa

SEQ ID NO: 269904 - DNA, 25 bp, Artificial
  probe
  misc_feature (1)..(25): SEQ ID NO: 672; WAN024D3F; Start 284; Stop 308
atctgacgcattcaagtaagttctg

SEQ ID NO: 269905 - DNA, 25 bp, Artificial
  probe
  misc_feature (1)..(25): SEQ ID NO: 672; WAN024D3F; Start 277; Stop 301
gttggttatctgacgcattcaagta

SEQ ID NO: 269906 - DNA, 25 bp, Artificial
  probe
  misc_feature (1)..(25): SEQ ID NO: 672; WAN024D3F; Start 129; Stop 153
taagtccattgagtccatccttaga

SEQ ID NO: 269907 - DNA, 25 bp, Artificial
  probe
  misc_feature (1)..(25): SEQ ID NO: 672; WAN024D3F; Start 128; Stop 152
ataagtccattgagtccatccttag

SEQ ID NO: 269908 - DNA, 25 bp, Artificial
  probe
  misc_feature (1)..(25): SEQ ID NO: 672; WAN024D3F; Start 225; Stop 249
accagttaccaatcattctcttatt

SEQ ID NO: 269909 - DNA, 25 bp, Artificial
  probe
  misc_feature (1)..(25): SEQ ID NO: 672; WAN024D3F; Start 214; Stop 238
tatgacttgttaccagttaccaatc

SEQ ID NO: 269910 - DNA, 25 bp, Artificial
  probe
  misc_feature (1)..(25): SEQ ID NO: 672; WAN024D3F; Start 210; Stop 234
cgcttatgacttgttaccagttacc

SEQ ID NO: 269911 - DNA, 25 bp, Artificial
  probe
  misc_feature (1)..(25): SEQ ID NO: 672; WAN024D3F; Start 126; Stop 150
ttataagtccattgagtccatcctt

SEQ ID NO: 269912 - DNA, 25 bp, Artificial
  probe
  misc_feature (1)..(25): SEQ ID NO: 672; WAN024D3F; Start 213; Stop 237
ttatgacttgttaccagttaccaat

SEQ ID NO: 269913 - DNA, 25 bp, Artificial
  probe
  misc_feature (1)..(25): SEQ ID NO: 672; WAN024D3F; Start 382; Stop 406
accttctataagcaagatcaagatc

SEQ ID NO: 269914 - DNA, 25 bp, Artificial
  probe
  misc_feature (1)..(25): SEQ ID NO: 672; WAN024D3F; Start 381; Stop 405
gaccttctataagcaagatcaagat

SEQ ID NO: 269915 - DNA, 25 bp, Artificial
  probe
  misc_feature (1)..(25): SEQ ID NO: 673; WAN024B7X; Start 345; Stop 369
aactggctactctactccttataca

SEQ ID NO: 269916 - DNA, 25 bp, Artificial
  probe
  misc_feature (1)..(25): SEQ ID NO: 673; WAN024B7X; Start 343; Stop 367
acaactggctactctactccttata

SEQ ID NO: 269917 - DNA, 25 bp, Artificial
  probe
  misc_feature (1)..(25): SEQ ID NO: 673; WAN024B7X; Start 344; Stop 368
caactggctactctactccttatac

SEQ ID NO: 269918 - DNA, 25 bp, Artificial
  probe
  misc_feature (1)..(25): SEQ ID NO: 673; WAN024B7X; Start 347; Stop 371
ctggctactctactccttatacact

SEQ ID NO: 269919 - DNA, 25 bp, Artificial
  probe
  misc_feature (1)..(25): SEQ ID NO: 673; WAN024B7X; Start 346; Stop 370
actggctactctactccttatacac

SEQ ID NO: 269920 - DNA, 25 bp, Artificial
  probe
  misc_feature (1)..(25): SEQ ID NO: 673; WAN024B7X; Start 348; Stop 372
tggctactctactccttatacacta

SEQ ID NO: 269921 - DNA, 25 bp, Artificial
  probe
  misc_feature (1)..(25): SEQ ID NO: 673; WAN024B7X; Start 342; Stop 366
cacaactggctactctactccttat

SEQ ID NO: 269922 - DNA, 25 bp, Artificial
  probe
  misc_feature (1)..(25): SEQ ID NO: 673; WAN024B7X; Start 349; Stop 373
ggctactctactccttatacactag

SEQ ID NO: 269923 - DNA, 25 bp, Artificial
  probe
  misc_feature (1)..(25): SEQ ID NO: 673; WAN024B7X; Start 410; Stop 434
aaggcatgaacatcgaaggatataa

SEQ ID NO: 269924 - DNA, 25 bp, Artificial
  probe
  misc_feature (1)..(25): SEQ ID NO: 673; WAN024B7X; Start 411; Stop 435
aggcatgaacatcgaaggatataac

SEQ ID NO: 269925 - DNA, 25 bp, Artificial
  probe
  misc_feature (1)..(25): SEQ ID NO: 673; WAN024B7X; Start 164; Stop 188
aagtagaactgattcaagctggtac

SEQ ID NO: 269926 - DNA, 25 bp, Artificial
  probe
  misc_feature (1)..(25): SEQ ID NO: 673; WAN024B7X; Start 260; Stop 284
atacacaatatactacccacggaga

SEQ ID NO: 269927 - DNA, 25 bp, Artificial
  probe
  misc_feature (1)..(25): SEQ ID NO: 673; WAN024B7X; Start 166; Stop 190
gtagaactgattcaagctggtactg

SEQ ID NO: 269928 - DNA, 25 bp, Artificial
  probe
  misc_feature (1)..(25): SEQ ID NO: 673; WAN024B7X; Start 261; Stop 285
tacacaatatactacccacggagaa

SEQ ID NO: 269929 - DNA, 25 bp, Artificial
  probe
  misc_feature (1)..(25): SEQ ID NO: 673; WAN024B7X; Start 267; Stop 291
atatactacccacggagaactcttt

SEQ ID NO: 269930 - DNA, 25 bp, Artificial
  probe
  misc_feature (1)..(25): SEQ ID NO: 673; WAN024B7X; Start 266; Stop 290
aatatactacccacggagaactctt

SEQ ID NO: 269931 - DNA, 25 bp, Artificial
  probe
  misc_feature (1)..(25): SEQ ID NO: 673; WAN024B7X; Start 259; Stop 283
tatacacaatatactacccacggag

SEQ ID NO: 269932 - DNA, 25 bp, Artificial
  probe
  misc_feature (1)..(25): SEQ ID NO: 673; WAN024B7X; Start 340; Stop 364
aacacaactggctactctactcctt

SEQ ID NO: 269933 - DNA, 25 bp, Artificial
  probe
  misc_feature (1)..(25): SEQ ID NO: 673; WAN024B7X; Start 265; Stop 289
caatatactacccacggagaactct

SEQ ID NO: 269934 - DNA, 25 bp, Artificial
  probe
  misc_feature (1)..(25): SEQ ID NO: 673; WAN024B7X; Start 353; Stop 377
actctactccttatacactagatgg

SEQ ID NO: 269935 - DNA, 25 bp, Artificial
  probe
  misc_feature (1)..(25): SEQ ID NO: 673; WAN024B7X; Start 258; Stop 282
ttatacacaatatactacccacgga

SEQ ID NO: 269936 - DNA, 25 bp, Artificial
  probe
  misc_feature (1)..(25): SEQ ID NO: 673; WAN024B7X; Start 412; Stop 436
ggcatgaacatcgaaggatataacg

SEQ ID NO: 269937 - DNA, 25 bp, Artificial
  probe
  misc_feature (1)..(25): SEQ ID NO: 673; WAN024B7X; Start 268; Stop 292
tatactacccacggagaactctttg

SEQ ID NO: 269938 - DNA, 25 bp, Artificial
  probe
  misc_feature (1)..(25): SEQ ID NO: 673; WAN024B7X; Start 264; Stop 288
acaatatactacccacggagaactc

SEQ ID NO: 269939 - DNA, 25 bp, Artificial
  probe
  misc_feature (1)..(25): SEQ ID NO: 673; WAN024B7X; Start 263; Stop 287
cacaatatactacccacggagaact

SEQ ID NO: 269940 - DNA, 25 bp, Artificial
  probe
  misc_feature (1)..(25): SEQ ID NO: 673; WAN024B7X; Start 257; Stop 281
cttatacacaatatactacccacgg

SEQ ID NO: 269941 - DNA, 25 bp, Artificial
  probe
  misc_feature (1)..(25): SEQ ID NO: 673; WAN024B7X; Start 350; Stop 374
gctactctactccttatacactaga

SEQ ID NO: 269942 - DNA, 25 bp, Artificial
  probe
  misc_feature (1)..(25): SEQ ID NO: 673; WAN024B7X; Start 388; Stop 412
atcgtcaaccctgatttaactaaag

SEQ ID NO: 269943 - DNA, 25 bp, Artificial
  probe
  misc_feature (1)..(25): SEQ ID NO: 673; WAN024B7X; Start 97; Stop 121
tattcaccaaactcagagggcttaa

SEQ ID NO: 269944 - DNA, 25 bp, Artificial
  probe
  misc_feature (1)..(25): SEQ ID NO: 673; WAN024B7X; Start 96; Stop 120
ttattcaccaaactcagagggctta

SEQ ID NO: 269945 - DNA, 25 bp, Artificial
  probe
  misc_feature (1)..(25): SEQ ID NO: 673; WAN024B7X; Start 262; Stop 286
acacaatatactacccacggagaac

SEQ ID NO: 269946 - DNA, 25 bp, Artificial
  probe
  misc_feature (1)..(25): SEQ ID NO: 673; WAN024B7X; Start 974; Stop 998
agaaatacaacgaagtctttacaga

SEQ ID NO: 269947 - DNA, 25 bp, Artificial
  probe
  misc_feature (1)..(25): SEQ ID NO: 673; WAN024B7X; Start 746; Stop 770
tacctgctagtgctgctatcgttaa

SEQ ID NO: 269948 - DNA, 25 bp, Artificial
  probe
  misc_feature (1)..(25): SEQ ID NO: 674; WAN024F7U; Start 344; Stop 368
caactggcttctctactccttatac

SEQ ID NO: 269949 - DNA, 25 bp, Artificial
  probe
  misc_feature (1)..(25): SEQ ID NO: 674; WAN024F7U; Start 348; Stop 372
tggcttctctactccttatacacta

SEQ ID NO: 269950 - DNA, 25 bp, Artificial
  probe
  misc_feature (1)..(25): SEQ ID NO: 674; WAN024F7U; Start 345; Stop 369
aactggcttctctactccttataca

SEQ ID NO: 269951 - DNA, 25 bp, Artificial
  probe
  misc_feature (1)..(25): SEQ ID NO: 674; WAN024F7U; Start 343; Stop 367
acaactggcttctctactccttata

SEQ ID NO: 269952 - DNA, 25 bp, Artificial
  probe
  misc_feature (1)..(25): SEQ ID NO: 674; WAN024F7U; Start 347; Stop 371
ctggcttctctactccttatacact

SEQ ID NO: 269953 - DNA, 25 bp, Artificial
  probe
  misc_feature (1)..(25): SEQ ID NO: 674; WAN024F7U; Start 346; Stop 370
actggcttctctactccttatacac

SEQ ID NO: 269954 - DNA, 25 bp, Artificial
  probe
  misc_feature (1)..(25): SEQ ID NO: 674; WAN024F7U; Start 349; Stop 373
ggcttctctactccttatacactag

SEQ ID NO: 269955 - DNA, 25 bp, Artificial
  probe
  misc_feature (1)..(25): SEQ ID NO: 674; WAN024F7U; Start 342; Stop 366
cacaactggcttctctactccttat

SEQ ID NO: 269956 - DNA, 25 bp, Artificial
  probe
  misc_feature (1)..(25): SEQ ID NO: 674; WAN024F7U; Start 249; Stop 273
tggtggttcttatacacaatatgct

SEQ ID NO: 269957 - DNA, 25 bp, Artificial
  probe
  misc_feature (1)..(25): SEQ ID NO: 674; WAN024F7U; Start 248; Stop 272
ttggtggttcttatacacaatatgc

SEQ ID NO: 269958 - DNA, 25 bp, Artificial
  probe
  misc_feature (1)..(25): SEQ ID NO: 674; WAN024F7U; Start 166; Stop 190
atagaactgattcaagctggtactg

SEQ ID NO: 269959 - DNA, 25 bp, Artificial
  probe
  misc_feature (1)..(25): SEQ ID NO: 674; WAN024F7U; Start 165; Stop 189
aatagaactgattcaagctggtact

SEQ ID NO: 269960 - DNA, 25 bp, Artificial
  probe
  misc_feature (1)..(25): SEQ ID NO: 674; WAN024F7U; Start 410; Stop 434
aaggcatgaacatcgaaggatatag

SEQ ID NO: 269961 - DNA, 25 bp, Artificial
  probe
  misc_feature (1)..(25): SEQ ID NO: 674; WAN024F7U; Start 250; Stop 274
ggtggttcttatacacaatatgcta

SEQ ID NO: 269962 - DNA, 25 bp, Artificial
  probe
  misc_feature (1)..(25): SEQ ID NO: 674; WAN024F7U; Start 256; Stop 280
tcttatacacaatatgctacccacg

SEQ ID NO: 269963 - DNA, 25 bp, Artificial
  probe
  misc_feature (1)..(25): SEQ ID NO: 674; WAN024F7U; Start 96; Stop 120
ttattcaccaaactcagaaggctta

SEQ ID NO: 269964 - DNA, 25 bp, Artificial
  probe
  misc_feature (1)..(25): SEQ ID NO: 674; WAN024F7U; Start 388; Stop 412
atcgtccaccctgatttaactaaag

SEQ ID NO: 269965 - DNA, 25 bp, Artificial
  probe
  misc_feature (1)..(25): SEQ ID NO: 674; WAN024F7U; Start 350; Stop 374
gcttctctactccttatacactaga

SEQ ID NO: 269966 - DNA, 25 bp, Artificial
  probe
  misc_feature (1)..(25): SEQ ID NO: 674; WAN024F7U; Start 97; Stop 121
tattcaccaaactcagaaggcttaa

SEQ ID NO: 269967 - DNA, 25 bp, Artificial
  probe
  misc_feature (1)..(25): SEQ ID NO: 674; WAN024F7U; Start 257; Stop 281
cttatacacaatatgctacccacgg

SEQ ID NO: 269968 - DNA, 25 bp, Artificial
  probe
  misc_feature (1)..(25): SEQ ID NO: 674; WAN024F7U; Start 98; Stop 122
attcaccaaactcagaaggcttaat

SEQ ID NO: 269969 - DNA, 25 bp, Artificial
  probe
  misc_feature (1)..(25): SEQ ID NO: 674; WAN024F7U; Start 95; Stop 119
tttattcaccaaactcagaaggctt

SEQ ID NO: 269970 - DNA, 25 bp, Artificial
  probe
  misc_feature (1)..(25): SEQ ID NO: 674; WAN024F7U; Start 252; Stop 276
tggttcttatacacaatatgctacc

SEQ ID NO: 269971 - DNA, 25 bp, Artificial
  probe
  misc_feature (1)..(25): SEQ ID NO: 674; WAN024F7U; Start 258; Stop 282
ttatacacaatatgctacccacgga

SEQ ID NO: 269972 - DNA, 25 bp, Artificial
  probe
  misc_feature (1)..(25): SEQ ID NO: 674; WAN024F7U; Start 99; Stop 123
ttcaccaaactcagaaggcttaatt

SEQ ID NO: 269973 - DNA, 25 bp, Artificial
  probe
  misc_feature (1)..(25): SEQ ID NO: 674; WAN024F7U; Start 112; Stop 136
gaaggcttaattggagcaactattc

SEQ ID NO: 269974 - DNA, 25 bp, Artificial
  probe
  misc_feature (1)..(25): SEQ ID NO: 674; WAN024F7U; Start 111; Stop 135
agaaggcttaattggagcaactatt

SEQ ID NO: 269975 - DNA, 25 bp, Artificial
  probe
  misc_feature (1)..(25): SEQ ID NO: 674; WAN024F7U; Start 255; Stop 279
ttcttatacacaatatgctacccac

SEQ ID NO: 269976 - DNA, 25 bp, Artificial
  probe
  misc_feature (1)..(25): SEQ ID NO: 674; WAN024F7U; Start 254; Stop 278
gttcttatacacaatatgctaccca

SEQ ID NO: 269977 - DNA, 25 bp, Artificial
  probe
  misc_feature (1)..(25): SEQ ID NO: 674; WAN024F7U; Start 353; Stop 377
tctctactccttatacactagatgg

SEQ ID NO: 269978 - DNA, 25 bp, Artificial
  probe
  misc_feature (1)..(25): SEQ ID NO: 674; WAN024F7U; Start 251; Stop 275
gtggttcttatacacaatatgctac

SEQ ID NO: 269979 - DNA, 25 bp, Artificial
  probe
  misc_feature (1)..(25): SEQ ID NO: 674; WAN024F7U; Start 259; Stop 283
tatacacaatatgctacccacggag

SEQ ID NO: 269980 - DNA, 25 bp, Artificial
  probe
  misc_feature (1)..(25): SEQ ID NO: 674; WAN024F7U; Start 110; Stop 134
cagaaggcttaattggagcaactat

SEQ ID NO: 269981 - DNA, 25 bp, Artificial
  probe
  misc_feature (1)..(25): SEQ ID NO: 675; WAN024G9D; Start 1435; Stop 1459
atgaagacaggtgagatagaagttg

SEQ ID NO: 269982 - DNA, 25 bp, Artificial
  probe
  misc_feature (1)..(25): SEQ ID NO: 675; WAN024G9D; Start 166; Stop 190
atggtggatacaggagaagattatg

SEQ ID NO: 269983 - DNA, 25 bp, Artificial
  probe
  misc_feature (1)..(25): SEQ ID NO: 675; WAN024G9D; Start 167; Stop 191
tggtggatacaggagaagattatga

SEQ ID NO: 269984 - DNA, 25 bp, Artificial
  probe
  misc_feature (1)..(25): SEQ ID NO: 675; WAN024G9D; Start 618; Stop 642
tgacaattccaattccttgattagc

SEQ ID NO: 269985 - DNA, 25 bp, Artificial
  probe
  misc_feature (1)..(25): SEQ ID NO: 675; WAN024G9D; Start 104; Stop 128
ttatcaatgttcaagaaggtggcag

SEQ ID NO: 269986 - DNA, 25 bp, Artificial
  probe
  misc_feature (1)..(25): SEQ ID NO: 675; WAN024G9D; Start 619; Stop 643
gacaattccaattccttgattagcg

SEQ ID NO: 269987 - DNA, 25 bp, Artificial
  probe
  misc_feature (1)..(25): SEQ ID NO: 675; WAN024G9D; Start 621; Stop 645
caattccaattccttgattagcgtg

SEQ ID NO: 269988 - DNA, 25 bp, Artificial
  probe
  misc_feature (1)..(25): SEQ ID NO: 675; WAN024G9D; Start 1406; Stop 1430
cctggtactatatggattctactgg

SEQ ID NO: 269989 - DNA, 25 bp, Artificial
  probe
  misc_feature (1)..(25): SEQ ID NO: 675; WAN024G9D; Start 357; Stop 381
tgatgaattactgtctacctatcca

SEQ ID NO: 269990 - DNA, 25 bp, Artificial
  probe
  misc_feature (1)..(25): SEQ ID NO: 675; WAN024G9D; Start 1434; Stop 1458
catgaagacaggtgagatagaagtt

SEQ ID NO: 269991 - DNA, 25 bp, Artificial
  probe
  misc_feature (1)..(25): SEQ ID NO: 675; WAN024G9D; Start 620; Stop 644
acaattccaattccttgattagcgt

SEQ ID NO: 269992 - DNA, 25 bp, Artificial
  probe
  misc_feature (1)..(25): SEQ ID NO: 675; WAN024G9D; Start 165; Stop 189
catggtggatacaggagaagattat

SEQ ID NO: 269993 - DNA, 25 bp, Artificial
  probe
  misc_feature (1)..(25): SEQ ID NO: 675; WAN024G9D; Start 1437; Stop 1461
gaagacaggtgagatagaagttgct

SEQ ID NO: 269994 - DNA, 25 bp, Artificial
  probe
  misc_feature (1)..(25): SEQ ID NO: 675; WAN024G9D; Start 376; Stop 400
tatccagttgaccgagtctatctta

SEQ ID NO: 269995 - DNA, 25 bp, Artificial
  probe
  misc_feature (1)..(25): SEQ ID NO: 675; WAN024G9D; Start 859; Stop 883
gttgatagtgagtatgttaattggc

SEQ ID NO: 269996 - DNA, 25 bp, Artificial
  probe
  misc_feature (1)..(25): SEQ ID NO: 675; WAN024G9D; Start 687; Stop 711
agataatgttcatggagcagaagac

SEQ ID NO: 269997 - DNA, 25 bp, Artificial
  probe
  misc_feature (1)..(25): SEQ ID NO: 675; WAN024G9D; Start 686; Stop 710
tagataatgttcatggagcagaaga

SEQ ID NO: 269998 - DNA, 25 bp, Artificial
  probe
  misc_feature (1)..(25): SEQ ID NO: 675; WAN024G9D; Start 1407; Stop 1431
ctggtactatatggattctactggt

SEQ ID NO: 269999 - DNA, 25 bp, Artificial
  probe
  misc_feature (1)..(25): SEQ ID NO: 675; WAN024G9D; Start 860; Stop 884
ttgatagtgagtatgttaattggct

SEQ ID NO: 270000 - DNA, 25 bp, Artificial
  probe
  misc_feature (1)..(25): SEQ ID NO: 675; WAN024G9D; Start 377; Stop 401
atccagttgaccgagtctatcttaa

SEQ ID NO: 270001 - DNA, 25 bp, Artificial
  probe
  misc_feature (1)..(25): SEQ ID NO: 675; WAN024G9D; Start 706; Stop 730
gaagacaagtatggtcctctcattg

SEQ ID NO: 270002 - DNA, 25 bp, Artificial
  probe
  misc_feature (1)..(25): SEQ ID NO: 675; WAN024G9D; Start 705; Stop 729
agaagacaagtatggtcctctcatt

SEQ ID NO: 270003 - DNA, 25 bp, Artificial
  probe
  misc_feature (1)..(25): SEQ ID NO: 675; WAN024G9D; Start 352; Stop 376
aatgttgatgaattactgtctacct

SEQ ID NO: 270004 - DNA, 25 bp, Artificial
  probe
  misc_feature (1)..(25): SEQ ID NO: 675; WAN024G9D; Start 1436; Stop 1460
tgaagacaggtgagatagaagttgc

SEQ ID NO: 270005 - DNA, 25 bp, Artificial
  probe
  misc_feature (1)..(25): SEQ ID NO: 675; WAN024G9D; Start 853; Stop 877
aatggtgttgatagtgagtatgtta

SEQ ID NO: 270006 - DNA, 25 bp, Artificial
  probe
  misc_feature (1)..(25): SEQ ID NO: 675; WAN024G9D; Start 375; Stop 399
ctatccagttgaccgagtctatctt

SEQ ID NO: 270007 - DNA, 25 bp, Artificial
  probe
  misc_feature (1)..(25): SEQ ID NO: 675; WAN024G9D; Start 861; Stop 885
tgatagtgagtatgttaattggctc

SEQ ID NO: 270008 - DNA, 25 bp, Artificial
  probe
  misc_feature (1)..(25): SEQ ID NO: 675; WAN024G9D; Start 855; Stop 879
tggtgttgatagtgagtatgttaat

SEQ ID NO: 270009 - DNA, 25 bp, Artificial
  probe
  misc_feature (1)..(25): SEQ ID NO: 675; WAN024G9D; Start 854; Stop 878
atggtgttgatagtgagtatgttaa

SEQ ID NO: 270010 - DNA, 25 bp, Artificial
  probe
  misc_feature (1)..(25): SEQ ID NO: 675; WAN024G9D; Start 685; Stop 709
ttagataatgttcatggagcagaag

SEQ ID NO: 270011 - DNA, 25 bp, Artificial
  probe
  misc_feature (1)..(25): SEQ ID NO: 675; WAN024G9D; Start 615; Stop 639
ggatgacaattccaattccttgatt

SEQ ID NO: 270012 - DNA, 25 bp, Artificial
  probe
  misc_feature (1)..(25): SEQ ID NO: 675; WAN024G9D; Start 105; Stop 129
tatcaatgttcaagaaggtggcagt

SEQ ID NO: 270013 - DNA, 25 bp, Artificial
  probe
  misc_feature (1)..(25): SEQ ID NO: 675; WAN024G9D; Start 689; Stop 713
ataatgttcatggagcagaagacaa

SEQ ID NO: 270014 - DNA, 25 bp, Artificial
  probe
  misc_feature (1)..(25): SEQ ID NO: 676; WAN024DLD; Start 118; Stop 142
gcctattatctgtcggatatgatgt

SEQ ID NO: 270015 - DNA, 25 bp, Artificial
  probe
  misc_feature (1)..(25): SEQ ID NO: 676; WAN024DLD; Start 117; Stop 141
tgcctattatctgtcggatatgatg

SEQ ID NO: 270016 - DNA, 25 bp, Artificial
  probe
  misc_feature (1)..(25): SEQ ID NO: 676; WAN024DLD; Start 46; Stop 70
ctagttattgctgaccagaagttca

SEQ ID NO: 270017 - DNA, 25 bp, Artificial
  probe
  misc_feature (1)..(25): SEQ ID NO: 676; WAN024DLD; Start 116; Stop 140
ttgcctattatctgtcggatatgat

SEQ ID NO: 270018 - DNA, 25 bp, Artificial
  probe
  misc_feature (1)..(25): SEQ ID NO: 676; WAN024DLD; Start 164; Stop 188
ttgctcttattgctatgatttggtc

SEQ ID NO: 270019 - DNA, 25 bp, Artificial
  probe
  misc_feature (1)..(25): SEQ ID NO: 676; WAN024DLD; Start 124; Stop 148
tatctgtcggatatgatgttgaatt

SEQ ID NO: 270020 - DNA, 25 bp, Artificial
  probe
  misc_feature (1)..(25): SEQ ID NO: 676; WAN024DLD; Start 123; Stop 147
ttatctgtcggatatgatgttgaat

SEQ ID NO: 270021 - DNA, 25 bp, Artificial
  probe
  misc_feature (1)..(25): SEQ ID NO: 676; WAN024DLD; Start 122; Stop 146
attatctgtcggatatgatgttgaa

SEQ ID NO: 270022 - DNA, 25 bp, Artificial
  probe
  misc_feature (1)..(25): SEQ ID NO: 676; WAN024DLD; Start 545; Stop 569
tcttctatatgggtggaggtcttat

SEQ ID NO: 270023 - DNA, 25 bp, Artificial
  probe
  misc_feature (1)..(25): SEQ ID NO: 676; WAN024DLD; Start 544; Stop 568
gtcttctatatgggtggaggtctta

SEQ ID NO: 270024 - DNA, 25 bp, Artificial
  probe
  misc_feature (1)..(25): SEQ ID NO: 676; WAN024DLD; Start 163; Stop 187
tttgctcttattgctatgatttggt

SEQ ID NO: 270025 - DNA, 25 bp, Artificial
  probe
  misc_feature (1)..(25): SEQ ID NO: 676; WAN024DLD; Start 119; Stop 143
cctattatctgtcggatatgatgtt

SEQ ID NO: 270026 - DNA, 25 bp, Artificial
  probe
  misc_feature (1)..(25): SEQ ID NO: 676; WAN024DLD; Start 551; Stop 575
atatgggtggaggtcttatatttgc

SEQ ID NO: 270027 - DNA, 25 bp, Artificial
  probe
  misc_feature (1)..(25): SEQ ID NO: 676; WAN024DLD; Start 105; Stop 129
gctatctgactttgcctattatctg

SEQ ID NO: 270028 - DNA, 25 bp, Artificial
  probe
  misc_feature (1)..(25): SEQ ID NO: 676; WAN024DLD; Start 503; Stop 527
tctcgcacattagtaatcacggttg

SEQ ID NO: 270029 - DNA, 25 bp, Artificial
  probe
  misc_feature (1)..(25): SEQ ID NO: 676; WAN024DLD; Start 502; Stop 526
gtctcgcacattagtaatcacggtt

SEQ ID NO: 270030 - DNA, 25 bp, Artificial
  probe
  misc_feature (1)..(25): SEQ ID NO: 676; WAN024DLD; Start 167; Stop 191
ctcttattgctatgatttggtcggg

SEQ ID NO: 270031 - DNA, 25 bp, Artificial
  probe
  misc_feature (1)..(25): SEQ ID NO: 676; WAN024DLD; Start 165; Stop 189
tgctcttattgctatgatttggtcg

SEQ ID NO: 270032 - DNA, 25 bp, Artificial
  probe
  misc_feature (1)..(25): SEQ ID NO: 676; WAN024DLD; Start 541; Stop 565
tttgtcttctatatgggtggaggtc

SEQ ID NO: 270033 - DNA, 25 bp, Artificial
  probe
  misc_feature (1)..(25): SEQ ID NO: 676; WAN024DLD; Start 540; Stop 564
ctttgtcttctatatgggtggaggt

SEQ ID NO: 270034 - DNA, 25 bp, Artificial
  probe
  misc_feature (1)..(25): SEQ ID NO: 676; WAN024DLD; Start 539; Stop 563
actttgtcttctatatgggtggagg

SEQ ID NO: 270035 - DNA, 25 bp, Artificial
  probe
  misc_feature (1)..(25): SEQ ID NO: 676; WAN024DLD; Start 546; Stop 570
cttctatatgggtggaggtcttata

SEQ ID NO: 270036 - DNA, 25 bp, Artificial
  probe
  misc_feature (1)..(25): SEQ ID NO: 676; WAN024DLD; Start 9; Stop 33
gataatctcacaccgctactttatt

SEQ ID NO: 270037 - DNA, 25 bp, Artificial
  probe
  misc_feature (1)..(25): SEQ ID NO: 676; WAN024DLD; Start 125; Stop 149
atctgtcggatatgatgttgaattt

SEQ ID NO: 270038 - DNA, 25 bp, Artificial
  probe
  misc_feature (1)..(25): SEQ ID NO: 676; WAN024DLD; Start 7; Stop 31
aagataatctcacaccgctacttta

SEQ ID NO: 270039 - DNA, 25 bp, Artificial
  probe
  misc_feature (1)..(25): SEQ ID NO: 676; WAN024DLD; Start 14; Stop 38
tctcacaccgctactttattatagt

SEQ ID NO: 270040 - DNA, 25 bp, Artificial
  probe
  misc_feature (1)..(25): SEQ ID NO: 676; WAN024DLD; Start 510; Stop 534
cattagtaatcacggttgggtcttg

SEQ ID NO: 270041 - DNA, 25 bp, Artificial
  probe
  misc_feature (1)..(25): SEQ ID NO: 676; WAN024DLD; Start 8; Stop 32
agataatctcacaccgctactttat

SEQ ID NO: 270042 - DNA, 25 bp, Artificial
  probe
  misc_feature (1)..(25): SEQ ID NO: 676; WAN024DLD; Start 162; Stop 186
atttgctcttattgctatgatttgg

SEQ ID NO: 270043 - DNA, 25 bp, Artificial
  probe
  misc_feature (1)..(25): SEQ ID NO: 676; WAN024DLD; Start 121; Stop 145
tattatctgtcggatatgatgttga

SEQ ID NO: 270044 - DNA, 25 bp, Artificial
  probe
  misc_feature (1)..(25): SEQ ID NO: 676; WAN024DLD; Start 13; Stop 37
atctcacaccgctactttattatag

SEQ ID NO: 270045 - DNA, 25 bp, Artificial
  probe
  misc_feature (1)..(25): SEQ ID NO: 676; WAN024DLD; Start 509; Stop 533
acattagtaatcacggttgggtctt

SEQ ID NO: 270046 - DNA, 25 bp, Artificial
  probe
  misc_feature (1)..(25): SEQ ID NO: 676; WAN024DLD; Start 115; Stop 139
tttgcctattatctgtcggatatga

SEQ ID NO: 270047 - DNA, 25 bp, Artificial
  probe
  misc_feature (1)..(25): SEQ ID NO: 677; WAN024AY9; Start 588; Stop 612
cctcatcttattgactgctcataga

SEQ ID NO: 270048 - DNA, 25 bp, Artificial
  probe
  misc_feature (1)..(25): SEQ ID NO: 677; WAN024AY9; Start 587; Stop 611
gcctcatcttattgactgctcatag

SEQ ID NO: 270049 - DNA, 25 bp, Artificial
  probe
  misc_feature (1)..(25): SEQ ID NO: 677; WAN024AY9; Start 286; Stop 310
gatactactacgacatatgcagcag

SEQ ID NO: 270050 - DNA, 25 bp, Artificial
  probe
  misc_feature (1)..(25): SEQ ID NO: 677; WAN024AY9; Start 284; Stop 308
gtgatactactacgacatatgcagc

SEQ ID NO: 270051 - DNA, 25 bp, Artificial
  probe
  misc_feature (1)..(25): SEQ ID NO: 677; WAN024AY9; Start 279; Stop 303
tcacggtgatactactacgacatat

SEQ ID NO: 270052 - DNA, 25 bp, Artificial
  probe
  misc_feature (1)..(25): SEQ ID NO: 677; WAN024AY9; Start 278; Stop 302
ttcacggtgatactactacgacata

SEQ ID NO: 270053 - DNA, 25 bp, Artificial
  probe
  misc_feature (1)..(25): SEQ ID NO: 677; WAN024AY9; Start 285; Stop 309
tgatactactacgacatatgcagca

SEQ ID NO: 270054 - DNA, 25 bp, Artificial
  probe
  misc_feature (1)..(25): SEQ ID NO: 677; WAN024AY9; Start 347; Stop 371
atgttgaagctggattacgaactta

SEQ ID NO: 270055 - DNA, 25 bp, Artificial
  probe
  misc_feature (1)..(25): SEQ ID NO: 677; WAN024AY9; Start 399; Stop 423
gttcaacagacaatcgacttctatt

SEQ ID NO: 270056 - DNA, 25 bp, Artificial
  probe
  misc_feature (1)..(25): SEQ ID NO: 677; WAN024AY9; Start 350; Stop 374
ttgaagctggattacgaacttacaa

SEQ ID NO: 270057 - DNA, 25 bp, Artificial
  probe
  misc_feature (1)..(25): SEQ ID NO: 677; WAN024AY9; Start 945; Stop 969
tgggactgatgaggagactatttat

SEQ ID NO: 270058 - DNA, 25 bp, Artificial
  probe
  misc_feature (1)..(25): SEQ ID NO: 677; WAN024AY9; Start 821; Stop 845
atatgattctaactgactcaggagg

SEQ ID NO: 270059 - DNA, 25 bp, Artificial
  probe
  misc_feature (1)..(25): SEQ ID NO: 677; WAN024AY9; Start 944; Stop 968
ttgggactgatgaggagactattta

SEQ ID NO: 270060 - DNA, 25 bp, Artificial
  probe
  misc_feature (1)..(25): SEQ ID NO: 677; WAN024AY9; Start 398; Stop 422
agttcaacagacaatcgacttctat

SEQ ID NO: 270061 - DNA, 25 bp, Artificial
  probe
  misc_feature (1)..(25): SEQ ID NO: 677; WAN024AY9; Start 946; Stop 970
gggactgatgaggagactatttatc

SEQ ID NO: 270062 - DNA, 25 bp, Artificial
  probe
  misc_feature (1)..(25): SEQ ID NO: 677; WAN024AY9; Start 351; Stop 375
tgaagctggattacgaacttacaac

SEQ ID NO: 270063 - DNA, 25 bp, Artificial
  probe
  misc_feature (1)..(25): SEQ ID NO: 677; WAN024AY9; Start 397; Stop 421
gagttcaacagacaatcgacttcta

SEQ ID NO: 270064 - DNA, 25 bp, Artificial
  probe
  misc_feature (1)..(25): SEQ ID NO: 677; WAN024AY9; Start 586; Stop 610
cgcctcatcttattgactgctcata

SEQ ID NO: 270065 - DNA, 25 bp, Artificial
  probe
  misc_feature (1)..(25): SEQ ID NO: 677; WAN024AY9; Start 349; Stop 373
gttgaagctggattacgaacttaca

SEQ ID NO: 270066 - DNA, 25 bp, Artificial
  probe
  misc_feature (1)..(25): SEQ ID NO: 677; WAN024AY9; Start 348; Stop 372
tgttgaagctggattacgaacttac

SEQ ID NO: 270067 - DNA, 25 bp, Artificial
  probe
  misc_feature (1)..(25): SEQ ID NO: 677; WAN024AY9; Start 1033; Stop 1057
ccttatggaaatggtgatgctagta

SEQ ID NO: 270068 - DNA, 25 bp, Artificial
  probe
  misc_feature (1)..(25): SEQ ID NO: 677; WAN024AY9; Start 1037; Stop 1061
atggaaatggtgatgctagtaaaca

SEQ ID NO: 270069 - DNA, 25 bp, Artificial
  probe
  misc_feature (1)..(25): SEQ ID NO: 677; WAN024AY9; Start 515; Stop 539
tgattgatgcacttacaactacagt

SEQ ID NO: 270070 - DNA, 25 bp, Artificial
  probe
  misc_feature (1)..(25): SEQ ID NO: 677; WAN024AY9; Start 1042; Stop 1066
aatggtgatgctagtaaacagattg

SEQ ID NO: 270071 - DNA, 25 bp, Artificial
  probe
  misc_feature (1)..(25): SEQ ID NO: 677; WAN024AY9; Start 395; Stop 419
aagagttcaacagacaatcgacttc

SEQ ID NO: 270072 - DNA, 25 bp, Artificial
  probe
  misc_feature (1)..(25): SEQ ID NO: 677; WAN024AY9; Start 394; Stop 418
gaagagttcaacagacaatcgactt

SEQ ID NO: 270073 - DNA, 25 bp, Artificial
  probe
  misc_feature (1)..(25): SEQ ID NO: 677; WAN024AY9; Start 1039; Stop 1063
ggaaatggtgatgctagtaaacaga

SEQ ID NO: 270074 - DNA, 25 bp, Artificial
  probe
  misc_feature (1)..(25): SEQ ID NO: 677; WAN024AY9; Start 352; Stop 376
gaagctggattacgaacttacaacc

SEQ ID NO: 270075 - DNA, 25 bp, Artificial
  probe
  misc_feature (1)..(25): SEQ ID NO: 677; WAN024AY9; Start 346; Stop 370
catgttgaagctggattacgaactt

SEQ ID NO: 270076 - DNA, 25 bp, Artificial
  probe
  misc_feature (1)..(25): SEQ ID NO: 677; WAN024AY9; Start 277; Stop 301
gttcacggtgatactactacgacat

SEQ ID NO: 270077 - DNA, 25 bp, Artificial
  probe
  misc_feature (1)..(25): SEQ ID NO: 677; WAN024AY9; Start 1040; Stop 1064
gaaatggtgatgctagtaaacagat

SEQ ID NO: 270078 - DNA, 25 bp, Artificial
  probe
  misc_feature (1)..(25): SEQ ID NO: 677; WAN024AY9; Start 283; Stop 307
ggtgatactactacgacatatgcag

SEQ ID NO: 270079 - DNA, 25 bp, Artificial
  probe
  misc_feature (1)..(25): SEQ ID NO: 677; WAN024AY9; Start 280; Stop 304
cacggtgatactactacgacatatg

SEQ ID NO: 270080 - DNA, 25 bp, Artificial
  probe
  misc_feature (1)..(25): SEQ ID NO: 678; WAN024DAC; Start 247; Stop 271
cctgctatggatgatgacgattatc

SEQ ID NO: 270081 - DNA, 25 bp, Artificial
  probe
  misc_feature (1)..(25): SEQ ID NO: 678; WAN024DAC; Start 92; Stop 116
ttctctattctattcatgctggtgg

SEQ ID NO: 270082 - DNA, 25 bp, Artificial
  probe
  misc_feature (1)..(25): SEQ ID NO: 678; WAN024DAC; Start 90; Stop 114
tgttctctattctattcatgctggt

SEQ ID NO: 270083 - DNA, 25 bp, Artificial
  probe
  misc_feature (1)..(25): SEQ ID NO: 678; WAN024DAC; Start 91; Stop 115
gttctctattctattcatgctggtg

SEQ ID NO: 270084 - DNA, 25 bp, Artificial
  probe
  misc_feature (1)..(25): SEQ ID NO: 678; WAN024DAC; Start 89; Stop 113
ctgttctctattctattcatgctgg

SEQ ID NO: 270085 - DNA, 25 bp, Artificial
  probe
  misc_feature (1)..(25): SEQ ID NO: 678; WAN024DAC; Start 138; Stop 162
cttgttagaagttctggaagccttg

SEQ ID NO: 270086 - DNA, 25 bp, Artificial
  probe
  misc_feature (1)..(25): SEQ ID NO: 678; WAN024DAC; Start 137; Stop 161
tcttgttagaagttctggaagcctt

SEQ ID NO: 270087 - DNA, 25 bp, Artificial
  probe
  misc_feature (1)..(25): SEQ ID NO: 678; WAN024DAC; Start 88; Stop 112
tctgttctctattctattcatgctg

SEQ ID NO: 270088 - DNA, 25 bp, Artificial
  probe
  misc_feature (1)..(25): SEQ ID NO: 678; WAN024DAC; Start 87; Stop 111
gtctgttctctattctattcatgct

SEQ ID NO: 270089 - DNA, 25 bp, Artificial
  probe
  misc_feature (1)..(25): SEQ ID NO: 678; WAN024DAC; Start 86; Stop 110
agtctgttctctattctattcatgc

SEQ ID NO: 270090 - DNA, 25 bp, Artificial
  probe
  misc_feature (1)..(25): SEQ ID NO: 678; WAN024DAC; Start 246; Stop 270
tcctgctatggatgatgacgattat

SEQ ID NO: 270091 - DNA, 25 bp, Artificial
  probe
  misc_feature (1)..(25): SEQ ID NO: 678; WAN024DAC; Start 245; Stop 269
ttcctgctatggatgatgacgatta

SEQ ID NO: 270092 - DNA, 25 bp, Artificial
  probe
  misc_feature (1)..(25): SEQ ID NO: 678; WAN024DAC; Start 136; Stop 160
ctcttgttagaagttctggaagcct

SEQ ID NO: 270093 - DNA, 25 bp, Artificial
  probe
  misc_feature (1)..(25): SEQ ID NO: 678; WAN024DAC; Start 135; Stop 159
tctcttgttagaagttctggaagcc

SEQ ID NO: 270094 - DNA, 25 bp, Artificial
  probe
  misc_feature (1)..(25): SEQ ID NO: 678; WAN024DAC; Start 93; Stop 117
tctctattctattcatgctggtggc

SEQ ID NO: 270095 - DNA, 25 bp, Artificial
  probe
  misc_feature (1)..(25): SEQ ID NO: 678; WAN024DAC; Start 640; Stop 664
agagatgatgtactggatgtgacag

SEQ ID NO: 270096 - DNA, 25 bp, Artificial
  probe
  misc_feature (1)..(25): SEQ ID NO: 678; WAN024DAC; Start 84; Stop 108
ggagtctgttctctattctattcat

SEQ ID NO: 270097 - DNA, 25 bp, Artificial
  probe
  misc_feature (1)..(25): SEQ ID NO: 678; WAN024DAC; Start 134; Stop 158
ttctcttgttagaagttctggaagc

SEQ ID NO: 270098 - DNA, 25 bp, Artificial
  probe
  misc_feature (1)..(25): SEQ ID NO: 678; WAN024DAC; Start 82; Stop 106
cgggagtctgttctctattctattc

SEQ ID NO: 270099 - DNA, 25 bp, Artificial
  probe
  misc_feature (1)..(25): SEQ ID NO: 678; WAN024DAC; Start 79; Stop 103
ttacgggagtctgttctctattcta

SEQ ID NO: 270100 - DNA, 25 bp, Artificial
  probe
  misc_feature (1)..(25): SEQ ID NO: 678; WAN024DAC; Start 80; Stop 104
tacgggagtctgttctctattctat

SEQ ID NO: 270101 - DNA, 25 bp, Artificial
  probe
  misc_feature (1)..(25): SEQ ID NO: 678; WAN024DAC; Start 75; Stop 99
tagtttacgggagtctgttctctat

SEQ ID NO: 270102 - DNA, 25 bp, Artificial
  probe
  misc_feature (1)..(25): SEQ ID NO: 678; WAN024DAC; Start 560; Stop 584
ctattatagctgaattgtcacctga

SEQ ID NO: 270103 - DNA, 25 bp, Artificial
  probe
  misc_feature (1)..(25): SEQ ID NO: 678; WAN024DAC; Start 81; Stop 105
acgggagtctgttctctattctatt

SEQ ID NO: 270104 - DNA, 25 bp, Artificial
  probe
  misc_feature (1)..(25): SEQ ID NO: 678; WAN024DAC; Start 78; Stop 102
tttacgggagtctgttctctattct

SEQ ID NO: 270105 - DNA, 25 bp, Artificial
  probe
  misc_feature (1)..(25): SEQ ID NO: 678; WAN024DAC; Start 77; Stop 101
gtttacgggagtctgttctctattc

SEQ ID NO: 270106 - DNA, 25 bp, Artificial
  probe
  misc_feature (1)..(25): SEQ ID NO: 678; WAN024DAC; Start 519; Stop 543
taagactgggaagttactagcctat

SEQ ID NO: 270107 - DNA, 25 bp, Artificial
  probe
  misc_feature (1)..(25): SEQ ID NO: 678; WAN024DAC; Start 518; Stop 542
ataagactgggaagttactagccta

SEQ ID NO: 270108 - DNA, 25 bp, Artificial
  probe
  misc_feature (1)..(25): SEQ ID NO: 678; WAN024DAC; Start 83; Stop 107
gggagtctgttctctattctattca

SEQ ID NO: 270109 - DNA, 25 bp, Artificial
  probe
  misc_feature (1)..(25): SEQ ID NO: 678; WAN024DAC; Start 76; Stop 100
agtttacgggagtctgttctctatt

SEQ ID NO: 270110 - DNA, 25 bp, Artificial
  probe
  misc_feature (1)..(25): SEQ ID NO: 678; WAN024DAC; Start 517; Stop 541
aataagactgggaagttactagcct

SEQ ID NO: 270111 - DNA, 25 bp, Artificial
  probe
  misc_feature (1)..(25): SEQ ID NO: 678; WAN024DAC; Start 516; Stop 540
caataagactgggaagttactagcc

SEQ ID NO: 270112 - DNA, 25 bp, Artificial
  probe
  misc_feature (1)..(25): SEQ ID NO: 678; WAN024DAC; Start 529; Stop 553
aagttactagcctatcccttccaag

SEQ ID NO: 270113 - DNA, 25 bp, Artificial
  probe
  misc_feature (1)..(25): SEQ ID NO: 679; WAN024CDG; Start 330; Stop 354
caatgtcctgcttcctagtcttatc

SEQ ID NO: 270114 - DNA, 25 bp, Artificial
  probe
  misc_feature (1)..(25): SEQ ID NO: 679; WAN024CDG; Start 329; Stop 353
tcaatgtcctgcttcctagtcttat

SEQ ID NO: 270115 - DNA, 25 bp, Artificial
  probe
  misc_feature (1)..(25): SEQ ID NO: 679; WAN024CDG; Start 328; Stop 352
atcaatgtcctgcttcctagtctta

SEQ ID NO: 270116 - DNA, 25 bp, Artificial
  probe
  misc_feature (1)..(25): SEQ ID NO: 679; WAN024CDG; Start 104; Stop 128
aaggtctggaggtagaagttagttc

SEQ ID NO: 270117 - DNA, 25 bp, Artificial
  probe
  misc_feature (1)..(25): SEQ ID NO: 679; WAN024CDG; Start 340; Stop 364
cttcctagtcttatccaagccaatc

SEQ ID NO: 270118 - DNA, 25 bp, Artificial
  probe
  misc_feature (1)..(25): SEQ ID NO: 679; WAN024CDG; Start 103; Stop 127
caaggtctggaggtagaagttagtt

SEQ ID NO: 270119 - DNA, 25 bp, Artificial
  probe
  misc_feature (1)..(25): SEQ ID NO: 679; WAN024CDG; Start 344; Stop 368
ctagtcttatccaagccaatcaacc

SEQ ID NO: 270120 - DNA, 25 bp, Artificial
  probe
  misc_feature (1)..(25): SEQ ID NO: 679; WAN024CDG; Start 343; Stop 367
cctagtcttatccaagccaatcaac

SEQ ID NO: 270121 - DNA, 25 bp, Artificial
  probe
  misc_feature (1)..(25): SEQ ID NO: 679; WAN024CDG; Start 342; Stop 366
tcctagtcttatccaagccaatcaa

SEQ ID NO: 270122 - DNA, 25 bp, Artificial
  probe
  misc_feature (1)..(25): SEQ ID NO: 679; WAN024CDG; Start 341; Stop 365
ttcctagtcttatccaagccaatca

SEQ ID NO: 270123 - DNA, 25 bp, Artificial
  probe
  misc_feature (1)..(25): SEQ ID NO: 679; WAN024CDG; Start 345; Stop 369
tagtcttatccaagccaatcaacca

SEQ ID NO: 270124 - DNA, 25 bp, Artificial
  probe
  misc_feature (1)..(25): SEQ ID NO: 679; WAN024CDG; Start 331; Stop 355
aatgtcctgcttcctagtcttatcc

SEQ ID NO: 270125 - DNA, 25 bp, Artificial
  probe
  misc_feature (1)..(25): SEQ ID NO: 679; WAN024CDG; Start 116; Stop 140
tagaagttagttcgcttggtgtctt

SEQ ID NO: 270126 - DNA, 25 bp, Artificial
  probe
  misc_feature (1)..(25): SEQ ID NO: 679; WAN024CDG; Start 283; Stop 307
ctgctctatctaggaaccttgatgg

SEQ ID NO: 270127 - DNA, 25 bp, Artificial
  probe
  misc_feature (1)..(25): SEQ ID NO: 679; WAN024CDG; Start 257; Stop 281
cacttattcgactaatcaatctgcc

SEQ ID NO: 270128 - DNA, 25 bp, Artificial
  probe
  misc_feature (1)..(25): SEQ ID NO: 679; WAN024CDG; Start 253; Stop 277
ggctcacttattcgactaatcaatc

SEQ ID NO: 270129 - DNA, 25 bp, Artificial
  probe
  misc_feature (1)..(25): SEQ ID NO: 679; WAN024CDG; Start 346; Stop 370
agtcttatccaagccaatcaaccaa

SEQ ID NO: 270130 - DNA, 25 bp, Artificial
  probe
  misc_feature (1)..(25): SEQ ID NO: 679; WAN024CDG; Start 334; Stop 358
gtcctgcttcctagtcttatccaag

SEQ ID NO: 270131 - DNA, 25 bp, Artificial
  probe
  misc_feature (1)..(25): SEQ ID NO: 679; WAN024CDG; Start 228; Stop 252
ctacagcctcttcttcttgaccatc

SEQ ID NO: 270132 - DNA, 25 bp, Artificial
  probe
  misc_feature (1)..(25): SEQ ID NO: 679; WAN024CDG; Start 327; Stop 351
catcaatgtcctgcttcctagtctt

SEQ ID NO: 270133 - DNA, 25 bp, Artificial
  probe
  misc_feature (1)..(25): SEQ ID NO: 679; WAN024CDG; Start 256; Stop 280
tcacttattcgactaatcaatctgc

SEQ ID NO: 270134 - DNA, 25 bp, Artificial
  probe
  misc_feature (1)..(25): SEQ ID NO: 679; WAN024CDG; Start 252; Stop 276
cggctcacttattcgactaatcaat

SEQ ID NO: 270135 - DNA, 25 bp, Artificial
  probe
  misc_feature (1)..(25): SEQ ID NO: 679; WAN024CDG; Start 218; Stop 242
atctcttcacctacagcctcttctt

SEQ ID NO: 270136 - DNA, 25 bp, Artificial
  probe
  misc_feature (1)..(25): SEQ ID NO: 679; WAN024CDG; Start 115; Stop 139
gtagaagttagttcgcttggtgtct

SEQ ID NO: 270137 - DNA, 25 bp, Artificial
  probe
  misc_feature (1)..(25): SEQ ID NO: 679; WAN024CDG; Start 730; Stop 754
atcttatctctgattagcattcctt

SEQ ID NO: 270138 - DNA, 25 bp, Artificial
  probe
  misc_feature (1)..(25): SEQ ID NO: 679; WAN024CDG; Start 254; Stop 278
gctcacttattcgactaatcaatct

SEQ ID NO: 270139 - DNA, 25 bp, Artificial
  probe
  misc_feature (1)..(25): SEQ ID NO: 679; WAN024CDG; Start 332; Stop 356
atgtcctgcttcctagtcttatcca

SEQ ID NO: 270140 - DNA, 25 bp, Artificial
  probe
  misc_feature (1)..(25): SEQ ID NO: 679; WAN024CDG; Start 222; Stop 246
cttcacctacagcctcttcttcttg

SEQ ID NO: 270141 - DNA, 25 bp, Artificial
  probe
  misc_feature (1)..(25): SEQ ID NO: 679; WAN024CDG; Start 221; Stop 245
tcttcacctacagcctcttcttctt

SEQ ID NO: 270142 - DNA, 25 bp, Artificial
  probe
  misc_feature (1)..(25): SEQ ID NO: 679; WAN024CDG; Start 526; Stop 550
ctcccaaatcaccgctataatcata

SEQ ID NO: 270143 - DNA, 25 bp, Artificial
  probe
  misc_feature (1)..(25): SEQ ID NO: 679; WAN024CDG; Start 31; Stop 55
ggtattatcctgattggtgtttcct

SEQ ID NO: 270144 - DNA, 25 bp, Artificial
  probe
  misc_feature (1)..(25): SEQ ID NO: 679; WAN024CDG; Start 478; Stop 502
cttatccttctcctcacgttactct

SEQ ID NO: 270145 - DNA, 25 bp, Artificial
  probe
  misc_feature (1)..(25): SEQ ID NO: 679; WAN024CDG; Start 333; Stop 357
tgtcctgcttcctagtcttatccaa

SEQ ID NO: 270146 - DNA, 25 bp, Artificial
  probe
  misc_feature (1)..(25): SEQ ID NO: 680; WAN024FVR; Start 240; Stop 264
gattgtctgtctcatcttggtatca

SEQ ID NO: 270147 - DNA, 25 bp, Artificial
  probe
  misc_feature (1)..(25): SEQ ID NO: 680; WAN024FVR; Start 239; Stop 263
ggattgtctgtctcatcttggtatc

SEQ ID NO: 270148 - DNA, 25 bp, Artificial
  probe
  misc_feature (1)..(25): SEQ ID NO: 680; WAN024FVR; Start 410; Stop 434
ccaatcgtatcaatgaccaaggtaa

SEQ ID NO: 270149 - DNA, 25 bp, Artificial
  probe
  misc_feature (1)..(25): SEQ ID NO: 680; WAN024FVR; Start 409; Stop 433
tccaatcgtatcaatgaccaaggta

SEQ ID NO: 270150 - DNA, 25 bp, Artificial
  probe
  misc_feature (1)..(25): SEQ ID NO: 680; WAN024FVR; Start 490; Stop 514
tacttaaccttgactgccatcatct

SEQ ID NO: 270151 - DNA, 25 bp, Artificial
  probe
  misc_feature (1)..(25): SEQ ID NO: 680; WAN024FVR; Start 241; Stop 265
attgtctgtctcatcttggtatcag

SEQ ID NO: 270152 - DNA, 25 bp, Artificial
  probe
  misc_feature (1)..(25): SEQ ID NO: 680; WAN024FVR; Start 246; Stop 270
ctgtctcatcttggtatcagaagga

SEQ ID NO: 270153 - DNA, 25 bp, Artificial
  probe
  misc_feature (1)..(25): SEQ ID NO: 680; WAN024FVR; Start 406; Stop 430
ttgtccaatcgtatcaatgaccaag

SEQ ID NO: 270154 - DNA, 25 bp, Artificial
  probe
  misc_feature (1)..(25): SEQ ID NO: 680; WAN024FVR; Start 489; Stop 513
gtacttaaccttgactgccatcatc

SEQ ID NO: 270155 - DNA, 25 bp, Artificial
  probe
  misc_feature (1)..(25): SEQ ID NO: 680; WAN024FVR; Start 247; Stop 271
tgtctcatcttggtatcagaaggac

SEQ ID NO: 270156 - DNA, 25 bp, Artificial
  probe
  misc_feature (1)..(25): SEQ ID NO: 680; WAN024FVR; Start 405; Stop 429
gttgtccaatcgtatcaatgaccaa

SEQ ID NO: 270157 - DNA, 25 bp, Artificial
  probe
  misc_feature (1)..(25): SEQ ID NO: 680; WAN024FVR; Start 432; Stop 456
taaaccagaagaatcccactttgaa

SEQ ID NO: 270158 - DNA, 25 bp, Artificial
  probe
  misc_feature (1)..(25): SEQ ID NO: 680; WAN024FVR; Start 462; Stop 486
gaaattatctgttcttgactggctc

SEQ ID NO: 270159 - DNA, 25 bp, Artificial
  probe
  misc_feature (1)..(25): SEQ ID NO: 680; WAN024FVR; Start 421; Stop 445
aatgaccaaggtaaaccagaagaat

SEQ ID NO: 270160 - DNA, 25 bp, Artificial
  probe
  misc_feature (1)..(25): SEQ ID NO: 680; WAN024FVR; Start 417; Stop 441
tatcaatgaccaaggtaaaccagaa

SEQ ID NO: 270161 - DNA, 25 bp, Artificial
  probe
  misc_feature (1)..(25): SEQ ID NO: 680; WAN024FVR; Start 431; Stop 455
gtaaaccagaagaatcccactttga

SEQ ID NO: 270162 - DNA, 25 bp, Artificial
  probe
  misc_feature (1)..(25): SEQ ID NO: 680; WAN024FVR; Start 416; Stop 440
gtatcaatgaccaaggtaaaccaga

SEQ ID NO: 270163 - DNA, 25 bp, Artificial
  probe
  misc_feature (1)..(25): SEQ ID NO: 680; WAN024FVR; Start 412; Stop 436
aatcgtatcaatgaccaaggtaaac

SEQ ID NO: 270164 - DNA, 25 bp, Artificial
  probe
  misc_feature (1)..(25): SEQ ID NO: 680; WAN024FVR; Start 411; Stop 435
caatcgtatcaatgaccaaggtaaa

SEQ ID NO: 270165 - DNA, 25 bp, Artificial
  probe
  misc_feature (1)..(25): SEQ ID NO: 680; WAN024FVR; Start 422; Stop 446
atgaccaaggtaaaccagaagaatc

SEQ ID NO: 270166 - DNA, 25 bp, Artificial
  probe
  misc_feature (1)..(25): SEQ ID NO: 680; WAN024FVR; Start 491; Stop 515
acttaaccttgactgccatcatctg

SEQ ID NO: 270167 - DNA, 25 bp, Artificial
  probe
  misc_feature (1)..(25): SEQ ID NO: 680; WAN024FVR; Start 418; Stop 442
atcaatgaccaaggtaaaccagaag

SEQ ID NO: 270168 - DNA, 25 bp, Artificial
  probe
  misc_feature (1)..(25): SEQ ID NO: 680; WAN024FVR; Start 413; Stop 437
atcgtatcaatgaccaaggtaaacc

SEQ ID NO: 270169 - DNA, 25 bp, Artificial
  probe
  misc_feature (1)..(25): SEQ ID NO: 680; WAN024FVR; Start 560; Stop 584
ctttccgtgatagtgttacctgttg

SEQ ID NO: 270170 - DNA, 25 bp, Artificial
  probe
  misc_feature (1)..(25): SEQ ID NO: 680; WAN024FVR; Start 420; Stop 444
caatgaccaaggtaaaccagaagaa

SEQ ID NO: 270171 - DNA, 25 bp, Artificial
  probe
  misc_feature (1)..(25): SEQ ID NO: 680; WAN024FVR; Start 463; Stop 487
aaattatctgttcttgactggctca

SEQ ID NO: 270172 - DNA, 25 bp, Artificial
  probe
  misc_feature (1)..(25): SEQ ID NO: 680; WAN024FVR; Start 248; Stop 272
gtctcatcttggtatcagaaggacg

SEQ ID NO: 270173 - DNA, 25 bp, Artificial
  probe
  misc_feature (1)..(25): SEQ ID NO: 680; WAN024FVR; Start 433; Stop 457
aaaccagaagaatcccactttgaag

SEQ ID NO: 270174 - DNA, 25 bp, Artificial
  probe
  misc_feature (1)..(25): SEQ ID NO: 680; WAN024FVR; Start 238; Stop 262
gggattgtctgtctcatcttggtat

SEQ ID NO: 270175 - DNA, 25 bp, Artificial
  probe
  misc_feature (1)..(25): SEQ ID NO: 680; WAN024FVR; Start 387; Stop 411
gattggtctctgtacttggttgtcc

SEQ ID NO: 270176 - DNA, 25 bp, Artificial
  probe
  misc_feature (1)..(25): SEQ ID NO: 680; WAN024FVR; Start 162; Stop 186
aagtgttcccttgatcttaaagttc

SEQ ID NO: 270177 - DNA, 25 bp, Artificial
  probe
  misc_feature (1)..(25): SEQ ID NO: 680; WAN024FVR; Start 145; Stop 169
tatctcatcgccttgtcaagtgttc

SEQ ID NO: 270178 - DNA, 25 bp, Artificial
  probe
  misc_feature (1)..(25): SEQ ID NO: 680; WAN024FVR; Start 407; Stop 431
tgtccaatcgtatcaatgaccaagg

SEQ ID NO: 270179 - DNA, 25 bp, Artificial
  probe
  misc_feature (1)..(25): SEQ ID NO: 681; WAN024GF7; Start 39; Stop 63
gattgaccttggtggaacttctatc

SEQ ID NO: 270180 - DNA, 25 bp, Artificial
  probe
  misc_feature (1)..(25): SEQ ID NO: 681; WAN024GF7; Start 40; Stop 64
attgaccttggtggaacttctatca

SEQ ID NO: 270181 - DNA, 25 bp, Artificial
  probe
  misc_feature (1)..(25): SEQ ID NO: 681; WAN024GF7; Start 947; Stop 971
ttatcggagcagcatcacttgtatt

SEQ ID NO: 270182 - DNA, 25 bp, Artificial
  probe
  misc_feature (1)..(25): SEQ ID NO: 681; WAN024GF7; Start 38; Stop 62
ggattgaccttggtggaacttctat

SEQ ID NO: 270183 - DNA, 25 bp, Artificial
  probe
  misc_feature (1)..(25): SEQ ID NO: 681; WAN024GF7; Start 146; Stop 170
tcgttgatgatatgattgagtctat

SEQ ID NO: 270184 - DNA, 25 bp, Artificial
  probe
  misc_feature (1)..(25): SEQ ID NO: 681; WAN024GF7; Start 145; Stop 169
atcgttgatgatatgattgagtcta

SEQ ID NO: 270185 - DNA, 25 bp, Artificial
  probe
  misc_feature (1)..(25): SEQ ID NO: 681; WAN024GF7; Start 786; Stop 810
ttcaatcctaaacccatcaacaatc

SEQ ID NO: 270186 - DNA, 25 bp, Artificial
  probe
  misc_feature (1)..(25): SEQ ID NO: 681; WAN024GF7; Start 948; Stop 972
tatcggagcagcatcacttgtattg

SEQ ID NO: 270187 - DNA, 25 bp, Artificial
  probe
  misc_feature (1)..(25): SEQ ID NO: 681; WAN024GF7; Start 946; Stop 970
gttatcggagcagcatcacttgtat

SEQ ID NO: 270188 - DNA, 25 bp, Artificial
  probe
  misc_feature (1)..(25): SEQ ID NO: 681; WAN024GF7; Start 785; Stop 809
gttcaatcctaaacccatcaacaat

SEQ ID NO: 270189 - DNA, 25 bp, Artificial
  probe
  misc_feature (1)..(25): SEQ ID NO: 681; WAN024GF7; Start 71; Stop 95
caatcttaacaacagcaggagaaat

SEQ ID NO: 270190 - DNA, 25 bp, Artificial
  probe
  misc_feature (1)..(25): SEQ ID NO: 681; WAN024GF7; Start 72; Stop 96
aatcttaacaacagcaggagaaatc

SEQ ID NO: 270191 - DNA, 25 bp, Artificial
  probe
  misc_feature (1)..(25): SEQ ID NO: 681; WAN024GF7; Start 789; Stop 813
aatcctaaacccatcaacaatcgtc

SEQ ID NO: 270192 - DNA, 25 bp, Artificial
  probe
  misc_feature (1)..(25): SEQ ID NO: 681; WAN024GF7; Start 787; Stop 811
tcaatcctaaacccatcaacaatcg

SEQ ID NO: 270193 - DNA, 25 bp, Artificial
  probe
  misc_feature (1)..(25): SEQ ID NO: 681; WAN024GF7; Start 147; Stop 171
cgttgatgatatgattgagtctatt

SEQ ID NO: 270194 - DNA, 25 bp, Artificial
  probe
  misc_feature (1)..(25): SEQ ID NO: 681; WAN024GF7; Start 144; Stop 168
tatcgttgatgatatgattgagtct

SEQ ID NO: 270195 - DNA, 25 bp, Artificial
  probe
  misc_feature (1)..(25): SEQ ID NO: 681; WAN024GF7; Start 27; Stop 51
aaagattattgggattgaccttggt

SEQ ID NO: 270196 - DNA, 25 bp, Artificial
  probe
  misc_feature (1)..(25): SEQ ID NO: 681; WAN024GF7; Start 788; Stop 812
caatcctaaacccatcaacaatcgt

SEQ ID NO: 270197 - DNA, 25 bp, Artificial
  probe
  misc_feature (1)..(25): SEQ ID NO: 681; WAN024GF7; Start 44; Stop 68
accttggtggaacttctatcaaatt

SEQ ID NO: 270198 - DNA, 25 bp, Artificial
  probe
  misc_feature (1)..(25): SEQ ID NO: 681; WAN024GF7; Start 28; Stop 52
aagattattgggattgaccttggtg

SEQ ID NO: 270199 - DNA, 25 bp, Artificial
  probe
  misc_feature (1)..(25): SEQ ID NO: 681; WAN024GF7; Start 43; Stop 67
gaccttggtggaacttctatcaaat

SEQ ID NO: 270200 - DNA, 25 bp, Artificial
  probe
  misc_feature (1)..(25): SEQ ID NO: 681; WAN024GF7; Start 792; Stop 816
cctaaacccatcaacaatcgtcatc

SEQ ID NO: 270201 - DNA, 25 bp, Artificial
  probe
  misc_feature (1)..(25): SEQ ID NO: 681; WAN024GF7; Start 168; Stop 192
tattcaacatcgtttggacttgctt

SEQ ID NO: 270202 - DNA, 25 bp, Artificial
  probe
  misc_feature (1)..(25): SEQ ID NO: 681; WAN024GF7; Start 165; Stop 189
gtctattcaacatcgtttggacttg

SEQ ID NO: 270203 - DNA, 25 bp, Artificial
  probe
  misc_feature (1)..(25): SEQ ID NO: 681; WAN024GF7; Start 791; Stop 815
tcctaaacccatcaacaatcgtcat

SEQ ID NO: 270204 - DNA, 25 bp, Artificial
  probe
  misc_feature (1)..(25): SEQ ID NO: 681; WAN024GF7; Start 790; Stop 814
atcctaaacccatcaacaatcgtca

SEQ ID NO: 270205 - DNA, 25 bp, Artificial
  probe
  misc_feature (1)..(25): SEQ ID NO: 681; WAN024GF7; Start 167; Stop 191
ctattcaacatcgtttggacttgct

SEQ ID NO: 270206 - DNA, 25 bp, Artificial
  probe
  misc_feature (1)..(25): SEQ ID NO: 681; WAN024GF7; Start 166; Stop 190
tctattcaacatcgtttggacttgc

SEQ ID NO: 270207 - DNA, 25 bp, Artificial
  probe
  misc_feature (1)..(25): SEQ ID NO: 681; WAN024GF7; Start 927; Stop 951
tctaggaaatgacgctggagttatc

SEQ ID NO: 270208 - DNA, 25 bp, Artificial
  probe
  misc_feature (1)..(25): SEQ ID NO: 681; WAN024GF7; Start 793; Stop 817
ctaaacccatcaacaatcgtcatcg

SEQ ID NO: 270209 - DNA, 25 bp, Artificial
  probe
  misc_feature (1)..(25): SEQ ID NO: 681; WAN024GF7; Start 70; Stop 94
gcaatcttaacaacagcaggagaaa

SEQ ID NO: 270210 - DNA, 25 bp, Artificial
  probe
  misc_feature (1)..(25): SEQ ID NO: 681; WAN024GF7; Start 162; Stop 186
tgagtctattcaacatcgtttggac

SEQ ID NO: 270211 - DNA, 25 bp, Artificial
  probe
  misc_feature (1)..(25): SEQ ID NO: 681; WAN024GF7; Start 31; Stop 55
attattgggattgaccttggtggaa

SEQ ID NO: 270212 - DNA, 25 bp, Artificial
  probe
  misc_feature (1)..(25): SEQ ID NO: 682; WAN024AW4; Start 518; Stop 542
tgagtctgcctagtctgttagatat

SEQ ID NO: 270213 - DNA, 25 bp, Artificial
  probe
  misc_feature (1)..(25): SEQ ID NO: 682; WAN024AW4; Start 517; Stop 541
ttgagtctgcctagtctgttagata

SEQ ID NO: 270214 - DNA, 25 bp, Artificial
  probe
  misc_feature (1)..(25): SEQ ID NO: 682; WAN024AW4; Start 362; Stop 386
ttgctgagctaggtatctatgtaac

SEQ ID NO: 270215 - DNA, 25 bp, Artificial
  probe
  misc_feature (1)..(25): SEQ ID NO: 682; WAN024AW4; Start 258; Stop 282
attagtggtagtgctccatatctct

SEQ ID NO: 270216 - DNA, 25 bp, Artificial
  probe
  misc_feature (1)..(25): SEQ ID NO: 682; WAN024AW4; Start 259; Stop 283
ttagtggtagtgctccatatctctt

SEQ ID NO: 270217 - DNA, 25 bp, Artificial
  probe
  misc_feature (1)..(25): SEQ ID NO: 682; WAN024AW4; Start 253; Stop 277
acagtattagtggtagtgctccata

SEQ ID NO: 270218 - DNA, 25 bp, Artificial
  probe
  misc_feature (1)..(25): SEQ ID NO: 682; WAN024AW4; Start 254; Stop 278
cagtattagtggtagtgctccatat

SEQ ID NO: 270219 - DNA, 25 bp, Artificial
  probe
  misc_feature (1)..(25): SEQ ID NO: 682; WAN024AW4; Start 256; Stop 280
gtattagtggtagtgctccatatct

SEQ ID NO: 270220 - DNA, 25 bp, Artificial
  probe
  misc_feature (1)..(25): SEQ ID NO: 682; WAN024AW4; Start 255; Stop 279
agtattagtggtagtgctccatatc

SEQ ID NO: 270221 - DNA, 25 bp, Artificial
  probe
  misc_feature (1)..(25): SEQ ID NO: 682; WAN024AW4; Start 472; Stop 496
cttgatttgcttcttccttccattt

SEQ ID NO: 270222 - DNA, 25 bp, Artificial
  probe
  misc_feature (1)..(25): SEQ ID NO: 682; WAN024AW4; Start 257; Stop 281
tattagtggtagtgctccatatctc

SEQ ID NO: 270223 - DNA, 25 bp, Artificial
  probe
  misc_feature (1)..(25): SEQ ID NO: 682; WAN024AW4; Start 431; Stop 455
gattacttcaacacgccttctttaa

SEQ ID NO: 270224 - DNA, 25 bp, Artificial
  probe
  misc_feature (1)..(25): SEQ ID NO: 682; WAN024AW4; Start 595; Stop 619
aagagtatttatccatcctatgcgg

SEQ ID NO: 270225 - DNA, 25 bp, Artificial
  probe
  misc_feature (1)..(25): SEQ ID NO: 682; WAN024AW4; Start 329; Stop 353
ggaacgtattgattggttatagtgg

SEQ ID NO: 270226 - DNA, 25 bp, Artificial
  probe
  misc_feature (1)..(25): SEQ ID NO: 682; WAN024AW4; Start 432; Stop 456
attacttcaacacgccttctttaag

SEQ ID NO: 270227 - DNA, 25 bp, Artificial
  probe
  misc_feature (1)..(25): SEQ ID NO: 682; WAN024AW4; Start 594; Stop 618
caagagtatttatccatcctatgcg

SEQ ID NO: 270228 - DNA, 25 bp, Artificial
  probe
  misc_feature (1)..(25): SEQ ID NO: 682; WAN024AW4; Start 325; Stop 349
ggttggaacgtattgattggttata

SEQ ID NO: 270229 - DNA, 25 bp, Artificial
  probe
  misc_feature (1)..(25): SEQ ID NO: 682; WAN024AW4; Start 252; Stop 276
gacagtattagtggtagtgctccat

SEQ ID NO: 270230 - DNA, 25 bp, Artificial
  probe
  misc_feature (1)..(25): SEQ ID NO: 682; WAN024AW4; Start 597; Stop 621
gagtatttatccatcctatgcggtg

SEQ ID NO: 270231 - DNA, 25 bp, Artificial
  probe
  misc_feature (1)..(25): SEQ ID NO: 682; WAN024AW4; Start 596; Stop 620
agagtatttatccatcctatgcggt

SEQ ID NO: 270232 - DNA, 25 bp, Artificial
  probe
  misc_feature (1)..(25): SEQ ID NO: 682; WAN024AW4; Start 430; Stop 454
ggattacttcaacacgccttcttta

SEQ ID NO: 270233 - DNA, 25 bp, Artificial
  probe
  misc_feature (1)..(25): SEQ ID NO: 682; WAN024AW4; Start 519; Stop 543
gagtctgcctagtctgttagatatc

SEQ ID NO: 270234 - DNA, 25 bp, Artificial
  probe
  misc_feature (1)..(25): SEQ ID NO: 682; WAN024AW4; Start 328; Stop 352
tggaacgtattgattggttatagtg

SEQ ID NO: 270235 - DNA, 25 bp, Artificial
  probe
  misc_feature (1)..(25): SEQ ID NO: 682; WAN024AW4; Start 593; Stop 617
ccaagagtatttatccatcctatgc

SEQ ID NO: 270236 - DNA, 25 bp, Artificial
  probe
  misc_feature (1)..(25): SEQ ID NO: 682; WAN024AW4; Start 148; Stop 172
ttgagtttactatttagcggagtca

SEQ ID NO: 270237 - DNA, 25 bp, Artificial
  probe
  misc_feature (1)..(25): SEQ ID NO: 682; WAN024AW4; Start 149; Stop 173
tgagtttactatttagcggagtcat

SEQ ID NO: 270238 - DNA, 25 bp, Artificial
  probe
  misc_feature (1)..(25): SEQ ID NO: 682; WAN024AW4; Start 146; Stop 170
tcttgagtttactatttagcggagt

SEQ ID NO: 270239 - DNA, 25 bp, Artificial
  probe
  misc_feature (1)..(25): SEQ ID NO: 682; WAN024AW4; Start 147; Stop 171
cttgagtttactatttagcggagtc

SEQ ID NO: 270240 - DNA, 25 bp, Artificial
  probe
  misc_feature (1)..(25): SEQ ID NO: 682; WAN024AW4; Start 145; Stop 169
atcttgagtttactatttagcggag

SEQ ID NO: 270241 - DNA, 25 bp, Artificial
  probe
  misc_feature (1)..(25): SEQ ID NO: 682; WAN024AW4; Start 471; Stop 495
ccttgatttgcttcttccttccatt

SEQ ID NO: 270242 - DNA, 25 bp, Artificial
  probe
  misc_feature (1)..(25): SEQ ID NO: 682; WAN024AW4; Start 516; Stop 540
tttgagtctgcctagtctgttagat

SEQ ID NO: 270243 - DNA, 25 bp, Artificial
  probe
  misc_feature (1)..(25): SEQ ID NO: 682; WAN024AW4; Start 327; Stop 351
ttggaacgtattgattggttatagt

SEQ ID NO: 270244 - DNA, 25 bp, Artificial
  probe
  misc_feature (1)..(25): SEQ ID NO: 682; WAN024AW4; Start 326; Stop 350
gttggaacgtattgattggttatag

SEQ ID NO: 270245 - DNA, 25 bp, Artificial
  probe
  misc_feature (1)..(25): SEQ ID NO: 683; WAN024AUL; Start 246; Stop 270
cgctgcaattaacagagctattgaa

SEQ ID NO: 270246 - DNA, 25 bp, Artificial
  probe
  misc_feature (1)..(25): SEQ ID NO: 683; WAN024AUL; Start 736; Stop 760
aagaaggactttgtcttaatcacaa

SEQ ID NO: 270247 - DNA, 25 bp, Artificial
  probe
  misc_feature (1)..(25): SEQ ID NO: 683; WAN024AUL; Start 735; Stop 759
taagaaggactttgtcttaatcaca

SEQ ID NO: 270248 - DNA, 25 bp, Artificial
  probe
  misc_feature (1)..(25): SEQ ID NO: 683; WAN024AUL; Start 734; Stop 758
ctaagaaggactttgtcttaatcac

SEQ ID NO: 270249 - DNA, 25 bp, Artificial
  probe
  misc_feature (1)..(25): SEQ ID NO: 683; WAN024AUL; Start 733; Stop 757
tctaagaaggactttgtcttaatca

SEQ ID NO: 270250 - DNA, 25 bp, Artificial
  probe
  misc_feature (1)..(25): SEQ ID NO: 683; WAN024AUL; Start 210; Stop 234
taatattggtccagcgcgagctata

SEQ ID NO: 270251 - DNA, 25 bp, Artificial
  probe
  misc_feature (1)..(25): SEQ ID NO: 683; WAN024AUL; Start 211; Stop 235
aatattggtccagcgcgagctatag

SEQ ID NO: 270252 - DNA, 25 bp, Artificial
  probe
  misc_feature (1)..(25): SEQ ID NO: 683; WAN024AUL; Start 209; Stop 233
ctaatattggtccagcgcgagctat

SEQ ID NO: 270253 - DNA, 25 bp, Artificial
  probe
  misc_feature (1)..(25): SEQ ID NO: 684; WAN024AUK; Start 535; Stop 559
atacagtatcaacctaagacaacct

SEQ ID NO: 270254 - DNA, 25 bp, Artificial
  probe
  misc_feature (1)..(25): SEQ ID NO: 684; WAN024AUK; Start 536; Stop 560
tacagtatcaacctaagacaaccta

SEQ ID NO: 270255 - DNA, 25 bp, Artificial
  probe
  misc_feature (1)..(25): SEQ ID NO: 684; WAN024AUK; Start 574; Stop 598
acagatacaacacgctccacattaa

SEQ ID NO: 270256 - DNA, 25 bp, Artificial
  probe
  misc_feature (1)..(25): SEQ ID NO: 684; WAN024AUK; Start 534; Stop 558
tatacagtatcaacctaagacaacc

SEQ ID NO: 270257 - DNA, 25 bp, Artificial
  probe
  misc_feature (1)..(25): SEQ ID NO: 684; WAN024AUK; Start 573; Stop 597
gacagatacaacacgctccacatta

SEQ ID NO: 270258 - DNA, 25 bp, Artificial
  probe
  misc_feature (1)..(25): SEQ ID NO: 684; WAN024AUK; Start 578; Stop 602
atacaacacgctccacattaaatag

SEQ ID NO: 270259 - DNA, 25 bp, Artificial
  probe
  misc_feature (1)..(25): SEQ ID NO: 684; WAN024AUK; Start 577; Stop 601
gatacaacacgctccacattaaata

SEQ ID NO: 270260 - DNA, 25 bp, Artificial
  probe
  misc_feature (1)..(25): SEQ ID NO: 684; WAN024AUK; Start 576; Stop 600
agatacaacacgctccacattaaat

SEQ ID NO: 270261 - DNA, 25 bp, Artificial
  probe
  misc_feature (1)..(25): SEQ ID NO: 684; WAN024AUK; Start 555; Stop 579
aacctatatcgcttatgggacagat

SEQ ID NO: 270262 - DNA, 25 bp, Artificial
  probe
  misc_feature (1)..(25): SEQ ID NO: 684; WAN024AUK; Start 843; Stop 867
agtctacgaccaagaacttctgaag

SEQ ID NO: 270263 - DNA, 25 bp, Artificial
  probe
  misc_feature (1)..(25): SEQ ID NO: 684; WAN024AUK; Start 842; Stop 866
cagtctacgaccaagaacttctgaa

SEQ ID NO: 270264 - DNA, 25 bp, Artificial
  probe
  misc_feature (1)..(25): SEQ ID NO: 684; WAN024AUK; Start 839; Stop 863
gaacagtctacgaccaagaacttct

SEQ ID NO: 270265 - DNA, 25 bp, Artificial
  probe
  misc_feature (1)..(25): SEQ ID NO: 684; WAN024AUK; Start 575; Stop 599
cagatacaacacgctccacattaaa

SEQ ID NO: 270266 - DNA, 25 bp, Artificial
  probe
  misc_feature (1)..(25): SEQ ID NO: 684; WAN024AUK; Start 554; Stop 578
caacctatatcgcttatgggacaga

SEQ ID NO: 270267 - DNA, 25 bp, Artificial
  probe
  misc_feature (1)..(25): SEQ ID NO: 684; WAN024AUK; Start 840; Stop 864
aacagtctacgaccaagaacttctg

SEQ ID NO: 270268 - DNA, 25 bp, Artificial
  probe
  misc_feature (1)..(25): SEQ ID NO: 684; WAN024AUK; Start 806; Stop 830
gatttgataaagatccacgagtgaa

SEQ ID NO: 270269 - DNA, 25 bp, Artificial
  probe
  misc_feature (1)..(25): SEQ ID NO: 684; WAN024AUK; Start 557; Stop 581
cctatatcgcttatgggacagatac

SEQ ID NO: 270270 - DNA, 25 bp, Artificial
  probe
  misc_feature (1)..(25): SEQ ID NO: 684; WAN024AUK; Start 560; Stop 584
atatcgcttatgggacagatacaac

SEQ ID NO: 270271 - DNA, 25 bp, Artificial
  probe
  misc_feature (1)..(25): SEQ ID NO: 684; WAN024AUK; Start 556; Stop 580
acctatatcgcttatgggacagata

SEQ ID NO: 270272 - DNA, 25 bp, Artificial
  probe
  misc_feature (1)..(25): SEQ ID NO: 684; WAN024AUK; Start 553; Stop 577
acaacctatatcgcttatgggacag

SEQ ID NO: 270273 - DNA, 25 bp, Artificial
  probe
  misc_feature (1)..(25): SEQ ID NO: 684; WAN024AUK; Start 558; Stop 582
ctatatcgcttatgggacagataca

SEQ ID NO: 270274 - DNA, 25 bp, Artificial
  probe
  misc_feature (1)..(25): SEQ ID NO: 684; WAN024AUK; Start 552; Stop 576
gacaacctatatcgcttatgggaca

SEQ ID NO: 270275 - DNA, 25 bp, Artificial
  probe
  misc_feature (1)..(25): SEQ ID NO: 684; WAN024AUK; Start 807; Stop 831
atttgataaagatccacgagtgaaa

SEQ ID NO: 270276 - DNA, 25 bp, Artificial
  probe
  misc_feature (1)..(25): SEQ ID NO: 684; WAN024AUK; Start 559; Stop 583
tatatcgcttatgggacagatacaa

SEQ ID NO: 270277 - DNA, 25 bp, Artificial
  probe
  misc_feature (1)..(25): SEQ ID NO: 684; WAN024AUK; Start 747; Stop 771
tgtcctaatcacaaatgtagaacag

SEQ ID NO: 270278 - DNA, 25 bp, Artificial
  probe
  misc_feature (1)..(25): SEQ ID NO: 684; WAN024AUK; Start 838; Stop 862
ggaacagtctacgaccaagaacttc

SEQ ID NO: 270279 - DNA, 25 bp, Artificial
  probe
  misc_feature (1)..(25): SEQ ID NO: 684; WAN024AUK; Start 748; Stop 772
gtcctaatcacaaatgtagaacaga

SEQ ID NO: 270280 - DNA, 25 bp, Artificial
  probe
  misc_feature (1)..(25): SEQ ID NO: 684; WAN024AUK; Start 561; Stop 585
tatcgcttatgggacagatacaaca

SEQ ID NO: 270281 - DNA, 25 bp, Artificial
  probe
  misc_feature (1)..(25): SEQ ID NO: 684; WAN024AUK; Start 694; Stop 718
aattatgagtctatgatacgtggtt

SEQ ID NO: 270282 - DNA, 25 bp, Artificial
  probe
  misc_feature (1)..(25): SEQ ID NO: 684; WAN024AUK; Start 588; Stop 612
ctccacattaaatagcagtgatgaa

SEQ ID NO: 270283 - DNA, 25 bp, Artificial
  probe
  misc_feature (1)..(25): SEQ ID NO: 684; WAN024AUK; Start 589; Stop 613
tccacattaaatagcagtgatgaaa

SEQ ID NO: 270284 - DNA, 25 bp, Artificial
  probe
  misc_feature (1)..(25): SEQ ID NO: 684; WAN024AUK; Start 841; Stop 865
acagtctacgaccaagaacttctga

SEQ ID NO: 270285 - DNA, 25 bp, Artificial
  probe
  misc_feature (1)..(25): SEQ ID NO: 684; WAN024AUK; Start 562; Stop 586
atcgcttatgggacagatacaacac

SEQ ID NO: 270286 - DNA, 25 bp, Artificial
  probe
  misc_feature (1)..(25): SEQ ID NO: 685; WAN024C6I; Start 331; Stop 355
aacatatactcagttggaatggcat

SEQ ID NO: 270287 - DNA, 25 bp, Artificial
  probe
  misc_feature (1)..(25): SEQ ID NO: 685; WAN024C6I; Start 11; Stop 35
acgaatataagtatggaggtgttct

SEQ ID NO: 270288 - DNA, 25 bp, Artificial
  probe
  misc_feature (1)..(25): SEQ ID NO: 685; WAN024C6I; Start 336; Stop 360
atactcagttggaatggcattagaa

SEQ ID NO: 270289 - DNA, 25 bp, Artificial
  probe
  misc_feature (1)..(25): SEQ ID NO: 685; WAN024C6I; Start 335; Stop 359
tatactcagttggaatggcattaga

SEQ ID NO: 270290 - DNA, 25 bp, Artificial
  probe
  misc_feature (1)..(25): SEQ ID NO: 685; WAN024C6I; Start 332; Stop 356
acatatactcagttggaatggcatt

SEQ ID NO: 270291 - DNA, 25 bp, Artificial
  probe
  misc_feature (1)..(25): SEQ ID NO: 685; WAN024C6I; Start 337; Stop 361
tactcagttggaatggcattagaac

SEQ ID NO: 270292 - DNA, 25 bp, Artificial
  probe
  misc_feature (1)..(25): SEQ ID NO: 685; WAN024C6I; Start 343; Stop 367
gttggaatggcattagaacaagaag

SEQ ID NO: 270293 - DNA, 25 bp, Artificial
  probe
  misc_feature (1)..(25): SEQ ID NO: 685; WAN024C6I; Start 10; Stop 34
aacgaatataagtatggaggtgttc

SEQ ID NO: 270294 - DNA, 25 bp, Artificial
  probe
  misc_feature (1)..(25): SEQ ID NO: 685; WAN024C6I; Start 19; Stop 43
aagtatggaggtgttcttatgacaa

SEQ ID NO: 270295 - DNA, 25 bp, Artificial
  probe
  misc_feature (1)..(25): SEQ ID NO: 685; WAN024C6I; Start 342; Stop 366
agttggaatggcattagaacaagaa

SEQ ID NO: 270296 - DNA, 25 bp, Artificial
  probe
  misc_feature (1)..(25): SEQ ID NO: 685; WAN024C6I; Start 334; Stop 358
atatactcagttggaatggcattag

SEQ ID NO: 270297 - DNA, 25 bp, Artificial
  probe
  misc_feature (1)..(25): SEQ ID NO: 685; WAN024C6I; Start 333; Stop 357
catatactcagttggaatggcatta

SEQ ID NO: 270298 - DNA, 25 bp, Artificial
  probe
  misc_feature (1)..(25): SEQ ID NO: 685; WAN024C6I; Start 12; Stop 36
cgaatataagtatggaggtgttctt

SEQ ID NO: 270299 - DNA, 25 bp, Artificial
  probe
  misc_feature (1)..(25): SEQ ID NO: 685; WAN024C6I; Start 346; Stop 370
ggaatggcattagaacaagaaggtt

SEQ ID NO: 270300 - DNA, 25 bp, Artificial
  probe
  misc_feature (1)..(25): SEQ ID NO: 685; WAN024C6I; Start 344; Stop 368
ttggaatggcattagaacaagaagg

SEQ ID NO: 270301 - DNA, 25 bp, Artificial
  probe
  misc_feature (1)..(25): SEQ ID NO: 685; WAN024C6I; Start 341; Stop 365
cagttggaatggcattagaacaaga

SEQ ID NO: 270302 - DNA, 25 bp, Artificial
  probe
  misc_feature (1)..(25): SEQ ID NO: 685; WAN024C6I; Start 340; Stop 364
tcagttggaatggcattagaacaag

SEQ ID NO: 270303 - DNA, 25 bp, Artificial
  probe
  misc_feature (1)..(25): SEQ ID NO: 685; WAN024C6I; Start 339; Stop 363
ctcagttggaatggcattagaacaa

SEQ ID NO: 270304 - DNA, 25 bp, Artificial
  probe
  misc_feature (1)..(25): SEQ ID NO: 685; WAN024C6I; Start 18; Stop 42
taagtatggaggtgttcttatgaca

SEQ ID NO: 270305 - DNA, 25 bp, Artificial
  probe
  misc_feature (1)..(25): SEQ ID NO: 685; WAN024C6I; Start 345; Stop 369
tggaatggcattagaacaagaaggt

SEQ ID NO: 270306 - DNA, 25 bp, Artificial
  probe
  misc_feature (1)..(25): SEQ ID NO: 685; WAN024C6I; Start 75; Stop 99
tgttcattcagatacgttcaagttc

SEQ ID NO: 270307 - DNA, 25 bp, Artificial
  probe
  misc_feature (1)..(25): SEQ ID NO: 685; WAN024C6I; Start 714; Stop 738
gcggttaggtagaagatttataggt

SEQ ID NO: 270308 - DNA, 25 bp, Artificial
  probe
  misc_feature (1)..(25): SEQ ID NO: 685; WAN024C6I; Start 710; Stop 734
cgaagcggttaggtagaagatttat

SEQ ID NO: 270309 - DNA, 25 bp, Artificial
  probe
  misc_feature (1)..(25): SEQ ID NO: 685; WAN024C6I; Start 713; Stop 737
agcggttaggtagaagatttatagg

SEQ ID NO: 270310 - DNA, 25 bp, Artificial
  probe
  misc_feature (1)..(25): SEQ ID NO: 685; WAN024C6I; Start 338; Stop 362
actcagttggaatggcattagaaca

SEQ ID NO: 270311 - DNA, 25 bp, Artificial
  probe
  misc_feature (1)..(25): SEQ ID NO: 685; WAN024C6I; Start 9; Stop 33
taacgaatataagtatggaggtgtt

SEQ ID NO: 270312 - DNA, 25 bp, Artificial
  probe
  misc_feature (1)..(25): SEQ ID NO: 685; WAN024C6I; Start 8; Stop 32
ataacgaatataagtatggaggtgt

SEQ ID NO: 270313 - DNA, 25 bp, Artificial
  probe
  misc_feature (1)..(25): SEQ ID NO: 685; WAN024C6I; Start 76; Stop 100
gttcattcagatacgttcaagttct

SEQ ID NO: 270314 - DNA, 25 bp, Artificial
  probe
  misc_feature (1)..(25): SEQ ID NO: 685; WAN024C6I; Start 197; Stop 221
tttctgttgataaaggagattggga

SEQ ID NO: 270315 - DNA, 25 bp, Artificial
  probe
  misc_feature (1)..(25): SEQ ID NO: 685; WAN024C6I; Start 196; Stop 220
gtttctgttgataaaggagattggg

SEQ ID NO: 270316 - DNA, 25 bp, Artificial
  probe
  misc_feature (1)..(25): SEQ ID NO: 685; WAN024C6I; Start 198; Stop 222
ttctgttgataaaggagattgggat

SEQ ID NO: 270317 - DNA, 25 bp, Artificial
  probe
  misc_feature (1)..(25): SEQ ID NO: 685; WAN024C6I; Start 74; Stop 98
ttgttcattcagatacgttcaagtt

SEQ ID NO: 270318 - DNA, 25 bp, Artificial
  probe
  misc_feature (1)..(25): SEQ ID NO: 685; WAN024C6I; Start 303; Stop 327
gacggtatggatttcaggtagtttg

SEQ ID NO: 270319 - DNA, 25 bp, Artificial
  probe
  misc_feature (1)..(25): SEQ ID NO: 686; WAN024CSA; Start 253; Stop 277
aagaccttagctgttgtaccattag

SEQ ID NO: 270320 - DNA, 25 bp, Artificial
  probe
  misc_feature (1)..(25): SEQ ID NO: 686; WAN024CSA; Start 251; Stop 275
gtaagaccttagctgttgtaccatt

SEQ ID NO: 270321 - DNA, 25 bp, Artificial
  probe
  misc_feature (1)..(25): SEQ ID NO: 686; WAN024CSA; Start 255; Stop 279
gaccttagctgttgtaccattagag

SEQ ID NO: 270322 - DNA, 25 bp, Artificial
  probe
  misc_feature (1)..(25): SEQ ID NO: 686; WAN024CSA; Start 252; Stop 276
taagaccttagctgttgtaccatta

SEQ ID NO: 270323 - DNA, 25 bp, Artificial
  probe
  misc_feature (1)..(25): SEQ ID NO: 686; WAN024CSA; Start 254; Stop 278
agaccttagctgttgtaccattaga

SEQ ID NO: 270324 - DNA, 25 bp, Artificial
  probe
  misc_feature (1)..(25): SEQ ID NO: 686; WAN024CSA; Start 8; Stop 32
ataatgctattggtagtaactggaa

SEQ ID NO: 270325 - DNA, 25 bp, Artificial
  probe
  misc_feature (1)..(25): SEQ ID NO: 686; WAN024CSA; Start 7; Stop 31
aataatgctattggtagtaactgga

SEQ ID NO: 270326 - DNA, 25 bp, Artificial
  probe
  misc_feature (1)..(25): SEQ ID NO: 686; WAN024CSA; Start 12; Stop 36
tgctattggtagtaactggaaagat

SEQ ID NO: 270327 - DNA, 25 bp, Artificial
  probe
  misc_feature (1)..(25): SEQ ID NO: 686; WAN024CSA; Start 11; Stop 35
atgctattggtagtaactggaaaga

SEQ ID NO: 270328 - DNA, 25 bp, Artificial
  probe
  misc_feature (1)..(25): SEQ ID NO: 686; WAN024CSA; Start 13; Stop 37
gctattggtagtaactggaaagatg

SEQ ID NO: 270329 - DNA, 25 bp, Artificial
  probe
  misc_feature (1)..(25): SEQ ID NO: 686; WAN024CSA; Start 186; Stop 210
tagaatggaaacaggaaagacaagc

SEQ ID NO: 270330 - DNA, 25 bp, Artificial
  probe
  misc_feature (1)..(25): SEQ ID NO: 686; WAN024CSA; Start 20; Stop 44
gtagtaactggaaagatgtaagagc

SEQ ID NO: 270331 - DNA, 25 bp, Artificial
  probe
  misc_feature (1)..(25): SEQ ID NO: 686; WAN024CSA; Start 179; Stop 203
ttatcgctagaatggaaacaggaaa

SEQ ID NO: 270332 - DNA, 25 bp, Artificial
  probe
  misc_feature (1)..(25): SEQ ID NO: 686; WAN024CSA; Start 18; Stop 42
tggtagtaactggaaagatgtaaga

SEQ ID NO: 270333 - DNA, 25 bp, Artificial
  probe
  misc_feature (1)..(25): SEQ ID NO: 686; WAN024CSA; Start 185; Stop 209
ctagaatggaaacaggaaagacaag

SEQ ID NO: 270334 - DNA, 25 bp, Artificial
  probe
  misc_feature (1)..(25): SEQ ID NO: 686; WAN024CSA; Start 180; Stop 204
tatcgctagaatggaaacaggaaag

SEQ ID NO: 270335 - DNA, 25 bp, Artificial
  probe
  misc_feature (1)..(25): SEQ ID NO: 686; WAN024CSA; Start 10; Stop 34
aatgctattggtagtaactggaaag

SEQ ID NO: 270336 - DNA, 25 bp, Artificial
  probe
  misc_feature (1)..(25): SEQ ID NO: 686; WAN024CSA; Start 208; Stop 232
agcccacaacttgatacagtattaa

SEQ ID NO: 270337 - DNA, 25 bp, Artificial
  probe
  misc_feature (1)..(25): SEQ ID NO: 686; WAN024CSA; Start 207; Stop 231
aagcccacaacttgatacagtatta

SEQ ID NO: 270338 - DNA, 25 bp, Artificial
  probe
  misc_feature (1)..(25): SEQ ID NO: 686; WAN024CSA; Start 184; Stop 208
gctagaatggaaacaggaaagacaa

SEQ ID NO: 270339 - DNA, 25 bp, Artificial
  probe
  misc_feature (1)..(25): SEQ ID NO: 686; WAN024CSA; Start 19; Stop 43
ggtagtaactggaaagatgtaagag

SEQ ID NO: 270340 - DNA, 25 bp, Artificial
  probe
  misc_feature (1)..(25): SEQ ID NO: 686; WAN024CSA; Start 209; Stop 233
gcccacaacttgatacagtattaaa

SEQ ID NO: 270341 - DNA, 25 bp, Artificial
  probe
  misc_feature (1)..(25): SEQ ID NO: 686; WAN024CSA; Start 178; Stop 202
gttatcgctagaatggaaacaggaa

SEQ ID NO: 270342 - DNA, 25 bp, Artificial
  probe
  misc_feature (1)..(25): SEQ ID NO: 686; WAN024CSA; Start 137; Stop 161
gtcagaagaaactagaggagatgag

SEQ ID NO: 270343 - DNA, 25 bp, Artificial
  probe
  misc_feature (1)..(25): SEQ ID NO: 686; WAN024CSA; Start 136; Stop 160
agtcagaagaaactagaggagatga

SEQ ID NO: 270344 - DNA, 25 bp, Artificial
  probe
  misc_feature (1)..(25): SEQ ID NO: 686; WAN024CSA; Start 17; Stop 41
ttggtagtaactggaaagatgtaag

SEQ ID NO: 270345 - DNA, 25 bp, Artificial
  probe
  misc_feature (1)..(25): SEQ ID NO: 686; WAN024CSA; Start 264; Stop 288
tgttgtaccattagagcatgagcag

SEQ ID NO: 270346 - DNA, 25 bp, Artificial
  probe
  misc_feature (1)..(25): SEQ ID NO: 686; WAN024CSA; Start 263; Stop 287
ctgttgtaccattagagcatgagca

SEQ ID NO: 270347 - DNA, 25 bp, Artificial
  probe
  misc_feature (1)..(25): SEQ ID NO: 686; WAN024CSA; Start 167; Stop 191
ttagtcagccagttatcgctagaat

SEQ ID NO: 270348 - DNA, 25 bp, Artificial
  probe
  misc_feature (1)..(25): SEQ ID NO: 686; WAN024CSA; Start 14; Stop 38
ctattggtagtaactggaaagatgt

SEQ ID NO: 270349 - DNA, 25 bp, Artificial
  probe
  misc_feature (1)..(25): SEQ ID NO: 686; WAN024CSA; Start 247; Stop 271
cttggtaagaccttagctgttgtac

SEQ ID NO: 270350 - DNA, 25 bp, Artificial
  probe
  misc_feature (1)..(25): SEQ ID NO: 686; WAN024CSA; Start 177; Stop 201
agttatcgctagaatggaaacagga

SEQ ID NO: 270351 - DNA, 25 bp, Artificial
  probe
  misc_feature (1)..(25): SEQ ID NO: 686; WAN024CSA; Start 176; Stop 200
cagttatcgctagaatggaaacagg

SEQ ID NO: 270352 - DNA, 25 bp, Artificial
  probe
  misc_feature (1)..(25): SEQ ID NO: 687; WAN024FDM; Start 75; Stop 99
cgaagacttgagagttaatcatact

SEQ ID NO: 270353 - DNA, 25 bp, Artificial
  probe
  misc_feature (1)..(25): SEQ ID NO: 687; WAN024FDM; Start 74; Stop 98
tcgaagacttgagagttaatcatac

SEQ ID NO: 270354 - DNA, 25 bp, Artificial
  probe
  misc_feature (1)..(25): SEQ ID NO: 687; WAN024FDM; Start 45; Stop 69
ccttgtaataactgttgaaaatcct

SEQ ID NO: 270355 - DNA, 25 bp, Artificial
  probe
  misc_feature (1)..(25): SEQ ID NO: 687; WAN024FDM; Start 44; Stop 68
tccttgtaataactgttgaaaatcc

SEQ ID NO: 270356 - DNA, 25 bp, Artificial
  probe
  misc_feature (1)..(25): SEQ ID NO: 687; WAN024FDM; Start 77; Stop 101
aagacttgagagttaatcatactca

SEQ ID NO: 270357 - DNA, 25 bp, Artificial
  probe
  misc_feature (1)..(25): SEQ ID NO: 687; WAN024FDM; Start 73; Stop 97
ttcgaagacttgagagttaatcata

SEQ ID NO: 270358 - DNA, 25 bp, Artificial
  probe
  misc_feature (1)..(25): SEQ ID NO: 687; WAN024FDM; Start 64; Stop 88
aatcctgatttcgaagacttgagag

SEQ ID NO: 270359 - DNA, 25 bp, Artificial
  probe
  misc_feature (1)..(25): SEQ ID NO: 687; WAN024FDM; Start 67; Stop 91
cctgatttcgaagacttgagagtta

SEQ ID NO: 270360 - DNA, 25 bp, Artificial
  probe
  misc_feature (1)..(25): SEQ ID NO: 687; WAN024FDM; Start 76; Stop 100
gaagacttgagagttaatcatactc

SEQ ID NO: 270361 - DNA, 25 bp, Artificial
  probe
  misc_feature (1)..(25): SEQ ID NO: 687; WAN024FDM; Start 47; Stop 71
ttgtaataactgttgaaaatcctga

SEQ ID NO: 270362 - DNA, 25 bp, Artificial
  probe
  misc_feature (1)..(25): SEQ ID NO: 687; WAN024FDM; Start 63; Stop 87
aaatcctgatttcgaagacttgaga

SEQ ID NO: 270363 - DNA, 25 bp, Artificial
  probe
  misc_feature (1)..(25): SEQ ID NO: 687; WAN024FDM; Start 68; Stop 92
ctgatttcgaagacttgagagttaa

SEQ ID NO: 270364 - DNA, 25 bp, Artificial
  probe
  misc_feature (1)..(25): SEQ ID NO: 687; WAN024FDM; Start 48; Stop 72
tgtaataactgttgaaaatcctgat

SEQ ID NO: 270365 - DNA, 25 bp, Artificial
  probe
  misc_feature (1)..(25): SEQ ID NO: 687; WAN024FDM; Start 46; Stop 70
cttgtaataactgttgaaaatcctg

SEQ ID NO: 270366 - DNA, 25 bp, Artificial
  probe
  misc_feature (1)..(25): SEQ ID NO: 687; WAN024FDM; Start 65; Stop 89
atcctgatttcgaagacttgagagt

SEQ ID NO: 270367 - DNA, 25 bp, Artificial
  probe
  misc_feature (1)..(25): SEQ ID NO: 687; WAN024FDM; Start 72; Stop 96
tttcgaagacttgagagttaatcat

SEQ ID NO: 270368 - DNA, 25 bp, Artificial
  probe
  misc_feature (1)..(25): SEQ ID NO: 687; WAN024FDM; Start 71; Stop 95
atttcgaagacttgagagttaatca

SEQ ID NO: 270369 - DNA, 25 bp, Artificial
  probe
  misc_feature (1)..(25): SEQ ID NO: 687; WAN024FDM; Start 69; Stop 93
tgatttcgaagacttgagagttaat

SEQ ID NO: 270370 - DNA, 25 bp, Artificial
  probe
  misc_feature (1)..(25): SEQ ID NO: 687; WAN024FDM; Start 66; Stop 90
tcctgatttcgaagacttgagagtt

SEQ ID NO: 270371 - DNA, 25 bp, Artificial
  probe
  misc_feature (1)..(25): SEQ ID NO: 687; WAN024FDM; Start 53; Stop 77
taactgttgaaaatcctgatttcga

SEQ ID NO: 270372 - DNA, 25 bp, Artificial
  probe
  misc_feature (1)..(25): SEQ ID NO: 687; WAN024FDM; Start 52; Stop 76
ataactgttgaaaatcctgatttcg

SEQ ID NO: 270373 - DNA, 25 bp, Artificial
  probe
  misc_feature (1)..(25): SEQ ID NO: 687; WAN024FDM; Start 70; Stop 94
gatttcgaagacttgagagttaatc

SEQ ID NO: 270374 - DNA, 25 bp, Artificial
  probe
  misc_feature (1)..(25): SEQ ID NO: 687; WAN024FDM; Start 49; Stop 73
gtaataactgttgaaaatcctgatt

SEQ ID NO: 270375 - DNA, 25 bp, Artificial
  probe
  misc_feature (1)..(25): SEQ ID NO: 687; WAN024FDM; Start 62; Stop 86
aaaatcctgatttcgaagacttgag

SEQ ID NO: 270376 - DNA, 25 bp, Artificial
  probe
  misc_feature (1)..(25): SEQ ID NO: 687; WAN024FDM; Start 51; Stop 75
aataactgttgaaaatcctgatttc

SEQ ID NO: 270377 - DNA, 25 bp, Artificial
  probe
  misc_feature (1)..(25): SEQ ID NO: 687; WAN024FDM; Start 60; Stop 84
tgaaaatcctgatttcgaagacttg

SEQ ID NO: 270378 - DNA, 25 bp, Artificial
  probe
  misc_feature (1)..(25): SEQ ID NO: 687; WAN024FDM; Start 58; Stop 82
gttgaaaatcctgatttcgaagact

SEQ ID NO: 270379 - DNA, 25 bp, Artificial
  probe
  misc_feature (1)..(25): SEQ ID NO: 687; WAN024FDM; Start 57; Stop 81
tgttgaaaatcctgatttcgaagac

SEQ ID NO: 270380 - DNA, 25 bp, Artificial
  probe
  misc_feature (1)..(25): SEQ ID NO: 687; WAN024FDM; Start 56; Stop 80
ctgttgaaaatcctgatttcgaaga

SEQ ID NO: 270381 - DNA, 25 bp, Artificial
  probe
  misc_feature (1)..(25): SEQ ID NO: 687; WAN024FDM; Start 55; Stop 79
actgttgaaaatcctgatttcgaag

SEQ ID NO: 270382 - DNA, 25 bp, Artificial
  probe
  misc_feature (1)..(25): SEQ ID NO: 687; WAN024FDM; Start 54; Stop 78
aactgttgaaaatcctgatttcgaa

SEQ ID NO: 270383 - DNA, 25 bp, Artificial
  probe
  misc_feature (1)..(25): SEQ ID NO: 687; WAN024FDM; Start 61; Stop 85
gaaaatcctgatttcgaagacttga

SEQ ID NO: 270384 - DNA, 25 bp, Artificial
  probe
  misc_feature (1)..(25): SEQ ID NO: 687; WAN024FDM; Start 59; Stop 83
ttgaaaatcctgatttcgaagactt

SEQ ID NO: 270385 - DNA, 25 bp, Artificial
  probe
  misc_feature (1)..(25): SEQ ID NO: 687; WAN024FDM; Start 50; Stop 74
taataactgttgaaaatcctgattt

SEQ ID NO: 270386 - DNA, 25 bp, Artificial
  probe
  misc_feature (1)..(25): SEQ ID NO: 688; WAN024FRN; Start 155; Stop 179
tgctgctaatcgttatcatcatagg

SEQ ID NO: 270387 - DNA, 25 bp, Artificial
  probe
  misc_feature (1)..(25): SEQ ID NO: 688; WAN024FRN; Start 458; Stop 482
aagatatggatgaattggagagtgg

SEQ ID NO: 270388 - DNA, 25 bp, Artificial
  probe
  misc_feature (1)..(25): SEQ ID NO: 688; WAN024FRN; Start 460; Stop 484
gatatggatgaattggagagtggag

SEQ ID NO: 270389 - DNA, 25 bp, Artificial
  probe
  misc_feature (1)..(25): SEQ ID NO: 688; WAN024FRN; Start 461; Stop 485
atatggatgaattggagagtggaga

SEQ ID NO: 270390 - DNA, 25 bp, Artificial
  probe
  misc_feature (1)..(25): SEQ ID NO: 688; WAN024FRN; Start 459; Stop 483
agatatggatgaattggagagtgga

SEQ ID NO: 270391 - DNA, 25 bp, Artificial
  probe
  misc_feature (1)..(25): SEQ ID NO: 688; WAN024FRN; Start 464; Stop 488
tggatgaattggagagtggagaata

SEQ ID NO: 270392 - DNA, 25 bp, Artificial
  probe
  misc_feature (1)..(25): SEQ ID NO: 688; WAN024FRN; Start 462; Stop 486
tatggatgaattggagagtggagaa

SEQ ID NO: 270393 - DNA, 25 bp, Artificial
  probe
  misc_feature (1)..(25): SEQ ID NO: 688; WAN024FRN; Start 154; Stop 178
atgctgctaatcgttatcatcatag

SEQ ID NO: 270394 - DNA, 25 bp, Artificial
  probe
  misc_feature (1)..(25): SEQ ID NO: 688; WAN024FRN; Start 456; Stop 480
acaagatatggatgaattggagagt

SEQ ID NO: 270395 - DNA, 25 bp, Artificial
  probe
  misc_feature (1)..(25): SEQ ID NO: 688; WAN024FRN; Start 457; Stop 481
caagatatggatgaattggagagtg

SEQ ID NO: 270396 - DNA, 25 bp, Artificial
  probe
  misc_feature (1)..(25): SEQ ID NO: 688; WAN024FRN; Start 151; Stop 175
aatatgctgctaatcgttatcatca

SEQ ID NO: 270397 - DNA, 25 bp, Artificial
  probe
  misc_feature (1)..(25): SEQ ID NO: 688; WAN024FRN; Start 463; Stop 487
atggatgaattggagagtggagaat

SEQ ID NO: 270398 - DNA, 25 bp, Artificial
  probe
  misc_feature (1)..(25): SEQ ID NO: 688; WAN024FRN; Start 453; Stop 477
tgaacaagatatggatgaattggag

SEQ ID NO: 270399 - DNA, 25 bp, Artificial
  probe
  misc_feature (1)..(25): SEQ ID NO: 688; WAN024FRN; Start 152; Stop 176
atatgctgctaatcgttatcatcat

SEQ ID NO: 270400 - DNA, 25 bp, Artificial
  probe
  misc_feature (1)..(25): SEQ ID NO: 688; WAN024FRN; Start 455; Stop 479
aacaagatatggatgaattggagag

SEQ ID NO: 270401 - DNA, 25 bp, Artificial
  probe
  misc_feature (1)..(25): SEQ ID NO: 688; WAN024FRN; Start 454; Stop 478
gaacaagatatggatgaattggaga

SEQ ID NO: 270402 - DNA, 25 bp, Artificial
  probe
  misc_feature (1)..(25): SEQ ID NO: 688; WAN024FRN; Start 452; Stop 476
ttgaacaagatatggatgaattgga

SEQ ID NO: 270403 - DNA, 25 bp, Artificial
  probe
  misc_feature (1)..(25): SEQ ID NO: 688; WAN024FRN; Start 148; Stop 172
tctaatatgctgctaatcgttatca

SEQ ID NO: 270404 - DNA, 25 bp, Artificial
  probe
  misc_feature (1)..(25): SEQ ID NO: 688; WAN024FRN; Start 159; Stop 183
gctaatcgttatcatcatagggaca

SEQ ID NO: 270405 - DNA, 25 bp, Artificial
  probe
  misc_feature (1)..(25): SEQ ID NO: 688; WAN024FRN; Start 158; Stop 182
tgctaatcgttatcatcatagggac

SEQ ID NO: 270406 - DNA, 25 bp, Artificial
  probe
  misc_feature (1)..(25): SEQ ID NO: 688; WAN024FRN; Start 157; Stop 181
ctgctaatcgttatcatcataggga

SEQ ID NO: 270407 - DNA, 25 bp, Artificial
  probe
  misc_feature (1)..(25): SEQ ID NO: 688; WAN024FRN; Start 94; Stop 118
gctttgtcgctcctatcttatatca

SEQ ID NO: 270408 - DNA, 25 bp, Artificial
  probe
  misc_feature (1)..(25): SEQ ID NO: 688; WAN024FRN; Start 114; Stop 138
tatcatttcagtattagcaccaagc

SEQ ID NO: 270409 - DNA, 25 bp, Artificial
  probe
  misc_feature (1)..(25): SEQ ID NO: 688; WAN024FRN; Start 118; Stop 142
atttcagtattagcaccaagccttt

SEQ ID NO: 270410 - DNA, 25 bp, Artificial
  probe
  misc_feature (1)..(25): SEQ ID NO: 688; WAN024FRN; Start 147; Stop 171
ttctaatatgctgctaatcgttatc

SEQ ID NO: 270411 - DNA, 25 bp, Artificial
  probe
  misc_feature (1)..(25): SEQ ID NO: 688; WAN024FRN; Start 156; Stop 180
gctgctaatcgttatcatcataggg

SEQ ID NO: 270412 - DNA, 25 bp, Artificial
  probe
  misc_feature (1)..(25): SEQ ID NO: 688; WAN024FRN; Start 153; Stop 177
tatgctgctaatcgttatcatcata

SEQ ID NO: 270413 - DNA, 25 bp, Artificial
  probe
  misc_feature (1)..(25): SEQ ID NO: 688; WAN024FRN; Start 31; Stop 55
ctagacgaaagagaagaacaactgt

SEQ ID NO: 270414 - DNA, 25 bp, Artificial
  probe
  misc_feature (1)..(25): SEQ ID NO: 688; WAN024FRN; Start 30; Stop 54
actagacgaaagagaagaacaactg

SEQ ID NO: 270415 - DNA, 25 bp, Artificial
  probe
  misc_feature (1)..(25): SEQ ID NO: 688; WAN024FRN; Start 115; Stop 139
atcatttcagtattagcaccaagcc

SEQ ID NO: 270416 - DNA, 25 bp, Artificial
  probe
  misc_feature (1)..(25): SEQ ID NO: 688; WAN024FRN; Start 150; Stop 174
taatatgctgctaatcgttatcatc

SEQ ID NO: 270417 - DNA, 25 bp, Artificial
  probe
  misc_feature (1)..(25): SEQ ID NO: 688; WAN024FRN; Start 149; Stop 173
ctaatatgctgctaatcgttatcat

SEQ ID NO: 270418 - DNA, 25 bp, Artificial
  probe
  misc_feature (1)..(25): SEQ ID NO: 688; WAN024FRN; Start 29; Stop 53
tactagacgaaagagaagaacaact

SEQ ID NO: 270419 - DNA, 25 bp, Artificial
  probe
  misc_feature (1)..(25): SEQ ID NO: 689; WAN024FTX; Start 318; Stop 342
aatgatgctggactatgatgttgtt

SEQ ID NO: 270420 - DNA, 25 bp, Artificial
  probe
  misc_feature (1)..(25): SEQ ID NO: 689; WAN024FTX; Start 584; Stop 608
aacggttggatattacaggctattc

SEQ ID NO: 270421 - DNA, 25 bp, Artificial
  probe
  misc_feature (1)..(25): SEQ ID NO: 689; WAN024FTX; Start 158; Stop 182
attattgtgaattgactggcttgtt

SEQ ID NO: 270422 - DNA, 25 bp, Artificial
  probe
  misc_feature (1)..(25): SEQ ID NO: 689; WAN024FTX; Start 153; Stop 177
tccttattattgtgaattgactggc

SEQ ID NO: 270423 - DNA, 25 bp, Artificial
  probe
  misc_feature (1)..(25): SEQ ID NO: 689; WAN024FTX; Start 154; Stop 178
ccttattattgtgaattgactggct

SEQ ID NO: 270424 - DNA, 25 bp, Artificial
  probe
  misc_feature (1)..(25): SEQ ID NO: 689; WAN024FTX; Start 157; Stop 181
tattattgtgaattgactggcttgt

SEQ ID NO: 270425 - DNA, 25 bp, Artificial
  probe
  misc_feature (1)..(25): SEQ ID NO: 689; WAN024FTX; Start 319; Stop 343
atgatgctggactatgatgttgttg

SEQ ID NO: 270426 - DNA, 25 bp, Artificial
  probe
  misc_feature (1)..(25): SEQ ID NO: 689; WAN024FTX; Start 322; Stop 346
atgctggactatgatgttgttgttc

SEQ ID NO: 270427 - DNA, 25 bp, Artificial
  probe
  misc_feature (1)..(25): SEQ ID NO: 689; WAN024FTX; Start 321; Stop 345
gatgctggactatgatgttgttgtt

SEQ ID NO: 270428 - DNA, 25 bp, Artificial
  probe
  misc_feature (1)..(25): SEQ ID NO: 689; WAN024FTX; Start 589; Stop 613
ttggatattacaggctattcggctt

SEQ ID NO: 270429 - DNA, 25 bp, Artificial
  probe
  misc_feature (1)..(25): SEQ ID NO: 689; WAN024FTX; Start 156; Stop 180
ttattattgtgaattgactggcttg

SEQ ID NO: 270430 - DNA, 25 bp, Artificial
  probe
  misc_feature (1)..(25): SEQ ID NO: 689; WAN024FTX; Start 155; Stop 179
cttattattgtgaattgactggctt

SEQ ID NO: 270431 - DNA, 25 bp, Artificial
  probe
  misc_feature (1)..(25): SEQ ID NO: 689; WAN024FTX; Start 320; Stop 344
tgatgctggactatgatgttgttgt

SEQ ID NO: 270432 - DNA, 25 bp, Artificial
  probe
  misc_feature (1)..(25): SEQ ID NO: 689; WAN024FTX; Start 588; Stop 612
gttggatattacaggctattcggct

SEQ ID NO: 270433 - DNA, 25 bp, Artificial
  probe
  misc_feature (1)..(25): SEQ ID NO: 689; WAN024FTX; Start 585; Stop 609
acggttggatattacaggctattcg

SEQ ID NO: 270434 - DNA, 25 bp, Artificial
  probe
  misc_feature (1)..(25): SEQ ID NO: 689; WAN024FTX; Start 213; Stop 237
tcttggattagtacactatcgtaga

SEQ ID NO: 270435 - DNA, 25 bp, Artificial
  probe
  misc_feature (1)..(25): SEQ ID NO: 689; WAN024FTX; Start 372; Stop 396
aactctctattctcactatgcacat

SEQ ID NO: 270436 - DNA, 25 bp, Artificial
  probe
  misc_feature (1)..(25): SEQ ID NO: 689; WAN024FTX; Start 329; Stop 353
actatgatgttgttgttccacgtaa

SEQ ID NO: 270437 - DNA, 25 bp, Artificial
  probe
  misc_feature (1)..(25): SEQ ID NO: 689; WAN024FTX; Start 583; Stop 607
aaacggttggatattacaggctatt

SEQ ID NO: 270438 - DNA, 25 bp, Artificial
  probe
  misc_feature (1)..(25): SEQ ID NO: 689; WAN024FTX; Start 468; Stop 492
gtttgataaagtgatgaatcgtcgt

SEQ ID NO: 270439 - DNA, 25 bp, Artificial
  probe
  misc_feature (1)..(25): SEQ ID NO: 689; WAN024FTX; Start 582; Stop 606
taaacggttggatattacaggctat

SEQ ID NO: 270440 - DNA, 25 bp, Artificial
  probe
  misc_feature (1)..(25): SEQ ID NO: 689; WAN024FTX; Start 581; Stop 605
ataaacggttggatattacaggcta

SEQ ID NO: 270441 - DNA, 25 bp, Artificial
  probe
  misc_feature (1)..(25): SEQ ID NO: 689; WAN024FTX; Start 580; Stop 604
tataaacggttggatattacaggct

SEQ ID NO: 270442 - DNA, 25 bp, Artificial
  probe
  misc_feature (1)..(25): SEQ ID NO: 689; WAN024FTX; Start 635; Stop 659
gtgtcagtgaacgcttatttaatgt

SEQ ID NO: 270443 - DNA, 25 bp, Artificial
  probe
  misc_feature (1)..(25): SEQ ID NO: 689; WAN024FTX; Start 317; Stop 341
aaatgatgctggactatgatgttgt

SEQ ID NO: 270444 - DNA, 25 bp, Artificial
  probe
  misc_feature (1)..(25): SEQ ID NO: 689; WAN024FTX; Start 159; Stop 183
ttattgtgaattgactggcttgttt

SEQ ID NO: 270445 - DNA, 25 bp, Artificial
  probe
  misc_feature (1)..(25): SEQ ID NO: 689; WAN024FTX; Start 328; Stop 352
gactatgatgttgttgttccacgta

SEQ ID NO: 270446 - DNA, 25 bp, Artificial
  probe
  misc_feature (1)..(25): SEQ ID NO: 689; WAN024FTX; Start 470; Stop 494
ttgataaagtgatgaatcgtcgtag

SEQ ID NO: 270447 - DNA, 25 bp, Artificial
  probe
  misc_feature (1)..(25): SEQ ID NO: 689; WAN024FTX; Start 467; Stop 491
cgtttgataaagtgatgaatcgtcg

SEQ ID NO: 270448 - DNA, 25 bp, Artificial
  probe
  misc_feature (1)..(25): SEQ ID NO: 689; WAN024FTX; Start 377; Stop 401
tctattctcactatgcacatactca

SEQ ID NO: 270449 - DNA, 25 bp, Artificial
  probe
  misc_feature (1)..(25): SEQ ID NO: 689; WAN024FTX; Start 152; Stop 176
atccttattattgtgaattgactgg

SEQ ID NO: 270450 - DNA, 25 bp, Artificial
  probe
  misc_feature (1)..(25): SEQ ID NO: 689; WAN024FTX; Start 640; Stop 664
agtgaacgcttatttaatgtttggt

SEQ ID NO: 270451 - DNA, 25 bp, Artificial
  probe
  misc_feature (1)..(25): SEQ ID NO: 689; WAN024FTX; Start 471; Stop 495
tgataaagtgatgaatcgtcgtagc

SEQ ID NO: 270452 - DNA, 25 bp, Artificial
  probe
  misc_feature (1)..(25): SEQ ID NO: 690; WAN024FTW; Start 629; Stop 653
ttggaagagtaagtgagttgttatt

SEQ ID NO: 270453 - DNA, 25 bp, Artificial
  probe
  misc_feature (1)..(25): SEQ ID NO: 690; WAN024FTW; Start 158; Stop 182
attattgtgaattaactggcttgtt

SEQ ID NO: 270454 - DNA, 25 bp, Artificial
  probe
  misc_feature (1)..(25): SEQ ID NO: 690; WAN024FTW; Start 154; Stop 178
ccttattattgtgaattaactggct

SEQ ID NO: 270455 - DNA, 25 bp, Artificial
  probe
  misc_feature (1)..(25): SEQ ID NO: 690; WAN024FTW; Start 153; Stop 177
tccttattattgtgaattaactggc

SEQ ID NO: 270456 - DNA, 25 bp, Artificial
  probe
  misc_feature (1)..(25): SEQ ID NO: 690; WAN024FTW; Start 472; Stop 496
gataaggtaatggaacaaagaagcg

SEQ ID NO: 270457 - DNA, 25 bp, Artificial
  probe
  misc_feature (1)..(25): SEQ ID NO: 690; WAN024FTW; Start 764; Stop 788
tcggaaagaaatatggacagagttt

SEQ ID NO: 270458 - DNA, 25 bp, Artificial
  probe
  misc_feature (1)..(25): SEQ ID NO: 690; WAN024FTW; Start 691; Stop 715
gaagtgccgtttatgtatatggaaa

SEQ ID NO: 270459 - DNA, 25 bp, Artificial
  probe
  misc_feature (1)..(25): SEQ ID NO: 690; WAN024FTW; Start 687; Stop 711
aaaggaagtgccgtttatgtatatg

SEQ ID NO: 270460 - DNA, 25 bp, Artificial
  probe
  misc_feature (1)..(25): SEQ ID NO: 690; WAN024FTW; Start 686; Stop 710
caaaggaagtgccgtttatgtatat

SEQ ID NO: 270461 - DNA, 25 bp, Artificial
  probe
  misc_feature (1)..(25): SEQ ID NO: 690; WAN024FTW; Start 471; Stop 495
tgataaggtaatggaacaaagaagc

SEQ ID NO: 270462 - DNA, 25 bp, Artificial
  probe
  misc_feature (1)..(25): SEQ ID NO: 690; WAN024FTW; Start 47; Stop 71
tgcccagtgattcaaatatgtatct

SEQ ID NO: 270463 - DNA, 25 bp, Artificial
  probe
  misc_feature (1)..(25): SEQ ID NO: 690; WAN024FTW; Start 763; Stop 787
ttcggaaagaaatatggacagagtt

SEQ ID NO: 270464 - DNA, 25 bp, Artificial
  probe
  misc_feature (1)..(25): SEQ ID NO: 690; WAN024FTW; Start 690; Stop 714
ggaagtgccgtttatgtatatggaa

SEQ ID NO: 270465 - DNA, 25 bp, Artificial
  probe
  misc_feature (1)..(25): SEQ ID NO: 690; WAN024FTW; Start 688; Stop 712
aaggaagtgccgtttatgtatatgg

SEQ ID NO: 270466 - DNA, 25 bp, Artificial
  probe
  misc_feature (1)..(25): SEQ ID NO: 690; WAN024FTW; Start 685; Stop 709
ccaaaggaagtgccgtttatgtata

SEQ ID NO: 270467 - DNA, 25 bp, Artificial
  probe
  misc_feature (1)..(25): SEQ ID NO: 690; WAN024FTW; Start 44; Stop 68
aaatgcccagtgattcaaatatgta

SEQ ID NO: 270468 - DNA, 25 bp, Artificial
  probe
  misc_feature (1)..(25): SEQ ID NO: 690; WAN024FTW; Start 473; Stop 497
ataaggtaatggaacaaagaagcgg

SEQ ID NO: 270469 - DNA, 25 bp, Artificial
  probe
  misc_feature (1)..(25): SEQ ID NO: 690; WAN024FTW; Start 157; Stop 181
tattattgtgaattaactggcttgt

SEQ ID NO: 270470 - DNA, 25 bp, Artificial
  probe
  misc_feature (1)..(25): SEQ ID NO: 690; WAN024FTW; Start 45; Stop 69
aatgcccagtgattcaaatatgtat

SEQ ID NO: 270471 - DNA, 25 bp, Artificial
  probe
  misc_feature (1)..(25): SEQ ID NO: 690; WAN024FTW; Start 659; Stop 683
tatggttggtgaagagcaatttaac

SEQ ID NO: 270472 - DNA, 25 bp, Artificial
  probe
  misc_feature (1)..(25): SEQ ID NO: 690; WAN024FTW; Start 658; Stop 682
gtatggttggtgaagagcaatttaa

SEQ ID NO: 270473 - DNA, 25 bp, Artificial
  probe
  misc_feature (1)..(25): SEQ ID NO: 690; WAN024FTW; Start 441; Stop 465
aatgaagaatccagaatatctctct

SEQ ID NO: 270474 - DNA, 25 bp, Artificial
  probe
  misc_feature (1)..(25): SEQ ID NO: 690; WAN024FTW; Start 107; Stop 131
taggatttcaaggtgacaattcaga

SEQ ID NO: 270475 - DNA, 25 bp, Artificial
  probe
  misc_feature (1)..(25): SEQ ID NO: 690; WAN024FTW; Start 109; Stop 133
ggatttcaaggtgacaattcagaag

SEQ ID NO: 270476 - DNA, 25 bp, Artificial
  probe
  misc_feature (1)..(25): SEQ ID NO: 690; WAN024FTW; Start 212; Stop 236
atctgggtttagtacattatcgtcg

SEQ ID NO: 270477 - DNA, 25 bp, Artificial
  probe
  misc_feature (1)..(25): SEQ ID NO: 690; WAN024FTW; Start 689; Stop 713
aggaagtgccgtttatgtatatgga

SEQ ID NO: 270478 - DNA, 25 bp, Artificial
  probe
  misc_feature (1)..(25): SEQ ID NO: 690; WAN024FTW; Start 215; Stop 239
tgggtttagtacattatcgtcgtta

SEQ ID NO: 270479 - DNA, 25 bp, Artificial
  probe
  misc_feature (1)..(25): SEQ ID NO: 690; WAN024FTW; Start 110; Stop 134
gatttcaaggtgacaattcagaaga

SEQ ID NO: 270480 - DNA, 25 bp, Artificial
  probe
  misc_feature (1)..(25): SEQ ID NO: 690; WAN024FTW; Start 108; Stop 132
aggatttcaaggtgacaattcagaa

SEQ ID NO: 270481 - DNA, 25 bp, Artificial
  probe
  misc_feature (1)..(25): SEQ ID NO: 690; WAN024FTW; Start 48; Stop 72
gcccagtgattcaaatatgtatcta

SEQ ID NO: 270482 - DNA, 25 bp, Artificial
  probe
  misc_feature (1)..(25): SEQ ID NO: 690; WAN024FTW; Start 214; Stop 238
ctgggtttagtacattatcgtcgtt

SEQ ID NO: 270483 - DNA, 25 bp, Artificial
  probe
  misc_feature (1)..(25): SEQ ID NO: 690; WAN024FTW; Start 106; Stop 130
ttaggatttcaaggtgacaattcag

SEQ ID NO: 270484 - DNA, 25 bp, Artificial
  probe
  misc_feature (1)..(25): SEQ ID NO: 690; WAN024FTW; Start 667; Stop 691
gtgaagagcaatttaactccaaagg

SEQ ID NO: 270485 - DNA, 25 bp, Artificial
  probe
  misc_feature (1)..(25): SEQ ID NO: 691; WAN024D4K; Start 346; Stop 370
tcaattatatcaagcacaggtagcc

SEQ ID NO: 270486 - DNA, 25 bp, Artificial
  probe
  misc_feature (1)..(25): SEQ ID NO: 691; WAN024D4K; Start 345; Stop 369
ttcaattatatcaagcacaggtagc

SEQ ID NO: 270487 - DNA, 25 bp, Artificial
  probe
  misc_feature (1)..(25): SEQ ID NO: 691; WAN024D4K; Start 364; Stop 388
ggtagcctagtagatggtgttattg

SEQ ID NO: 270488 - DNA, 25 bp, Artificial
  probe
  misc_feature (1)..(25): SEQ ID NO: 691; WAN024D4K; Start 365; Stop 389
gtagcctagtagatggtgttattgt

SEQ ID NO: 270489 - DNA, 25 bp, Artificial
  probe
  misc_feature (1)..(25): SEQ ID NO: 691; WAN024D4K; Start 473; Stop 497
cgtctggagtagtctatgtatctaa

SEQ ID NO: 270490 - DNA, 25 bp, Artificial
  probe
  misc_feature (1)..(25): SEQ ID NO: 691; WAN024D4K; Start 366; Stop 390
tagcctagtagatggtgttattgtt

SEQ ID NO: 270491 - DNA, 25 bp, Artificial
  probe
  misc_feature (1)..(25): SEQ ID NO: 691; WAN024D4K; Start 321; Stop 345
tggagaggaggatacaattagtaat

SEQ ID NO: 270492 - DNA, 25 bp, Artificial
  probe
  misc_feature (1)..(25): SEQ ID NO: 691; WAN024D4K; Start 320; Stop 344
ttggagaggaggatacaattagtaa

SEQ ID NO: 270493 - DNA, 25 bp, Artificial
  probe
  misc_feature (1)..(25): SEQ ID NO: 691; WAN024D4K; Start 348; Stop 372
aattatatcaagcacaggtagccta

SEQ ID NO: 270494 - DNA, 25 bp, Artificial
  probe
  misc_feature (1)..(25): SEQ ID NO: 691; WAN024D4K; Start 347; Stop 371
caattatatcaagcacaggtagcct

SEQ ID NO: 270495 - DNA, 25 bp, Artificial
  probe
  misc_feature (1)..(25): SEQ ID NO: 691; WAN024D4K; Start 351; Stop 375
tatatcaagcacaggtagcctagta

SEQ ID NO: 270496 - DNA, 25 bp, Artificial
  probe
  misc_feature (1)..(25): SEQ ID NO: 691; WAN024D4K; Start 363; Stop 387
aggtagcctagtagatggtgttatt

SEQ ID NO: 270497 - DNA, 25 bp, Artificial
  probe
  misc_feature (1)..(25): SEQ ID NO: 691; WAN024D4K; Start 349; Stop 373
attatatcaagcacaggtagcctag

SEQ ID NO: 270498 - DNA, 25 bp, Artificial
  probe
  misc_feature (1)..(25): SEQ ID NO: 691; WAN024D4K; Start 350; Stop 374
ttatatcaagcacaggtagcctagt

SEQ ID NO: 270499 - DNA, 25 bp, Artificial
  probe
  misc_feature (1)..(25): SEQ ID NO: 691; WAN024D4K; Start 362; Stop 386
caggtagcctagtagatggtgttat

SEQ ID NO: 270500 - DNA, 25 bp, Artificial
  probe
  misc_feature (1)..(25): SEQ ID NO: 691; WAN024D4K; Start 352; Stop 376
atatcaagcacaggtagcctagtag

SEQ ID NO: 270501 - DNA, 25 bp, Artificial
  probe
  misc_feature (1)..(25): SEQ ID NO: 691; WAN024D4K; Start 471; Stop 495
aacgtctggagtagtctatgtatct

SEQ ID NO: 270502 - DNA, 25 bp, Artificial
  probe
  misc_feature (1)..(25): SEQ ID NO: 691; WAN024D4K; Start 902; Stop 926
tggctaaagaaatgatagaaggtgt

SEQ ID NO: 270503 - DNA, 25 bp, Artificial
  probe
  misc_feature (1)..(25): SEQ ID NO: 691; WAN024D4K; Start 472; Stop 496
acgtctggagtagtctatgtatcta

SEQ ID NO: 270504 - DNA, 25 bp, Artificial
  probe
  misc_feature (1)..(25): SEQ ID NO: 691; WAN024D4K; Start 255; Stop 279
tacgctgttagataaagtgttacgg

SEQ ID NO: 270505 - DNA, 25 bp, Artificial
  probe
  misc_feature (1)..(25): SEQ ID NO: 691; WAN024D4K; Start 248; Stop 272
ggtttcatacgctgttagataaagt

SEQ ID NO: 270506 - DNA, 25 bp, Artificial
  probe
  misc_feature (1)..(25): SEQ ID NO: 691; WAN024D4K; Start 247; Stop 271
tggtttcatacgctgttagataaag

SEQ ID NO: 270507 - DNA, 25 bp, Artificial
  probe
  misc_feature (1)..(25): SEQ ID NO: 691; WAN024D4K; Start 237; Stop 261
tcctttaatttggtttcatacgctg

SEQ ID NO: 270508 - DNA, 25 bp, Artificial
  probe
  misc_feature (1)..(25): SEQ ID NO: 691; WAN024D4K; Start 903; Stop 927
ggctaaagaaatgatagaaggtgtt

SEQ ID NO: 270509 - DNA, 25 bp, Artificial
  probe
  misc_feature (1)..(25): SEQ ID NO: 691; WAN024D4K; Start 901; Stop 925
ttggctaaagaaatgatagaaggtg

SEQ ID NO: 270510 - DNA, 25 bp, Artificial
  probe
  misc_feature (1)..(25): SEQ ID NO: 691; WAN024D4K; Start 281; Stop 305
cgtgtaaagaatttggtgttaatgc

SEQ ID NO: 270511 - DNA, 25 bp, Artificial
  probe
  misc_feature (1)..(25): SEQ ID NO: 691; WAN024D4K; Start 254; Stop 278
atacgctgttagataaagtgttacg

SEQ ID NO: 270512 - DNA, 25 bp, Artificial
  probe
  misc_feature (1)..(25): SEQ ID NO: 691; WAN024D4K; Start 238; Stop 262
cctttaatttggtttcatacgctgt

SEQ ID NO: 270513 - DNA, 25 bp, Artificial
  probe
  misc_feature (1)..(25): SEQ ID NO: 691; WAN024D4K; Start 236; Stop 260
ttcctttaatttggtttcatacgct

SEQ ID NO: 270514 - DNA, 25 bp, Artificial
  probe
  misc_feature (1)..(25): SEQ ID NO: 691; WAN024D4K; Start 76; Stop 100
tcacgagttattaatggtggagtaa

SEQ ID NO: 270515 - DNA, 25 bp, Artificial
  probe
  misc_feature (1)..(25): SEQ ID NO: 691; WAN024D4K; Start 75; Stop 99
ttcacgagttattaatggtggagta

SEQ ID NO: 270516 - DNA, 25 bp, Artificial
  probe
  misc_feature (1)..(25): SEQ ID NO: 691; WAN024D4K; Start 243; Stop 267
aatttggtttcatacgctgttagat

SEQ ID NO: 270517 - DNA, 25 bp, Artificial
  probe
  misc_feature (1)..(25): SEQ ID NO: 691; WAN024D4K; Start 954; Stop 978
cacatctgttgaagtttctcctaaa

SEQ ID NO: 270518 - DNA, 25 bp, Artificial
  probe
  misc_feature (1)..(25): SEQ ID NO: 692; WAN024FG3; Start 776; Stop 800
tccaaggtgaggttaagatgattac

SEQ ID NO: 270519 - DNA, 25 bp, Artificial
  probe
  misc_feature (1)..(25): SEQ ID NO: 692; WAN024FG3; Start 773; Stop 797
gtatccaaggtgaggttaagatgat

SEQ ID NO: 270520 - DNA, 25 bp, Artificial
  probe
  misc_feature (1)..(25): SEQ ID NO: 692; WAN024FG3; Start 775; Stop 799
atccaaggtgaggttaagatgatta

SEQ ID NO: 270521 - DNA, 25 bp, Artificial
  probe
  misc_feature (1)..(25): SEQ ID NO: 692; WAN024FG3; Start 774; Stop 798
tatccaaggtgaggttaagatgatt

SEQ ID NO: 270522 - DNA, 25 bp, Artificial
  probe
  misc_feature (1)..(25): SEQ ID NO: 692; WAN024FG3; Start 640; Stop 664
attgagattggtaatactagcgagg

SEQ ID NO: 270523 - DNA, 25 bp, Artificial
  probe
  misc_feature (1)..(25): SEQ ID NO: 692; WAN024FG3; Start 770; Stop 794
atcgtatccaaggtgaggttaagat

SEQ ID NO: 270524 - DNA, 25 bp, Artificial
  probe
  misc_feature (1)..(25): SEQ ID NO: 692; WAN024FG3; Start 778; Stop 802
caaggtgaggttaagatgattacgg

SEQ ID NO: 270525 - DNA, 25 bp, Artificial
  probe
  misc_feature (1)..(25): SEQ ID NO: 692; WAN024FG3; Start 777; Stop 801
ccaaggtgaggttaagatgattacg

SEQ ID NO: 270526 - DNA, 25 bp, Artificial
  probe
  misc_feature (1)..(25): SEQ ID NO: 692; WAN024FG3; Start 638; Stop 662
tgattgagattggtaatactagcga

SEQ ID NO: 270527 - DNA, 25 bp, Artificial
  probe
  misc_feature (1)..(25): SEQ ID NO: 692; WAN024FG3; Start 637; Stop 661
gtgattgagattggtaatactagcg

SEQ ID NO: 270528 - DNA, 25 bp, Artificial
  probe
  misc_feature (1)..(25): SEQ ID NO: 692; WAN024FG3; Start 636; Stop 660
ggtgattgagattggtaatactagc

SEQ ID NO: 270529 - DNA, 25 bp, Artificial
  probe
  misc_feature (1)..(25): SEQ ID NO: 692; WAN024FG3; Start 639; Stop 663
gattgagattggtaatactagcgag

SEQ ID NO: 270530 - DNA, 25 bp, Artificial
  probe
  misc_feature (1)..(25): SEQ ID NO: 692; WAN024FG3; Start 769; Stop 793
catcgtatccaaggtgaggttaaga

SEQ ID NO: 270531 - DNA, 25 bp, Artificial
  probe
  misc_feature (1)..(25): SEQ ID NO: 692; WAN024FG3; Start 772; Stop 796
cgtatccaaggtgaggttaagatga

SEQ ID NO: 270532 - DNA, 25 bp, Artificial
  probe
  misc_feature (1)..(25): SEQ ID NO: 692; WAN024FG3; Start 771; Stop 795
tcgtatccaaggtgaggttaagatg

SEQ ID NO: 270533 - DNA, 25 bp, Artificial
  probe
  misc_feature (1)..(25): SEQ ID NO: 692; WAN024FG3; Start 641; Stop 665
ttgagattggtaatactagcgaggc

SEQ ID NO: 270534 - DNA, 25 bp, Artificial
  probe
  misc_feature (1)..(25): SEQ ID NO: 692; WAN024FG3; Start 768; Stop 792
ccatcgtatccaaggtgaggttaag

SEQ ID NO: 270535 - DNA, 25 bp, Artificial
  probe
  misc_feature (1)..(25): SEQ ID NO: 692; WAN024FG3; Start 634; Stop 658
cgggtgattgagattggtaatacta

SEQ ID NO: 270536 - DNA, 25 bp, Artificial
  probe
  misc_feature (1)..(25): SEQ ID NO: 692; WAN024FG3; Start 826; Stop 850
cccattacccagtttgcgatttata

SEQ ID NO: 270537 - DNA, 25 bp, Artificial
  probe
  misc_feature (1)..(25): SEQ ID NO: 692; WAN024FG3; Start 596; Stop 620
aaacagttgccatttatcccttctt

SEQ ID NO: 270538 - DNA, 25 bp, Artificial
  probe
  misc_feature (1)..(25): SEQ ID NO: 692; WAN024FG3; Start 486; Stop 510
aattgttgctagtctgtctcaggtt

SEQ ID NO: 270539 - DNA, 25 bp, Artificial
  probe
  misc_feature (1)..(25): SEQ ID NO: 692; WAN024FG3; Start 631; Stop 655
agacgggtgattgagattggtaata

SEQ ID NO: 270540 - DNA, 25 bp, Artificial
  probe
  misc_feature (1)..(25): SEQ ID NO: 692; WAN024FG3; Start 632; Stop 656
gacgggtgattgagattggtaatac

SEQ ID NO: 270541 - DNA, 25 bp, Artificial
  probe
  misc_feature (1)..(25): SEQ ID NO: 692; WAN024FG3; Start 169; Stop 193
ttaacatttgaaggaagcaaggaag

SEQ ID NO: 270542 - DNA, 25 bp, Artificial
  probe
  misc_feature (1)..(25): SEQ ID NO: 692; WAN024FG3; Start 608; Stop 632
tttatcccttcttgtcagacttcag

SEQ ID NO: 270543 - DNA, 25 bp, Artificial
  probe
  misc_feature (1)..(25): SEQ ID NO: 692; WAN024FG3; Start 607; Stop 631
atttatcccttcttgtcagacttca

SEQ ID NO: 270544 - DNA, 25 bp, Artificial
  probe
  misc_feature (1)..(25): SEQ ID NO: 692; WAN024FG3; Start 605; Stop 629
ccatttatcccttcttgtcagactt

SEQ ID NO: 270545 - DNA, 25 bp, Artificial
  probe
  misc_feature (1)..(25): SEQ ID NO: 692; WAN024FG3; Start 606; Stop 630
catttatcccttcttgtcagacttc

SEQ ID NO: 270546 - DNA, 25 bp, Artificial
  probe
  misc_feature (1)..(25): SEQ ID NO: 692; WAN024FG3; Start 633; Stop 657
acgggtgattgagattggtaatact

SEQ ID NO: 270547 - DNA, 25 bp, Artificial
  probe
  misc_feature (1)..(25): SEQ ID NO: 692; WAN024FG3; Start 609; Stop 633
ttatcccttcttgtcagacttcaga

SEQ ID NO: 270548 - DNA, 25 bp, Artificial
  probe
  misc_feature (1)..(25): SEQ ID NO: 692; WAN024FG3; Start 13; Stop 37
gctttgctagaagaaattaagacct

SEQ ID NO: 270549 - DNA, 25 bp, Artificial
  probe
  misc_feature (1)..(25): SEQ ID NO: 692; WAN024FG3; Start 645; Stop 669
gattggtaatactagcgaggcttac

SEQ ID NO: 270550 - DNA, 25 bp, Artificial
  probe
  misc_feature (1)..(25): SEQ ID NO: 692; WAN024FG3; Start 644; Stop 668
agattggtaatactagcgaggctta

SEQ ID NO: 270551 - DNA, 25 bp, Artificial
  probe
  misc_feature (1)..(25): SEQ ID NO: 693; WAN024D2R; Start 15; Stop 39
tgtaatcggaaagagtttgaaagaa

SEQ ID NO: 270552 - DNA, 25 bp, Artificial
  probe
  misc_feature (1)..(25): SEQ ID NO: 693; WAN024D2R; Start 14; Stop 38
ttgtaatcggaaagagtttgaaaga

SEQ ID NO: 270553 - DNA, 25 bp, Artificial
  probe
  misc_feature (1)..(25): SEQ ID NO: 693; WAN024D2R; Start 13; Stop 37
tttgtaatcggaaagagtttgaaag

SEQ ID NO: 270554 - DNA, 25 bp, Artificial
  probe
  misc_feature (1)..(25): SEQ ID NO: 693; WAN024D2R; Start 16; Stop 40
gtaatcggaaagagtttgaaagaat

SEQ ID NO: 270555 - DNA, 25 bp, Artificial
  probe
  misc_feature (1)..(25): SEQ ID NO: 693; WAN024D2R; Start 83; Stop 107
gtgctgaccctagatcaacaattat

SEQ ID NO: 270556 - DNA, 25 bp, Artificial
  probe
  misc_feature (1)..(25): SEQ ID NO: 693; WAN024D2R; Start 84; Stop 108
tgctgaccctagatcaacaattata

SEQ ID NO: 270557 - DNA, 25 bp, Artificial
  probe
  misc_feature (1)..(25): SEQ ID NO: 693; WAN024D2R; Start 20; Stop 44
tcggaaagagtttgaaagaattatc

SEQ ID NO: 270558 - DNA, 25 bp, Artificial
  probe
  misc_feature (1)..(25): SEQ ID NO: 693; WAN024D2R; Start 21; Stop 45
cggaaagagtttgaaagaattatct

SEQ ID NO: 270559 - DNA, 25 bp, Artificial
  probe
  misc_feature (1)..(25): SEQ ID NO: 693; WAN024D2R; Start 85; Stop 109
gctgaccctagatcaacaattatat

SEQ ID NO: 270560 - DNA, 25 bp, Artificial
  probe
  misc_feature (1)..(25): SEQ ID NO: 693; WAN024D2R; Start 18; Stop 42
aatcggaaagagtttgaaagaatta

SEQ ID NO: 270561 - DNA, 25 bp, Artificial
  probe
  misc_feature (1)..(25): SEQ ID NO: 693; WAN024D2R; Start 17; Stop 41
taatcggaaagagtttgaaagaatt

SEQ ID NO: 270562 - DNA, 25 bp, Artificial
  probe
  misc_feature (1)..(25): SEQ ID NO: 693; WAN024D2R; Start 19; Stop 43
atcggaaagagtttgaaagaattat

SEQ ID NO: 270563 - DNA, 25 bp, Artificial
  probe
  misc_feature (1)..(25): SEQ ID NO: 693; WAN024D2R; Start 87; Stop 111
tgaccctagatcaacaattatatgt

SEQ ID NO: 270564 - DNA, 25 bp, Artificial
  probe
  misc_feature (1)..(25): SEQ ID NO: 693; WAN024D2R; Start 82; Stop 106
ggtgctgaccctagatcaacaatta

SEQ ID NO: 270565 - DNA, 25 bp, Artificial
  probe
  misc_feature (1)..(25): SEQ ID NO: 693; WAN024D2R; Start 48; Stop 72
tgaagaaatgcaattggtttatggt

SEQ ID NO: 270566 - DNA, 25 bp, Artificial
  probe
  misc_feature (1)..(25): SEQ ID NO: 693; WAN024D2R; Start 49; Stop 73
gaagaaatgcaattggtttatggtg

SEQ ID NO: 270567 - DNA, 25 bp, Artificial
  probe
  misc_feature (1)..(25): SEQ ID NO: 693; WAN024D2R; Start 50; Stop 74
aagaaatgcaattggtttatggtgg

SEQ ID NO: 270568 - DNA, 25 bp, Artificial
  probe
  misc_feature (1)..(25): SEQ ID NO: 693; WAN024D2R; Start 86; Stop 110
ctgaccctagatcaacaattatatg

SEQ ID NO: 270569 - DNA, 25 bp, Artificial
  probe
  misc_feature (1)..(25): SEQ ID NO: 693; WAN024D2R; Start 59; Stop 83
aattggtttatggtggcacagatgg

SEQ ID NO: 270570 - DNA, 25 bp, Artificial
  probe
  misc_feature (1)..(25): SEQ ID NO: 693; WAN024D2R; Start 43; Stop 67
tctcttgaagaaatgcaattggttt

SEQ ID NO: 270571 - DNA, 25 bp, Artificial
  probe
  misc_feature (1)..(25): SEQ ID NO: 693; WAN024D2R; Start 42; Stop 66
atctcttgaagaaatgcaattggtt

SEQ ID NO: 270572 - DNA, 25 bp, Artificial
  probe
  misc_feature (1)..(25): SEQ ID NO: 693; WAN024D2R; Start 12; Stop 36
ttttgtaatcggaaagagtttgaaa

SEQ ID NO: 270573 - DNA, 25 bp, Artificial
  probe
  misc_feature (1)..(25): SEQ ID NO: 693; WAN024D2R; Start 47; Stop 71
ttgaagaaatgcaattggtttatgg

SEQ ID NO: 270574 - DNA, 25 bp, Artificial
  probe
  misc_feature (1)..(25): SEQ ID NO: 693; WAN024D2R; Start 41; Stop 65
tatctcttgaagaaatgcaattggt

SEQ ID NO: 270575 - DNA, 25 bp, Artificial
  probe
  misc_feature (1)..(25): SEQ ID NO: 693; WAN024D2R; Start 11; Stop 35
attttgtaatcggaaagagtttgaa

SEQ ID NO: 270576 - DNA, 25 bp, Artificial
  probe
  misc_feature (1)..(25): SEQ ID NO: 693; WAN024D2R; Start 44; Stop 68
ctcttgaagaaatgcaattggttta

SEQ ID NO: 270577 - DNA, 25 bp, Artificial
  probe
  misc_feature (1)..(25): SEQ ID NO: 693; WAN024D2R; Start 22; Stop 46
ggaaagagtttgaaagaattatctc

SEQ ID NO: 270578 - DNA, 25 bp, Artificial
  probe
  misc_feature (1)..(25): SEQ ID NO: 693; WAN024D2R; Start 36; Stop 60
agaattatctcttgaagaaatgcaa

SEQ ID NO: 270579 - DNA, 25 bp, Artificial
  probe
  misc_feature (1)..(25): SEQ ID NO: 693; WAN024D2R; Start 110; Stop 134
gttctgctacattaagttttattgc

SEQ ID NO: 270580 - DNA, 25 bp, Artificial
  probe
  misc_feature (1)..(25): SEQ ID NO: 693; WAN024D2R; Start 40; Stop 64
ttatctcttgaagaaatgcaattgg

SEQ ID NO: 270581 - DNA, 25 bp, Artificial
  probe
  misc_feature (1)..(25): SEQ ID NO: 693; WAN024D2R; Start 127; Stop 151
tttattgcatcatatttggggtcag

SEQ ID NO: 270582 - DNA, 25 bp, Artificial
  probe
  misc_feature (1)..(25): SEQ ID NO: 693; WAN024D2R; Start 46; Stop 70
cttgaagaaatgcaattggtttatg

SEQ ID NO: 270583 - DNA, 25 bp, Artificial
  probe
  misc_feature (1)..(25): SEQ ID NO: 693; WAN024D2R; Start 97; Stop 121
tcaacaattatatgttctgctacat

SEQ ID NO: 270584 - DNA, 25 bp, Artificial
  probe
  misc_feature (1)..(25): SEQ ID NO: 694; WAN024CKP; Start 496; Stop 520
gttgagatgaagacggagttagatg

SEQ ID NO: 270585 - DNA, 25 bp, Artificial
  probe
  misc_feature (1)..(25): SEQ ID NO: 694; WAN024CKP; Start 495; Stop 519
tgttgagatgaagacggagttagat

SEQ ID NO: 270586 - DNA, 25 bp, Artificial
  probe
  misc_feature (1)..(25): SEQ ID NO: 694; WAN024CKP; Start 509; Stop 533
cggagttagatggctactatgttaa

SEQ ID NO: 270587 - DNA, 25 bp, Artificial
  probe
  misc_feature (1)..(25): SEQ ID NO: 694; WAN024CKP; Start 508; Stop 532
acggagttagatggctactatgtta

SEQ ID NO: 270588 - DNA, 25 bp, Artificial
  probe
  misc_feature (1)..(25): SEQ ID NO: 694; WAN024CKP; Start 412; Stop 436
gcagagagagataagtatggagcaa

SEQ ID NO: 270589 - DNA, 25 bp, Artificial
  probe
  misc_feature (1)..(25): SEQ ID NO: 694; WAN024CKP; Start 497; Stop 521
ttgagatgaagacggagttagatgg

SEQ ID NO: 270590 - DNA, 25 bp, Artificial
  probe
  misc_feature (1)..(25): SEQ ID NO: 694; WAN024CKP; Start 494; Stop 518
ctgttgagatgaagacggagttaga

SEQ ID NO: 270591 - DNA, 25 bp, Artificial
  probe
  misc_feature (1)..(25): SEQ ID NO: 694; WAN024CKP; Start 504; Stop 528
gaagacggagttagatggctactat

SEQ ID NO: 270592 - DNA, 25 bp, Artificial
  probe
  misc_feature (1)..(25): SEQ ID NO: 694; WAN024CKP; Start 505; Stop 529
aagacggagttagatggctactatg

SEQ ID NO: 270593 - DNA, 25 bp, Artificial
  probe
  misc_feature (1)..(25): SEQ ID NO: 694; WAN024CKP; Start 493; Stop 517
tctgttgagatgaagacggagttag

SEQ ID NO: 270594 - DNA, 25 bp, Artificial
  probe
  misc_feature (1)..(25): SEQ ID NO: 694; WAN024CKP; Start 507; Stop 531
gacggagttagatggctactatgtt

SEQ ID NO: 270595 - DNA, 25 bp, Artificial
  probe
  misc_feature (1)..(25): SEQ ID NO: 694; WAN024CKP; Start 354; Stop 378
tggtaatatgagtattgtaggtcct

SEQ ID NO: 270596 - DNA, 25 bp, Artificial
  probe
  misc_feature (1)..(25): SEQ ID NO: 694; WAN024CKP; Start 501; Stop 525
gatgaagacggagttagatggctac

SEQ ID NO: 270597 - DNA, 25 bp, Artificial
  probe
  misc_feature (1)..(25): SEQ ID NO: 694; WAN024CKP; Start 500; Stop 524
agatgaagacggagttagatggcta

SEQ ID NO: 270598 - DNA, 25 bp, Artificial
  probe
  misc_feature (1)..(25): SEQ ID NO: 694; WAN024CKP; Start 353; Stop 377
ttggtaatatgagtattgtaggtcc

SEQ ID NO: 270599 - DNA, 25 bp, Artificial
  probe
  misc_feature (1)..(25): SEQ ID NO: 694; WAN024CKP; Start 506; Stop 530
agacggagttagatggctactatgt

SEQ ID NO: 270600 - DNA, 25 bp, Artificial
  probe
  misc_feature (1)..(25): SEQ ID NO: 694; WAN024CKP; Start 503; Stop 527
tgaagacggagttagatggctacta

SEQ ID NO: 270601 - DNA, 25 bp, Artificial
  probe
  misc_feature (1)..(25): SEQ ID NO: 694; WAN024CKP; Start 407; Stop 431
tgattgcagagagagataagtatgg

SEQ ID NO: 270602 - DNA, 25 bp, Artificial
  probe
  misc_feature (1)..(25): SEQ ID NO: 694; WAN024CKP; Start 599; Stop 623
aaggtattgtagagggtagtggtaa

SEQ ID NO: 270603 - DNA, 25 bp, Artificial
  probe
  misc_feature (1)..(25): SEQ ID NO: 694; WAN024CKP; Start 598; Stop 622
aaaggtattgtagagggtagtggta

SEQ ID NO: 270604 - DNA, 25 bp, Artificial
  probe
  misc_feature (1)..(25): SEQ ID NO: 694; WAN024CKP; Start 408; Stop 432
gattgcagagagagataagtatgga

SEQ ID NO: 270605 - DNA, 25 bp, Artificial
  probe
  misc_feature (1)..(25): SEQ ID NO: 694; WAN024CKP; Start 606; Stop 630
tgtagagggtagtggtaagaaagaa

SEQ ID NO: 270606 - DNA, 25 bp, Artificial
  probe
  misc_feature (1)..(25): SEQ ID NO: 694; WAN024CKP; Start 605; Stop 629
ttgtagagggtagtggtaagaaaga

SEQ ID NO: 270607 - DNA, 25 bp, Artificial
  probe
  misc_feature (1)..(25): SEQ ID NO: 694; WAN024CKP; Start 409; Stop 433
attgcagagagagataagtatggag

SEQ ID NO: 270608 - DNA, 25 bp, Artificial
  probe
  misc_feature (1)..(25): SEQ ID NO: 694; WAN024CKP; Start 413; Stop 437
cagagagagataagtatggagcaaa

SEQ ID NO: 270609 - DNA, 25 bp, Artificial
  probe
  misc_feature (1)..(25): SEQ ID NO: 694; WAN024CKP; Start 610; Stop 634
gagggtagtggtaagaaagaaagtc

SEQ ID NO: 270610 - DNA, 25 bp, Artificial
  probe
  misc_feature (1)..(25): SEQ ID NO: 694; WAN024CKP; Start 604; Stop 628
attgtagagggtagtggtaagaaag

SEQ ID NO: 270611 - DNA, 25 bp, Artificial
  probe
  misc_feature (1)..(25): SEQ ID NO: 694; WAN024CKP; Start 601; Stop 625
ggtattgtagagggtagtggtaaga

SEQ ID NO: 270612 - DNA, 25 bp, Artificial
  probe
  misc_feature (1)..(25): SEQ ID NO: 694; WAN024CKP; Start 600; Stop 624
aggtattgtagagggtagtggtaag

SEQ ID NO: 270613 - DNA, 25 bp, Artificial
  probe
  misc_feature (1)..(25): SEQ ID NO: 694; WAN024CKP; Start 607; Stop 631
gtagagggtagtggtaagaaagaaa

SEQ ID NO: 270614 - DNA, 25 bp, Artificial
  probe
  misc_feature (1)..(25): SEQ ID NO: 694; WAN024CKP; Start 609; Stop 633
agagggtagtggtaagaaagaaagt

SEQ ID NO: 270615 - DNA, 25 bp, Artificial
  probe
  misc_feature (1)..(25): SEQ ID NO: 694; WAN024CKP; Start 608; Stop 632
tagagggtagtggtaagaaagaaag

SEQ ID NO: 270616 - DNA, 25 bp, Artificial
  probe
  misc_feature (1)..(25): SEQ ID NO: 694; WAN024CKP; Start 602; Stop 626
gtattgtagagggtagtggtaagaa

SEQ ID NO: 270617 - DNA, 25 bp, Artificial
  probe
  misc_feature (1)..(25): SEQ ID NO: 695; WAN024G5L; Start 1032; Stop 1056
cattattggtgaaggtgcgattatt

SEQ ID NO: 270618 - DNA, 25 bp, Artificial
  probe
  misc_feature (1)..(25): SEQ ID NO: 695; WAN024G5L; Start 498; Stop 522
gaacacagatgctaacaatcgtatt

SEQ ID NO: 270619 - DNA, 25 bp, Artificial
  probe
  misc_feature (1)..(25): SEQ ID NO: 695; WAN024G5L; Start 497; Stop 521
tgaacacagatgctaacaatcgtat

SEQ ID NO: 270620 - DNA, 25 bp, Artificial
  probe
  misc_feature (1)..(25): SEQ ID NO: 695; WAN024G5L; Start 496; Stop 520
atgaacacagatgctaacaatcgta

SEQ ID NO: 270621 - DNA, 25 bp, Artificial
  probe
  misc_feature (1)..(25): SEQ ID NO: 695; WAN024G5L; Start 417; Stop 441
gtctcataaggataataatgccagc

SEQ ID NO: 270622 - DNA, 25 bp, Artificial
  probe
  misc_feature (1)..(25): SEQ ID NO: 695; WAN024G5L; Start 878; Stop 902
aagactcattagttgtagacggatg

SEQ ID NO: 270623 - DNA, 25 bp, Artificial
  probe
  misc_feature (1)..(25): SEQ ID NO: 695; WAN024G5L; Start 877; Stop 901
gaagactcattagttgtagacggat

SEQ ID NO: 270624 - DNA, 25 bp, Artificial
  probe
  misc_feature (1)..(25): SEQ ID NO: 695; WAN024G5L; Start 873; Stop 897
tgtggaagactcattagttgtagac

SEQ ID NO: 270625 - DNA, 25 bp, Artificial
  probe
  misc_feature (1)..(25): SEQ ID NO: 695; WAN024G5L; Start 414; Stop 438
ccagtctcataaggataataatgcc

SEQ ID NO: 270626 - DNA, 25 bp, Artificial
  probe
  misc_feature (1)..(25): SEQ ID NO: 695; WAN024G5L; Start 880; Stop 904
gactcattagttgtagacggatgtt

SEQ ID NO: 270627 - DNA, 25 bp, Artificial
  probe
  misc_feature (1)..(25): SEQ ID NO: 695; WAN024G5L; Start 797; Stop 821
atagtcgtaaccgtcaatggaagat

SEQ ID NO: 270628 - DNA, 25 bp, Artificial
  probe
  misc_feature (1)..(25): SEQ ID NO: 695; WAN024G5L; Start 398; Stop 422
actatgatgatatgctccagtctca

SEQ ID NO: 270629 - DNA, 25 bp, Artificial
  probe
  misc_feature (1)..(25): SEQ ID NO: 695; WAN024G5L; Start 251; Stop 275
tctctattcttcaaccttattctgc

SEQ ID NO: 270630 - DNA, 25 bp, Artificial
  probe
  misc_feature (1)..(25): SEQ ID NO: 695; WAN024G5L; Start 872; Stop 896
atgtggaagactcattagttgtaga

SEQ ID NO: 270631 - DNA, 25 bp, Artificial
  probe
  misc_feature (1)..(25): SEQ ID NO: 695; WAN024G5L; Start 879; Stop 903
agactcattagttgtagacggatgt

SEQ ID NO: 270632 - DNA, 25 bp, Artificial
  probe
  misc_feature (1)..(25): SEQ ID NO: 695; WAN024G5L; Start 874; Stop 898
gtggaagactcattagttgtagacg

SEQ ID NO: 270633 - DNA, 25 bp, Artificial
  probe
  misc_feature (1)..(25): SEQ ID NO: 695; WAN024G5L; Start 798; Stop 822
tagtcgtaaccgtcaatggaagatt

SEQ ID NO: 270634 - DNA, 25 bp, Artificial
  probe
  misc_feature (1)..(25): SEQ ID NO: 695; WAN024G5L; Start 1075; Stop 1099
gatggaacagatgaagtacaagttg

SEQ ID NO: 270635 - DNA, 25 bp, Artificial
  probe
  misc_feature (1)..(25): SEQ ID NO: 695; WAN024G5L; Start 1074; Stop 1098
tgatggaacagatgaagtacaagtt

SEQ ID NO: 270636 - DNA, 25 bp, Artificial
  probe
  misc_feature (1)..(25): SEQ ID NO: 695; WAN024G5L; Start 601; Stop 625
cttcgtaatatgttagtcgctgctg

SEQ ID NO: 270637 - DNA, 25 bp, Artificial
  probe
  misc_feature (1)..(25): SEQ ID NO: 695; WAN024G5L; Start 1073; Stop 1097
ttgatggaacagatgaagtacaagt

SEQ ID NO: 270638 - DNA, 25 bp, Artificial
  probe
  misc_feature (1)..(25): SEQ ID NO: 695; WAN024G5L; Start 415; Stop 439
cagtctcataaggataataatgcca

SEQ ID NO: 270639 - DNA, 25 bp, Artificial
  probe
  misc_feature (1)..(25): SEQ ID NO: 695; WAN024G5L; Start 1072; Stop 1096
attgatggaacagatgaagtacaag

SEQ ID NO: 270640 - DNA, 25 bp, Artificial
  probe
  misc_feature (1)..(25): SEQ ID NO: 695; WAN024G5L; Start 729; Stop 753
agatgttggtactattgagtcactt

SEQ ID NO: 270641 - DNA, 25 bp, Artificial
  probe
  misc_feature (1)..(25): SEQ ID NO: 695; WAN024G5L; Start 728; Stop 752
aagatgttggtactattgagtcact

SEQ ID NO: 270642 - DNA, 25 bp, Artificial
  probe
  misc_feature (1)..(25): SEQ ID NO: 695; WAN024G5L; Start 876; Stop 900
ggaagactcattagttgtagacgga

SEQ ID NO: 270643 - DNA, 25 bp, Artificial
  probe
  misc_feature (1)..(25): SEQ ID NO: 695; WAN024G5L; Start 796; Stop 820
gatagtcgtaaccgtcaatggaaga

SEQ ID NO: 270644 - DNA, 25 bp, Artificial
  probe
  misc_feature (1)..(25): SEQ ID NO: 695; WAN024G5L; Start 416; Stop 440
agtctcataaggataataatgccag

SEQ ID NO: 270645 - DNA, 25 bp, Artificial
  probe
  misc_feature (1)..(25): SEQ ID NO: 695; WAN024G5L; Start 603; Stop 627
tcgtaatatgttagtcgctgctgaa

SEQ ID NO: 270646 - DNA, 25 bp, Artificial
  probe
  misc_feature (1)..(25): SEQ ID NO: 695; WAN024G5L; Start 602; Stop 626
ttcgtaatatgttagtcgctgctga

SEQ ID NO: 270647 - DNA, 25 bp, Artificial
  probe
  misc_feature (1)..(25): SEQ ID NO: 695; WAN024G5L; Start 869; Stop 893
ctcatgtggaagactcattagttgt

SEQ ID NO: 270648 - DNA, 25 bp, Artificial
  probe
  misc_feature (1)..(25): SEQ ID NO: 695; WAN024G5L; Start 875; Stop 899
tggaagactcattagttgtagacgg

SEQ ID NO: 270649 - DNA, 25 bp, Artificial
  probe
  misc_feature (1)..(25): SEQ ID NO: 695; WAN024G5L; Start 870; Stop 894
tcatgtggaagactcattagttgta

SEQ ID NO: 270650 - DNA, 25 bp, Artificial
  probe
  misc_feature (1)..(25): SEQ ID NO: 696; WAN024D3E; Start 364; Stop 388
ctacctattggcttagtatgcttga

SEQ ID NO: 270651 - DNA, 25 bp, Artificial
  probe
  misc_feature (1)..(25): SEQ ID NO: 696; WAN024D3E; Start 363; Stop 387
tctacctattggcttagtatgcttg

SEQ ID NO: 270652 - DNA, 25 bp, Artificial
  probe
  misc_feature (1)..(25): SEQ ID NO: 696; WAN024D3E; Start 362; Stop 386
gtctacctattggcttagtatgctt

SEQ ID NO: 270653 - DNA, 25 bp, Artificial
  probe
  misc_feature (1)..(25): SEQ ID NO: 696; WAN024D3E; Start 361; Stop 385
agtctacctattggcttagtatgct

SEQ ID NO: 270654 - DNA, 25 bp, Artificial
  probe
  misc_feature (1)..(25): SEQ ID NO: 696; WAN024D3E; Start 365; Stop 389
tacctattggcttagtatgcttgat

SEQ ID NO: 270655 - DNA, 25 bp, Artificial
  probe
  misc_feature (1)..(25): SEQ ID NO: 696; WAN024D3E; Start 360; Stop 384
tagtctacctattggcttagtatgc

SEQ ID NO: 270656 - DNA, 25 bp, Artificial
  probe
  misc_feature (1)..(25): SEQ ID NO: 696; WAN024D3E; Start 357; Stop 381
tgctagtctacctattggcttagta

SEQ ID NO: 270657 - DNA, 25 bp, Artificial
  probe
  misc_feature (1)..(25): SEQ ID NO: 696; WAN024D3E; Start 356; Stop 380
atgctagtctacctattggcttagt

SEQ ID NO: 270658 - DNA, 25 bp, Artificial
  probe
  misc_feature (1)..(25): SEQ ID NO: 696; WAN024D3E; Start 367; Stop 391
cctattggcttagtatgcttgatct

SEQ ID NO: 270659 - DNA, 25 bp, Artificial
  probe
  misc_feature (1)..(25): SEQ ID NO: 696; WAN024D3E; Start 366; Stop 390
acctattggcttagtatgcttgatc

SEQ ID NO: 270660 - DNA, 25 bp, Artificial
  probe
  misc_feature (1)..(25): SEQ ID NO: 696; WAN024D3E; Start 358; Stop 382
gctagtctacctattggcttagtat

SEQ ID NO: 270661 - DNA, 25 bp, Artificial
  probe
  misc_feature (1)..(25): SEQ ID NO: 696; WAN024D3E; Start 355; Stop 379
catgctagtctacctattggcttag

SEQ ID NO: 270662 - DNA, 25 bp, Artificial
  probe
  misc_feature (1)..(25): SEQ ID NO: 696; WAN024D3E; Start 368; Stop 392
ctattggcttagtatgcttgatctt

SEQ ID NO: 270663 - DNA, 25 bp, Artificial
  probe
  misc_feature (1)..(25): SEQ ID NO: 696; WAN024D3E; Start 111; Stop 135
cctggtctatctgatcttgctagtc

SEQ ID NO: 270664 - DNA, 25 bp, Artificial
  probe
  misc_feature (1)..(25): SEQ ID NO: 696; WAN024D3E; Start 112; Stop 136
ctggtctatctgatcttgctagtca

SEQ ID NO: 270665 - DNA, 25 bp, Artificial
  probe
  misc_feature (1)..(25): SEQ ID NO: 696; WAN024D3E; Start 113; Stop 137
tggtctatctgatcttgctagtcac

SEQ ID NO: 270666 - DNA, 25 bp, Artificial
  probe
  misc_feature (1)..(25): SEQ ID NO: 696; WAN024D3E; Start 359; Stop 383
ctagtctacctattggcttagtatg

SEQ ID NO: 270667 - DNA, 25 bp, Artificial
  probe
  misc_feature (1)..(25): SEQ ID NO: 696; WAN024D3E; Start 65; Stop 89
tattcctattacgcagtttcaatcg

SEQ ID NO: 270668 - DNA, 25 bp, Artificial
  probe
  misc_feature (1)..(25): SEQ ID NO: 696; WAN024D3E; Start 274; Stop 298
cttcttgataaggatagttcgggac

SEQ ID NO: 270669 - DNA, 25 bp, Artificial
  probe
  misc_feature (1)..(25): SEQ ID NO: 696; WAN024D3E; Start 275; Stop 299
ttcttgataaggatagttcgggacg

SEQ ID NO: 270670 - DNA, 25 bp, Artificial
  probe
  misc_feature (1)..(25): SEQ ID NO: 696; WAN024D3E; Start 232; Stop 256
atcaatcacccgagaccttatgaaa

SEQ ID NO: 270671 - DNA, 25 bp, Artificial
  probe
  misc_feature (1)..(25): SEQ ID NO: 696; WAN024D3E; Start 231; Stop 255
aatcaatcacccgagaccttatgaa

SEQ ID NO: 270672 - DNA, 25 bp, Artificial
  probe
  misc_feature (1)..(25): SEQ ID NO: 696; WAN024D3E; Start 230; Stop 254
aaatcaatcacccgagaccttatga

SEQ ID NO: 270673 - DNA, 25 bp, Artificial
  probe
  misc_feature (1)..(25): SEQ ID NO: 696; WAN024D3E; Start 369; Stop 393
tattggcttagtatgcttgatcttt

SEQ ID NO: 270674 - DNA, 25 bp, Artificial
  probe
  misc_feature (1)..(25): SEQ ID NO: 696; WAN024D3E; Start 235; Stop 259
aatcacccgagaccttatgaaactt

SEQ ID NO: 270675 - DNA, 25 bp, Artificial
  probe
  misc_feature (1)..(25): SEQ ID NO: 696; WAN024D3E; Start 64; Stop 88
ttattcctattacgcagtttcaatc

SEQ ID NO: 270676 - DNA, 25 bp, Artificial
  probe
  misc_feature (1)..(25): SEQ ID NO: 696; WAN024D3E; Start 236; Stop 260
atcacccgagaccttatgaaacttg

SEQ ID NO: 270677 - DNA, 25 bp, Artificial
  probe
  misc_feature (1)..(25): SEQ ID NO: 696; WAN024D3E; Start 234; Stop 258
caatcacccgagaccttatgaaact

SEQ ID NO: 270678 - DNA, 25 bp, Artificial
  probe
  misc_feature (1)..(25): SEQ ID NO: 696; WAN024D3E; Start 233; Stop 257
tcaatcacccgagaccttatgaaac

SEQ ID NO: 270679 - DNA, 25 bp, Artificial
  probe
  misc_feature (1)..(25): SEQ ID NO: 696; WAN024D3E; Start 63; Stop 87
tttattcctattacgcagtttcaat

SEQ ID NO: 270680 - DNA, 25 bp, Artificial
  probe
  misc_feature (1)..(25): SEQ ID NO: 696; WAN024D3E; Start 110; Stop 134
ccctggtctatctgatcttgctagt

SEQ ID NO: 270681 - DNA, 25 bp, Artificial
  probe
  misc_feature (1)..(25): SEQ ID NO: 696; WAN024D3E; Start 445; Stop 469
gatgtcttggttggctatgcttgtg

SEQ ID NO: 270682 - DNA, 25 bp, Artificial
  probe
  misc_feature (1)..(25): SEQ ID NO: 696; WAN024D3E; Start 228; Stop 252
gaaaatcaatcacccgagaccttat

SEQ ID NO: 270683 - DNA, 25 bp, Artificial
  probe
  misc_feature (1)..(25): SEQ ID NO: 697; WAN024CWV; Start 331; Stop 355
gtgatagaagatgtgttgattcctc

SEQ ID NO: 270684 - DNA, 25 bp, Artificial
  probe
  misc_feature (1)..(25): SEQ ID NO: 697; WAN024CWV; Start 330; Stop 354
cgtgatagaagatgtgttgattcct

SEQ ID NO: 270685 - DNA, 25 bp, Artificial
  probe
  misc_feature (1)..(25): SEQ ID NO: 697; WAN024CWV; Start 332; Stop 356
tgatagaagatgtgttgattcctca

SEQ ID NO: 270686 - DNA, 25 bp, Artificial
  probe
  misc_feature (1)..(25): SEQ ID NO: 697; WAN024CWV; Start 96; Stop 120
ttattcttcgagcatgttcttagga

SEQ ID NO: 270687 - DNA, 25 bp, Artificial
  probe
  misc_feature (1)..(25): SEQ ID NO: 697; WAN024CWV; Start 99; Stop 123
ttcttcgagcatgttcttaggaata

SEQ ID NO: 270688 - DNA, 25 bp, Artificial
  probe
  misc_feature (1)..(25): SEQ ID NO: 697; WAN024CWV; Start 97; Stop 121
tattcttcgagcatgttcttaggaa

SEQ ID NO: 270689 - DNA, 25 bp, Artificial
  probe
  misc_feature (1)..(25): SEQ ID NO: 697; WAN024CWV; Start 100; Stop 124
tcttcgagcatgttcttaggaatat

SEQ ID NO: 270690 - DNA, 25 bp, Artificial
  probe
  misc_feature (1)..(25): SEQ ID NO: 697; WAN024CWV; Start 95; Stop 119
attattcttcgagcatgttcttagg

SEQ ID NO: 270691 - DNA, 25 bp, Artificial
  probe
  misc_feature (1)..(25): SEQ ID NO: 697; WAN024CWV; Start 317; Stop 341
gctccataagttacgtgatagaaga

SEQ ID NO: 270692 - DNA, 25 bp, Artificial
  probe
  misc_feature (1)..(25): SEQ ID NO: 697; WAN024CWV; Start 316; Stop 340
agctccataagttacgtgatagaag

SEQ ID NO: 270693 - DNA, 25 bp, Artificial
  probe
  misc_feature (1)..(25): SEQ ID NO: 697; WAN024CWV; Start 325; Stop 349
agttacgtgatagaagatgtgttga

SEQ ID NO: 270694 - DNA, 25 bp, Artificial
  probe
  misc_feature (1)..(25): SEQ ID NO: 697; WAN024CWV; Start 64; Stop 88
tatatagtagcattgtggcacgtta

SEQ ID NO: 270695 - DNA, 25 bp, Artificial
  probe
  misc_feature (1)..(25): SEQ ID NO: 697; WAN024CWV; Start 63; Stop 87
ttatatagtagcattgtggcacgtt

SEQ ID NO: 270696 - DNA, 25 bp, Artificial
  probe
  misc_feature (1)..(25): SEQ ID NO: 697; WAN024CWV; Start 540; Stop 564
tagaactagcaatgcgaatatagaa

SEQ ID NO: 270697 - DNA, 25 bp, Artificial
  probe
  misc_feature (1)..(25): SEQ ID NO: 697; WAN024CWV; Start 539; Stop 563
ttagaactagcaatgcgaatataga

SEQ ID NO: 270698 - DNA, 25 bp, Artificial
  probe
  misc_feature (1)..(25): SEQ ID NO: 697; WAN024CWV; Start 347; Stop 371
tgattcctcaagtggtagaatatga

SEQ ID NO: 270699 - DNA, 25 bp, Artificial
  probe
  misc_feature (1)..(25): SEQ ID NO: 697; WAN024CWV; Start 972; Stop 996
acaaatacctccacatcaacttctt

SEQ ID NO: 270700 - DNA, 25 bp, Artificial
  probe
  misc_feature (1)..(25): SEQ ID NO: 697; WAN024CWV; Start 971; Stop 995
aacaaatacctccacatcaacttct

SEQ ID NO: 270701 - DNA, 25 bp, Artificial
  probe
  misc_feature (1)..(25): SEQ ID NO: 697; WAN024CWV; Start 970; Stop 994
caacaaatacctccacatcaacttc

SEQ ID NO: 270702 - DNA, 25 bp, Artificial
  probe
  misc_feature (1)..(25): SEQ ID NO: 697; WAN024CWV; Start 101; Stop 125
cttcgagcatgttcttaggaatatt

SEQ ID NO: 270703 - DNA, 25 bp, Artificial
  probe
  misc_feature (1)..(25): SEQ ID NO: 697; WAN024CWV; Start 451; Stop 475
ttacaggtggcagtaggatttattt

SEQ ID NO: 270704 - DNA, 25 bp, Artificial
  probe
  misc_feature (1)..(25): SEQ ID NO: 697; WAN024CWV; Start 450; Stop 474
tttacaggtggcagtaggatttatt

SEQ ID NO: 270705 - DNA, 25 bp, Artificial
  probe
  misc_feature (1)..(25): SEQ ID NO: 697; WAN024CWV; Start 314; Stop 338
ctagctccataagttacgtgataga

SEQ ID NO: 270706 - DNA, 25 bp, Artificial
  probe
  misc_feature (1)..(25): SEQ ID NO: 697; WAN024CWV; Start 171; Stop 195
accagttattgacagagtaaatccg

SEQ ID NO: 270707 - DNA, 25 bp, Artificial
  probe
  misc_feature (1)..(25): SEQ ID NO: 697; WAN024CWV; Start 324; Stop 348
aagttacgtgatagaagatgtgttg

SEQ ID NO: 270708 - DNA, 25 bp, Artificial
  probe
  misc_feature (1)..(25): SEQ ID NO: 697; WAN024CWV; Start 65; Stop 89
atatagtagcattgtggcacgttag

SEQ ID NO: 270709 - DNA, 25 bp, Artificial
  probe
  misc_feature (1)..(25): SEQ ID NO: 697; WAN024CWV; Start 170; Stop 194
gaccagttattgacagagtaaatcc

SEQ ID NO: 270710 - DNA, 25 bp, Artificial
  probe
  misc_feature (1)..(25): SEQ ID NO: 697; WAN024CWV; Start 169; Stop 193
ggaccagttattgacagagtaaatc

SEQ ID NO: 270711 - DNA, 25 bp, Artificial
  probe
  misc_feature (1)..(25): SEQ ID NO: 697; WAN024CWV; Start 755; Stop 779
ctattgctggtttgggtggtatatt

SEQ ID NO: 270712 - DNA, 25 bp, Artificial
  probe
  misc_feature (1)..(25): SEQ ID NO: 697; WAN024CWV; Start 326; Stop 350
gttacgtgatagaagatgtgttgat

SEQ ID NO: 270713 - DNA, 25 bp, Artificial
  probe
  misc_feature (1)..(25): SEQ ID NO: 697; WAN024CWV; Start 315; Stop 339
tagctccataagttacgtgatagaa

SEQ ID NO: 270714 - DNA, 25 bp, Artificial
  probe
  misc_feature (1)..(25): SEQ ID NO: 697; WAN024CWV; Start 967; Stop 991
taccaacaaatacctccacatcaac

SEQ ID NO: 270715 - DNA, 25 bp, Artificial
  probe
  misc_feature (1)..(25): SEQ ID NO: 697; WAN024CWV; Start 352; Stop 376
cctcaagtggtagaatatgataaga

SEQ ID NO: 270716 - DNA, 25 bp, Artificial
  probe
  misc_feature (1)..(25): SEQ ID NO: 698; WAN024D9Q; Start 463; Stop 487
atcgtagagatgacagaacttgatg

SEQ ID NO: 270717 - DNA, 25 bp, Artificial
  probe
  misc_feature (1)..(25): SEQ ID NO: 698; WAN024D9Q; Start 466; Stop 490
gtagagatgacagaacttgatgacc

SEQ ID NO: 270718 - DNA, 25 bp, Artificial
  probe
  misc_feature (1)..(25): SEQ ID NO: 698; WAN024D9Q; Start 467; Stop 491
tagagatgacagaacttgatgacca

SEQ ID NO: 270719 - DNA, 25 bp, Artificial
  probe
  misc_feature (1)..(25): SEQ ID NO: 698; WAN024D9Q; Start 465; Stop 489
cgtagagatgacagaacttgatgac

SEQ ID NO: 270720 - DNA, 25 bp, Artificial
  probe
  misc_feature (1)..(25): SEQ ID NO: 698; WAN024D9Q; Start 464; Stop 488
tcgtagagatgacagaacttgatga

SEQ ID NO: 270721 - DNA, 25 bp, Artificial
  probe
  misc_feature (1)..(25): SEQ ID NO: 698; WAN024D9Q; Start 280; Stop 304
atcttggtggatgatgtgctctata

SEQ ID NO: 270722 - DNA, 25 bp, Artificial
  probe
  misc_feature (1)..(25): SEQ ID NO: 698; WAN024D9Q; Start 279; Stop 303
tatcttggtggatgatgtgctctat

SEQ ID NO: 270723 - DNA, 25 bp, Artificial
  probe
  misc_feature (1)..(25): SEQ ID NO: 698; WAN024D9Q; Start 278; Stop 302
ttatcttggtggatgatgtgctcta

SEQ ID NO: 270724 - DNA, 25 bp, Artificial
  probe
  misc_feature (1)..(25): SEQ ID NO: 698; WAN024D9Q; Start 314; Stop 338
ccatccgtgctgctattgataatat

SEQ ID NO: 270725 - DNA, 25 bp, Artificial
  probe
  misc_feature (1)..(25): SEQ ID NO: 698; WAN024D9Q; Start 281; Stop 305
tcttggtggatgatgtgctctatac

SEQ ID NO: 270726 - DNA, 25 bp, Artificial
  probe
  misc_feature (1)..(25): SEQ ID NO: 698; WAN024D9Q; Start 273; Stop 297
cgaagttatcttggtggatgatgtg

SEQ ID NO: 270727 - DNA, 25 bp, Artificial
  probe
  misc_feature (1)..(25): SEQ ID NO: 698; WAN024D9Q; Start 312; Stop 336
taccatccgtgctgctattgataat

SEQ ID NO: 270728 - DNA, 25 bp, Artificial
  probe
  misc_feature (1)..(25): SEQ ID NO: 698; WAN024D9Q; Start 468; Stop 492
agagatgacagaacttgatgaccaa

SEQ ID NO: 270729 - DNA, 25 bp, Artificial
  probe
  misc_feature (1)..(25): SEQ ID NO: 698; WAN024D9Q; Start 274; Stop 298
gaagttatcttggtggatgatgtgc

SEQ ID NO: 270730 - DNA, 25 bp, Artificial
  probe
  misc_feature (1)..(25): SEQ ID NO: 698; WAN024D9Q; Start 313; Stop 337
accatccgtgctgctattgataata

SEQ ID NO: 270731 - DNA, 25 bp, Artificial
  probe
  misc_feature (1)..(25): SEQ ID NO: 698; WAN024D9Q; Start 322; Stop 346
gctgctattgataatattgtcggtc

SEQ ID NO: 270732 - DNA, 25 bp, Artificial
  probe
  misc_feature (1)..(25): SEQ ID NO: 698; WAN024D9Q; Start 275; Stop 299
aagttatcttggtggatgatgtgct

SEQ ID NO: 270733 - DNA, 25 bp, Artificial
  probe
  misc_feature (1)..(25): SEQ ID NO: 698; WAN024D9Q; Start 320; Stop 344
gtgctgctattgataatattgtcgg

SEQ ID NO: 270734 - DNA, 25 bp, Artificial
  probe
  misc_feature (1)..(25): SEQ ID NO: 698; WAN024D9Q; Start 318; Stop 342
ccgtgctgctattgataatattgtc

SEQ ID NO: 270735 - DNA, 25 bp, Artificial
  probe
  misc_feature (1)..(25): SEQ ID NO: 698; WAN024D9Q; Start 289; Stop 313
gatgatgtgctctatacaggtcgta

SEQ ID NO: 270736 - DNA, 25 bp, Artificial
  probe
  misc_feature (1)..(25): SEQ ID NO: 698; WAN024D9Q; Start 321; Stop 345
tgctgctattgataatattgtcggt

SEQ ID NO: 270737 - DNA, 25 bp, Artificial
  probe
  misc_feature (1)..(25): SEQ ID NO: 698; WAN024D9Q; Start 317; Stop 341
tccgtgctgctattgataatattgt

SEQ ID NO: 270738 - DNA, 25 bp, Artificial
  probe
  misc_feature (1)..(25): SEQ ID NO: 698; WAN024D9Q; Start 319; Stop 343
cgtgctgctattgataatattgtcg

SEQ ID NO: 270739 - DNA, 25 bp, Artificial
  probe
  misc_feature (1)..(25): SEQ ID NO: 698; WAN024D9Q; Start 316; Stop 340
atccgtgctgctattgataatattg

SEQ ID NO: 270740 - DNA, 25 bp, Artificial
  probe
  misc_feature (1)..(25): SEQ ID NO: 698; WAN024D9Q; Start 315; Stop 339
catccgtgctgctattgataatatt

SEQ ID NO: 270741 - DNA, 25 bp, Artificial
  probe
  misc_feature (1)..(25): SEQ ID NO: 698; WAN024D9Q; Start 59; Stop 83
cttatgagattatcgaacgcaacaa

SEQ ID NO: 270742 - DNA, 25 bp, Artificial
  probe
  misc_feature (1)..(25): SEQ ID NO: 698; WAN024D9Q; Start 331; Stop 355
gataatattgtcggtcatggtcgtc

SEQ ID NO: 270743 - DNA, 25 bp, Artificial
  probe
  misc_feature (1)..(25): SEQ ID NO: 698; WAN024D9Q; Start 58; Stop 82
acttatgagattatcgaacgcaaca

SEQ ID NO: 270744 - DNA, 25 bp, Artificial
  probe
  misc_feature (1)..(25): SEQ ID NO: 698; WAN024D9Q; Start 484; Stop 508
gatgaccaagacagagttctgatta

SEQ ID NO: 270745 - DNA, 25 bp, Artificial
  probe
  misc_feature (1)..(25): SEQ ID NO: 698; WAN024D9Q; Start 57; Stop 81
tacttatgagattatcgaacgcaac

SEQ ID NO: 270746 - DNA, 25 bp, Artificial
  probe
  misc_feature (1)..(25): SEQ ID NO: 698; WAN024D9Q; Start 489; Stop 513
ccaagacagagttctgattactgaa

SEQ ID NO: 270747 - DNA, 25 bp, Artificial
  probe
  misc_feature (1)..(25): SEQ ID NO: 698; WAN024D9Q; Start 485; Stop 509
atgaccaagacagagttctgattac

SEQ ID NO: 270748 - DNA, 25 bp, Artificial
  probe
  misc_feature (1)..(25): SEQ ID NO: 698; WAN024D9Q; Start 277; Stop 301
gttatcttggtggatgatgtgctct

SEQ ID NO: 270749 - DNA, 25 bp, Artificial
  probe
  misc_feature (1)..(25): SEQ ID NO: 699; WAN024F3I; Start 37; Stop 61
gtgtctaacgaagtgattgataagc

SEQ ID NO: 270750 - DNA, 25 bp, Artificial
  probe
  misc_feature (1)..(25): SEQ ID NO: 699; WAN024F3I; Start 36; Stop 60
tgtgtctaacgaagtgattgataag

SEQ ID NO: 270751 - DNA, 25 bp, Artificial
  probe
  misc_feature (1)..(25): SEQ ID NO: 699; WAN024F3I; Start 38; Stop 62
tgtctaacgaagtgattgataagcg

SEQ ID NO: 270752 - DNA, 25 bp, Artificial
  probe
  misc_feature (1)..(25): SEQ ID NO: 699; WAN024F3I; Start 33; Stop 57
tgttgtgtctaacgaagtgattgat

SEQ ID NO: 270753 - DNA, 25 bp, Artificial
  probe
  misc_feature (1)..(25): SEQ ID NO: 699; WAN024F3I; Start 34; Stop 58
gttgtgtctaacgaagtgattgata

SEQ ID NO: 270754 - DNA, 25 bp, Artificial
  probe
  misc_feature (1)..(25): SEQ ID NO: 699; WAN024F3I; Start 35; Stop 59
ttgtgtctaacgaagtgattgataa

SEQ ID NO: 270755 - DNA, 25 bp, Artificial
  probe
  misc_feature (1)..(25): SEQ ID NO: 699; WAN024F3I; Start 32; Stop 56
ctgttgtgtctaacgaagtgattga

SEQ ID NO: 270756 - DNA, 25 bp, Artificial
  probe
  misc_feature (1)..(25): SEQ ID NO: 699; WAN024F3I; Start 31; Stop 55
tctgttgtgtctaacgaagtgattg

SEQ ID NO: 270757 - DNA, 25 bp, Artificial
  probe
  misc_feature (1)..(25): SEQ ID NO: 699; WAN024F3I; Start 30; Stop 54
gtctgttgtgtctaacgaagtgatt

SEQ ID NO: 270758 - DNA, 25 bp, Artificial
  probe
  misc_feature (1)..(25): SEQ ID NO: 699; WAN024F3I; Start 29; Stop 53
agtctgttgtgtctaacgaagtgat

SEQ ID NO: 270759 - DNA, 25 bp, Artificial
  probe
  misc_feature (1)..(25): SEQ ID NO: 699; WAN024F3I; Start 28; Stop 52
aagtctgttgtgtctaacgaagtga

SEQ ID NO: 270760 - DNA, 25 bp, Artificial
  probe
  misc_feature (1)..(25): SEQ ID NO: 699; WAN024F3I; Start 27; Stop 51
caagtctgttgtgtctaacgaagtg

SEQ ID NO: 270761 - DNA, 25 bp, Artificial
  probe
  misc_feature (1)..(25): SEQ ID NO: 699; WAN024F3I; Start 45; Stop 69
cgaagtgattgataagcgtgatttg

SEQ ID NO: 270762 - DNA, 25 bp, Artificial
  probe
  misc_feature (1)..(25): SEQ ID NO: 699; WAN024F3I; Start 46; Stop 70
gaagtgattgataagcgtgatttgc

SEQ ID NO: 270763 - DNA, 25 bp, Artificial
  probe
  misc_feature (1)..(25): SEQ ID NO: 699; WAN024F3I; Start 271; Stop 295
agaagagagttgggacttgaataac

SEQ ID NO: 270764 - DNA, 25 bp, Artificial
  probe
  misc_feature (1)..(25): SEQ ID NO: 699; WAN024F3I; Start 270; Stop 294
aagaagagagttgggacttgaataa

SEQ ID NO: 270765 - DNA, 25 bp, Artificial
  probe
  misc_feature (1)..(25): SEQ ID NO: 699; WAN024F3I; Start 269; Stop 293
aaagaagagagttgggacttgaata

SEQ ID NO: 270766 - DNA, 25 bp, Artificial
  probe
  misc_feature (1)..(25): SEQ ID NO: 699; WAN024F3I; Start 231; Stop 255
ttatgacgagttgatcgcttatgtg

SEQ ID NO: 270767 - DNA, 25 bp, Artificial
  probe
  misc_feature (1)..(25): SEQ ID NO: 699; WAN024F3I; Start 42; Stop 66
taacgaagtgattgataagcgtgat

SEQ ID NO: 270768 - DNA, 25 bp, Artificial
  probe
  misc_feature (1)..(25): SEQ ID NO: 699; WAN024F3I; Start 26; Stop 50
gcaagtctgttgtgtctaacgaagt

SEQ ID NO: 270769 - DNA, 25 bp, Artificial
  probe
  misc_feature (1)..(25): SEQ ID NO: 699; WAN024F3I; Start 41; Stop 65
ctaacgaagtgattgataagcgtga

SEQ ID NO: 270770 - DNA, 25 bp, Artificial
  probe
  misc_feature (1)..(25): SEQ ID NO: 699; WAN024F3I; Start 40; Stop 64
tctaacgaagtgattgataagcgtg

SEQ ID NO: 270771 - DNA, 25 bp, Artificial
  probe
  misc_feature (1)..(25): SEQ ID NO: 699; WAN024F3I; Start 39; Stop 63
gtctaacgaagtgattgataagcgt

SEQ ID NO: 270772 - DNA, 25 bp, Artificial
  probe
  misc_feature (1)..(25): SEQ ID NO: 699; WAN024F3I; Start 43; Stop 67
aacgaagtgattgataagcgtgatt

SEQ ID NO: 270773 - DNA, 25 bp, Artificial
  probe
  misc_feature (1)..(25): SEQ ID NO: 699; WAN024F3I; Start 138; Stop 162
cgcttatatcaaactagacaatgca

SEQ ID NO: 270774 - DNA, 25 bp, Artificial
  probe
  misc_feature (1)..(25): SEQ ID NO: 699; WAN024F3I; Start 143; Stop 167
atatcaaactagacaatgcagaagc

SEQ ID NO: 270775 - DNA, 25 bp, Artificial
  probe
  misc_feature (1)..(25): SEQ ID NO: 699; WAN024F3I; Start 144; Stop 168
tatcaaactagacaatgcagaagcc

SEQ ID NO: 270776 - DNA, 25 bp, Artificial
  probe
  misc_feature (1)..(25): SEQ ID NO: 699; WAN024F3I; Start 232; Stop 256
tatgacgagttgatcgcttatgtgg

SEQ ID NO: 270777 - DNA, 25 bp, Artificial
  probe
  misc_feature (1)..(25): SEQ ID NO: 699; WAN024F3I; Start 139; Stop 163
gcttatatcaaactagacaatgcag

SEQ ID NO: 270778 - DNA, 25 bp, Artificial
  probe
  misc_feature (1)..(25): SEQ ID NO: 699; WAN024F3I; Start 230; Stop 254
tttatgacgagttgatcgcttatgt

SEQ ID NO: 270779 - DNA, 25 bp, Artificial
  probe
  misc_feature (1)..(25): SEQ ID NO: 699; WAN024F3I; Start 262; Stop 286
aaagtgaaaagaagagagttgggac

SEQ ID NO: 270780 - DNA, 25 bp, Artificial
  probe
  misc_feature (1)..(25): SEQ ID NO: 699; WAN024F3I; Start 25; Stop 49
cgcaagtctgttgtgtctaacgaag

SEQ ID NO: 270781 - DNA, 25 bp, Artificial
  probe
  misc_feature (1)..(25): SEQ ID NO: 699; WAN024F3I; Start 272; Stop 296
gaagagagttgggacttgaataact

SEQ ID NO: 270782 - DNA, 25 bp, Artificial
  probe
  misc_feature (1)..(25): SEQ ID NO: 700; WAN024FCZ; Start 870; Stop 894
tgaggatgttaatgctggtattgta

SEQ ID NO: 270783 - DNA, 25 bp, Artificial
  probe
  misc_feature (1)..(25): SEQ ID NO: 700; WAN024FCZ; Start 869; Stop 893
ttgaggatgttaatgctggtattgt

SEQ ID NO: 270784 - DNA, 25 bp, Artificial
  probe
  misc_feature (1)..(25): SEQ ID NO: 700; WAN024FCZ; Start 1338; Stop 1362
agaagaggttaatagcgtagttcaa

SEQ ID NO: 270785 - DNA, 25 bp, Artificial
  probe
  misc_feature (1)..(25): SEQ ID NO: 700; WAN024FCZ; Start 1337; Stop 1361
aagaagaggttaatagcgtagttca

SEQ ID NO: 270786 - DNA, 25 bp, Artificial
  probe
  misc_feature (1)..(25): SEQ ID NO: 700; WAN024FCZ; Start 1340; Stop 1364
aagaggttaatagcgtagttcaaca

SEQ ID NO: 270787 - DNA, 25 bp, Artificial
  probe
  misc_feature (1)..(25): SEQ ID NO: 700; WAN024FCZ; Start 871; Stop 895
gaggatgttaatgctggtattgtaa

SEQ ID NO: 270788 - DNA, 25 bp, Artificial
  probe
  misc_feature (1)..(25): SEQ ID NO: 700; WAN024FCZ; Start 1339; Stop 1363
gaagaggttaatagcgtagttcaac

SEQ ID NO: 270789 - DNA, 25 bp, Artificial
  probe
  misc_feature (1)..(25): SEQ ID NO: 700; WAN024FCZ; Start 1341; Stop 1365
agaggttaatagcgtagttcaacac

SEQ ID NO: 270790 - DNA, 25 bp, Artificial
  probe
  misc_feature (1)..(25): SEQ ID NO: 700; WAN024FCZ; Start 668; Stop 692
atgtaccaatggctattacctctaa

SEQ ID NO: 270791 - DNA, 25 bp, Artificial
  probe
  misc_feature (1)..(25): SEQ ID NO: 700; WAN024FCZ; Start 773; Stop 797
gaggctccattcttagtcataacca

SEQ ID NO: 270792 - DNA, 25 bp, Artificial
  probe
  misc_feature (1)..(25): SEQ ID NO: 700; WAN024FCZ; Start 774; Stop 798
aggctccattcttagtcataaccac

SEQ ID NO: 270793 - DNA, 25 bp, Artificial
  probe
  misc_feature (1)..(25): SEQ ID NO: 700; WAN024FCZ; Start 667; Stop 691
catgtaccaatggctattacctcta

SEQ ID NO: 270794 - DNA, 25 bp, Artificial
  probe
  misc_feature (1)..(25): SEQ ID NO: 700; WAN024FCZ; Start 88; Stop 112
gtactagcgttaataggtgaggagg

SEQ ID NO: 270795 - DNA, 25 bp, Artificial
  probe
  misc_feature (1)..(25): SEQ ID NO: 700; WAN024FCZ; Start 406; Stop 430
tacggagagctagagattacgataa

SEQ ID NO: 270796 - DNA, 25 bp, Artificial
  probe
  misc_feature (1)..(25): SEQ ID NO: 700; WAN024FCZ; Start 405; Stop 429
atacggagagctagagattacgata

SEQ ID NO: 270797 - DNA, 25 bp, Artificial
  probe
  misc_feature (1)..(25): SEQ ID NO: 700; WAN024FCZ; Start 404; Stop 428
aatacggagagctagagattacgat

SEQ ID NO: 270798 - DNA, 25 bp, Artificial
  probe
  misc_feature (1)..(25): SEQ ID NO: 700; WAN024FCZ; Start 775; Stop 799
ggctccattcttagtcataaccact

SEQ ID NO: 270799 - DNA, 25 bp, Artificial
  probe
  misc_feature (1)..(25): SEQ ID NO: 700; WAN024FCZ; Start 24; Stop 48
tgttgatagagtaattgaatacgga

SEQ ID NO: 270800 - DNA, 25 bp, Artificial
  probe
  misc_feature (1)..(25): SEQ ID NO: 700; WAN024FCZ; Start 776; Stop 800
gctccattcttagtcataaccacta

SEQ ID NO: 270801 - DNA, 25 bp, Artificial
  probe
  misc_feature (1)..(25): SEQ ID NO: 700; WAN024FCZ; Start 779; Stop 803
ccattcttagtcataaccactacca

SEQ ID NO: 270802 - DNA, 25 bp, Artificial
  probe
  misc_feature (1)..(25): SEQ ID NO: 700; WAN024FCZ; Start 781; Stop 805
attcttagtcataaccactaccagg

SEQ ID NO: 270803 - DNA, 25 bp, Artificial
  probe
  misc_feature (1)..(25): SEQ ID NO: 700; WAN024FCZ; Start 778; Stop 802
tccattcttagtcataaccactacc

SEQ ID NO: 270804 - DNA, 25 bp, Artificial
  probe
  misc_feature (1)..(25): SEQ ID NO: 700; WAN024FCZ; Start 213; Stop 237
aaaggaatgtttaggagcagagtta

SEQ ID NO: 270805 - DNA, 25 bp, Artificial
  probe
  misc_feature (1)..(25): SEQ ID NO: 700; WAN024FCZ; Start 1443; Stop 1467
tatgagatttgttaagtcggttgga

SEQ ID NO: 270806 - DNA, 25 bp, Artificial
  probe
  misc_feature (1)..(25): SEQ ID NO: 700; WAN024FCZ; Start 1437; Stop 1461
agcgtttatgagatttgttaagtcg

SEQ ID NO: 270807 - DNA, 25 bp, Artificial
  probe
  misc_feature (1)..(25): SEQ ID NO: 700; WAN024FCZ; Start 214; Stop 238
aaggaatgtttaggagcagagttaa

SEQ ID NO: 270808 - DNA, 25 bp, Artificial
  probe
  misc_feature (1)..(25): SEQ ID NO: 700; WAN024FCZ; Start 1439; Stop 1463
cgtttatgagatttgttaagtcggt

SEQ ID NO: 270809 - DNA, 25 bp, Artificial
  probe
  misc_feature (1)..(25): SEQ ID NO: 700; WAN024FCZ; Start 866; Stop 890
actttgaggatgttaatgctggtat

SEQ ID NO: 270810 - DNA, 25 bp, Artificial
  probe
  misc_feature (1)..(25): SEQ ID NO: 700; WAN024FCZ; Start 216; Stop 240
ggaatgtttaggagcagagttaatg

SEQ ID NO: 270811 - DNA, 25 bp, Artificial
  probe
  misc_feature (1)..(25): SEQ ID NO: 700; WAN024FCZ; Start 215; Stop 239
aggaatgtttaggagcagagttaat

SEQ ID NO: 270812 - DNA, 25 bp, Artificial
  probe
  misc_feature (1)..(25): SEQ ID NO: 700; WAN024FCZ; Start 868; Stop 892
tttgaggatgttaatgctggtattg

SEQ ID NO: 270813 - DNA, 25 bp, Artificial
  probe
  misc_feature (1)..(25): SEQ ID NO: 700; WAN024FCZ; Start 1446; Stop 1470
gagatttgttaagtcggttggaatt

SEQ ID NO: 270814 - DNA, 25 bp, Artificial
  probe
  misc_feature (1)..(25): SEQ ID NO: 700; WAN024FCZ; Start 780; Stop 804
cattcttagtcataaccactaccag

SEQ ID NO: 270815 - DNA, 25 bp, Artificial
  probe
  misc_feature (1)..(25): SEQ ID NO: 701; WAN024FHZ; Start 589; Stop 613
gatgctgtctaccttgatacaactg

SEQ ID NO: 270816 - DNA, 25 bp, Artificial
  probe
  misc_feature (1)..(25): SEQ ID NO: 701; WAN024FHZ; Start 436; Stop 460
ctagtagcttctgttgatgagagag

SEQ ID NO: 270817 - DNA, 25 bp, Artificial
  probe
  misc_feature (1)..(25): SEQ ID NO: 701; WAN024FHZ; Start 391; Stop 415
gatattggaactgttgtattgccac

SEQ ID NO: 270818 - DNA, 25 bp, Artificial
  probe
  misc_feature (1)..(25): SEQ ID NO: 701; WAN024FHZ; Start 433; Stop 457
ttcctagtagcttctgttgatgaga

SEQ ID NO: 270819 - DNA, 25 bp, Artificial
  probe
  misc_feature (1)..(25): SEQ ID NO: 701; WAN024FHZ; Start 392; Stop 416
atattggaactgttgtattgccaca

SEQ ID NO: 270820 - DNA, 25 bp, Artificial
  probe
  misc_feature (1)..(25): SEQ ID NO: 701; WAN024FHZ; Start 588; Stop 612
ggatgctgtctaccttgatacaact

SEQ ID NO: 270821 - DNA, 25 bp, Artificial
  probe
  misc_feature (1)..(25): SEQ ID NO: 701; WAN024FHZ; Start 496; Stop 520
attgaaacagaccttgaaaccctaa

SEQ ID NO: 270822 - DNA, 25 bp, Artificial
  probe
  misc_feature (1)..(25): SEQ ID NO: 701; WAN024FHZ; Start 435; Stop 459
cctagtagcttctgttgatgagaga

SEQ ID NO: 270823 - DNA, 25 bp, Artificial
  probe
  misc_feature (1)..(25): SEQ ID NO: 701; WAN024FHZ; Start 434; Stop 458
tcctagtagcttctgttgatgagag

SEQ ID NO: 270824 - DNA, 25 bp, Artificial
  probe
  misc_feature (1)..(25): SEQ ID NO: 701; WAN024FHZ; Start 389; Stop 413
gcgatattggaactgttgtattgcc

SEQ ID NO: 270825 - DNA, 25 bp, Artificial
  probe
  misc_feature (1)..(25): SEQ ID NO: 701; WAN024FHZ; Start 586; Stop 610
gaggatgctgtctaccttgatacaa

SEQ ID NO: 270826 - DNA, 25 bp, Artificial
  probe
  misc_feature (1)..(25): SEQ ID NO: 701; WAN024FHZ; Start 238; Stop 262
tttgtaggagatgtggatattaccc

SEQ ID NO: 270827 - DNA, 25 bp, Artificial
  probe
  misc_feature (1)..(25): SEQ ID NO: 701; WAN024FHZ; Start 497; Stop 521
ttgaaacagaccttgaaaccctaaa

SEQ ID NO: 270828 - DNA, 25 bp, Artificial
  probe
  misc_feature (1)..(25): SEQ ID NO: 701; WAN024FHZ; Start 590; Stop 614
atgctgtctaccttgatacaactgg

SEQ ID NO: 270829 - DNA, 25 bp, Artificial
  probe
  misc_feature (1)..(25): SEQ ID NO: 701; WAN024FHZ; Start 495; Stop 519
aattgaaacagaccttgaaacccta

SEQ ID NO: 270830 - DNA, 25 bp, Artificial
  probe
  misc_feature (1)..(25): SEQ ID NO: 701; WAN024FHZ; Start 587; Stop 611
aggatgctgtctaccttgatacaac

SEQ ID NO: 270831 - DNA, 25 bp, Artificial
  probe
  misc_feature (1)..(25): SEQ ID NO: 701; WAN024FHZ; Start 390; Stop 414
cgatattggaactgttgtattgcca

SEQ ID NO: 270832 - DNA, 25 bp, Artificial
  probe
  misc_feature (1)..(25): SEQ ID NO: 701; WAN024FHZ; Start 600; Stop 624
ccttgatacaactggtttgaacatt

SEQ ID NO: 270833 - DNA, 25 bp, Artificial
  probe
  misc_feature (1)..(25): SEQ ID NO: 701; WAN024FHZ; Start 584; Stop 608
cagaggatgctgtctaccttgatac

SEQ ID NO: 270834 - DNA, 25 bp, Artificial
  probe
  misc_feature (1)..(25): SEQ ID NO: 701; WAN024FHZ; Start 45; Stop 69
taagagtacggtcgcaaagattatt

SEQ ID NO: 270835 - DNA, 25 bp, Artificial
  probe
  misc_feature (1)..(25): SEQ ID NO: 701; WAN024FHZ; Start 482; Stop 506
atattgccaagggaattgaaacaga

SEQ ID NO: 270836 - DNA, 25 bp, Artificial
  probe
  misc_feature (1)..(25): SEQ ID NO: 701; WAN024FHZ; Start 601; Stop 625
cttgatacaactggtttgaacattc

SEQ ID NO: 270837 - DNA, 25 bp, Artificial
  probe
  misc_feature (1)..(25): SEQ ID NO: 701; WAN024FHZ; Start 494; Stop 518
gaattgaaacagaccttgaaaccct

SEQ ID NO: 270838 - DNA, 25 bp, Artificial
  probe
  misc_feature (1)..(25): SEQ ID NO: 701; WAN024FHZ; Start 44; Stop 68
gtaagagtacggtcgcaaagattat

SEQ ID NO: 270839 - DNA, 25 bp, Artificial
  probe
  misc_feature (1)..(25): SEQ ID NO: 701; WAN024FHZ; Start 585; Stop 609
agaggatgctgtctaccttgataca

SEQ ID NO: 270840 - DNA, 25 bp, Artificial
  probe
  misc_feature (1)..(25): SEQ ID NO: 701; WAN024FHZ; Start 253; Stop 277
gatattacccatcctatccgtgaaa

SEQ ID NO: 270841 - DNA, 25 bp, Artificial
  probe
  misc_feature (1)..(25): SEQ ID NO: 701; WAN024FHZ; Start 15; Stop 39
aattgctattgatggtcctgcttcc

SEQ ID NO: 270842 - DNA, 25 bp, Artificial
  probe
  misc_feature (1)..(25): SEQ ID NO: 701; WAN024FHZ; Start 14; Stop 38
aaattgctattgatggtcctgcttc

SEQ ID NO: 270843 - DNA, 25 bp, Artificial
  probe
  misc_feature (1)..(25): SEQ ID NO: 701; WAN024FHZ; Start 602; Stop 626
ttgatacaactggtttgaacattca

SEQ ID NO: 270844 - DNA, 25 bp, Artificial
  probe
  misc_feature (1)..(25): SEQ ID NO: 701; WAN024FHZ; Start 483; Stop 507
tattgccaagggaattgaaacagac

SEQ ID NO: 270845 - DNA, 25 bp, Artificial
  probe
  misc_feature (1)..(25): SEQ ID NO: 701; WAN024FHZ; Start 592; Stop 616
gctgtctaccttgatacaactggtt

SEQ ID NO: 270846 - DNA, 25 bp, Artificial
  probe
  misc_feature (1)..(25): SEQ ID NO: 701; WAN024FHZ; Start 89; Stop 113
cctaccttgatacaggagctatgta

SEQ ID NO: 270847 - DNA, 25 bp, Artificial
  probe
  misc_feature (1)..(25): SEQ ID NO: 701; WAN024FHZ; Start 282; Stop 306
agtgaccaatcatgtttctgctatt

SEQ ID NO: 270848 - DNA, 25 bp, Artificial
  probe
  misc_feature (1)..(25): SEQ ID NO: 702; WAN024ET5; Start 21; Stop 45
tagagaagagttagaagcgattgtt

SEQ ID NO: 270849 - DNA, 25 bp, Artificial
  probe
  misc_feature (1)..(25): SEQ ID NO: 702; WAN024ET5; Start 20; Stop 44
atagagaagagttagaagcgattgt

SEQ ID NO: 270850 - DNA, 25 bp, Artificial
  probe
  misc_feature (1)..(25): SEQ ID NO: 702; WAN024ET5; Start 22; Stop 46
agagaagagttagaagcgattgttg

SEQ ID NO: 270851 - DNA, 25 bp, Artificial
  probe
  misc_feature (1)..(25): SEQ ID NO: 702; WAN024ET5; Start 17; Stop 41
tcaatagagaagagttagaagcgat

SEQ ID NO: 270852 - DNA, 25 bp, Artificial
  probe
  misc_feature (1)..(25): SEQ ID NO: 702; WAN024ET5; Start 16; Stop 40
atcaatagagaagagttagaagcga

SEQ ID NO: 270853 - DNA, 25 bp, Artificial
  probe
  misc_feature (1)..(25): SEQ ID NO: 702; WAN024ET5; Start 365; Stop 389
atattgaacatctggagagagtagc

SEQ ID NO: 270854 - DNA, 25 bp, Artificial
  probe
  misc_feature (1)..(25): SEQ ID NO: 702; WAN024ET5; Start 366; Stop 390
tattgaacatctggagagagtagca

SEQ ID NO: 270855 - DNA, 25 bp, Artificial
  probe
  misc_feature (1)..(25): SEQ ID NO: 702; WAN024ET5; Start 19; Stop 43
aatagagaagagttagaagcgattg

SEQ ID NO: 270856 - DNA, 25 bp, Artificial
  probe
  misc_feature (1)..(25): SEQ ID NO: 702; WAN024ET5; Start 18; Stop 42
caatagagaagagttagaagcgatt

SEQ ID NO: 270857 - DNA, 25 bp, Artificial
  probe
  misc_feature (1)..(25): SEQ ID NO: 702; WAN024ET5; Start 405; Stop 429
catctcttgtcgttataatcctgga

SEQ ID NO: 270858 - DNA, 25 bp, Artificial
  probe
  misc_feature (1)..(25): SEQ ID NO: 702; WAN024ET5; Start 404; Stop 428
tcatctcttgtcgttataatcctgg

SEQ ID NO: 270859 - DNA, 25 bp, Artificial
  probe
  misc_feature (1)..(25): SEQ ID NO: 702; WAN024ET5; Start 678; Stop 702
ttctggcggtattggtgttaattat

SEQ ID NO: 270860 - DNA, 25 bp, Artificial
  probe
  misc_feature (1)..(25): SEQ ID NO: 702; WAN024ET5; Start 679; Stop 703
tctggcggtattggtgttaattatc

SEQ ID NO: 270861 - DNA, 25 bp, Artificial
  probe
  misc_feature (1)..(25): SEQ ID NO: 702; WAN024ET5; Start 364; Stop 388
gatattgaacatctggagagagtag

SEQ ID NO: 270862 - DNA, 25 bp, Artificial
  probe
  misc_feature (1)..(25): SEQ ID NO: 702; WAN024ET5; Start 23; Stop 47
gagaagagttagaagcgattgttgc

SEQ ID NO: 270863 - DNA, 25 bp, Artificial
  probe
  misc_feature (1)..(25): SEQ ID NO: 702; WAN024ET5; Start 15; Stop 39
tatcaatagagaagagttagaagcg

SEQ ID NO: 270864 - DNA, 25 bp, Artificial
  probe
  misc_feature (1)..(25): SEQ ID NO: 702; WAN024ET5; Start 935; Stop 959
tgtacggagcttaccatcatattag

SEQ ID NO: 270865 - DNA, 25 bp, Artificial
  probe
  misc_feature (1)..(25): SEQ ID NO: 702; WAN024ET5; Start 406; Stop 430
atctcttgtcgttataatcctggag

SEQ ID NO: 270866 - DNA, 25 bp, Artificial
  probe
  misc_feature (1)..(25): SEQ ID NO: 702; WAN024ET5; Start 403; Stop 427
atcatctcttgtcgttataatcctg

SEQ ID NO: 270867 - DNA, 25 bp, Artificial
  probe
  misc_feature (1)..(25): SEQ ID NO: 702; WAN024ET5; Start 934; Stop 958
atgtacggagcttaccatcatatta

SEQ ID NO: 270868 - DNA, 25 bp, Artificial
  probe
  misc_feature (1)..(25): SEQ ID NO: 702; WAN024ET5; Start 367; Stop 391
attgaacatctggagagagtagcag

SEQ ID NO: 270869 - DNA, 25 bp, Artificial
  probe
  misc_feature (1)..(25): SEQ ID NO: 702; WAN024ET5; Start 665; Stop 689
actttatcaatctttctggcggtat

SEQ ID NO: 270870 - DNA, 25 bp, Artificial
  probe
  misc_feature (1)..(25): SEQ ID NO: 702; WAN024ET5; Start 212; Stop 236
gtgtggactgctctagttatgtaga

SEQ ID NO: 270871 - DNA, 25 bp, Artificial
  probe
  misc_feature (1)..(25): SEQ ID NO: 702; WAN024ET5; Start 349; Stop 373
ttggatgcctttgaagatattgaac

SEQ ID NO: 270872 - DNA, 25 bp, Artificial
  probe
  misc_feature (1)..(25): SEQ ID NO: 702; WAN024ET5; Start 666; Stop 690
ctttatcaatctttctggcggtatt

SEQ ID NO: 270873 - DNA, 25 bp, Artificial
  probe
  misc_feature (1)..(25): SEQ ID NO: 702; WAN024ET5; Start 211; Stop 235
ggtgtggactgctctagttatgtag

SEQ ID NO: 270874 - DNA, 25 bp, Artificial
  probe
  misc_feature (1)..(25): SEQ ID NO: 702; WAN024ET5; Start 407; Stop 431
tctcttgtcgttataatcctggagg

SEQ ID NO: 270875 - DNA, 25 bp, Artificial
  probe
  misc_feature (1)..(25): SEQ ID NO: 702; WAN024ET5; Start 350; Stop 374
tggatgcctttgaagatattgaaca

SEQ ID NO: 270876 - DNA, 25 bp, Artificial
  probe
  misc_feature (1)..(25): SEQ ID NO: 702; WAN024ET5; Start 664; Stop 688
gactttatcaatctttctggcggta

SEQ ID NO: 270877 - DNA, 25 bp, Artificial
  probe
  misc_feature (1)..(25): SEQ ID NO: 702; WAN024ET5; Start 346; Stop 370
aacttggatgcctttgaagatattg

SEQ ID NO: 270878 - DNA, 25 bp, Artificial
  probe
  misc_feature (1)..(25): SEQ ID NO: 702; WAN024ET5; Start 575; Stop 599
ataccgtgacccatctctattatcc

SEQ ID NO: 270879 - DNA, 25 bp, Artificial
  probe
  misc_feature (1)..(25): SEQ ID NO: 702; WAN024ET5; Start 351; Stop 375
ggatgcctttgaagatattgaacat

SEQ ID NO: 270880 - DNA, 25 bp, Artificial
  probe
  misc_feature (1)..(25): SEQ ID NO: 702; WAN024ET5; Start 348; Stop 372
cttggatgcctttgaagatattgaa

SEQ ID NO: 270881 - DNA, 25 bp, Artificial
  probe
  misc_feature (1)..(25): SEQ ID NO: 703; WAN024G26; Start 663; Stop 687
tatcgttattggttatcgctatgac

SEQ ID NO: 270882 - DNA, 25 bp, Artificial
  probe
  misc_feature (1)..(25): SEQ ID NO: 703; WAN024G26; Start 871; Stop 895
ttggctgattacactgttactgaag

SEQ ID NO: 270883 - DNA, 25 bp, Artificial
  probe
  misc_feature (1)..(25): SEQ ID NO: 703; WAN024G26; Start 870; Stop 894
cttggctgattacactgttactgaa

SEQ ID NO: 270884 - DNA, 25 bp, Artificial
  probe
  misc_feature (1)..(25): SEQ ID NO: 703; WAN024G26; Start 18; Stop 42
aatcgcacagagtattgagttgaag

SEQ ID NO: 270885 - DNA, 25 bp, Artificial
  probe
  misc_feature (1)..(25): SEQ ID NO: 703; WAN024G26; Start 1104; Stop 1128
taagttcggtattccagcagttgta

SEQ ID NO: 270886 - DNA, 25 bp, Artificial
  probe
  misc_feature (1)..(25): SEQ ID NO: 703; WAN024G26; Start 865; Stop 889
cttcacttggctgattacactgtta

SEQ ID NO: 270887 - DNA, 25 bp, Artificial
  probe
  misc_feature (1)..(25): SEQ ID NO: 703; WAN024G26; Start 866; Stop 890
ttcacttggctgattacactgttac

SEQ ID NO: 270888 - DNA, 25 bp, Artificial
  probe
  misc_feature (1)..(25): SEQ ID NO: 703; WAN024G26; Start 868; Stop 892
cacttggctgattacactgttactg

SEQ ID NO: 270889 - DNA, 25 bp, Artificial
  probe
  misc_feature (1)..(25): SEQ ID NO: 703; WAN024G26; Start 869; Stop 893
acttggctgattacactgttactga

SEQ ID NO: 270890 - DNA, 25 bp, Artificial
  probe
  misc_feature (1)..(25): SEQ ID NO: 703; WAN024G26; Start 662; Stop 686
atatcgttattggttatcgctatga

SEQ ID NO: 270891 - DNA, 25 bp, Artificial
  probe
  misc_feature (1)..(25): SEQ ID NO: 703; WAN024G26; Start 1001; Stop 1025
ttaagatgaatggtggtgtggctaa

SEQ ID NO: 270892 - DNA, 25 bp, Artificial
  probe
  misc_feature (1)..(25): SEQ ID NO: 703; WAN024G26; Start 391; Stop 415
catgctattacaactgccaacaatg

SEQ ID NO: 270893 - DNA, 25 bp, Artificial
  probe
  misc_feature (1)..(25): SEQ ID NO: 703; WAN024G26; Start 867; Stop 891
tcacttggctgattacactgttact

SEQ ID NO: 270894 - DNA, 25 bp, Artificial
  probe
  misc_feature (1)..(25): SEQ ID NO: 703; WAN024G26; Start 392; Stop 416
atgctattacaactgccaacaatgc

SEQ ID NO: 270895 - DNA, 25 bp, Artificial
  probe
  misc_feature (1)..(25): SEQ ID NO: 703; WAN024G26; Start 877; Stop 901
gattacactgttactgaagctggtt

SEQ ID NO: 270896 - DNA, 25 bp, Artificial
  probe
  misc_feature (1)..(25): SEQ ID NO: 703; WAN024G26; Start 667; Stop 691
gttattggttatcgctatgaccgta

SEQ ID NO: 270897 - DNA, 25 bp, Artificial
  probe
  misc_feature (1)..(25): SEQ ID NO: 703; WAN024G26; Start 1568; Stop 1592
ttgccttaactggtgatgttatgac

SEQ ID NO: 270898 - DNA, 25 bp, Artificial
  probe
  misc_feature (1)..(25): SEQ ID NO: 703; WAN024G26; Start 1567; Stop 1591
gttgccttaactggtgatgttatga

SEQ ID NO: 270899 - DNA, 25 bp, Artificial
  probe
  misc_feature (1)..(25): SEQ ID NO: 703; WAN024G26; Start 664; Stop 688
atcgttattggttatcgctatgacc

SEQ ID NO: 270900 - DNA, 25 bp, Artificial
  probe
  misc_feature (1)..(25): SEQ ID NO: 703; WAN024G26; Start 875; Stop 899
ctgattacactgttactgaagctgg

SEQ ID NO: 270901 - DNA, 25 bp, Artificial
  probe
  misc_feature (1)..(25): SEQ ID NO: 703; WAN024G26; Start 1105; Stop 1129
aagttcggtattccagcagttgtag

SEQ ID NO: 270902 - DNA, 25 bp, Artificial
  probe
  misc_feature (1)..(25): SEQ ID NO: 703; WAN024G26; Start 1361; Stop 1385
aaatctatcgtggtagcaaagtgaa

SEQ ID NO: 270903 - DNA, 25 bp, Artificial
  probe
  misc_feature (1)..(25): SEQ ID NO: 703; WAN024G26; Start 5; Stop 29
aaacagatattgaaatcgcacagag

SEQ ID NO: 270904 - DNA, 25 bp, Artificial
  probe
  misc_feature (1)..(25): SEQ ID NO: 703; WAN024G26; Start 7; Stop 31
acagatattgaaatcgcacagagta

SEQ ID NO: 270905 - DNA, 25 bp, Artificial
  probe
  misc_feature (1)..(25): SEQ ID NO: 703; WAN024G26; Start 668; Stop 692
ttattggttatcgctatgaccgtac

SEQ ID NO: 270906 - DNA, 25 bp, Artificial
  probe
  misc_feature (1)..(25): SEQ ID NO: 703; WAN024G26; Start 12; Stop 36
tattgaaatcgcacagagtattgag

SEQ ID NO: 270907 - DNA, 25 bp, Artificial
  probe
  misc_feature (1)..(25): SEQ ID NO: 703; WAN024G26; Start 13; Stop 37
attgaaatcgcacagagtattgagt

SEQ ID NO: 270908 - DNA, 25 bp, Artificial
  probe
  misc_feature (1)..(25): SEQ ID NO: 703; WAN024G26; Start 661; Stop 685
aatatcgttattggttatcgctatg

SEQ ID NO: 270909 - DNA, 25 bp, Artificial
  probe
  misc_feature (1)..(25): SEQ ID NO: 703; WAN024G26; Start 1360; Stop 1384
gaaatctatcgtggtagcaaagtga

SEQ ID NO: 270910 - DNA, 25 bp, Artificial
  probe
  misc_feature (1)..(25): SEQ ID NO: 703; WAN024G26; Start 1358; Stop 1382
ctgaaatctatcgtggtagcaaagt

SEQ ID NO: 270911 - DNA, 25 bp, Artificial
  probe
  misc_feature (1)..(25): SEQ ID NO: 703; WAN024G26; Start 1357; Stop 1381
actgaaatctatcgtggtagcaaag

SEQ ID NO: 270912 - DNA, 25 bp, Artificial
  probe
  misc_feature (1)..(25): SEQ ID NO: 703; WAN024G26; Start 914; Stop 938
ttggtgctgagaaattccttgatat

SEQ ID NO: 270913 - DNA, 25 bp, Artificial
  probe
  misc_feature (1)..(25): SEQ ID NO: 703; WAN024G26; Start 17; Stop 41
aaatcgcacagagtattgagttgaa

SEQ ID NO: 270914 - DNA, 25 bp, Artificial
  probe
  misc_feature (1)..(25): SEQ ID NO: 704; WAN024FBN; Start 868; Stop 892
aagattatccaactaacaccagacc

SEQ ID NO: 270915 - DNA, 25 bp, Artificial
  probe
  misc_feature (1)..(25): SEQ ID NO: 704; WAN024FBN; Start 870; Stop 894
gattatccaactaacaccagacctc

SEQ ID NO: 270916 - DNA, 25 bp, Artificial
  probe
  misc_feature (1)..(25): SEQ ID NO: 704; WAN024FBN; Start 869; Stop 893
agattatccaactaacaccagacct

SEQ ID NO: 270917 - DNA, 25 bp, Artificial
  probe
  misc_feature (1)..(25): SEQ ID NO: 704; WAN024FBN; Start 871; Stop 895
attatccaactaacaccagacctct

SEQ ID NO: 270918 - DNA, 25 bp, Artificial
  probe
  misc_feature (1)..(25): SEQ ID NO: 704; WAN024FBN; Start 867; Stop 891
taagattatccaactaacaccagac

SEQ ID NO: 270919 - DNA, 25 bp, Artificial
  probe
  misc_feature (1)..(25): SEQ ID NO: 704; WAN024FBN; Start 866; Stop 890
gtaagattatccaactaacaccaga

SEQ ID NO: 270920 - DNA, 25 bp, Artificial
  probe
  misc_feature (1)..(25): SEQ ID NO: 704; WAN024FBN; Start 450; Stop 474
ctggacttctaccaaggctaatatc

SEQ ID NO: 270921 - DNA, 25 bp, Artificial
  probe
  misc_feature (1)..(25): SEQ ID NO: 704; WAN024FBN; Start 448; Stop 472
tactggacttctaccaaggctaata

SEQ ID NO: 270922 - DNA, 25 bp, Artificial
  probe
  misc_feature (1)..(25): SEQ ID NO: 704; WAN024FBN; Start 456; Stop 480
ttctaccaaggctaatatcgaatcc

SEQ ID NO: 270923 - DNA, 25 bp, Artificial
  probe
  misc_feature (1)..(25): SEQ ID NO: 704; WAN024FBN; Start 453; Stop 477
gacttctaccaaggctaatatcgaa

SEQ ID NO: 270924 - DNA, 25 bp, Artificial
  probe
  misc_feature (1)..(25): SEQ ID NO: 704; WAN024FBN; Start 449; Stop 473
actggacttctaccaaggctaatat

SEQ ID NO: 270925 - DNA, 25 bp, Artificial
  probe
  misc_feature (1)..(25): SEQ ID NO: 704; WAN024FBN; Start 454; Stop 478
acttctaccaaggctaatatcgaat

SEQ ID NO: 270926 - DNA, 25 bp, Artificial
  probe
  misc_feature (1)..(25): SEQ ID NO: 704; WAN024FBN; Start 468; Stop 492
taatatcgaatccttagcaagtgcc

SEQ ID NO: 270927 - DNA, 25 bp, Artificial
  probe
  misc_feature (1)..(25): SEQ ID NO: 704; WAN024FBN; Start 865; Stop 889
ggtaagattatccaactaacaccag

SEQ ID NO: 270928 - DNA, 25 bp, Artificial
  probe
  misc_feature (1)..(25): SEQ ID NO: 704; WAN024FBN; Start 455; Stop 479
cttctaccaaggctaatatcgaatc

SEQ ID NO: 270929 - DNA, 25 bp, Artificial
  probe
  misc_feature (1)..(25): SEQ ID NO: 704; WAN024FBN; Start 733; Stop 757
gaaagtgtcaaagaaatcaaccctg

SEQ ID NO: 270930 - DNA, 25 bp, Artificial
  probe
  misc_feature (1)..(25): SEQ ID NO: 704; WAN024FBN; Start 447; Stop 471
ctactggacttctaccaaggctaat

SEQ ID NO: 270931 - DNA, 25 bp, Artificial
  probe
  misc_feature (1)..(25): SEQ ID NO: 704; WAN024FBN; Start 452; Stop 476
ggacttctaccaaggctaatatcga

SEQ ID NO: 270932 - DNA, 25 bp, Artificial
  probe
  misc_feature (1)..(25): SEQ ID NO: 704; WAN024FBN; Start 389; Stop 413
tcgtagacaaattcaaagaaatcgc

SEQ ID NO: 270933 - DNA, 25 bp, Artificial
  probe
  misc_feature (1)..(25): SEQ ID NO: 704; WAN024FBN; Start 863; Stop 887
atggtaagattatccaactaacacc

SEQ ID NO: 270934 - DNA, 25 bp, Artificial
  probe
  misc_feature (1)..(25): SEQ ID NO: 704; WAN024FBN; Start 467; Stop 491
ctaatatcgaatccttagcaagtgc

SEQ ID NO: 270935 - DNA, 25 bp, Artificial
  probe
  misc_feature (1)..(25): SEQ ID NO: 704; WAN024FBN; Start 451; Stop 475
tggacttctaccaaggctaatatcg

SEQ ID NO: 270936 - DNA, 25 bp, Artificial
  probe
  misc_feature (1)..(25): SEQ ID NO: 704; WAN024FBN; Start 872; Stop 896
ttatccaactaacaccagacctctg

SEQ ID NO: 270937 - DNA, 25 bp, Artificial
  probe
  misc_feature (1)..(25): SEQ ID NO: 704; WAN024FBN; Start 638; Stop 662
ccaaatctcgtttctctttcttgta

SEQ ID NO: 270938 - DNA, 25 bp, Artificial
  probe
  misc_feature (1)..(25): SEQ ID NO: 704; WAN024FBN; Start 391; Stop 415
gtagacaaattcaaagaaatcgccc

SEQ ID NO: 270939 - DNA, 25 bp, Artificial
  probe
  misc_feature (1)..(25): SEQ ID NO: 704; WAN024FBN; Start 641; Stop 665
aatctcgtttctctttcttgtacca

SEQ ID NO: 270940 - DNA, 25 bp, Artificial
  probe
  misc_feature (1)..(25): SEQ ID NO: 704; WAN024FBN; Start 457; Stop 481
tctaccaaggctaatatcgaatcct

SEQ ID NO: 270941 - DNA, 25 bp, Artificial
  probe
  misc_feature (1)..(25): SEQ ID NO: 704; WAN024FBN; Start 640; Stop 664
aaatctcgtttctctttcttgtacc

SEQ ID NO: 270942 - DNA, 25 bp, Artificial
  probe
  misc_feature (1)..(25): SEQ ID NO: 704; WAN024FBN; Start 390; Stop 414
cgtagacaaattcaaagaaatcgcc

SEQ ID NO: 270943 - DNA, 25 bp, Artificial
  probe
  misc_feature (1)..(25): SEQ ID NO: 704; WAN024FBN; Start 734; Stop 758
aaagtgtcaaagaaatcaaccctga

SEQ ID NO: 270944 - DNA, 25 bp, Artificial
  probe
  misc_feature (1)..(25): SEQ ID NO: 704; WAN024FBN; Start 732; Stop 756
tgaaagtgtcaaagaaatcaaccct

SEQ ID NO: 270945 - DNA, 25 bp, Artificial
  probe
  misc_feature (1)..(25): SEQ ID NO: 704; WAN024FBN; Start 470; Stop 494
atatcgaatccttagcaagtgcctt

SEQ ID NO: 270946 - DNA, 25 bp, Artificial
  probe
  misc_feature (1)..(25): SEQ ID NO: 704; WAN024FBN; Start 469; Stop 493
aatatcgaatccttagcaagtgcct

SEQ ID NO: 270947 - DNA, 25 bp, Artificial
  probe
  misc_feature (1)..(25): SEQ ID NO: 705; WAN024D89; Start 153; Stop 177
gtatctcctaccaagtcttctcaga

SEQ ID NO: 270948 - DNA, 25 bp, Artificial
  probe
  misc_feature (1)..(25): SEQ ID NO: 705; WAN024D89; Start 694; Stop 718
ctagtcttcttcaatagcctgtcag

SEQ ID NO: 270949 - DNA, 25 bp, Artificial
  probe
  misc_feature (1)..(25): SEQ ID NO: 705; WAN024D89; Start 692; Stop 716
gtctagtcttcttcaatagcctgtc

SEQ ID NO: 270950 - DNA, 25 bp, Artificial
  probe
  misc_feature (1)..(25): SEQ ID NO: 705; WAN024D89; Start 693; Stop 717
tctagtcttcttcaatagcctgtca

SEQ ID NO: 270951 - DNA, 25 bp, Artificial
  probe
  misc_feature (1)..(25): SEQ ID NO: 705; WAN024D89; Start 695; Stop 719
tagtcttcttcaatagcctgtcaga

SEQ ID NO: 270952 - DNA, 25 bp, Artificial
  probe
  misc_feature (1)..(25): SEQ ID NO: 705; WAN024D89; Start 685; Stop 709
ttccgtggtctagtcttcttcaata

SEQ ID NO: 270953 - DNA, 25 bp, Artificial
  probe
  misc_feature (1)..(25): SEQ ID NO: 705; WAN024D89; Start 152; Stop 176
cgtatctcctaccaagtcttctcag

SEQ ID NO: 270954 - DNA, 25 bp, Artificial
  probe
  misc_feature (1)..(25): SEQ ID NO: 705; WAN024D89; Start 686; Stop 710
tccgtggtctagtcttcttcaatag

SEQ ID NO: 270955 - DNA, 25 bp, Artificial
  probe
  misc_feature (1)..(25): SEQ ID NO: 705; WAN024D89; Start 567; Stop 591
gaatacacgcactattgatctctct

SEQ ID NO: 270956 - DNA, 25 bp, Artificial
  probe
  misc_feature (1)..(25): SEQ ID NO: 705; WAN024D89; Start 741; Stop 765
actacagtatcgtgatatattggct

SEQ ID NO: 270957 - DNA, 25 bp, Artificial
  probe
  misc_feature (1)..(25): SEQ ID NO: 705; WAN024D89; Start 691; Stop 715
ggtctagtcttcttcaatagcctgt

SEQ ID NO: 270958 - DNA, 25 bp, Artificial
  probe
  misc_feature (1)..(25): SEQ ID NO: 705; WAN024D89; Start 690; Stop 714
tggtctagtcttcttcaatagcctg

SEQ ID NO: 270959 - DNA, 25 bp, Artificial
  probe
  misc_feature (1)..(25): SEQ ID NO: 705; WAN024D89; Start 689; Stop 713
gtggtctagtcttcttcaatagcct

SEQ ID NO: 270960 - DNA, 25 bp, Artificial
  probe
  misc_feature (1)..(25): SEQ ID NO: 705; WAN024D89; Start 149; Stop 173
tagcgtatctcctaccaagtcttct

SEQ ID NO: 270961 - DNA, 25 bp, Artificial
  probe
  misc_feature (1)..(25): SEQ ID NO: 705; WAN024D89; Start 148; Stop 172
ctagcgtatctcctaccaagtcttc

SEQ ID NO: 270962 - DNA, 25 bp, Artificial
  probe
  misc_feature (1)..(25): SEQ ID NO: 705; WAN024D89; Start 196; Stop 220
caacaactcttgattctagcaccaa

SEQ ID NO: 270963 - DNA, 25 bp, Artificial
  probe
  misc_feature (1)..(25): SEQ ID NO: 705; WAN024D89; Start 740; Stop 764
aactacagtatcgtgatatattggc

SEQ ID NO: 270964 - DNA, 25 bp, Artificial
  probe
  misc_feature (1)..(25): SEQ ID NO: 705; WAN024D89; Start 566; Stop 590
cgaatacacgcactattgatctctc

SEQ ID NO: 270965 - DNA, 25 bp, Artificial
  probe
  misc_feature (1)..(25): SEQ ID NO: 705; WAN024D89; Start 699; Stop 723
cttcttcaatagcctgtcagacctt

SEQ ID NO: 270966 - DNA, 25 bp, Artificial
  probe
  misc_feature (1)..(25): SEQ ID NO: 705; WAN024D89; Start 742; Stop 766
ctacagtatcgtgatatattggctg

SEQ ID NO: 270967 - DNA, 25 bp, Artificial
  probe
  misc_feature (1)..(25): SEQ ID NO: 705; WAN024D89; Start 444; Stop 468
tgaccaattactagatgattctcag

SEQ ID NO: 270968 - DNA, 25 bp, Artificial
  probe
  misc_feature (1)..(25): SEQ ID NO: 705; WAN024D89; Start 821; Stop 845
ttaaagataaccaactaaccctgct

SEQ ID NO: 270969 - DNA, 25 bp, Artificial
  probe
  misc_feature (1)..(25): SEQ ID NO: 705; WAN024D89; Start 371; Stop 395
gccgtatctttgaactcattaaact

SEQ ID NO: 270970 - DNA, 25 bp, Artificial
  probe
  misc_feature (1)..(25): SEQ ID NO: 705; WAN024D89; Start 700; Stop 724
ttcttcaatagcctgtcagaccttg

SEQ ID NO: 270971 - DNA, 25 bp, Artificial
  probe
  misc_feature (1)..(25): SEQ ID NO: 705; WAN024D89; Start 445; Stop 469
gaccaattactagatgattctcaga

SEQ ID NO: 270972 - DNA, 25 bp, Artificial
  probe
  misc_feature (1)..(25): SEQ ID NO: 705; WAN024D89; Start 822; Stop 846
taaagataaccaactaaccctgctt

SEQ ID NO: 270973 - DNA, 25 bp, Artificial
  probe
  misc_feature (1)..(25): SEQ ID NO: 705; WAN024D89; Start 688; Stop 712
cgtggtctagtcttcttcaatagcc

SEQ ID NO: 270974 - DNA, 25 bp, Artificial
  probe
  misc_feature (1)..(25): SEQ ID NO: 705; WAN024D89; Start 687; Stop 711
ccgtggtctagtcttcttcaatagc

SEQ ID NO: 270975 - DNA, 25 bp, Artificial
  probe
  misc_feature (1)..(25): SEQ ID NO: 705; WAN024D89; Start 885; Stop 909
tagcctagaatgtgtcgtaaacttt

SEQ ID NO: 270976 - DNA, 25 bp, Artificial
  probe
  misc_feature (1)..(25): SEQ ID NO: 705; WAN024D89; Start 884; Stop 908
atagcctagaatgtgtcgtaaactt

SEQ ID NO: 270977 - DNA, 25 bp, Artificial
  probe
  misc_feature (1)..(25): SEQ ID NO: 705; WAN024D89; Start 883; Stop 907
gatagcctagaatgtgtcgtaaact

SEQ ID NO: 270978 - DNA, 25 bp, Artificial
  probe
  misc_feature (1)..(25): SEQ ID NO: 705; WAN024D89; Start 993; Stop 1017
cgtcactcatccagaagaaatcaaa

SEQ ID NO: 270979 - DNA, 25 bp, Artificial
  probe
  misc_feature (1)..(25): SEQ ID NO: 705; WAN024D89; Start 443; Stop 467
ttgaccaattactagatgattctca

SEQ ID NO: 270980 - DNA, 25 bp, Artificial
  probe
  misc_feature (1)..(25): SEQ ID NO: 706; WAN024BEF; Start 63; Stop 87
gataaataatgtgttccatcagggc

SEQ ID NO: 270981 - DNA, 25 bp, Artificial
  probe
  misc_feature (1)..(25): SEQ ID NO: 706; WAN024BEF; Start 64; Stop 88
ataaataatgtgttccatcagggct

SEQ ID NO: 270982 - DNA, 25 bp, Artificial
  probe
  misc_feature (1)..(25): SEQ ID NO: 706; WAN024BEF; Start 65; Stop 89
taaataatgtgttccatcagggctc

SEQ ID NO: 270983 - DNA, 25 bp, Artificial
  probe
  misc_feature (1)..(25): SEQ ID NO: 706; WAN024BEF; Start 27; Stop 51
ggttcaaggtaaggattgccaagtc

SEQ ID NO: 270984 - DNA, 25 bp, Artificial
  probe
  misc_feature (1)..(25): SEQ ID NO: 706; WAN024BEF; Start 19; Stop 43
ctcaggacggttcaaggtaaggatt

SEQ ID NO: 270985 - DNA, 25 bp, Artificial
  probe
  misc_feature (1)..(25): SEQ ID NO: 706; WAN024BEF; Start 66; Stop 90
aaataatgtgttccatcagggctcc

SEQ ID NO: 270986 - DNA, 25 bp, Artificial
  probe
  misc_feature (1)..(25): SEQ ID NO: 706; WAN024BEF; Start 20; Stop 44
tcaggacggttcaaggtaaggattg

SEQ ID NO: 270987 - DNA, 25 bp, Artificial
  probe
  misc_feature (1)..(25): SEQ ID NO: 706; WAN024BEF; Start 28; Stop 52
gttcaaggtaaggattgccaagtcc

SEQ ID NO: 270988 - DNA, 25 bp, Artificial
  probe
  misc_feature (1)..(25): SEQ ID NO: 706; WAN024BEF; Start 62; Stop 86
tgataaataatgtgttccatcaggg

SEQ ID NO: 270989 - DNA, 25 bp, Artificial
  probe
  misc_feature (1)..(25): SEQ ID NO: 706; WAN024BEF; Start 68; Stop 92
ataatgtgttccatcagggctcctt

SEQ ID NO: 270990 - DNA, 25 bp, Artificial
  probe
  misc_feature (1)..(25): SEQ ID NO: 706; WAN024BEF; Start 67; Stop 91
aataatgtgttccatcagggctcct

SEQ ID NO: 270991 - DNA, 25 bp, Artificial
  probe
  misc_feature (1)..(25): SEQ ID NO: 706; WAN024BEF; Start 36; Stop 60
taaggattgccaagtcctcttcaag

SEQ ID NO: 270992 - DNA, 25 bp, Artificial
  probe
  misc_feature (1)..(25): SEQ ID NO: 706; WAN024BEF; Start 69; Stop 93
taatgtgttccatcagggctccttt

SEQ ID NO: 270993 - DNA, 25 bp, Artificial
  probe
  misc_feature (1)..(25): SEQ ID NO: 706; WAN024BEF; Start 35; Stop 59
gtaaggattgccaagtcctcttcaa

SEQ ID NO: 270994 - DNA, 25 bp, Artificial
  probe
  misc_feature (1)..(25): SEQ ID NO: 706; WAN024BEF; Start 32; Stop 56
aaggtaaggattgccaagtcctctt

SEQ ID NO: 270995 - DNA, 25 bp, Artificial
  probe
  misc_feature (1)..(25): SEQ ID NO: 706; WAN024BEF; Start 29; Stop 53
ttcaaggtaaggattgccaagtcct

SEQ ID NO: 270996 - DNA, 25 bp, Artificial
  probe
  misc_feature (1)..(25): SEQ ID NO: 706; WAN024BEF; Start 33; Stop 57
aggtaaggattgccaagtcctcttc

SEQ ID NO: 270997 - DNA, 25 bp, Artificial
  probe
  misc_feature (1)..(25): SEQ ID NO: 706; WAN024BEF; Start 34; Stop 58
ggtaaggattgccaagtcctcttca

SEQ ID NO: 270998 - DNA, 25 bp, Artificial
  probe
  misc_feature (1)..(25): SEQ ID NO: 706; WAN024BEF; Start 31; Stop 55
caaggtaaggattgccaagtcctct

SEQ ID NO: 270999 - DNA, 25 bp, Artificial
  probe
  misc_feature (1)..(25): SEQ ID NO: 706; WAN024BEF; Start 30; Stop 54
tcaaggtaaggattgccaagtcctc

SEQ ID NO: 271000 - DNA, 25 bp, Artificial
  probe
  misc_feature (1)..(25): SEQ ID NO: 706; WAN024BEF; Start 70; Stop 94
aatgtgttccatcagggctcctttt

SEQ ID NO: 271001 - DNA, 25 bp, Artificial
  probe
  misc_feature (1)..(25): SEQ ID NO: 706; WAN024BEF; Start 1; Stop 25
atgaaaaccatttgcgacctcagga

SEQ ID NO: 271002 - DNA, 25 bp, Artificial
  probe
  misc_feature (1)..(25): SEQ ID NO: 707; WAN024D4B; Start 199; Stop 223
tatgggtgggaagtaggagataaat

SEQ ID NO: 271003 - DNA, 25 bp, Artificial
  probe
  misc_feature (1)..(25): SEQ ID NO: 707; WAN024D4B; Start 198; Stop 222
atatgggtgggaagtaggagataaa

SEQ ID NO: 271004 - DNA, 25 bp, Artificial
  probe
  misc_feature (1)..(25): SEQ ID NO: 707; WAN024D4B; Start 197; Stop 221
aatatgggtgggaagtaggagataa

SEQ ID NO: 271005 - DNA, 25 bp, Artificial
  probe
  misc_feature (1)..(25): SEQ ID NO: 707; WAN024D4B; Start 196; Stop 220
aaatatgggtgggaagtaggagata

SEQ ID NO: 271006 - DNA, 25 bp, Artificial
  probe
  misc_feature (1)..(25): SEQ ID NO: 707; WAN024D4B; Start 431; Stop 455
ttcaggactatgacactagcatata

SEQ ID NO: 271007 - DNA, 25 bp, Artificial
  probe
  misc_feature (1)..(25): SEQ ID NO: 707; WAN024D4B; Start 208; Stop 232
gaagtaggagataaattgccagagt

SEQ ID NO: 271008 - DNA, 25 bp, Artificial
  probe
  misc_feature (1)..(25): SEQ ID NO: 707; WAN024D4B; Start 209; Stop 233
aagtaggagataaattgccagagtg

SEQ ID NO: 271009 - DNA, 25 bp, Artificial
  probe
  misc_feature (1)..(25): SEQ ID NO: 707; WAN024D4B; Start 207; Stop 231
ggaagtaggagataaattgccagag

SEQ ID NO: 271010 - DNA, 25 bp, Artificial
  probe
  misc_feature (1)..(25): SEQ ID NO: 707; WAN024D4B; Start 63; Stop 87
tgattatgaaactgaaagccgttac

SEQ ID NO: 271011 - DNA, 25 bp, Artificial
  probe
  misc_feature (1)..(25): SEQ ID NO: 707; WAN024D4B; Start 62; Stop 86
ctgattatgaaactgaaagccgtta

SEQ ID NO: 271012 - DNA, 25 bp, Artificial
  probe
  misc_feature (1)..(25): SEQ ID NO: 707; WAN024D4B; Start 200; Stop 224
atgggtgggaagtaggagataaatt

SEQ ID NO: 271013 - DNA, 25 bp, Artificial
  probe
  misc_feature (1)..(25): SEQ ID NO: 707; WAN024D4B; Start 126; Stop 150
cgattgtgtgagatggttatctgaa

SEQ ID NO: 271014 - DNA, 25 bp, Artificial
  probe
  misc_feature (1)..(25): SEQ ID NO: 707; WAN024D4B; Start 398; Stop 422
agagttgtgaaattgttcttgatgc

SEQ ID NO: 271015 - DNA, 25 bp, Artificial
  probe
  misc_feature (1)..(25): SEQ ID NO: 707; WAN024D4B; Start 432; Stop 456
tcaggactatgacactagcatatat

SEQ ID NO: 271016 - DNA, 25 bp, Artificial
  probe
  misc_feature (1)..(25): SEQ ID NO: 707; WAN024D4B; Start 334; Stop 358
cgtttagtaagtatagaggctgaaa

SEQ ID NO: 271017 - DNA, 25 bp, Artificial
  probe
  misc_feature (1)..(25): SEQ ID NO: 707; WAN024D4B; Start 92; Stop 116
acctaagtttaatcgtctgtacctt

SEQ ID NO: 271018 - DNA, 25 bp, Artificial
  probe
  misc_feature (1)..(25): SEQ ID NO: 707; WAN024D4B; Start 201; Stop 225
tgggtgggaagtaggagataaattg

SEQ ID NO: 271019 - DNA, 25 bp, Artificial
  probe
  misc_feature (1)..(25): SEQ ID NO: 707; WAN024D4B; Start 67; Stop 91
tatgaaactgaaagccgttacgata

SEQ ID NO: 271020 - DNA, 25 bp, Artificial
  probe
  misc_feature (1)..(25): SEQ ID NO: 707; WAN024D4B; Start 91; Stop 115
aacctaagtttaatcgtctgtacct

SEQ ID NO: 271021 - DNA, 25 bp, Artificial
  probe
  misc_feature (1)..(25): SEQ ID NO: 707; WAN024D4B; Start 206; Stop 230
gggaagtaggagataaattgccaga

SEQ ID NO: 271022 - DNA, 25 bp, Artificial
  probe
  misc_feature (1)..(25): SEQ ID NO: 707; WAN024D4B; Start 16; Stop 40
cttgttgcatcagaagaggtgtatg

SEQ ID NO: 271023 - DNA, 25 bp, Artificial
  probe
  misc_feature (1)..(25): SEQ ID NO: 707; WAN024D4B; Start 64; Stop 88
gattatgaaactgaaagccgttacg

SEQ ID NO: 271024 - DNA, 25 bp, Artificial
  probe
  misc_feature (1)..(25): SEQ ID NO: 707; WAN024D4B; Start 61; Stop 85
cctgattatgaaactgaaagccgtt

SEQ ID NO: 271025 - DNA, 25 bp, Artificial
  probe
  misc_feature (1)..(25): SEQ ID NO: 707; WAN024D4B; Start 68; Stop 92
atgaaactgaaagccgttacgataa

SEQ ID NO: 271026 - DNA, 25 bp, Artificial
  probe
  misc_feature (1)..(25): SEQ ID NO: 707; WAN024D4B; Start 66; Stop 90
ttatgaaactgaaagccgttacgat

SEQ ID NO: 271027 - DNA, 25 bp, Artificial
  probe
  misc_feature (1)..(25): SEQ ID NO: 707; WAN024D4B; Start 65; Stop 89
attatgaaactgaaagccgttacga

SEQ ID NO: 271028 - DNA, 25 bp, Artificial
  probe
  misc_feature (1)..(25): SEQ ID NO: 707; WAN024D4B; Start 15; Stop 39
acttgttgcatcagaagaggtgtat

SEQ ID NO: 271029 - DNA, 25 bp, Artificial
  probe
  misc_feature (1)..(25): SEQ ID NO: 707; WAN024D4B; Start 14; Stop 38
aacttgttgcatcagaagaggtgta

SEQ ID NO: 271030 - DNA, 25 bp, Artificial
  probe
  misc_feature (1)..(25): SEQ ID NO: 707; WAN024D4B; Start 115; Stop 139
ttatcagatcccgattgtgtgagat

SEQ ID NO: 271031 - DNA, 25 bp, Artificial
  probe
  misc_feature (1)..(25): SEQ ID NO: 707; WAN024D4B; Start 232; Stop 256
tggctacatagctcctatcatagat

SEQ ID NO: 271032 - DNA, 25 bp, Artificial
  probe
  misc_feature (1)..(25): SEQ ID NO: 707; WAN024D4B; Start 122; Stop 146
atcccgattgtgtgagatggttatc

SEQ ID NO: 271033 - DNA, 25 bp, Artificial
  probe
  misc_feature (1)..(25): SEQ ID NO: 707; WAN024D4B; Start 111; Stop 135
taccttatcagatcccgattgtgtg

SEQ ID NO: 271034 - DNA, 25 bp, Artificial
  probe
  misc_feature (1)..(25): SEQ ID NO: 707; WAN024D4B; Start 110; Stop 134
gtaccttatcagatcccgattgtgt

SEQ ID NO: 271035 - DNA, 25 bp, Artificial
  probe
  misc_feature (1)..(25): SEQ ID NO: 708; WAN024GCA; Start 1362; Stop 1386
gcttcaagagacctacgatatacaa

SEQ ID NO: 271036 - DNA, 25 bp, Artificial
  probe
  misc_feature (1)..(25): SEQ ID NO: 708; WAN024GCA; Start 1360; Stop 1384
ctgcttcaagagacctacgatatac

SEQ ID NO: 271037 - DNA, 25 bp, Artificial
  probe
  misc_feature (1)..(25): SEQ ID NO: 708; WAN024GCA; Start 2411; Stop 2435
aagttgacgaggctattgatagatt

SEQ ID NO: 271038 - DNA, 25 bp, Artificial
  probe
  misc_feature (1)..(25): SEQ ID NO: 708; WAN024GCA; Start 2410; Stop 2434
gaagttgacgaggctattgatagat

SEQ ID NO: 271039 - DNA, 25 bp, Artificial
  probe
  misc_feature (1)..(25): SEQ ID NO: 708; WAN024GCA; Start 591; Stop 615
aacttatcgcaaccaatctatcctg

SEQ ID NO: 271040 - DNA, 25 bp, Artificial
  probe
  misc_feature (1)..(25): SEQ ID NO: 708; WAN024GCA; Start 1361; Stop 1385
tgcttcaagagacctacgatataca

SEQ ID NO: 271041 - DNA, 25 bp, Artificial
  probe
  misc_feature (1)..(25): SEQ ID NO: 708; WAN024GCA; Start 593; Stop 617
cttatcgcaaccaatctatcctgag

SEQ ID NO: 271042 - DNA, 25 bp, Artificial
  probe
  misc_feature (1)..(25): SEQ ID NO: 708; WAN024GCA; Start 1359; Stop 1383
tctgcttcaagagacctacgatata

SEQ ID NO: 271043 - DNA, 25 bp, Artificial
  probe
  misc_feature (1)..(25): SEQ ID NO: 708; WAN024GCA; Start 1358; Stop 1382
atctgcttcaagagacctacgatat

SEQ ID NO: 271044 - DNA, 25 bp, Artificial
  probe
  misc_feature (1)..(25): SEQ ID NO: 708; WAN024GCA; Start 1357; Stop 1381
aatctgcttcaagagacctacgata

SEQ ID NO: 271045 - DNA, 25 bp, Artificial
  probe
  misc_feature (1)..(25): SEQ ID NO: 708; WAN024GCA; Start 1876; Stop 1900
ttagaagtctatgccagagaggtag

SEQ ID NO: 271046 - DNA, 25 bp, Artificial
  probe
  misc_feature (1)..(25): SEQ ID NO: 708; WAN024GCA; Start 1875; Stop 1899
cttagaagtctatgccagagaggta

SEQ ID NO: 271047 - DNA, 25 bp, Artificial
  probe
  misc_feature (1)..(25): SEQ ID NO: 708; WAN024GCA; Start 594; Stop 618
ttatcgcaaccaatctatcctgagt

SEQ ID NO: 271048 - DNA, 25 bp, Artificial
  probe
  misc_feature (1)..(25): SEQ ID NO: 708; WAN024GCA; Start 592; Stop 616
acttatcgcaaccaatctatcctga

SEQ ID NO: 271049 - DNA, 25 bp, Artificial
  probe
  misc_feature (1)..(25): SEQ ID NO: 708; WAN024GCA; Start 2359; Stop 2383
atagtagcatctctagcagaagaag

SEQ ID NO: 271050 - DNA, 25 bp, Artificial
  probe
  misc_feature (1)..(25): SEQ ID NO: 708; WAN024GCA; Start 1365; Stop 1389
tcaagagacctacgatatacaatct

SEQ ID NO: 271051 - DNA, 25 bp, Artificial
  probe
  misc_feature (1)..(25): SEQ ID NO: 708; WAN024GCA; Start 595; Stop 619
tatcgcaaccaatctatcctgagtt

SEQ ID NO: 271052 - DNA, 25 bp, Artificial
  probe
  misc_feature (1)..(25): SEQ ID NO: 708; WAN024GCA; Start 2358; Stop 2382
aatagtagcatctctagcagaagaa

SEQ ID NO: 271053 - DNA, 25 bp, Artificial
  probe
  misc_feature (1)..(25): SEQ ID NO: 708; WAN024GCA; Start 605; Stop 629
aatctatcctgagttctccagactt

SEQ ID NO: 271054 - DNA, 25 bp, Artificial
  probe
  misc_feature (1)..(25): SEQ ID NO: 708; WAN024GCA; Start 600; Stop 624
caaccaatctatcctgagttctcca

SEQ ID NO: 271055 - DNA, 25 bp, Artificial
  probe
  misc_feature (1)..(25): SEQ ID NO: 708; WAN024GCA; Start 2360; Stop 2384
tagtagcatctctagcagaagaagc

SEQ ID NO: 271056 - DNA, 25 bp, Artificial
  probe
  misc_feature (1)..(25): SEQ ID NO: 708; WAN024GCA; Start 1273; Stop 1297
accagacttgaagataatcctgaat

SEQ ID NO: 271057 - DNA, 25 bp, Artificial
  probe
  misc_feature (1)..(25): SEQ ID NO: 708; WAN024GCA; Start 1363; Stop 1387
cttcaagagacctacgatatacaat

SEQ ID NO: 271058 - DNA, 25 bp, Artificial
  probe
  misc_feature (1)..(25): SEQ ID NO: 708; WAN024GCA; Start 1364; Stop 1388
ttcaagagacctacgatatacaatc

SEQ ID NO: 271059 - DNA, 25 bp, Artificial
  probe
  misc_feature (1)..(25): SEQ ID NO: 708; WAN024GCA; Start 1081; Stop 1105
cttactgagacagagacaggagatt

SEQ ID NO: 271060 - DNA, 25 bp, Artificial
  probe
  misc_feature (1)..(25): SEQ ID NO: 708; WAN024GCA; Start 606; Stop 630
atctatcctgagttctccagacttg

SEQ ID NO: 271061 - DNA, 25 bp, Artificial
  probe
  misc_feature (1)..(25): SEQ ID NO: 708; WAN024GCA; Start 604; Stop 628
caatctatcctgagttctccagact

SEQ ID NO: 271062 - DNA, 25 bp, Artificial
  probe
  misc_feature (1)..(25): SEQ ID NO: 708; WAN024GCA; Start 1872; Stop 1896
ctccttagaagtctatgccagagag

SEQ ID NO: 271063 - DNA, 25 bp, Artificial
  probe
  misc_feature (1)..(25): SEQ ID NO: 708; WAN024GCA; Start 2409; Stop 2433
cgaagttgacgaggctattgataga

SEQ ID NO: 271064 - DNA, 25 bp, Artificial
  probe
  misc_feature (1)..(25): SEQ ID NO: 708; WAN024GCA; Start 1247; Stop 1271
tagtgactaatcatgcctatctcgt

SEQ ID NO: 271065 - DNA, 25 bp, Artificial
  probe
  misc_feature (1)..(25): SEQ ID NO: 708; WAN024GCA; Start 1274; Stop 1298
ccagacttgaagataatcctgaatt

SEQ ID NO: 271066 - DNA, 25 bp, Artificial
  probe
  misc_feature (1)..(25): SEQ ID NO: 708; WAN024GCA; Start 601; Stop 625
aaccaatctatcctgagttctccag

SEQ ID NO: 271067 - DNA, 25 bp, Artificial
  probe
  misc_feature (1)..(25): SEQ ID NO: 708; WAN024GCA; Start 948; Stop 972
agtgttccatacagatattcatagc

SEQ ID NO: 271068 - DNA, 25 bp, Artificial
  probe
  misc_feature (1)..(25): SEQ ID NO: 709; WAN024GNJ; Start 99; Stop 123
caaggctggaggattaggaattatc

SEQ ID NO: 271069 - DNA, 25 bp, Artificial
  probe
  misc_feature (1)..(25): SEQ ID NO: 709; WAN024GNJ; Start 238; Stop 262
atcgtggatctcgttattgaagaag

SEQ ID NO: 271070 - DNA, 25 bp, Artificial
  probe
  misc_feature (1)..(25): SEQ ID NO: 709; WAN024GNJ; Start 243; Stop 267
ggatctcgttattgaagaaggtgtt

SEQ ID NO: 271071 - DNA, 25 bp, Artificial
  probe
  misc_feature (1)..(25): SEQ ID NO: 709; WAN024GNJ; Start 100; Stop 124
aaggctggaggattaggaattatcg

SEQ ID NO: 271072 - DNA, 25 bp, Artificial
  probe
  misc_feature (1)..(25): SEQ ID NO: 709; WAN024GNJ; Start 245; Stop 269
atctcgttattgaagaaggtgttaa

SEQ ID NO: 271073 - DNA, 25 bp, Artificial
  probe
  misc_feature (1)..(25): SEQ ID NO: 709; WAN024GNJ; Start 244; Stop 268
gatctcgttattgaagaaggtgtta

SEQ ID NO: 271074 - DNA, 25 bp, Artificial
  probe
  misc_feature (1)..(25): SEQ ID NO: 709; WAN024GNJ; Start 241; Stop 265
gtggatctcgttattgaagaaggtg

SEQ ID NO: 271075 - DNA, 25 bp, Artificial
  probe
  misc_feature (1)..(25): SEQ ID NO: 709; WAN024GNJ; Start 104; Stop 128
ctggaggattaggaattatcggtgg

SEQ ID NO: 271076 - DNA, 25 bp, Artificial
  probe
  misc_feature (1)..(25): SEQ ID NO: 709; WAN024GNJ; Start 242; Stop 266
tggatctcgttattgaagaaggtgt

SEQ ID NO: 271077 - DNA, 25 bp, Artificial
  probe
  misc_feature (1)..(25): SEQ ID NO: 709; WAN024GNJ; Start 103; Stop 127
gctggaggattaggaattatcggtg

SEQ ID NO: 271078 - DNA, 25 bp, Artificial
  probe
  misc_feature (1)..(25): SEQ ID NO: 709; WAN024GNJ; Start 239; Stop 263
tcgtggatctcgttattgaagaagg

SEQ ID NO: 271079 - DNA, 25 bp, Artificial
  probe
  misc_feature (1)..(25): SEQ ID NO: 709; WAN024GNJ; Start 284; Stop 308
gagcaggaaatccaagcaagtatat

SEQ ID NO: 271080 - DNA, 25 bp, Artificial
  probe
  misc_feature (1)..(25): SEQ ID NO: 709; WAN024GNJ; Start 248; Stop 272
tcgttattgaagaaggtgttaaagt

SEQ ID NO: 271081 - DNA, 25 bp, Artificial
  probe
  misc_feature (1)..(25): SEQ ID NO: 709; WAN024GNJ; Start 98; Stop 122
ccaaggctggaggattaggaattat

SEQ ID NO: 271082 - DNA, 25 bp, Artificial
  probe
  misc_feature (1)..(25): SEQ ID NO: 709; WAN024GNJ; Start 285; Stop 309
agcaggaaatccaagcaagtatatg

SEQ ID NO: 271083 - DNA, 25 bp, Artificial
  probe
  misc_feature (1)..(25): SEQ ID NO: 709; WAN024GNJ; Start 240; Stop 264
cgtggatctcgttattgaagaaggt

SEQ ID NO: 271084 - DNA, 25 bp, Artificial
  probe
  misc_feature (1)..(25): SEQ ID NO: 709; WAN024GNJ; Start 253; Stop 277
attgaagaaggtgttaaagttgtca

SEQ ID NO: 271085 - DNA, 25 bp, Artificial
  probe
  misc_feature (1)..(25): SEQ ID NO: 709; WAN024GNJ; Start 247; Stop 271
ctcgttattgaagaaggtgttaaag

SEQ ID NO: 271086 - DNA, 25 bp, Artificial
  probe
  misc_feature (1)..(25): SEQ ID NO: 709; WAN024GNJ; Start 246; Stop 270
tctcgttattgaagaaggtgttaaa

SEQ ID NO: 271087 - DNA, 25 bp, Artificial
  probe
  misc_feature (1)..(25): SEQ ID NO: 709; WAN024GNJ; Start 249; Stop 273
cgttattgaagaaggtgttaaagtt

SEQ ID NO: 271088 - DNA, 25 bp, Artificial
  probe
  misc_feature (1)..(25): SEQ ID NO: 709; WAN024GNJ; Start 205; Stop 229
aacatcatgctcttatctccctttg

SEQ ID NO: 271089 - DNA, 25 bp, Artificial
  probe
  misc_feature (1)..(25): SEQ ID NO: 709; WAN024GNJ; Start 204; Stop 228
caacatcatgctcttatctcccttt

SEQ ID NO: 271090 - DNA, 25 bp, Artificial
  probe
  misc_feature (1)..(25): SEQ ID NO: 709; WAN024GNJ; Start 101; Stop 125
aggctggaggattaggaattatcgg

SEQ ID NO: 271091 - DNA, 25 bp, Artificial
  probe
  misc_feature (1)..(25): SEQ ID NO: 709; WAN024GNJ; Start 254; Stop 278
ttgaagaaggtgttaaagttgtcac

SEQ ID NO: 271092 - DNA, 25 bp, Artificial
  probe
  misc_feature (1)..(25): SEQ ID NO: 709; WAN024GNJ; Start 255; Stop 279
tgaagaaggtgttaaagttgtcaca

SEQ ID NO: 271093 - DNA, 25 bp, Artificial
  probe
  misc_feature (1)..(25): SEQ ID NO: 709; WAN024GNJ; Start 207; Stop 231
catcatgctcttatctccctttgtg

SEQ ID NO: 271094 - DNA, 25 bp, Artificial
  probe
  misc_feature (1)..(25): SEQ ID NO: 709; WAN024GNJ; Start 203; Stop 227
tcaacatcatgctcttatctccctt

SEQ ID NO: 271095 - DNA, 25 bp, Artificial
  probe
  misc_feature (1)..(25): SEQ ID NO: 709; WAN024GNJ; Start 252; Stop 276
tattgaagaaggtgttaaagttgtc

SEQ ID NO: 271096 - DNA, 25 bp, Artificial
  probe
  misc_feature (1)..(25): SEQ ID NO: 709; WAN024GNJ; Start 428; Stop 452
ggcatatcggtaaattaacaaccat

SEQ ID NO: 271097 - DNA, 25 bp, Artificial
  probe
  misc_feature (1)..(25): SEQ ID NO: 709; WAN024GNJ; Start 102; Stop 126
ggctggaggattaggaattatcggt

SEQ ID NO: 271098 - DNA, 25 bp, Artificial
  probe
  misc_feature (1)..(25): SEQ ID NO: 709; WAN024GNJ; Start 399; Stop 423
tgttattgcagaaggaatggaagct

SEQ ID NO: 271099 - DNA, 25 bp, Artificial
  probe
  misc_feature (1)..(25): SEQ ID NO: 709; WAN024GNJ; Start 256; Stop 280
gaagaaggtgttaaagttgtcacaa

SEQ ID NO: 271100 - DNA, 25 bp, Artificial
  probe
  misc_feature (1)..(25): SEQ ID NO: 709; WAN024GNJ; Start 202; Stop 226
gtcaacatcatgctcttatctccct

SEQ ID NO: 271101 - DNA, 25 bp, Artificial
  probe
  misc_feature (1)..(25): SEQ ID NO: 710; WAN024FSB; Start 168; Stop 192
cttgatgaattatctgaccaatcct

SEQ ID NO: 271102 - DNA, 25 bp, Artificial
  probe
  misc_feature (1)..(25): SEQ ID NO: 710; WAN024FSB; Start 167; Stop 191
tcttgatgaattatctgaccaatcc

SEQ ID NO: 271103 - DNA, 25 bp, Artificial
  probe
  misc_feature (1)..(25): SEQ ID NO: 710; WAN024FSB; Start 169; Stop 193
ttgatgaattatctgaccaatcctt

SEQ ID NO: 271104 - DNA, 25 bp, Artificial
  probe
  misc_feature (1)..(25): SEQ ID NO: 710; WAN024FSB; Start 88; Stop 112
tatcctatggagattcagtggctaa

SEQ ID NO: 271105 - DNA, 25 bp, Artificial
  probe
  misc_feature (1)..(25): SEQ ID NO: 710; WAN024FSB; Start 87; Stop 111
ctatcctatggagattcagtggcta

SEQ ID NO: 271106 - DNA, 25 bp, Artificial
  probe
  misc_feature (1)..(25): SEQ ID NO: 710; WAN024FSB; Start 85; Stop 109
ttctatcctatggagattcagtggc

SEQ ID NO: 271107 - DNA, 25 bp, Artificial
  probe
  misc_feature (1)..(25): SEQ ID NO: 710; WAN024FSB; Start 306; Stop 330
gccaagtttctatgtctttgtcaat

SEQ ID NO: 271108 - DNA, 25 bp, Artificial
  probe
  misc_feature (1)..(25): SEQ ID NO: 710; WAN024FSB; Start 86; Stop 110
tctatcctatggagattcagtggct

SEQ ID NO: 271109 - DNA, 25 bp, Artificial
  probe
  misc_feature (1)..(25): SEQ ID NO: 710; WAN024FSB; Start 94; Stop 118
atggagattcagtggctaaacttaa

SEQ ID NO: 271110 - DNA, 25 bp, Artificial
  probe
  misc_feature (1)..(25): SEQ ID NO: 710; WAN024FSB; Start 92; Stop 116
ctatggagattcagtggctaaactt

SEQ ID NO: 271111 - DNA, 25 bp, Artificial
  probe
  misc_feature (1)..(25): SEQ ID NO: 710; WAN024FSB; Start 98; Stop 122
agattcagtggctaaacttaacgaa

SEQ ID NO: 271112 - DNA, 25 bp, Artificial
  probe
  misc_feature (1)..(25): SEQ ID NO: 710; WAN024FSB; Start 95; Stop 119
tggagattcagtggctaaacttaac

SEQ ID NO: 271113 - DNA, 25 bp, Artificial
  probe
  misc_feature (1)..(25): SEQ ID NO: 710; WAN024FSB; Start 93; Stop 117
tatggagattcagtggctaaactta

SEQ ID NO: 271114 - DNA, 25 bp, Artificial
  probe
  misc_feature (1)..(25): SEQ ID NO: 710; WAN024FSB; Start 305; Stop 329
tgccaagtttctatgtctttgtcaa

SEQ ID NO: 271115 - DNA, 25 bp, Artificial
  probe
  misc_feature (1)..(25): SEQ ID NO: 710; WAN024FSB; Start 97; Stop 121
gagattcagtggctaaacttaacga

SEQ ID NO: 271116 - DNA, 25 bp, Artificial
  probe
  misc_feature (1)..(25): SEQ ID NO: 710; WAN024FSB; Start 166; Stop 190
atcttgatgaattatctgaccaatc

SEQ ID NO: 271117 - DNA, 25 bp, Artificial
  probe
  misc_feature (1)..(25): SEQ ID NO: 710; WAN024FSB; Start 304; Stop 328
ctgccaagtttctatgtctttgtca

SEQ ID NO: 271118 - DNA, 25 bp, Artificial
  probe
  misc_feature (1)..(25): SEQ ID NO: 710; WAN024FSB; Start 170; Stop 194
tgatgaattatctgaccaatccttt

SEQ ID NO: 271119 - DNA, 25 bp, Artificial
  probe
  misc_feature (1)..(25): SEQ ID NO: 710; WAN024FSB; Start 303; Stop 327
actgccaagtttctatgtctttgtc

SEQ ID NO: 271120 - DNA, 25 bp, Artificial
  probe
  misc_feature (1)..(25): SEQ ID NO: 710; WAN024FSB; Start 302; Stop 326
cactgccaagtttctatgtctttgt

SEQ ID NO: 271121 - DNA, 25 bp, Artificial
  probe
  misc_feature (1)..(25): SEQ ID NO: 710; WAN024FSB; Start 96; Stop 120
ggagattcagtggctaaacttaacg

SEQ ID NO: 271122 - DNA, 25 bp, Artificial
  probe
  misc_feature (1)..(25): SEQ ID NO: 710; WAN024FSB; Start 91; Stop 115
cctatggagattcagtggctaaact

SEQ ID NO: 271123 - DNA, 25 bp, Artificial
  probe
  misc_feature (1)..(25): SEQ ID NO: 710; WAN024FSB; Start 266; Stop 290
atctctttcatttggttcagctagt

SEQ ID NO: 271124 - DNA, 25 bp, Artificial
  probe
  misc_feature (1)..(25): SEQ ID NO: 710; WAN024FSB; Start 163; Stop 187
catatcttgatgaattatctgacca

SEQ ID NO: 271125 - DNA, 25 bp, Artificial
  probe
  misc_feature (1)..(25): SEQ ID NO: 710; WAN024FSB; Start 267; Stop 291
tctctttcatttggttcagctagta

SEQ ID NO: 271126 - DNA, 25 bp, Artificial
  probe
  misc_feature (1)..(25): SEQ ID NO: 710; WAN024FSB; Start 268; Stop 292
ctctttcatttggttcagctagtag

SEQ ID NO: 271127 - DNA, 25 bp, Artificial
  probe
  misc_feature (1)..(25): SEQ ID NO: 710; WAN024FSB; Start 137; Stop 161
aaccagaaaccattcaatacaattt

SEQ ID NO: 271128 - DNA, 25 bp, Artificial
  probe
  misc_feature (1)..(25): SEQ ID NO: 710; WAN024FSB; Start 136; Stop 160
aaaccagaaaccattcaatacaatt

SEQ ID NO: 271129 - DNA, 25 bp, Artificial
  probe
  misc_feature (1)..(25): SEQ ID NO: 710; WAN024FSB; Start 301; Stop 325
acactgccaagtttctatgtctttg

SEQ ID NO: 271130 - DNA, 25 bp, Artificial
  probe
  misc_feature (1)..(25): SEQ ID NO: 710; WAN024FSB; Start 265; Stop 289
aatctctttcatttggttcagctag

SEQ ID NO: 271131 - DNA, 25 bp, Artificial
  probe
  misc_feature (1)..(25): SEQ ID NO: 710; WAN024FSB; Start 101; Stop 125
ttcagtggctaaacttaacgaatcg

SEQ ID NO: 271132 - DNA, 25 bp, Artificial
  probe
  misc_feature (1)..(25): SEQ ID NO: 710; WAN024FSB; Start 84; Stop 108
tttctatcctatggagattcagtgg

SEQ ID NO: 271133 - DNA, 25 bp, Artificial
  probe
  misc_feature (1)..(25): SEQ ID NO: 710; WAN024FSB; Start 522; Stop 546
tttgccagagaccttctttcttcat

SEQ ID NO: 271134 - DNA, 25 bp, Artificial
  probe
  misc_feature (1)..(25): SEQ ID NO: 711; WAN024CMD; Start 237; Stop 261
caatcaacttatgttcatcggcttg

SEQ ID NO: 271135 - DNA, 25 bp, Artificial
  probe
  misc_feature (1)..(25): SEQ ID NO: 711; WAN024CMD; Start 347; Stop 371
ttctctgcttaatcatcatgcttct

SEQ ID NO: 271136 - DNA, 25 bp, Artificial
  probe
  misc_feature (1)..(25): SEQ ID NO: 711; WAN024CMD; Start 346; Stop 370
gttctctgcttaatcatcatgcttc

SEQ ID NO: 271137 - DNA, 25 bp, Artificial
  probe
  misc_feature (1)..(25): SEQ ID NO: 711; WAN024CMD; Start 345; Stop 369
tgttctctgcttaatcatcatgctt

SEQ ID NO: 271138 - DNA, 25 bp, Artificial
  probe
  misc_feature (1)..(25): SEQ ID NO: 711; WAN024CMD; Start 348; Stop 372
tctctgcttaatcatcatgcttctg

SEQ ID NO: 271139 - DNA, 25 bp, Artificial
  probe
  misc_feature (1)..(25): SEQ ID NO: 711; WAN024CMD; Start 344; Stop 368
ctgttctctgcttaatcatcatgct

SEQ ID NO: 271140 - DNA, 25 bp, Artificial
  probe
  misc_feature (1)..(25): SEQ ID NO: 711; WAN024CMD; Start 236; Stop 260
ccaatcaacttatgttcatcggctt

SEQ ID NO: 271141 - DNA, 25 bp, Artificial
  probe
  misc_feature (1)..(25): SEQ ID NO: 711; WAN024CMD; Start 234; Stop 258
aaccaatcaacttatgttcatcggc

SEQ ID NO: 271142 - DNA, 25 bp, Artificial
  probe
  misc_feature (1)..(25): SEQ ID NO: 711; WAN024CMD; Start 38; Stop 62
ttgcgagattgttcttaggtcagtt

SEQ ID NO: 271143 - DNA, 25 bp, Artificial
  probe
  misc_feature (1)..(25): SEQ ID NO: 711; WAN024CMD; Start 353; Stop 377
gcttaatcatcatgcttctgctcat

SEQ ID NO: 271144 - DNA, 25 bp, Artificial
  probe
  misc_feature (1)..(25): SEQ ID NO: 711; WAN024CMD; Start 308; Stop 332
gagaatcctaccaacaaataatcgc

SEQ ID NO: 271145 - DNA, 25 bp, Artificial
  probe
  misc_feature (1)..(25): SEQ ID NO: 711; WAN024CMD; Start 185; Stop 209
gggaaatgaggataagagagtttga

SEQ ID NO: 271146 - DNA, 25 bp, Artificial
  probe
  misc_feature (1)..(25): SEQ ID NO: 711; WAN024CMD; Start 184; Stop 208
agggaaatgaggataagagagtttg

SEQ ID NO: 271147 - DNA, 25 bp, Artificial
  probe
  misc_feature (1)..(25): SEQ ID NO: 711; WAN024CMD; Start 310; Stop 334
gaatcctaccaacaaataatcgctt

SEQ ID NO: 271148 - DNA, 25 bp, Artificial
  probe
  misc_feature (1)..(25): SEQ ID NO: 711; WAN024CMD; Start 309; Stop 333
agaatcctaccaacaaataatcgct

SEQ ID NO: 271149 - DNA, 25 bp, Artificial
  probe
  misc_feature (1)..(25): SEQ ID NO: 711; WAN024CMD; Start 63; Stop 87
gcccttgcttgtttctacttatcta

SEQ ID NO: 271150 - DNA, 25 bp, Artificial
  probe
  misc_feature (1)..(25): SEQ ID NO: 711; WAN024CMD; Start 235; Stop 259
accaatcaacttatgttcatcggct

SEQ ID NO: 271151 - DNA, 25 bp, Artificial
  probe
  misc_feature (1)..(25): SEQ ID NO: 711; WAN024CMD; Start 351; Stop 375
ctgcttaatcatcatgcttctgctc

SEQ ID NO: 271152 - DNA, 25 bp, Artificial
  probe
  misc_feature (1)..(25): SEQ ID NO: 711; WAN024CMD; Start 349; Stop 373
ctctgcttaatcatcatgcttctgc

SEQ ID NO: 271153 - DNA, 25 bp, Artificial
  probe
  misc_feature (1)..(25): SEQ ID NO: 711; WAN024CMD; Start 342; Stop 366
cgctgttctctgcttaatcatcatg

SEQ ID NO: 271154 - DNA, 25 bp, Artificial
  probe
  misc_feature (1)..(25): SEQ ID NO: 711; WAN024CMD; Start 191; Stop 215
tgaggataagagagtttgaagatga

SEQ ID NO: 271155 - DNA, 25 bp, Artificial
  probe
  misc_feature (1)..(25): SEQ ID NO: 711; WAN024CMD; Start 37; Stop 61
cttgcgagattgttcttaggtcagt

SEQ ID NO: 271156 - DNA, 25 bp, Artificial
  probe
  misc_feature (1)..(25): SEQ ID NO: 711; WAN024CMD; Start 241; Stop 265
caacttatgttcatcggcttgacag

SEQ ID NO: 271157 - DNA, 25 bp, Artificial
  probe
  misc_feature (1)..(25): SEQ ID NO: 711; WAN024CMD; Start 180; Stop 204
cactagggaaatgaggataagagag

SEQ ID NO: 271158 - DNA, 25 bp, Artificial
  probe
  misc_feature (1)..(25): SEQ ID NO: 711; WAN024CMD; Start 163; Stop 187
ttggttactgtttatctcactaggg

SEQ ID NO: 271159 - DNA, 25 bp, Artificial
  probe
  misc_feature (1)..(25): SEQ ID NO: 711; WAN024CMD; Start 164; Stop 188
tggttactgtttatctcactaggga

SEQ ID NO: 271160 - DNA, 25 bp, Artificial
  probe
  misc_feature (1)..(25): SEQ ID NO: 711; WAN024CMD; Start 343; Stop 367
gctgttctctgcttaatcatcatgc

SEQ ID NO: 271161 - DNA, 25 bp, Artificial
  probe
  misc_feature (1)..(25): SEQ ID NO: 711; WAN024CMD; Start 165; Stop 189
ggttactgtttatctcactagggaa

SEQ ID NO: 271162 - DNA, 25 bp, Artificial
  probe
  misc_feature (1)..(25): SEQ ID NO: 711; WAN024CMD; Start 31; Stop 55
atcttccttgcgagattgttcttag

SEQ ID NO: 271163 - DNA, 25 bp, Artificial
  probe
  misc_feature (1)..(25): SEQ ID NO: 711; WAN024CMD; Start 311; Stop 335
aatcctaccaacaaataatcgctta

SEQ ID NO: 271164 - DNA, 25 bp, Artificial
  probe
  misc_feature (1)..(25): SEQ ID NO: 711; WAN024CMD; Start 183; Stop 207
tagggaaatgaggataagagagttt

SEQ ID NO: 271165 - DNA, 25 bp, Artificial
  probe
  misc_feature (1)..(25): SEQ ID NO: 711; WAN024CMD; Start 61; Stop 85
ttgcccttgcttgtttctacttatc

SEQ ID NO: 271166 - DNA, 25 bp, Artificial
  probe
  misc_feature (1)..(25): SEQ ID NO: 711; WAN024CMD; Start 350; Stop 374
tctgcttaatcatcatgcttctgct

SEQ ID NO: 271167 - DNA, 25 bp, Artificial
  probe
  misc_feature (1)..(25): SEQ ID NO: 712; WAN024FH4; Start 24; Stop 48
cggtataggagtagctctattatct

SEQ ID NO: 271168 - DNA, 25 bp, Artificial
  probe
  misc_feature (1)..(25): SEQ ID NO: 712; WAN024FH4; Start 23; Stop 47
tcggtataggagtagctctattatc

SEQ ID NO: 271169 - DNA, 25 bp, Artificial
  probe
  misc_feature (1)..(25): SEQ ID NO: 712; WAN024FH4; Start 20; Stop 44
ttatcggtataggagtagctctatt

SEQ ID NO: 271170 - DNA, 25 bp, Artificial
  probe
  misc_feature (1)..(25): SEQ ID NO: 712; WAN024FH4; Start 51; Stop 75
ttctcttctagttgcatgtggaaca

SEQ ID NO: 271171 - DNA, 25 bp, Artificial
  probe
  misc_feature (1)..(25): SEQ ID NO: 712; WAN024FH4; Start 22; Stop 46
atcggtataggagtagctctattat

SEQ ID NO: 271172 - DNA, 25 bp, Artificial
  probe
  misc_feature (1)..(25): SEQ ID NO: 712; WAN024FH4; Start 15; Stop 39
aaagtttatcggtataggagtagct

SEQ ID NO: 271173 - DNA, 25 bp, Artificial
  probe
  misc_feature (1)..(25): SEQ ID NO: 712; WAN024FH4; Start 45; Stop 69
atctctttctcttctagttgcatgt

SEQ ID NO: 271174 - DNA, 25 bp, Artificial
  probe
  misc_feature (1)..(25): SEQ ID NO: 712; WAN024FH4; Start 46; Stop 70
tctctttctcttctagttgcatgtg

SEQ ID NO: 271175 - DNA, 25 bp, Artificial
  probe
  misc_feature (1)..(25): SEQ ID NO: 712; WAN024FH4; Start 17; Stop 41
agtttatcggtataggagtagctct

SEQ ID NO: 271176 - DNA, 25 bp, Artificial
  probe
  misc_feature (1)..(25): SEQ ID NO: 712; WAN024FH4; Start 16; Stop 40
aagtttatcggtataggagtagctc

SEQ ID NO: 271177 - DNA, 25 bp, Artificial
  probe
  misc_feature (1)..(25): SEQ ID NO: 712; WAN024FH4; Start 49; Stop 73
ctttctcttctagttgcatgtggaa

SEQ ID NO: 271178 - DNA, 25 bp, Artificial
  probe
  misc_feature (1)..(25): SEQ ID NO: 712; WAN024FH4; Start 47; Stop 71
ctctttctcttctagttgcatgtgg

SEQ ID NO: 271179 - DNA, 25 bp, Artificial
  probe
  misc_feature (1)..(25): SEQ ID NO: 712; WAN024FH4; Start 21; Stop 45
tatcggtataggagtagctctatta

SEQ ID NO: 271180 - DNA, 25 bp, Artificial
  probe
  misc_feature (1)..(25): SEQ ID NO: 712; WAN024FH4; Start 50; Stop 74
tttctcttctagttgcatgtggaac

SEQ ID NO: 271181 - DNA, 25 bp, Artificial
  probe
  misc_feature (1)..(25): SEQ ID NO: 712; WAN024FH4; Start 48; Stop 72
tctttctcttctagttgcatgtgga

SEQ ID NO: 271182 - DNA, 25 bp, Artificial
  probe
  misc_feature (1)..(25): SEQ ID NO: 712; WAN024FH4; Start 18; Stop 42
gtttatcggtataggagtagctcta

SEQ ID NO: 271183 - DNA, 25 bp, Artificial
  probe
  misc_feature (1)..(25): SEQ ID NO: 712; WAN024FH4; Start 44; Stop 68
tatctctttctcttctagttgcatg

SEQ ID NO: 271184 - DNA, 25 bp, Artificial
  probe
  misc_feature (1)..(25): SEQ ID NO: 712; WAN024FH4; Start 25; Stop 49
ggtataggagtagctctattatctc

SEQ ID NO: 271185 - DNA, 25 bp, Artificial
  probe
  misc_feature (1)..(25): SEQ ID NO: 712; WAN024FH4; Start 30; Stop 54
aggagtagctctattatctctttct

SEQ ID NO: 271186 - DNA, 25 bp, Artificial
  probe
  misc_feature (1)..(25): SEQ ID NO: 712; WAN024FH4; Start 43; Stop 67
ttatctctttctcttctagttgcat

SEQ ID NO: 271187 - DNA, 25 bp, Artificial
  probe
  misc_feature (1)..(25): SEQ ID NO: 712; WAN024FH4; Start 42; Stop 66
attatctctttctcttctagttgca

SEQ ID NO: 271188 - DNA, 25 bp, Artificial
  probe
  misc_feature (1)..(25): SEQ ID NO: 712; WAN024FH4; Start 31; Stop 55
ggagtagctctattatctctttctc

SEQ ID NO: 271189 - DNA, 25 bp, Artificial
  probe
  misc_feature (1)..(25): SEQ ID NO: 712; WAN024FH4; Start 19; Stop 43
tttatcggtataggagtagctctat

SEQ ID NO: 271190 - DNA, 25 bp, Artificial
  probe
  misc_feature (1)..(25): SEQ ID NO: 712; WAN024FH4; Start 14; Stop 38
aaaagtttatcggtataggagtagc

SEQ ID NO: 271191 - DNA, 25 bp, Artificial
  probe
  misc_feature (1)..(25): SEQ ID NO: 712; WAN024FH4; Start 41; Stop 65
tattatctctttctcttctagttgc

SEQ ID NO: 271192 - DNA, 25 bp, Artificial
  probe
  misc_feature (1)..(25): SEQ ID NO: 712; WAN024FH4; Start 37; Stop 61
gctctattatctctttctcttctag

SEQ ID NO: 271193 - DNA, 25 bp, Artificial
  probe
  misc_feature (1)..(25): SEQ ID NO: 712; WAN024FH4; Start 26; Stop 50
gtataggagtagctctattatctct

SEQ ID NO: 271194 - DNA, 25 bp, Artificial
  probe
  misc_feature (1)..(25): SEQ ID NO: 712; WAN024FH4; Start 32; Stop 56
gagtagctctattatctctttctct

SEQ ID NO: 271195 - DNA, 25 bp, Artificial
  probe
  misc_feature (1)..(25): SEQ ID NO: 712; WAN024FH4; Start 33; Stop 57
agtagctctattatctctttctctt

SEQ ID NO: 271196 - DNA, 25 bp, Artificial
  probe
  misc_feature (1)..(25): SEQ ID NO: 712; WAN024FH4; Start 29; Stop 53
taggagtagctctattatctctttc

SEQ ID NO: 271197 - DNA, 25 bp, Artificial
  probe
  misc_feature (1)..(25): SEQ ID NO: 712; WAN024FH4; Start 34; Stop 58
gtagctctattatctctttctcttc

SEQ ID NO: 271198 - DNA, 25 bp, Artificial
  probe
  misc_feature (1)..(25): SEQ ID NO: 712; WAN024FH4; Start 36; Stop 60
agctctattatctctttctcttcta

SEQ ID NO: 271199 - DNA, 25 bp, Artificial
  probe
  misc_feature (1)..(25): SEQ ID NO: 712; WAN024FH4; Start 35; Stop 59
tagctctattatctctttctcttct

SEQ ID NO: 271200 - DNA, 25 bp, Artificial
  probe
  misc_feature (1)..(25): SEQ ID NO: 713; WAN024B4V; Start 391; Stop 415
aagatggttcagttggaaggttatg

SEQ ID NO: 271201 - DNA, 25 bp, Artificial
  probe
  misc_feature (1)..(25): SEQ ID NO: 713; WAN024B4V; Start 390; Stop 414
caagatggttcagttggaaggttat

SEQ ID NO: 271202 - DNA, 25 bp, Artificial
  probe
  misc_feature (1)..(25): SEQ ID NO: 713; WAN024B4V; Start 652; Stop 676
gttatgaatgatggcgagattgtcc

SEQ ID NO: 271203 - DNA, 25 bp, Artificial
  probe
  misc_feature (1)..(25): SEQ ID NO: 713; WAN024B4V; Start 392; Stop 416
agatggttcagttggaaggttatga

SEQ ID NO: 271204 - DNA, 25 bp, Artificial
  probe
  misc_feature (1)..(25): SEQ ID NO: 713; WAN024B4V; Start 389; Stop 413
tcaagatggttcagttggaaggtta

SEQ ID NO: 271205 - DNA, 25 bp, Artificial
  probe
  misc_feature (1)..(25): SEQ ID NO: 713; WAN024B4V; Start 385; Stop 409
gttctcaagatggttcagttggaag

SEQ ID NO: 271206 - DNA, 25 bp, Artificial
  probe
  misc_feature (1)..(25): SEQ ID NO: 713; WAN024B4V; Start 382; Stop 406
gaagttctcaagatggttcagttgg

SEQ ID NO: 271207 - DNA, 25 bp, Artificial
  probe
  misc_feature (1)..(25): SEQ ID NO: 713; WAN024B4V; Start 381; Stop 405
ggaagttctcaagatggttcagttg

SEQ ID NO: 271208 - DNA, 25 bp, Artificial
  probe
  misc_feature (1)..(25): SEQ ID NO: 713; WAN024B4V; Start 264; Stop 288
cgtacataccgtcttccaatcctat

SEQ ID NO: 271209 - DNA, 25 bp, Artificial
  probe
  misc_feature (1)..(25): SEQ ID NO: 713; WAN024B4V; Start 384; Stop 408
agttctcaagatggttcagttggaa

SEQ ID NO: 271210 - DNA, 25 bp, Artificial
  probe
  misc_feature (1)..(25): SEQ ID NO: 713; WAN024B4V; Start 383; Stop 407
aagttctcaagatggttcagttgga

SEQ ID NO: 271211 - DNA, 25 bp, Artificial
  probe
  misc_feature (1)..(25): SEQ ID NO: 713; WAN024B4V; Start 651; Stop 675
cgttatgaatgatggcgagattgtc

SEQ ID NO: 271212 - DNA, 25 bp, Artificial
  probe
  misc_feature (1)..(25): SEQ ID NO: 713; WAN024B4V; Start 265; Stop 289
gtacataccgtcttccaatcctatg

SEQ ID NO: 271213 - DNA, 25 bp, Artificial
  probe
  misc_feature (1)..(25): SEQ ID NO: 713; WAN024B4V; Start 957; Stop 981
ctatgacgaacttggaaatgaatgg

SEQ ID NO: 271214 - DNA, 25 bp, Artificial
  probe
  misc_feature (1)..(25): SEQ ID NO: 713; WAN024B4V; Start 956; Stop 980
cctatgacgaacttggaaatgaatg

SEQ ID NO: 271215 - DNA, 25 bp, Artificial
  probe
  misc_feature (1)..(25): SEQ ID NO: 713; WAN024B4V; Start 588; Stop 612
cattacctttgtctttgtcactcac

SEQ ID NO: 271216 - DNA, 25 bp, Artificial
  probe
  misc_feature (1)..(25): SEQ ID NO: 713; WAN024B4V; Start 958; Stop 982
tatgacgaacttggaaatgaatgga

SEQ ID NO: 271217 - DNA, 25 bp, Artificial
  probe
  misc_feature (1)..(25): SEQ ID NO: 713; WAN024B4V; Start 386; Stop 410
ttctcaagatggttcagttggaagg

SEQ ID NO: 271218 - DNA, 25 bp, Artificial
  probe
  misc_feature (1)..(25): SEQ ID NO: 713; WAN024B4V; Start 962; Stop 986
acgaacttggaaatgaatggatgat

SEQ ID NO: 271219 - DNA, 25 bp, Artificial
  probe
  misc_feature (1)..(25): SEQ ID NO: 713; WAN024B4V; Start 959; Stop 983
atgacgaacttggaaatgaatggat

SEQ ID NO: 271220 - DNA, 25 bp, Artificial
  probe
  misc_feature (1)..(25): SEQ ID NO: 713; WAN024B4V; Start 527; Stop 551
tggacttgaaattgagaacagacat

SEQ ID NO: 271221 - DNA, 25 bp, Artificial
  probe
  misc_feature (1)..(25): SEQ ID NO: 713; WAN024B4V; Start 266; Stop 290
tacataccgtcttccaatcctatgc

SEQ ID NO: 271222 - DNA, 25 bp, Artificial
  probe
  misc_feature (1)..(25): SEQ ID NO: 713; WAN024B4V; Start 105; Stop 129
ctttgagttggaagaagggaaattc

SEQ ID NO: 271223 - DNA, 25 bp, Artificial
  probe
  misc_feature (1)..(25): SEQ ID NO: 713; WAN024B4V; Start 380; Stop 404
cggaagttctcaagatggttcagtt

SEQ ID NO: 271224 - DNA, 25 bp, Artificial
  probe
  misc_feature (1)..(25): SEQ ID NO: 713; WAN024B4V; Start 589; Stop 613
attacctttgtctttgtcactcacg

SEQ ID NO: 271225 - DNA, 25 bp, Artificial
  probe
  misc_feature (1)..(25): SEQ ID NO: 713; WAN024B4V; Start 568; Stop 592
gaattacaacaacgattgggcatta

SEQ ID NO: 271226 - DNA, 25 bp, Artificial
  probe
  misc_feature (1)..(25): SEQ ID NO: 713; WAN024B4V; Start 388; Stop 412
ctcaagatggttcagttggaaggtt

SEQ ID NO: 271227 - DNA, 25 bp, Artificial
  probe
  misc_feature (1)..(25): SEQ ID NO: 713; WAN024B4V; Start 569; Stop 593
aattacaacaacgattgggcattac

SEQ ID NO: 271228 - DNA, 25 bp, Artificial
  probe
  misc_feature (1)..(25): SEQ ID NO: 713; WAN024B4V; Start 961; Stop 985
gacgaacttggaaatgaatggatga

SEQ ID NO: 271229 - DNA, 25 bp, Artificial
  probe
  misc_feature (1)..(25): SEQ ID NO: 713; WAN024B4V; Start 955; Stop 979
gcctatgacgaacttggaaatgaat

SEQ ID NO: 271230 - DNA, 25 bp, Artificial
  probe
  misc_feature (1)..(25): SEQ ID NO: 713; WAN024B4V; Start 963; Stop 987
cgaacttggaaatgaatggatgatc

SEQ ID NO: 271231 - DNA, 25 bp, Artificial
  probe
  misc_feature (1)..(25): SEQ ID NO: 713; WAN024B4V; Start 587; Stop 611
gcattacctttgtctttgtcactca

SEQ ID NO: 271232 - DNA, 25 bp, Artificial
  probe
  misc_feature (1)..(25): SEQ ID NO: 713; WAN024B4V; Start 104; Stop 128
actttgagttggaagaagggaaatt

SEQ ID NO: 271233 - DNA, 25 bp, Artificial
  probe
  misc_feature (1)..(25): SEQ ID NO: 714; WAN024BHT; Start 178; Stop 202
atgaaatctaggatgaaatggcttg

SEQ ID NO: 271234 - DNA, 25 bp, Artificial
  probe
  misc_feature (1)..(25): SEQ ID NO: 714; WAN024BHT; Start 180; Stop 204
gaaatctaggatgaaatggcttggt

SEQ ID NO: 271235 - DNA, 25 bp, Artificial
  probe
  misc_feature (1)..(25): SEQ ID NO: 714; WAN024BHT; Start 179; Stop 203
tgaaatctaggatgaaatggcttgg

SEQ ID NO: 271236 - DNA, 25 bp, Artificial
  probe
  misc_feature (1)..(25): SEQ ID NO: 714; WAN024BHT; Start 177; Stop 201
tatgaaatctaggatgaaatggctt

SEQ ID NO: 271237 - DNA, 25 bp, Artificial
  probe
  misc_feature (1)..(25): SEQ ID NO: 714; WAN024BHT; Start 176; Stop 200
atatgaaatctaggatgaaatggct

SEQ ID NO: 271238 - DNA, 25 bp, Artificial
  probe
  misc_feature (1)..(25): SEQ ID NO: 714; WAN024BHT; Start 175; Stop 199
aatatgaaatctaggatgaaatggc

SEQ ID NO: 271239 - DNA, 25 bp, Artificial
  probe
  misc_feature (1)..(25): SEQ ID NO: 714; WAN024BHT; Start 170; Stop 194
aggtcaatatgaaatctaggatgaa

SEQ ID NO: 271240 - DNA, 25 bp, Artificial
  probe
  misc_feature (1)..(25): SEQ ID NO: 714; WAN024BHT; Start 169; Stop 193
aaggtcaatatgaaatctaggatga

SEQ ID NO: 271241 - DNA, 25 bp, Artificial
  probe
  misc_feature (1)..(25): SEQ ID NO: 714; WAN024BHT; Start 216; Stop 240
tagcctactgattataagtctatgt

SEQ ID NO: 271242 - DNA, 25 bp, Artificial
  probe
  misc_feature (1)..(25): SEQ ID NO: 714; WAN024BHT; Start 171; Stop 195
ggtcaatatgaaatctaggatgaaa

SEQ ID NO: 271243 - DNA, 25 bp, Artificial
  probe
  misc_feature (1)..(25): SEQ ID NO: 714; WAN024BHT; Start 557; Stop 581
acctactagtttatagtttgctgct

SEQ ID NO: 271244 - DNA, 25 bp, Artificial
  probe
  misc_feature (1)..(25): SEQ ID NO: 714; WAN024BHT; Start 174; Stop 198
caatatgaaatctaggatgaaatgg

SEQ ID NO: 271245 - DNA, 25 bp, Artificial
  probe
  misc_feature (1)..(25): SEQ ID NO: 714; WAN024BHT; Start 556; Stop 580
aacctactagtttatagtttgctgc

SEQ ID NO: 271246 - DNA, 25 bp, Artificial
  probe
  misc_feature (1)..(25): SEQ ID NO: 714; WAN024BHT; Start 168; Stop 192
taaggtcaatatgaaatctaggatg

SEQ ID NO: 271247 - DNA, 25 bp, Artificial
  probe
  misc_feature (1)..(25): SEQ ID NO: 714; WAN024BHT; Start 558; Stop 582
cctactagtttatagtttgctgctt

SEQ ID NO: 271248 - DNA, 25 bp, Artificial
  probe
  misc_feature (1)..(25): SEQ ID NO: 714; WAN024BHT; Start 215; Stop 239
ttagcctactgattataagtctatg

SEQ ID NO: 271249 - DNA, 25 bp, Artificial
  probe
  misc_feature (1)..(25): SEQ ID NO: 714; WAN024BHT; Start 214; Stop 238
gttagcctactgattataagtctat

SEQ ID NO: 271250 - DNA, 25 bp, Artificial
  probe
  misc_feature (1)..(25): SEQ ID NO: 714; WAN024BHT; Start 553; Stop 577
tggaacctactagtttatagtttgc

SEQ ID NO: 271251 - DNA, 25 bp, Artificial
  probe
  misc_feature (1)..(25): SEQ ID NO: 714; WAN024BHT; Start 554; Stop 578
ggaacctactagtttatagtttgct

SEQ ID NO: 271252 - DNA, 25 bp, Artificial
  probe
  misc_feature (1)..(25): SEQ ID NO: 714; WAN024BHT; Start 166; Stop 190
cataaggtcaatatgaaatctagga

SEQ ID NO: 271253 - DNA, 25 bp, Artificial
  probe
  misc_feature (1)..(25): SEQ ID NO: 714; WAN024BHT; Start 420; Stop 444
aagtgttttatttgccttagcacat

SEQ ID NO: 271254 - DNA, 25 bp, Artificial
  probe
  misc_feature (1)..(25): SEQ ID NO: 714; WAN024BHT; Start 423; Stop 447
tgttttatttgccttagcacatcat

SEQ ID NO: 271255 - DNA, 25 bp, Artificial
  probe
  misc_feature (1)..(25): SEQ ID NO: 714; WAN024BHT; Start 421; Stop 445
agtgttttatttgccttagcacatc

SEQ ID NO: 271256 - DNA, 25 bp, Artificial
  probe
  misc_feature (1)..(25): SEQ ID NO: 714; WAN024BHT; Start 417; Stop 441
gacaagtgttttatttgccttagca

SEQ ID NO: 271257 - DNA, 25 bp, Artificial
  probe
  misc_feature (1)..(25): SEQ ID NO: 714; WAN024BHT; Start 422; Stop 446
gtgttttatttgccttagcacatca

SEQ ID NO: 271258 - DNA, 25 bp, Artificial
  probe
  misc_feature (1)..(25): SEQ ID NO: 714; WAN024BHT; Start 419; Stop 443
caagtgttttatttgccttagcaca

SEQ ID NO: 271259 - DNA, 25 bp, Artificial
  probe
  misc_feature (1)..(25): SEQ ID NO: 714; WAN024BHT; Start 418; Stop 442
acaagtgttttatttgccttagcac

SEQ ID NO: 271260 - DNA, 25 bp, Artificial
  probe
  misc_feature (1)..(25): SEQ ID NO: 714; WAN024BHT; Start 555; Stop 579
gaacctactagtttatagtttgctg

SEQ ID NO: 271261 - DNA, 25 bp, Artificial
  probe
  misc_feature (1)..(25): SEQ ID NO: 714; WAN024BHT; Start 559; Stop 583
ctactagtttatagtttgctgcttt

SEQ ID NO: 271262 - DNA, 25 bp, Artificial
  probe
  misc_feature (1)..(25): SEQ ID NO: 714; WAN024BHT; Start 552; Stop 576
gtggaacctactagtttatagtttg

SEQ ID NO: 271263 - DNA, 25 bp, Artificial
  probe
  misc_feature (1)..(25): SEQ ID NO: 714; WAN024BHT; Start 173; Stop 197
tcaatatgaaatctaggatgaaatg

SEQ ID NO: 271264 - DNA, 25 bp, Artificial
  probe
  misc_feature (1)..(25): SEQ ID NO: 714; WAN024BHT; Start 167; Stop 191
ataaggtcaatatgaaatctaggat

SEQ ID NO: 271265 - DNA, 25 bp, Artificial
  probe
  misc_feature (1)..(25): SEQ ID NO: 714; WAN024BHT; Start 560; Stop 584
tactagtttatagtttgctgctttt

SEQ ID NO: 271266 - DNA, 25 bp, Artificial
  probe
  misc_feature (1)..(25): SEQ ID NO: 715; WAN024BHS; Start 435; Stop 459
cttagtacatcatccaggaaccatt

SEQ ID NO: 271267 - DNA, 25 bp, Artificial
  probe
  misc_feature (1)..(25): SEQ ID NO: 715; WAN024BHS; Start 158; Stop 182
aacaagtggtcaaggtcaatatgaa

SEQ ID NO: 271268 - DNA, 25 bp, Artificial
  probe
  misc_feature (1)..(25): SEQ ID NO: 715; WAN024BHS; Start 436; Stop 460
ttagtacatcatccaggaaccattc

SEQ ID NO: 271269 - DNA, 25 bp, Artificial
  probe
  misc_feature (1)..(25): SEQ ID NO: 715; WAN024BHS; Start 439; Stop 463
gtacatcatccaggaaccattctag

SEQ ID NO: 271270 - DNA, 25 bp, Artificial
  probe
  misc_feature (1)..(25): SEQ ID NO: 715; WAN024BHS; Start 438; Stop 462
agtacatcatccaggaaccattcta

SEQ ID NO: 271271 - DNA, 25 bp, Artificial
  probe
  misc_feature (1)..(25): SEQ ID NO: 715; WAN024BHS; Start 437; Stop 461
tagtacatcatccaggaaccattct

SEQ ID NO: 271272 - DNA, 25 bp, Artificial
  probe
  misc_feature (1)..(25): SEQ ID NO: 715; WAN024BHS; Start 440; Stop 464
tacatcatccaggaaccattctagc

SEQ ID NO: 271273 - DNA, 25 bp, Artificial
  probe
  misc_feature (1)..(25): SEQ ID NO: 715; WAN024BHS; Start 189; Stop 213
gatgaaatgccttggtattggacta

SEQ ID NO: 271274 - DNA, 25 bp, Artificial
  probe
  misc_feature (1)..(25): SEQ ID NO: 715; WAN024BHS; Start 434; Stop 458
ccttagtacatcatccaggaaccat

SEQ ID NO: 271275 - DNA, 25 bp, Artificial
  probe
  misc_feature (1)..(25): SEQ ID NO: 715; WAN024BHS; Start 190; Stop 214
atgaaatgccttggtattggactag

SEQ ID NO: 271276 - DNA, 25 bp, Artificial
  probe
  misc_feature (1)..(25): SEQ ID NO: 715; WAN024BHS; Start 259; Stop 283
caaggaagcacgaatcaaacaaatt

SEQ ID NO: 271277 - DNA, 25 bp, Artificial
  probe
  misc_feature (1)..(25): SEQ ID NO: 715; WAN024BHS; Start 159; Stop 183
acaagtggtcaaggtcaatatgaaa

SEQ ID NO: 271278 - DNA, 25 bp, Artificial
  probe
  misc_feature (1)..(25): SEQ ID NO: 715; WAN024BHS; Start 157; Stop 181
aaacaagtggtcaaggtcaatatga

SEQ ID NO: 271279 - DNA, 25 bp, Artificial
  probe
  misc_feature (1)..(25): SEQ ID NO: 715; WAN024BHS; Start 348; Stop 372
ggttgaagaatttctgtatcgtgaa

SEQ ID NO: 271280 - DNA, 25 bp, Artificial
  probe
  misc_feature (1)..(25): SEQ ID NO: 715; WAN024BHS; Start 346; Stop 370
atggttgaagaatttctgtatcgtg

SEQ ID NO: 271281 - DNA, 25 bp, Artificial
  probe
  misc_feature (1)..(25): SEQ ID NO: 715; WAN024BHS; Start 347; Stop 371
tggttgaagaatttctgtatcgtga

SEQ ID NO: 271282 - DNA, 25 bp, Artificial
  probe
  misc_feature (1)..(25): SEQ ID NO: 715; WAN024BHS; Start 258; Stop 282
tcaaggaagcacgaatcaaacaaat

SEQ ID NO: 271283 - DNA, 25 bp, Artificial
  probe
  misc_feature (1)..(25): SEQ ID NO: 715; WAN024BHS; Start 431; Stop 455
ttgccttagtacatcatccaggaac

SEQ ID NO: 271284 - DNA, 25 bp, Artificial
  probe
  misc_feature (1)..(25): SEQ ID NO: 715; WAN024BHS; Start 427; Stop 451
ttatttgccttagtacatcatccag

SEQ ID NO: 271285 - DNA, 25 bp, Artificial
  probe
  misc_feature (1)..(25): SEQ ID NO: 715; WAN024BHS; Start 183; Stop 207
aactaggatgaaatgccttggtatt

SEQ ID NO: 271286 - DNA, 25 bp, Artificial
  probe
  misc_feature (1)..(25): SEQ ID NO: 715; WAN024BHS; Start 182; Stop 206
aaactaggatgaaatgccttggtat

SEQ ID NO: 271287 - DNA, 25 bp, Artificial
  probe
  misc_feature (1)..(25): SEQ ID NO: 715; WAN024BHS; Start 426; Stop 450
tttatttgccttagtacatcatcca

SEQ ID NO: 271288 - DNA, 25 bp, Artificial
  probe
  misc_feature (1)..(25): SEQ ID NO: 715; WAN024BHS; Start 345; Stop 369
tatggttgaagaatttctgtatcgt

SEQ ID NO: 271289 - DNA, 25 bp, Artificial
  probe
  misc_feature (1)..(25): SEQ ID NO: 715; WAN024BHS; Start 257; Stop 281
ctcaaggaagcacgaatcaaacaaa

SEQ ID NO: 271290 - DNA, 25 bp, Artificial
  probe
  misc_feature (1)..(25): SEQ ID NO: 715; WAN024BHS; Start 184; Stop 208
actaggatgaaatgccttggtattg

SEQ ID NO: 271291 - DNA, 25 bp, Artificial
  probe
  misc_feature (1)..(25): SEQ ID NO: 715; WAN024BHS; Start 428; Stop 452
tatttgccttagtacatcatccagg

SEQ ID NO: 271292 - DNA, 25 bp, Artificial
  probe
  misc_feature (1)..(25): SEQ ID NO: 715; WAN024BHS; Start 261; Stop 285
aggaagcacgaatcaaacaaattta

SEQ ID NO: 271293 - DNA, 25 bp, Artificial
  probe
  misc_feature (1)..(25): SEQ ID NO: 715; WAN024BHS; Start 262; Stop 286
ggaagcacgaatcaaacaaatttaa

SEQ ID NO: 271294 - DNA, 25 bp, Artificial
  probe
  misc_feature (1)..(25): SEQ ID NO: 715; WAN024BHS; Start 185; Stop 209
ctaggatgaaatgccttggtattgg

SEQ ID NO: 271295 - DNA, 25 bp, Artificial
  probe
  misc_feature (1)..(25): SEQ ID NO: 715; WAN024BHS; Start 456; Stop 480
cattctagcttggtgtctgtacgtt

SEQ ID NO: 271296 - DNA, 25 bp, Artificial
  probe
  misc_feature (1)..(25): SEQ ID NO: 715; WAN024BHS; Start 260; Stop 284
aaggaagcacgaatcaaacaaattt

SEQ ID NO: 271297 - DNA, 25 bp, Artificial
  probe
  misc_feature (1)..(25): SEQ ID NO: 715; WAN024BHS; Start 400; Stop 424
gatattcgagttgctttgacaagtg

SEQ ID NO: 271298 - DNA, 25 bp, Artificial
  probe
  misc_feature (1)..(25): SEQ ID NO: 715; WAN024BHS; Start 429; Stop 453
atttgccttagtacatcatccagga

SEQ ID NO: 271299 - DNA, 25 bp, Artificial
  probe
  misc_feature (1)..(25): SEQ ID NO: 716; WAN024BHR; Start 206; Stop 230
ttggattcgttagcctactgattat

SEQ ID NO: 271300 - DNA, 25 bp, Artificial
  probe
  misc_feature (1)..(25): SEQ ID NO: 716; WAN024BHR; Start 205; Stop 229
attggattcgttagcctactgatta

SEQ ID NO: 271301 - DNA, 25 bp, Artificial
  probe
  misc_feature (1)..(25): SEQ ID NO: 716; WAN024BHR; Start 204; Stop 228
tattggattcgttagcctactgatt

SEQ ID NO: 271302 - DNA, 25 bp, Artificial
  probe
  misc_feature (1)..(25): SEQ ID NO: 716; WAN024BHR; Start 203; Stop 227
gtattggattcgttagcctactgat

SEQ ID NO: 271303 - DNA, 25 bp, Artificial
  probe
  misc_feature (1)..(25): SEQ ID NO: 716; WAN024BHR; Start 551; Stop 575
tgtggaacctatcagtctatgtctt

SEQ ID NO: 271304 - DNA, 25 bp, Artificial
  probe
  misc_feature (1)..(25): SEQ ID NO: 716; WAN024BHR; Start 552; Stop 576
gtggaacctatcagtctatgtctta

SEQ ID NO: 271305 - DNA, 25 bp, Artificial
  probe
  misc_feature (1)..(25): SEQ ID NO: 716; WAN024BHR; Start 207; Stop 231
tggattcgttagcctactgattata

SEQ ID NO: 271306 - DNA, 25 bp, Artificial
  probe
  misc_feature (1)..(25): SEQ ID NO: 716; WAN024BHR; Start 550; Stop 574
gtgtggaacctatcagtctatgtct

SEQ ID NO: 271307 - DNA, 25 bp, Artificial
  probe
  misc_feature (1)..(25): SEQ ID NO: 716; WAN024BHR; Start 199; Stop 223
cttggtattggattcgttagcctac

SEQ ID NO: 271308 - DNA, 25 bp, Artificial
  probe
  misc_feature (1)..(25): SEQ ID NO: 716; WAN024BHR; Start 194; Stop 218
aatggcttggtattggattcgttag

SEQ ID NO: 271309 - DNA, 25 bp, Artificial
  probe
  misc_feature (1)..(25): SEQ ID NO: 716; WAN024BHR; Start 200; Stop 224
ttggtattggattcgttagcctact

SEQ ID NO: 271310 - DNA, 25 bp, Artificial
  probe
  misc_feature (1)..(25): SEQ ID NO: 716; WAN024BHR; Start 553; Stop 577
tggaacctatcagtctatgtcttat

SEQ ID NO: 271311 - DNA, 25 bp, Artificial
  probe
  misc_feature (1)..(25): SEQ ID NO: 716; WAN024BHR; Start 98; Stop 122
tactacagattctctattgtgcgtc

SEQ ID NO: 271312 - DNA, 25 bp, Artificial
  probe
  misc_feature (1)..(25): SEQ ID NO: 716; WAN024BHR; Start 202; Stop 226
ggtattggattcgttagcctactga

SEQ ID NO: 271313 - DNA, 25 bp, Artificial
  probe
  misc_feature (1)..(25): SEQ ID NO: 716; WAN024BHR; Start 97; Stop 121
atactacagattctctattgtgcgt

SEQ ID NO: 271314 - DNA, 25 bp, Artificial
  probe
  misc_feature (1)..(25): SEQ ID NO: 716; WAN024BHR; Start 96; Stop 120
catactacagattctctattgtgcg

SEQ ID NO: 271315 - DNA, 25 bp, Artificial
  probe
  misc_feature (1)..(25): SEQ ID NO: 716; WAN024BHR; Start 201; Stop 225
tggtattggattcgttagcctactg

SEQ ID NO: 271316 - DNA, 25 bp, Artificial
  probe
  misc_feature (1)..(25): SEQ ID NO: 716; WAN024BHR; Start 95; Stop 119
ccatactacagattctctattgtgc

SEQ ID NO: 271317 - DNA, 25 bp, Artificial
  probe
  misc_feature (1)..(25): SEQ ID NO: 716; WAN024BHR; Start 326; Stop 350
tgttattaatcaatgcgagtatggt

SEQ ID NO: 271318 - DNA, 25 bp, Artificial
  probe
  misc_feature (1)..(25): SEQ ID NO: 716; WAN024BHR; Start 158; Stop 182
aacaagttgtcaaggtcaatatgaa

SEQ ID NO: 271319 - DNA, 25 bp, Artificial
  probe
  misc_feature (1)..(25): SEQ ID NO: 716; WAN024BHR; Start 554; Stop 578
ggaacctatcagtctatgtcttatt

SEQ ID NO: 271320 - DNA, 25 bp, Artificial
  probe
  misc_feature (1)..(25): SEQ ID NO: 716; WAN024BHR; Start 253; Stop 277
catgctcaaggaactacgaatcaag

SEQ ID NO: 271321 - DNA, 25 bp, Artificial
  probe
  misc_feature (1)..(25): SEQ ID NO: 716; WAN024BHR; Start 470; Stop 494
gtttgtatgtttcacttgggatgtt

SEQ ID NO: 271322 - DNA, 25 bp, Artificial
  probe
  misc_feature (1)..(25): SEQ ID NO: 716; WAN024BHR; Start 208; Stop 232
ggattcgttagcctactgattataa

SEQ ID NO: 271323 - DNA, 25 bp, Artificial
  probe
  misc_feature (1)..(25): SEQ ID NO: 716; WAN024BHR; Start 471; Stop 495
tttgtatgtttcacttgggatgttt

SEQ ID NO: 271324 - DNA, 25 bp, Artificial
  probe
  misc_feature (1)..(25): SEQ ID NO: 716; WAN024BHR; Start 94; Stop 118
accatactacagattctctattgtg

SEQ ID NO: 271325 - DNA, 25 bp, Artificial
  probe
  misc_feature (1)..(25): SEQ ID NO: 716; WAN024BHR; Start 193; Stop 217
aaatggcttggtattggattcgtta

SEQ ID NO: 271326 - DNA, 25 bp, Artificial
  probe
  misc_feature (1)..(25): SEQ ID NO: 716; WAN024BHR; Start 262; Stop 286
ggaactacgaatcaagcaaacttaa

SEQ ID NO: 271327 - DNA, 25 bp, Artificial
  probe
  misc_feature (1)..(25): SEQ ID NO: 716; WAN024BHR; Start 261; Stop 285
aggaactacgaatcaagcaaactta

SEQ ID NO: 271328 - DNA, 25 bp, Artificial
  probe
  misc_feature (1)..(25): SEQ ID NO: 716; WAN024BHR; Start 189; Stop 213
gatgaaatggcttggtattggattc

SEQ ID NO: 271329 - DNA, 25 bp, Artificial
  probe
  misc_feature (1)..(25): SEQ ID NO: 716; WAN024BHR; Start 469; Stop 493
tgtttgtatgtttcacttgggatgt

SEQ ID NO: 271330 - DNA, 25 bp, Artificial
  probe
  misc_feature (1)..(25): SEQ ID NO: 716; WAN024BHR; Start 183; Stop 207
aactaggatgaaatggcttggtatt

SEQ ID NO: 271331 - DNA, 25 bp, Artificial
  probe
  misc_feature (1)..(25): SEQ ID NO: 716; WAN024BHR; Start 182; Stop 206
aaactaggatgaaatggcttggtat

SEQ ID NO: 271332 - DNA, 25 bp, Artificial
  probe
  misc_feature (1)..(25): SEQ ID NO: 717; WAN024DNN; Start 7; Stop 31
agaatcattcatgcttggaataagg

SEQ ID NO: 271333 - DNA, 25 bp, Artificial
  probe
  misc_feature (1)..(25): SEQ ID NO: 717; WAN024DNN; Start 8; Stop 32
gaatcattcatgcttggaataaggc

SEQ ID NO: 271334 - DNA, 25 bp, Artificial
  probe
  misc_feature (1)..(25): SEQ ID NO: 717; WAN024DNN; Start 6; Stop 30
aagaatcattcatgcttggaataag

SEQ ID NO: 271335 - DNA, 25 bp, Artificial
  probe
  misc_feature (1)..(25): SEQ ID NO: 717; WAN024DNN; Start 10; Stop 34
atcattcatgcttggaataaggcaa

SEQ ID NO: 271336 - DNA, 25 bp, Artificial
  probe
  misc_feature (1)..(25): SEQ ID NO: 717; WAN024DNN; Start 9; Stop 33
aatcattcatgcttggaataaggca

SEQ ID NO: 271337 - DNA, 25 bp, Artificial
  probe
  misc_feature (1)..(25): SEQ ID NO: 717; WAN024DNN; Start 11; Stop 35
tcattcatgcttggaataaggcaag

SEQ ID NO: 271338 - DNA, 25 bp, Artificial
  probe
  misc_feature (1)..(25): SEQ ID NO: 717; WAN024DNN; Start 5; Stop 29
aaagaatcattcatgcttggaataa

SEQ ID NO: 271339 - DNA, 25 bp, Artificial
  probe
  misc_feature (1)..(25): SEQ ID NO: 717; WAN024DNN; Start 3; Stop 27
gaaaagaatcattcatgcttggaat

SEQ ID NO: 271340 - DNA, 25 bp, Artificial
  probe
  misc_feature (1)..(25): SEQ ID NO: 717; WAN024DNN; Start 42; Stop 66
caagcgtatcttgattggtatgctt

SEQ ID NO: 271341 - DNA, 25 bp, Artificial
  probe
  misc_feature (1)..(25): SEQ ID NO: 717; WAN024DNN; Start 4; Stop 28
aaaagaatcattcatgcttggaata

SEQ ID NO: 271342 - DNA, 25 bp, Artificial
  probe
  misc_feature (1)..(25): SEQ ID NO: 717; WAN024DNN; Start 43; Stop 67
aagcgtatcttgattggtatgcttt

SEQ ID NO: 271343 - DNA, 25 bp, Artificial
  probe
  misc_feature (1)..(25): SEQ ID NO: 717; WAN024DNN; Start 21; Stop 45
ttggaataaggcaagccttgtcaag

SEQ ID NO: 271344 - DNA, 25 bp, Artificial
  probe
  misc_feature (1)..(25): SEQ ID NO: 717; WAN024DNN; Start 20; Stop 44
cttggaataaggcaagccttgtcaa

SEQ ID NO: 271345 - DNA, 25 bp, Artificial
  probe
  misc_feature (1)..(25): SEQ ID NO: 717; WAN024DNN; Start 26; Stop 50
ataaggcaagccttgtcaagcgtat

SEQ ID NO: 271346 - DNA, 25 bp, Artificial
  probe
  misc_feature (1)..(25): SEQ ID NO: 717; WAN024DNN; Start 25; Stop 49
aataaggcaagccttgtcaagcgta

SEQ ID NO: 271347 - DNA, 25 bp, Artificial
  probe
  misc_feature (1)..(25): SEQ ID NO: 718; WAN024FDL; Start 73; Stop 97
aattcgtcattggattcttagtgat

SEQ ID NO: 271348 - DNA, 25 bp, Artificial
  probe
  misc_feature (1)..(25): SEQ ID NO: 718; WAN024FDL; Start 74; Stop 98
attcgtcattggattcttagtgatc

SEQ ID NO: 271349 - DNA, 25 bp, Artificial
  probe
  misc_feature (1)..(25): SEQ ID NO: 718; WAN024FDL; Start 14; Stop 38
tgataagcaatggaaatgatggaac

SEQ ID NO: 271350 - DNA, 25 bp, Artificial
  probe
  misc_feature (1)..(25): SEQ ID NO: 718; WAN024FDL; Start 13; Stop 37
gtgataagcaatggaaatgatggaa

SEQ ID NO: 271351 - DNA, 25 bp, Artificial
  probe
  misc_feature (1)..(25): SEQ ID NO: 718; WAN024FDL; Start 6; Stop 30
aagagaggtgataagcaatggaaat

SEQ ID NO: 271352 - DNA, 25 bp, Artificial
  probe
  misc_feature (1)..(25): SEQ ID NO: 718; WAN024FDL; Start 10; Stop 34
gaggtgataagcaatggaaatgatg

SEQ ID NO: 271353 - DNA, 25 bp, Artificial
  probe
  misc_feature (1)..(25): SEQ ID NO: 718; WAN024FDL; Start 9; Stop 33
agaggtgataagcaatggaaatgat

SEQ ID NO: 271354 - DNA, 25 bp, Artificial
  probe
  misc_feature (1)..(25): SEQ ID NO: 718; WAN024FDL; Start 15; Stop 39
gataagcaatggaaatgatggaact

SEQ ID NO: 271355 - DNA, 25 bp, Artificial
  probe
  misc_feature (1)..(25): SEQ ID NO: 718; WAN024FDL; Start 5; Stop 29
aaagagaggtgataagcaatggaaa

SEQ ID NO: 271356 - DNA, 25 bp, Artificial
  probe
  misc_feature (1)..(25): SEQ ID NO: 718; WAN024FDL; Start 17; Stop 41
taagcaatggaaatgatggaactac

SEQ ID NO: 271357 - DNA, 25 bp, Artificial
  probe
  misc_feature (1)..(25): SEQ ID NO: 718; WAN024FDL; Start 8; Stop 32
gagaggtgataagcaatggaaatga

SEQ ID NO: 271358 - DNA, 25 bp, Artificial
  probe
  misc_feature (1)..(25): SEQ ID NO: 718; WAN024FDL; Start 7; Stop 31
agagaggtgataagcaatggaaatg

SEQ ID NO: 271359 - DNA, 25 bp, Artificial
  probe
  misc_feature (1)..(25): SEQ ID NO: 718; WAN024FDL; Start 28; Stop 52
aatgatggaactaccaagtcaggaa

SEQ ID NO: 271360 - DNA, 25 bp, Artificial
  probe
  misc_feature (1)..(25): SEQ ID NO: 718; WAN024FDL; Start 12; Stop 36
ggtgataagcaatggaaatgatgga

SEQ ID NO: 271361 - DNA, 25 bp, Artificial
  probe
  misc_feature (1)..(25): SEQ ID NO: 718; WAN024FDL; Start 11; Stop 35
aggtgataagcaatggaaatgatgg

SEQ ID NO: 271362 - DNA, 25 bp, Artificial
  probe
  misc_feature (1)..(25): SEQ ID NO: 718; WAN024FDL; Start 18; Stop 42
aagcaatggaaatgatggaactacc

SEQ ID NO: 271363 - DNA, 25 bp, Artificial
  probe
  misc_feature (1)..(25): SEQ ID NO: 718; WAN024FDL; Start 16; Stop 40
ataagcaatggaaatgatggaacta

SEQ ID NO: 271364 - DNA, 25 bp, Artificial
  probe
  misc_feature (1)..(25): SEQ ID NO: 718; WAN024FDL; Start 70; Stop 94
acaaattcgtcattggattcttagt

SEQ ID NO: 271365 - DNA, 25 bp, Artificial
  probe
  misc_feature (1)..(25): SEQ ID NO: 718; WAN024FDL; Start 71; Stop 95
caaattcgtcattggattcttagtg

SEQ ID NO: 271366 - DNA, 25 bp, Artificial
  probe
  misc_feature (1)..(25): SEQ ID NO: 718; WAN024FDL; Start 72; Stop 96
aaattcgtcattggattcttagtga

SEQ ID NO: 271367 - DNA, 25 bp, Artificial
  probe
  misc_feature (1)..(25): SEQ ID NO: 718; WAN024FDL; Start 69; Stop 93
aacaaattcgtcattggattcttag

SEQ ID NO: 271368 - DNA, 25 bp, Artificial
  probe
  misc_feature (1)..(25): SEQ ID NO: 718; WAN024FDL; Start 21; Stop 45
caatggaaatgatggaactaccaag

SEQ ID NO: 271369 - DNA, 25 bp, Artificial
  probe
  misc_feature (1)..(25): SEQ ID NO: 718; WAN024FDL; Start 22; Stop 46
aatggaaatgatggaactaccaagt

SEQ ID NO: 271370 - DNA, 25 bp, Artificial
  probe
  misc_feature (1)..(25): SEQ ID NO: 718; WAN024FDL; Start 68; Stop 92
aaacaaattcgtcattggattctta

SEQ ID NO: 271371 - DNA, 25 bp, Artificial
  probe
  misc_feature (1)..(25): SEQ ID NO: 718; WAN024FDL; Start 31; Stop 55
gatggaactaccaagtcaggaaatt

SEQ ID NO: 271372 - DNA, 25 bp, Artificial
  probe
  misc_feature (1)..(25): SEQ ID NO: 718; WAN024FDL; Start 23; Stop 47
atggaaatgatggaactaccaagtc

SEQ ID NO: 271373 - DNA, 25 bp, Artificial
  probe
  misc_feature (1)..(25): SEQ ID NO: 718; WAN024FDL; Start 26; Stop 50
gaaatgatggaactaccaagtcagg

SEQ ID NO: 271374 - DNA, 25 bp, Artificial
  probe
  misc_feature (1)..(25): SEQ ID NO: 718; WAN024FDL; Start 25; Stop 49
ggaaatgatggaactaccaagtcag

SEQ ID NO: 271375 - DNA, 25 bp, Artificial
  probe
  misc_feature (1)..(25): SEQ ID NO: 718; WAN024FDL; Start 77; Stop 101
cgtcattggattcttagtgatcaag

SEQ ID NO: 271376 - DNA, 25 bp, Artificial
  probe
  misc_feature (1)..(25): SEQ ID NO: 718; WAN024FDL; Start 76; Stop 100
tcgtcattggattcttagtgatcaa

SEQ ID NO: 271377 - DNA, 25 bp, Artificial
  probe
  misc_feature (1)..(25): SEQ ID NO: 718; WAN024FDL; Start 75; Stop 99
ttcgtcattggattcttagtgatca

SEQ ID NO: 271378 - DNA, 25 bp, Artificial
  probe
  misc_feature (1)..(25): SEQ ID NO: 718; WAN024FDL; Start 30; Stop 54
tgatggaactaccaagtcaggaaat

SEQ ID NO: 271379 - DNA, 25 bp, Artificial
  probe
  misc_feature (1)..(25): SEQ ID NO: 718; WAN024FDL; Start 29; Stop 53
atgatggaactaccaagtcaggaaa

SEQ ID NO: 271380 - DNA, 25 bp, Artificial
  probe
  misc_feature (1)..(25): SEQ ID NO: 719; WAN024FPL; Start 176; Stop 200
tggttgaagcaataagatatgttga

SEQ ID NO: 271381 - DNA, 25 bp, Artificial
  probe
  misc_feature (1)..(25): SEQ ID NO: 719; WAN024FPL; Start 175; Stop 199
ttggttgaagcaataagatatgttg

SEQ ID NO: 271382 - DNA, 25 bp, Artificial
  probe
  misc_feature (1)..(25): SEQ ID NO: 719; WAN024FPL; Start 177; Stop 201
ggttgaagcaataagatatgttgat

SEQ ID NO: 271383 - DNA, 25 bp, Artificial
  probe
  misc_feature (1)..(25): SEQ ID NO: 719; WAN024FPL; Start 65; Stop 89
agagagcaaagcaattaggagatta

SEQ ID NO: 271384 - DNA, 25 bp, Artificial
  probe
  misc_feature (1)..(25): SEQ ID NO: 719; WAN024FPL; Start 62; Stop 86
taaagagagcaaagcaattaggaga

SEQ ID NO: 271385 - DNA, 25 bp, Artificial
  probe
  misc_feature (1)..(25): SEQ ID NO: 719; WAN024FPL; Start 59; Stop 83
tgttaaagagagcaaagcaattagg

SEQ ID NO: 271386 - DNA, 25 bp, Artificial
  probe
  misc_feature (1)..(25): SEQ ID NO: 719; WAN024FPL; Start 60; Stop 84
gttaaagagagcaaagcaattagga

SEQ ID NO: 271387 - DNA, 25 bp, Artificial
  probe
  misc_feature (1)..(25): SEQ ID NO: 719; WAN024FPL; Start 16; Stop 40
acttatggaacctttgatttgcttc

SEQ ID NO: 271388 - DNA, 25 bp, Artificial
  probe
  misc_feature (1)..(25): SEQ ID NO: 719; WAN024FPL; Start 64; Stop 88
aagagagcaaagcaattaggagatt

SEQ ID NO: 271389 - DNA, 25 bp, Artificial
  probe
  misc_feature (1)..(25): SEQ ID NO: 719; WAN024FPL; Start 63; Stop 87
aaagagagcaaagcaattaggagat

SEQ ID NO: 271390 - DNA, 25 bp, Artificial
  probe
  misc_feature (1)..(25): SEQ ID NO: 719; WAN024FPL; Start 61; Stop 85
ttaaagagagcaaagcaattaggag

SEQ ID NO: 271391 - DNA, 25 bp, Artificial
  probe
  misc_feature (1)..(25): SEQ ID NO: 719; WAN024FPL; Start 15; Stop 39
tacttatggaacctttgatttgctt

SEQ ID NO: 271392 - DNA, 25 bp, Artificial
  probe
  misc_feature (1)..(25): SEQ ID NO: 719; WAN024FPL; Start 14; Stop 38
ttacttatggaacctttgatttgct

SEQ ID NO: 271393 - DNA, 25 bp, Artificial
  probe
  misc_feature (1)..(25): SEQ ID NO: 719; WAN024FPL; Start 67; Stop 91
agagcaaagcaattaggagattatc

SEQ ID NO: 271394 - DNA, 25 bp, Artificial
  probe
  misc_feature (1)..(25): SEQ ID NO: 719; WAN024FPL; Start 66; Stop 90
gagagcaaagcaattaggagattat

SEQ ID NO: 271395 - DNA, 25 bp, Artificial
  probe
  misc_feature (1)..(25): SEQ ID NO: 719; WAN024FPL; Start 88; Stop 112
tatctcattgttgtagtttcaagcg

SEQ ID NO: 271396 - DNA, 25 bp, Artificial
  probe
  misc_feature (1)..(25): SEQ ID NO: 719; WAN024FPL; Start 26; Stop 50
cctttgatttgcttcattatggaca

SEQ ID NO: 271397 - DNA, 25 bp, Artificial
  probe
  misc_feature (1)..(25): SEQ ID NO: 719; WAN024FPL; Start 25; Stop 49
acctttgatttgcttcattatggac

SEQ ID NO: 271398 - DNA, 25 bp, Artificial
  probe
  misc_feature (1)..(25): SEQ ID NO: 719; WAN024FPL; Start 17; Stop 41
cttatggaacctttgatttgcttca

SEQ ID NO: 271399 - DNA, 25 bp, Artificial
  probe
  misc_feature (1)..(25): SEQ ID NO: 719; WAN024FPL; Start 100; Stop 124
gtagtttcaagcgatgagttcaatt

SEQ ID NO: 271400 - DNA, 25 bp, Artificial
  probe
  misc_feature (1)..(25): SEQ ID NO: 719; WAN024FPL; Start 24; Stop 48
aacctttgatttgcttcattatgga

SEQ ID NO: 271401 - DNA, 25 bp, Artificial
  probe
  misc_feature (1)..(25): SEQ ID NO: 719; WAN024FPL; Start 21; Stop 45
tggaacctttgatttgcttcattat

SEQ ID NO: 271402 - DNA, 25 bp, Artificial
  probe
  misc_feature (1)..(25): SEQ ID NO: 719; WAN024FPL; Start 20; Stop 44
atggaacctttgatttgcttcatta

SEQ ID NO: 271403 - DNA, 25 bp, Artificial
  probe
  misc_feature (1)..(25): SEQ ID NO: 719; WAN024FPL; Start 19; Stop 43
tatggaacctttgatttgcttcatt

SEQ ID NO: 271404 - DNA, 25 bp, Artificial
  probe
  misc_feature (1)..(25): SEQ ID NO: 719; WAN024FPL; Start 18; Stop 42
ttatggaacctttgatttgcttcat

SEQ ID NO: 271405 - DNA, 25 bp, Artificial
  probe
  misc_feature (1)..(25): SEQ ID NO: 719; WAN024FPL; Start 101; Stop 125
tagtttcaagcgatgagttcaattt

SEQ ID NO: 271406 - DNA, 25 bp, Artificial
  probe
  misc_feature (1)..(25): SEQ ID NO: 719; WAN024FPL; Start 91; Stop 115
ctcattgttgtagtttcaagcgatg

SEQ ID NO: 271407 - DNA, 25 bp, Artificial
  probe
  misc_feature (1)..(25): SEQ ID NO: 719; WAN024FPL; Start 90; Stop 114
tctcattgttgtagtttcaagcgat

SEQ ID NO: 271408 - DNA, 25 bp, Artificial
  probe
  misc_feature (1)..(25): SEQ ID NO: 719; WAN024FPL; Start 89; Stop 113
atctcattgttgtagtttcaagcga

SEQ ID NO: 271409 - DNA, 25 bp, Artificial
  probe
  misc_feature (1)..(25): SEQ ID NO: 719; WAN024FPL; Start 184; Stop 208
gcaataagatatgttgatctggtga

SEQ ID NO: 271410 - DNA, 25 bp, Artificial
  probe
  misc_feature (1)..(25): SEQ ID NO: 719; WAN024FPL; Start 183; Stop 207
agcaataagatatgttgatctggtg

SEQ ID NO: 271411 - DNA, 25 bp, Artificial
  probe
  misc_feature (1)..(25): SEQ ID NO: 719; WAN024FPL; Start 23; Stop 47
gaacctttgatttgcttcattatgg

SEQ ID NO: 271412 - DNA, 25 bp, Artificial
  probe
  misc_feature (1)..(25): SEQ ID NO: 719; WAN024FPL; Start 22; Stop 46
ggaacctttgatttgcttcattatg

SEQ ID NO: 271413 - DNA, 25 bp, Artificial
  probe
  misc_feature (1)..(25): SEQ ID NO: 720; WAN024FTA; Start 26; Stop 50
ggaaacaatttcgcttaacagaaac

SEQ ID NO: 271414 - DNA, 25 bp, Artificial
  probe
  misc_feature (1)..(25): SEQ ID NO: 720; WAN024FTA; Start 21; Stop 45
tattcggaaacaatttcgcttaaca

SEQ ID NO: 271415 - DNA, 25 bp, Artificial
  probe
  misc_feature (1)..(25): SEQ ID NO: 720; WAN024FTA; Start 17; Stop 41
gtagtattcggaaacaatttcgctt

SEQ ID NO: 271416 - DNA, 25 bp, Artificial
  probe
  misc_feature (1)..(25): SEQ ID NO: 720; WAN024FTA; Start 27; Stop 51
gaaacaatttcgcttaacagaaacg

SEQ ID NO: 271417 - DNA, 25 bp, Artificial
  probe
  misc_feature (1)..(25): SEQ ID NO: 720; WAN024FTA; Start 20; Stop 44
gtattcggaaacaatttcgcttaac

SEQ ID NO: 271418 - DNA, 25 bp, Artificial
  probe
  misc_feature (1)..(25): SEQ ID NO: 720; WAN024FTA; Start 19; Stop 43
agtattcggaaacaatttcgcttaa

SEQ ID NO: 271419 - DNA, 25 bp, Artificial
  probe
  misc_feature (1)..(25): SEQ ID NO: 720; WAN024FTA; Start 22; Stop 46
attcggaaacaatttcgcttaacag

SEQ ID NO: 271420 - DNA, 25 bp, Artificial
  probe
  misc_feature (1)..(25): SEQ ID NO: 720; WAN024FTA; Start 25; Stop 49
cggaaacaatttcgcttaacagaaa

SEQ ID NO: 271421 - DNA, 25 bp, Artificial
  probe
  misc_feature (1)..(25): SEQ ID NO: 720; WAN024FTA; Start 18; Stop 42
tagtattcggaaacaatttcgctta

SEQ ID NO: 271422 - DNA, 25 bp, Artificial
  probe
  misc_feature (1)..(25): SEQ ID NO: 720; WAN024FTA; Start 28; Stop 52
aaacaatttcgcttaacagaaacgg

SEQ ID NO: 271423 - DNA, 25 bp, Artificial
  probe
  misc_feature (1)..(25): SEQ ID NO: 720; WAN024FTA; Start 33; Stop 57
atttcgcttaacagaaacggaagaa

SEQ ID NO: 271424 - DNA, 25 bp, Artificial
  probe
  misc_feature (1)..(25): SEQ ID NO: 720; WAN024FTA; Start 32; Stop 56
aatttcgcttaacagaaacggaaga

SEQ ID NO: 271425 - DNA, 25 bp, Artificial
  probe
  misc_feature (1)..(25): SEQ ID NO: 720; WAN024FTA; Start 31; Stop 55
caatttcgcttaacagaaacggaag

SEQ ID NO: 271426 - DNA, 25 bp, Artificial
  probe
  misc_feature (1)..(25): SEQ ID NO: 720; WAN024FTA; Start 34; Stop 58
tttcgcttaacagaaacggaagaaa

SEQ ID NO: 271427 - DNA, 25 bp, Artificial
  probe
  misc_feature (1)..(25): SEQ ID NO: 720; WAN024FTA; Start 24; Stop 48
tcggaaacaatttcgcttaacagaa

SEQ ID NO: 271428 - DNA, 25 bp, Artificial
  probe
  misc_feature (1)..(25): SEQ ID NO: 720; WAN024FTA; Start 23; Stop 47
ttcggaaacaatttcgcttaacaga

SEQ ID NO: 271429 - DNA, 25 bp, Artificial
  probe
  misc_feature (1)..(25): SEQ ID NO: 720; WAN024FTA; Start 66; Stop 90
actagatttaatgagagagaaagga

SEQ ID NO: 271430 - DNA, 25 bp, Artificial
  probe
  misc_feature (1)..(25): SEQ ID NO: 720; WAN024FTA; Start 30; Stop 54
acaatttcgcttaacagaaacggaa

SEQ ID NO: 271431 - DNA, 25 bp, Artificial
  probe
  misc_feature (1)..(25): SEQ ID NO: 720; WAN024FTA; Start 29; Stop 53
aacaatttcgcttaacagaaacgga

SEQ ID NO: 271432 - DNA, 25 bp, Artificial
  probe
  misc_feature (1)..(25): SEQ ID NO: 720; WAN024FTA; Start 16; Stop 40
cgtagtattcggaaacaatttcgct

SEQ ID NO: 271433 - DNA, 25 bp, Artificial
  probe
  misc_feature (1)..(25): SEQ ID NO: 720; WAN024FTA; Start 68; Stop 92
tagatttaatgagagagaaaggaga

SEQ ID NO: 271434 - DNA, 25 bp, Artificial
  probe
  misc_feature (1)..(25): SEQ ID NO: 720; WAN024FTA; Start 35; Stop 59
ttcgcttaacagaaacggaagaaaa

SEQ ID NO: 271435 - DNA, 25 bp, Artificial
  probe
  misc_feature (1)..(25): SEQ ID NO: 720; WAN024FTA; Start 67; Stop 91
ctagatttaatgagagagaaaggag

SEQ ID NO: 271436 - DNA, 25 bp, Artificial
  probe
  misc_feature (1)..(25): SEQ ID NO: 720; WAN024FTA; Start 15; Stop 39
acgtagtattcggaaacaatttcgc

SEQ ID NO: 271437 - DNA, 25 bp, Artificial
  probe
  misc_feature (1)..(25): SEQ ID NO: 720; WAN024FTA; Start 100; Stop 124
ttttctgattttctccgtaaaagct

SEQ ID NO: 271438 - DNA, 25 bp, Artificial
  probe
  misc_feature (1)..(25): SEQ ID NO: 720; WAN024FTA; Start 14; Stop 38
tacgtagtattcggaaacaatttcg

SEQ ID NO: 271439 - DNA, 25 bp, Artificial
  probe
  misc_feature (1)..(25): SEQ ID NO: 720; WAN024FTA; Start 65; Stop 89
tactagatttaatgagagagaaagg

SEQ ID NO: 271440 - DNA, 25 bp, Artificial
  probe
  misc_feature (1)..(25): SEQ ID NO: 720; WAN024FTA; Start 13; Stop 37
atacgtagtattcggaaacaatttc

SEQ ID NO: 271441 - DNA, 25 bp, Artificial
  probe
  misc_feature (1)..(25): SEQ ID NO: 720; WAN024FTA; Start 12; Stop 36
tatacgtagtattcggaaacaattt

SEQ ID NO: 271442 - DNA, 25 bp, Artificial
  probe
  misc_feature (1)..(25): SEQ ID NO: 720; WAN024FTA; Start 11; Stop 35
atatacgtagtattcggaaacaatt

SEQ ID NO: 271443 - DNA, 25 bp, Artificial
  probe
  misc_feature (1)..(25): SEQ ID NO: 720; WAN024FTA; Start 101; Stop 125
tttctgattttctccgtaaaagctt

SEQ ID NO: 271444 - DNA, 25 bp, Artificial
  probe
  misc_feature (1)..(25): SEQ ID NO: 720; WAN024FTA; Start 104; Stop 128
ctgattttctccgtaaaagcttact

SEQ ID NO: 271445 - DNA, 25 bp, Artificial
  probe
  misc_feature (1)..(25): SEQ ID NO: 720; WAN024FTA; Start 103; Stop 127
tctgattttctccgtaaaagcttac

SEQ ID NO: 271446 - DNA, 25 bp, Artificial
  probe
  misc_feature (1)..(25): SEQ ID NO: 721; WAN024FV4; Start 308; Stop 332
ttgaagaagaaggtgttgaagtagt

SEQ ID NO: 271447 - DNA, 25 bp, Artificial
  probe
  misc_feature (1)..(25): SEQ ID NO: 721; WAN024FV4; Start 309; Stop 333
tgaagaagaaggtgttgaagtagtc

SEQ ID NO: 271448 - DNA, 25 bp, Artificial
  probe
  misc_feature (1)..(25): SEQ ID NO: 721; WAN024FV4; Start 307; Stop 331
cttgaagaagaaggtgttgaagtag

SEQ ID NO: 271449 - DNA, 25 bp, Artificial
  probe
  misc_feature (1)..(25): SEQ ID NO: 721; WAN024FV4; Start 310; Stop 334
gaagaagaaggtgttgaagtagtct

SEQ ID NO: 271450 - DNA, 25 bp, Artificial
  probe
  misc_feature (1)..(25): SEQ ID NO: 721; WAN024FV4; Start 311; Stop 335
aagaagaaggtgttgaagtagtcta

SEQ ID NO: 271451 - DNA, 25 bp, Artificial
  probe
  misc_feature (1)..(25): SEQ ID NO: 721; WAN024FV4; Start 312; Stop 336
agaagaaggtgttgaagtagtctat

SEQ ID NO: 271452 - DNA, 25 bp, Artificial
  probe
  misc_feature (1)..(25): SEQ ID NO: 721; WAN024FV4; Start 313; Stop 337
gaagaaggtgttgaagtagtctatt

SEQ ID NO: 271453 - DNA, 25 bp, Artificial
  probe
  misc_feature (1)..(25): SEQ ID NO: 721; WAN024FV4; Start 316; Stop 340
gaaggtgttgaagtagtctatttgc

SEQ ID NO: 271454 - DNA, 25 bp, Artificial
  probe
  misc_feature (1)..(25): SEQ ID NO: 721; WAN024FV4; Start 272; Stop 296
taatgggtgatgattggaaaggtaa

SEQ ID NO: 271455 - DNA, 25 bp, Artificial
  probe
  misc_feature (1)..(25): SEQ ID NO: 721; WAN024FV4; Start 319; Stop 343
ggtgttgaagtagtctatttgccta

SEQ ID NO: 271456 - DNA, 25 bp, Artificial
  probe
  misc_feature (1)..(25): SEQ ID NO: 721; WAN024FV4; Start 268; Stop 292
tttgtaatgggtgatgattggaaag

SEQ ID NO: 271457 - DNA, 25 bp, Artificial
  probe
  misc_feature (1)..(25): SEQ ID NO: 721; WAN024FV4; Start 274; Stop 298
atgggtgatgattggaaaggtaaat

SEQ ID NO: 271458 - DNA, 25 bp, Artificial
  probe
  misc_feature (1)..(25): SEQ ID NO: 721; WAN024FV4; Start 271; Stop 295
gtaatgggtgatgattggaaaggta

SEQ ID NO: 271459 - DNA, 25 bp, Artificial
  probe
  misc_feature (1)..(25): SEQ ID NO: 721; WAN024FV4; Start 273; Stop 297
aatgggtgatgattggaaaggtaaa

SEQ ID NO: 271460 - DNA, 25 bp, Artificial
  probe
  misc_feature (1)..(25): SEQ ID NO: 721; WAN024FV4; Start 346; Stop 370
acaaaggaaatatcaaccacaaaga

SEQ ID NO: 271461 - DNA, 25 bp, Artificial
  probe
  misc_feature (1)..(25): SEQ ID NO: 721; WAN024FV4; Start 343; Stop 367
agaacaaaggaaatatcaaccacaa

SEQ ID NO: 271462 - DNA, 25 bp, Artificial
  probe
  misc_feature (1)..(25): SEQ ID NO: 721; WAN024FV4; Start 317; Stop 341
aaggtgttgaagtagtctatttgcc

SEQ ID NO: 271463 - DNA, 25 bp, Artificial
  probe
  misc_feature (1)..(25): SEQ ID NO: 721; WAN024FV4; Start 275; Stop 299
tgggtgatgattggaaaggtaaatt

SEQ ID NO: 271464 - DNA, 25 bp, Artificial
  probe
  misc_feature (1)..(25): SEQ ID NO: 721; WAN024FV4; Start 269; Stop 293
ttgtaatgggtgatgattggaaagg

SEQ ID NO: 271465 - DNA, 25 bp, Artificial
  probe
  misc_feature (1)..(25): SEQ ID NO: 721; WAN024FV4; Start 320; Stop 344
gtgttgaagtagtctatttgcctag

SEQ ID NO: 271466 - DNA, 25 bp, Artificial
  probe
  misc_feature (1)..(25): SEQ ID NO: 721; WAN024FV4; Start 306; Stop 330
tcttgaagaagaaggtgttgaagta

SEQ ID NO: 271467 - DNA, 25 bp, Artificial
  probe
  misc_feature (1)..(25): SEQ ID NO: 721; WAN024FV4; Start 305; Stop 329
atcttgaagaagaaggtgttgaagt

SEQ ID NO: 271468 - DNA, 25 bp, Artificial
  probe
  misc_feature (1)..(25): SEQ ID NO: 721; WAN024FV4; Start 344; Stop 368
gaacaaaggaaatatcaaccacaaa

SEQ ID NO: 271469 - DNA, 25 bp, Artificial
  probe
  misc_feature (1)..(25): SEQ ID NO: 721; WAN024FV4; Start 345; Stop 369
aacaaaggaaatatcaaccacaaag

SEQ ID NO: 271470 - DNA, 25 bp, Artificial
  probe
  misc_feature (1)..(25): SEQ ID NO: 721; WAN024FV4; Start 342; Stop 366
tagaacaaaggaaatatcaaccaca

SEQ ID NO: 271471 - DNA, 25 bp, Artificial
  probe
  misc_feature (1)..(25): SEQ ID NO: 721; WAN024FV4; Start 96; Stop 120
tgtagttgtttcaagtgatgagttt

SEQ ID NO: 271472 - DNA, 25 bp, Artificial
  probe
  misc_feature (1)..(25): SEQ ID NO: 721; WAN024FV4; Start 95; Stop 119
ttgtagttgtttcaagtgatgagtt

SEQ ID NO: 271473 - DNA, 25 bp, Artificial
  probe
  misc_feature (1)..(25): SEQ ID NO: 721; WAN024FV4; Start 94; Stop 118
attgtagttgtttcaagtgatgagt

SEQ ID NO: 271474 - DNA, 25 bp, Artificial
  probe
  misc_feature (1)..(25): SEQ ID NO: 721; WAN024FV4; Start 92; Stop 116
tgattgtagttgtttcaagtgatga

SEQ ID NO: 271475 - DNA, 25 bp, Artificial
  probe
  misc_feature (1)..(25): SEQ ID NO: 721; WAN024FV4; Start 315; Stop 339
agaaggtgttgaagtagtctatttg

SEQ ID NO: 271476 - DNA, 25 bp, Artificial
  probe
  misc_feature (1)..(25): SEQ ID NO: 721; WAN024FV4; Start 304; Stop 328
tatcttgaagaagaaggtgttgaag

SEQ ID NO: 271477 - DNA, 25 bp, Artificial
  probe
  misc_feature (1)..(25): SEQ ID NO: 721; WAN024FV4; Start 347; Stop 371
caaaggaaatatcaaccacaaagat

SEQ ID NO: 271478 - DNA, 25 bp, Artificial
  probe
  misc_feature (1)..(25): SEQ ID NO: 721; WAN024FV4; Start 270; Stop 294
tgtaatgggtgatgattggaaaggt

SEQ ID NO: 271479 - DNA, 25 bp, Artificial
  probe
  misc_feature (1)..(25): SEQ ID NO: 722; WAN024DKH; Start 266; Stop 290
taatgatagaatctggatcgacctg

SEQ ID NO: 271480 - DNA, 25 bp, Artificial
  probe
  misc_feature (1)..(25): SEQ ID NO: 722; WAN024DKH; Start 133; Stop 157
ttattacacagagagcatggatatg

SEQ ID NO: 271481 - DNA, 25 bp, Artificial
  probe
  misc_feature (1)..(25): SEQ ID NO: 722; WAN024DKH; Start 267; Stop 291
aatgatagaatctggatcgacctgt

SEQ ID NO: 271482 - DNA, 25 bp, Artificial
  probe
  misc_feature (1)..(25): SEQ ID NO: 722; WAN024DKH; Start 499; Stop 523
acagatggttacgataaagagatgg

SEQ ID NO: 271483 - DNA, 25 bp, Artificial
  probe
  misc_feature (1)..(25): SEQ ID NO: 722; WAN024DKH; Start 497; Stop 521
ggacagatggttacgataaagagat

SEQ ID NO: 271484 - DNA, 25 bp, Artificial
  probe
  misc_feature (1)..(25): SEQ ID NO: 722; WAN024DKH; Start 714; Stop 738
aaatgctgggataatggttaaggta

SEQ ID NO: 271485 - DNA, 25 bp, Artificial
  probe
  misc_feature (1)..(25): SEQ ID NO: 722; WAN024DKH; Start 721; Stop 745
gggataatggttaaggtagtttcgt

SEQ ID NO: 271486 - DNA, 25 bp, Artificial
  probe
  misc_feature (1)..(25): SEQ ID NO: 722; WAN024DKH; Start 720; Stop 744
tgggataatggttaaggtagtttcg

SEQ ID NO: 271487 - DNA, 25 bp, Artificial
  probe
  misc_feature (1)..(25): SEQ ID NO: 722; WAN024DKH; Start 715; Stop 739
aatgctgggataatggttaaggtag

SEQ ID NO: 271488 - DNA, 25 bp, Artificial
  probe
  misc_feature (1)..(25): SEQ ID NO: 722; WAN024DKH; Start 265; Stop 289
ataatgatagaatctggatcgacct

SEQ ID NO: 271489 - DNA, 25 bp, Artificial
  probe
  misc_feature (1)..(25): SEQ ID NO: 722; WAN024DKH; Start 718; Stop 742
gctgggataatggttaaggtagttt

SEQ ID NO: 271490 - DNA, 25 bp, Artificial
  probe
  misc_feature (1)..(25): SEQ ID NO: 722; WAN024DKH; Start 500; Stop 524
cagatggttacgataaagagatggg

SEQ ID NO: 271491 - DNA, 25 bp, Artificial
  probe
  misc_feature (1)..(25): SEQ ID NO: 722; WAN024DKH; Start 498; Stop 522
gacagatggttacgataaagagatg

SEQ ID NO: 271492 - DNA, 25 bp, Artificial
  probe
  misc_feature (1)..(25): SEQ ID NO: 722; WAN024DKH; Start 368; Stop 392
ttgtgagagcttatgattcatgtcg

SEQ ID NO: 271493 - DNA, 25 bp, Artificial
  probe
  misc_feature (1)..(25): SEQ ID NO: 722; WAN024DKH; Start 719; Stop 743
ctgggataatggttaaggtagtttc

SEQ ID NO: 271494 - DNA, 25 bp, Artificial
  probe
  misc_feature (1)..(25): SEQ ID NO: 722; WAN024DKH; Start 268; Stop 292
atgatagaatctggatcgacctgtg

SEQ ID NO: 271495 - DNA, 25 bp, Artificial
  probe
  misc_feature (1)..(25): SEQ ID NO: 722; WAN024DKH; Start 716; Stop 740
atgctgggataatggttaaggtagt

SEQ ID NO: 271496 - DNA, 25 bp, Artificial
  probe
  misc_feature (1)..(25): SEQ ID NO: 722; WAN024DKH; Start 493; Stop 517
gttgggacagatggttacgataaag

SEQ ID NO: 271497 - DNA, 25 bp, Artificial
  probe
  misc_feature (1)..(25): SEQ ID NO: 722; WAN024DKH; Start 494; Stop 518
ttgggacagatggttacgataaaga

SEQ ID NO: 271498 - DNA, 25 bp, Artificial
  probe
  misc_feature (1)..(25): SEQ ID NO: 722; WAN024DKH; Start 717; Stop 741
tgctgggataatggttaaggtagtt

SEQ ID NO: 271499 - DNA, 25 bp, Artificial
  probe
  misc_feature (1)..(25): SEQ ID NO: 722; WAN024DKH; Start 264; Stop 288
aataatgatagaatctggatcgacc

SEQ ID NO: 271500 - DNA, 25 bp, Artificial
  probe
  misc_feature (1)..(25): SEQ ID NO: 722; WAN024DKH; Start 496; Stop 520
gggacagatggttacgataaagaga

SEQ ID NO: 271501 - DNA, 25 bp, Artificial
  probe
  misc_feature (1)..(25): SEQ ID NO: 722; WAN024DKH; Start 156; Stop 180
tgctgtattaaatagtggagatgac

SEQ ID NO: 271502 - DNA, 25 bp, Artificial
  probe
  misc_feature (1)..(25): SEQ ID NO: 722; WAN024DKH; Start 495; Stop 519
tgggacagatggttacgataaagag

SEQ ID NO: 271503 - DNA, 25 bp, Artificial
  probe
  misc_feature (1)..(25): SEQ ID NO: 722; WAN024DKH; Start 637; Stop 661
agaagatttgctttaagtcaagtct

SEQ ID NO: 271504 - DNA, 25 bp, Artificial
  probe
  misc_feature (1)..(25): SEQ ID NO: 722; WAN024DKH; Start 130; Stop 154
ggtttattacacagagagcatggat

SEQ ID NO: 271505 - DNA, 25 bp, Artificial
  probe
  misc_feature (1)..(25): SEQ ID NO: 722; WAN024DKH; Start 127; Stop 151
aaaggtttattacacagagagcatg

SEQ ID NO: 271506 - DNA, 25 bp, Artificial
  probe
  misc_feature (1)..(25): SEQ ID NO: 722; WAN024DKH; Start 722; Stop 746
ggataatggttaaggtagtttcgta

SEQ ID NO: 271507 - DNA, 25 bp, Artificial
  probe
  misc_feature (1)..(25): SEQ ID NO: 722; WAN024DKH; Start 128; Stop 152
aaggtttattacacagagagcatgg

SEQ ID NO: 271508 - DNA, 25 bp, Artificial
  probe
  misc_feature (1)..(25): SEQ ID NO: 722; WAN024DKH; Start 503; Stop 527
atggttacgataaagagatgggctt

SEQ ID NO: 271509 - DNA, 25 bp, Artificial
  probe
  misc_feature (1)..(25): SEQ ID NO: 722; WAN024DKH; Start 369; Stop 393
tgtgagagcttatgattcatgtcgt

SEQ ID NO: 271510 - DNA, 25 bp, Artificial
  probe
  misc_feature (1)..(25): SEQ ID NO: 722; WAN024DKH; Start 288; Stop 312
ctgtgctttacttgctgaggaaatt

SEQ ID NO: 271511 - DNA, 25 bp, Artificial
  probe
  misc_feature (1)..(25): SEQ ID NO: 722; WAN024DKH; Start 644; Stop 668
ttgctttaagtcaagtctatgaagt

SEQ ID NO: 271512 - DNA, 25 bp, Artificial
  probe
  misc_feature (1)..(25): SEQ ID NO: 723; WAN024GI6; Start 268; Stop 292
attaccattgttcacactcatcatc

SEQ ID NO: 271513 - DNA, 25 bp, Artificial
  probe
  misc_feature (1)..(25): SEQ ID NO: 723; WAN024GI6; Start 593; Stop 617
gattgacctacctaattgatgcgat

SEQ ID NO: 271514 - DNA, 25 bp, Artificial
  probe
  misc_feature (1)..(25): SEQ ID NO: 723; WAN024GI6; Start 594; Stop 618
attgacctacctaattgatgcgatg

SEQ ID NO: 271515 - DNA, 25 bp, Artificial
  probe
  misc_feature (1)..(25): SEQ ID NO: 723; WAN024GI6; Start 269; Stop 293
ttaccattgttcacactcatcatcg

SEQ ID NO: 271516 - DNA, 25 bp, Artificial
  probe
  misc_feature (1)..(25): SEQ ID NO: 723; WAN024GI6; Start 267; Stop 291
tattaccattgttcacactcatcat

SEQ ID NO: 271517 - DNA, 25 bp, Artificial
  probe
  misc_feature (1)..(25): SEQ ID NO: 723; WAN024GI6; Start 266; Stop 290
atattaccattgttcacactcatca

SEQ ID NO: 271518 - DNA, 25 bp, Artificial
  probe
  misc_feature (1)..(25): SEQ ID NO: 723; WAN024GI6; Start 598; Stop 622
acctacctaattgatgcgatgtctt

SEQ ID NO: 271519 - DNA, 25 bp, Artificial
  probe
  misc_feature (1)..(25): SEQ ID NO: 723; WAN024GI6; Start 595; Stop 619
ttgacctacctaattgatgcgatgt

SEQ ID NO: 271520 - DNA, 25 bp, Artificial
  probe
  misc_feature (1)..(25): SEQ ID NO: 723; WAN024GI6; Start 590; Stop 614
aaggattgacctacctaattgatgc

SEQ ID NO: 271521 - DNA, 25 bp, Artificial
  probe
  misc_feature (1)..(25): SEQ ID NO: 723; WAN024GI6; Start 264; Stop 288
tgatattaccattgttcacactcat

SEQ ID NO: 271522 - DNA, 25 bp, Artificial
  probe
  misc_feature (1)..(25): SEQ ID NO: 723; WAN024GI6; Start 263; Stop 287
atgatattaccattgttcacactca

SEQ ID NO: 271523 - DNA, 25 bp, Artificial
  probe
  misc_feature (1)..(25): SEQ ID NO: 723; WAN024GI6; Start 265; Stop 289
gatattaccattgttcacactcatc

SEQ ID NO: 271524 - DNA, 25 bp, Artificial
  probe
  misc_feature (1)..(25): SEQ ID NO: 723; WAN024GI6; Start 592; Stop 616
ggattgacctacctaattgatgcga

SEQ ID NO: 271525 - DNA, 25 bp, Artificial
  probe
  misc_feature (1)..(25): SEQ ID NO: 723; WAN024GI6; Start 607; Stop 631
attgatgcgatgtctttagtgaaac

SEQ ID NO: 271526 - DNA, 25 bp, Artificial
  probe
  misc_feature (1)..(25): SEQ ID NO: 723; WAN024GI6; Start 270; Stop 294
taccattgttcacactcatcatcgg

SEQ ID NO: 271527 - DNA, 25 bp, Artificial
  probe
  misc_feature (1)..(25): SEQ ID NO: 723; WAN024GI6; Start 59; Stop 83
gtggtgcagaacgtattgtatatca

SEQ ID NO: 271528 - DNA, 25 bp, Artificial
  probe
  misc_feature (1)..(25): SEQ ID NO: 723; WAN024GI6; Start 606; Stop 630
aattgatgcgatgtctttagtgaaa

SEQ ID NO: 271529 - DNA, 25 bp, Artificial
  probe
  misc_feature (1)..(25): SEQ ID NO: 723; WAN024GI6; Start 60; Stop 84
tggtgcagaacgtattgtatatcaa

SEQ ID NO: 271530 - DNA, 25 bp, Artificial
  probe
  misc_feature (1)..(25): SEQ ID NO: 723; WAN024GI6; Start 597; Stop 621
gacctacctaattgatgcgatgtct

SEQ ID NO: 271531 - DNA, 25 bp, Artificial
  probe
  misc_feature (1)..(25): SEQ ID NO: 723; WAN024GI6; Start 599; Stop 623
cctacctaattgatgcgatgtcttt

SEQ ID NO: 271532 - DNA, 25 bp, Artificial
  probe
  misc_feature (1)..(25): SEQ ID NO: 723; WAN024GI6; Start 605; Stop 629
taattgatgcgatgtctttagtgaa

SEQ ID NO: 271533 - DNA, 25 bp, Artificial
  probe
  misc_feature (1)..(25): SEQ ID NO: 723; WAN024GI6; Start 600; Stop 624
ctacctaattgatgcgatgtcttta

SEQ ID NO: 271534 - DNA, 25 bp, Artificial
  probe
  misc_feature (1)..(25): SEQ ID NO: 723; WAN024GI6; Start 596; Stop 620
tgacctacctaattgatgcgatgtc

SEQ ID NO: 271535 - DNA, 25 bp, Artificial
  probe
  misc_feature (1)..(25): SEQ ID NO: 723; WAN024GI6; Start 58; Stop 82
ggtggtgcagaacgtattgtatatc

SEQ ID NO: 271536 - DNA, 25 bp, Artificial
  probe
  misc_feature (1)..(25): SEQ ID NO: 723; WAN024GI6; Start 272; Stop 296
ccattgttcacactcatcatcggat

SEQ ID NO: 271537 - DNA, 25 bp, Artificial
  probe
  misc_feature (1)..(25): SEQ ID NO: 723; WAN024GI6; Start 591; Stop 615
aggattgacctacctaattgatgcg

SEQ ID NO: 271538 - DNA, 25 bp, Artificial
  probe
  misc_feature (1)..(25): SEQ ID NO: 723; WAN024GI6; Start 189; Stop 213
tttagatgttgacagtaagaatccc

SEQ ID NO: 271539 - DNA, 25 bp, Artificial
  probe
  misc_feature (1)..(25): SEQ ID NO: 723; WAN024GI6; Start 98; Stop 122
tgaaagatgaatttgatagtgtcca

SEQ ID NO: 271540 - DNA, 25 bp, Artificial
  probe
  misc_feature (1)..(25): SEQ ID NO: 723; WAN024GI6; Start 461; Stop 485
atgtaggaatcagtgatagtacagt

SEQ ID NO: 271541 - DNA, 25 bp, Artificial
  probe
  misc_feature (1)..(25): SEQ ID NO: 723; WAN024GI6; Start 103; Stop 127
gatgaatttgatagtgtccatgtcg

SEQ ID NO: 271542 - DNA, 25 bp, Artificial
  probe
  misc_feature (1)..(25): SEQ ID NO: 723; WAN024GI6; Start 57; Stop 81
tggtggtgcagaacgtattgtatat

SEQ ID NO: 271543 - DNA, 25 bp, Artificial
  probe
  misc_feature (1)..(25): SEQ ID NO: 723; WAN024GI6; Start 603; Stop 627
cctaattgatgcgatgtctttagtg

SEQ ID NO: 271544 - DNA, 25 bp, Artificial
  probe
  misc_feature (1)..(25): SEQ ID NO: 723; WAN024GI6; Start 602; Stop 626
acctaattgatgcgatgtctttagt

SEQ ID NO: 271545 - DNA, 25 bp, Artificial
  probe
  misc_feature (1)..(25): SEQ ID NO: 724; WAN024EV3; Start 736; Stop 760
ttccatattatccaacatctcagcc

SEQ ID NO: 271546 - DNA, 25 bp, Artificial
  probe
  misc_feature (1)..(25): SEQ ID NO: 724; WAN024EV3; Start 739; Stop 763
catattatccaacatctcagccgtg

SEQ ID NO: 271547 - DNA, 25 bp, Artificial
  probe
  misc_feature (1)..(25): SEQ ID NO: 724; WAN024EV3; Start 737; Stop 761
tccatattatccaacatctcagccg

SEQ ID NO: 271548 - DNA, 25 bp, Artificial
  probe
  misc_feature (1)..(25): SEQ ID NO: 724; WAN024EV3; Start 738; Stop 762
ccatattatccaacatctcagccgt

SEQ ID NO: 271549 - DNA, 25 bp, Artificial
  probe
  misc_feature (1)..(25): SEQ ID NO: 724; WAN024EV3; Start 678; Stop 702
tccttactatgacttggctaaacag

SEQ ID NO: 271550 - DNA, 25 bp, Artificial
  probe
  misc_feature (1)..(25): SEQ ID NO: 724; WAN024EV3; Start 740; Stop 764
atattatccaacatctcagccgtgc

SEQ ID NO: 271551 - DNA, 25 bp, Artificial
  probe
  misc_feature (1)..(25): SEQ ID NO: 724; WAN024EV3; Start 735; Stop 759
tttccatattatccaacatctcagc

SEQ ID NO: 271552 - DNA, 25 bp, Artificial
  probe
  misc_feature (1)..(25): SEQ ID NO: 724; WAN024EV3; Start 677; Stop 701
gtccttactatgacttggctaaaca

SEQ ID NO: 271553 - DNA, 25 bp, Artificial
  probe
  misc_feature (1)..(25): SEQ ID NO: 724; WAN024EV3; Start 661; Stop 685
acgatggatatgtttagtccttact

SEQ ID NO: 271554 - DNA, 25 bp, Artificial
  probe
  misc_feature (1)..(25): SEQ ID NO: 724; WAN024EV3; Start 734; Stop 758
gtttccatattatccaacatctcag

SEQ ID NO: 271555 - DNA, 25 bp, Artificial
  probe
  misc_feature (1)..(25): SEQ ID NO: 724; WAN024EV3; Start 657; Stop 681
cattacgatggatatgtttagtcct

SEQ ID NO: 271556 - DNA, 25 bp, Artificial
  probe
  misc_feature (1)..(25): SEQ ID NO: 724; WAN024EV3; Start 656; Stop 680
tcattacgatggatatgtttagtcc

SEQ ID NO: 271557 - DNA, 25 bp, Artificial
  probe
  misc_feature (1)..(25): SEQ ID NO: 724; WAN024EV3; Start 660; Stop 684
tacgatggatatgtttagtccttac

SEQ ID NO: 271558 - DNA, 25 bp, Artificial
  probe
  misc_feature (1)..(25): SEQ ID NO: 724; WAN024EV3; Start 6; Stop 30
aagcgacaaaaccatcattagaaag

SEQ ID NO: 271559 - DNA, 25 bp, Artificial
  probe
  misc_feature (1)..(25): SEQ ID NO: 724; WAN024EV3; Start 5; Stop 29
aaagcgacaaaaccatcattagaaa

SEQ ID NO: 271560 - DNA, 25 bp, Artificial
  probe
  misc_feature (1)..(25): SEQ ID NO: 724; WAN024EV3; Start 4; Stop 28
aaaagcgacaaaaccatcattagaa

SEQ ID NO: 271561 - DNA, 25 bp, Artificial
  probe
  misc_feature (1)..(25): SEQ ID NO: 724; WAN024EV3; Start 3; Stop 27
gaaaagcgacaaaaccatcattaga

SEQ ID NO: 271562 - DNA, 25 bp, Artificial
  probe
  misc_feature (1)..(25): SEQ ID NO: 724; WAN024EV3; Start 8; Stop 32
gcgacaaaaccatcattagaaagat

SEQ ID NO: 271563 - DNA, 25 bp, Artificial
  probe
  misc_feature (1)..(25): SEQ ID NO: 724; WAN024EV3; Start 658; Stop 682
attacgatggatatgtttagtcctt

SEQ ID NO: 271564 - DNA, 25 bp, Artificial
  probe
  misc_feature (1)..(25): SEQ ID NO: 724; WAN024EV3; Start 7; Stop 31
agcgacaaaaccatcattagaaaga

SEQ ID NO: 271565 - DNA, 25 bp, Artificial
  probe
  misc_feature (1)..(25): SEQ ID NO: 724; WAN024EV3; Start 674; Stop 698
ttagtccttactatgacttggctaa

SEQ ID NO: 271566 - DNA, 25 bp, Artificial
  probe
  misc_feature (1)..(25): SEQ ID NO: 724; WAN024EV3; Start 655; Stop 679
atcattacgatggatatgtttagtc

SEQ ID NO: 271567 - DNA, 25 bp, Artificial
  probe
  misc_feature (1)..(25): SEQ ID NO: 724; WAN024EV3; Start 662; Stop 686
cgatggatatgtttagtccttacta

SEQ ID NO: 271568 - DNA, 25 bp, Artificial
  probe
  misc_feature (1)..(25): SEQ ID NO: 724; WAN024EV3; Start 2; Stop 26
tgaaaagcgacaaaaccatcattag

SEQ ID NO: 271569 - DNA, 25 bp, Artificial
  probe
  misc_feature (1)..(25): SEQ ID NO: 724; WAN024EV3; Start 682; Stop 706
tactatgacttggctaaacagcttt

SEQ ID NO: 271570 - DNA, 25 bp, Artificial
  probe
  misc_feature (1)..(25): SEQ ID NO: 724; WAN024EV3; Start 741; Stop 765
tattatccaacatctcagccgtgcc

SEQ ID NO: 271571 - DNA, 25 bp, Artificial
  probe
  misc_feature (1)..(25): SEQ ID NO: 724; WAN024EV3; Start 659; Stop 683
ttacgatggatatgtttagtcctta

SEQ ID NO: 271572 - DNA, 25 bp, Artificial
  probe
  misc_feature (1)..(25): SEQ ID NO: 724; WAN024EV3; Start 9; Stop 33
cgacaaaaccatcattagaaagatt

SEQ ID NO: 271573 - DNA, 25 bp, Artificial
  probe
  misc_feature (1)..(25): SEQ ID NO: 724; WAN024EV3; Start 706; Stop 730
tttccgtgtgctaaaatcgttctag

SEQ ID NO: 271574 - DNA, 25 bp, Artificial
  probe
  misc_feature (1)..(25): SEQ ID NO: 724; WAN024EV3; Start 654; Stop 678
aatcattacgatggatatgtttagt

SEQ ID NO: 271575 - DNA, 25 bp, Artificial
  probe
  misc_feature (1)..(25): SEQ ID NO: 724; WAN024EV3; Start 705; Stop 729
ttttccgtgtgctaaaatcgttcta

SEQ ID NO: 271576 - DNA, 25 bp, Artificial
  probe
  misc_feature (1)..(25): SEQ ID NO: 724; WAN024EV3; Start 676; Stop 700
agtccttactatgacttggctaaac

SEQ ID NO: 271577 - DNA, 25 bp, Artificial
  probe
  misc_feature (1)..(25): SEQ ID NO: 724; WAN024EV3; Start 672; Stop 696
gtttagtccttactatgacttggct

SEQ ID NO: 271578 - DNA, 25 bp, Artificial
  probe
  misc_feature (1)..(25): SEQ ID NO: 725; WAN024CLC; Start 64; Stop 88
attgtagatagaatgcagaccttgt

SEQ ID NO: 271579 - DNA, 25 bp, Artificial
  probe
  misc_feature (1)..(25): SEQ ID NO: 725; WAN024CLC; Start 60; Stop 84
tgttattgtagatagaatgcagacc

SEQ ID NO: 271580 - DNA, 25 bp, Artificial
  probe
  misc_feature (1)..(25): SEQ ID NO: 725; WAN024CLC; Start 58; Stop 82
ggtgttattgtagatagaatgcaga

SEQ ID NO: 271581 - DNA, 25 bp, Artificial
  probe
  misc_feature (1)..(25): SEQ ID NO: 725; WAN024CLC; Start 63; Stop 87
tattgtagatagaatgcagaccttg

SEQ ID NO: 271582 - DNA, 25 bp, Artificial
  probe
  misc_feature (1)..(25): SEQ ID NO: 725; WAN024CLC; Start 61; Stop 85
gttattgtagatagaatgcagacct

SEQ ID NO: 271583 - DNA, 25 bp, Artificial
  probe
  misc_feature (1)..(25): SEQ ID NO: 725; WAN024CLC; Start 65; Stop 89
ttgtagatagaatgcagaccttgtc

SEQ ID NO: 271584 - DNA, 25 bp, Artificial
  probe
  misc_feature (1)..(25): SEQ ID NO: 725; WAN024CLC; Start 86; Stop 110
tgtcagtcctatttacagtgtcaaa

SEQ ID NO: 271585 - DNA, 25 bp, Artificial
  probe
  misc_feature (1)..(25): SEQ ID NO: 725; WAN024CLC; Start 85; Stop 109
ttgtcagtcctatttacagtgtcaa

SEQ ID NO: 271586 - DNA, 25 bp, Artificial
  probe
  misc_feature (1)..(25): SEQ ID NO: 725; WAN024CLC; Start 84; Stop 108
cttgtcagtcctatttacagtgtca

SEQ ID NO: 271587 - DNA, 25 bp, Artificial
  probe
  misc_feature (1)..(25): SEQ ID NO: 725; WAN024CLC; Start 67; Stop 91
gtagatagaatgcagaccttgtcag

SEQ ID NO: 271588 - DNA, 25 bp, Artificial
  probe
  misc_feature (1)..(25): SEQ ID NO: 725; WAN024CLC; Start 83; Stop 107
ccttgtcagtcctatttacagtgtc

SEQ ID NO: 271589 - DNA, 25 bp, Artificial
  probe
  misc_feature (1)..(25): SEQ ID NO: 725; WAN024CLC; Start 68; Stop 92
tagatagaatgcagaccttgtcagt

SEQ ID NO: 271590 - DNA, 25 bp, Artificial
  probe
  misc_feature (1)..(25): SEQ ID NO: 725; WAN024CLC; Start 79; Stop 103
cagaccttgtcagtcctatttacag

SEQ ID NO: 271591 - DNA, 25 bp, Artificial
  probe
  misc_feature (1)..(25): SEQ ID NO: 725; WAN024CLC; Start 66; Stop 90
tgtagatagaatgcagaccttgtca

SEQ ID NO: 271592 - DNA, 25 bp, Artificial
  probe
  misc_feature (1)..(25): SEQ ID NO: 725; WAN024CLC; Start 81; Stop 105
gaccttgtcagtcctatttacagtg

SEQ ID NO: 271593 - DNA, 25 bp, Artificial
  probe
  misc_feature (1)..(25): SEQ ID NO: 725; WAN024CLC; Start 80; Stop 104
agaccttgtcagtcctatttacagt

SEQ ID NO: 271594 - DNA, 25 bp, Artificial
  probe
  misc_feature (1)..(25): SEQ ID NO: 725; WAN024CLC; Start 82; Stop 106
accttgtcagtcctatttacagtgt

SEQ ID NO: 271595 - DNA, 25 bp, Artificial
  probe
  misc_feature (1)..(25): SEQ ID NO: 725; WAN024CLC; Start 59; Stop 83
gtgttattgtagatagaatgcagac

SEQ ID NO: 271596 - DNA, 25 bp, Artificial
  probe
  misc_feature (1)..(25): SEQ ID NO: 725; WAN024CLC; Start 62; Stop 86
ttattgtagatagaatgcagacctt

SEQ ID NO: 271597 - DNA, 25 bp, Artificial
  probe
  misc_feature (1)..(25): SEQ ID NO: 725; WAN024CLC; Start 69; Stop 93
agatagaatgcagaccttgtcagtc

SEQ ID NO: 271598 - DNA, 25 bp, Artificial
  probe
  misc_feature (1)..(25): SEQ ID NO: 725; WAN024CLC; Start 57; Stop 81
gggtgttattgtagatagaatgcag

SEQ ID NO: 271599 - DNA, 25 bp, Artificial
  probe
  misc_feature (1)..(25): SEQ ID NO: 725; WAN024CLC; Start 78; Stop 102
gcagaccttgtcagtcctatttaca

SEQ ID NO: 271600 - DNA, 25 bp, Artificial
  probe
  misc_feature (1)..(25): SEQ ID NO: 725; WAN024CLC; Start 74; Stop 98
gaatgcagaccttgtcagtcctatt

SEQ ID NO: 271601 - DNA, 25 bp, Artificial
  probe
  misc_feature (1)..(25): SEQ ID NO: 725; WAN024CLC; Start 72; Stop 96
tagaatgcagaccttgtcagtccta

SEQ ID NO: 271602 - DNA, 25 bp, Artificial
  probe
  misc_feature (1)..(25): SEQ ID NO: 725; WAN024CLC; Start 55; Stop 79
tggggtgttattgtagatagaatgc

SEQ ID NO: 271603 - DNA, 25 bp, Artificial
  probe
  misc_feature (1)..(25): SEQ ID NO: 725; WAN024CLC; Start 70; Stop 94
gatagaatgcagaccttgtcagtcc

SEQ ID NO: 271604 - DNA, 25 bp, Artificial
  probe
  misc_feature (1)..(25): SEQ ID NO: 725; WAN024CLC; Start 51; Stop 75
agtctggggtgttattgtagataga

SEQ ID NO: 271605 - DNA, 25 bp, Artificial
  probe
  misc_feature (1)..(25): SEQ ID NO: 725; WAN024CLC; Start 52; Stop 76
gtctggggtgttattgtagatagaa

SEQ ID NO: 271606 - DNA, 25 bp, Artificial
  probe
  misc_feature (1)..(25): SEQ ID NO: 725; WAN024CLC; Start 87; Stop 111
gtcagtcctatttacagtgtcaaaa

SEQ ID NO: 271607 - DNA, 25 bp, Artificial
  probe
  misc_feature (1)..(25): SEQ ID NO: 725; WAN024CLC; Start 54; Stop 78
ctggggtgttattgtagatagaatg

SEQ ID NO: 271608 - DNA, 25 bp, Artificial
  probe
  misc_feature (1)..(25): SEQ ID NO: 725; WAN024CLC; Start 47; Stop 71
ttttagtctggggtgttattgtaga

SEQ ID NO: 271609 - DNA, 25 bp, Artificial
  probe
  misc_feature (1)..(25): SEQ ID NO: 725; WAN024CLC; Start 76; Stop 100
atgcagaccttgtcagtcctattta

SEQ ID NO: 271610 - DNA, 25 bp, Artificial
  probe
  misc_feature (1)..(25): SEQ ID NO: 725; WAN024CLC; Start 48; Stop 72
tttagtctggggtgttattgtagat

SEQ ID NO: 271611 - DNA, 25 bp, Artificial
  probe
  misc_feature (1)..(25): SEQ ID NO: 726; WAN024AZ2; Start 859; Stop 883
agactcaatcagacactacaatcac

SEQ ID NO: 271612 - DNA, 25 bp, Artificial
  probe
  misc_feature (1)..(25): SEQ ID NO: 726; WAN024AZ2; Start 858; Stop 882
aagactcaatcagacactacaatca

SEQ ID NO: 271613 - DNA, 25 bp, Artificial
  probe
  misc_feature (1)..(25): SEQ ID NO: 726; WAN024AZ2; Start 732; Stop 756
tacctatcaagcatccaactctaag

SEQ ID NO: 271614 - DNA, 25 bp, Artificial
  probe
  misc_feature (1)..(25): SEQ ID NO: 726; WAN024AZ2; Start 734; Stop 758
cctatcaagcatccaactctaagaa

SEQ ID NO: 271615 - DNA, 25 bp, Artificial
  probe
  misc_feature (1)..(25): SEQ ID NO: 726; WAN024AZ2; Start 731; Stop 755
ttacctatcaagcatccaactctaa

SEQ ID NO: 271616 - DNA, 25 bp, Artificial
  probe
  misc_feature (1)..(25): SEQ ID NO: 726; WAN024AZ2; Start 733; Stop 757
acctatcaagcatccaactctaaga

SEQ ID NO: 271617 - DNA, 25 bp, Artificial
  probe
  misc_feature (1)..(25): SEQ ID NO: 726; WAN024AZ2; Start 909; Stop 933
caagattcatacattggaagaagcc

SEQ ID NO: 271618 - DNA, 25 bp, Artificial
  probe
  misc_feature (1)..(25): SEQ ID NO: 726; WAN024AZ2; Start 908; Stop 932
acaagattcatacattggaagaagc

SEQ ID NO: 271619 - DNA, 25 bp, Artificial
  probe
  misc_feature (1)..(25): SEQ ID NO: 726; WAN024AZ2; Start 576; Stop 600
caacttacacttagccattgatgat

SEQ ID NO: 271620 - DNA, 25 bp, Artificial
  probe
  misc_feature (1)..(25): SEQ ID NO: 726; WAN024AZ2; Start 860; Stop 884
gactcaatcagacactacaatcacg

SEQ ID NO: 271621 - DNA, 25 bp, Artificial
  probe
  misc_feature (1)..(25): SEQ ID NO: 726; WAN024AZ2; Start 575; Stop 599
ccaacttacacttagccattgatga

SEQ ID NO: 271622 - DNA, 25 bp, Artificial
  probe
  misc_feature (1)..(25): SEQ ID NO: 726; WAN024AZ2; Start 574; Stop 598
accaacttacacttagccattgatg

SEQ ID NO: 271623 - DNA, 25 bp, Artificial
  probe
  misc_feature (1)..(25): SEQ ID NO: 726; WAN024AZ2; Start 573; Stop 597
caccaacttacacttagccattgat

SEQ ID NO: 271624 - DNA, 25 bp, Artificial
  probe
  misc_feature (1)..(25): SEQ ID NO: 726; WAN024AZ2; Start 283; Stop 307
tgtgaattactagctgaagaagagg

SEQ ID NO: 271625 - DNA, 25 bp, Artificial
  probe
  misc_feature (1)..(25): SEQ ID NO: 726; WAN024AZ2; Start 307; Stop 331
ggaattaagctctctgatacaactg

SEQ ID NO: 271626 - DNA, 25 bp, Artificial
  probe
  misc_feature (1)..(25): SEQ ID NO: 726; WAN024AZ2; Start 570; Stop 594
aaccaccaacttacacttagccatt

SEQ ID NO: 271627 - DNA, 25 bp, Artificial
  probe
  misc_feature (1)..(25): SEQ ID NO: 726; WAN024AZ2; Start 282; Stop 306
ctgtgaattactagctgaagaagag

SEQ ID NO: 271628 - DNA, 25 bp, Artificial
  probe
  misc_feature (1)..(25): SEQ ID NO: 726; WAN024AZ2; Start 910; Stop 934
aagattcatacattggaagaagcca

SEQ ID NO: 271629 - DNA, 25 bp, Artificial
  probe
  misc_feature (1)..(25): SEQ ID NO: 726; WAN024AZ2; Start 313; Stop 337
aagctctctgatacaactgttagaa

SEQ ID NO: 271630 - DNA, 25 bp, Artificial
  probe
  misc_feature (1)..(25): SEQ ID NO: 726; WAN024AZ2; Start 907; Stop 931
aacaagattcatacattggaagaag

SEQ ID NO: 271631 - DNA, 25 bp, Artificial
  probe
  misc_feature (1)..(25): SEQ ID NO: 726; WAN024AZ2; Start 281; Stop 305
tctgtgaattactagctgaagaaga

SEQ ID NO: 271632 - DNA, 25 bp, Artificial
  probe
  misc_feature (1)..(25): SEQ ID NO: 726; WAN024AZ2; Start 308; Stop 332
gaattaagctctctgatacaactgt

SEQ ID NO: 271633 - DNA, 25 bp, Artificial
  probe
  misc_feature (1)..(25): SEQ ID NO: 726; WAN024AZ2; Start 937; Stop 961
actttccttctttcctacatccaaa

SEQ ID NO: 271634 - DNA, 25 bp, Artificial
  probe
  misc_feature (1)..(25): SEQ ID NO: 726; WAN024AZ2; Start 938; Stop 962
ctttccttctttcctacatccaaac

SEQ ID NO: 271635 - DNA, 25 bp, Artificial
  probe
  misc_feature (1)..(25): SEQ ID NO: 726; WAN024AZ2; Start 930; Stop 954
agccaatactttccttctttcctac

SEQ ID NO: 271636 - DNA, 25 bp, Artificial
  probe
  misc_feature (1)..(25): SEQ ID NO: 726; WAN024AZ2; Start 639; Stop 663
agagaccttgaatgcctactaccat

SEQ ID NO: 271637 - DNA, 25 bp, Artificial
  probe
  misc_feature (1)..(25): SEQ ID NO: 726; WAN024AZ2; Start 936; Stop 960
tactttccttctttcctacatccaa

SEQ ID NO: 271638 - DNA, 25 bp, Artificial
  probe
  misc_feature (1)..(25): SEQ ID NO: 726; WAN024AZ2; Start 931; Stop 955
gccaatactttccttctttcctaca

SEQ ID NO: 271639 - DNA, 25 bp, Artificial
  probe
  misc_feature (1)..(25): SEQ ID NO: 726; WAN024AZ2; Start 375; Stop 399
tcacagaaagacaaagaagagagta

SEQ ID NO: 271640 - DNA, 25 bp, Artificial
  probe
  misc_feature (1)..(25): SEQ ID NO: 726; WAN024AZ2; Start 730; Stop 754
tttacctatcaagcatccaactcta

SEQ ID NO: 271641 - DNA, 25 bp, Artificial
  probe
  misc_feature (1)..(25): SEQ ID NO: 726; WAN024AZ2; Start 312; Stop 336
taagctctctgatacaactgttaga

SEQ ID NO: 271642 - DNA, 25 bp, Artificial
  probe
  misc_feature (1)..(25): SEQ ID NO: 726; WAN024AZ2; Start 935; Stop 959
atactttccttctttcctacatcca

SEQ ID NO: 271643 - DNA, 25 bp, Artificial
  probe
  misc_feature (1)..(25): SEQ ID NO: 726; WAN024AZ2; Start 942; Stop 966
ccttctttcctacatccaaaccttt

SEQ ID NO: 271644 - DNA, 25 bp, Artificial
  probe
  misc_feature (1)..(25): SEQ ID NO: 727; WAN024AZ3; Start 914; Stop 938
ttcataccttggaagaagccaatac

SEQ ID NO: 271645 - DNA, 25 bp, Artificial
  probe
  misc_feature (1)..(25): SEQ ID NO: 727; WAN024AZ3; Start 917; Stop 941
ataccttggaagaagccaatacctt

SEQ ID NO: 271646 - DNA, 25 bp, Artificial
  probe
  misc_feature (1)..(25): SEQ ID NO: 727; WAN024AZ3; Start 916; Stop 940
cataccttggaagaagccaatacct

SEQ ID NO: 271647 - DNA, 25 bp, Artificial
  probe
  misc_feature (1)..(25): SEQ ID NO: 727; WAN024AZ3; Start 915; Stop 939
tcataccttggaagaagccaatacc

SEQ ID NO: 271648 - DNA, 25 bp, Artificial
  probe
  misc_feature (1)..(25): SEQ ID NO: 728; WAN024AZ4; Start 359; Stop 383
atcctgtcgcctaagtctcatagaa

SEQ ID NO: 271649 - DNA, 25 bp, Artificial
  probe
  misc_feature (1)..(25): SEQ ID NO: 728; WAN024AZ4; Start 564; Stop 588
gagcacaaacatctaacttacactt

SEQ ID NO: 271650 - DNA, 25 bp, Artificial
  probe
  misc_feature (1)..(25): SEQ ID NO: 728; WAN024AZ4; Start 563; Stop 587
ggagcacaaacatctaacttacact

SEQ ID NO: 271651 - DNA, 25 bp, Artificial
  probe
  misc_feature (1)..(25): SEQ ID NO: 728; WAN024AZ4; Start 433; Stop 457
cctagataatccaatcttaccgacg

SEQ ID NO: 271652 - DNA, 25 bp, Artificial
  probe
  misc_feature (1)..(25): SEQ ID NO: 728; WAN024AZ4; Start 562; Stop 586
tggagcacaaacatctaacttacac

SEQ ID NO: 271653 - DNA, 25 bp, Artificial
  probe
  misc_feature (1)..(25): SEQ ID NO: 728; WAN024AZ4; Start 561; Stop 585
ttggagcacaaacatctaacttaca

SEQ ID NO: 271654 - DNA, 25 bp, Artificial
  probe
  misc_feature (1)..(25): SEQ ID NO: 728; WAN024AZ4; Start 565; Stop 589
agcacaaacatctaacttacactta

SEQ ID NO: 271655 - DNA, 25 bp, Artificial
  probe
  misc_feature (1)..(25): SEQ ID NO: 728; WAN024AZ4; Start 434; Stop 458
ctagataatccaatcttaccgacgg

SEQ ID NO: 271656 - DNA, 25 bp, Artificial
  probe
  misc_feature (1)..(25): SEQ ID NO: 728; WAN024AZ4; Start 358; Stop 382
catcctgtcgcctaagtctcataga

SEQ ID NO: 271657 - DNA, 25 bp, Artificial
  probe
  misc_feature (1)..(25): SEQ ID NO: 728; WAN024AZ4; Start 362; Stop 386
ctgtcgcctaagtctcatagaaaga

SEQ ID NO: 271658 - DNA, 25 bp, Artificial
  probe
  misc_feature (1)..(25): SEQ ID NO: 728; WAN024AZ4; Start 356; Stop 380
aacatcctgtcgcctaagtctcata

SEQ ID NO: 271659 - DNA, 25 bp, Artificial
  probe
  misc_feature (1)..(25): SEQ ID NO: 728; WAN024AZ4; Start 595; Stop 619
tgatgatgcttctggcaatatctta

SEQ ID NO: 271660 - DNA, 25 bp, Artificial
  probe
  misc_feature (1)..(25): SEQ ID NO: 728; WAN024AZ4; Start 596; Stop 620
gatgatgcttctggcaatatcttag

SEQ ID NO: 271661 - DNA, 25 bp, Artificial
  probe
  misc_feature (1)..(25): SEQ ID NO: 728; WAN024AZ4; Start 593; Stop 617
attgatgatgcttctggcaatatct

SEQ ID NO: 271662 - DNA, 25 bp, Artificial
  probe
  misc_feature (1)..(25): SEQ ID NO: 728; WAN024AZ4; Start 568; Stop 592
acaaacatctaacttacacttagcc

SEQ ID NO: 271663 - DNA, 25 bp, Artificial
  probe
  misc_feature (1)..(25): SEQ ID NO: 728; WAN024AZ4; Start 597; Stop 621
atgatgcttctggcaatatcttagg

SEQ ID NO: 271664 - DNA, 25 bp, Artificial
  probe
  misc_feature (1)..(25): SEQ ID NO: 728; WAN024AZ4; Start 594; Stop 618
ttgatgatgcttctggcaatatctt

SEQ ID NO: 271665 - DNA, 25 bp, Artificial
  probe
  misc_feature (1)..(25): SEQ ID NO: 728; WAN024AZ4; Start 375; Stop 399
ctcatagaaagacaaagaagagagt

SEQ ID NO: 271666 - DNA, 25 bp, Artificial
  probe
  misc_feature (1)..(25): SEQ ID NO: 728; WAN024AZ4; Start 437; Stop 461
gataatccaatcttaccgacggctg

SEQ ID NO: 271667 - DNA, 25 bp, Artificial
  probe
  misc_feature (1)..(25): SEQ ID NO: 728; WAN024AZ4; Start 435; Stop 459
tagataatccaatcttaccgacggc

SEQ ID NO: 271668 - DNA, 25 bp, Artificial
  probe
  misc_feature (1)..(25): SEQ ID NO: 728; WAN024AZ4; Start 357; Stop 381
acatcctgtcgcctaagtctcatag

SEQ ID NO: 271669 - DNA, 25 bp, Artificial
  probe
  misc_feature (1)..(25): SEQ ID NO: 728; WAN024AZ4; Start 567; Stop 591
cacaaacatctaacttacacttagc

SEQ ID NO: 271670 - DNA, 25 bp, Artificial
  probe
  misc_feature (1)..(25): SEQ ID NO: 728; WAN024AZ4; Start 566; Stop 590
gcacaaacatctaacttacacttag

SEQ ID NO: 271671 - DNA, 25 bp, Artificial
  probe
  misc_feature (1)..(25): SEQ ID NO: 728; WAN024AZ4; Start 361; Stop 385
cctgtcgcctaagtctcatagaaag

SEQ ID NO: 271672 - DNA, 25 bp, Artificial
  probe
  misc_feature (1)..(25): SEQ ID NO: 728; WAN024AZ4; Start 360; Stop 384
tcctgtcgcctaagtctcatagaaa

SEQ ID NO: 271673 - DNA, 25 bp, Artificial
  probe
  misc_feature (1)..(25): SEQ ID NO: 728; WAN024AZ4; Start 438; Stop 462
ataatccaatcttaccgacggctga

SEQ ID NO: 271674 - DNA, 25 bp, Artificial
  probe
  misc_feature (1)..(25): SEQ ID NO: 728; WAN024AZ4; Start 432; Stop 456
ccctagataatccaatcttaccgac

SEQ ID NO: 271675 - DNA, 25 bp, Artificial
  probe
  misc_feature (1)..(25): SEQ ID NO: 728; WAN024AZ4; Start 376; Stop 400
tcatagaaagacaaagaagagagta

SEQ ID NO: 271676 - DNA, 25 bp, Artificial
  probe
  misc_feature (1)..(25): SEQ ID NO: 728; WAN024AZ4; Start 439; Stop 463
taatccaatcttaccgacggctgaa

SEQ ID NO: 271677 - DNA, 25 bp, Artificial
  probe
  misc_feature (1)..(25): SEQ ID NO: 728; WAN024AZ4; Start 560; Stop 584
tttggagcacaaacatctaacttac

SEQ ID NO: 271678 - DNA, 25 bp, Artificial
  probe
  misc_feature (1)..(25): SEQ ID NO: 728; WAN024AZ4; Start 272; Stop 296
gtccttcatttctgtgaattgctag

SEQ ID NO: 271679 - DNA, 25 bp, Artificial
  probe
  misc_feature (1)..(25): SEQ ID NO: 728; WAN024AZ4; Start 269; Stop 293
aatgtccttcatttctgtgaattgc

SEQ ID NO: 271680 - DNA, 25 bp, Artificial
  probe
  misc_feature (1)..(25): SEQ ID NO: 728; WAN024AZ4; Start 271; Stop 295
tgtccttcatttctgtgaattgcta

SEQ ID NO: 271681 - DNA, 25 bp, Artificial
  probe
  misc_feature (1)..(25): SEQ ID NO: 729; WAN024AOM; Start 15; Stop 39
tctctatctctactacttgaaggtc

SEQ ID NO: 271682 - DNA, 25 bp, Artificial
  probe
  misc_feature (1)..(25): SEQ ID NO: 729; WAN024AOM; Start 16; Stop 40
ctctatctctactacttgaaggtca

SEQ ID NO: 271683 - DNA, 25 bp, Artificial
  probe
  misc_feature (1)..(25): SEQ ID NO: 729; WAN024AOM; Start 14; Stop 38
ttctctatctctactacttgaaggt

SEQ ID NO: 271684 - DNA, 25 bp, Artificial
  probe
  misc_feature (1)..(25): SEQ ID NO: 729; WAN024AOM; Start 7; Stop 31
aggcagattctctatctctactact

SEQ ID NO: 271685 - DNA, 25 bp, Artificial
  probe
  misc_feature (1)..(25): SEQ ID NO: 729; WAN024AOM; Start 8; Stop 32
ggcagattctctatctctactactt

SEQ ID NO: 271686 - DNA, 25 bp, Artificial
  probe
  misc_feature (1)..(25): SEQ ID NO: 729; WAN024AOM; Start 6; Stop 30
aaggcagattctctatctctactac

SEQ ID NO: 271687 - DNA, 25 bp, Artificial
  probe
  misc_feature (1)..(25): SEQ ID NO: 729; WAN024AOM; Start 13; Stop 37
attctctatctctactacttgaagg

SEQ ID NO: 271688 - DNA, 25 bp, Artificial
  probe
  misc_feature (1)..(25): SEQ ID NO: 729; WAN024AOM; Start 9; Stop 33
gcagattctctatctctactacttg

SEQ ID NO: 271689 - DNA, 25 bp, Artificial
  probe
  misc_feature (1)..(25): SEQ ID NO: 729; WAN024AOM; Start 17; Stop 41
tctatctctactacttgaaggtcaa

SEQ ID NO: 271690 - DNA, 25 bp, Artificial
  probe
  misc_feature (1)..(25): SEQ ID NO: 729; WAN024AOM; Start 12; Stop 36
gattctctatctctactacttgaag

SEQ ID NO: 271691 - DNA, 25 bp, Artificial
  probe
  misc_feature (1)..(25): SEQ ID NO: 729; WAN024AOM; Start 5; Stop 29
aaaggcagattctctatctctacta

SEQ ID NO: 271692 - DNA, 25 bp, Artificial
  probe
  misc_feature (1)..(25): SEQ ID NO: 729; WAN024AOM; Start 10; Stop 34
cagattctctatctctactacttga

SEQ ID NO: 271693 - DNA, 25 bp, Artificial
  probe
  misc_feature (1)..(25): SEQ ID NO: 729; WAN024AOM; Start 32; Stop 56
tgaaggtcaagaatccgccgttatc

SEQ ID NO: 271694 - DNA, 25 bp, Artificial
  probe
  misc_feature (1)..(25): SEQ ID NO: 729; WAN024AOM; Start 38; Stop 62
tcaagaatccgccgttatccaaaga

SEQ ID NO: 271695 - DNA, 25 bp, Artificial
  probe
  misc_feature (1)..(25): SEQ ID NO: 729; WAN024AOM; Start 37; Stop 61
gtcaagaatccgccgttatccaaag

SEQ ID NO: 271696 - DNA, 25 bp, Artificial
  probe
  misc_feature (1)..(25): SEQ ID NO: 729; WAN024AOM; Start 11; Stop 35
agattctctatctctactacttgaa

SEQ ID NO: 271697 - DNA, 25 bp, Artificial
  probe
  misc_feature (1)..(25): SEQ ID NO: 729; WAN024AOM; Start 1; Stop 25
atgaaaaggcagattctctatctct

SEQ ID NO: 271698 - DNA, 25 bp, Artificial
  probe
  misc_feature (1)..(25): SEQ ID NO: 729; WAN024AOM; Start 4; Stop 28
aaaaggcagattctctatctctact

SEQ ID NO: 271699 - DNA, 25 bp, Artificial
  probe
  misc_feature (1)..(25): SEQ ID NO: 729; WAN024AOM; Start 2; Stop 26
tgaaaaggcagattctctatctcta

SEQ ID NO: 271700 - DNA, 25 bp, Artificial
  probe
  misc_feature (1)..(25): SEQ ID NO: 729; WAN024AOM; Start 3; Stop 27
gaaaaggcagattctctatctctac

SEQ ID NO: 271701 - DNA, 25 bp, Artificial
  probe
  misc_feature (1)..(25): SEQ ID NO: 729; WAN024AOM; Start 31; Stop 55
ttgaaggtcaagaatccgccgttat

SEQ ID NO: 271702 - DNA, 25 bp, Artificial
  probe
  misc_feature (1)..(25): SEQ ID NO: 730; WAN024FMR; Start 176; Stop 200
caattcaagaggagtgtcaatcatc

SEQ ID NO: 271703 - DNA, 25 bp, Artificial
  probe
  misc_feature (1)..(25): SEQ ID NO: 730; WAN024FMR; Start 715; Stop 739
tatattgacgatattgttgaaggcg

SEQ ID NO: 271704 - DNA, 25 bp, Artificial
  probe
  misc_feature (1)..(25): SEQ ID NO: 730; WAN024FMR; Start 307; Stop 331
caagcaggtgttcgttattctatca

SEQ ID NO: 271705 - DNA, 25 bp, Artificial
  probe
  misc_feature (1)..(25): SEQ ID NO: 730; WAN024FMR; Start 788; Stop 812
ggttaccaattcctccttatgctat

SEQ ID NO: 271706 - DNA, 25 bp, Artificial
  probe
  misc_feature (1)..(25): SEQ ID NO: 730; WAN024FMR; Start 790; Stop 814
ttaccaattcctccttatgctatct

SEQ ID NO: 271707 - DNA, 25 bp, Artificial
  probe
  misc_feature (1)..(25): SEQ ID NO: 730; WAN024FMR; Start 789; Stop 813
gttaccaattcctccttatgctatc

SEQ ID NO: 271708 - DNA, 25 bp, Artificial
  probe
  misc_feature (1)..(25): SEQ ID NO: 730; WAN024FMR; Start 177; Stop 201
aattcaagaggagtgtcaatcatct

SEQ ID NO: 271709 - DNA, 25 bp, Artificial
  probe
  misc_feature (1)..(25): SEQ ID NO: 730; WAN024FMR; Start 792; Stop 816
accaattcctccttatgctatctat

SEQ ID NO: 271710 - DNA, 25 bp, Artificial
  probe
  misc_feature (1)..(25): SEQ ID NO: 730; WAN024FMR; Start 170; Stop 194
tatcaacaattcaagaggagtgtca

SEQ ID NO: 271711 - DNA, 25 bp, Artificial
  probe
  misc_feature (1)..(25): SEQ ID NO: 730; WAN024FMR; Start 791; Stop 815
taccaattcctccttatgctatcta

SEQ ID NO: 271712 - DNA, 25 bp, Artificial
  probe
  misc_feature (1)..(25): SEQ ID NO: 730; WAN024FMR; Start 175; Stop 199
acaattcaagaggagtgtcaatcat

SEQ ID NO: 271713 - DNA, 25 bp, Artificial
  probe
  misc_feature (1)..(25): SEQ ID NO: 730; WAN024FMR; Start 173; Stop 197
caacaattcaagaggagtgtcaatc

SEQ ID NO: 271714 - DNA, 25 bp, Artificial
  probe
  misc_feature (1)..(25): SEQ ID NO: 730; WAN024FMR; Start 174; Stop 198
aacaattcaagaggagtgtcaatca

SEQ ID NO: 271715 - DNA, 25 bp, Artificial
  probe
  misc_feature (1)..(25): SEQ ID NO: 730; WAN024FMR; Start 172; Stop 196
tcaacaattcaagaggagtgtcaat

SEQ ID NO: 271716 - DNA, 25 bp, Artificial
  probe
  misc_feature (1)..(25): SEQ ID NO: 730; WAN024FMR; Start 171; Stop 195
atcaacaattcaagaggagtgtcaa

SEQ ID NO: 271717 - DNA, 25 bp, Artificial
  probe
  misc_feature (1)..(25): SEQ ID NO: 730; WAN024FMR; Start 970; Stop 994
gcagatataagtctattggagaagg

SEQ ID NO: 271718 - DNA, 25 bp, Artificial
  probe
  misc_feature (1)..(25): SEQ ID NO: 730; WAN024FMR; Start 532; Stop 556
aatgaattagaagcacatgcgtatt

SEQ ID NO: 271719 - DNA, 25 bp, Artificial
  probe
  misc_feature (1)..(25): SEQ ID NO: 730; WAN024FMR; Start 169; Stop 193
ttatcaacaattcaagaggagtgtc

SEQ ID NO: 271720 - DNA, 25 bp, Artificial
  probe
  misc_feature (1)..(25): SEQ ID NO: 730; WAN024FMR; Start 306; Stop 330
acaagcaggtgttcgttattctatc

SEQ ID NO: 271721 - DNA, 25 bp, Artificial
  probe
  misc_feature (1)..(25): SEQ ID NO: 730; WAN024FMR; Start 310; Stop 334
gcaggtgttcgttattctatcacta

SEQ ID NO: 271722 - DNA, 25 bp, Artificial
  probe
  misc_feature (1)..(25): SEQ ID NO: 730; WAN024FMR; Start 308; Stop 332
aagcaggtgttcgttattctatcac

SEQ ID NO: 271723 - DNA, 25 bp, Artificial
  probe
  misc_feature (1)..(25): SEQ ID NO: 730; WAN024FMR; Start 714; Stop 738
ttatattgacgatattgttgaaggc

SEQ ID NO: 271724 - DNA, 25 bp, Artificial
  probe
  misc_feature (1)..(25): SEQ ID NO: 730; WAN024FMR; Start 613; Stop 637
gctggaagacctgatatggcttatt

SEQ ID NO: 271725 - DNA, 25 bp, Artificial
  probe
  misc_feature (1)..(25): SEQ ID NO: 730; WAN024FMR; Start 305; Stop 329
cacaagcaggtgttcgttattctat

SEQ ID NO: 271726 - DNA, 25 bp, Artificial
  probe
  misc_feature (1)..(25): SEQ ID NO: 730; WAN024FMR; Start 315; Stop 339
tgttcgttattctatcactaatcct

SEQ ID NO: 271727 - DNA, 25 bp, Artificial
  probe
  misc_feature (1)..(25): SEQ ID NO: 730; WAN024FMR; Start 311; Stop 335
caggtgttcgttattctatcactaa

SEQ ID NO: 271728 - DNA, 25 bp, Artificial
  probe
  misc_feature (1)..(25): SEQ ID NO: 730; WAN024FMR; Start 316; Stop 340
gttcgttattctatcactaatcctg

SEQ ID NO: 271729 - DNA, 25 bp, Artificial
  probe
  misc_feature (1)..(25): SEQ ID NO: 730; WAN024FMR; Start 56; Stop 80
gctttattggtgctaatcttgtcat

SEQ ID NO: 271730 - DNA, 25 bp, Artificial
  probe
  misc_feature (1)..(25): SEQ ID NO: 730; WAN024FMR; Start 477; Stop 501
tgaattagatgcagtagacaatcct

SEQ ID NO: 271731 - DNA, 25 bp, Artificial
  probe
  misc_feature (1)..(25): SEQ ID NO: 730; WAN024FMR; Start 309; Stop 333
agcaggtgttcgttattctatcact

SEQ ID NO: 271732 - DNA, 25 bp, Artificial
  probe
  misc_feature (1)..(25): SEQ ID NO: 730; WAN024FMR; Start 793; Stop 817
ccaattcctccttatgctatctata

SEQ ID NO: 271733 - DNA, 25 bp, Artificial
  probe
  misc_feature (1)..(25): SEQ ID NO: 730; WAN024FMR; Start 235; Stop 259
attgctgattctgatttgatggaag

SEQ ID NO: 271734 - DNA, 25 bp, Artificial
  probe
  misc_feature (1)..(25): SEQ ID NO: 730; WAN024FMR; Start 614; Stop 638
ctggaagacctgatatggcttattt

SEQ ID NO: 271735 - DNA, 25 bp, Artificial
  probe
  misc_feature (1)..(25): SEQ ID NO: 731; WAN024CWR; Start 536; Stop 560
cgacgctgattaactacctgattag

SEQ ID NO: 271736 - DNA, 25 bp, Artificial
  probe
  misc_feature (1)..(25): SEQ ID NO: 731; WAN024CWR; Start 291; Stop 315
tgtctatatcctagcctatcctctc

SEQ ID NO: 271737 - DNA, 25 bp, Artificial
  probe
  misc_feature (1)..(25): SEQ ID NO: 731; WAN024CWR; Start 290; Stop 314
ctgtctatatcctagcctatcctct

SEQ ID NO: 271738 - DNA, 25 bp, Artificial
  probe
  misc_feature (1)..(25): SEQ ID NO: 731; WAN024CWR; Start 296; Stop 320
atatcctagcctatcctctcttctt

SEQ ID NO: 271739 - DNA, 25 bp, Artificial
  probe
  misc_feature (1)..(25): SEQ ID NO: 731; WAN024CWR; Start 292; Stop 316
gtctatatcctagcctatcctctct

SEQ ID NO: 271740 - DNA, 25 bp, Artificial
  probe
  misc_feature (1)..(25): SEQ ID NO: 731; WAN024CWR; Start 105; Stop 129
aactgactatggttacttcaactca

SEQ ID NO: 271741 - DNA, 25 bp, Artificial
  probe
  misc_feature (1)..(25): SEQ ID NO: 731; WAN024CWR; Start 103; Stop 127
cgaactgactatggttacttcaact

SEQ ID NO: 271742 - DNA, 25 bp, Artificial
  probe
  misc_feature (1)..(25): SEQ ID NO: 731; WAN024CWR; Start 104; Stop 128
gaactgactatggttacttcaactc

SEQ ID NO: 271743 - DNA, 25 bp, Artificial
  probe
  misc_feature (1)..(25): SEQ ID NO: 731; WAN024CWR; Start 295; Stop 319
tatatcctagcctatcctctcttct

SEQ ID NO: 271744 - DNA, 25 bp, Artificial
  probe
  misc_feature (1)..(25): SEQ ID NO: 731; WAN024CWR; Start 293; Stop 317
tctatatcctagcctatcctctctt

SEQ ID NO: 271745 - DNA, 25 bp, Artificial
  probe
  misc_feature (1)..(25): SEQ ID NO: 731; WAN024CWR; Start 507; Stop 531
tgttgtctatacacttgtgatgagt

SEQ ID NO: 271746 - DNA, 25 bp, Artificial
  probe
  misc_feature (1)..(25): SEQ ID NO: 731; WAN024CWR; Start 294; Stop 318
ctatatcctagcctatcctctcttc

SEQ ID NO: 271747 - DNA, 25 bp, Artificial
  probe
  misc_feature (1)..(25): SEQ ID NO: 731; WAN024CWR; Start 102; Stop 126
ccgaactgactatggttacttcaac

SEQ ID NO: 271748 - DNA, 25 bp, Artificial
  probe
  misc_feature (1)..(25): SEQ ID NO: 731; WAN024CWR; Start 195; Stop 219
ggctatcagtaatgtcaaggataac

SEQ ID NO: 271749 - DNA, 25 bp, Artificial
  probe
  misc_feature (1)..(25): SEQ ID NO: 731; WAN024CWR; Start 508; Stop 532
gttgtctatacacttgtgatgagtt

SEQ ID NO: 271750 - DNA, 25 bp, Artificial
  probe
  misc_feature (1)..(25): SEQ ID NO: 731; WAN024CWR; Start 506; Stop 530
ttgttgtctatacacttgtgatgag

SEQ ID NO: 271751 - DNA, 25 bp, Artificial
  probe
  misc_feature (1)..(25): SEQ ID NO: 731; WAN024CWR; Start 196; Stop 220
gctatcagtaatgtcaaggataaca

SEQ ID NO: 271752 - DNA, 25 bp, Artificial
  probe
  misc_feature (1)..(25): SEQ ID NO: 731; WAN024CWR; Start 280; Stop 304
ttgaccactgctgtctatatcctag

SEQ ID NO: 271753 - DNA, 25 bp, Artificial
  probe
  misc_feature (1)..(25): SEQ ID NO: 731; WAN024CWR; Start 537; Stop 561
gacgctgattaactacctgattagt

SEQ ID NO: 271754 - DNA, 25 bp, Artificial
  probe
  misc_feature (1)..(25): SEQ ID NO: 731; WAN024CWR; Start 505; Stop 529
attgttgtctatacacttgtgatga

SEQ ID NO: 271755 - DNA, 25 bp, Artificial
  probe
  misc_feature (1)..(25): SEQ ID NO: 731; WAN024CWR; Start 500; Stop 524
acgatattgttgtctatacacttgt

SEQ ID NO: 271756 - DNA, 25 bp, Artificial
  probe
  misc_feature (1)..(25): SEQ ID NO: 731; WAN024CWR; Start 498; Stop 522
acacgatattgttgtctatacactt

SEQ ID NO: 271757 - DNA, 25 bp, Artificial
  probe
  misc_feature (1)..(25): SEQ ID NO: 731; WAN024CWR; Start 853; Stop 877
ctggttaatagaggtagtcgaatct

SEQ ID NO: 271758 - DNA, 25 bp, Artificial
  probe
  misc_feature (1)..(25): SEQ ID NO: 731; WAN024CWR; Start 852; Stop 876
tctggttaatagaggtagtcgaatc

SEQ ID NO: 271759 - DNA, 25 bp, Artificial
  probe
  misc_feature (1)..(25): SEQ ID NO: 731; WAN024CWR; Start 533; Stop 557
tatcgacgctgattaactacctgat

SEQ ID NO: 271760 - DNA, 25 bp, Artificial
  probe
  misc_feature (1)..(25): SEQ ID NO: 731; WAN024CWR; Start 499; Stop 523
cacgatattgttgtctatacacttg

SEQ ID NO: 271761 - DNA, 25 bp, Artificial
  probe
  misc_feature (1)..(25): SEQ ID NO: 731; WAN024CWR; Start 190; Stop 214
ttaagggctatcagtaatgtcaagg

SEQ ID NO: 271762 - DNA, 25 bp, Artificial
  probe
  misc_feature (1)..(25): SEQ ID NO: 731; WAN024CWR; Start 535; Stop 559
tcgacgctgattaactacctgatta

SEQ ID NO: 271763 - DNA, 25 bp, Artificial
  probe
  misc_feature (1)..(25): SEQ ID NO: 731; WAN024CWR; Start 501; Stop 525
cgatattgttgtctatacacttgtg

SEQ ID NO: 271764 - DNA, 25 bp, Artificial
  probe
  misc_feature (1)..(25): SEQ ID NO: 731; WAN024CWR; Start 187; Stop 211
ggtttaagggctatcagtaatgtca

SEQ ID NO: 271765 - DNA, 25 bp, Artificial
  probe
  misc_feature (1)..(25): SEQ ID NO: 731; WAN024CWR; Start 191; Stop 215
taagggctatcagtaatgtcaagga

SEQ ID NO: 271766 - DNA, 25 bp, Artificial
  probe
  misc_feature (1)..(25): SEQ ID NO: 731; WAN024CWR; Start 184; Stop 208
tacggtttaagggctatcagtaatg

SEQ ID NO: 271767 - DNA, 25 bp, Artificial
  probe
  misc_feature (1)..(25): SEQ ID NO: 731; WAN024CWR; Start 183; Stop 207
ctacggtttaagggctatcagtaat

SEQ ID NO: 271768 - DNA, 25 bp, Artificial
  probe
  misc_feature (1)..(25): SEQ ID NO: 732; WAN024D9E; Start 144; Stop 168
aatttcatcagactcacacccattc

SEQ ID NO: 271769 - DNA, 25 bp, Artificial
  probe
  misc_feature (1)..(25): SEQ ID NO: 732; WAN024D9E; Start 146; Stop 170
tttcatcagactcacacccattcta

SEQ ID NO: 271770 - DNA, 25 bp, Artificial
  probe
  misc_feature (1)..(25): SEQ ID NO: 732; WAN024D9E; Start 145; Stop 169
atttcatcagactcacacccattct

SEQ ID NO: 271771 - DNA, 25 bp, Artificial
  probe
  misc_feature (1)..(25): SEQ ID NO: 732; WAN024D9E; Start 147; Stop 171
ttcatcagactcacacccattctac

SEQ ID NO: 271772 - DNA, 25 bp, Artificial
  probe
  misc_feature (1)..(25): SEQ ID NO: 732; WAN024D9E; Start 143; Stop 167
aaatttcatcagactcacacccatt

SEQ ID NO: 271773 - DNA, 25 bp, Artificial
  probe
  misc_feature (1)..(25): SEQ ID NO: 732; WAN024D9E; Start 11; Stop 35
atatccatccagaatatcgcccagt

SEQ ID NO: 271774 - DNA, 25 bp, Artificial
  probe
  misc_feature (1)..(25): SEQ ID NO: 732; WAN024D9E; Start 149; Stop 173
catcagactcacacccattctacac

SEQ ID NO: 271775 - DNA, 25 bp, Artificial
  probe
  misc_feature (1)..(25): SEQ ID NO: 732; WAN024D9E; Start 150; Stop 174
atcagactcacacccattctacact

SEQ ID NO: 271776 - DNA, 25 bp, Artificial
  probe
  misc_feature (1)..(25): SEQ ID NO: 732; WAN024D9E; Start 148; Stop 172
tcatcagactcacacccattctaca

SEQ ID NO: 271777 - DNA, 25 bp, Artificial
  probe
  misc_feature (1)..(25): SEQ ID NO: 732; WAN024D9E; Start 20; Stop 44
cagaatatcgcccagttgtcttcat

SEQ ID NO: 271778 - DNA, 25 bp, Artificial
  probe
  misc_feature (1)..(25): SEQ ID NO: 732; WAN024D9E; Start 12; Stop 36
tatccatccagaatatcgcccagtt

SEQ ID NO: 271779 - DNA, 25 bp, Artificial
  probe
  misc_feature (1)..(25): SEQ ID NO: 732; WAN024D9E; Start 86; Stop 110
aacgctctaacgaaacagttgagtt

SEQ ID NO: 271780 - DNA, 25 bp, Artificial
  probe
  misc_feature (1)..(25): SEQ ID NO: 732; WAN024D9E; Start 85; Stop 109
aaacgctctaacgaaacagttgagt

SEQ ID NO: 271781 - DNA, 25 bp, Artificial
  probe
  misc_feature (1)..(25): SEQ ID NO: 732; WAN024D9E; Start 21; Stop 45
agaatatcgcccagttgtcttcatg

SEQ ID NO: 271782 - DNA, 25 bp, Artificial
  probe
  misc_feature (1)..(25): SEQ ID NO: 732; WAN024D9E; Start 87; Stop 111
acgctctaacgaaacagttgagttc

SEQ ID NO: 271783 - DNA, 25 bp, Artificial
  probe
  misc_feature (1)..(25): SEQ ID NO: 732; WAN024D9E; Start 17; Stop 41
atccagaatatcgcccagttgtctt

SEQ ID NO: 271784 - DNA, 25 bp, Artificial
  probe
  misc_feature (1)..(25): SEQ ID NO: 732; WAN024D9E; Start 77; Stop 101
gttcaacaaaacgctctaacgaaac

SEQ ID NO: 271785 - DNA, 25 bp, Artificial
  probe
  misc_feature (1)..(25): SEQ ID NO: 732; WAN024D9E; Start 78; Stop 102
ttcaacaaaacgctctaacgaaaca

SEQ ID NO: 271786 - DNA, 25 bp, Artificial
  probe
  misc_feature (1)..(25): SEQ ID NO: 732; WAN024D9E; Start 81; Stop 105
aacaaaacgctctaacgaaacagtt

SEQ ID NO: 271787 - DNA, 25 bp, Artificial
  probe
  misc_feature (1)..(25): SEQ ID NO: 732; WAN024D9E; Start 79; Stop 103
tcaacaaaacgctctaacgaaacag

SEQ ID NO: 271788 - DNA, 25 bp, Artificial
  probe
  misc_feature (1)..(25): SEQ ID NO: 732; WAN024D9E; Start 181; Stop 205
caaaagttcactcaagcagatggac

SEQ ID NO: 271789 - DNA, 25 bp, Artificial
  probe
  misc_feature (1)..(25): SEQ ID NO: 732; WAN024D9E; Start 179; Stop 203
gtcaaaagttcactcaagcagatgg

SEQ ID NO: 271790 - DNA, 25 bp, Artificial
  probe
  misc_feature (1)..(25): SEQ ID NO: 732; WAN024D9E; Start 151; Stop 175
tcagactcacacccattctacactg

SEQ ID NO: 271791 - DNA, 25 bp, Artificial
  probe
  misc_feature (1)..(25): SEQ ID NO: 732; WAN024D9E; Start 180; Stop 204
tcaaaagttcactcaagcagatgga

SEQ ID NO: 271792 - DNA, 25 bp, Artificial
  probe
  misc_feature (1)..(25): SEQ ID NO: 732; WAN024D9E; Start 80; Stop 104
caacaaaacgctctaacgaaacagt

SEQ ID NO: 271793 - DNA, 25 bp, Artificial
  probe
  misc_feature (1)..(25): SEQ ID NO: 732; WAN024D9E; Start 112; Stop 136
gaaggcgaaacttacccattgatcc

SEQ ID NO: 271794 - DNA, 25 bp, Artificial
  probe
  misc_feature (1)..(25): SEQ ID NO: 732; WAN024D9E; Start 83; Stop 107
caaaacgctctaacgaaacagttga

SEQ ID NO: 271795 - DNA, 25 bp, Artificial
  probe
  misc_feature (1)..(25): SEQ ID NO: 732; WAN024D9E; Start 84; Stop 108
aaaacgctctaacgaaacagttgag

SEQ ID NO: 271796 - DNA, 25 bp, Artificial
  probe
  misc_feature (1)..(25): SEQ ID NO: 732; WAN024D9E; Start 178; Stop 202
cgtcaaaagttcactcaagcagatg

SEQ ID NO: 271797 - DNA, 25 bp, Artificial
  probe
  misc_feature (1)..(25): SEQ ID NO: 732; WAN024D9E; Start 117; Stop 141
cgaaacttacccattgatccgtgtg

SEQ ID NO: 271798 - DNA, 25 bp, Artificial
  probe
  misc_feature (1)..(25): SEQ ID NO: 732; WAN024D9E; Start 76; Stop 100
ggttcaacaaaacgctctaacgaaa

SEQ ID NO: 271799 - DNA, 25 bp, Artificial
  probe
  misc_feature (1)..(25): SEQ ID NO: 732; WAN024D9E; Start 13; Stop 37
atccatccagaatatcgcccagttg

SEQ ID NO: 271800 - DNA, 25 bp, Artificial
  probe
  misc_feature (1)..(25): SEQ ID NO: 732; WAN024D9E; Start 18; Stop 42
tccagaatatcgcccagttgtcttc

SEQ ID NO: 271801 - DNA, 25 bp, Artificial
  probe
  misc_feature (1)..(25): SEQ ID NO: 733; WAN024AYZ; Start 731; Stop 755
ttacctatatcaagcctccaactcg

SEQ ID NO: 271802 - DNA, 25 bp, Artificial
  probe
  misc_feature (1)..(25): SEQ ID NO: 733; WAN024AYZ; Start 736; Stop 760
tatatcaagcctccaactcgaagaa

SEQ ID NO: 271803 - DNA, 25 bp, Artificial
  probe
  misc_feature (1)..(25): SEQ ID NO: 733; WAN024AYZ; Start 730; Stop 754
tttacctatatcaagcctccaactc

SEQ ID NO: 271804 - DNA, 25 bp, Artificial
  probe
  misc_feature (1)..(25): SEQ ID NO: 733; WAN024AYZ; Start 729; Stop 753
ctttacctatatcaagcctccaact

SEQ ID NO: 271805 - DNA, 25 bp, Artificial
  probe
  misc_feature (1)..(25): SEQ ID NO: 733; WAN024AYZ; Start 728; Stop 752
tctttacctatatcaagcctccaac

SEQ ID NO: 271806 - DNA, 25 bp, Artificial
  probe
  misc_feature (1)..(25): SEQ ID NO: 733; WAN024AYZ; Start 727; Stop 751
gtctttacctatatcaagcctccaa

SEQ ID NO: 271807 - DNA, 25 bp, Artificial
  probe
  misc_feature (1)..(25): SEQ ID NO: 733; WAN024AYZ; Start 735; Stop 759
ctatatcaagcctccaactcgaaga

SEQ ID NO: 271808 - DNA, 25 bp, Artificial
  probe
  misc_feature (1)..(25): SEQ ID NO: 733; WAN024AYZ; Start 732; Stop 756
tacctatatcaagcctccaactcga

SEQ ID NO: 271809 - DNA, 25 bp, Artificial
  probe
  misc_feature (1)..(25): SEQ ID NO: 733; WAN024AYZ; Start 734; Stop 758
cctatatcaagcctccaactcgaag

SEQ ID NO: 271810 - DNA, 25 bp, Artificial
  probe
  misc_feature (1)..(25): SEQ ID NO: 733; WAN024AYZ; Start 733; Stop 757
acctatatcaagcctccaactcgaa

SEQ ID NO: 271811 - DNA, 25 bp, Artificial
  probe
  misc_feature (1)..(25): SEQ ID NO: 733; WAN024AYZ; Start 726; Stop 750
ggtctttacctatatcaagcctcca

SEQ ID NO: 271812 - DNA, 25 bp, Artificial
  probe
  misc_feature (1)..(25): SEQ ID NO: 733; WAN024AYZ; Start 723; Stop 747
aacggtctttacctatatcaagcct

SEQ ID NO: 271813 - DNA, 25 bp, Artificial
  probe
  misc_feature (1)..(25): SEQ ID NO: 733; WAN024AYZ; Start 724; Stop 748
acggtctttacctatatcaagcctc

SEQ ID NO: 271814 - DNA, 25 bp, Artificial
  probe
  misc_feature (1)..(25): SEQ ID NO: 733; WAN024AYZ; Start 737; Stop 761
atatcaagcctccaactcgaagaaa

SEQ ID NO: 271815 - DNA, 25 bp, Artificial
  probe
  misc_feature (1)..(25): SEQ ID NO: 733; WAN024AYZ; Start 654; Stop 678
ttactatcatgtcctcgaacaaatt

SEQ ID NO: 271816 - DNA, 25 bp, Artificial
  probe
  misc_feature (1)..(25): SEQ ID NO: 733; WAN024AYZ; Start 725; Stop 749
cggtctttacctatatcaagcctcc

SEQ ID NO: 271817 - DNA, 25 bp, Artificial
  probe
  misc_feature (1)..(25): SEQ ID NO: 733; WAN024AYZ; Start 693; Stop 717
cgttccccttcaaattaaaacagat

SEQ ID NO: 271818 - DNA, 25 bp, Artificial
  probe
  misc_feature (1)..(25): SEQ ID NO: 733; WAN024AYZ; Start 655; Stop 679
tactatcatgtcctcgaacaaattt

SEQ ID NO: 271819 - DNA, 25 bp, Artificial
  probe
  misc_feature (1)..(25): SEQ ID NO: 733; WAN024AYZ; Start 116; Stop 140
gacaaatcaatcgtctgctactagc

SEQ ID NO: 271820 - DNA, 25 bp, Artificial
  probe
  misc_feature (1)..(25): SEQ ID NO: 733; WAN024AYZ; Start 692; Stop 716
gcgttccccttcaaattaaaacaga

SEQ ID NO: 271821 - DNA, 25 bp, Artificial
  probe
  misc_feature (1)..(25): SEQ ID NO: 733; WAN024AYZ; Start 114; Stop 138
aagacaaatcaatcgtctgctacta

SEQ ID NO: 271822 - DNA, 25 bp, Artificial
  probe
  misc_feature (1)..(25): SEQ ID NO: 733; WAN024AYZ; Start 108; Stop 132
ttctgaaagacaaatcaatcgtctg

SEQ ID NO: 271823 - DNA, 25 bp, Artificial
  probe
  misc_feature (1)..(25): SEQ ID NO: 733; WAN024AYZ; Start 115; Stop 139
agacaaatcaatcgtctgctactag

SEQ ID NO: 271824 - DNA, 25 bp, Artificial
  probe
  misc_feature (1)..(25): SEQ ID NO: 733; WAN024AYZ; Start 112; Stop 136
gaaagacaaatcaatcgtctgctac

SEQ ID NO: 271825 - DNA, 25 bp, Artificial
  probe
  misc_feature (1)..(25): SEQ ID NO: 733; WAN024AYZ; Start 694; Stop 718
gttccccttcaaattaaaacagata

SEQ ID NO: 271826 - DNA, 25 bp, Artificial
  probe
  misc_feature (1)..(25): SEQ ID NO: 733; WAN024AYZ; Start 113; Stop 137
aaagacaaatcaatcgtctgctact

SEQ ID NO: 271827 - DNA, 25 bp, Artificial
  probe
  misc_feature (1)..(25): SEQ ID NO: 733; WAN024AYZ; Start 111; Stop 135
tgaaagacaaatcaatcgtctgcta

SEQ ID NO: 271828 - DNA, 25 bp, Artificial
  probe
  misc_feature (1)..(25): SEQ ID NO: 733; WAN024AYZ; Start 107; Stop 131
tttctgaaagacaaatcaatcgtct

SEQ ID NO: 271829 - DNA, 25 bp, Artificial
  probe
  misc_feature (1)..(25): SEQ ID NO: 733; WAN024AYZ; Start 697; Stop 721
ccccttcaaattaaaacagataaga

SEQ ID NO: 271830 - DNA, 25 bp, Artificial
  probe
  misc_feature (1)..(25): SEQ ID NO: 733; WAN024AYZ; Start 696; Stop 720
tccccttcaaattaaaacagataag

SEQ ID NO: 271831 - DNA, 25 bp, Artificial
  probe
  misc_feature (1)..(25): SEQ ID NO: 733; WAN024AYZ; Start 667; Stop 691
ctcgaacaaattttaggcaatcacg

SEQ ID NO: 271832 - DNA, 25 bp, Artificial
  probe
  misc_feature (1)..(25): SEQ ID NO: 733; WAN024AYZ; Start 117; Stop 141
acaaatcaatcgtctgctactagcc

SEQ ID NO: 271833 - DNA, 25 bp, Artificial
  probe
  misc_feature (1)..(25): SEQ ID NO: 733; WAN024AYZ; Start 691; Stop 715
ggcgttccccttcaaattaaaacag

SEQ ID NO: 271834 - DNA, 25 bp, Artificial
  probe
  misc_feature (1)..(25): SEQ ID NO: 734; WAN024CJD; Start 196; Stop 220
ttactctacggcgattacaatactt

SEQ ID NO: 271835 - DNA, 25 bp, Artificial
  probe
  misc_feature (1)..(25): SEQ ID NO: 734; WAN024CJD; Start 195; Stop 219
gttactctacggcgattacaatact

SEQ ID NO: 271836 - DNA, 25 bp, Artificial
  probe
  misc_feature (1)..(25): SEQ ID NO: 734; WAN024CJD; Start 198; Stop 222
actctacggcgattacaatacttat

SEQ ID NO: 271837 - DNA, 25 bp, Artificial
  probe
  misc_feature (1)..(25): SEQ ID NO: 734; WAN024CJD; Start 203; Stop 227
acggcgattacaatacttatctaca

SEQ ID NO: 271838 - DNA, 25 bp, Artificial
  probe
  misc_feature (1)..(25): SEQ ID NO: 734; WAN024CJD; Start 194; Stop 218
agttactctacggcgattacaatac

SEQ ID NO: 271839 - DNA, 25 bp, Artificial
  probe
  misc_feature (1)..(25): SEQ ID NO: 734; WAN024CJD; Start 204; Stop 228
cggcgattacaatacttatctacac

SEQ ID NO: 271840 - DNA, 25 bp, Artificial
  probe
  misc_feature (1)..(25): SEQ ID NO: 734; WAN024CJD; Start 618; Stop 642
tggcaatgatattcctaattcgtct

SEQ ID NO: 271841 - DNA, 25 bp, Artificial
  probe
  misc_feature (1)..(25): SEQ ID NO: 734; WAN024CJD; Start 200; Stop 224
tctacggcgattacaatacttatct

SEQ ID NO: 271842 - DNA, 25 bp, Artificial
  probe
  misc_feature (1)..(25): SEQ ID NO: 734; WAN024CJD; Start 617; Stop 641
ttggcaatgatattcctaattcgtc

SEQ ID NO: 271843 - DNA, 25 bp, Artificial
  probe
  misc_feature (1)..(25): SEQ ID NO: 734; WAN024CJD; Start 197; Stop 221
tactctacggcgattacaatactta

SEQ ID NO: 271844 - DNA, 25 bp, Artificial
  probe
  misc_feature (1)..(25): SEQ ID NO: 734; WAN024CJD; Start 199; Stop 223
ctctacggcgattacaatacttatc

SEQ ID NO: 271845 - DNA, 25 bp, Artificial
  probe
  misc_feature (1)..(25): SEQ ID NO: 734; WAN024CJD; Start 619; Stop 643
ggcaatgatattcctaattcgtctt

SEQ ID NO: 271846 - DNA, 25 bp, Artificial
  probe
  misc_feature (1)..(25): SEQ ID NO: 734; WAN024CJD; Start 651; Stop 675
aattgactatatcgcaccttcagaa

SEQ ID NO: 271847 - DNA, 25 bp, Artificial
  probe
  misc_feature (1)..(25): SEQ ID NO: 734; WAN024CJD; Start 205; Stop 229
ggcgattacaatacttatctacact

SEQ ID NO: 271848 - DNA, 25 bp, Artificial
  probe
  misc_feature (1)..(25): SEQ ID NO: 734; WAN024CJD; Start 202; Stop 226
tacggcgattacaatacttatctac

SEQ ID NO: 271849 - DNA, 25 bp, Artificial
  probe
  misc_feature (1)..(25): SEQ ID NO: 734; WAN024CJD; Start 201; Stop 225
ctacggcgattacaatacttatcta

SEQ ID NO: 271850 - DNA, 25 bp, Artificial
  probe
  misc_feature (1)..(25): SEQ ID NO: 734; WAN024CJD; Start 193; Stop 217
gagttactctacggcgattacaata

SEQ ID NO: 271851 - DNA, 25 bp, Artificial
  probe
  misc_feature (1)..(25): SEQ ID NO: 734; WAN024CJD; Start 524; Stop 548
aatatctatacactgccttactagc

SEQ ID NO: 271852 - DNA, 25 bp, Artificial
  probe
  misc_feature (1)..(25): SEQ ID NO: 734; WAN024CJD; Start 655; Stop 679
gactatatcgcaccttcagaaattg

SEQ ID NO: 271853 - DNA, 25 bp, Artificial
  probe
  misc_feature (1)..(25): SEQ ID NO: 734; WAN024CJD; Start 656; Stop 680
actatatcgcaccttcagaaattgt

SEQ ID NO: 271854 - DNA, 25 bp, Artificial
  probe
  misc_feature (1)..(25): SEQ ID NO: 734; WAN024CJD; Start 657; Stop 681
ctatatcgcaccttcagaaattgtt

SEQ ID NO: 271855 - DNA, 25 bp, Artificial
  probe
  misc_feature (1)..(25): SEQ ID NO: 734; WAN024CJD; Start 616; Stop 640
tttggcaatgatattcctaattcgt

SEQ ID NO: 271856 - DNA, 25 bp, Artificial
  probe
  misc_feature (1)..(25): SEQ ID NO: 734; WAN024CJD; Start 658; Stop 682
tatatcgcaccttcagaaattgttt

SEQ ID NO: 271857 - DNA, 25 bp, Artificial
  probe
  misc_feature (1)..(25): SEQ ID NO: 734; WAN024CJD; Start 525; Stop 549
atatctatacactgccttactagct

SEQ ID NO: 271858 - DNA, 25 bp, Artificial
  probe
  misc_feature (1)..(25): SEQ ID NO: 734; WAN024CJD; Start 206; Stop 230
gcgattacaatacttatctacactt

SEQ ID NO: 271859 - DNA, 25 bp, Artificial
  probe
  misc_feature (1)..(25): SEQ ID NO: 734; WAN024CJD; Start 653; Stop 677
ttgactatatcgcaccttcagaaat

SEQ ID NO: 271860 - DNA, 25 bp, Artificial
  probe
  misc_feature (1)..(25): SEQ ID NO: 734; WAN024CJD; Start 652; Stop 676
attgactatatcgcaccttcagaaa

SEQ ID NO: 271861 - DNA, 25 bp, Artificial
  probe
  misc_feature (1)..(25): SEQ ID NO: 734; WAN024CJD; Start 615; Stop 639
ctttggcaatgatattcctaattcg

SEQ ID NO: 271862 - DNA, 25 bp, Artificial
  probe
  misc_feature (1)..(25): SEQ ID NO: 734; WAN024CJD; Start 654; Stop 678
tgactatatcgcaccttcagaaatt

SEQ ID NO: 271863 - DNA, 25 bp, Artificial
  probe
  misc_feature (1)..(25): SEQ ID NO: 734; WAN024CJD; Start 650; Stop 674
aaattgactatatcgcaccttcaga

SEQ ID NO: 271864 - DNA, 25 bp, Artificial
  probe
  misc_feature (1)..(25): SEQ ID NO: 734; WAN024CJD; Start 611; Stop 635
acttctttggcaatgatattcctaa

SEQ ID NO: 271865 - DNA, 25 bp, Artificial
  probe
  misc_feature (1)..(25): SEQ ID NO: 734; WAN024CJD; Start 610; Stop 634
aacttctttggcaatgatattccta

SEQ ID NO: 271866 - DNA, 25 bp, Artificial
  probe
  misc_feature (1)..(25): SEQ ID NO: 734; WAN024CJD; Start 609; Stop 633
taacttctttggcaatgatattcct

SEQ ID NO: 271867 - DNA, 25 bp, Artificial
  probe
  misc_feature (1)..(25): SEQ ID NO: 735; WAN024FYL; Start 959; Stop 983
ttgctattatgaccttccgtatgtt

SEQ ID NO: 271868 - DNA, 25 bp, Artificial
  probe
  misc_feature (1)..(25): SEQ ID NO: 735; WAN024FYL; Start 958; Stop 982
attgctattatgaccttccgtatgt

SEQ ID NO: 271869 - DNA, 25 bp, Artificial
  probe
  misc_feature (1)..(25): SEQ ID NO: 735; WAN024FYL; Start 961; Stop 985
gctattatgaccttccgtatgttct

SEQ ID NO: 271870 - DNA, 25 bp, Artificial
  probe
  misc_feature (1)..(25): SEQ ID NO: 735; WAN024FYL; Start 951; Stop 975
ctatgcgattgctattatgaccttc

SEQ ID NO: 271871 - DNA, 25 bp, Artificial
  probe
  misc_feature (1)..(25): SEQ ID NO: 735; WAN024FYL; Start 610; Stop 634
ccagttatcttgttattcttgccac

SEQ ID NO: 271872 - DNA, 25 bp, Artificial
  probe
  misc_feature (1)..(25): SEQ ID NO: 735; WAN024FYL; Start 1245; Stop 1269
atctgctgttatgtatggtctcttg

SEQ ID NO: 271873 - DNA, 25 bp, Artificial
  probe
  misc_feature (1)..(25): SEQ ID NO: 735; WAN024FYL; Start 609; Stop 633
accagttatcttgttattcttgcca

SEQ ID NO: 271874 - DNA, 25 bp, Artificial
  probe
  misc_feature (1)..(25): SEQ ID NO: 735; WAN024FYL; Start 960; Stop 984
tgctattatgaccttccgtatgttc

SEQ ID NO: 271875 - DNA, 25 bp, Artificial
  probe
  misc_feature (1)..(25): SEQ ID NO: 735; WAN024FYL; Start 957; Stop 981
gattgctattatgaccttccgtatg

SEQ ID NO: 271876 - DNA, 25 bp, Artificial
  probe
  misc_feature (1)..(25): SEQ ID NO: 735; WAN024FYL; Start 956; Stop 980
cgattgctattatgaccttccgtat

SEQ ID NO: 271877 - DNA, 25 bp, Artificial
  probe
  misc_feature (1)..(25): SEQ ID NO: 735; WAN024FYL; Start 1206; Stop 1230
agttcctattatcggttcaatgaca

SEQ ID NO: 271878 - DNA, 25 bp, Artificial
  probe
  misc_feature (1)..(25): SEQ ID NO: 735; WAN024FYL; Start 952; Stop 976
tatgcgattgctattatgaccttcc

SEQ ID NO: 271879 - DNA, 25 bp, Artificial
  probe
  misc_feature (1)..(25): SEQ ID NO: 735; WAN024FYL; Start 1244; Stop 1268
catctgctgttatgtatggtctctt

SEQ ID NO: 271880 - DNA, 25 bp, Artificial
  probe
  misc_feature (1)..(25): SEQ ID NO: 735; WAN024FYL; Start 1207; Stop 1231
gttcctattatcggttcaatgacaa

SEQ ID NO: 271881 - DNA, 25 bp, Artificial
  probe
  misc_feature (1)..(25): SEQ ID NO: 735; WAN024FYL; Start 608; Stop 632
aaccagttatcttgttattcttgcc

SEQ ID NO: 271882 - DNA, 25 bp, Artificial
  probe
  misc_feature (1)..(25): SEQ ID NO: 735; WAN024FYL; Start 1253; Stop 1277
ttatgtatggtctcttgctaggttc

SEQ ID NO: 271883 - DNA, 25 bp, Artificial
  probe
  misc_feature (1)..(25): SEQ ID NO: 735; WAN024FYL; Start 1252; Stop 1276
gttatgtatggtctcttgctaggtt

SEQ ID NO: 271884 - DNA, 25 bp, Artificial
  probe
  misc_feature (1)..(25): SEQ ID NO: 735; WAN024FYL; Start 1205; Stop 1229
aagttcctattatcggttcaatgac

SEQ ID NO: 271885 - DNA, 25 bp, Artificial
  probe
  misc_feature (1)..(25): SEQ ID NO: 735; WAN024FYL; Start 1250; Stop 1274
ctgttatgtatggtctcttgctagg

SEQ ID NO: 271886 - DNA, 25 bp, Artificial
  probe
  misc_feature (1)..(25): SEQ ID NO: 735; WAN024FYL; Start 950; Stop 974
gctatgcgattgctattatgacctt

SEQ ID NO: 271887 - DNA, 25 bp, Artificial
  probe
  misc_feature (1)..(25): SEQ ID NO: 735; WAN024FYL; Start 1254; Stop 1278
tatgtatggtctcttgctaggttca

SEQ ID NO: 271888 - DNA, 25 bp, Artificial
  probe
  misc_feature (1)..(25): SEQ ID NO: 735; WAN024FYL; Start 1248; Stop 1272
tgctgttatgtatggtctcttgcta

SEQ ID NO: 271889 - DNA, 25 bp, Artificial
  probe
  misc_feature (1)..(25): SEQ ID NO: 735; WAN024FYL; Start 1203; Stop 1227
agaagttcctattatcggttcaatg

SEQ ID NO: 271890 - DNA, 25 bp, Artificial
  probe
  misc_feature (1)..(25): SEQ ID NO: 735; WAN024FYL; Start 1251; Stop 1275
tgttatgtatggtctcttgctaggt

SEQ ID NO: 271891 - DNA, 25 bp, Artificial
  probe
  misc_feature (1)..(25): SEQ ID NO: 735; WAN024FYL; Start 1249; Stop 1273
gctgttatgtatggtctcttgctag

SEQ ID NO: 271892 - DNA, 25 bp, Artificial
  probe
  misc_feature (1)..(25): SEQ ID NO: 735; WAN024FYL; Start 1204; Stop 1228
gaagttcctattatcggttcaatga

SEQ ID NO: 271893 - DNA, 25 bp, Artificial
  probe
  misc_feature (1)..(25): SEQ ID NO: 735; WAN024FYL; Start 962; Stop 986
ctattatgaccttccgtatgttctt

SEQ ID NO: 271894 - DNA, 25 bp, Artificial
  probe
  misc_feature (1)..(25): SEQ ID NO: 735; WAN024FYL; Start 611; Stop 635
cagttatcttgttattcttgccaca

SEQ ID NO: 271895 - DNA, 25 bp, Artificial
  probe
  misc_feature (1)..(25): SEQ ID NO: 735; WAN024FYL; Start 613; Stop 637
gttatcttgttattcttgccacaga

SEQ ID NO: 271896 - DNA, 25 bp, Artificial
  probe
  misc_feature (1)..(25): SEQ ID NO: 735; WAN024FYL; Start 612; Stop 636
agttatcttgttattcttgccacag

SEQ ID NO: 271897 - DNA, 25 bp, Artificial
  probe
  misc_feature (1)..(25): SEQ ID NO: 735; WAN024FYL; Start 1255; Stop 1279
atgtatggtctcttgctaggttcaa

SEQ ID NO: 271898 - DNA, 25 bp, Artificial
  probe
  misc_feature (1)..(25): SEQ ID NO: 735; WAN024FYL; Start 1202; Stop 1226
aagaagttcctattatcggttcaat

SEQ ID NO: 271899 - DNA, 25 bp, Artificial
  probe
  misc_feature (1)..(25): SEQ ID NO: 735; WAN024FYL; Start 1326; Stop 1350
ggtgctaggcggaattatctatctt

SEQ ID NO: 271900 - DNA, 25 bp, Artificial
  probe
  misc_feature (1)..(25): SEQ ID NO: 736; WAN024FPS; Start 864; Stop 888
aagtatcctatctgaccgtgttaca

SEQ ID NO: 271901 - DNA, 25 bp, Artificial
  probe
  misc_feature (1)..(25): SEQ ID NO: 736; WAN024FPS; Start 470; Stop 494
agattatccataacgctagagatgt

SEQ ID NO: 271902 - DNA, 25 bp, Artificial
  probe
  misc_feature (1)..(25): SEQ ID NO: 736; WAN024FPS; Start 553; Stop 577
tctgatgagactattgctctaggtc

SEQ ID NO: 271903 - DNA, 25 bp, Artificial
  probe
  misc_feature (1)..(25): SEQ ID NO: 736; WAN024FPS; Start 469; Stop 493
aagattatccataacgctagagatg

SEQ ID NO: 271904 - DNA, 25 bp, Artificial
  probe
  misc_feature (1)..(25): SEQ ID NO: 736; WAN024FPS; Start 554; Stop 578
ctgatgagactattgctctaggtca

SEQ ID NO: 271905 - DNA, 25 bp, Artificial
  probe
  misc_feature (1)..(25): SEQ ID NO: 736; WAN024FPS; Start 559; Stop 583
gagactattgctctaggtcatgttg

SEQ ID NO: 271906 - DNA, 25 bp, Artificial
  probe
  misc_feature (1)..(25): SEQ ID NO: 736; WAN024FPS; Start 471; Stop 495
gattatccataacgctagagatgta

SEQ ID NO: 271907 - DNA, 25 bp, Artificial
  probe
  misc_feature (1)..(25): SEQ ID NO: 736; WAN024FPS; Start 558; Stop 582
tgagactattgctctaggtcatgtt

SEQ ID NO: 271908 - DNA, 25 bp, Artificial
  probe
  misc_feature (1)..(25): SEQ ID NO: 736; WAN024FPS; Start 976; Stop 1000
tcagatagagaaagagtgtcattgc

SEQ ID NO: 271909 - DNA, 25 bp, Artificial
  probe
  misc_feature (1)..(25): SEQ ID NO: 736; WAN024FPS; Start 863; Stop 887
aaagtatcctatctgaccgtgttac

SEQ ID NO: 271910 - DNA, 25 bp, Artificial
  probe
  misc_feature (1)..(25): SEQ ID NO: 736; WAN024FPS; Start 805; Stop 829
ccaagtttatatgaagggttaccac

SEQ ID NO: 271911 - DNA, 25 bp, Artificial
  probe
  misc_feature (1)..(25): SEQ ID NO: 736; WAN024FPS; Start 867; Stop 891
tatcctatctgaccgtgttacacaa

SEQ ID NO: 271912 - DNA, 25 bp, Artificial
  probe
  misc_feature (1)..(25): SEQ ID NO: 736; WAN024FPS; Start 804; Stop 828
tccaagtttatatgaagggttacca

SEQ ID NO: 271913 - DNA, 25 bp, Artificial
  probe
  misc_feature (1)..(25): SEQ ID NO: 736; WAN024FPS; Start 561; Stop 585
gactattgctctaggtcatgttgga

SEQ ID NO: 271914 - DNA, 25 bp, Artificial
  probe
  misc_feature (1)..(25): SEQ ID NO: 736; WAN024FPS; Start 560; Stop 584
agactattgctctaggtcatgttgg

SEQ ID NO: 271915 - DNA, 25 bp, Artificial
  probe
  misc_feature (1)..(25): SEQ ID NO: 736; WAN024FPS; Start 472; Stop 496
attatccataacgctagagatgtaa

SEQ ID NO: 271916 - DNA, 25 bp, Artificial
  probe
  misc_feature (1)..(25): SEQ ID NO: 736; WAN024FPS; Start 865; Stop 889
agtatcctatctgaccgtgttacac

SEQ ID NO: 271917 - DNA, 25 bp, Artificial
  probe
  misc_feature (1)..(25): SEQ ID NO: 736; WAN024FPS; Start 562; Stop 586
actattgctctaggtcatgttggac

SEQ ID NO: 271918 - DNA, 25 bp, Artificial
  probe
  misc_feature (1)..(25): SEQ ID NO: 736; WAN024FPS; Start 973; Stop 997
acttcagatagagaaagagtgtcat

SEQ ID NO: 271919 - DNA, 25 bp, Artificial
  probe
  misc_feature (1)..(25): SEQ ID NO: 736; WAN024FPS; Start 866; Stop 890
gtatcctatctgaccgtgttacaca

SEQ ID NO: 271920 - DNA, 25 bp, Artificial
  probe
  misc_feature (1)..(25): SEQ ID NO: 736; WAN024FPS; Start 975; Stop 999
ttcagatagagaaagagtgtcattg

SEQ ID NO: 271921 - DNA, 25 bp, Artificial
  probe
  misc_feature (1)..(25): SEQ ID NO: 736; WAN024FPS; Start 555; Stop 579
tgatgagactattgctctaggtcat

SEQ ID NO: 271922 - DNA, 25 bp, Artificial
  probe
  misc_feature (1)..(25): SEQ ID NO: 736; WAN024FPS; Start 776; Stop 800
ttgtgtcatcaatggatataatgtt

SEQ ID NO: 271923 - DNA, 25 bp, Artificial
  probe
  misc_feature (1)..(25): SEQ ID NO: 736; WAN024FPS; Start 803; Stop 827
ttccaagtttatatgaagggttacc

SEQ ID NO: 271924 - DNA, 25 bp, Artificial
  probe
  misc_feature (1)..(25): SEQ ID NO: 736; WAN024FPS; Start 974; Stop 998
cttcagatagagaaagagtgtcatt

SEQ ID NO: 271925 - DNA, 25 bp, Artificial
  probe
  misc_feature (1)..(25): SEQ ID NO: 736; WAN024FPS; Start 556; Stop 580
gatgagactattgctctaggtcatg

SEQ ID NO: 271926 - DNA, 25 bp, Artificial
  probe
  misc_feature (1)..(25): SEQ ID NO: 736; WAN024FPS; Start 467; Stop 491
ataagattatccataacgctagaga

SEQ ID NO: 271927 - DNA, 25 bp, Artificial
  probe
  misc_feature (1)..(25): SEQ ID NO: 736; WAN024FPS; Start 972; Stop 996
tacttcagatagagaaagagtgtca

SEQ ID NO: 271928 - DNA, 25 bp, Artificial
  probe
  misc_feature (1)..(25): SEQ ID NO: 736; WAN024FPS; Start 871; Stop 895
ctatctgaccgtgttacacaagagt

SEQ ID NO: 271929 - DNA, 25 bp, Artificial
  probe
  misc_feature (1)..(25): SEQ ID NO: 736; WAN024FPS; Start 468; Stop 492
taagattatccataacgctagagat

SEQ ID NO: 271930 - DNA, 25 bp, Artificial
  probe
  misc_feature (1)..(25): SEQ ID NO: 736; WAN024FPS; Start 557; Stop 581
atgagactattgctctaggtcatgt

SEQ ID NO: 271931 - DNA, 25 bp, Artificial
  probe
  misc_feature (1)..(25): SEQ ID NO: 736; WAN024FPS; Start 868; Stop 892
atcctatctgaccgtgttacacaag

SEQ ID NO: 271932 - DNA, 25 bp, Artificial
  probe
  misc_feature (1)..(25): SEQ ID NO: 736; WAN024FPS; Start 806; Stop 830
caagtttatatgaagggttaccact

SEQ ID NO: 271933 - DNA, 25 bp, Artificial
  probe
  misc_feature (1)..(25): SEQ ID NO: 737; WAN024CKK; Start 779; Stop 803
ttggagatggtacggaattgttaag

SEQ ID NO: 271934 - DNA, 25 bp, Artificial
  probe
  misc_feature (1)..(25): SEQ ID NO: 737; WAN024CKK; Start 778; Stop 802
gttggagatggtacggaattgttaa

SEQ ID NO: 271935 - DNA, 25 bp, Artificial
  probe
  misc_feature (1)..(25): SEQ ID NO: 737; WAN024CKK; Start 167; Stop 191
gtgagattatagaaggtgttacgat

SEQ ID NO: 271936 - DNA, 25 bp, Artificial
  probe
  misc_feature (1)..(25): SEQ ID NO: 737; WAN024CKK; Start 782; Stop 806
gagatggtacggaattgttaagcat

SEQ ID NO: 271937 - DNA, 25 bp, Artificial
  probe
  misc_feature (1)..(25): SEQ ID NO: 737; WAN024CKK; Start 21; Stop 45
ccaacattataagccagaaccattc

SEQ ID NO: 271938 - DNA, 25 bp, Artificial
  probe
  misc_feature (1)..(25): SEQ ID NO: 737; WAN024CKK; Start 22; Stop 46
caacattataagccagaaccattca

SEQ ID NO: 271939 - DNA, 25 bp, Artificial
  probe
  misc_feature (1)..(25): SEQ ID NO: 737; WAN024CKK; Start 785; Stop 809
atggtacggaattgttaagcatgaa

SEQ ID NO: 271940 - DNA, 25 bp, Artificial
  probe
  misc_feature (1)..(25): SEQ ID NO: 737; WAN024CKK; Start 23; Stop 47
aacattataagccagaaccattcag

SEQ ID NO: 271941 - DNA, 25 bp, Artificial
  probe
  misc_feature (1)..(25): SEQ ID NO: 737; WAN024CKK; Start 24; Stop 48
acattataagccagaaccattcagg

SEQ ID NO: 271942 - DNA, 25 bp, Artificial
  probe
  misc_feature (1)..(25): SEQ ID NO: 737; WAN024CKK; Start 784; Stop 808
gatggtacggaattgttaagcatga

SEQ ID NO: 271943 - DNA, 25 bp, Artificial
  probe
  misc_feature (1)..(25): SEQ ID NO: 737; WAN024CKK; Start 783; Stop 807
agatggtacggaattgttaagcatg

SEQ ID NO: 271944 - DNA, 25 bp, Artificial
  probe
  misc_feature (1)..(25): SEQ ID NO: 737; WAN024CKK; Start 777; Stop 801
tgttggagatggtacggaattgtta

SEQ ID NO: 271945 - DNA, 25 bp, Artificial
  probe
  misc_feature (1)..(25): SEQ ID NO: 737; WAN024CKK; Start 20; Stop 44
gccaacattataagccagaaccatt

SEQ ID NO: 271946 - DNA, 25 bp, Artificial
  probe
  misc_feature (1)..(25): SEQ ID NO: 737; WAN024CKK; Start 1118; Stop 1142
gacaaagagagttaggaaagaaagc

SEQ ID NO: 271947 - DNA, 25 bp, Artificial
  probe
  misc_feature (1)..(25): SEQ ID NO: 737; WAN024CKK; Start 162; Stop 186
aagacgtgagattatagaaggtgtt

SEQ ID NO: 271948 - DNA, 25 bp, Artificial
  probe
  misc_feature (1)..(25): SEQ ID NO: 737; WAN024CKK; Start 724; Stop 748
gccagtttgatagagaagaatacca

SEQ ID NO: 271949 - DNA, 25 bp, Artificial
  probe
  misc_feature (1)..(25): SEQ ID NO: 737; WAN024CKK; Start 40; Stop 64
ccattcaggttgtcagatatttgtg

SEQ ID NO: 271950 - DNA, 25 bp, Artificial
  probe
  misc_feature (1)..(25): SEQ ID NO: 737; WAN024CKK; Start 1115; Stop 1139
agagacaaagagagttaggaaagaa

SEQ ID NO: 271951 - DNA, 25 bp, Artificial
  probe
  misc_feature (1)..(25): SEQ ID NO: 737; WAN024CKK; Start 1114; Stop 1138
aagagacaaagagagttaggaaaga

SEQ ID NO: 271952 - DNA, 25 bp, Artificial
  probe
  misc_feature (1)..(25): SEQ ID NO: 737; WAN024CKK; Start 164; Stop 188
gacgtgagattatagaaggtgttac

SEQ ID NO: 271953 - DNA, 25 bp, Artificial
  probe
  misc_feature (1)..(25): SEQ ID NO: 737; WAN024CKK; Start 163; Stop 187
agacgtgagattatagaaggtgtta

SEQ ID NO: 271954 - DNA, 25 bp, Artificial
  probe
  misc_feature (1)..(25): SEQ ID NO: 737; WAN024CKK; Start 1026; Stop 1050
agaagaagcaaattgtggatatgtt

SEQ ID NO: 271955 - DNA, 25 bp, Artificial
  probe
  misc_feature (1)..(25): SEQ ID NO: 737; WAN024CKK; Start 776; Stop 800
ttgttggagatggtacggaattgtt

SEQ ID NO: 271956 - DNA, 25 bp, Artificial
  probe
  misc_feature (1)..(25): SEQ ID NO: 737; WAN024CKK; Start 562; Stop 586
gtgaagcaatttgacatatccgaac

SEQ ID NO: 271957 - DNA, 25 bp, Artificial
  probe
  misc_feature (1)..(25): SEQ ID NO: 737; WAN024CKK; Start 564; Stop 588
gaagcaatttgacatatccgaacaa

SEQ ID NO: 271958 - DNA, 25 bp, Artificial
  probe
  misc_feature (1)..(25): SEQ ID NO: 737; WAN024CKK; Start 44; Stop 68
tcaggttgtcagatatttgtgaaga

SEQ ID NO: 271959 - DNA, 25 bp, Artificial
  probe
  misc_feature (1)..(25): SEQ ID NO: 737; WAN024CKK; Start 25; Stop 49
cattataagccagaaccattcaggt

SEQ ID NO: 271960 - DNA, 25 bp, Artificial
  probe
  misc_feature (1)..(25): SEQ ID NO: 737; WAN024CKK; Start 1029; Stop 1053
agaagcaaattgtggatatgttagt

SEQ ID NO: 271961 - DNA, 25 bp, Artificial
  probe
  misc_feature (1)..(25): SEQ ID NO: 737; WAN024CKK; Start 563; Stop 587
tgaagcaatttgacatatccgaaca

SEQ ID NO: 271962 - DNA, 25 bp, Artificial
  probe
  misc_feature (1)..(25): SEQ ID NO: 737; WAN024CKK; Start 1117; Stop 1141
agacaaagagagttaggaaagaaag

SEQ ID NO: 271963 - DNA, 25 bp, Artificial
  probe
  misc_feature (1)..(25): SEQ ID NO: 737; WAN024CKK; Start 1116; Stop 1140
gagacaaagagagttaggaaagaaa

SEQ ID NO: 271964 - DNA, 25 bp, Artificial
  probe
  misc_feature (1)..(25): SEQ ID NO: 737; WAN024CKK; Start 781; Stop 805
ggagatggtacggaattgttaagca

SEQ ID NO: 271965 - DNA, 25 bp, Artificial
  probe
  misc_feature (1)..(25): SEQ ID NO: 737; WAN024CKK; Start 780; Stop 804
tggagatggtacggaattgttaagc

SEQ ID NO: 271966 - DNA, 25 bp, Artificial
  probe
  misc_feature (1)..(25): SEQ ID NO: 738; WAN024CYI; Start 762; Stop 786
tagtcaaggtatcaatgctgtcatc

SEQ ID NO: 271967 - DNA, 25 bp, Artificial
  probe
  misc_feature (1)..(25): SEQ ID NO: 738; WAN024CYI; Start 761; Stop 785
ctagtcaaggtatcaatgctgtcat

SEQ ID NO: 271968 - DNA, 25 bp, Artificial
  probe
  misc_feature (1)..(25): SEQ ID NO: 738; WAN024CYI; Start 758; Stop 782
atgctagtcaaggtatcaatgctgt

SEQ ID NO: 271969 - DNA, 25 bp, Artificial
  probe
  misc_feature (1)..(25): SEQ ID NO: 738; WAN024CYI; Start 881; Stop 905
ttggtgatatagcagatgaaccttc

SEQ ID NO: 271970 - DNA, 25 bp, Artificial
  probe
  misc_feature (1)..(25): SEQ ID NO: 738; WAN024CYI; Start 763; Stop 787
agtcaaggtatcaatgctgtcatcc

SEQ ID NO: 271971 - DNA, 25 bp, Artificial
  probe
  misc_feature (1)..(25): SEQ ID NO: 738; WAN024CYI; Start 882; Stop 906
tggtgatatagcagatgaaccttct

SEQ ID NO: 271972 - DNA, 25 bp, Artificial
  probe
  misc_feature (1)..(25): SEQ ID NO: 738; WAN024CYI; Start 111; Stop 135
acaagcaatccaagatgtcctagaa

SEQ ID NO: 271973 - DNA, 25 bp, Artificial
  probe
  misc_feature (1)..(25): SEQ ID NO: 738; WAN024CYI; Start 760; Stop 784
gctagtcaaggtatcaatgctgtca

SEQ ID NO: 271974 - DNA, 25 bp, Artificial
  probe
  misc_feature (1)..(25): SEQ ID NO: 738; WAN024CYI; Start 759; Stop 783
tgctagtcaaggtatcaatgctgtc

SEQ ID NO: 271975 - DNA, 25 bp, Artificial
  probe
  misc_feature (1)..(25): SEQ ID NO: 738; WAN024CYI; Start 237; Stop 261
cattctctgtcatttggatgttgtt

SEQ ID NO: 271976 - DNA, 25 bp, Artificial
  probe
  misc_feature (1)..(25): SEQ ID NO: 738; WAN024CYI; Start 238; Stop 262
attctctgtcatttggatgttgttc

SEQ ID NO: 271977 - DNA, 25 bp, Artificial
  probe
  misc_feature (1)..(25): SEQ ID NO: 738; WAN024CYI; Start 903; Stop 927
ttctggtcacctatcctttaatgtc

SEQ ID NO: 271978 - DNA, 25 bp, Artificial
  probe
  misc_feature (1)..(25): SEQ ID NO: 738; WAN024CYI; Start 902; Stop 926
cttctggtcacctatcctttaatgt

SEQ ID NO: 271979 - DNA, 25 bp, Artificial
  probe
  misc_feature (1)..(25): SEQ ID NO: 738; WAN024CYI; Start 901; Stop 925
ccttctggtcacctatcctttaatg

SEQ ID NO: 271980 - DNA, 25 bp, Artificial
  probe
  misc_feature (1)..(25): SEQ ID NO: 738; WAN024CYI; Start 53; Stop 77
aaaccttgatttcctatccttcagt

SEQ ID NO: 271981 - DNA, 25 bp, Artificial
  probe
  misc_feature (1)..(25): SEQ ID NO: 738; WAN024CYI; Start 164; Stop 188
gtttcactacctatcttgaccctaa

SEQ ID NO: 271982 - DNA, 25 bp, Artificial
  probe
  misc_feature (1)..(25): SEQ ID NO: 738; WAN024CYI; Start 1275; Stop 1299
agatttgtaccgtgctatggatatt

SEQ ID NO: 271983 - DNA, 25 bp, Artificial
  probe
  misc_feature (1)..(25): SEQ ID NO: 738; WAN024CYI; Start 1274; Stop 1298
aagatttgtaccgtgctatggatat

SEQ ID NO: 271984 - DNA, 25 bp, Artificial
  probe
  misc_feature (1)..(25): SEQ ID NO: 738; WAN024CYI; Start 1273; Stop 1297
gaagatttgtaccgtgctatggata

SEQ ID NO: 271985 - DNA, 25 bp, Artificial
  probe
  misc_feature (1)..(25): SEQ ID NO: 738; WAN024CYI; Start 1144; Stop 1168
gataacagtcctgctatttcatccg

SEQ ID NO: 271986 - DNA, 25 bp, Artificial
  probe
  misc_feature (1)..(25): SEQ ID NO: 738; WAN024CYI; Start 1143; Stop 1167
cgataacagtcctgctatttcatcc

SEQ ID NO: 271987 - DNA, 25 bp, Artificial
  probe
  misc_feature (1)..(25): SEQ ID NO: 738; WAN024CYI; Start 112; Stop 136
caagcaatccaagatgtcctagaaa

SEQ ID NO: 271988 - DNA, 25 bp, Artificial
  probe
  misc_feature (1)..(25): SEQ ID NO: 738; WAN024CYI; Start 166; Stop 190
ttcactacctatcttgaccctaaag

SEQ ID NO: 271989 - DNA, 25 bp, Artificial
  probe
  misc_feature (1)..(25): SEQ ID NO: 738; WAN024CYI; Start 1276; Stop 1300
gatttgtaccgtgctatggatattt

SEQ ID NO: 271990 - DNA, 25 bp, Artificial
  probe
  misc_feature (1)..(25): SEQ ID NO: 738; WAN024CYI; Start 54; Stop 78
aaccttgatttcctatccttcagta

SEQ ID NO: 271991 - DNA, 25 bp, Artificial
  probe
  misc_feature (1)..(25): SEQ ID NO: 738; WAN024CYI; Start 1280; Stop 1304
tgtaccgtgctatggatatttatgc

SEQ ID NO: 271992 - DNA, 25 bp, Artificial
  probe
  misc_feature (1)..(25): SEQ ID NO: 738; WAN024CYI; Start 1270; Stop 1294
ctagaagatttgtaccgtgctatgg

SEQ ID NO: 271993 - DNA, 25 bp, Artificial
  probe
  misc_feature (1)..(25): SEQ ID NO: 738; WAN024CYI; Start 165; Stop 189
tttcactacctatcttgaccctaaa

SEQ ID NO: 271994 - DNA, 25 bp, Artificial
  probe
  misc_feature (1)..(25): SEQ ID NO: 738; WAN024CYI; Start 1050; Stop 1074
ctacgaagagtttgactatctagcg

SEQ ID NO: 271995 - DNA, 25 bp, Artificial
  probe
  misc_feature (1)..(25): SEQ ID NO: 738; WAN024CYI; Start 1048; Stop 1072
cgctacgaagagtttgactatctag

SEQ ID NO: 271996 - DNA, 25 bp, Artificial
  probe
  misc_feature (1)..(25): SEQ ID NO: 738; WAN024CYI; Start 1279; Stop 1303
ttgtaccgtgctatggatatttatg

SEQ ID NO: 271997 - DNA, 25 bp, Artificial
  probe
  misc_feature (1)..(25): SEQ ID NO: 738; WAN024CYI; Start 1285; Stop 1309
cgtgctatggatatttatgccgaag

SEQ ID NO: 271998 - DNA, 25 bp, Artificial
  probe
  misc_feature (1)..(25): SEQ ID NO: 738; WAN024CYI; Start 1271; Stop 1295
tagaagatttgtaccgtgctatgga

SEQ ID NO: 271999 - DNA, 25 bp, Artificial
  probe
  misc_feature (1)..(25): SEQ ID NO: 739; WAN024DJI; Start 994; Stop 1018
gataacttccgtcactcctctattc

SEQ ID NO: 272000 - DNA, 25 bp, Artificial
  probe
  misc_feature (1)..(25): SEQ ID NO: 739; WAN024DJI; Start 995; Stop 1019
ataacttccgtcactcctctattca

SEQ ID NO: 272001 - DNA, 25 bp, Artificial
  probe
  misc_feature (1)..(25): SEQ ID NO: 739; WAN024DJI; Start 996; Stop 1020
taacttccgtcactcctctattcaa

SEQ ID NO: 272002 - DNA, 25 bp, Artificial
  probe
  misc_feature (1)..(25): SEQ ID NO: 739; WAN024DJI; Start 477; Stop 501
tgttggaactgacttagaagatact

SEQ ID NO: 272003 - DNA, 25 bp, Artificial
  probe
  misc_feature (1)..(25): SEQ ID NO: 739; WAN024DJI; Start 474; Stop 498
cattgttggaactgacttagaagat

SEQ ID NO: 272004 - DNA, 25 bp, Artificial
  probe
  misc_feature (1)..(25): SEQ ID NO: 739; WAN024DJI; Start 473; Stop 497
tcattgttggaactgacttagaaga

SEQ ID NO: 272005 - DNA, 25 bp, Artificial
  probe
  misc_feature (1)..(25): SEQ ID NO: 739; WAN024DJI; Start 476; Stop 500
ttgttggaactgacttagaagatac

SEQ ID NO: 272006 - DNA, 25 bp, Artificial
  probe
  misc_feature (1)..(25): SEQ ID NO: 739; WAN024DJI; Start 471; Stop 495
catcattgttggaactgacttagaa

SEQ ID NO: 272007 - DNA, 25 bp, Artificial
  probe
  misc_feature (1)..(25): SEQ ID NO: 739; WAN024DJI; Start 472; Stop 496
atcattgttggaactgacttagaag

SEQ ID NO: 272008 - DNA, 25 bp, Artificial
  probe
  misc_feature (1)..(25): SEQ ID NO: 739; WAN024DJI; Start 452; Stop 476
ataacctgtatccaagtcgcatcat

SEQ ID NO: 272009 - DNA, 25 bp, Artificial
  probe
  misc_feature (1)..(25): SEQ ID NO: 739; WAN024DJI; Start 478; Stop 502
gttggaactgacttagaagatactt

SEQ ID NO: 272010 - DNA, 25 bp, Artificial
  probe
  misc_feature (1)..(25): SEQ ID NO: 739; WAN024DJI; Start 470; Stop 494
gcatcattgttggaactgacttaga

SEQ ID NO: 272011 - DNA, 25 bp, Artificial
  probe
  misc_feature (1)..(25): SEQ ID NO: 739; WAN024DJI; Start 1052; Stop 1076
ttacggttatcatctatgagccaac

SEQ ID NO: 272012 - DNA, 25 bp, Artificial
  probe
  misc_feature (1)..(25): SEQ ID NO: 739; WAN024DJI; Start 1051; Stop 1075
gttacggttatcatctatgagccaa

SEQ ID NO: 272013 - DNA, 25 bp, Artificial
  probe
  misc_feature (1)..(25): SEQ ID NO: 739; WAN024DJI; Start 14; Stop 38
tagcaggaacaggttatgtaggatt

SEQ ID NO: 272014 - DNA, 25 bp, Artificial
  probe
  misc_feature (1)..(25): SEQ ID NO: 739; WAN024DJI; Start 194; Stop 218
tggatgctaagtatgcttatgaaga

SEQ ID NO: 272015 - DNA, 25 bp, Artificial
  probe
  misc_feature (1)..(25): SEQ ID NO: 739; WAN024DJI; Start 1049; Stop 1073
gagttacggttatcatctatgagcc

SEQ ID NO: 272016 - DNA, 25 bp, Artificial
  probe
  misc_feature (1)..(25): SEQ ID NO: 739; WAN024DJI; Start 1048; Stop 1072
ggagttacggttatcatctatgagc

SEQ ID NO: 272017 - DNA, 25 bp, Artificial
  probe
  misc_feature (1)..(25): SEQ ID NO: 739; WAN024DJI; Start 453; Stop 477
taacctgtatccaagtcgcatcatt

SEQ ID NO: 272018 - DNA, 25 bp, Artificial
  probe
  misc_feature (1)..(25): SEQ ID NO: 739; WAN024DJI; Start 901; Stop 925
gctggagtatctgagactgatagtt

SEQ ID NO: 272019 - DNA, 25 bp, Artificial
  probe
  misc_feature (1)..(25): SEQ ID NO: 739; WAN024DJI; Start 197; Stop 221
atgctaagtatgcttatgaagatgc

SEQ ID NO: 272020 - DNA, 25 bp, Artificial
  probe
  misc_feature (1)..(25): SEQ ID NO: 739; WAN024DJI; Start 997; Stop 1021
aacttccgtcactcctctattcaag

SEQ ID NO: 272021 - DNA, 25 bp, Artificial
  probe
  misc_feature (1)..(25): SEQ ID NO: 739; WAN024DJI; Start 1053; Stop 1077
tacggttatcatctatgagccaact

SEQ ID NO: 272022 - DNA, 25 bp, Artificial
  probe
  misc_feature (1)..(25): SEQ ID NO: 739; WAN024DJI; Start 1050; Stop 1074
agttacggttatcatctatgagcca

SEQ ID NO: 272023 - DNA, 25 bp, Artificial
  probe
  misc_feature (1)..(25): SEQ ID NO: 739; WAN024DJI; Start 441; Stop 465
agcattatacgataacctgtatcca

SEQ ID NO: 272024 - DNA, 25 bp, Artificial
  probe
  misc_feature (1)..(25): SEQ ID NO: 739; WAN024DJI; Start 193; Stop 217
atggatgctaagtatgcttatgaag

SEQ ID NO: 272025 - DNA, 25 bp, Artificial
  probe
  misc_feature (1)..(25): SEQ ID NO: 739; WAN024DJI; Start 475; Stop 499
attgttggaactgacttagaagata

SEQ ID NO: 272026 - DNA, 25 bp, Artificial
  probe
  misc_feature (1)..(25): SEQ ID NO: 739; WAN024DJI; Start 13; Stop 37
gtagcaggaacaggttatgtaggat

SEQ ID NO: 272027 - DNA, 25 bp, Artificial
  probe
  misc_feature (1)..(25): SEQ ID NO: 739; WAN024DJI; Start 195; Stop 219
ggatgctaagtatgcttatgaagat

SEQ ID NO: 272028 - DNA, 25 bp, Artificial
  probe
  misc_feature (1)..(25): SEQ ID NO: 739; WAN024DJI; Start 188; Stop 212
caactatggatgctaagtatgctta

SEQ ID NO: 272029 - DNA, 25 bp, Artificial
  probe
  misc_feature (1)..(25): SEQ ID NO: 739; WAN024DJI; Start 442; Stop 466
gcattatacgataacctgtatccaa

SEQ ID NO: 272030 - DNA, 25 bp, Artificial
  probe
  misc_feature (1)..(25): SEQ ID NO: 739; WAN024DJI; Start 190; Stop 214
actatggatgctaagtatgcttatg

SEQ ID NO: 272031 - DNA, 25 bp, Artificial
  probe
  misc_feature (1)..(25): SEQ ID NO: 739; WAN024DJI; Start 1054; Stop 1078
acggttatcatctatgagccaactt

SEQ ID NO: 272032 - DNA, 25 bp, Artificial
  probe
  misc_feature (1)..(25): SEQ ID NO: 740; WAN024FMO; Start 457; Stop 481
gccttgtatccatcaatcctactta

SEQ ID NO: 272033 - DNA, 25 bp, Artificial
  probe
  misc_feature (1)..(25): SEQ ID NO: 740; WAN024FMO; Start 454; Stop 478
tatgccttgtatccatcaatcctac

SEQ ID NO: 272034 - DNA, 25 bp, Artificial
  probe
  misc_feature (1)..(25): SEQ ID NO: 740; WAN024FMO; Start 453; Stop 477
atatgccttgtatccatcaatccta

SEQ ID NO: 272035 - DNA, 25 bp, Artificial
  probe
  misc_feature (1)..(25): SEQ ID NO: 740; WAN024FMO; Start 893; Stop 917
ccattgaaggagtcaggaattatca

SEQ ID NO: 272036 - DNA, 25 bp, Artificial
  probe
  misc_feature (1)..(25): SEQ ID NO: 740; WAN024FMO; Start 892; Stop 916
accattgaaggagtcaggaattatc

SEQ ID NO: 272037 - DNA, 25 bp, Artificial
  probe
  misc_feature (1)..(25): SEQ ID NO: 740; WAN024FMO; Start 526; Stop 550
aggtattggcagtggttattactaa

SEQ ID NO: 272038 - DNA, 25 bp, Artificial
  probe
  misc_feature (1)..(25): SEQ ID NO: 740; WAN024FMO; Start 525; Stop 549
aaggtattggcagtggttattacta

SEQ ID NO: 272039 - DNA, 25 bp, Artificial
  probe
  misc_feature (1)..(25): SEQ ID NO: 740; WAN024FMO; Start 524; Stop 548
taaggtattggcagtggttattact

SEQ ID NO: 272040 - DNA, 25 bp, Artificial
  probe
  misc_feature (1)..(25): SEQ ID NO: 740; WAN024FMO; Start 895; Stop 919
attgaaggagtcaggaattatcaga

SEQ ID NO: 272041 - DNA, 25 bp, Artificial
  probe
  misc_feature (1)..(25): SEQ ID NO: 740; WAN024FMO; Start 894; Stop 918
cattgaaggagtcaggaattatcag

SEQ ID NO: 272042 - DNA, 25 bp, Artificial
  probe
  misc_feature (1)..(25): SEQ ID NO: 740; WAN024FMO; Start 523; Stop 547
ataaggtattggcagtggttattac

SEQ ID NO: 272043 - DNA, 25 bp, Artificial
  probe
  misc_feature (1)..(25): SEQ ID NO: 740; WAN024FMO; Start 455; Stop 479
atgccttgtatccatcaatcctact

SEQ ID NO: 272044 - DNA, 25 bp, Artificial
  probe
  misc_feature (1)..(25): SEQ ID NO: 740; WAN024FMO; Start 452; Stop 476
gatatgccttgtatccatcaatcct

SEQ ID NO: 272045 - DNA, 25 bp, Artificial
  probe
  misc_feature (1)..(25): SEQ ID NO: 740; WAN024FMO; Start 451; Stop 475
agatatgccttgtatccatcaatcc

SEQ ID NO: 272046 - DNA, 25 bp, Artificial
  probe
  misc_feature (1)..(25): SEQ ID NO: 740; WAN024FMO; Start 448; Stop 472
ttcagatatgccttgtatccatcaa

SEQ ID NO: 272047 - DNA, 25 bp, Artificial
  probe
  misc_feature (1)..(25): SEQ ID NO: 740; WAN024FMO; Start 449; Stop 473
tcagatatgccttgtatccatcaat

SEQ ID NO: 272048 - DNA, 25 bp, Artificial
  probe
  misc_feature (1)..(25): SEQ ID NO: 740; WAN024FMO; Start 450; Stop 474
cagatatgccttgtatccatcaatc

SEQ ID NO: 272049 - DNA, 25 bp, Artificial
  probe
  misc_feature (1)..(25): SEQ ID NO: 740; WAN024FMO; Start 456; Stop 480
tgccttgtatccatcaatcctactt

SEQ ID NO: 272050 - DNA, 25 bp, Artificial
  probe
  misc_feature (1)..(25): SEQ ID NO: 740; WAN024FMO; Start 896; Stop 920
ttgaaggagtcaggaattatcagac

SEQ ID NO: 272051 - DNA, 25 bp, Artificial
  probe
  misc_feature (1)..(25): SEQ ID NO: 740; WAN024FMO; Start 891; Stop 915
gaccattgaaggagtcaggaattat

SEQ ID NO: 272052 - DNA, 25 bp, Artificial
  probe
  misc_feature (1)..(25): SEQ ID NO: 740; WAN024FMO; Start 466; Stop 490
ccatcaatcctacttatgaatgtca

SEQ ID NO: 272053 - DNA, 25 bp, Artificial
  probe
  misc_feature (1)..(25): SEQ ID NO: 740; WAN024FMO; Start 900; Stop 924
aggagtcaggaattatcagacctat

SEQ ID NO: 272054 - DNA, 25 bp, Artificial
  probe
  misc_feature (1)..(25): SEQ ID NO: 740; WAN024FMO; Start 901; Stop 925
ggagtcaggaattatcagacctatc

SEQ ID NO: 272055 - DNA, 25 bp, Artificial
  probe
  misc_feature (1)..(25): SEQ ID NO: 740; WAN024FMO; Start 899; Stop 923
aaggagtcaggaattatcagaccta

SEQ ID NO: 272056 - DNA, 25 bp, Artificial
  probe
  misc_feature (1)..(25): SEQ ID NO: 740; WAN024FMO; Start 465; Stop 489
tccatcaatcctacttatgaatgtc

SEQ ID NO: 272057 - DNA, 25 bp, Artificial
  probe
  misc_feature (1)..(25): SEQ ID NO: 740; WAN024FMO; Start 527; Stop 551
ggtattggcagtggttattactaac

SEQ ID NO: 272058 - DNA, 25 bp, Artificial
  probe
  misc_feature (1)..(25): SEQ ID NO: 740; WAN024FMO; Start 521; Stop 545
atataaggtattggcagtggttatt

SEQ ID NO: 272059 - DNA, 25 bp, Artificial
  probe
  misc_feature (1)..(25): SEQ ID NO: 740; WAN024FMO; Start 520; Stop 544
aatataaggtattggcagtggttat

SEQ ID NO: 272060 - DNA, 25 bp, Artificial
  probe
  misc_feature (1)..(25): SEQ ID NO: 740; WAN024FMO; Start 902; Stop 926
gagtcaggaattatcagacctatct

SEQ ID NO: 272061 - DNA, 25 bp, Artificial
  probe
  misc_feature (1)..(25): SEQ ID NO: 740; WAN024FMO; Start 897; Stop 921
tgaaggagtcaggaattatcagacc

SEQ ID NO: 272062 - DNA, 25 bp, Artificial
  probe
  misc_feature (1)..(25): SEQ ID NO: 740; WAN024FMO; Start 898; Stop 922
gaaggagtcaggaattatcagacct

SEQ ID NO: 272063 - DNA, 25 bp, Artificial
  probe
  misc_feature (1)..(25): SEQ ID NO: 740; WAN024FMO; Start 903; Stop 927
agtcaggaattatcagacctatctt

SEQ ID NO: 272064 - DNA, 25 bp, Artificial
  probe
  misc_feature (1)..(25): SEQ ID NO: 740; WAN024FMO; Start 458; Stop 482
ccttgtatccatcaatcctacttat

SEQ ID NO: 272065 - DNA, 25 bp, Artificial
  probe
  misc_feature (1)..(25): SEQ ID NO: 741; WAN024FPG; Start 173; Stop 197
gagatagaagttacgaagagaagca

SEQ ID NO: 272066 - DNA, 25 bp, Artificial
  probe
  misc_feature (1)..(25): SEQ ID NO: 741; WAN024FPG; Start 172; Stop 196
agagatagaagttacgaagagaagc

SEQ ID NO: 272067 - DNA, 25 bp, Artificial
  probe
  misc_feature (1)..(25): SEQ ID NO: 741; WAN024FPG; Start 177; Stop 201
tagaagttacgaagagaagcatcat

SEQ ID NO: 272068 - DNA, 25 bp, Artificial
  probe
  misc_feature (1)..(25): SEQ ID NO: 741; WAN024FPG; Start 176; Stop 200
atagaagttacgaagagaagcatca

SEQ ID NO: 272069 - DNA, 25 bp, Artificial
  probe
  misc_feature (1)..(25): SEQ ID NO: 741; WAN024FPG; Start 174; Stop 198
agatagaagttacgaagagaagcat

SEQ ID NO: 272070 - DNA, 25 bp, Artificial
  probe
  misc_feature (1)..(25): SEQ ID NO: 741; WAN024FPG; Start 589; Stop 613
gcagatagccagattaaggaagatt

SEQ ID NO: 272071 - DNA, 25 bp, Artificial
  probe
  misc_feature (1)..(25): SEQ ID NO: 741; WAN024FPG; Start 175; Stop 199
gatagaagttacgaagagaagcatc

SEQ ID NO: 272072 - DNA, 25 bp, Artificial
  probe
  misc_feature (1)..(25): SEQ ID NO: 741; WAN024FPG; Start 169; Stop 193
gagagagatagaagttacgaagaga

SEQ ID NO: 272073 - DNA, 25 bp, Artificial
  probe
  misc_feature (1)..(25): SEQ ID NO: 741; WAN024FPG; Start 168; Stop 192
agagagagatagaagttacgaagag

SEQ ID NO: 272074 - DNA, 25 bp, Artificial
  probe
  misc_feature (1)..(25): SEQ ID NO: 741; WAN024FPG; Start 485; Stop 509
caattattcggacgcaagatgataa

SEQ ID NO: 272075 - DNA, 25 bp, Artificial
  probe
  misc_feature (1)..(25): SEQ ID NO: 741; WAN024FPG; Start 474; Stop 498
agaacagataccaattattcggacg

SEQ ID NO: 272076 - DNA, 25 bp, Artificial
  probe
  misc_feature (1)..(25): SEQ ID NO: 741; WAN024FPG; Start 484; Stop 508
ccaattattcggacgcaagatgata

SEQ ID NO: 272077 - DNA, 25 bp, Artificial
  probe
  misc_feature (1)..(25): SEQ ID NO: 741; WAN024FPG; Start 480; Stop 504
gataccaattattcggacgcaagat

SEQ ID NO: 272078 - DNA, 25 bp, Artificial
  probe
  misc_feature (1)..(25): SEQ ID NO: 741; WAN024FPG; Start 473; Stop 497
aagaacagataccaattattcggac

SEQ ID NO: 272079 - DNA, 25 bp, Artificial
  probe
  misc_feature (1)..(25): SEQ ID NO: 741; WAN024FPG; Start 170; Stop 194
agagagatagaagttacgaagagaa

SEQ ID NO: 272080 - DNA, 25 bp, Artificial
  probe
  misc_feature (1)..(25): SEQ ID NO: 741; WAN024FPG; Start 167; Stop 191
aagagagagatagaagttacgaaga

SEQ ID NO: 272081 - DNA, 25 bp, Artificial
  probe
  misc_feature (1)..(25): SEQ ID NO: 741; WAN024FPG; Start 165; Stop 189
agaagagagagatagaagttacgaa

SEQ ID NO: 272082 - DNA, 25 bp, Artificial
  probe
  misc_feature (1)..(25): SEQ ID NO: 741; WAN024FPG; Start 481; Stop 505
ataccaattattcggacgcaagatg

SEQ ID NO: 272083 - DNA, 25 bp, Artificial
  probe
  misc_feature (1)..(25): SEQ ID NO: 741; WAN024FPG; Start 171; Stop 195
gagagatagaagttacgaagagaag

SEQ ID NO: 272084 - DNA, 25 bp, Artificial
  probe
  misc_feature (1)..(25): SEQ ID NO: 741; WAN024FPG; Start 166; Stop 190
gaagagagagatagaagttacgaag

SEQ ID NO: 272085 - DNA, 25 bp, Artificial
  probe
  misc_feature (1)..(25): SEQ ID NO: 741; WAN024FPG; Start 178; Stop 202
agaagttacgaagagaagcatcatg

SEQ ID NO: 272086 - DNA, 25 bp, Artificial
  probe
  misc_feature (1)..(25): SEQ ID NO: 741; WAN024FPG; Start 191; Stop 215
agaagcatcatgtgaagattattcg

SEQ ID NO: 272087 - DNA, 25 bp, Artificial
  probe
  misc_feature (1)..(25): SEQ ID NO: 741; WAN024FPG; Start 187; Stop 211
gaagagaagcatcatgtgaagatta

SEQ ID NO: 272088 - DNA, 25 bp, Artificial
  probe
  misc_feature (1)..(25): SEQ ID NO: 741; WAN024FPG; Start 183; Stop 207
ttacgaagagaagcatcatgtgaag

SEQ ID NO: 272089 - DNA, 25 bp, Artificial
  probe
  misc_feature (1)..(25): SEQ ID NO: 741; WAN024FPG; Start 179; Stop 203
gaagttacgaagagaagcatcatgt

SEQ ID NO: 272090 - DNA, 25 bp, Artificial
  probe
  misc_feature (1)..(25): SEQ ID NO: 741; WAN024FPG; Start 192; Stop 216
gaagcatcatgtgaagattattcgc

SEQ ID NO: 272091 - DNA, 25 bp, Artificial
  probe
  misc_feature (1)..(25): SEQ ID NO: 741; WAN024FPG; Start 479; Stop 503
agataccaattattcggacgcaaga

SEQ ID NO: 272092 - DNA, 25 bp, Artificial
  probe
  misc_feature (1)..(25): SEQ ID NO: 741; WAN024FPG; Start 478; Stop 502
cagataccaattattcggacgcaag

SEQ ID NO: 272093 - DNA, 25 bp, Artificial
  probe
  misc_feature (1)..(25): SEQ ID NO: 741; WAN024FPG; Start 588; Stop 612
cgcagatagccagattaaggaagat

SEQ ID NO: 272094 - DNA, 25 bp, Artificial
  probe
  misc_feature (1)..(25): SEQ ID NO: 741; WAN024FPG; Start 182; Stop 206
gttacgaagagaagcatcatgtgaa

SEQ ID NO: 272095 - DNA, 25 bp, Artificial
  probe
  misc_feature (1)..(25): SEQ ID NO: 741; WAN024FPG; Start 180; Stop 204
aagttacgaagagaagcatcatgtg

SEQ ID NO: 272096 - DNA, 25 bp, Artificial
  probe
  misc_feature (1)..(25): SEQ ID NO: 741; WAN024FPG; Start 186; Stop 210
cgaagagaagcatcatgtgaagatt

SEQ ID NO: 272097 - DNA, 25 bp, Artificial
  probe
  misc_feature (1)..(25): SEQ ID NO: 741; WAN024FPG; Start 164; Stop 188
tagaagagagagatagaagttacga

SEQ ID NO: 272098 - DNA, 25 bp, Artificial
  probe
  misc_feature (1)..(25): SEQ ID NO: 742; WAN024FUM; Start 144; Stop 168
tccttgtcattatcctactaatcgt

SEQ ID NO: 272099 - DNA, 25 bp, Artificial
  probe
  misc_feature (1)..(25): SEQ ID NO: 742; WAN024FUM; Start 143; Stop 167
atccttgtcattatcctactaatcg

SEQ ID NO: 272100 - DNA, 25 bp, Artificial
  probe
  misc_feature (1)..(25): SEQ ID NO: 742; WAN024FUM; Start 145; Stop 169
ccttgtcattatcctactaatcgta

SEQ ID NO: 272101 - DNA, 25 bp, Artificial
  probe
  misc_feature (1)..(25): SEQ ID NO: 742; WAN024FUM; Start 374; Stop 398
cagataagttcatagttcagtggga

SEQ ID NO: 272102 - DNA, 25 bp, Artificial
  probe
  misc_feature (1)..(25): SEQ ID NO: 742; WAN024FUM; Start 373; Stop 397
acagataagttcatagttcagtggg

SEQ ID NO: 272103 - DNA, 25 bp, Artificial
  probe
  misc_feature (1)..(25): SEQ ID NO: 742; WAN024FUM; Start 22; Stop 46
tctagtggaggtcatctgactcatt

SEQ ID NO: 272104 - DNA, 25 bp, Artificial
  probe
  misc_feature (1)..(25): SEQ ID NO: 742; WAN024FUM; Start 26; Stop 50
gtggaggtcatctgactcatttata

SEQ ID NO: 272105 - DNA, 25 bp, Artificial
  probe
  misc_feature (1)..(25): SEQ ID NO: 742; WAN024FUM; Start 24; Stop 48
tagtggaggtcatctgactcattta

SEQ ID NO: 272106 - DNA, 25 bp, Artificial
  probe
  misc_feature (1)..(25): SEQ ID NO: 742; WAN024FUM; Start 25; Stop 49
agtggaggtcatctgactcatttat

SEQ ID NO: 272107 - DNA, 25 bp, Artificial
  probe
  misc_feature (1)..(25): SEQ ID NO: 742; WAN024FUM; Start 27; Stop 51
tggaggtcatctgactcatttatat

SEQ ID NO: 272108 - DNA, 25 bp, Artificial
  probe
  misc_feature (1)..(25): SEQ ID NO: 742; WAN024FUM; Start 146; Stop 170
cttgtcattatcctactaatcgtaa

SEQ ID NO: 272109 - DNA, 25 bp, Artificial
  probe
  misc_feature (1)..(25): SEQ ID NO: 742; WAN024FUM; Start 23; Stop 47
ctagtggaggtcatctgactcattt

SEQ ID NO: 272110 - DNA, 25 bp, Artificial
  probe
  misc_feature (1)..(25): SEQ ID NO: 742; WAN024FUM; Start 28; Stop 52
ggaggtcatctgactcatttatatc

SEQ ID NO: 272111 - DNA, 25 bp, Artificial
  probe
  misc_feature (1)..(25): SEQ ID NO: 742; WAN024FUM; Start 258; Stop 282
tgtagcagttcctttcttttaccta

SEQ ID NO: 272112 - DNA, 25 bp, Artificial
  probe
  misc_feature (1)..(25): SEQ ID NO: 742; WAN024FUM; Start 68; Stop 92
ggaaagataaggaaagattttgggt

SEQ ID NO: 272113 - DNA, 25 bp, Artificial
  probe
  misc_feature (1)..(25): SEQ ID NO: 742; WAN024FUM; Start 67; Stop 91
tggaaagataaggaaagattttggg

SEQ ID NO: 272114 - DNA, 25 bp, Artificial
  probe
  misc_feature (1)..(25): SEQ ID NO: 742; WAN024FUM; Start 259; Stop 283
gtagcagttcctttcttttacctag

SEQ ID NO: 272115 - DNA, 25 bp, Artificial
  probe
  misc_feature (1)..(25): SEQ ID NO: 742; WAN024FUM; Start 29; Stop 53
gaggtcatctgactcatttatatct

SEQ ID NO: 272116 - DNA, 25 bp, Artificial
  probe
  misc_feature (1)..(25): SEQ ID NO: 742; WAN024FUM; Start 147; Stop 171
ttgtcattatcctactaatcgtaat

SEQ ID NO: 272117 - DNA, 25 bp, Artificial
  probe
  misc_feature (1)..(25): SEQ ID NO: 742; WAN024FUM; Start 66; Stop 90
ctggaaagataaggaaagattttgg

SEQ ID NO: 272118 - DNA, 25 bp, Artificial
  probe
  misc_feature (1)..(25): SEQ ID NO: 742; WAN024FUM; Start 148; Stop 172
tgtcattatcctactaatcgtaatt

SEQ ID NO: 272119 - DNA, 25 bp, Artificial
  probe
  misc_feature (1)..(25): SEQ ID NO: 742; WAN024FUM; Start 257; Stop 281
ctgtagcagttcctttcttttacct

SEQ ID NO: 272120 - DNA, 25 bp, Artificial
  probe
  misc_feature (1)..(25): SEQ ID NO: 742; WAN024FUM; Start 72; Stop 96
agataaggaaagattttgggttact

SEQ ID NO: 272121 - DNA, 25 bp, Artificial
  probe
  misc_feature (1)..(25): SEQ ID NO: 742; WAN024FUM; Start 69; Stop 93
gaaagataaggaaagattttgggtt

SEQ ID NO: 272122 - DNA, 25 bp, Artificial
  probe
  misc_feature (1)..(25): SEQ ID NO: 742; WAN024FUM; Start 142; Stop 166
tatccttgtcattatcctactaatc

SEQ ID NO: 272123 - DNA, 25 bp, Artificial
  probe
  misc_feature (1)..(25): SEQ ID NO: 742; WAN024FUM; Start 216; Stop 240
gagaaaggaacgccctgatgttatc

SEQ ID NO: 272124 - DNA, 25 bp, Artificial
  probe
  misc_feature (1)..(25): SEQ ID NO: 742; WAN024FUM; Start 71; Stop 95
aagataaggaaagattttgggttac

SEQ ID NO: 272125 - DNA, 25 bp, Artificial
  probe
  misc_feature (1)..(25): SEQ ID NO: 742; WAN024FUM; Start 73; Stop 97
gataaggaaagattttgggttactt

SEQ ID NO: 272126 - DNA, 25 bp, Artificial
  probe
  misc_feature (1)..(25): SEQ ID NO: 742; WAN024FUM; Start 65; Stop 89
tctggaaagataaggaaagattttg

SEQ ID NO: 272127 - DNA, 25 bp, Artificial
  probe
  misc_feature (1)..(25): SEQ ID NO: 742; WAN024FUM; Start 63; Stop 87
tttctggaaagataaggaaagattt

SEQ ID NO: 272128 - DNA, 25 bp, Artificial
  probe
  misc_feature (1)..(25): SEQ ID NO: 742; WAN024FUM; Start 256; Stop 280
gctgtagcagttcctttcttttacc

SEQ ID NO: 272129 - DNA, 25 bp, Artificial
  probe
  misc_feature (1)..(25): SEQ ID NO: 742; WAN024FUM; Start 218; Stop 242
gaaaggaacgccctgatgttatcat

SEQ ID NO: 272130 - DNA, 25 bp, Artificial
  probe
  misc_feature (1)..(25): SEQ ID NO: 742; WAN024FUM; Start 77; Stop 101
aggaaagattttgggttacttttga

SEQ ID NO: 272131 - DNA, 25 bp, Artificial
  probe
  misc_feature (1)..(25): SEQ ID NO: 743; WAN024ERR; Start 1226; Stop 1250
cgatagaagtgattcagtattatga

SEQ ID NO: 272132 - DNA, 25 bp, Artificial
  probe
  misc_feature (1)..(25): SEQ ID NO: 743; WAN024ERR; Start 1223; Stop 1247
actcgatagaagtgattcagtatta

SEQ ID NO: 272133 - DNA, 25 bp, Artificial
  probe
  misc_feature (1)..(25): SEQ ID NO: 743; WAN024ERR; Start 1210; Stop 1234
actttagatgaacactcgatagaag

SEQ ID NO: 272134 - DNA, 25 bp, Artificial
  probe
  misc_feature (1)..(25): SEQ ID NO: 743; WAN024ERR; Start 1209; Stop 1233
aactttagatgaacactcgatagaa

SEQ ID NO: 272135 - DNA, 25 bp, Artificial
  probe
  misc_feature (1)..(25): SEQ ID NO: 743; WAN024ERR; Start 1208; Stop 1232
aaactttagatgaacactcgataga

SEQ ID NO: 272136 - DNA, 25 bp, Artificial
  probe
  misc_feature (1)..(25): SEQ ID NO: 743; WAN024ERR; Start 1211; Stop 1235
ctttagatgaacactcgatagaagt

SEQ ID NO: 272137 - DNA, 25 bp, Artificial
  probe
  misc_feature (1)..(25): SEQ ID NO: 743; WAN024ERR; Start 1225; Stop 1249
tcgatagaagtgattcagtattatg

SEQ ID NO: 272138 - DNA, 25 bp, Artificial
  probe
  misc_feature (1)..(25): SEQ ID NO: 743; WAN024ERR; Start 1203; Stop 1227
attgaaaactttagatgaacactcg

SEQ ID NO: 272139 - DNA, 25 bp, Artificial
  probe
  misc_feature (1)..(25): SEQ ID NO: 743; WAN024ERR; Start 1217; Stop 1241
atgaacactcgatagaagtgattca

SEQ ID NO: 272140 - DNA, 25 bp, Artificial
  probe
  misc_feature (1)..(25): SEQ ID NO: 743; WAN024ERR; Start 1224; Stop 1248
ctcgatagaagtgattcagtattat

SEQ ID NO: 272141 - DNA, 25 bp, Artificial
  probe
  misc_feature (1)..(25): SEQ ID NO: 743; WAN024ERR; Start 1219; Stop 1243
gaacactcgatagaagtgattcagt

SEQ ID NO: 272142 - DNA, 25 bp, Artificial
  probe
  misc_feature (1)..(25): SEQ ID NO: 743; WAN024ERR; Start 1218; Stop 1242
tgaacactcgatagaagtgattcag

SEQ ID NO: 272143 - DNA, 25 bp, Artificial
  probe
  misc_feature (1)..(25): SEQ ID NO: 743; WAN024ERR; Start 1215; Stop 1239
agatgaacactcgatagaagtgatt

SEQ ID NO: 272144 - DNA, 25 bp, Artificial
  probe
  misc_feature (1)..(25): SEQ ID NO: 743; WAN024ERR; Start 1216; Stop 1240
gatgaacactcgatagaagtgattc

SEQ ID NO: 272145 - DNA, 25 bp, Artificial
  probe
  misc_feature (1)..(25): SEQ ID NO: 743; WAN024ERR; Start 1220; Stop 1244
aacactcgatagaagtgattcagta

SEQ ID NO: 272146 - DNA, 25 bp, Artificial
  probe
  misc_feature (1)..(25): SEQ ID NO: 743; WAN024ERR; Start 1221; Stop 1245
acactcgatagaagtgattcagtat

SEQ ID NO: 272147 - DNA, 25 bp, Artificial
  probe
  misc_feature (1)..(25): SEQ ID NO: 743; WAN024ERR; Start 1213; Stop 1237
ttagatgaacactcgatagaagtga

SEQ ID NO: 272148 - DNA, 25 bp, Artificial
  probe
  misc_feature (1)..(25): SEQ ID NO: 743; WAN024ERR; Start 1214; Stop 1238
tagatgaacactcgatagaagtgat

SEQ ID NO: 272149 - DNA, 25 bp, Artificial
  probe
  misc_feature (1)..(25): SEQ ID NO: 743; WAN024ERR; Start 1204; Stop 1228
ttgaaaactttagatgaacactcga

SEQ ID NO: 272150 - DNA, 25 bp, Artificial
  probe
  misc_feature (1)..(25): SEQ ID NO: 743; WAN024ERR; Start 1222; Stop 1246
cactcgatagaagtgattcagtatt

SEQ ID NO: 272151 - DNA, 25 bp, Artificial
  probe
  misc_feature (1)..(25): SEQ ID NO: 743; WAN024ERR; Start 1205; Stop 1229
tgaaaactttagatgaacactcgat

SEQ ID NO: 272152 - DNA, 25 bp, Artificial
  probe
  misc_feature (1)..(25): SEQ ID NO: 743; WAN024ERR; Start 544; Stop 568
cctactattcgtaaacttttgaaac

SEQ ID NO: 272153 - DNA, 25 bp, Artificial
  probe
  misc_feature (1)..(25): SEQ ID NO: 743; WAN024ERR; Start 1234; Stop 1258
gtgattcagtattatgaaagagtga

SEQ ID NO: 272154 - DNA, 25 bp, Artificial
  probe
  misc_feature (1)..(25): SEQ ID NO: 743; WAN024ERR; Start 1233; Stop 1257
agtgattcagtattatgaaagagtg

SEQ ID NO: 272155 - DNA, 25 bp, Artificial
  probe
  misc_feature (1)..(25): SEQ ID NO: 743; WAN024ERR; Start 543; Stop 567
tcctactattcgtaaacttttgaaa

SEQ ID NO: 272156 - DNA, 25 bp, Artificial
  probe
  misc_feature (1)..(25): SEQ ID NO: 743; WAN024ERR; Start 1207; Stop 1231
aaaactttagatgaacactcgatag

SEQ ID NO: 272157 - DNA, 25 bp, Artificial
  probe
  misc_feature (1)..(25): SEQ ID NO: 743; WAN024ERR; Start 1206; Stop 1230
gaaaactttagatgaacactcgata

SEQ ID NO: 272158 - DNA, 25 bp, Artificial
  probe
  misc_feature (1)..(25): SEQ ID NO: 743; WAN024ERR; Start 1202; Stop 1226
aattgaaaactttagatgaacactc

SEQ ID NO: 272159 - DNA, 25 bp, Artificial
  probe
  misc_feature (1)..(25): SEQ ID NO: 743; WAN024ERR; Start 542; Stop 566
atcctactattcgtaaacttttgaa

SEQ ID NO: 272160 - DNA, 25 bp, Artificial
  probe
  misc_feature (1)..(25): SEQ ID NO: 743; WAN024ERR; Start 1212; Stop 1236
tttagatgaacactcgatagaagtg

SEQ ID NO: 272161 - DNA, 25 bp, Artificial
  probe
  misc_feature (1)..(25): SEQ ID NO: 743; WAN024ERR; Start 1232; Stop 1256
aagtgattcagtattatgaaagagt

SEQ ID NO: 272162 - DNA, 25 bp, Artificial
  probe
  misc_feature (1)..(25): SEQ ID NO: 743; WAN024ERR; Start 1201; Stop 1225
aaattgaaaactttagatgaacact

SEQ ID NO: 272163 - DNA, 25 bp, Artificial
  probe
  misc_feature (1)..(25): SEQ ID NO: 743; WAN024ERR; Start 1235; Stop 1259
tgattcagtattatgaaagagtgat

SEQ ID NO: 272164 - DNA, 25 bp, Artificial
  probe
  misc_feature (1)..(25): SEQ ID NO: 744; WAN024DEJ; Start 292; Stop 316
attgatacaccgattcgtattgatg

SEQ ID NO: 272165 - DNA, 25 bp, Artificial
  probe
  misc_feature (1)..(25): SEQ ID NO: 744; WAN024DEJ; Start 293; Stop 317
ttgatacaccgattcgtattgatgg

SEQ ID NO: 272166 - DNA, 25 bp, Artificial
  probe
  misc_feature (1)..(25): SEQ ID NO: 744; WAN024DEJ; Start 295; Stop 319
gatacaccgattcgtattgatggag

SEQ ID NO: 272167 - DNA, 25 bp, Artificial
  probe
  misc_feature (1)..(25): SEQ ID NO: 744; WAN024DEJ; Start 291; Stop 315
aattgatacaccgattcgtattgat

SEQ ID NO: 272168 - DNA, 25 bp, Artificial
  probe
  misc_feature (1)..(25): SEQ ID NO: 744; WAN024DEJ; Start 509; Stop 533
tggaacaagtagtaaataagccgaa

SEQ ID NO: 272169 - DNA, 25 bp, Artificial
  probe
  misc_feature (1)..(25): SEQ ID NO: 744; WAN024DEJ; Start 508; Stop 532
atggaacaagtagtaaataagccga

SEQ ID NO: 272170 - DNA, 25 bp, Artificial
  probe
  misc_feature (1)..(25): SEQ ID NO: 744; WAN024DEJ; Start 507; Stop 531
gatggaacaagtagtaaataagccg

SEQ ID NO: 272171 - DNA, 25 bp, Artificial
  probe
  misc_feature (1)..(25): SEQ ID NO: 744; WAN024DEJ; Start 334; Stop 358
agtagtttacctatcaaagcgatgg

SEQ ID NO: 272172 - DNA, 25 bp, Artificial
  probe
  misc_feature (1)..(25): SEQ ID NO: 744; WAN024DEJ; Start 510; Stop 534
ggaacaagtagtaaataagccgaat

SEQ ID NO: 272173 - DNA, 25 bp, Artificial
  probe
  misc_feature (1)..(25): SEQ ID NO: 744; WAN024DEJ; Start 294; Stop 318
tgatacaccgattcgtattgatgga

SEQ ID NO: 272174 - DNA, 25 bp, Artificial
  probe
  misc_feature (1)..(25): SEQ ID NO: 744; WAN024DEJ; Start 506; Stop 530
tgatggaacaagtagtaaataagcc

SEQ ID NO: 272175 - DNA, 25 bp, Artificial
  probe
  misc_feature (1)..(25): SEQ ID NO: 744; WAN024DEJ; Start 251; Stop 275
aagatgatgctcgcatacctgataa

SEQ ID NO: 272176 - DNA, 25 bp, Artificial
  probe
  misc_feature (1)..(25): SEQ ID NO: 744; WAN024DEJ; Start 333; Stop 357
tagtagtttacctatcaaagcgatg

SEQ ID NO: 272177 - DNA, 25 bp, Artificial
  probe
  misc_feature (1)..(25): SEQ ID NO: 744; WAN024DEJ; Start 165; Stop 189
attacgatatcaaccagatgctgta

SEQ ID NO: 272178 - DNA, 25 bp, Artificial
  probe
  misc_feature (1)..(25): SEQ ID NO: 744; WAN024DEJ; Start 164; Stop 188
tattacgatatcaaccagatgctgt

SEQ ID NO: 272179 - DNA, 25 bp, Artificial
  probe
  misc_feature (1)..(25): SEQ ID NO: 744; WAN024DEJ; Start 166; Stop 190
ttacgatatcaaccagatgctgtac

SEQ ID NO: 272180 - DNA, 25 bp, Artificial
  probe
  misc_feature (1)..(25): SEQ ID NO: 744; WAN024DEJ; Start 265; Stop 289
atacctgataacgaaggcaatcaac

SEQ ID NO: 272181 - DNA, 25 bp, Artificial
  probe
  misc_feature (1)..(25): SEQ ID NO: 744; WAN024DEJ; Start 264; Stop 288
catacctgataacgaaggcaatcaa

SEQ ID NO: 272182 - DNA, 25 bp, Artificial
  probe
  misc_feature (1)..(25): SEQ ID NO: 744; WAN024DEJ; Start 465; Stop 489
attccctaatatgagagcaggtttc

SEQ ID NO: 272183 - DNA, 25 bp, Artificial
  probe
  misc_feature (1)..(25): SEQ ID NO: 744; WAN024DEJ; Start 331; Stop 355
tttagtagtttacctatcaaagcga

SEQ ID NO: 272184 - DNA, 25 bp, Artificial
  probe
  misc_feature (1)..(25): SEQ ID NO: 744; WAN024DEJ; Start 464; Stop 488
aattccctaatatgagagcaggttt

SEQ ID NO: 272185 - DNA, 25 bp, Artificial
  probe
  misc_feature (1)..(25): SEQ ID NO: 744; WAN024DEJ; Start 463; Stop 487
aaattccctaatatgagagcaggtt

SEQ ID NO: 272186 - DNA, 25 bp, Artificial
  probe
  misc_feature (1)..(25): SEQ ID NO: 744; WAN024DEJ; Start 252; Stop 276
agatgatgctcgcatacctgataac

SEQ ID NO: 272187 - DNA, 25 bp, Artificial
  probe
  misc_feature (1)..(25): SEQ ID NO: 744; WAN024DEJ; Start 250; Stop 274
caagatgatgctcgcatacctgata

SEQ ID NO: 272188 - DNA, 25 bp, Artificial
  probe
  misc_feature (1)..(25): SEQ ID NO: 744; WAN024DEJ; Start 559; Stop 583
attgtaagaggcatagaggtagcta

SEQ ID NO: 272189 - DNA, 25 bp, Artificial
  probe
  misc_feature (1)..(25): SEQ ID NO: 744; WAN024DEJ; Start 162; Stop 186
aatattacgatatcaaccagatgct

SEQ ID NO: 272190 - DNA, 25 bp, Artificial
  probe
  misc_feature (1)..(25): SEQ ID NO: 744; WAN024DEJ; Start 167; Stop 191
tacgatatcaaccagatgctgtact

SEQ ID NO: 272191 - DNA, 25 bp, Artificial
  probe
  misc_feature (1)..(25): SEQ ID NO: 744; WAN024DEJ; Start 270; Stop 294
tgataacgaaggcaatcaaccaatt

SEQ ID NO: 272192 - DNA, 25 bp, Artificial
  probe
  misc_feature (1)..(25): SEQ ID NO: 744; WAN024DEJ; Start 173; Stop 197
atcaaccagatgctgtactttgtat

SEQ ID NO: 272193 - DNA, 25 bp, Artificial
  probe
  misc_feature (1)..(25): SEQ ID NO: 744; WAN024DEJ; Start 171; Stop 195
atatcaaccagatgctgtactttgt

SEQ ID NO: 272194 - DNA, 25 bp, Artificial
  probe
  misc_feature (1)..(25): SEQ ID NO: 744; WAN024DEJ; Start 172; Stop 196
tatcaaccagatgctgtactttgta

SEQ ID NO: 272195 - DNA, 25 bp, Artificial
  probe
  misc_feature (1)..(25): SEQ ID NO: 744; WAN024DEJ; Start 332; Stop 356
ttagtagtttacctatcaaagcgat

SEQ ID NO: 272196 - DNA, 25 bp, Artificial
  probe
  misc_feature (1)..(25): SEQ ID NO: 744; WAN024DEJ; Start 296; Stop 320
atacaccgattcgtattgatggagc

SEQ ID NO: 272197 - DNA, 25 bp, Artificial
  probe
  misc_feature (1)..(25): SEQ ID NO: 745; WAN024ERQ; Start 182; Stop 206
ttgagtgttatgaactgcttaatag

SEQ ID NO: 272198 - DNA, 25 bp, Artificial
  probe
  misc_feature (1)..(25): SEQ ID NO: 745; WAN024ERQ; Start 183; Stop 207
tgagtgttatgaactgcttaatagc

SEQ ID NO: 272199 - DNA, 25 bp, Artificial
  probe
  misc_feature (1)..(25): SEQ ID NO: 745; WAN024ERQ; Start 85; Stop 109
caaattgctcaaggttatcaagtag

SEQ ID NO: 272200 - DNA, 25 bp, Artificial
  probe
  misc_feature (1)..(25): SEQ ID NO: 745; WAN024ERQ; Start 180; Stop 204
gtttgagtgttatgaactgcttaat

SEQ ID NO: 272201 - DNA, 25 bp, Artificial
  probe
  misc_feature (1)..(25): SEQ ID NO: 745; WAN024ERQ; Start 184; Stop 208
gagtgttatgaactgcttaatagct

SEQ ID NO: 272202 - DNA, 25 bp, Artificial
  probe
  misc_feature (1)..(25): SEQ ID NO: 745; WAN024ERQ; Start 228; Stop 252
aggtatatccgatccaactgctttc

SEQ ID NO: 272203 - DNA, 25 bp, Artificial
  probe
  misc_feature (1)..(25): SEQ ID NO: 745; WAN024ERQ; Start 227; Stop 251
gaggtatatccgatccaactgcttt

SEQ ID NO: 272204 - DNA, 25 bp, Artificial
  probe
  misc_feature (1)..(25): SEQ ID NO: 745; WAN024ERQ; Start 217; Stop 241
gctttatttggaggtatatccgatc

SEQ ID NO: 272205 - DNA, 25 bp, Artificial
  probe
  misc_feature (1)..(25): SEQ ID NO: 745; WAN024ERQ; Start 185; Stop 209
agtgttatgaactgcttaatagctt

SEQ ID NO: 272206 - DNA, 25 bp, Artificial
  probe
  misc_feature (1)..(25): SEQ ID NO: 745; WAN024ERQ; Start 218; Stop 242
ctttatttggaggtatatccgatcc

SEQ ID NO: 272207 - DNA, 25 bp, Artificial
  probe
  misc_feature (1)..(25): SEQ ID NO: 745; WAN024ERQ; Start 86; Stop 110
aaattgctcaaggttatcaagtagc

SEQ ID NO: 272208 - DNA, 25 bp, Artificial
  probe
  misc_feature (1)..(25): SEQ ID NO: 745; WAN024ERQ; Start 188; Stop 212
gttatgaactgcttaatagcttacc

SEQ ID NO: 272209 - DNA, 25 bp, Artificial
  probe
  misc_feature (1)..(25): SEQ ID NO: 745; WAN024ERQ; Start 64; Stop 88
gctgaggatttaatgatagagcaaa

SEQ ID NO: 272210 - DNA, 25 bp, Artificial
  probe
  misc_feature (1)..(25): SEQ ID NO: 745; WAN024ERQ; Start 189; Stop 213
ttatgaactgcttaatagcttacct

SEQ ID NO: 272211 - DNA, 25 bp, Artificial
  probe
  misc_feature (1)..(25): SEQ ID NO: 745; WAN024ERQ; Start 191; Stop 215
atgaactgcttaatagcttacctat

SEQ ID NO: 272212 - DNA, 25 bp, Artificial
  probe
  misc_feature (1)..(25): SEQ ID NO: 745; WAN024ERQ; Start 65; Stop 89
ctgaggatttaatgatagagcaaat

SEQ ID NO: 272213 - DNA, 25 bp, Artificial
  probe
  misc_feature (1)..(25): SEQ ID NO: 745; WAN024ERQ; Start 61; Stop 85
tatgctgaggatttaatgatagagc

SEQ ID NO: 272214 - DNA, 25 bp, Artificial
  probe
  misc_feature (1)..(25): SEQ ID NO: 745; WAN024ERQ; Start 226; Stop 250
ggaggtatatccgatccaactgctt

SEQ ID NO: 272215 - DNA, 25 bp, Artificial
  probe
  misc_feature (1)..(25): SEQ ID NO: 745; WAN024ERQ; Start 181; Stop 205
tttgagtgttatgaactgcttaata

SEQ ID NO: 272216 - DNA, 25 bp, Artificial
  probe
  misc_feature (1)..(25): SEQ ID NO: 745; WAN024ERQ; Start 179; Stop 203
agtttgagtgttatgaactgcttaa

SEQ ID NO: 272217 - DNA, 25 bp, Artificial
  probe
  misc_feature (1)..(25): SEQ ID NO: 745; WAN024ERQ; Start 187; Stop 211
tgttatgaactgcttaatagcttac

SEQ ID NO: 272218 - DNA, 25 bp, Artificial
  probe
  misc_feature (1)..(25): SEQ ID NO: 745; WAN024ERQ; Start 186; Stop 210
gtgttatgaactgcttaatagctta

SEQ ID NO: 272219 - DNA, 25 bp, Artificial
  probe
  misc_feature (1)..(25): SEQ ID NO: 745; WAN024ERQ; Start 190; Stop 214
tatgaactgcttaatagcttaccta

SEQ ID NO: 272220 - DNA, 25 bp, Artificial
  probe
  misc_feature (1)..(25): SEQ ID NO: 745; WAN024ERQ; Start 1145; Stop 1169
ttaaagacaaggaagatttgttggc

SEQ ID NO: 272221 - DNA, 25 bp, Artificial
  probe
  misc_feature (1)..(25): SEQ ID NO: 745; WAN024ERQ; Start 1096; Stop 1120
gtgagtgaaaatgttggatcaaaag

SEQ ID NO: 272222 - DNA, 25 bp, Artificial
  probe
  misc_feature (1)..(25): SEQ ID NO: 745; WAN024ERQ; Start 60; Stop 84
atatgctgaggatttaatgatagag

SEQ ID NO: 272223 - DNA, 25 bp, Artificial
  probe
  misc_feature (1)..(25): SEQ ID NO: 745; WAN024ERQ; Start 1099; Stop 1123
agtgaaaatgttggatcaaaagact

SEQ ID NO: 272224 - DNA, 25 bp, Artificial
  probe
  misc_feature (1)..(25): SEQ ID NO: 745; WAN024ERQ; Start 1097; Stop 1121
tgagtgaaaatgttggatcaaaaga

SEQ ID NO: 272225 - DNA, 25 bp, Artificial
  probe
  misc_feature (1)..(25): SEQ ID NO: 745; WAN024ERQ; Start 66; Stop 90
tgaggatttaatgatagagcaaatt

SEQ ID NO: 272226 - DNA, 25 bp, Artificial
  probe
  misc_feature (1)..(25): SEQ ID NO: 745; WAN024ERQ; Start 1149; Stop 1173
agacaaggaagatttgttggctaaa

SEQ ID NO: 272227 - DNA, 25 bp, Artificial
  probe
  misc_feature (1)..(25): SEQ ID NO: 745; WAN024ERQ; Start 1148; Stop 1172
aagacaaggaagatttgttggctaa

SEQ ID NO: 272228 - DNA, 25 bp, Artificial
  probe
  misc_feature (1)..(25): SEQ ID NO: 745; WAN024ERQ; Start 1147; Stop 1171
aaagacaaggaagatttgttggcta

SEQ ID NO: 272229 - DNA, 25 bp, Artificial
  probe
  misc_feature (1)..(25): SEQ ID NO: 745; WAN024ERQ; Start 1146; Stop 1170
taaagacaaggaagatttgttggct

SEQ ID NO: 272230 - DNA, 25 bp, Artificial
  probe
  misc_feature (1)..(25): SEQ ID NO: 746; WAN024CBB; Start 334; Stop 358
gatacttacatctctccaatccgcc

SEQ ID NO: 272231 - DNA, 25 bp, Artificial
  probe
  misc_feature (1)..(25): SEQ ID NO: 746; WAN024CBB; Start 335; Stop 359
atacttacatctctccaatccgcct

SEQ ID NO: 272232 - DNA, 25 bp, Artificial
  probe
  misc_feature (1)..(25): SEQ ID NO: 746; WAN024CBB; Start 395; Stop 419
ctaaagtagaagacatcccagcaaa

SEQ ID NO: 272233 - DNA, 25 bp, Artificial
  probe
  misc_feature (1)..(25): SEQ ID NO: 746; WAN024CBB; Start 396; Stop 420
taaagtagaagacatcccagcaaac

SEQ ID NO: 272234 - DNA, 25 bp, Artificial
  probe
  misc_feature (1)..(25): SEQ ID NO: 746; WAN024CBB; Start 263; Stop 287
acgctttccaacactataacttctt

SEQ ID NO: 272235 - DNA, 25 bp, Artificial
  probe
  misc_feature (1)..(25): SEQ ID NO: 746; WAN024CBB; Start 262; Stop 286
aacgctttccaacactataacttct

SEQ ID NO: 272236 - DNA, 25 bp, Artificial
  probe
  misc_feature (1)..(25): SEQ ID NO: 746; WAN024CBB; Start 391; Stop 415
tacactaaagtagaagacatcccag

SEQ ID NO: 272237 - DNA, 25 bp, Artificial
  probe
  misc_feature (1)..(25): SEQ ID NO: 746; WAN024CBB; Start 261; Stop 285
gaacgctttccaacactataacttc

SEQ ID NO: 272238 - DNA, 25 bp, Artificial
  probe
  misc_feature (1)..(25): SEQ ID NO: 746; WAN024CBB; Start 336; Stop 360
tacttacatctctccaatccgcctt

SEQ ID NO: 272239 - DNA, 25 bp, Artificial
  probe
  misc_feature (1)..(25): SEQ ID NO: 746; WAN024CBB; Start 192; Stop 216
cttggaatttacagagttcacagac

SEQ ID NO: 272240 - DNA, 25 bp, Artificial
  probe
  misc_feature (1)..(25): SEQ ID NO: 746; WAN024CBB; Start 189; Stop 213
taccttggaatttacagagttcaca

SEQ ID NO: 272241 - DNA, 25 bp, Artificial
  probe
  misc_feature (1)..(25): SEQ ID NO: 746; WAN024CBB; Start 260; Stop 284
tgaacgctttccaacactataactt

SEQ ID NO: 272242 - DNA, 25 bp, Artificial
  probe
  misc_feature (1)..(25): SEQ ID NO: 746; WAN024CBB; Start 258; Stop 282
tttgaacgctttccaacactataac

SEQ ID NO: 272243 - DNA, 25 bp, Artificial
  probe
  misc_feature (1)..(25): SEQ ID NO: 746; WAN024CBB; Start 191; Stop 215
ccttggaatttacagagttcacaga

SEQ ID NO: 272244 - DNA, 25 bp, Artificial
  probe
  misc_feature (1)..(25): SEQ ID NO: 746; WAN024CBB; Start 264; Stop 288
cgctttccaacactataacttcttg

SEQ ID NO: 272245 - DNA, 25 bp, Artificial
  probe
  misc_feature (1)..(25): SEQ ID NO: 746; WAN024CBB; Start 257; Stop 281
atttgaacgctttccaacactataa

SEQ ID NO: 272246 - DNA, 25 bp, Artificial
  probe
  misc_feature (1)..(25): SEQ ID NO: 746; WAN024CBB; Start 733; Stop 757
aaagattgggaaacatcacctaagg

SEQ ID NO: 272247 - DNA, 25 bp, Artificial
  probe
  misc_feature (1)..(25): SEQ ID NO: 746; WAN024CBB; Start 358; Stop 382
ctttactcaggtttgaatggaagtg

SEQ ID NO: 272248 - DNA, 25 bp, Artificial
  probe
  misc_feature (1)..(25): SEQ ID NO: 746; WAN024CBB; Start 265; Stop 289
gctttccaacactataacttcttga

SEQ ID NO: 272249 - DNA, 25 bp, Artificial
  probe
  misc_feature (1)..(25): SEQ ID NO: 746; WAN024CBB; Start 190; Stop 214
accttggaatttacagagttcacag

SEQ ID NO: 272250 - DNA, 25 bp, Artificial
  probe
  misc_feature (1)..(25): SEQ ID NO: 746; WAN024CBB; Start 394; Stop 418
actaaagtagaagacatcccagcaa

SEQ ID NO: 272251 - DNA, 25 bp, Artificial
  probe
  misc_feature (1)..(25): SEQ ID NO: 746; WAN024CBB; Start 188; Stop 212
ttaccttggaatttacagagttcac

SEQ ID NO: 272252 - DNA, 25 bp, Artificial
  probe
  misc_feature (1)..(25): SEQ ID NO: 746; WAN024CBB; Start 193; Stop 217
ttggaatttacagagttcacagact

SEQ ID NO: 272253 - DNA, 25 bp, Artificial
  probe
  misc_feature (1)..(25): SEQ ID NO: 746; WAN024CBB; Start 259; Stop 283
ttgaacgctttccaacactataact

SEQ ID NO: 272254 - DNA, 25 bp, Artificial
  probe
  misc_feature (1)..(25): SEQ ID NO: 746; WAN024CBB; Start 381; Stop 405
tgccaacaagtacactaaagtagaa

SEQ ID NO: 272255 - DNA, 25 bp, Artificial
  probe
  misc_feature (1)..(25): SEQ ID NO: 746; WAN024CBB; Start 382; Stop 406
gccaacaagtacactaaagtagaag

SEQ ID NO: 272256 - DNA, 25 bp, Artificial
  probe
  misc_feature (1)..(25): SEQ ID NO: 746; WAN024CBB; Start 390; Stop 414
gtacactaaagtagaagacatccca

SEQ ID NO: 272257 - DNA, 25 bp, Artificial
  probe
  misc_feature (1)..(25): SEQ ID NO: 746; WAN024CBB; Start 194; Stop 218
tggaatttacagagttcacagacta

SEQ ID NO: 272258 - DNA, 25 bp, Artificial
  probe
  misc_feature (1)..(25): SEQ ID NO: 746; WAN024CBB; Start 389; Stop 413
agtacactaaagtagaagacatccc

SEQ ID NO: 272259 - DNA, 25 bp, Artificial
  probe
  misc_feature (1)..(25): SEQ ID NO: 746; WAN024CBB; Start 181; Stop 205
gacggaattaccttggaatttacag

SEQ ID NO: 272260 - DNA, 25 bp, Artificial
  probe
  misc_feature (1)..(25): SEQ ID NO: 746; WAN024CBB; Start 183; Stop 207
cggaattaccttggaatttacagag

SEQ ID NO: 272261 - DNA, 25 bp, Artificial
  probe
  misc_feature (1)..(25): SEQ ID NO: 746; WAN024CBB; Start 182; Stop 206
acggaattaccttggaatttacaga

SEQ ID NO: 272262 - DNA, 25 bp, Artificial
  probe
  misc_feature (1)..(25): SEQ ID NO: 746; WAN024CBB; Start 180; Stop 204
agacggaattaccttggaatttaca

SEQ ID NO: 272263 - DNA, 25 bp, Artificial
  probe
  misc_feature (1)..(25): SEQ ID NO: 747; WAN024AT7; Start 27; Stop 51
gaaagaactacctccagtgacaaac

SEQ ID NO: 272264 - DNA, 25 bp, Artificial
  probe
  misc_feature (1)..(25): SEQ ID NO: 747; WAN024AT7; Start 30; Stop 54
agaactacctccagtgacaaacttt

SEQ ID NO: 272265 - DNA, 25 bp, Artificial
  probe
  misc_feature (1)..(25): SEQ ID NO: 747; WAN024AT7; Start 29; Stop 53
aagaactacctccagtgacaaactt

SEQ ID NO: 272266 - DNA, 25 bp, Artificial
  probe
  misc_feature (1)..(25): SEQ ID NO: 747; WAN024AT7; Start 28; Stop 52
aaagaactacctccagtgacaaact

SEQ ID NO: 272267 - DNA, 25 bp, Artificial
  probe
  misc_feature (1)..(25): SEQ ID NO: 747; WAN024AT7; Start 26; Stop 50
tgaaagaactacctccagtgacaaa

SEQ ID NO: 272268 - DNA, 25 bp, Artificial
  probe
  misc_feature (1)..(25): SEQ ID NO: 747; WAN024AT7; Start 31; Stop 55
gaactacctccagtgacaaactttg

SEQ ID NO: 272269 - DNA, 25 bp, Artificial
  probe
  misc_feature (1)..(25): SEQ ID NO: 747; WAN024AT7; Start 35; Stop 59
tacctccagtgacaaactttgagaa

SEQ ID NO: 272270 - DNA, 25 bp, Artificial
  probe
  misc_feature (1)..(25): SEQ ID NO: 747; WAN024AT7; Start 90; Stop 114
aataggaagcatccgcattgttaaa

SEQ ID NO: 272271 - DNA, 25 bp, Artificial
  probe
  misc_feature (1)..(25): SEQ ID NO: 747; WAN024AT7; Start 89; Stop 113
aaataggaagcatccgcattgttaa

SEQ ID NO: 272272 - DNA, 25 bp, Artificial
  probe
  misc_feature (1)..(25): SEQ ID NO: 747; WAN024AT7; Start 32; Stop 56
aactacctccagtgacaaactttga

SEQ ID NO: 272273 - DNA, 25 bp, Artificial
  probe
  misc_feature (1)..(25): SEQ ID NO: 747; WAN024AT7; Start 25; Stop 49
ctgaaagaactacctccagtgacaa

SEQ ID NO: 272274 - DNA, 25 bp, Artificial
  probe
  misc_feature (1)..(25): SEQ ID NO: 747; WAN024AT7; Start 34; Stop 58
ctacctccagtgacaaactttgaga

SEQ ID NO: 272275 - DNA, 25 bp, Artificial
  probe
  misc_feature (1)..(25): SEQ ID NO: 747; WAN024AT7; Start 36; Stop 60
acctccagtgacaaactttgagaaa

SEQ ID NO: 272276 - DNA, 25 bp, Artificial
  probe
  misc_feature (1)..(25): SEQ ID NO: 747; WAN024AT7; Start 33; Stop 57
actacctccagtgacaaactttgag

SEQ ID NO: 272277 - DNA, 25 bp, Artificial
  probe
  misc_feature (1)..(25): SEQ ID NO: 747; WAN024AT7; Start 37; Stop 61
cctccagtgacaaactttgagaaaa

SEQ ID NO: 272278 - DNA, 25 bp, Artificial
  probe
  misc_feature (1)..(25): SEQ ID NO: 747; WAN024AT7; Start 92; Stop 116
taggaagcatccgcattgttaaaat

SEQ ID NO: 272279 - DNA, 25 bp, Artificial
  probe
  misc_feature (1)..(25): SEQ ID NO: 747; WAN024AT7; Start 91; Stop 115
ataggaagcatccgcattgttaaaa

SEQ ID NO: 272280 - DNA, 25 bp, Artificial
  probe
  misc_feature (1)..(25): SEQ ID NO: 747; WAN024AT7; Start 88; Stop 112
aaaataggaagcatccgcattgtta

SEQ ID NO: 272281 - DNA, 25 bp, Artificial
  probe
  misc_feature (1)..(25): SEQ ID NO: 747; WAN024AT7; Start 93; Stop 117
aggaagcatccgcattgttaaaatc

SEQ ID NO: 272282 - DNA, 25 bp, Artificial
  probe
  misc_feature (1)..(25): SEQ ID NO: 747; WAN024AT7; Start 23; Stop 47
aactgaaagaactacctccagtgac

SEQ ID NO: 272283 - DNA, 25 bp, Artificial
  probe
  misc_feature (1)..(25): SEQ ID NO: 747; WAN024AT7; Start 22; Stop 46
caactgaaagaactacctccagtga

SEQ ID NO: 272284 - DNA, 25 bp, Artificial
  probe
  misc_feature (1)..(25): SEQ ID NO: 747; WAN024AT7; Start 94; Stop 118
ggaagcatccgcattgttaaaatcc

SEQ ID NO: 272285 - DNA, 25 bp, Artificial
  probe
  misc_feature (1)..(25): SEQ ID NO: 747; WAN024AT7; Start 21; Stop 45
ccaactgaaagaactacctccagtg

SEQ ID NO: 272286 - DNA, 25 bp, Artificial
  probe
  misc_feature (1)..(25): SEQ ID NO: 747; WAN024AT7; Start 24; Stop 48
actgaaagaactacctccagtgaca

SEQ ID NO: 272287 - DNA, 25 bp, Artificial
  probe
  misc_feature (1)..(25): SEQ ID NO: 748; WAN024F7S; Start 5; Stop 29
aaatcaaagaagaaactagcaagct

SEQ ID NO: 272288 - DNA, 25 bp, Artificial
  probe
  misc_feature (1)..(25): SEQ ID NO: 748; WAN024F7S; Start 6; Stop 30
aatcaaagaagaaactagcaagcta

SEQ ID NO: 272289 - DNA, 25 bp, Artificial
  probe
  misc_feature (1)..(25): SEQ ID NO: 748; WAN024F7S; Start 69; Stop 93
taagactgacctatataatccaagg

SEQ ID NO: 272290 - DNA, 25 bp, Artificial
  probe
  misc_feature (1)..(25): SEQ ID NO: 748; WAN024F7S; Start 60; Stop 84
ggttgtagataagactgacctatat

SEQ ID NO: 272291 - DNA, 25 bp, Artificial
  probe
  misc_feature (1)..(25): SEQ ID NO: 748; WAN024F7S; Start 66; Stop 90
agataagactgacctatataatcca

SEQ ID NO: 272292 - DNA, 25 bp, Artificial
  probe
  misc_feature (1)..(25): SEQ ID NO: 748; WAN024F7S; Start 4; Stop 28
aaaatcaaagaagaaactagcaagc

SEQ ID NO: 272293 - DNA, 25 bp, Artificial
  probe
  misc_feature (1)..(25): SEQ ID NO: 748; WAN024F7S; Start 68; Stop 92
ataagactgacctatataatccaag

SEQ ID NO: 272294 - DNA, 25 bp, Artificial
  probe
  misc_feature (1)..(25): SEQ ID NO: 748; WAN024F7S; Start 57; Stop 81
tgaggttgtagataagactgaccta

SEQ ID NO: 272295 - DNA, 25 bp, Artificial
  probe
  misc_feature (1)..(25): SEQ ID NO: 748; WAN024F7S; Start 7; Stop 31
atcaaagaagaaactagcaagctag

SEQ ID NO: 272296 - DNA, 25 bp, Artificial
  probe
  misc_feature (1)..(25): SEQ ID NO: 748; WAN024F7S; Start 67; Stop 91
gataagactgacctatataatccaa

SEQ ID NO: 272297 - DNA, 25 bp, Artificial
  probe
  misc_feature (1)..(25): SEQ ID NO: 748; WAN024F7S; Start 56; Stop 80
ttgaggttgtagataagactgacct

SEQ ID NO: 272298 - DNA, 25 bp, Artificial
  probe
  misc_feature (1)..(25): SEQ ID NO: 748; WAN024F7S; Start 58; Stop 82
gaggttgtagataagactgacctat

SEQ ID NO: 272299 - DNA, 25 bp, Artificial
  probe
  misc_feature (1)..(25): SEQ ID NO: 748; WAN024F7S; Start 2; Stop 26
tgaaaatcaaagaagaaactagcaa

SEQ ID NO: 272300 - DNA, 25 bp, Artificial
  probe
  misc_feature (1)..(25): SEQ ID NO: 748; WAN024F7S; Start 3; Stop 27
gaaaatcaaagaagaaactagcaag

SEQ ID NO: 272301 - DNA, 25 bp, Artificial
  probe
  misc_feature (1)..(25): SEQ ID NO: 748; WAN024F7S; Start 1; Stop 25
atgaaaatcaaagaagaaactagca

SEQ ID NO: 272302 - DNA, 25 bp, Artificial
  probe
  misc_feature (1)..(25): SEQ ID NO: 748; WAN024F7S; Start 59; Stop 83
aggttgtagataagactgacctata

SEQ ID NO: 272303 - DNA, 25 bp, Artificial
  probe
  misc_feature (1)..(25): SEQ ID NO: 748; WAN024F7S; Start 28; Stop 52
ctagtagcagattgcccaaaacacc

SEQ ID NO: 272304 - DNA, 25 bp, Artificial
  probe
  misc_feature (1)..(25): SEQ ID NO: 748; WAN024F7S; Start 25; Stop 49
aagctagtagcagattgcccaaaac

SEQ ID NO: 272305 - DNA, 25 bp, Artificial
  probe
  misc_feature (1)..(25): SEQ ID NO: 748; WAN024F7S; Start 24; Stop 48
caagctagtagcagattgcccaaaa

SEQ ID NO: 272306 - DNA, 25 bp, Artificial
  probe
  misc_feature (1)..(25): SEQ ID NO: 748; WAN024F7S; Start 8; Stop 32
tcaaagaagaaactagcaagctagt

SEQ ID NO: 272307 - DNA, 25 bp, Artificial
  probe
  misc_feature (1)..(25): SEQ ID NO: 748; WAN024F7S; Start 11; Stop 35
aagaagaaactagcaagctagtagc

SEQ ID NO: 272308 - DNA, 25 bp, Artificial
  probe
  misc_feature (1)..(25): SEQ ID NO: 748; WAN024F7S; Start 16; Stop 40
gaaactagcaagctagtagcagatt

SEQ ID NO: 272309 - DNA, 25 bp, Artificial
  probe
  misc_feature (1)..(25): SEQ ID NO: 748; WAN024F7S; Start 27; Stop 51
gctagtagcagattgcccaaaacac

SEQ ID NO: 272310 - DNA, 25 bp, Artificial
  probe
  misc_feature (1)..(25): SEQ ID NO: 748; WAN024F7S; Start 17; Stop 41
aaactagcaagctagtagcagattg

SEQ ID NO: 272311 - DNA, 25 bp, Artificial
  probe
  misc_feature (1)..(25): SEQ ID NO: 748; WAN024F7S; Start 13; Stop 37
gaagaaactagcaagctagtagcag

SEQ ID NO: 272312 - DNA, 25 bp, Artificial
  probe
  misc_feature (1)..(25): SEQ ID NO: 748; WAN024F7S; Start 9; Stop 33
caaagaagaaactagcaagctagta

SEQ ID NO: 272313 - DNA, 25 bp, Artificial
  probe
  misc_feature (1)..(25): SEQ ID NO: 748; WAN024F7S; Start 15; Stop 39
agaaactagcaagctagtagcagat

SEQ ID NO: 272314 - DNA, 25 bp, Artificial
  probe
  misc_feature (1)..(25): SEQ ID NO: 748; WAN024F7S; Start 10; Stop 34
aaagaagaaactagcaagctagtag

SEQ ID NO: 272315 - DNA, 25 bp, Artificial
  probe
  misc_feature (1)..(25): SEQ ID NO: 748; WAN024F7S; Start 18; Stop 42
aactagcaagctagtagcagattgc

SEQ ID NO: 272316 - DNA, 25 bp, Artificial
  probe
  misc_feature (1)..(25): SEQ ID NO: 748; WAN024F7S; Start 14; Stop 38
aagaaactagcaagctagtagcaga

SEQ ID NO: 272317 - DNA, 25 bp, Artificial
  probe
  misc_feature (1)..(25): SEQ ID NO: 748; WAN024F7S; Start 12; Stop 36
agaagaaactagcaagctagtagca

SEQ ID NO: 272318 - DNA, 25 bp, Artificial
  probe
  misc_feature (1)..(25): SEQ ID NO: 748; WAN024F7S; Start 26; Stop 50
agctagtagcagattgcccaaaaca

SEQ ID NO: 272319 - DNA, 25 bp, Artificial
  probe
  misc_feature (1)..(25): SEQ ID NO: 748; WAN024F7S; Start 19; Stop 43
actagcaagctagtagcagattgcc

SEQ ID NO: 272320 - DNA, 25 bp, Artificial
  probe
  misc_feature (1)..(25): SEQ ID NO: 748; WAN024F7S; Start 20; Stop 44
ctagcaagctagtagcagattgccc

SEQ ID NO: 272321 - DNA, 25 bp, Artificial
  probe
  misc_feature (1)..(25): SEQ ID NO: 749; WAN024BEO; Start 114; Stop 138
tgaagctgacgtggttctaactaat

SEQ ID NO: 272322 - DNA, 25 bp, Artificial
  probe
  misc_feature (1)..(25): SEQ ID NO: 749; WAN024BEO; Start 113; Stop 137
atgaagctgacgtggttctaactaa

SEQ ID NO: 272323 - DNA, 25 bp, Artificial
  probe
  misc_feature (1)..(25): SEQ ID NO: 749; WAN024BEO; Start 112; Stop 136
gatgaagctgacgtggttctaacta

SEQ ID NO: 272324 - DNA, 25 bp, Artificial
  probe
  misc_feature (1)..(25): SEQ ID NO: 749; WAN024BEO; Start 6; Stop 30
aatcaaagaccaaactaggaagcta

SEQ ID NO: 272325 - DNA, 25 bp, Artificial
  probe
  misc_feature (1)..(25): SEQ ID NO: 749; WAN024BEO; Start 5; Stop 29
aaatcaaagaccaaactaggaagct

SEQ ID NO: 272326 - DNA, 25 bp, Artificial
  probe
  misc_feature (1)..(25): SEQ ID NO: 749; WAN024BEO; Start 7; Stop 31
atcaaagaccaaactaggaagctag

SEQ ID NO: 272327 - DNA, 25 bp, Artificial
  probe
  misc_feature (1)..(25): SEQ ID NO: 749; WAN024BEO; Start 4; Stop 28
aaaatcaaagaccaaactaggaagc

SEQ ID NO: 272328 - DNA, 25 bp, Artificial
  probe
  misc_feature (1)..(25): SEQ ID NO: 749; WAN024BEO; Start 2; Stop 26
tgaaaatcaaagaccaaactaggaa

SEQ ID NO: 272329 - DNA, 25 bp, Artificial
  probe
  misc_feature (1)..(25): SEQ ID NO: 749; WAN024BEO; Start 1; Stop 25
atgaaaatcaaagaccaaactagga

SEQ ID NO: 272330 - DNA, 25 bp, Artificial
  probe
  misc_feature (1)..(25): SEQ ID NO: 749; WAN024BEO; Start 111; Stop 135
ggatgaagctgacgtggttctaact

SEQ ID NO: 272331 - DNA, 25 bp, Artificial
  probe
  misc_feature (1)..(25): SEQ ID NO: 749; WAN024BEO; Start 94; Stop 118
cactgttttgaggttgtggatgaag

SEQ ID NO: 272332 - DNA, 25 bp, Artificial
  probe
  misc_feature (1)..(25): SEQ ID NO: 749; WAN024BEO; Start 110; Stop 134
tggatgaagctgacgtggttctaac

SEQ ID NO: 272333 - DNA, 25 bp, Artificial
  probe
  misc_feature (1)..(25): SEQ ID NO: 749; WAN024BEO; Start 109; Stop 133
gtggatgaagctgacgtggttctaa

SEQ ID NO: 272334 - DNA, 25 bp, Artificial
  probe
  misc_feature (1)..(25): SEQ ID NO: 749; WAN024BEO; Start 95; Stop 119
actgttttgaggttgtggatgaagc

SEQ ID NO: 272335 - DNA, 25 bp, Artificial
  probe
  misc_feature (1)..(25): SEQ ID NO: 749; WAN024BEO; Start 99; Stop 123
ttttgaggttgtggatgaagctgac

SEQ ID NO: 272336 - DNA, 25 bp, Artificial
  probe
  misc_feature (1)..(25): SEQ ID NO: 749; WAN024BEO; Start 98; Stop 122
gttttgaggttgtggatgaagctga

SEQ ID NO: 272337 - DNA, 25 bp, Artificial
  probe
  misc_feature (1)..(25): SEQ ID NO: 749; WAN024BEO; Start 96; Stop 120
ctgttttgaggttgtggatgaagct

SEQ ID NO: 272338 - DNA, 25 bp, Artificial
  probe
  misc_feature (1)..(25): SEQ ID NO: 749; WAN024BEO; Start 97; Stop 121
tgttttgaggttgtggatgaagctg

SEQ ID NO: 272339 - DNA, 25 bp, Artificial
  probe
  misc_feature (1)..(25): SEQ ID NO: 750; WAN024BDS; Start 180; Stop 204
cgaagagtataaaggtgtaccgaga

SEQ ID NO: 272340 - DNA, 25 bp, Artificial
  probe
  misc_feature (1)..(25): SEQ ID NO: 750; WAN024BDS; Start 179; Stop 203
tcgaagagtataaaggtgtaccgag

SEQ ID NO: 272341 - DNA, 25 bp, Artificial
  probe
  misc_feature (1)..(25): SEQ ID NO: 750; WAN024BDS; Start 177; Stop 201
tttcgaagagtataaaggtgtaccg

SEQ ID NO: 272342 - DNA, 25 bp, Artificial
  probe
  misc_feature (1)..(25): SEQ ID NO: 750; WAN024BDS; Start 178; Stop 202
ttcgaagagtataaaggtgtaccga

SEQ ID NO: 272343 - DNA, 25 bp, Artificial
  probe
  misc_feature (1)..(25): SEQ ID NO: 750; WAN024BDS; Start 176; Stop 200
ttttcgaagagtataaaggtgtacc

SEQ ID NO: 272344 - DNA, 25 bp, Artificial
  probe
  misc_feature (1)..(25): SEQ ID NO: 751; WAN024BDQ; Start 163; Stop 187
cggattgaagagattttcgaagagt

SEQ ID NO: 272345 - DNA, 25 bp, Artificial
  probe
  misc_feature (1)..(25): SEQ ID NO: 751; WAN024BDQ; Start 164; Stop 188
ggattgaagagattttcgaagagta

SEQ ID NO: 272346 - DNA, 25 bp, Artificial
  probe
  misc_feature (1)..(25): SEQ ID NO: 751; WAN024BDQ; Start 162; Stop 186
gcggattgaagagattttcgaagag

SEQ ID NO: 272347 - DNA, 25 bp, Artificial
  probe
  misc_feature (1)..(25): SEQ ID NO: 751; WAN024BDQ; Start 156; Stop 180
gttgacgcggattgaagagattttc

SEQ ID NO: 272348 - DNA, 25 bp, Artificial
  probe
  misc_feature (1)..(25): SEQ ID NO: 751; WAN024BDQ; Start 165; Stop 189
gattgaagagattttcgaagagtat

SEQ ID NO: 272349 - DNA, 25 bp, Artificial
  probe
  misc_feature (1)..(25): SEQ ID NO: 751; WAN024BDQ; Start 161; Stop 185
cgcggattgaagagattttcgaaga

SEQ ID NO: 272350 - DNA, 25 bp, Artificial
  probe
  misc_feature (1)..(25): SEQ ID NO: 751; WAN024BDQ; Start 160; Stop 184
acgcggattgaagagattttcgaag

SEQ ID NO: 272351 - DNA, 25 bp, Artificial
  probe
  misc_feature (1)..(25): SEQ ID NO: 751; WAN024BDQ; Start 159; Stop 183
gacgcggattgaagagattttcgaa

SEQ ID NO: 272352 - DNA, 25 bp, Artificial
  probe
  misc_feature (1)..(25): SEQ ID NO: 751; WAN024BDQ; Start 157; Stop 181
ttgacgcggattgaagagattttcg

SEQ ID NO: 272353 - DNA, 25 bp, Artificial
  probe
  misc_feature (1)..(25): SEQ ID NO: 751; WAN024BDQ; Start 166; Stop 190
attgaagagattttcgaagagtata

SEQ ID NO: 272354 - DNA, 25 bp, Artificial
  probe
  misc_feature (1)..(25): SEQ ID NO: 751; WAN024BDQ; Start 155; Stop 179
cgttgacgcggattgaagagatttt

SEQ ID NO: 272355 - DNA, 25 bp, Artificial
  probe
  misc_feature (1)..(25): SEQ ID NO: 751; WAN024BDQ; Start 158; Stop 182
tgacgcggattgaagagattttcga

SEQ ID NO: 272356 - DNA, 25 bp, Artificial
  probe
  misc_feature (1)..(25): SEQ ID NO: 751; WAN024BDQ; Start 170; Stop 194
aagagattttcgaagagtataaatc

SEQ ID NO: 272357 - DNA, 25 bp, Artificial
  probe
  misc_feature (1)..(25): SEQ ID NO: 752; WAN024BF2; Start 80; Stop 104
aagtcagtaaccatacatacggcaa

SEQ ID NO: 272358 - DNA, 25 bp, Artificial
  probe
  misc_feature (1)..(25): SEQ ID NO: 752; WAN024BF2; Start 77; Stop 101
acgaagtcagtaaccatacatacgg

SEQ ID NO: 272359 - DNA, 25 bp, Artificial
  probe
  misc_feature (1)..(25): SEQ ID NO: 752; WAN024BF2; Start 76; Stop 100
gacgaagtcagtaaccatacatacg

SEQ ID NO: 272360 - DNA, 25 bp, Artificial
  probe
  misc_feature (1)..(25): SEQ ID NO: 752; WAN024BF2; Start 81; Stop 105
agtcagtaaccatacatacggcaag

SEQ ID NO: 272361 - DNA, 25 bp, Artificial
  probe
  misc_feature (1)..(25): SEQ ID NO: 752; WAN024BF2; Start 79; Stop 103
gaagtcagtaaccatacatacggca

SEQ ID NO: 272362 - DNA, 25 bp, Artificial
  probe
  misc_feature (1)..(25): SEQ ID NO: 752; WAN024BF2; Start 82; Stop 106
gtcagtaaccatacatacggcaagg

SEQ ID NO: 272363 - DNA, 25 bp, Artificial
  probe
  misc_feature (1)..(25): SEQ ID NO: 752; WAN024BF2; Start 78; Stop 102
cgaagtcagtaaccatacatacggc

SEQ ID NO: 272364 - DNA, 25 bp, Artificial
  probe
  misc_feature (1)..(25): SEQ ID NO: 752; WAN024BF2; Start 85; Stop 109
agtaaccatacatacggcaaggcaa

SEQ ID NO: 272365 - DNA, 25 bp, Artificial
  probe
  misc_feature (1)..(25): SEQ ID NO: 752; WAN024BF2; Start 87; Stop 111
taaccatacatacggcaaggcaaag

SEQ ID NO: 272366 - DNA, 25 bp, Artificial
  probe
  misc_feature (1)..(25): SEQ ID NO: 752; WAN024BF2; Start 86; Stop 110
gtaaccatacatacggcaaggcaaa

SEQ ID NO: 272367 - DNA, 25 bp, Artificial
  probe
  misc_feature (1)..(25): SEQ ID NO: 752; WAN024BF2; Start 83; Stop 107
tcagtaaccatacatacggcaaggc

SEQ ID NO: 272368 - DNA, 25 bp, Artificial
  probe
  misc_feature (1)..(25): SEQ ID NO: 752; WAN024BF2; Start 75; Stop 99
tgacgaagtcagtaaccatacatac

SEQ ID NO: 272369 - DNA, 25 bp, Artificial
  probe
  misc_feature (1)..(25): SEQ ID NO: 752; WAN024BF2; Start 84; Stop 108
cagtaaccatacatacggcaaggca

SEQ ID NO: 272370 - DNA, 25 bp, Artificial
  probe
  misc_feature (1)..(25): SEQ ID NO: 752; WAN024BF2; Start 122; Stop 146
ttgaagagattttcgaagagtatct

SEQ ID NO: 272371 - DNA, 25 bp, Artificial
  probe
  misc_feature (1)..(25): SEQ ID NO: 752; WAN024BF2; Start 126; Stop 150
agagattttcgaagagtatctaact

SEQ ID NO: 272372 - DNA, 25 bp, Artificial
  probe
  misc_feature (1)..(25): SEQ ID NO: 752; WAN024BF2; Start 123; Stop 147
tgaagagattttcgaagagtatcta

SEQ ID NO: 272373 - DNA, 25 bp, Artificial
  probe
  misc_feature (1)..(25): SEQ ID NO: 752; WAN024BF2; Start 125; Stop 149
aagagattttcgaagagtatctaac

SEQ ID NO: 272374 - DNA, 25 bp, Artificial
  probe
  misc_feature (1)..(25): SEQ ID NO: 752; WAN024BF2; Start 124; Stop 148
gaagagattttcgaagagtatctaa

SEQ ID NO: 272375 - DNA, 25 bp, Artificial
  probe
  misc_feature (1)..(25): SEQ ID NO: 752; WAN024BF2; Start 127; Stop 151
gagattttcgaagagtatctaacta

SEQ ID NO: 272376 - DNA, 25 bp, Artificial
  probe
  misc_feature (1)..(25): SEQ ID NO: 752; WAN024BF2; Start 128; Stop 152
agattttcgaagagtatctaactaa

SEQ ID NO: 272377 - DNA, 25 bp, Artificial
  probe
  misc_feature (1)..(25): SEQ ID NO: 753; WAN024BES; Start 154; Stop 178
atgctgacgtggtttgaatttgatt

SEQ ID NO: 272378 - DNA, 25 bp, Artificial
  probe
  misc_feature (1)..(25): SEQ ID NO: 753; WAN024BES; Start 155; Stop 179
tgctgacgtggtttgaatttgattt

SEQ ID NO: 272379 - DNA, 25 bp, Artificial
  probe
  misc_feature (1)..(25): SEQ ID NO: 753; WAN024BES; Start 153; Stop 177
gatgctgacgtggtttgaatttgat

SEQ ID NO: 272380 - DNA, 25 bp, Artificial
  probe
  misc_feature (1)..(25): SEQ ID NO: 753; WAN024BES; Start 128; Stop 152
tcagtaaccatacctacggtaaggc

SEQ ID NO: 272381 - DNA, 25 bp, Artificial
  probe
  misc_feature (1)..(25): SEQ ID NO: 753; WAN024BES; Start 157; Stop 181
ctgacgtggtttgaatttgattttc

SEQ ID NO: 272382 - DNA, 25 bp, Artificial
  probe
  misc_feature (1)..(25): SEQ ID NO: 753; WAN024BES; Start 156; Stop 180
gctgacgtggtttgaatttgatttt

SEQ ID NO: 272383 - DNA, 25 bp, Artificial
  probe
  misc_feature (1)..(25): SEQ ID NO: 753; WAN024BES; Start 132; Stop 156
taaccatacctacggtaaggcgatg

SEQ ID NO: 272384 - DNA, 25 bp, Artificial
  probe
  misc_feature (1)..(25): SEQ ID NO: 753; WAN024BES; Start 131; Stop 155
gtaaccatacctacggtaaggcgat

SEQ ID NO: 272385 - DNA, 25 bp, Artificial
  probe
  misc_feature (1)..(25): SEQ ID NO: 753; WAN024BES; Start 161; Stop 185
cgtggtttgaatttgattttcatct

SEQ ID NO: 272386 - DNA, 25 bp, Artificial
  probe
  misc_feature (1)..(25): SEQ ID NO: 753; WAN024BES; Start 129; Stop 153
cagtaaccatacctacggtaaggcg

SEQ ID NO: 272387 - DNA, 25 bp, Artificial
  probe
  misc_feature (1)..(25): SEQ ID NO: 753; WAN024BES; Start 152; Stop 176
cgatgctgacgtggtttgaatttga

SEQ ID NO: 272388 - DNA, 25 bp, Artificial
  probe
  misc_feature (1)..(25): SEQ ID NO: 753; WAN024BES; Start 130; Stop 154
agtaaccatacctacggtaaggcga

SEQ ID NO: 272389 - DNA, 25 bp, Artificial
  probe
  misc_feature (1)..(25): SEQ ID NO: 753; WAN024BES; Start 158; Stop 182
tgacgtggtttgaatttgattttca

SEQ ID NO: 272390 - DNA, 25 bp, Artificial
  probe
  misc_feature (1)..(25): SEQ ID NO: 753; WAN024BES; Start 160; Stop 184
acgtggtttgaatttgattttcatc

SEQ ID NO: 272391 - DNA, 25 bp, Artificial
  probe
  misc_feature (1)..(25): SEQ ID NO: 753; WAN024BES; Start 159; Stop 183
gacgtggtttgaatttgattttcat

SEQ ID NO: 272392 - DNA, 25 bp, Artificial
  probe
  misc_feature (1)..(25): SEQ ID NO: 753; WAN024BES; Start 162; Stop 186
gtggtttgaatttgattttcatcta

SEQ ID NO: 272393 - DNA, 25 bp, Artificial
  probe
  misc_feature (1)..(25): SEQ ID NO: 753; WAN024BES; Start 163; Stop 187
tggtttgaatttgattttcatctaa

SEQ ID NO: 272394 - DNA, 25 bp, Artificial
  probe
  misc_feature (1)..(25): SEQ ID NO: 753; WAN024BES; Start 164; Stop 188
ggtttgaatttgattttcatctaac

SEQ ID NO: 272395 - DNA, 25 bp, Artificial
  probe
  misc_feature (1)..(25): SEQ ID NO: 754; WAN024BE9; Start 76; Stop 100
gacgaagtcagtagccatacctacg

SEQ ID NO: 272396 - DNA, 25 bp, Artificial
  probe
  misc_feature (1)..(25): SEQ ID NO: 754; WAN024BE9; Start 75; Stop 99
tgacgaagtcagtagccatacctac

SEQ ID NO: 272397 - DNA, 25 bp, Artificial
  probe
  misc_feature (1)..(25): SEQ ID NO: 754; WAN024BE9; Start 124; Stop 148
gaagagattttcgaagagtatcaac

SEQ ID NO: 272398 - DNA, 25 bp, Artificial
  probe
  misc_feature (1)..(25): SEQ ID NO: 754; WAN024BE9; Start 125; Stop 149
aagagattttcgaagagtatcaact

SEQ ID NO: 272399 - DNA, 25 bp, Artificial
  probe
  misc_feature (1)..(25): SEQ ID NO: 754; WAN024BE9; Start 123; Stop 147
tgaagagattttcgaagagtatcaa

SEQ ID NO: 272400 - DNA, 25 bp, Artificial
  probe
  misc_feature (1)..(25): SEQ ID NO: 754; WAN024BE9; Start 132; Stop 156
tttcgaagagtatcaactaactaat

SEQ ID NO: 272401 - DNA, 25 bp, Artificial
  probe
  misc_feature (1)..(25): SEQ ID NO: 754; WAN024BE9; Start 126; Stop 150
agagattttcgaagagtatcaacta

SEQ ID NO: 272402 - DNA, 25 bp, Artificial
  probe
  misc_feature (1)..(25): SEQ ID NO: 754; WAN024BE9; Start 129; Stop 153
gattttcgaagagtatcaactaact

SEQ ID NO: 272403 - DNA, 25 bp, Artificial
  probe
  misc_feature (1)..(25): SEQ ID NO: 754; WAN024BE9; Start 128; Stop 152
agattttcgaagagtatcaactaac

SEQ ID NO: 272404 - DNA, 25 bp, Artificial
  probe
  misc_feature (1)..(25): SEQ ID NO: 754; WAN024BE9; Start 111; Stop 135
gttgacgcggtttgaagagattttc

SEQ ID NO: 272405 - DNA, 25 bp, Artificial
  probe
  misc_feature (1)..(25): SEQ ID NO: 754; WAN024BE9; Start 127; Stop 151
gagattttcgaagagtatcaactaa

SEQ ID NO: 272406 - DNA, 25 bp, Artificial
  probe
  misc_feature (1)..(25): SEQ ID NO: 754; WAN024BE9; Start 131; Stop 155
ttttcgaagagtatcaactaactaa

SEQ ID NO: 272407 - DNA, 25 bp, Artificial
  probe
  misc_feature (1)..(25): SEQ ID NO: 754; WAN024BE9; Start 130; Stop 154
attttcgaagagtatcaactaacta

SEQ ID NO: 272408 - DNA, 25 bp, Artificial
  probe
  misc_feature (1)..(25): SEQ ID NO: 754; WAN024BE9; Start 112; Stop 136
ttgacgcggtttgaagagattttcg

SEQ ID NO: 272409 - DNA, 25 bp, Artificial
  probe
  misc_feature (1)..(25): SEQ ID NO: 755; WAN024BF4; Start 58; Stop 82
gagattgtggatagaactgacgaag

SEQ ID NO: 272410 - DNA, 25 bp, Artificial
  probe
  misc_feature (1)..(25): SEQ ID NO: 755; WAN024BF4; Start 57; Stop 81
tgagattgtggatagaactgacgaa

SEQ ID NO: 272411 - DNA, 25 bp, Artificial
  probe
  misc_feature (1)..(25): SEQ ID NO: 755; WAN024BF4; Start 56; Stop 80
ttgagattgtggatagaactgacga

SEQ ID NO: 272412 - DNA, 25 bp, Artificial
  probe
  misc_feature (1)..(25): SEQ ID NO: 755; WAN024BF4; Start 55; Stop 79
tttgagattgtggatagaactgacg

SEQ ID NO: 272413 - DNA, 25 bp, Artificial
  probe
  misc_feature (1)..(25): SEQ ID NO: 755; WAN024BF4; Start 231; Stop 255
ttatagattagttaggcaagtaagc

SEQ ID NO: 272414 - DNA, 25 bp, Artificial
  probe
  misc_feature (1)..(25): SEQ ID NO: 755; WAN024BF4; Start 225; Stop 249
cgatgtttatagattagttaggcaa

SEQ ID NO: 272415 - DNA, 25 bp, Artificial
  probe
  misc_feature (1)..(25): SEQ ID NO: 755; WAN024BF4; Start 182; Stop 206
aagagtataaaatgatggggaaggc

SEQ ID NO: 272416 - DNA, 25 bp, Artificial
  probe
  misc_feature (1)..(25): SEQ ID NO: 755; WAN024BF4; Start 180; Stop 204
cgaagagtataaaatgatggggaag

SEQ ID NO: 272417 - DNA, 25 bp, Artificial
  probe
  misc_feature (1)..(25): SEQ ID NO: 755; WAN024BF4; Start 49; Stop 73
cagtgttttgagattgtggatagaa

SEQ ID NO: 272418 - DNA, 25 bp, Artificial
  probe
  misc_feature (1)..(25): SEQ ID NO: 755; WAN024BF4; Start 54; Stop 78
ttttgagattgtggatagaactgac

SEQ ID NO: 272419 - DNA, 25 bp, Artificial
  probe
  misc_feature (1)..(25): SEQ ID NO: 755; WAN024BF4; Start 181; Stop 205
gaagagtataaaatgatggggaagg

SEQ ID NO: 272420 - DNA, 25 bp, Artificial
  probe
  misc_feature (1)..(25): SEQ ID NO: 755; WAN024BF4; Start 184; Stop 208
gagtataaaatgatggggaaggctg

SEQ ID NO: 272421 - DNA, 25 bp, Artificial
  probe
  misc_feature (1)..(25): SEQ ID NO: 755; WAN024BF4; Start 183; Stop 207
agagtataaaatgatggggaaggct

SEQ ID NO: 272422 - DNA, 25 bp, Artificial
  probe
  misc_feature (1)..(25): SEQ ID NO: 755; WAN024BF4; Start 52; Stop 76
tgttttgagattgtggatagaactg

SEQ ID NO: 272423 - DNA, 25 bp, Artificial
  probe
  misc_feature (1)..(25): SEQ ID NO: 755; WAN024BF4; Start 51; Stop 75
gtgttttgagattgtggatagaact

SEQ ID NO: 272424 - DNA, 25 bp, Artificial
  probe
  misc_feature (1)..(25): SEQ ID NO: 755; WAN024BF4; Start 50; Stop 74
agtgttttgagattgtggatagaac

SEQ ID NO: 272425 - DNA, 25 bp, Artificial
  probe
  misc_feature (1)..(25): SEQ ID NO: 755; WAN024BF4; Start 224; Stop 248
tcgatgtttatagattagttaggca

SEQ ID NO: 272426 - DNA, 25 bp, Artificial
  probe
  misc_feature (1)..(25): SEQ ID NO: 755; WAN024BF4; Start 53; Stop 77
gttttgagattgtggatagaactga

SEQ ID NO: 272427 - DNA, 25 bp, Artificial
  probe
  misc_feature (1)..(25): SEQ ID NO: 755; WAN024BF4; Start 48; Stop 72
acagtgttttgagattgtggataga

SEQ ID NO: 272428 - DNA, 25 bp, Artificial
  probe
  misc_feature (1)..(25): SEQ ID NO: 755; WAN024BF4; Start 185; Stop 209
agtataaaatgatggggaaggctgg

SEQ ID NO: 272429 - DNA, 25 bp, Artificial
  probe
  misc_feature (1)..(25): SEQ ID NO: 755; WAN024BF4; Start 47; Stop 71
aacagtgttttgagattgtggatag

SEQ ID NO: 272430 - DNA, 25 bp, Artificial
  probe
  misc_feature (1)..(25): SEQ ID NO: 755; WAN024BF4; Start 232; Stop 256
tatagattagttaggcaagtaagcc

SEQ ID NO: 272431 - DNA, 25 bp, Artificial
  probe
  misc_feature (1)..(25): SEQ ID NO: 755; WAN024BF4; Start 179; Stop 203
tcgaagagtataaaatgatggggaa

SEQ ID NO: 272432 - DNA, 25 bp, Artificial
  probe
  misc_feature (1)..(25): SEQ ID NO: 755; WAN024BF4; Start 227; Stop 251
atgtttatagattagttaggcaagt

SEQ ID NO: 272433 - DNA, 25 bp, Artificial
  probe
  misc_feature (1)..(25): SEQ ID NO: 755; WAN024BF4; Start 223; Stop 247
ttcgatgtttatagattagttaggc

SEQ ID NO: 272434 - DNA, 25 bp, Artificial
  probe
  misc_feature (1)..(25): SEQ ID NO: 755; WAN024BF4; Start 186; Stop 210
gtataaaatgatggggaaggctggg

SEQ ID NO: 272435 - DNA, 25 bp, Artificial
  probe
  misc_feature (1)..(25): SEQ ID NO: 755; WAN024BF4; Start 226; Stop 250
gatgtttatagattagttaggcaag

SEQ ID NO: 272436 - DNA, 25 bp, Artificial
  probe
  misc_feature (1)..(25): SEQ ID NO: 755; WAN024BF4; Start 228; Stop 252
tgtttatagattagttaggcaagta

SEQ ID NO: 272437 - DNA, 25 bp, Artificial
  probe
  misc_feature (1)..(25): SEQ ID NO: 755; WAN024BF4; Start 46; Stop 70
aaacagtgttttgagattgtggata

SEQ ID NO: 272438 - DNA, 25 bp, Artificial
  probe
  misc_feature (1)..(25): SEQ ID NO: 755; WAN024BF4; Start 178; Stop 202
ttcgaagagtataaaatgatgggga

SEQ ID NO: 272439 - DNA, 25 bp, Artificial
  probe
  misc_feature (1)..(25): SEQ ID NO: 755; WAN024BF4; Start 177; Stop 201
tttcgaagagtataaaatgatgggg

SEQ ID NO: 272440 - DNA, 25 bp, Artificial
  probe
  misc_feature (1)..(25): SEQ ID NO: 755; WAN024BF4; Start 187; Stop 211
tataaaatgatggggaaggctgggc

SEQ ID NO: 272441 - DNA, 25 bp, Artificial
  probe
  misc_feature (1)..(25): SEQ ID NO: 755; WAN024BF4; Start 176; Stop 200
ttttcgaagagtataaaatgatggg

SEQ ID NO: 272442 - DNA, 25 bp, Artificial
  probe
  misc_feature (1)..(25): SEQ ID NO: 756; WAN024F7I; Start 91; Stop 115
ctacacatacgacaaggcgatattg

SEQ ID NO: 272443 - DNA, 25 bp, Artificial
  probe
  misc_feature (1)..(25): SEQ ID NO: 756; WAN024F7I; Start 80; Stop 104
tagtcagtatcctacacatacgaca

SEQ ID NO: 272444 - DNA, 25 bp, Artificial
  probe
  misc_feature (1)..(25): SEQ ID NO: 756; WAN024F7I; Start 92; Stop 116
tacacatacgacaaggcgatattga

SEQ ID NO: 272445 - DNA, 25 bp, Artificial
  probe
  misc_feature (1)..(25): SEQ ID NO: 756; WAN024F7I; Start 82; Stop 106
gtcagtatcctacacatacgacaag

SEQ ID NO: 272446 - DNA, 25 bp, Artificial
  probe
  misc_feature (1)..(25): SEQ ID NO: 756; WAN024F7I; Start 81; Stop 105
agtcagtatcctacacatacgacaa

SEQ ID NO: 272447 - DNA, 25 bp, Artificial
  probe
  misc_feature (1)..(25): SEQ ID NO: 756; WAN024F7I; Start 83; Stop 107
tcagtatcctacacatacgacaagg

SEQ ID NO: 272448 - DNA, 25 bp, Artificial
  probe
  misc_feature (1)..(25): SEQ ID NO: 756; WAN024F7I; Start 106; Stop 130
ggcgatattgacgtgattctaacta

SEQ ID NO: 272449 - DNA, 25 bp, Artificial
  probe
  misc_feature (1)..(25): SEQ ID NO: 756; WAN024F7I; Start 107; Stop 131
gcgatattgacgtgattctaactaa

SEQ ID NO: 272450 - DNA, 25 bp, Artificial
  probe
  misc_feature (1)..(25): SEQ ID NO: 756; WAN024F7I; Start 104; Stop 128
aaggcgatattgacgtgattctaac

SEQ ID NO: 272451 - DNA, 25 bp, Artificial
  probe
  misc_feature (1)..(25): SEQ ID NO: 756; WAN024F7I; Start 79; Stop 103
gtagtcagtatcctacacatacgac

SEQ ID NO: 272452 - DNA, 25 bp, Artificial
  probe
  misc_feature (1)..(25): SEQ ID NO: 756; WAN024F7I; Start 103; Stop 127
caaggcgatattgacgtgattctaa

SEQ ID NO: 272453 - DNA, 25 bp, Artificial
  probe
  misc_feature (1)..(25): SEQ ID NO: 756; WAN024F7I; Start 105; Stop 129
aggcgatattgacgtgattctaact

SEQ ID NO: 272454 - DNA, 25 bp, Artificial
  probe
  misc_feature (1)..(25): SEQ ID NO: 756; WAN024F7I; Start 90; Stop 114
cctacacatacgacaaggcgatatt

SEQ ID NO: 272455 - DNA, 25 bp, Artificial
  probe
  misc_feature (1)..(25): SEQ ID NO: 756; WAN024F7I; Start 93; Stop 117
acacatacgacaaggcgatattgac

SEQ ID NO: 272456 - DNA, 25 bp, Artificial
  probe
  misc_feature (1)..(25): SEQ ID NO: 756; WAN024F7I; Start 84; Stop 108
cagtatcctacacatacgacaaggc

SEQ ID NO: 272457 - DNA, 25 bp, Artificial
  probe
  misc_feature (1)..(25): SEQ ID NO: 756; WAN024F7I; Start 102; Stop 126
acaaggcgatattgacgtgattcta

SEQ ID NO: 272458 - DNA, 25 bp, Artificial
  probe
  misc_feature (1)..(25): SEQ ID NO: 756; WAN024F7I; Start 58; Stop 82
gaggttgtagatggaactgacgtag

SEQ ID NO: 272459 - DNA, 25 bp, Artificial
  probe
  misc_feature (1)..(25): SEQ ID NO: 756; WAN024F7I; Start 89; Stop 113
tcctacacatacgacaaggcgatat

SEQ ID NO: 272460 - DNA, 25 bp, Artificial
  probe
  misc_feature (1)..(25): SEQ ID NO: 756; WAN024F7I; Start 88; Stop 112
atcctacacatacgacaaggcgata

SEQ ID NO: 272461 - DNA, 25 bp, Artificial
  probe
  misc_feature (1)..(25): SEQ ID NO: 756; WAN024F7I; Start 87; Stop 111
tatcctacacatacgacaaggcgat

SEQ ID NO: 272462 - DNA, 25 bp, Artificial
  probe
  misc_feature (1)..(25): SEQ ID NO: 756; WAN024F7I; Start 76; Stop 100
gacgtagtcagtatcctacacatac

SEQ ID NO: 272463 - DNA, 25 bp, Artificial
  probe
  misc_feature (1)..(25): SEQ ID NO: 756; WAN024F7I; Start 55; Stop 79
tttgaggttgtagatggaactgacg

SEQ ID NO: 272464 - DNA, 25 bp, Artificial
  probe
  misc_feature (1)..(25): SEQ ID NO: 756; WAN024F7I; Start 108; Stop 132
cgatattgacgtgattctaactaat

SEQ ID NO: 272465 - DNA, 25 bp, Artificial
  probe
  misc_feature (1)..(25): SEQ ID NO: 756; WAN024F7I; Start 9; Stop 33
caaagatcaaactaggaaactagcc

SEQ ID NO: 272466 - DNA, 25 bp, Artificial
  probe
  misc_feature (1)..(25): SEQ ID NO: 756; WAN024F7I; Start 57; Stop 81
tgaggttgtagatggaactgacgta

SEQ ID NO: 272467 - DNA, 25 bp, Artificial
  probe
  misc_feature (1)..(25): SEQ ID NO: 756; WAN024F7I; Start 10; Stop 34
aaagatcaaactaggaaactagccg

SEQ ID NO: 272468 - DNA, 25 bp, Artificial
  probe
  misc_feature (1)..(25): SEQ ID NO: 756; WAN024F7I; Start 60; Stop 84
ggttgtagatggaactgacgtagtc

SEQ ID NO: 272469 - DNA, 25 bp, Artificial
  probe
  misc_feature (1)..(25): SEQ ID NO: 756; WAN024F7I; Start 59; Stop 83
aggttgtagatggaactgacgtagt

SEQ ID NO: 272470 - DNA, 25 bp, Artificial
  probe
  misc_feature (1)..(25): SEQ ID NO: 756; WAN024F7I; Start 94; Stop 118
cacatacgacaaggcgatattgacg

SEQ ID NO: 272471 - DNA, 25 bp, Artificial
  probe
  misc_feature (1)..(25): SEQ ID NO: 756; WAN024F7I; Start 101; Stop 125
gacaaggcgatattgacgtgattct

SEQ ID NO: 272472 - DNA, 25 bp, Artificial
  probe
  misc_feature (1)..(25): SEQ ID NO: 756; WAN024F7I; Start 86; Stop 110
gtatcctacacatacgacaaggcga

SEQ ID NO: 272473 - DNA, 25 bp, Artificial
  probe
  misc_feature (1)..(25): SEQ ID NO: 756; WAN024F7I; Start 85; Stop 109
agtatcctacacatacgacaaggcg

SEQ ID NO: 272474 - DNA, 25 bp, Artificial
  probe
  misc_feature (1)..(25): SEQ ID NO: 756; WAN024F7I; Start 54; Stop 78
ttttgaggttgtagatggaactgac

SEQ ID NO: 272475 - DNA, 25 bp, Artificial
  probe
  misc_feature (1)..(25): SEQ ID NO: 757; WAN024CP8; Start 621; Stop 645
cgaccattaccattacattcctaag

SEQ ID NO: 272476 - DNA, 25 bp, Artificial
  probe
  misc_feature (1)..(25): SEQ ID NO: 757; WAN024CP8; Start 590; Stop 614
atactggtgatgcttatatcgttcc

SEQ ID NO: 272477 - DNA, 25 bp, Artificial
  probe
  misc_feature (1)..(25): SEQ ID NO: 757; WAN024CP8; Start 620; Stop 644
gcgaccattaccattacattcctaa

SEQ ID NO: 272478 - DNA, 25 bp, Artificial
  probe
  misc_feature (1)..(25): SEQ ID NO: 757; WAN024CP8; Start 483; Stop 507
tcataatcacaactcaagagcagat

SEQ ID NO: 272479 - DNA, 25 bp, Artificial
  probe
  misc_feature (1)..(25): SEQ ID NO: 757; WAN024CP8; Start 487; Stop 511
aatcacaactcaagagcagataatg

SEQ ID NO: 272480 - DNA, 25 bp, Artificial
  probe
  misc_feature (1)..(25): SEQ ID NO: 757; WAN024CP8; Start 482; Stop 506
gtcataatcacaactcaagagcaga

SEQ ID NO: 272481 - DNA, 25 bp, Artificial
  probe
  misc_feature (1)..(25): SEQ ID NO: 757; WAN024CP8; Start 165; Stop 189
accagatgaagtcagtaagagagag

SEQ ID NO: 272482 - DNA, 25 bp, Artificial
  probe
  misc_feature (1)..(25): SEQ ID NO: 757; WAN024CP8; Start 591; Stop 615
tactggtgatgcttatatcgttcct

SEQ ID NO: 272483 - DNA, 25 bp, Artificial
  probe
  misc_feature (1)..(25): SEQ ID NO: 757; WAN024CP8; Start 582; Stop 606
cattgaagatactggtgatgcttat

SEQ ID NO: 272484 - DNA, 25 bp, Artificial
  probe
  misc_feature (1)..(25): SEQ ID NO: 757; WAN024CP8; Start 164; Stop 188
caccagatgaagtcagtaagagaga

SEQ ID NO: 272485 - DNA, 25 bp, Artificial
  probe
  misc_feature (1)..(25): SEQ ID NO: 757; WAN024CP8; Start 581; Stop 605
tcattgaagatactggtgatgctta

SEQ ID NO: 272486 - DNA, 25 bp, Artificial
  probe
  misc_feature (1)..(25): SEQ ID NO: 757; WAN024CP8; Start 709; Stop 733
cgtccttcttcaagttctagtcata

SEQ ID NO: 272487 - DNA, 25 bp, Artificial
  probe
  misc_feature (1)..(25): SEQ ID NO: 757; WAN024CP8; Start 2348; Stop 2372
aagtagagcattctgttattaacgc

SEQ ID NO: 272488 - DNA, 25 bp, Artificial
  probe
  misc_feature (1)..(25): SEQ ID NO: 757; WAN024CP8; Start 484; Stop 508
cataatcacaactcaagagcagata

SEQ ID NO: 272489 - DNA, 25 bp, Artificial
  probe
  misc_feature (1)..(25): SEQ ID NO: 757; WAN024CP8; Start 163; Stop 187
acaccagatgaagtcagtaagagag

SEQ ID NO: 272490 - DNA, 25 bp, Artificial
  probe
  misc_feature (1)..(25): SEQ ID NO: 757; WAN024CP8; Start 210; Stop 234
tgttatcaagattacggatcaaggt

SEQ ID NO: 272491 - DNA, 25 bp, Artificial
  probe
  misc_feature (1)..(25): SEQ ID NO: 757; WAN024CP8; Start 2340; Stop 2364
aattcctcaagtagagcattctgtt

SEQ ID NO: 272492 - DNA, 25 bp, Artificial
  probe
  misc_feature (1)..(25): SEQ ID NO: 757; WAN024CP8; Start 481; Stop 505
agtcataatcacaactcaagagcag

SEQ ID NO: 272493 - DNA, 25 bp, Artificial
  probe
  misc_feature (1)..(25): SEQ ID NO: 757; WAN024CP8; Start 166; Stop 190
ccagatgaagtcagtaagagagagg

SEQ ID NO: 272494 - DNA, 25 bp, Artificial
  probe
  misc_feature (1)..(25): SEQ ID NO: 757; WAN024CP8; Start 2343; Stop 2367
tcctcaagtagagcattctgttatt

SEQ ID NO: 272495 - DNA, 25 bp, Artificial
  probe
  misc_feature (1)..(25): SEQ ID NO: 757; WAN024CP8; Start 2342; Stop 2366
ttcctcaagtagagcattctgttat

SEQ ID NO: 272496 - DNA, 25 bp, Artificial
  probe
  misc_feature (1)..(25): SEQ ID NO: 757; WAN024CP8; Start 2341; Stop 2365
attcctcaagtagagcattctgtta

SEQ ID NO: 272497 - DNA, 25 bp, Artificial
  probe
  misc_feature (1)..(25): SEQ ID NO: 757; WAN024CP8; Start 480; Stop 504
cagtcataatcacaactcaagagca

SEQ ID NO: 272498 - DNA, 25 bp, Artificial
  probe
  misc_feature (1)..(25): SEQ ID NO: 757; WAN024CP8; Start 624; Stop 648
ccattaccattacattcctaagagt

SEQ ID NO: 272499 - DNA, 25 bp, Artificial
  probe
  misc_feature (1)..(25): SEQ ID NO: 757; WAN024CP8; Start 623; Stop 647
accattaccattacattcctaagag

SEQ ID NO: 272500 - DNA, 25 bp, Artificial
  probe
  misc_feature (1)..(25): SEQ ID NO: 757; WAN024CP8; Start 622; Stop 646
gaccattaccattacattcctaaga

SEQ ID NO: 272501 - DNA, 25 bp, Artificial
  probe
  misc_feature (1)..(25): SEQ ID NO: 757; WAN024CP8; Start 708; Stop 732
tcgtccttcttcaagttctagtcat

SEQ ID NO: 272502 - DNA, 25 bp, Artificial
  probe
  misc_feature (1)..(25): SEQ ID NO: 757; WAN024CP8; Start 588; Stop 612
agatactggtgatgcttatatcgtt

SEQ ID NO: 272503 - DNA, 25 bp, Artificial
  probe
  misc_feature (1)..(25): SEQ ID NO: 757; WAN024CP8; Start 587; Stop 611
aagatactggtgatgcttatatcgt

SEQ ID NO: 272504 - DNA, 25 bp, Artificial
  probe
  misc_feature (1)..(25): SEQ ID NO: 757; WAN024CP8; Start 373; Stop 397
ggctatgtgattaaggtagacggaa

SEQ ID NO: 272505 - DNA, 25 bp, Artificial
  probe
  misc_feature (1)..(25): SEQ ID NO: 757; WAN024CP8; Start 211; Stop 235
gttatcaagattacggatcaaggtt

SEQ ID NO: 272506 - DNA, 25 bp, Artificial
  probe
  misc_feature (1)..(25): SEQ ID NO: 757; WAN024CP8; Start 589; Stop 613
gatactggtgatgcttatatcgttc

SEQ ID NO: 272507 - DNA, 25 bp, Artificial
  probe
  misc_feature (1)..(25): SEQ ID NO: 757; WAN024CP8; Start 586; Stop 610
gaagatactggtgatgcttatatcg

SEQ ID NO: 272508 - DNA, 25 bp, Artificial
  probe
  misc_feature (1)..(25): SEQ ID NO: 758; WAN024FLD; Start 450; Stop 474
ccgatattcattacttccatcaacg

SEQ ID NO: 272509 - DNA, 25 bp, Artificial
  probe
  misc_feature (1)..(25): SEQ ID NO: 758; WAN024FLD; Start 451; Stop 475
cgatattcattacttccatcaacgc

SEQ ID NO: 272510 - DNA, 25 bp, Artificial
  probe
  misc_feature (1)..(25): SEQ ID NO: 758; WAN024FLD; Start 452; Stop 476
gatattcattacttccatcaacgct

SEQ ID NO: 272511 - DNA, 25 bp, Artificial
  probe
  misc_feature (1)..(25): SEQ ID NO: 758; WAN024FLD; Start 723; Stop 747
ttactggattgcgaagacttactta

SEQ ID NO: 272512 - DNA, 25 bp, Artificial
  probe
  misc_feature (1)..(25): SEQ ID NO: 758; WAN024FLD; Start 456; Stop 480
ttcattacttccatcaacgcttatg

SEQ ID NO: 272513 - DNA, 25 bp, Artificial
  probe
  misc_feature (1)..(25): SEQ ID NO: 758; WAN024FLD; Start 724; Stop 748
tactggattgcgaagacttacttaa

SEQ ID NO: 272514 - DNA, 25 bp, Artificial
  probe
  misc_feature (1)..(25): SEQ ID NO: 758; WAN024FLD; Start 455; Stop 479
attcattacttccatcaacgcttat

SEQ ID NO: 272515 - DNA, 25 bp, Artificial
  probe
  misc_feature (1)..(25): SEQ ID NO: 758; WAN024FLD; Start 453; Stop 477
atattcattacttccatcaacgctt

SEQ ID NO: 272516 - DNA, 25 bp, Artificial
  probe
  misc_feature (1)..(25): SEQ ID NO: 758; WAN024FLD; Start 722; Stop 746
gttactggattgcgaagacttactt

SEQ ID NO: 272517 - DNA, 25 bp, Artificial
  probe
  misc_feature (1)..(25): SEQ ID NO: 758; WAN024FLD; Start 449; Stop 473
tccgatattcattacttccatcaac

SEQ ID NO: 272518 - DNA, 25 bp, Artificial
  probe
  misc_feature (1)..(25): SEQ ID NO: 758; WAN024FLD; Start 421; Stop 445
cctaccagagttagacactatcttg

SEQ ID NO: 272519 - DNA, 25 bp, Artificial
  probe
  misc_feature (1)..(25): SEQ ID NO: 758; WAN024FLD; Start 198; Stop 222
atctgtgattggattattcgtgatt

SEQ ID NO: 272520 - DNA, 25 bp, Artificial
  probe
  misc_feature (1)..(25): SEQ ID NO: 758; WAN024FLD; Start 454; Stop 478
tattcattacttccatcaacgctta

SEQ ID NO: 272521 - DNA, 25 bp, Artificial
  probe
  misc_feature (1)..(25): SEQ ID NO: 758; WAN024FLD; Start 224; Stop 248
ttactctctgcttcatcataggtac

SEQ ID NO: 272522 - DNA, 25 bp, Artificial
  probe
  misc_feature (1)..(25): SEQ ID NO: 758; WAN024FLD; Start 420; Stop 444
gcctaccagagttagacactatctt

SEQ ID NO: 272523 - DNA, 25 bp, Artificial
  probe
  misc_feature (1)..(25): SEQ ID NO: 758; WAN024FLD; Start 355; Stop 379
agtgtattgctcctagtagtattga

SEQ ID NO: 272524 - DNA, 25 bp, Artificial
  probe
  misc_feature (1)..(25): SEQ ID NO: 758; WAN024FLD; Start 448; Stop 472
ttccgatattcattacttccatcaa

SEQ ID NO: 272525 - DNA, 25 bp, Artificial
  probe
  misc_feature (1)..(25): SEQ ID NO: 758; WAN024FLD; Start 720; Stop 744
gagttactggattgcgaagacttac

SEQ ID NO: 272526 - DNA, 25 bp, Artificial
  probe
  misc_feature (1)..(25): SEQ ID NO: 758; WAN024FLD; Start 721; Stop 745
agttactggattgcgaagacttact

SEQ ID NO: 272527 - DNA, 25 bp, Artificial
  probe
  misc_feature (1)..(25): SEQ ID NO: 758; WAN024FLD; Start 719; Stop 743
tgagttactggattgcgaagactta

SEQ ID NO: 272528 - DNA, 25 bp, Artificial
  probe
  misc_feature (1)..(25): SEQ ID NO: 758; WAN024FLD; Start 162; Stop 186
tctgaaggaacttatatctgagagt

SEQ ID NO: 272529 - DNA, 25 bp, Artificial
  probe
  misc_feature (1)..(25): SEQ ID NO: 758; WAN024FLD; Start 357; Stop 381
tgtattgctcctagtagtattgagt

SEQ ID NO: 272530 - DNA, 25 bp, Artificial
  probe
  misc_feature (1)..(25): SEQ ID NO: 758; WAN024FLD; Start 360; Stop 384
attgctcctagtagtattgagtagt

SEQ ID NO: 272531 - DNA, 25 bp, Artificial
  probe
  misc_feature (1)..(25): SEQ ID NO: 758; WAN024FLD; Start 356; Stop 380
gtgtattgctcctagtagtattgag

SEQ ID NO: 272532 - DNA, 25 bp, Artificial
  probe
  misc_feature (1)..(25): SEQ ID NO: 758; WAN024FLD; Start 422; Stop 446
ctaccagagttagacactatcttgg

SEQ ID NO: 272533 - DNA, 25 bp, Artificial
  probe
  misc_feature (1)..(25): SEQ ID NO: 758; WAN024FLD; Start 718; Stop 742
ttgagttactggattgcgaagactt

SEQ ID NO: 272534 - DNA, 25 bp, Artificial
  probe
  misc_feature (1)..(25): SEQ ID NO: 758; WAN024FLD; Start 864; Stop 888
aaagattgattggattggaaatggc

SEQ ID NO: 272535 - DNA, 25 bp, Artificial
  probe
  misc_feature (1)..(25): SEQ ID NO: 758; WAN024FLD; Start 708; Stop 732
taatgcctgtttgagttactggatt

SEQ ID NO: 272536 - DNA, 25 bp, Artificial
  probe
  misc_feature (1)..(25): SEQ ID NO: 758; WAN024FLD; Start 707; Stop 731
ttaatgcctgtttgagttactggat

SEQ ID NO: 272537 - DNA, 25 bp, Artificial
  probe
  misc_feature (1)..(25): SEQ ID NO: 758; WAN024FLD; Start 161; Stop 185
ttctgaaggaacttatatctgagag

SEQ ID NO: 272538 - DNA, 25 bp, Artificial
  probe
  misc_feature (1)..(25): SEQ ID NO: 758; WAN024FLD; Start 443; Stop 467
ttggtttccgatattcattacttcc

SEQ ID NO: 272539 - DNA, 25 bp, Artificial
  probe
  misc_feature (1)..(25): SEQ ID NO: 758; WAN024FLD; Start 197; Stop 221
aatctgtgattggattattcgtgat

SEQ ID NO: 272540 - DNA, 25 bp, Artificial
  probe
  misc_feature (1)..(25): SEQ ID NO: 758; WAN024FLD; Start 726; Stop 750
ctggattgcgaagacttacttaaac

SEQ ID NO: 272541 - DNA, 25 bp, Artificial
  probe
  misc_feature (1)..(25): SEQ ID NO: 759; WAN024BHL; Start 859; Stop 883
ggcataactcagtccattacagata

SEQ ID NO: 272542 - DNA, 25 bp, Artificial
  probe
  misc_feature (1)..(25): SEQ ID NO: 759; WAN024BHL; Start 641; Stop 665
cagagaccttgattgaacattcttg

SEQ ID NO: 272543 - DNA, 25 bp, Artificial
  probe
  misc_feature (1)..(25): SEQ ID NO: 759; WAN024BHL; Start 652; Stop 676
attgaacattcttgtcaggttaagc

SEQ ID NO: 272544 - DNA, 25 bp, Artificial
  probe
  misc_feature (1)..(25): SEQ ID NO: 759; WAN024BHL; Start 648; Stop 672
cttgattgaacattcttgtcaggtt

SEQ ID NO: 272545 - DNA, 25 bp, Artificial
  probe
  misc_feature (1)..(25): SEQ ID NO: 759; WAN024BHL; Start 868; Stop 892
cagtccattacagatatgtgtcaga

SEQ ID NO: 272546 - DNA, 25 bp, Artificial
  probe
  misc_feature (1)..(25): SEQ ID NO: 759; WAN024BHL; Start 867; Stop 891
tcagtccattacagatatgtgtcag

SEQ ID NO: 272547 - DNA, 25 bp, Artificial
  probe
  misc_feature (1)..(25): SEQ ID NO: 759; WAN024BHL; Start 866; Stop 890
ctcagtccattacagatatgtgtca

SEQ ID NO: 272548 - DNA, 25 bp, Artificial
  probe
  misc_feature (1)..(25): SEQ ID NO: 759; WAN024BHL; Start 865; Stop 889
actcagtccattacagatatgtgtc

SEQ ID NO: 272549 - DNA, 25 bp, Artificial
  probe
  misc_feature (1)..(25): SEQ ID NO: 759; WAN024BHL; Start 640; Stop 664
gcagagaccttgattgaacattctt

SEQ ID NO: 272550 - DNA, 25 bp, Artificial
  probe
  misc_feature (1)..(25): SEQ ID NO: 759; WAN024BHL; Start 642; Stop 666
agagaccttgattgaacattcttgt

SEQ ID NO: 272551 - DNA, 25 bp, Artificial
  probe
  misc_feature (1)..(25): SEQ ID NO: 759; WAN024BHL; Start 864; Stop 888
aactcagtccattacagatatgtgt

SEQ ID NO: 272552 - DNA, 25 bp, Artificial
  probe
  misc_feature (1)..(25): SEQ ID NO: 759; WAN024BHL; Start 860; Stop 884
gcataactcagtccattacagatat

SEQ ID NO: 272553 - DNA, 25 bp, Artificial
  probe
  misc_feature (1)..(25): SEQ ID NO: 759; WAN024BHL; Start 869; Stop 893
agtccattacagatatgtgtcagaa

SEQ ID NO: 272554 - DNA, 25 bp, Artificial
  probe
  misc_feature (1)..(25): SEQ ID NO: 759; WAN024BHL; Start 643; Stop 667
gagaccttgattgaacattcttgtc

SEQ ID NO: 272555 - DNA, 25 bp, Artificial
  probe
  misc_feature (1)..(25): SEQ ID NO: 759; WAN024BHL; Start 645; Stop 669
gaccttgattgaacattcttgtcag

SEQ ID NO: 272556 - DNA, 25 bp, Artificial
  probe
  misc_feature (1)..(25): SEQ ID NO: 759; WAN024BHL; Start 644; Stop 668
agaccttgattgaacattcttgtca

SEQ ID NO: 272557 - DNA, 25 bp, Artificial
  probe
  misc_feature (1)..(25): SEQ ID NO: 759; WAN024BHL; Start 650; Stop 674
tgattgaacattcttgtcaggttaa

SEQ ID NO: 272558 - DNA, 25 bp, Artificial
  probe
  misc_feature (1)..(25): SEQ ID NO: 759; WAN024BHL; Start 649; Stop 673
ttgattgaacattcttgtcaggtta

SEQ ID NO: 272559 - DNA, 25 bp, Artificial
  probe
  misc_feature (1)..(25): SEQ ID NO: 759; WAN024BHL; Start 736; Stop 760
cacactattggtcatgctattgaag

SEQ ID NO: 272560 - DNA, 25 bp, Artificial
  probe
  misc_feature (1)..(25): SEQ ID NO: 759; WAN024BHL; Start 735; Stop 759
tcacactattggtcatgctattgaa

SEQ ID NO: 272561 - DNA, 25 bp, Artificial
  probe
  misc_feature (1)..(25): SEQ ID NO: 759; WAN024BHL; Start 400; Stop 424
caggtggattcttctattggtggaa

SEQ ID NO: 272562 - DNA, 25 bp, Artificial
  probe
  misc_feature (1)..(25): SEQ ID NO: 759; WAN024BHL; Start 734; Stop 758
gtcacactattggtcatgctattga

SEQ ID NO: 272563 - DNA, 25 bp, Artificial
  probe
  misc_feature (1)..(25): SEQ ID NO: 759; WAN024BHL; Start 651; Stop 675
gattgaacattcttgtcaggttaag

SEQ ID NO: 272564 - DNA, 25 bp, Artificial
  probe
  misc_feature (1)..(25): SEQ ID NO: 759; WAN024BHL; Start 733; Stop 757
ggtcacactattggtcatgctattg

SEQ ID NO: 272565 - DNA, 25 bp, Artificial
  probe
  misc_feature (1)..(25): SEQ ID NO: 759; WAN024BHL; Start 647; Stop 671
ccttgattgaacattcttgtcaggt

SEQ ID NO: 272566 - DNA, 25 bp, Artificial
  probe
  misc_feature (1)..(25): SEQ ID NO: 759; WAN024BHL; Start 646; Stop 670
accttgattgaacattcttgtcagg

SEQ ID NO: 272567 - DNA, 25 bp, Artificial
  probe
  misc_feature (1)..(25): SEQ ID NO: 759; WAN024BHL; Start 371; Stop 395
ttgttcagataccgactagcttaac

SEQ ID NO: 272568 - DNA, 25 bp, Artificial
  probe
  misc_feature (1)..(25): SEQ ID NO: 759; WAN024BHL; Start 732; Stop 756
tggtcacactattggtcatgctatt

SEQ ID NO: 272569 - DNA, 25 bp, Artificial
  probe
  misc_feature (1)..(25): SEQ ID NO: 759; WAN024BHL; Start 731; Stop 755
ttggtcacactattggtcatgctat

SEQ ID NO: 272570 - DNA, 25 bp, Artificial
  probe
  misc_feature (1)..(25): SEQ ID NO: 759; WAN024BHL; Start 653; Stop 677
ttgaacattcttgtcaggttaagcg

SEQ ID NO: 272571 - DNA, 25 bp, Artificial
  probe
  misc_feature (1)..(25): SEQ ID NO: 759; WAN024BHL; Start 373; Stop 397
gttcagataccgactagcttaacag

SEQ ID NO: 272572 - DNA, 25 bp, Artificial
  probe
  misc_feature (1)..(25): SEQ ID NO: 759; WAN024BHL; Start 863; Stop 887
taactcagtccattacagatatgtg

SEQ ID NO: 272573 - DNA, 25 bp, Artificial
  probe
  misc_feature (1)..(25): SEQ ID NO: 759; WAN024BHL; Start 120; Stop 144
gacagataaccatgtagcttctctt

SEQ ID NO: 272574 - DNA, 25 bp, Artificial
  probe
  misc_feature (1)..(25): SEQ ID NO: 760; WAN024BHM; Start 690; Stop 714
tgaagatgagttggacaatggtatt

SEQ ID NO: 272575 - DNA, 25 bp, Artificial
  probe
  misc_feature (1)..(25): SEQ ID NO: 760; WAN024BHM; Start 691; Stop 715
gaagatgagttggacaatggtattc

SEQ ID NO: 272576 - DNA, 25 bp, Artificial
  probe
  misc_feature (1)..(25): SEQ ID NO: 760; WAN024BHM; Start 692; Stop 716
aagatgagttggacaatggtattcg

SEQ ID NO: 272577 - DNA, 25 bp, Artificial
  probe
  misc_feature (1)..(25): SEQ ID NO: 760; WAN024BHM; Start 689; Stop 713
ttgaagatgagttggacaatggtat

SEQ ID NO: 272578 - DNA, 25 bp, Artificial
  probe
  misc_feature (1)..(25): SEQ ID NO: 760; WAN024BHM; Start 688; Stop 712
gttgaagatgagttggacaatggta

SEQ ID NO: 272579 - DNA, 25 bp, Artificial
  probe
  misc_feature (1)..(25): SEQ ID NO: 760; WAN024BHM; Start 124; Stop 148
gataaccatgtagcctctctctatg

SEQ ID NO: 272580 - DNA, 25 bp, Artificial
  probe
  misc_feature (1)..(25): SEQ ID NO: 760; WAN024BHM; Start 693; Stop 717
agatgagttggacaatggtattcgt

SEQ ID NO: 272581 - DNA, 25 bp, Artificial
  probe
  misc_feature (1)..(25): SEQ ID NO: 760; WAN024BHM; Start 123; Stop 147
agataaccatgtagcctctctctat

SEQ ID NO: 272582 - DNA, 25 bp, Artificial
  probe
  misc_feature (1)..(25): SEQ ID NO: 760; WAN024BHM; Start 122; Stop 146
cagataaccatgtagcctctctcta

SEQ ID NO: 272583 - DNA, 25 bp, Artificial
  probe
  misc_feature (1)..(25): SEQ ID NO: 760; WAN024BHM; Start 678; Stop 702
caagatggtggttgaagatgagttg

SEQ ID NO: 272584 - DNA, 25 bp, Artificial
  probe
  misc_feature (1)..(25): SEQ ID NO: 760; WAN024BHM; Start 400; Stop 424
caggttgattcttctatcggtggaa

SEQ ID NO: 272585 - DNA, 25 bp, Artificial
  probe
  misc_feature (1)..(25): SEQ ID NO: 760; WAN024BHM; Start 125; Stop 149
ataaccatgtagcctctctctatgc

SEQ ID NO: 272586 - DNA, 25 bp, Artificial
  probe
  misc_feature (1)..(25): SEQ ID NO: 760; WAN024BHM; Start 685; Stop 709
gtggttgaagatgagttggacaatg

SEQ ID NO: 272587 - DNA, 25 bp, Artificial
  probe
  misc_feature (1)..(25): SEQ ID NO: 760; WAN024BHM; Start 694; Stop 718
gatgagttggacaatggtattcgtc

SEQ ID NO: 272588 - DNA, 25 bp, Artificial
  probe
  misc_feature (1)..(25): SEQ ID NO: 760; WAN024BHM; Start 364; Stop 388
attcactttgttcagattccgacta

SEQ ID NO: 272589 - DNA, 25 bp, Artificial
  probe
  misc_feature (1)..(25): SEQ ID NO: 760; WAN024BHM; Start 363; Stop 387
tattcactttgttcagattccgact

SEQ ID NO: 272590 - DNA, 25 bp, Artificial
  probe
  misc_feature (1)..(25): SEQ ID NO: 760; WAN024BHM; Start 362; Stop 386
gtattcactttgttcagattccgac

SEQ ID NO: 272591 - DNA, 25 bp, Artificial
  probe
  misc_feature (1)..(25): SEQ ID NO: 760; WAN024BHM; Start 695; Stop 719
atgagttggacaatggtattcgtct

SEQ ID NO: 272592 - DNA, 25 bp, Artificial
  probe
  misc_feature (1)..(25): SEQ ID NO: 760; WAN024BHM; Start 679; Stop 703
aagatggtggttgaagatgagttgg

SEQ ID NO: 272593 - DNA, 25 bp, Artificial
  probe
  misc_feature (1)..(25): SEQ ID NO: 760; WAN024BHM; Start 393; Stop 417
gacagctcaggttgattcttctatc

SEQ ID NO: 272594 - DNA, 25 bp, Artificial
  probe
  misc_feature (1)..(25): SEQ ID NO: 760; WAN024BHM; Start 361; Stop 385
ggtattcactttgttcagattccga

SEQ ID NO: 272595 - DNA, 25 bp, Artificial
  probe
  misc_feature (1)..(25): SEQ ID NO: 760; WAN024BHM; Start 115; Stop 139
attgtgacagataaccatgtagcct

SEQ ID NO: 272596 - DNA, 25 bp, Artificial
  probe
  misc_feature (1)..(25): SEQ ID NO: 760; WAN024BHM; Start 114; Stop 138
cattgtgacagataaccatgtagcc

SEQ ID NO: 272597 - DNA, 25 bp, Artificial
  probe
  misc_feature (1)..(25): SEQ ID NO: 760; WAN024BHM; Start 696; Stop 720
tgagttggacaatggtattcgtctt

SEQ ID NO: 272598 - DNA, 25 bp, Artificial
  probe
  misc_feature (1)..(25): SEQ ID NO: 760; WAN024BHM; Start 534; Stop 558
gattgaagggatgggtgaagttatc

SEQ ID NO: 272599 - DNA, 25 bp, Artificial
  probe
  misc_feature (1)..(25): SEQ ID NO: 760; WAN024BHM; Start 398; Stop 422
ctcaggttgattcttctatcggtgg

SEQ ID NO: 272600 - DNA, 25 bp, Artificial
  probe
  misc_feature (1)..(25): SEQ ID NO: 760; WAN024BHM; Start 392; Stop 416
tgacagctcaggttgattcttctat

SEQ ID NO: 272601 - DNA, 25 bp, Artificial
  probe
  misc_feature (1)..(25): SEQ ID NO: 760; WAN024BHM; Start 365; Stop 389
ttcactttgttcagattccgactag

SEQ ID NO: 272602 - DNA, 25 bp, Artificial
  probe
  misc_feature (1)..(25): SEQ ID NO: 760; WAN024BHM; Start 120; Stop 144
gacagataaccatgtagcctctctc

SEQ ID NO: 272603 - DNA, 25 bp, Artificial
  probe
  misc_feature (1)..(25): SEQ ID NO: 760; WAN024BHM; Start 391; Stop 415
ttgacagctcaggttgattcttcta

SEQ ID NO: 272604 - DNA, 25 bp, Artificial
  probe
  misc_feature (1)..(25): SEQ ID NO: 760; WAN024BHM; Start 533; Stop 557
tgattgaagggatgggtgaagttat

SEQ ID NO: 272605 - DNA, 25 bp, Artificial
  probe
  misc_feature (1)..(25): SEQ ID NO: 760; WAN024BHM; Start 402; Stop 426
ggttgattcttctatcggtggaaag

SEQ ID NO: 272606 - DNA, 25 bp, Artificial
  probe
  misc_feature (1)..(25): SEQ ID NO: 760; WAN024BHM; Start 121; Stop 145
acagataaccatgtagcctctctct

SEQ ID NO: 272607 - DNA, 25 bp, Artificial
  probe
  misc_feature (1)..(25): SEQ ID NO: 761; WAN024D7X; Start 346; Stop 370
cttgaagatgagagagatggcatta

SEQ ID NO: 272608 - DNA, 25 bp, Artificial
  probe
  misc_feature (1)..(25): SEQ ID NO: 761; WAN024D7X; Start 347; Stop 371
ttgaagatgagagagatggcattaa

SEQ ID NO: 272609 - DNA, 25 bp, Artificial
  probe
  misc_feature (1)..(25): SEQ ID NO: 761; WAN024D7X; Start 7; Stop 31
atcagacaagcaagattagaagatt

SEQ ID NO: 272610 - DNA, 25 bp, Artificial
  probe
  misc_feature (1)..(25): SEQ ID NO: 761; WAN024D7X; Start 32; Stop 56
tggatcggattgttgaacttgaatt

SEQ ID NO: 272611 - DNA, 25 bp, Artificial
  probe
  misc_feature (1)..(25): SEQ ID NO: 761; WAN024D7X; Start 31; Stop 55
ttggatcggattgttgaacttgaat

SEQ ID NO: 272612 - DNA, 25 bp, Artificial
  probe
  misc_feature (1)..(25): SEQ ID NO: 761; WAN024D7X; Start 257; Stop 281
atatctctgtgacctgtctgtctat

SEQ ID NO: 272613 - DNA, 25 bp, Artificial
  probe
  misc_feature (1)..(25): SEQ ID NO: 761; WAN024D7X; Start 258; Stop 282
tatctctgtgacctgtctgtctatt

SEQ ID NO: 272614 - DNA, 25 bp, Artificial
  probe
  misc_feature (1)..(25): SEQ ID NO: 761; WAN024D7X; Start 255; Stop 279
ttatatctctgtgacctgtctgtct

SEQ ID NO: 272615 - DNA, 25 bp, Artificial
  probe
  misc_feature (1)..(25): SEQ ID NO: 761; WAN024D7X; Start 254; Stop 278
gttatatctctgtgacctgtctgtc

SEQ ID NO: 272616 - DNA, 25 bp, Artificial
  probe
  misc_feature (1)..(25): SEQ ID NO: 761; WAN024D7X; Start 256; Stop 280
tatatctctgtgacctgtctgtcta

SEQ ID NO: 272617 - DNA, 25 bp, Artificial
  probe
  misc_feature (1)..(25): SEQ ID NO: 761; WAN024D7X; Start 345; Stop 369
tcttgaagatgagagagatggcatt

SEQ ID NO: 272618 - DNA, 25 bp, Artificial
  probe
  misc_feature (1)..(25): SEQ ID NO: 761; WAN024D7X; Start 361; Stop 385
gatggcattaatctaacctgtcatg

SEQ ID NO: 272619 - DNA, 25 bp, Artificial
  probe
  misc_feature (1)..(25): SEQ ID NO: 761; WAN024D7X; Start 348; Stop 372
tgaagatgagagagatggcattaat

SEQ ID NO: 272620 - DNA, 25 bp, Artificial
  probe
  misc_feature (1)..(25): SEQ ID NO: 761; WAN024D7X; Start 349; Stop 373
gaagatgagagagatggcattaatc

SEQ ID NO: 272621 - DNA, 25 bp, Artificial
  probe
  misc_feature (1)..(25): SEQ ID NO: 761; WAN024D7X; Start 259; Stop 283
atctctgtgacctgtctgtctattg

SEQ ID NO: 272622 - DNA, 25 bp, Artificial
  probe
  misc_feature (1)..(25): SEQ ID NO: 761; WAN024D7X; Start 464; Stop 488
ggtatgatatggtctgggaaatgaa

SEQ ID NO: 272623 - DNA, 25 bp, Artificial
  probe
  misc_feature (1)..(25): SEQ ID NO: 761; WAN024D7X; Start 462; Stop 486
atggtatgatatggtctgggaaatg

SEQ ID NO: 272624 - DNA, 25 bp, Artificial
  probe
  misc_feature (1)..(25): SEQ ID NO: 761; WAN024D7X; Start 253; Stop 277
ggttatatctctgtgacctgtctgt

SEQ ID NO: 272625 - DNA, 25 bp, Artificial
  probe
  misc_feature (1)..(25): SEQ ID NO: 761; WAN024D7X; Start 252; Stop 276
tggttatatctctgtgacctgtctg

SEQ ID NO: 272626 - DNA, 25 bp, Artificial
  probe
  misc_feature (1)..(25): SEQ ID NO: 761; WAN024D7X; Start 251; Stop 275
gtggttatatctctgtgacctgtct

SEQ ID NO: 272627 - DNA, 25 bp, Artificial
  probe
  misc_feature (1)..(25): SEQ ID NO: 761; WAN024D7X; Start 36; Stop 60
tcggattgttgaacttgaatttgaa

SEQ ID NO: 272628 - DNA, 25 bp, Artificial
  probe
  misc_feature (1)..(25): SEQ ID NO: 761; WAN024D7X; Start 35; Stop 59
atcggattgttgaacttgaatttga

SEQ ID NO: 272629 - DNA, 25 bp, Artificial
  probe
  misc_feature (1)..(25): SEQ ID NO: 761; WAN024D7X; Start 463; Stop 487
tggtatgatatggtctgggaaatga

SEQ ID NO: 272630 - DNA, 25 bp, Artificial
  probe
  misc_feature (1)..(25): SEQ ID NO: 761; WAN024D7X; Start 37; Stop 61
cggattgttgaacttgaatttgaaa

SEQ ID NO: 272631 - DNA, 25 bp, Artificial
  probe
  misc_feature (1)..(25): SEQ ID NO: 761; WAN024D7X; Start 94; Stop 118
gtctttgaagcacatttgagagaaa

SEQ ID NO: 272632 - DNA, 25 bp, Artificial
  probe
  misc_feature (1)..(25): SEQ ID NO: 761; WAN024D7X; Start 6; Stop 30
aatcagacaagcaagattagaagat

SEQ ID NO: 272633 - DNA, 25 bp, Artificial
  probe
  misc_feature (1)..(25): SEQ ID NO: 761; WAN024D7X; Start 465; Stop 489
gtatgatatggtctgggaaatgaaa

SEQ ID NO: 272634 - DNA, 25 bp, Artificial
  probe
  misc_feature (1)..(25): SEQ ID NO: 761; WAN024D7X; Start 11; Stop 35
gacaagcaagattagaagatttgga

SEQ ID NO: 272635 - DNA, 25 bp, Artificial
  probe
  misc_feature (1)..(25): SEQ ID NO: 761; WAN024D7X; Start 10; Stop 34
agacaagcaagattagaagatttgg

SEQ ID NO: 272636 - DNA, 25 bp, Artificial
  probe
  misc_feature (1)..(25): SEQ ID NO: 761; WAN024D7X; Start 8; Stop 32
tcagacaagcaagattagaagattt

SEQ ID NO: 272637 - DNA, 25 bp, Artificial
  probe
  misc_feature (1)..(25): SEQ ID NO: 761; WAN024D7X; Start 33; Stop 57
ggatcggattgttgaacttgaattt

SEQ ID NO: 272638 - DNA, 25 bp, Artificial
  probe
  misc_feature (1)..(25): SEQ ID NO: 761; WAN024D7X; Start 34; Stop 58
gatcggattgttgaacttgaatttg

SEQ ID NO: 272639 - DNA, 25 bp, Artificial
  probe
  misc_feature (1)..(25): SEQ ID NO: 761; WAN024D7X; Start 23; Stop 47
tagaagatttggatcggattgttga

SEQ ID NO: 272640 - DNA, 25 bp, Artificial
  probe
  misc_feature (1)..(25): SEQ ID NO: 762; WAN024D6E; Start 219; Stop 243
cctctctatttctcagtttaccctc

SEQ ID NO: 272641 - DNA, 25 bp, Artificial
  probe
  misc_feature (1)..(25): SEQ ID NO: 762; WAN024D6E; Start 218; Stop 242
tcctctctatttctcagtttaccct

SEQ ID NO: 272642 - DNA, 25 bp, Artificial
  probe
  misc_feature (1)..(25): SEQ ID NO: 762; WAN024D6E; Start 224; Stop 248
ctatttctcagtttaccctctttgc

SEQ ID NO: 272643 - DNA, 25 bp, Artificial
  probe
  misc_feature (1)..(25): SEQ ID NO: 762; WAN024D6E; Start 119; Stop 143
aagatttggactatgctgtgagaaa

SEQ ID NO: 272644 - DNA, 25 bp, Artificial
  probe
  misc_feature (1)..(25): SEQ ID NO: 762; WAN024D6E; Start 406; Stop 430
ggacctgttaccattatcctagata

SEQ ID NO: 272645 - DNA, 25 bp, Artificial
  probe
  misc_feature (1)..(25): SEQ ID NO: 762; WAN024D6E; Start 217; Stop 241
atcctctctatttctcagtttaccc

SEQ ID NO: 272646 - DNA, 25 bp, Artificial
  probe
  misc_feature (1)..(25): SEQ ID NO: 762; WAN024D6E; Start 118; Stop 142
gaagatttggactatgctgtgagaa

SEQ ID NO: 272647 - DNA, 25 bp, Artificial
  probe
  misc_feature (1)..(25): SEQ ID NO: 762; WAN024D6E; Start 408; Stop 432
acctgttaccattatcctagatact

SEQ ID NO: 272648 - DNA, 25 bp, Artificial
  probe
  misc_feature (1)..(25): SEQ ID NO: 762; WAN024D6E; Start 220; Stop 244
ctctctatttctcagtttaccctct

SEQ ID NO: 272649 - DNA, 25 bp, Artificial
  probe
  misc_feature (1)..(25): SEQ ID NO: 762; WAN024D6E; Start 225; Stop 249
tatttctcagtttaccctctttgcg

SEQ ID NO: 272650 - DNA, 25 bp, Artificial
  probe
  misc_feature (1)..(25): SEQ ID NO: 762; WAN024D6E; Start 407; Stop 431
gacctgttaccattatcctagatac

SEQ ID NO: 272651 - DNA, 25 bp, Artificial
  probe
  misc_feature (1)..(25): SEQ ID NO: 762; WAN024D6E; Start 221; Stop 245
tctctatttctcagtttaccctctt

SEQ ID NO: 272652 - DNA, 25 bp, Artificial
  probe
  misc_feature (1)..(25): SEQ ID NO: 762; WAN024D6E; Start 234; Stop 258
gtttaccctctttgcggatactaag

SEQ ID NO: 272653 - DNA, 25 bp, Artificial
  probe
  misc_feature (1)..(25): SEQ ID NO: 762; WAN024D6E; Start 181; Stop 205
aagatgaacctgtctgtcaaagata

SEQ ID NO: 272654 - DNA, 25 bp, Artificial
  probe
  misc_feature (1)..(25): SEQ ID NO: 762; WAN024D6E; Start 182; Stop 206
agatgaacctgtctgtcaaagatat

SEQ ID NO: 272655 - DNA, 25 bp, Artificial
  probe
  misc_feature (1)..(25): SEQ ID NO: 762; WAN024D6E; Start 113; Stop 137
aagaggaagatttggactatgctgt

SEQ ID NO: 272656 - DNA, 25 bp, Artificial
  probe
  misc_feature (1)..(25): SEQ ID NO: 762; WAN024D6E; Start 184; Stop 208
atgaacctgtctgtcaaagatattg

SEQ ID NO: 272657 - DNA, 25 bp, Artificial
  probe
  misc_feature (1)..(25): SEQ ID NO: 762; WAN024D6E; Start 380; Stop 404
atatgcaggttgagctggttaataa

SEQ ID NO: 272658 - DNA, 25 bp, Artificial
  probe
  misc_feature (1)..(25): SEQ ID NO: 762; WAN024D6E; Start 180; Stop 204
caagatgaacctgtctgtcaaagat

SEQ ID NO: 272659 - DNA, 25 bp, Artificial
  probe
  misc_feature (1)..(25): SEQ ID NO: 762; WAN024D6E; Start 223; Stop 247
tctatttctcagtttaccctctttg

SEQ ID NO: 272660 - DNA, 25 bp, Artificial
  probe
  misc_feature (1)..(25): SEQ ID NO: 762; WAN024D6E; Start 307; Stop 331
tcagacttctatgatgctttcaatc

SEQ ID NO: 272661 - DNA, 25 bp, Artificial
  probe
  misc_feature (1)..(25): SEQ ID NO: 762; WAN024D6E; Start 379; Stop 403
gatatgcaggttgagctggttaata

SEQ ID NO: 272662 - DNA, 25 bp, Artificial
  probe
  misc_feature (1)..(25): SEQ ID NO: 762; WAN024D6E; Start 183; Stop 207
gatgaacctgtctgtcaaagatatt

SEQ ID NO: 272663 - DNA, 25 bp, Artificial
  probe
  misc_feature (1)..(25): SEQ ID NO: 762; WAN024D6E; Start 112; Stop 136
caagaggaagatttggactatgctg

SEQ ID NO: 272664 - DNA, 25 bp, Artificial
  probe
  misc_feature (1)..(25): SEQ ID NO: 762; WAN024D6E; Start 222; Stop 246
ctctatttctcagtttaccctcttt

SEQ ID NO: 272665 - DNA, 25 bp, Artificial
  probe
  misc_feature (1)..(25): SEQ ID NO: 762; WAN024D6E; Start 297; Stop 321
tgatatggcatcagacttctatgat

SEQ ID NO: 272666 - DNA, 25 bp, Artificial
  probe
  misc_feature (1)..(25): SEQ ID NO: 762; WAN024D6E; Start 233; Stop 257
agtttaccctctttgcggatactaa

SEQ ID NO: 272667 - DNA, 25 bp, Artificial
  probe
  misc_feature (1)..(25): SEQ ID NO: 762; WAN024D6E; Start 216; Stop 240
aatcctctctatttctcagtttacc

SEQ ID NO: 272668 - DNA, 25 bp, Artificial
  probe
  misc_feature (1)..(25): SEQ ID NO: 762; WAN024D6E; Start 117; Stop 141
ggaagatttggactatgctgtgaga

SEQ ID NO: 272669 - DNA, 25 bp, Artificial
  probe
  misc_feature (1)..(25): SEQ ID NO: 762; WAN024D6E; Start 116; Stop 140
aggaagatttggactatgctgtgag

SEQ ID NO: 272670 - DNA, 25 bp, Artificial
  probe
  misc_feature (1)..(25): SEQ ID NO: 762; WAN024D6E; Start 115; Stop 139
gaggaagatttggactatgctgtga

SEQ ID NO: 272671 - DNA, 25 bp, Artificial
  probe
  misc_feature (1)..(25): SEQ ID NO: 762; WAN024D6E; Start 114; Stop 138
agaggaagatttggactatgctgtg

SEQ ID NO: 272672 - DNA, 25 bp, Artificial
  probe
  misc_feature (1)..(25): SEQ ID NO: 762; WAN024D6E; Start 34; Stop 58
caagtgagtatagaaggccagattc

SEQ ID NO: 272673 - DNA, 25 bp, Artificial
  probe
  misc_feature (1)..(25): SEQ ID NO: 763; WAN024EXZ; Start 346; Stop 370
cacgaagaataccaactagaggaat

SEQ ID NO: 272674 - DNA, 25 bp, Artificial
  probe
  misc_feature (1)..(25): SEQ ID NO: 763; WAN024EXZ; Start 347; Stop 371
acgaagaataccaactagaggaatt

SEQ ID NO: 272675 - DNA, 25 bp, Artificial
  probe
  misc_feature (1)..(25): SEQ ID NO: 763; WAN024EXZ; Start 345; Stop 369
tcacgaagaataccaactagaggaa

SEQ ID NO: 272676 - DNA, 25 bp, Artificial
  probe
  misc_feature (1)..(25): SEQ ID NO: 763; WAN024EXZ; Start 344; Stop 368
ttcacgaagaataccaactagagga

SEQ ID NO: 272677 - DNA, 25 bp, Artificial
  probe
  misc_feature (1)..(25): SEQ ID NO: 763; WAN024EXZ; Start 512; Stop 536
agcaactccttcatagtatccagac

SEQ ID NO: 272678 - DNA, 25 bp, Artificial
  probe
  misc_feature (1)..(25): SEQ ID NO: 763; WAN024EXZ; Start 511; Stop 535
gagcaactccttcatagtatccaga

SEQ ID NO: 272679 - DNA, 25 bp, Artificial
  probe
  misc_feature (1)..(25): SEQ ID NO: 763; WAN024EXZ; Start 110; Stop 134
gtcagacaatcgagaagatcaacaa

SEQ ID NO: 272680 - DNA, 25 bp, Artificial
  probe
  misc_feature (1)..(25): SEQ ID NO: 763; WAN024EXZ; Start 513; Stop 537
gcaactccttcatagtatccagacc

SEQ ID NO: 272681 - DNA, 25 bp, Artificial
  probe
  misc_feature (1)..(25): SEQ ID NO: 763; WAN024EXZ; Start 550; Stop 574
ctaccaaactacgatgtctatccag

SEQ ID NO: 272682 - DNA, 25 bp, Artificial
  probe
  misc_feature (1)..(25): SEQ ID NO: 763; WAN024EXZ; Start 214; Stop 238
aatcctcctgtctatatcgcagaga

SEQ ID NO: 272683 - DNA, 25 bp, Artificial
  probe
  misc_feature (1)..(25): SEQ ID NO: 763; WAN024EXZ; Start 213; Stop 237
caatcctcctgtctatatcgcagag

SEQ ID NO: 272684 - DNA, 25 bp, Artificial
  probe
  misc_feature (1)..(25): SEQ ID NO: 763; WAN024EXZ; Start 207; Stop 231
gtttggcaatcctcctgtctatatc

SEQ ID NO: 272685 - DNA, 25 bp, Artificial
  probe
  misc_feature (1)..(25): SEQ ID NO: 763; WAN024EXZ; Start 134; Stop 158
aaccgatctgtgctattctcttgac

SEQ ID NO: 272686 - DNA, 25 bp, Artificial
  probe
  misc_feature (1)..(25): SEQ ID NO: 763; WAN024EXZ; Start 254; Stop 278
tctacactcctgtcgataatctctc

SEQ ID NO: 272687 - DNA, 25 bp, Artificial
  probe
  misc_feature (1)..(25): SEQ ID NO: 763; WAN024EXZ; Start 253; Stop 277
ctctacactcctgtcgataatctct

SEQ ID NO: 272688 - DNA, 25 bp, Artificial
  probe
  misc_feature (1)..(25): SEQ ID NO: 763; WAN024EXZ; Start 551; Stop 575
taccaaactacgatgtctatccagg

SEQ ID NO: 272689 - DNA, 25 bp, Artificial
  probe
  misc_feature (1)..(25): SEQ ID NO: 763; WAN024EXZ; Start 549; Stop 573
cctaccaaactacgatgtctatcca

SEQ ID NO: 272690 - DNA, 25 bp, Artificial
  probe
  misc_feature (1)..(25): SEQ ID NO: 763; WAN024EXZ; Start 547; Stop 571
accctaccaaactacgatgtctatc

SEQ ID NO: 272691 - DNA, 25 bp, Artificial
  probe
  misc_feature (1)..(25): SEQ ID NO: 763; WAN024EXZ; Start 343; Stop 367
tttcacgaagaataccaactagagg

SEQ ID NO: 272692 - DNA, 25 bp, Artificial
  probe
  misc_feature (1)..(25): SEQ ID NO: 763; WAN024EXZ; Start 546; Stop 570
caccctaccaaactacgatgtctat

SEQ ID NO: 272693 - DNA, 25 bp, Artificial
  probe
  misc_feature (1)..(25): SEQ ID NO: 763; WAN024EXZ; Start 521; Stop 545
ttcatagtatccagacccaactctt

SEQ ID NO: 272694 - DNA, 25 bp, Artificial
  probe
  misc_feature (1)..(25): SEQ ID NO: 763; WAN024EXZ; Start 215; Stop 239
atcctcctgtctatatcgcagagag

SEQ ID NO: 272695 - DNA, 25 bp, Artificial
  probe
  misc_feature (1)..(25): SEQ ID NO: 763; WAN024EXZ; Start 342; Stop 366
ctttcacgaagaataccaactagag

SEQ ID NO: 272696 - DNA, 25 bp, Artificial
  probe
  misc_feature (1)..(25): SEQ ID NO: 763; WAN024EXZ; Start 522; Stop 546
tcatagtatccagacccaactcttc

SEQ ID NO: 272697 - DNA, 25 bp, Artificial
  probe
  misc_feature (1)..(25): SEQ ID NO: 763; WAN024EXZ; Start 520; Stop 544
cttcatagtatccagacccaactct

SEQ ID NO: 272698 - DNA, 25 bp, Artificial
  probe
  misc_feature (1)..(25): SEQ ID NO: 763; WAN024EXZ; Start 255; Stop 279
ctacactcctgtcgataatctctcc

SEQ ID NO: 272699 - DNA, 25 bp, Artificial
  probe
  misc_feature (1)..(25): SEQ ID NO: 763; WAN024EXZ; Start 348; Stop 372
cgaagaataccaactagaggaattt

SEQ ID NO: 272700 - DNA, 25 bp, Artificial
  probe
  misc_feature (1)..(25): SEQ ID NO: 763; WAN024EXZ; Start 517; Stop 541
ctccttcatagtatccagacccaac

SEQ ID NO: 272701 - DNA, 25 bp, Artificial
  probe
  misc_feature (1)..(25): SEQ ID NO: 763; WAN024EXZ; Start 524; Stop 548
atagtatccagacccaactcttcac

SEQ ID NO: 272702 - DNA, 25 bp, Artificial
  probe
  misc_feature (1)..(25): SEQ ID NO: 763; WAN024EXZ; Start 523; Stop 547
catagtatccagacccaactcttca

SEQ ID NO: 272703 - DNA, 25 bp, Artificial
  probe
  misc_feature (1)..(25): SEQ ID NO: 763; WAN024EXZ; Start 548; Stop 572
ccctaccaaactacgatgtctatcc

SEQ ID NO: 272704 - DNA, 25 bp, Artificial
  probe
  misc_feature (1)..(25): SEQ ID NO: 763; WAN024EXZ; Start 208; Stop 232
tttggcaatcctcctgtctatatcg

SEQ ID NO: 272705 - DNA, 25 bp, Artificial
  probe
  misc_feature (1)..(25): SEQ ID NO: 763; WAN024EXZ; Start 252; Stop 276
gctctacactcctgtcgataatctc

SEQ ID NO: 272706 - DNA, 25 bp, Artificial
  probe
  misc_feature (1)..(25): SEQ ID NO: 764; WAN024DJS; Start 102; Stop 126
taactatggtatgcgtggagaagaa

SEQ ID NO: 272707 - DNA, 25 bp, Artificial
  probe
  misc_feature (1)..(25): SEQ ID NO: 764; WAN024DJS; Start 101; Stop 125
ttaactatggtatgcgtggagaaga

SEQ ID NO: 272708 - DNA, 25 bp, Artificial
  probe
  misc_feature (1)..(25): SEQ ID NO: 764; WAN024DJS; Start 103; Stop 127
aactatggtatgcgtggagaagaag

SEQ ID NO: 272709 - DNA, 25 bp, Artificial
  probe
  misc_feature (1)..(25): SEQ ID NO: 764; WAN024DJS; Start 140; Stop 164
taacttatgtgcagaacggactaat

SEQ ID NO: 272710 - DNA, 25 bp, Artificial
  probe
  misc_feature (1)..(25): SEQ ID NO: 764; WAN024DJS; Start 138; Stop 162
attaacttatgtgcagaacggacta

SEQ ID NO: 272711 - DNA, 25 bp, Artificial
  probe
  misc_feature (1)..(25): SEQ ID NO: 764; WAN024DJS; Start 139; Stop 163
ttaacttatgtgcagaacggactaa

SEQ ID NO: 272712 - DNA, 25 bp, Artificial
  probe
  misc_feature (1)..(25): SEQ ID NO: 764; WAN024DJS; Start 300; Stop 324
cctttattctcaaatcaatggtggt

SEQ ID NO: 272713 - DNA, 25 bp, Artificial
  probe
  misc_feature (1)..(25): SEQ ID NO: 764; WAN024DJS; Start 137; Stop 161
aattaacttatgtgcagaacggact

SEQ ID NO: 272714 - DNA, 25 bp, Artificial
  probe
  misc_feature (1)..(25): SEQ ID NO: 764; WAN024DJS; Start 136; Stop 160
caattaacttatgtgcagaacggac

SEQ ID NO: 272715 - DNA, 25 bp, Artificial
  probe
  misc_feature (1)..(25): SEQ ID NO: 764; WAN024DJS; Start 134; Stop 158
gtcaattaacttatgtgcagaacgg

SEQ ID NO: 272716 - DNA, 25 bp, Artificial
  probe
  misc_feature (1)..(25): SEQ ID NO: 764; WAN024DJS; Start 304; Stop 328
tattctcaaatcaatggtggtaacg

SEQ ID NO: 272717 - DNA, 25 bp, Artificial
  probe
  misc_feature (1)..(25): SEQ ID NO: 764; WAN024DJS; Start 99; Stop 123
atttaactatggtatgcgtggagaa

SEQ ID NO: 272718 - DNA, 25 bp, Artificial
  probe
  misc_feature (1)..(25): SEQ ID NO: 764; WAN024DJS; Start 292; Stop 316
gacgcttacctttattctcaaatca

SEQ ID NO: 272719 - DNA, 25 bp, Artificial
  probe
  misc_feature (1)..(25): SEQ ID NO: 764; WAN024DJS; Start 135; Stop 159
tcaattaacttatgtgcagaacgga

SEQ ID NO: 272720 - DNA, 25 bp, Artificial
  probe
  misc_feature (1)..(25): SEQ ID NO: 764; WAN024DJS; Start 384; Stop 408
attgatgtttgaacgcttatttgct

SEQ ID NO: 272721 - DNA, 25 bp, Artificial
  probe
  misc_feature (1)..(25): SEQ ID NO: 764; WAN024DJS; Start 383; Stop 407
aattgatgtttgaacgcttatttgc

SEQ ID NO: 272722 - DNA, 25 bp, Artificial
  probe
  misc_feature (1)..(25): SEQ ID NO: 764; WAN024DJS; Start 98; Stop 122
tatttaactatggtatgcgtggaga

SEQ ID NO: 272723 - DNA, 25 bp, Artificial
  probe
  misc_feature (1)..(25): SEQ ID NO: 764; WAN024DJS; Start 100; Stop 124
tttaactatggtatgcgtggagaag

SEQ ID NO: 272724 - DNA, 25 bp, Artificial
  probe
  misc_feature (1)..(25): SEQ ID NO: 764; WAN024DJS; Start 293; Stop 317
acgcttacctttattctcaaatcaa

SEQ ID NO: 272725 - DNA, 25 bp, Artificial
  probe
  misc_feature (1)..(25): SEQ ID NO: 764; WAN024DJS; Start 391; Stop 415
tttgaacgcttatttgctgaagaaa

SEQ ID NO: 272726 - DNA, 25 bp, Artificial
  probe
  misc_feature (1)..(25): SEQ ID NO: 764; WAN024DJS; Start 117; Stop 141
tggagaagaaggagaaagtcaatta

SEQ ID NO: 272727 - DNA, 25 bp, Artificial
  probe
  misc_feature (1)..(25): SEQ ID NO: 764; WAN024DJS; Start 116; Stop 140
gtggagaagaaggagaaagtcaatt

SEQ ID NO: 272728 - DNA, 25 bp, Artificial
  probe
  misc_feature (1)..(25): SEQ ID NO: 764; WAN024DJS; Start 387; Stop 411
gatgtttgaacgcttatttgctgaa

SEQ ID NO: 272729 - DNA, 25 bp, Artificial
  probe
  misc_feature (1)..(25): SEQ ID NO: 764; WAN024DJS; Start 133; Stop 157
agtcaattaacttatgtgcagaacg

SEQ ID NO: 272730 - DNA, 25 bp, Artificial
  probe
  misc_feature (1)..(25): SEQ ID NO: 764; WAN024DJS; Start 141; Stop 165
aacttatgtgcagaacggactaatg

SEQ ID NO: 272731 - DNA, 25 bp, Artificial
  probe
  misc_feature (1)..(25): SEQ ID NO: 764; WAN024DJS; Start 97; Stop 121
ttatttaactatggtatgcgtggag

SEQ ID NO: 272732 - DNA, 25 bp, Artificial
  probe
  misc_feature (1)..(25): SEQ ID NO: 764; WAN024DJS; Start 390; Stop 414
gtttgaacgcttatttgctgaagaa

SEQ ID NO: 272733 - DNA, 25 bp, Artificial
  probe
  misc_feature (1)..(25): SEQ ID NO: 764; WAN024DJS; Start 388; Stop 412
atgtttgaacgcttatttgctgaag

SEQ ID NO: 272734 - DNA, 25 bp, Artificial
  probe
  misc_feature (1)..(25): SEQ ID NO: 764; WAN024DJS; Start 385; Stop 409
ttgatgtttgaacgcttatttgctg

SEQ ID NO: 272735 - DNA, 25 bp, Artificial
  probe
  misc_feature (1)..(25): SEQ ID NO: 764; WAN024DJS; Start 289; Stop 313
actgacgcttacctttattctcaaa

SEQ ID NO: 272736 - DNA, 25 bp, Artificial
  probe
  misc_feature (1)..(25): SEQ ID NO: 764; WAN024DJS; Start 288; Stop 312
aactgacgcttacctttattctcaa

SEQ ID NO: 272737 - DNA, 25 bp, Artificial
  probe
  misc_feature (1)..(25): SEQ ID NO: 764; WAN024DJS; Start 291; Stop 315
tgacgcttacctttattctcaaatc

SEQ ID NO: 272738 - DNA, 25 bp, Artificial
  probe
  misc_feature (1)..(25): SEQ ID NO: 764; WAN024DJS; Start 290; Stop 314
ctgacgcttacctttattctcaaat

SEQ ID NO: 272739 - DNA, 25 bp, Artificial
  probe
  misc_feature (1)..(25): SEQ ID NO: 765; WAN024FNX; Start 296; Stop 320
atctaggaactatggatatggtggt

SEQ ID NO: 272740 - DNA, 25 bp, Artificial
  probe
  misc_feature (1)..(25): SEQ ID NO: 765; WAN024FNX; Start 297; Stop 321
tctaggaactatggatatggtggtc

SEQ ID NO: 272741 - DNA, 25 bp, Artificial
  probe
  misc_feature (1)..(25): SEQ ID NO: 765; WAN024FNX; Start 295; Stop 319
catctaggaactatggatatggtgg

SEQ ID NO: 272742 - DNA, 25 bp, Artificial
  probe
  misc_feature (1)..(25): SEQ ID NO: 765; WAN024FNX; Start 404; Stop 428
ttatccgtggtccgattatcagtag

SEQ ID NO: 272743 - DNA, 25 bp, Artificial
  probe
  misc_feature (1)..(25): SEQ ID NO: 765; WAN024FNX; Start 294; Stop 318
tcatctaggaactatggatatggtg

SEQ ID NO: 272744 - DNA, 25 bp, Artificial
  probe
  misc_feature (1)..(25): SEQ ID NO: 765; WAN024FNX; Start 293; Stop 317
gtcatctaggaactatggatatggt

SEQ ID NO: 272745 - DNA, 25 bp, Artificial
  probe
  misc_feature (1)..(25): SEQ ID NO: 765; WAN024FNX; Start 287; Stop 311
aagagagtcatctaggaactatgga

SEQ ID NO: 272746 - DNA, 25 bp, Artificial
  probe
  misc_feature (1)..(25): SEQ ID NO: 765; WAN024FNX; Start 288; Stop 312
agagagtcatctaggaactatggat

SEQ ID NO: 272747 - DNA, 25 bp, Artificial
  probe
  misc_feature (1)..(25): SEQ ID NO: 765; WAN024FNX; Start 298; Stop 322
ctaggaactatggatatggtggtcg

SEQ ID NO: 272748 - DNA, 25 bp, Artificial
  probe
  misc_feature (1)..(25): SEQ ID NO: 765; WAN024FNX; Start 292; Stop 316
agtcatctaggaactatggatatgg

SEQ ID NO: 272749 - DNA, 25 bp, Artificial
  probe
  misc_feature (1)..(25): SEQ ID NO: 765; WAN024FNX; Start 414; Stop 438
tccgattatcagtagtgttggtgag

SEQ ID NO: 272750 - DNA, 25 bp, Artificial
  probe
  misc_feature (1)..(25): SEQ ID NO: 765; WAN024FNX; Start 405; Stop 429
tatccgtggtccgattatcagtagt

SEQ ID NO: 272751 - DNA, 25 bp, Artificial
  probe
  misc_feature (1)..(25): SEQ ID NO: 765; WAN024FNX; Start 55; Stop 79
ctagatcaattaggtgtcgagagtg

SEQ ID NO: 272752 - DNA, 25 bp, Artificial
  probe
  misc_feature (1)..(25): SEQ ID NO: 765; WAN024FNX; Start 58; Stop 82
gatcaattaggtgtcgagagtgtag

SEQ ID NO: 272753 - DNA, 25 bp, Artificial
  probe
  misc_feature (1)..(25): SEQ ID NO: 765; WAN024FNX; Start 289; Stop 313
gagagtcatctaggaactatggata

SEQ ID NO: 272754 - DNA, 25 bp, Artificial
  probe
  misc_feature (1)..(25): SEQ ID NO: 765; WAN024FNX; Start 413; Stop 437
gtccgattatcagtagtgttggtga

SEQ ID NO: 272755 - DNA, 25 bp, Artificial
  probe
  misc_feature (1)..(25): SEQ ID NO: 765; WAN024FNX; Start 59; Stop 83
atcaattaggtgtcgagagtgtaga

SEQ ID NO: 272756 - DNA, 25 bp, Artificial
  probe
  misc_feature (1)..(25): SEQ ID NO: 765; WAN024FNX; Start 57; Stop 81
agatcaattaggtgtcgagagtgta

SEQ ID NO: 272757 - DNA, 25 bp, Artificial
  probe
  misc_feature (1)..(25): SEQ ID NO: 765; WAN024FNX; Start 56; Stop 80
tagatcaattaggtgtcgagagtgt

SEQ ID NO: 272758 - DNA, 25 bp, Artificial
  probe
  misc_feature (1)..(25): SEQ ID NO: 765; WAN024FNX; Start 61; Stop 85
caattaggtgtcgagagtgtagaac

SEQ ID NO: 272759 - DNA, 25 bp, Artificial
  probe
  misc_feature (1)..(25): SEQ ID NO: 765; WAN024FNX; Start 60; Stop 84
tcaattaggtgtcgagagtgtagaa

SEQ ID NO: 272760 - DNA, 25 bp, Artificial
  probe
  misc_feature (1)..(25): SEQ ID NO: 765; WAN024FNX; Start 412; Stop 436
ggtccgattatcagtagtgttggtg

SEQ ID NO: 272761 - DNA, 25 bp, Artificial
  probe
  misc_feature (1)..(25): SEQ ID NO: 765; WAN024FNX; Start 410; Stop 434
gtggtccgattatcagtagtgttgg

SEQ ID NO: 272762 - DNA, 25 bp, Artificial
  probe
  misc_feature (1)..(25): SEQ ID NO: 765; WAN024FNX; Start 50; Stop 74
aagtgctagatcaattaggtgtcga

SEQ ID NO: 272763 - DNA, 25 bp, Artificial
  probe
  misc_feature (1)..(25): SEQ ID NO: 765; WAN024FNX; Start 62; Stop 86
aattaggtgtcgagagtgtagaact

SEQ ID NO: 272764 - DNA, 25 bp, Artificial
  probe
  misc_feature (1)..(25): SEQ ID NO: 765; WAN024FNX; Start 291; Stop 315
gagtcatctaggaactatggatatg

SEQ ID NO: 272765 - DNA, 25 bp, Artificial
  probe
  misc_feature (1)..(25): SEQ ID NO: 765; WAN024FNX; Start 54; Stop 78
gctagatcaattaggtgtcgagagt

SEQ ID NO: 272766 - DNA, 25 bp, Artificial
  probe
  misc_feature (1)..(25): SEQ ID NO: 765; WAN024FNX; Start 53; Stop 77
tgctagatcaattaggtgtcgagag

SEQ ID NO: 272767 - DNA, 25 bp, Artificial
  probe
  misc_feature (1)..(25): SEQ ID NO: 765; WAN024FNX; Start 403; Stop 427
tttatccgtggtccgattatcagta

SEQ ID NO: 272768 - DNA, 25 bp, Artificial
  probe
  misc_feature (1)..(25): SEQ ID NO: 765; WAN024FNX; Start 343; Stop 367
caattaggaagtttctacacggaag

SEQ ID NO: 272769 - DNA, 25 bp, Artificial
  probe
  misc_feature (1)..(25): SEQ ID NO: 765; WAN024FNX; Start 415; Stop 439
ccgattatcagtagtgttggtgagg

SEQ ID NO: 272770 - DNA, 25 bp, Artificial
  probe
  misc_feature (1)..(25): SEQ ID NO: 765; WAN024FNX; Start 290; Stop 314
agagtcatctaggaactatggatat

SEQ ID NO: 272771 - DNA, 25 bp, Artificial
  probe
  misc_feature (1)..(25): SEQ ID NO: 765; WAN024FNX; Start 388; Stop 412
aagattccaatgacctttatccgtg

SEQ ID NO: 272772 - DNA, 25 bp, Artificial
  probe
  misc_feature (1)..(25): SEQ ID NO: 766; WAN024GBL; Start 19; Stop 43
ggatattctggttctggtaagtcaa

SEQ ID NO: 272773 - DNA, 25 bp, Artificial
  probe
  misc_feature (1)..(25): SEQ ID NO: 766; WAN024GBL; Start 12; Stop 36
aattatcggatattctggttctggt

SEQ ID NO: 272774 - DNA, 25 bp, Artificial
  probe
  misc_feature (1)..(25): SEQ ID NO: 766; WAN024GBL; Start 15; Stop 39
tatcggatattctggttctggtaag

SEQ ID NO: 272775 - DNA, 25 bp, Artificial
  probe
  misc_feature (1)..(25): SEQ ID NO: 766; WAN024GBL; Start 11; Stop 35
caattatcggatattctggttctgg

SEQ ID NO: 272776 - DNA, 25 bp, Artificial
  probe
  misc_feature (1)..(25): SEQ ID NO: 766; WAN024GBL; Start 16; Stop 40
atcggatattctggttctggtaagt

SEQ ID NO: 272777 - DNA, 25 bp, Artificial
  probe
  misc_feature (1)..(25): SEQ ID NO: 766; WAN024GBL; Start 14; Stop 38
ttatcggatattctggttctggtaa

SEQ ID NO: 272778 - DNA, 25 bp, Artificial
  probe
  misc_feature (1)..(25): SEQ ID NO: 766; WAN024GBL; Start 21; Stop 45
atattctggttctggtaagtcaact

SEQ ID NO: 272779 - DNA, 25 bp, Artificial
  probe
  misc_feature (1)..(25): SEQ ID NO: 766; WAN024GBL; Start 20; Stop 44
gatattctggttctggtaagtcaac

SEQ ID NO: 272780 - DNA, 25 bp, Artificial
  probe
  misc_feature (1)..(25): SEQ ID NO: 766; WAN024GBL; Start 13; Stop 37
attatcggatattctggttctggta

SEQ ID NO: 272781 - DNA, 25 bp, Artificial
  probe
  misc_feature (1)..(25): SEQ ID NO: 766; WAN024GBL; Start 17; Stop 41
tcggatattctggttctggtaagtc

SEQ ID NO: 272782 - DNA, 25 bp, Artificial
  probe
  misc_feature (1)..(25): SEQ ID NO: 766; WAN024GBL; Start 18; Stop 42
cggatattctggttctggtaagtca

SEQ ID NO: 272783 - DNA, 25 bp, Artificial
  probe
  misc_feature (1)..(25): SEQ ID NO: 766; WAN024GBL; Start 192; Stop 216
cgatggtaattattcttggtgctac

SEQ ID NO: 272784 - DNA, 25 bp, Artificial
  probe
  misc_feature (1)..(25): SEQ ID NO: 766; WAN024GBL; Start 193; Stop 217
gatggtaattattcttggtgctact

SEQ ID NO: 272785 - DNA, 25 bp, Artificial
  probe
  misc_feature (1)..(25): SEQ ID NO: 766; WAN024GBL; Start 191; Stop 215
tcgatggtaattattcttggtgcta

SEQ ID NO: 272786 - DNA, 25 bp, Artificial
  probe
  misc_feature (1)..(25): SEQ ID NO: 766; WAN024GBL; Start 195; Stop 219
tggtaattattcttggtgctactac

SEQ ID NO: 272787 - DNA, 25 bp, Artificial
  probe
  misc_feature (1)..(25): SEQ ID NO: 766; WAN024GBL; Start 296; Stop 320
agcgttatcttaaataccgtggaaa

SEQ ID NO: 272788 - DNA, 25 bp, Artificial
  probe
  misc_feature (1)..(25): SEQ ID NO: 766; WAN024GBL; Start 214; Stop 238
tactaccaagaacgaatgcaagaag

SEQ ID NO: 272789 - DNA, 25 bp, Artificial
  probe
  misc_feature (1)..(25): SEQ ID NO: 766; WAN024GBL; Start 213; Stop 237
ctactaccaagaacgaatgcaagaa

SEQ ID NO: 272790 - DNA, 25 bp, Artificial
  probe
  misc_feature (1)..(25): SEQ ID NO: 766; WAN024GBL; Start 371; Stop 395
ttatcagatggattctttgggatgg

SEQ ID NO: 272791 - DNA, 25 bp, Artificial
  probe
  misc_feature (1)..(25): SEQ ID NO: 766; WAN024GBL; Start 368; Stop 392
agtttatcagatggattctttggga

SEQ ID NO: 272792 - DNA, 25 bp, Artificial
  probe
  misc_feature (1)..(25): SEQ ID NO: 766; WAN024GBL; Start 364; Stop 388
tgggagtttatcagatggattcttt

SEQ ID NO: 272793 - DNA, 25 bp, Artificial
  probe
  misc_feature (1)..(25): SEQ ID NO: 766; WAN024GBL; Start 295; Stop 319
aagcgttatcttaaataccgtggaa

SEQ ID NO: 272794 - DNA, 25 bp, Artificial
  probe
  misc_feature (1)..(25): SEQ ID NO: 766; WAN024GBL; Start 281; Stop 305
tctttagagcctttaagcgttatct

SEQ ID NO: 272795 - DNA, 25 bp, Artificial
  probe
  misc_feature (1)..(25): SEQ ID NO: 766; WAN024GBL; Start 367; Stop 391
gagtttatcagatggattctttggg

SEQ ID NO: 272796 - DNA, 25 bp, Artificial
  probe
  misc_feature (1)..(25): SEQ ID NO: 766; WAN024GBL; Start 366; Stop 390
ggagtttatcagatggattctttgg

SEQ ID NO: 272797 - DNA, 25 bp, Artificial
  probe
  misc_feature (1)..(25): SEQ ID NO: 766; WAN024GBL; Start 365; Stop 389
gggagtttatcagatggattctttg

SEQ ID NO: 272798 - DNA, 25 bp, Artificial
  probe
  misc_feature (1)..(25): SEQ ID NO: 766; WAN024GBL; Start 282; Stop 306
ctttagagcctttaagcgttatctt

SEQ ID NO: 272799 - DNA, 25 bp, Artificial
  probe
  misc_feature (1)..(25): SEQ ID NO: 766; WAN024GBL; Start 238; Stop 262
gctgaccaaatcatctttctcaatt

SEQ ID NO: 272800 - DNA, 25 bp, Artificial
  probe
  misc_feature (1)..(25): SEQ ID NO: 766; WAN024GBL; Start 194; Stop 218
atggtaattattcttggtgctacta

SEQ ID NO: 272801 - DNA, 25 bp, Artificial
  probe
  misc_feature (1)..(25): SEQ ID NO: 766; WAN024GBL; Start 370; Stop 394
tttatcagatggattctttgggatg

SEQ ID NO: 272802 - DNA, 25 bp, Artificial
  probe
  misc_feature (1)..(25): SEQ ID NO: 766; WAN024GBL; Start 369; Stop 393
gtttatcagatggattctttgggat

SEQ ID NO: 272803 - DNA, 25 bp, Artificial
  probe
  misc_feature (1)..(25): SEQ ID NO: 766; WAN024GBL; Start 57; Stop 81
gttatctaactactactccattcca

SEQ ID NO: 272804 - DNA, 25 bp, Artificial
  probe
  misc_feature (1)..(25): SEQ ID NO: 766; WAN024GBL; Start 294; Stop 318
taagcgttatcttaaataccgtgga

SEQ ID NO: 272805 - DNA, 25 bp, Artificial
  probe
  misc_feature (1)..(25): SEQ ID NO: 767; WAN024EWC; Start 507; Stop 531
tggaattagtaaggtgacagtctat

SEQ ID NO: 272806 - DNA, 25 bp, Artificial
  probe
  misc_feature (1)..(25): SEQ ID NO: 767; WAN024EWC; Start 506; Stop 530
atggaattagtaaggtgacagtcta

SEQ ID NO: 272807 - DNA, 25 bp, Artificial
  probe
  misc_feature (1)..(25): SEQ ID NO: 767; WAN024EWC; Start 505; Stop 529
tatggaattagtaaggtgacagtct

SEQ ID NO: 272808 - DNA, 25 bp, Artificial
  probe
  misc_feature (1)..(25): SEQ ID NO: 767; WAN024EWC; Start 508; Stop 532
ggaattagtaaggtgacagtctatg

SEQ ID NO: 272809 - DNA, 25 bp, Artificial
  probe
  misc_feature (1)..(25): SEQ ID NO: 767; WAN024EWC; Start 414; Stop 438
ttctgaagatgttatggttgtgtgc

SEQ ID NO: 272810 - DNA, 25 bp, Artificial
  probe
  misc_feature (1)..(25): SEQ ID NO: 767; WAN024EWC; Start 504; Stop 528
ttatggaattagtaaggtgacagtc

SEQ ID NO: 272811 - DNA, 25 bp, Artificial
  probe
  misc_feature (1)..(25): SEQ ID NO: 767; WAN024EWC; Start 247; Stop 271
aatatccagatgaccaaggaagttg

SEQ ID NO: 272812 - DNA, 25 bp, Artificial
  probe
  misc_feature (1)..(25): SEQ ID NO: 767; WAN024EWC; Start 413; Stop 437
tttctgaagatgttatggttgtgtg

SEQ ID NO: 272813 - DNA, 25 bp, Artificial
  probe
  misc_feature (1)..(25): SEQ ID NO: 767; WAN024EWC; Start 509; Stop 533
gaattagtaaggtgacagtctatgt

SEQ ID NO: 272814 - DNA, 25 bp, Artificial
  probe
  misc_feature (1)..(25): SEQ ID NO: 767; WAN024EWC; Start 363; Stop 387
caaggaacaaatcgtagcagatatt

SEQ ID NO: 272815 - DNA, 25 bp, Artificial
  probe
  misc_feature (1)..(25): SEQ ID NO: 767; WAN024EWC; Start 362; Stop 386
ccaaggaacaaatcgtagcagatat

SEQ ID NO: 272816 - DNA, 25 bp, Artificial
  probe
  misc_feature (1)..(25): SEQ ID NO: 767; WAN024EWC; Start 365; Stop 389
aggaacaaatcgtagcagatattga

SEQ ID NO: 272817 - DNA, 25 bp, Artificial
  probe
  misc_feature (1)..(25): SEQ ID NO: 767; WAN024EWC; Start 366; Stop 390
ggaacaaatcgtagcagatattgaa

SEQ ID NO: 272818 - DNA, 25 bp, Artificial
  probe
  misc_feature (1)..(25): SEQ ID NO: 767; WAN024EWC; Start 364; Stop 388
aaggaacaaatcgtagcagatattg

SEQ ID NO: 272819 - DNA, 25 bp, Artificial
  probe
  misc_feature (1)..(25): SEQ ID NO: 767; WAN024EWC; Start 418; Stop 442
gaagatgttatggttgtgtgcgaga

SEQ ID NO: 272820 - DNA, 25 bp, Artificial
  probe
  misc_feature (1)..(25): SEQ ID NO: 767; WAN024EWC; Start 99; Stop 123
taacatgattggtccctactttgaa

SEQ ID NO: 272821 - DNA, 25 bp, Artificial
  probe
  misc_feature (1)..(25): SEQ ID NO: 767; WAN024EWC; Start 98; Stop 122
ttaacatgattggtccctactttga

SEQ ID NO: 272822 - DNA, 25 bp, Artificial
  probe
  misc_feature (1)..(25): SEQ ID NO: 767; WAN024EWC; Start 97; Stop 121
tttaacatgattggtccctactttg

SEQ ID NO: 272823 - DNA, 25 bp, Artificial
  probe
  misc_feature (1)..(25): SEQ ID NO: 767; WAN024EWC; Start 100; Stop 124
aacatgattggtccctactttgaag

SEQ ID NO: 272824 - DNA, 25 bp, Artificial
  probe
  misc_feature (1)..(25): SEQ ID NO: 767; WAN024EWC; Start 419; Stop 443
aagatgttatggttgtgtgcgagac

SEQ ID NO: 272825 - DNA, 25 bp, Artificial
  probe
  misc_feature (1)..(25): SEQ ID NO: 767; WAN024EWC; Start 417; Stop 441
tgaagatgttatggttgtgtgcgag

SEQ ID NO: 272826 - DNA, 25 bp, Artificial
  probe
  misc_feature (1)..(25): SEQ ID NO: 767; WAN024EWC; Start 416; Stop 440
ctgaagatgttatggttgtgtgcga

SEQ ID NO: 272827 - DNA, 25 bp, Artificial
  probe
  misc_feature (1)..(25): SEQ ID NO: 767; WAN024EWC; Start 415; Stop 439
tctgaagatgttatggttgtgtgcg

SEQ ID NO: 272828 - DNA, 25 bp, Artificial
  probe
  misc_feature (1)..(25): SEQ ID NO: 767; WAN024EWC; Start 367; Stop 391
gaacaaatcgtagcagatattgaaa

SEQ ID NO: 272829 - DNA, 25 bp, Artificial
  probe
  misc_feature (1)..(25): SEQ ID NO: 767; WAN024EWC; Start 246; Stop 270
aaatatccagatgaccaaggaagtt

SEQ ID NO: 272830 - DNA, 25 bp, Artificial
  probe
  misc_feature (1)..(25): SEQ ID NO: 767; WAN024EWC; Start 157; Stop 181
ggtggtttatctatcgaagcagtat

SEQ ID NO: 272831 - DNA, 25 bp, Artificial
  probe
  misc_feature (1)..(25): SEQ ID NO: 767; WAN024EWC; Start 503; Stop 527
tttatggaattagtaaggtgacagt

SEQ ID NO: 272832 - DNA, 25 bp, Artificial
  probe
  misc_feature (1)..(25): SEQ ID NO: 767; WAN024EWC; Start 151; Stop 175
ggtagtggtggtttatctatcgaag

SEQ ID NO: 272833 - DNA, 25 bp, Artificial
  probe
  misc_feature (1)..(25): SEQ ID NO: 767; WAN024EWC; Start 150; Stop 174
aggtagtggtggtttatctatcgaa

SEQ ID NO: 272834 - DNA, 25 bp, Artificial
  probe
  misc_feature (1)..(25): SEQ ID NO: 767; WAN024EWC; Start 158; Stop 182
gtggtttatctatcgaagcagtatc

SEQ ID NO: 272835 - DNA, 25 bp, Artificial
  probe
  misc_feature (1)..(25): SEQ ID NO: 767; WAN024EWC; Start 152; Stop 176
gtagtggtggtttatctatcgaagc

SEQ ID NO: 272836 - DNA, 25 bp, Artificial
  probe
  misc_feature (1)..(25): SEQ ID NO: 767; WAN024EWC; Start 148; Stop 172
gcaggtagtggtggtttatctatcg

SEQ ID NO: 272837 - DNA, 25 bp, Artificial
  probe
  misc_feature (1)..(25): SEQ ID NO: 767; WAN024EWC; Start 156; Stop 180
tggtggtttatctatcgaagcagta

SEQ ID NO: 272838 - DNA, 25 bp, Artificial
  probe
  misc_feature (1)..(25): SEQ ID NO: 768; WAN024GAX; Start 73; Stop 97
agcactcatagcagattcttcatta

SEQ ID NO: 272839 - DNA, 25 bp, Artificial
  probe
  misc_feature (1)..(25): SEQ ID NO: 768; WAN024GAX; Start 74; Stop 98
gcactcatagcagattcttcattaa

SEQ ID NO: 272840 - DNA, 25 bp, Artificial
  probe
  misc_feature (1)..(25): SEQ ID NO: 768; WAN024GAX; Start 71; Stop 95
taagcactcatagcagattcttcat

SEQ ID NO: 272841 - DNA, 25 bp, Artificial
  probe
  misc_feature (1)..(25): SEQ ID NO: 768; WAN024GAX; Start 70; Stop 94
ataagcactcatagcagattcttca

SEQ ID NO: 272842 - DNA, 25 bp, Artificial
  probe
  misc_feature (1)..(25): SEQ ID NO: 768; WAN024GAX; Start 72; Stop 96
aagcactcatagcagattcttcatt

SEQ ID NO: 272843 - DNA, 25 bp, Artificial
  probe
  misc_feature (1)..(25): SEQ ID NO: 768; WAN024GAX; Start 69; Stop 93
gataagcactcatagcagattcttc

SEQ ID NO: 272844 - DNA, 25 bp, Artificial
  probe
  misc_feature (1)..(25): SEQ ID NO: 768; WAN024GAX; Start 68; Stop 92
agataagcactcatagcagattctt

SEQ ID NO: 272845 - DNA, 25 bp, Artificial
  probe
  misc_feature (1)..(25): SEQ ID NO: 768; WAN024GAX; Start 152; Stop 176
attcacatccgactctaatttccag

SEQ ID NO: 272846 - DNA, 25 bp, Artificial
  probe
  misc_feature (1)..(25): SEQ ID NO: 768; WAN024GAX; Start 150; Stop 174
tcattcacatccgactctaatttcc

SEQ ID NO: 272847 - DNA, 25 bp, Artificial
  probe
  misc_feature (1)..(25): SEQ ID NO: 768; WAN024GAX; Start 151; Stop 175
cattcacatccgactctaatttcca

SEQ ID NO: 272848 - DNA, 25 bp, Artificial
  probe
  misc_feature (1)..(25): SEQ ID NO: 768; WAN024GAX; Start 156; Stop 180
acatccgactctaatttccagttta

SEQ ID NO: 272849 - DNA, 25 bp, Artificial
  probe
  misc_feature (1)..(25): SEQ ID NO: 768; WAN024GAX; Start 158; Stop 182
atccgactctaatttccagtttact

SEQ ID NO: 272850 - DNA, 25 bp, Artificial
  probe
  misc_feature (1)..(25): SEQ ID NO: 768; WAN024GAX; Start 157; Stop 181
catccgactctaatttccagtttac

SEQ ID NO: 272851 - DNA, 25 bp, Artificial
  probe
  misc_feature (1)..(25): SEQ ID NO: 768; WAN024GAX; Start 159; Stop 183
tccgactctaatttccagtttacta

SEQ ID NO: 272852 - DNA, 25 bp, Artificial
  probe
  misc_feature (1)..(25): SEQ ID NO: 768; WAN024GAX; Start 155; Stop 179
cacatccgactctaatttccagttt

SEQ ID NO: 272853 - DNA, 25 bp, Artificial
  probe
  misc_feature (1)..(25): SEQ ID NO: 768; WAN024GAX; Start 149; Stop 173
gtcattcacatccgactctaatttc

SEQ ID NO: 272854 - DNA, 25 bp, Artificial
  probe
  misc_feature (1)..(25): SEQ ID NO: 768; WAN024GAX; Start 160; Stop 184
ccgactctaatttccagtttactaa

SEQ ID NO: 272855 - DNA, 25 bp, Artificial
  probe
  misc_feature (1)..(25): SEQ ID NO: 768; WAN024GAX; Start 154; Stop 178
tcacatccgactctaatttccagtt

SEQ ID NO: 272856 - DNA, 25 bp, Artificial
  probe
  misc_feature (1)..(25): SEQ ID NO: 768; WAN024GAX; Start 153; Stop 177
ttcacatccgactctaatttccagt

SEQ ID NO: 272857 - DNA, 25 bp, Artificial
  probe
  misc_feature (1)..(25): SEQ ID NO: 768; WAN024GAX; Start 140; Stop 164
tttcacatagtcattcacatccgac

SEQ ID NO: 272858 - DNA, 25 bp, Artificial
  probe
  misc_feature (1)..(25): SEQ ID NO: 768; WAN024GAX; Start 75; Stop 99
cactcatagcagattcttcattaat

SEQ ID NO: 272859 - DNA, 25 bp, Artificial
  probe
  misc_feature (1)..(25): SEQ ID NO: 768; WAN024GAX; Start 161; Stop 185
cgactctaatttccagtttactaac

SEQ ID NO: 272860 - DNA, 25 bp, Artificial
  probe
  misc_feature (1)..(25): SEQ ID NO: 768; WAN024GAX; Start 145; Stop 169
catagtcattcacatccgactctaa

SEQ ID NO: 272861 - DNA, 25 bp, Artificial
  probe
  misc_feature (1)..(25): SEQ ID NO: 768; WAN024GAX; Start 147; Stop 171
tagtcattcacatccgactctaatt

SEQ ID NO: 272862 - DNA, 25 bp, Artificial
  probe
  misc_feature (1)..(25): SEQ ID NO: 768; WAN024GAX; Start 114; Stop 138
ttcaaaccaagattttcaaactgct

SEQ ID NO: 272863 - DNA, 25 bp, Artificial
  probe
  misc_feature (1)..(25): SEQ ID NO: 768; WAN024GAX; Start 113; Stop 137
tttcaaaccaagattttcaaactgc

SEQ ID NO: 272864 - DNA, 25 bp, Artificial
  probe
  misc_feature (1)..(25): SEQ ID NO: 768; WAN024GAX; Start 144; Stop 168
acatagtcattcacatccgactcta

SEQ ID NO: 272865 - DNA, 25 bp, Artificial
  probe
  misc_feature (1)..(25): SEQ ID NO: 768; WAN024GAX; Start 139; Stop 163
ttttcacatagtcattcacatccga

SEQ ID NO: 272866 - DNA, 25 bp, Artificial
  probe
  misc_feature (1)..(25): SEQ ID NO: 768; WAN024GAX; Start 82; Stop 106
agcagattcttcattaataatcctg

SEQ ID NO: 272867 - DNA, 25 bp, Artificial
  probe
  misc_feature (1)..(25): SEQ ID NO: 768; WAN024GAX; Start 146; Stop 170
atagtcattcacatccgactctaat

SEQ ID NO: 272868 - DNA, 25 bp, Artificial
  probe
  misc_feature (1)..(25): SEQ ID NO: 768; WAN024GAX; Start 116; Stop 140
caaaccaagattttcaaactgcttt

SEQ ID NO: 272869 - DNA, 25 bp, Artificial
  probe
  misc_feature (1)..(25): SEQ ID NO: 768; WAN024GAX; Start 115; Stop 139
tcaaaccaagattttcaaactgctt

SEQ ID NO: 272870 - DNA, 25 bp, Artificial
  probe
  misc_feature (1)..(25): SEQ ID NO: 768; WAN024GAX; Start 117; Stop 141
aaaccaagattttcaaactgctttt

SEQ ID NO: 272871 - DNA, 25 bp, Artificial
  probe
  misc_feature (1)..(25): SEQ ID NO: 769; WAN024DEP; Start 127; Stop 151
ttgatggaacatgctattgtaacag

SEQ ID NO: 272872 - DNA, 25 bp, Artificial
  probe
  misc_feature (1)..(25): SEQ ID NO: 769; WAN024DEP; Start 81; Stop 105
agataatggtagatgctttgtggaa

SEQ ID NO: 272873 - DNA, 25 bp, Artificial
  probe
  misc_feature (1)..(25): SEQ ID NO: 769; WAN024DEP; Start 83; Stop 107
ataatggtagatgctttgtggaaac

SEQ ID NO: 272874 - DNA, 25 bp, Artificial
  probe
  misc_feature (1)..(25): SEQ ID NO: 769; WAN024DEP; Start 80; Stop 104
cagataatggtagatgctttgtgga

SEQ ID NO: 272875 - DNA, 25 bp, Artificial
  probe
  misc_feature (1)..(25): SEQ ID NO: 769; WAN024DEP; Start 82; Stop 106
gataatggtagatgctttgtggaaa

SEQ ID NO: 272876 - DNA, 25 bp, Artificial
  probe
  misc_feature (1)..(25): SEQ ID NO: 769; WAN024DEP; Start 281; Stop 305
agaagatttgatacgactttggaca

SEQ ID NO: 272877 - DNA, 25 bp, Artificial
  probe
  misc_feature (1)..(25): SEQ ID NO: 769; WAN024DEP; Start 302; Stop 326
gacaagtttggaaatcctgacataa

SEQ ID NO: 272878 - DNA, 25 bp, Artificial
  probe
  misc_feature (1)..(25): SEQ ID NO: 769; WAN024DEP; Start 90; Stop 114
tagatgctttgtggaaacctattac

SEQ ID NO: 272879 - DNA, 25 bp, Artificial
  probe
  misc_feature (1)..(25): SEQ ID NO: 769; WAN024DEP; Start 89; Stop 113
gtagatgctttgtggaaacctatta

SEQ ID NO: 272880 - DNA, 25 bp, Artificial
  probe
  misc_feature (1)..(25): SEQ ID NO: 769; WAN024DEP; Start 91; Stop 115
agatgctttgtggaaacctattacg

SEQ ID NO: 272881 - DNA, 25 bp, Artificial
  probe
  misc_feature (1)..(25): SEQ ID NO: 769; WAN024DEP; Start 283; Stop 307
aagatttgatacgactttggacaag

SEQ ID NO: 272882 - DNA, 25 bp, Artificial
  probe
  misc_feature (1)..(25): SEQ ID NO: 769; WAN024DEP; Start 282; Stop 306
gaagatttgatacgactttggacaa

SEQ ID NO: 272883 - DNA, 25 bp, Artificial
  probe
  misc_feature (1)..(25): SEQ ID NO: 769; WAN024DEP; Start 280; Stop 304
tagaagatttgatacgactttggac

SEQ ID NO: 272884 - DNA, 25 bp, Artificial
  probe
  misc_feature (1)..(25): SEQ ID NO: 769; WAN024DEP; Start 278; Stop 302
actagaagatttgatacgactttgg

SEQ ID NO: 272885 - DNA, 25 bp, Artificial
  probe
  misc_feature (1)..(25): SEQ ID NO: 769; WAN024DEP; Start 279; Stop 303
ctagaagatttgatacgactttgga

SEQ ID NO: 272886 - DNA, 25 bp, Artificial
  probe
  misc_feature (1)..(25): SEQ ID NO: 769; WAN024DEP; Start 92; Stop 116
gatgctttgtggaaacctattacgg

SEQ ID NO: 272887 - DNA, 25 bp, Artificial
  probe
  misc_feature (1)..(25): SEQ ID NO: 769; WAN024DEP; Start 245; Stop 269
gattgcgacagagggttatttcttc

SEQ ID NO: 272888 - DNA, 25 bp, Artificial
  probe
  misc_feature (1)..(25): SEQ ID NO: 769; WAN024DEP; Start 274; Stop 298
tgtcactagaagatttgatacgact

SEQ ID NO: 272889 - DNA, 25 bp, Artificial
  probe
  misc_feature (1)..(25): SEQ ID NO: 769; WAN024DEP; Start 251; Stop 275
gacagagggttatttcttccacatg

SEQ ID NO: 272890 - DNA, 25 bp, Artificial
  probe
  misc_feature (1)..(25): SEQ ID NO: 769; WAN024DEP; Start 128; Stop 152
tgatggaacatgctattgtaacagc

SEQ ID NO: 272891 - DNA, 25 bp, Artificial
  probe
  misc_feature (1)..(25): SEQ ID NO: 769; WAN024DEP; Start 277; Stop 301
cactagaagatttgatacgactttg

SEQ ID NO: 272892 - DNA, 25 bp, Artificial
  probe
  misc_feature (1)..(25): SEQ ID NO: 769; WAN024DEP; Start 126; Stop 150
tttgatggaacatgctattgtaaca

SEQ ID NO: 272893 - DNA, 25 bp, Artificial
  probe
  misc_feature (1)..(25): SEQ ID NO: 769; WAN024DEP; Start 301; Stop 325
ggacaagtttggaaatcctgacata

SEQ ID NO: 272894 - DNA, 25 bp, Artificial
  probe
  misc_feature (1)..(25): SEQ ID NO: 769; WAN024DEP; Start 275; Stop 299
gtcactagaagatttgatacgactt

SEQ ID NO: 272895 - DNA, 25 bp, Artificial
  probe
  misc_feature (1)..(25): SEQ ID NO: 769; WAN024DEP; Start 273; Stop 297
atgtcactagaagatttgatacgac

SEQ ID NO: 272896 - DNA, 25 bp, Artificial
  probe
  misc_feature (1)..(25): SEQ ID NO: 769; WAN024DEP; Start 272; Stop 296
catgtcactagaagatttgatacga

SEQ ID NO: 272897 - DNA, 25 bp, Artificial
  probe
  misc_feature (1)..(25): SEQ ID NO: 769; WAN024DEP; Start 250; Stop 274
cgacagagggttatttcttccacat

SEQ ID NO: 272898 - DNA, 25 bp, Artificial
  probe
  misc_feature (1)..(25): SEQ ID NO: 769; WAN024DEP; Start 88; Stop 112
ggtagatgctttgtggaaacctatt

SEQ ID NO: 272899 - DNA, 25 bp, Artificial
  probe
  misc_feature (1)..(25): SEQ ID NO: 769; WAN024DEP; Start 129; Stop 153
gatggaacatgctattgtaacagct

SEQ ID NO: 272900 - DNA, 25 bp, Artificial
  probe
  misc_feature (1)..(25): SEQ ID NO: 769; WAN024DEP; Start 276; Stop 300
tcactagaagatttgatacgacttt

SEQ ID NO: 272901 - DNA, 25 bp, Artificial
  probe
  misc_feature (1)..(25): SEQ ID NO: 769; WAN024DEP; Start 297; Stop 321
ctttggacaagtttggaaatcctga

SEQ ID NO: 272902 - DNA, 25 bp, Artificial
  probe
  misc_feature (1)..(25): SEQ ID NO: 769; WAN024DEP; Start 84; Stop 108
taatggtagatgctttgtggaaacc

SEQ ID NO: 272903 - DNA, 25 bp, Artificial
  probe
  misc_feature (1)..(25): SEQ ID NO: 769; WAN024DEP; Start 204; Stop 228
aaatggattgctgcgggtagttatt

SEQ ID NO: 272904 - DNA, 25 bp, Artificial
  probe
  misc_feature (1)..(25): SEQ ID NO: 770; WAN024CGU; Start 118; Stop 142
ataagtgttgttgaagaattaaggc

SEQ ID NO: 272905 - DNA, 25 bp, Artificial
  probe
  misc_feature (1)..(25): SEQ ID NO: 770; WAN024CGU; Start 116; Stop 140
cgataagtgttgttgaagaattaag

SEQ ID NO: 272906 - DNA, 25 bp, Artificial
  probe
  misc_feature (1)..(25): SEQ ID NO: 770; WAN024CGU; Start 119; Stop 143
taagtgttgttgaagaattaaggcc

SEQ ID NO: 272907 - DNA, 25 bp, Artificial
  probe
  misc_feature (1)..(25): SEQ ID NO: 770; WAN024CGU; Start 117; Stop 141
gataagtgttgttgaagaattaagg

SEQ ID NO: 272908 - DNA, 25 bp, Artificial
  probe
  misc_feature (1)..(25): SEQ ID NO: 770; WAN024CGU; Start 120; Stop 144
aagtgttgttgaagaattaaggcca

SEQ ID NO: 272909 - DNA, 25 bp, Artificial
  probe
  misc_feature (1)..(25): SEQ ID NO: 770; WAN024CGU; Start 115; Stop 139
tcgataagtgttgttgaagaattaa

SEQ ID NO: 272910 - DNA, 25 bp, Artificial
  probe
  misc_feature (1)..(25): SEQ ID NO: 770; WAN024CGU; Start 114; Stop 138
ttcgataagtgttgttgaagaatta

SEQ ID NO: 272911 - DNA, 25 bp, Artificial
  probe
  misc_feature (1)..(25): SEQ ID NO: 770; WAN024CGU; Start 112; Stop 136
ctttcgataagtgttgttgaagaat

SEQ ID NO: 272912 - DNA, 25 bp, Artificial
  probe
  misc_feature (1)..(25): SEQ ID NO: 770; WAN024CGU; Start 109; Stop 133
attctttcgataagtgttgttgaag

SEQ ID NO: 272913 - DNA, 25 bp, Artificial
  probe
  misc_feature (1)..(25): SEQ ID NO: 770; WAN024CGU; Start 125; Stop 149
ttgttgaagaattaaggccacgttg

SEQ ID NO: 272914 - DNA, 25 bp, Artificial
  probe
  misc_feature (1)..(25): SEQ ID NO: 770; WAN024CGU; Start 124; Stop 148
gttgttgaagaattaaggccacgtt

SEQ ID NO: 272915 - DNA, 25 bp, Artificial
  probe
  misc_feature (1)..(25): SEQ ID NO: 770; WAN024CGU; Start 113; Stop 137
tttcgataagtgttgttgaagaatt

SEQ ID NO: 272916 - DNA, 25 bp, Artificial
  probe
  misc_feature (1)..(25): SEQ ID NO: 770; WAN024CGU; Start 121; Stop 145
agtgttgttgaagaattaaggccac

SEQ ID NO: 272917 - DNA, 25 bp, Artificial
  probe
  misc_feature (1)..(25): SEQ ID NO: 770; WAN024CGU; Start 111; Stop 135
tctttcgataagtgttgttgaagaa

SEQ ID NO: 272918 - DNA, 25 bp, Artificial
  probe
  misc_feature (1)..(25): SEQ ID NO: 770; WAN024CGU; Start 110; Stop 134
ttctttcgataagtgttgttgaaga

SEQ ID NO: 272919 - DNA, 25 bp, Artificial
  probe
  misc_feature (1)..(25): SEQ ID NO: 770; WAN024CGU; Start 123; Stop 147
tgttgttgaagaattaaggccacgt

SEQ ID NO: 272920 - DNA, 25 bp, Artificial
  probe
  misc_feature (1)..(25): SEQ ID NO: 770; WAN024CGU; Start 108; Stop 132
tattctttcgataagtgttgttgaa

SEQ ID NO: 272921 - DNA, 25 bp, Artificial
  probe
  misc_feature (1)..(25): SEQ ID NO: 770; WAN024CGU; Start 107; Stop 131
ttattctttcgataagtgttgttga

SEQ ID NO: 272922 - DNA, 25 bp, Artificial
  probe
  misc_feature (1)..(25): SEQ ID NO: 770; WAN024CGU; Start 122; Stop 146
gtgttgttgaagaattaaggccacg

SEQ ID NO: 272923 - DNA, 25 bp, Artificial
  probe
  misc_feature (1)..(25): SEQ ID NO: 770; WAN024CGU; Start 4; Stop 28
aaaatcttttcctgtcacatgcctc

SEQ ID NO: 272924 - DNA, 25 bp, Artificial
  probe
  misc_feature (1)..(25): SEQ ID NO: 770; WAN024CGU; Start 106; Stop 130
tttattctttcgataagtgttgttg

SEQ ID NO: 272925 - DNA, 25 bp, Artificial
  probe
  misc_feature (1)..(25): SEQ ID NO: 770; WAN024CGU; Start 93; Stop 117
ggaaacagttggttttattctttcg

SEQ ID NO: 272926 - DNA, 25 bp, Artificial
  probe
  misc_feature (1)..(25): SEQ ID NO: 770; WAN024CGU; Start 86; Stop 110
ccattttggaaacagttggttttat

SEQ ID NO: 272927 - DNA, 25 bp, Artificial
  probe
  misc_feature (1)..(25): SEQ ID NO: 770; WAN024CGU; Start 5; Stop 29
aaatcttttcctgtcacatgcctca

SEQ ID NO: 272928 - DNA, 25 bp, Artificial
  probe
  misc_feature (1)..(25): SEQ ID NO: 770; WAN024CGU; Start 1; Stop 25
atgaaaatcttttcctgtcacatgc

SEQ ID NO: 272929 - DNA, 25 bp, Artificial
  probe
  misc_feature (1)..(25): SEQ ID NO: 770; WAN024CGU; Start 92; Stop 116
tggaaacagttggttttattctttc

SEQ ID NO: 272930 - DNA, 25 bp, Artificial
  probe
  misc_feature (1)..(25): SEQ ID NO: 770; WAN024CGU; Start 91; Stop 115
ttggaaacagttggttttattcttt

SEQ ID NO: 272931 - DNA, 25 bp, Artificial
  probe
  misc_feature (1)..(25): SEQ ID NO: 770; WAN024CGU; Start 90; Stop 114
tttggaaacagttggttttattctt

SEQ ID NO: 272932 - DNA, 25 bp, Artificial
  probe
  misc_feature (1)..(25): SEQ ID NO: 770; WAN024CGU; Start 89; Stop 113
ttttggaaacagttggttttattct

SEQ ID NO: 272933 - DNA, 25 bp, Artificial
  probe
  misc_feature (1)..(25): SEQ ID NO: 770; WAN024CGU; Start 126; Stop 150
tgttgaagaattaaggccacgttgg

SEQ ID NO: 272934 - DNA, 25 bp, Artificial
  probe
  misc_feature (1)..(25): SEQ ID NO: 770; WAN024CGU; Start 6; Stop 30
aatcttttcctgtcacatgcctcac

SEQ ID NO: 272935 - DNA, 25 bp, Artificial
  probe
  misc_feature (1)..(25): SEQ ID NO: 770; WAN024CGU; Start 102; Stop 126
tggttttattctttcgataagtgtt

SEQ ID NO: 272936 - DNA, 25 bp, Artificial
  probe
  misc_feature (1)..(25): SEQ ID NO: 770; WAN024CGU; Start 101; Stop 125
ttggttttattctttcgataagtgt

SEQ ID NO: 272937 - DNA, 25 bp, Artificial
  probe
  misc_feature (1)..(25): SEQ ID NO: 771; WAN024GND; Start 641; Stop 665
gcaatccgagatataccttattagc

SEQ ID NO: 272938 - DNA, 25 bp, Artificial
  probe
  misc_feature (1)..(25): SEQ ID NO: 771; WAN024GND; Start 442; Stop 466
agaggaggaagacaatctgaatatc

SEQ ID NO: 272939 - DNA, 25 bp, Artificial
  probe
  misc_feature (1)..(25): SEQ ID NO: 771; WAN024GND; Start 640; Stop 664
cgcaatccgagatataccttattag

SEQ ID NO: 272940 - DNA, 25 bp, Artificial
  probe
  misc_feature (1)..(25): SEQ ID NO: 771; WAN024GND; Start 709; Stop 733
caagatgaggagtatgctatcagag

SEQ ID NO: 272941 - DNA, 25 bp, Artificial
  probe
  misc_feature (1)..(25): SEQ ID NO: 771; WAN024GND; Start 708; Stop 732
acaagatgaggagtatgctatcaga

SEQ ID NO: 272942 - DNA, 25 bp, Artificial
  probe
  misc_feature (1)..(25): SEQ ID NO: 771; WAN024GND; Start 309; Stop 333
ctacggtgagaacagtaatctagtg

SEQ ID NO: 272943 - DNA, 25 bp, Artificial
  probe
  misc_feature (1)..(25): SEQ ID NO: 771; WAN024GND; Start 707; Stop 731
tacaagatgaggagtatgctatcag

SEQ ID NO: 272944 - DNA, 25 bp, Artificial
  probe
  misc_feature (1)..(25): SEQ ID NO: 771; WAN024GND; Start 121; Stop 145
gatactccagttacgaatcaagaat

SEQ ID NO: 272945 - DNA, 25 bp, Artificial
  probe
  misc_feature (1)..(25): SEQ ID NO: 771; WAN024GND; Start 710; Stop 734
aagatgaggagtatgctatcagagg

SEQ ID NO: 272946 - DNA, 25 bp, Artificial
  probe
  misc_feature (1)..(25): SEQ ID NO: 771; WAN024GND; Start 308; Stop 332
cctacggtgagaacagtaatctagt

SEQ ID NO: 272947 - DNA, 25 bp, Artificial
  probe
  misc_feature (1)..(25): SEQ ID NO: 771; WAN024GND; Start 712; Stop 736
gatgaggagtatgctatcagaggag

SEQ ID NO: 272948 - DNA, 25 bp, Artificial
  probe
  misc_feature (1)..(25): SEQ ID NO: 771; WAN024GND; Start 440; Stop 464
ctagaggaggaagacaatctgaata

SEQ ID NO: 272949 - DNA, 25 bp, Artificial
  probe
  misc_feature (1)..(25): SEQ ID NO: 771; WAN024GND; Start 337; Stop 361
ttagaagaccatccagtagttcatg

SEQ ID NO: 272950 - DNA, 25 bp, Artificial
  probe
  misc_feature (1)..(25): SEQ ID NO: 771; WAN024GND; Start 310; Stop 334
tacggtgagaacagtaatctagtgg

SEQ ID NO: 272951 - DNA, 25 bp, Artificial
  probe
  misc_feature (1)..(25): SEQ ID NO: 771; WAN024GND; Start 441; Stop 465
tagaggaggaagacaatctgaatat

SEQ ID NO: 272952 - DNA, 25 bp, Artificial
  probe
  misc_feature (1)..(25): SEQ ID NO: 771; WAN024GND; Start 338; Stop 362
tagaagaccatccagtagttcatgt

SEQ ID NO: 272953 - DNA, 25 bp, Artificial
  probe
  misc_feature (1)..(25): SEQ ID NO: 771; WAN024GND; Start 122; Stop 146
atactccagttacgaatcaagaatt

SEQ ID NO: 272954 - DNA, 25 bp, Artificial
  probe
  misc_feature (1)..(25): SEQ ID NO: 771; WAN024GND; Start 711; Stop 735
agatgaggagtatgctatcagagga

SEQ ID NO: 272955 - DNA, 25 bp, Artificial
  probe
  misc_feature (1)..(25): SEQ ID NO: 771; WAN024GND; Start 439; Stop 463
gctagaggaggaagacaatctgaat

SEQ ID NO: 272956 - DNA, 25 bp, Artificial
  probe
  misc_feature (1)..(25): SEQ ID NO: 771; WAN024GND; Start 704; Stop 728
ggatacaagatgaggagtatgctat

SEQ ID NO: 272957 - DNA, 25 bp, Artificial
  probe
  misc_feature (1)..(25): SEQ ID NO: 771; WAN024GND; Start 443; Stop 467
gaggaggaagacaatctgaatatcc

SEQ ID NO: 272958 - DNA, 25 bp, Artificial
  probe
  misc_feature (1)..(25): SEQ ID NO: 771; WAN024GND; Start 120; Stop 144
ggatactccagttacgaatcaagaa

SEQ ID NO: 272959 - DNA, 25 bp, Artificial
  probe
  misc_feature (1)..(25): SEQ ID NO: 771; WAN024GND; Start 340; Stop 364
gaagaccatccagtagttcatgttg

SEQ ID NO: 272960 - DNA, 25 bp, Artificial
  probe
  misc_feature (1)..(25): SEQ ID NO: 771; WAN024GND; Start 339; Stop 363
agaagaccatccagtagttcatgtt

SEQ ID NO: 272961 - DNA, 25 bp, Artificial
  probe
  misc_feature (1)..(25): SEQ ID NO: 771; WAN024GND; Start 716; Stop 740
aggagtatgctatcagaggaggttc

SEQ ID NO: 272962 - DNA, 25 bp, Artificial
  probe
  misc_feature (1)..(25): SEQ ID NO: 771; WAN024GND; Start 715; Stop 739
gaggagtatgctatcagaggaggtt

SEQ ID NO: 272963 - DNA, 25 bp, Artificial
  probe
  misc_feature (1)..(25): SEQ ID NO: 771; WAN024GND; Start 430; Stop 454
gaatatgctgctagaggaggaagac

SEQ ID NO: 272964 - DNA, 25 bp, Artificial
  probe
  misc_feature (1)..(25): SEQ ID NO: 771; WAN024GND; Start 706; Stop 730
atacaagatgaggagtatgctatca

SEQ ID NO: 272965 - DNA, 25 bp, Artificial
  probe
  misc_feature (1)..(25): SEQ ID NO: 771; WAN024GND; Start 385; Stop 409
ttctgtaattggagcggaatgtctt

SEQ ID NO: 272966 - DNA, 25 bp, Artificial
  probe
  misc_feature (1)..(25): SEQ ID NO: 771; WAN024GND; Start 713; Stop 737
atgaggagtatgctatcagaggagg

SEQ ID NO: 272967 - DNA, 25 bp, Artificial
  probe
  misc_feature (1)..(25): SEQ ID NO: 771; WAN024GND; Start 611; Stop 635
aaatgattgggaatgtttgggaatg

SEQ ID NO: 272968 - DNA, 25 bp, Artificial
  probe
  misc_feature (1)..(25): SEQ ID NO: 771; WAN024GND; Start 705; Stop 729
gatacaagatgaggagtatgctatc

SEQ ID NO: 272969 - DNA, 25 bp, Artificial
  probe
  misc_feature (1)..(25): SEQ ID NO: 771; WAN024GND; Start 86; Stop 110
aagtcgctgttagtgtaaaggattt

SEQ ID NO: 272970 - DNA, 25 bp, Artificial
  probe
  misc_feature (1)..(25): SEQ ID NO: 772; WAN024FXF; Start 561; Stop 585
tcactataaggaagactacgacaag

SEQ ID NO: 272971 - DNA, 25 bp, Artificial
  probe
  misc_feature (1)..(25): SEQ ID NO: 772; WAN024FXF; Start 1011; Stop 1035
tgaagaattgtatgacttactgcct

SEQ ID NO: 272972 - DNA, 25 bp, Artificial
  probe
  misc_feature (1)..(25): SEQ ID NO: 772; WAN024FXF; Start 1010; Stop 1034
ctgaagaattgtatgacttactgcc

SEQ ID NO: 272973 - DNA, 25 bp, Artificial
  probe
  misc_feature (1)..(25): SEQ ID NO: 772; WAN024FXF; Start 1009; Stop 1033
gctgaagaattgtatgacttactgc

SEQ ID NO: 272974 - DNA, 25 bp, Artificial
  probe
  misc_feature (1)..(25): SEQ ID NO: 772; WAN024FXF; Start 560; Stop 584
ttcactataaggaagactacgacaa

SEQ ID NO: 272975 - DNA, 25 bp, Artificial
  probe
  misc_feature (1)..(25): SEQ ID NO: 772; WAN024FXF; Start 1008; Stop 1032
tgctgaagaattgtatgacttactg

SEQ ID NO: 272976 - DNA, 25 bp, Artificial
  probe
  misc_feature (1)..(25): SEQ ID NO: 772; WAN024FXF; Start 1006; Stop 1030
actgctgaagaattgtatgacttac

SEQ ID NO: 272977 - DNA, 25 bp, Artificial
  probe
  misc_feature (1)..(25): SEQ ID NO: 772; WAN024FXF; Start 911; Stop 935
agccttatgtcagatatgtgaatga

SEQ ID NO: 272978 - DNA, 25 bp, Artificial
  probe
  misc_feature (1)..(25): SEQ ID NO: 772; WAN024FXF; Start 562; Stop 586
cactataaggaagactacgacaagt

SEQ ID NO: 272979 - DNA, 25 bp, Artificial
  probe
  misc_feature (1)..(25): SEQ ID NO: 772; WAN024FXF; Start 1007; Stop 1031
ctgctgaagaattgtatgacttact

SEQ ID NO: 272980 - DNA, 25 bp, Artificial
  probe
  misc_feature (1)..(25): SEQ ID NO: 772; WAN024FXF; Start 910; Stop 934
aagccttatgtcagatatgtgaatg

SEQ ID NO: 272981 - DNA, 25 bp, Artificial
  probe
  misc_feature (1)..(25): SEQ ID NO: 772; WAN024FXF; Start 909; Stop 933
caagccttatgtcagatatgtgaat

SEQ ID NO: 272982 - DNA, 25 bp, Artificial
  probe
  misc_feature (1)..(25): SEQ ID NO: 772; WAN024FXF; Start 563; Stop 587
actataaggaagactacgacaagtt

SEQ ID NO: 272983 - DNA, 25 bp, Artificial
  probe
  misc_feature (1)..(25): SEQ ID NO: 772; WAN024FXF; Start 908; Stop 932
acaagccttatgtcagatatgtgaa

SEQ ID NO: 272984 - DNA, 25 bp, Artificial
  probe
  misc_feature (1)..(25): SEQ ID NO: 772; WAN024FXF; Start 907; Stop 931
aacaagccttatgtcagatatgtga

SEQ ID NO: 272985 - DNA, 25 bp, Artificial
  probe
  misc_feature (1)..(25): SEQ ID NO: 772; WAN024FXF; Start 1005; Stop 1029
aactgctgaagaattgtatgactta

SEQ ID NO: 272986 - DNA, 25 bp, Artificial
  probe
  misc_feature (1)..(25): SEQ ID NO: 772; WAN024FXF; Start 912; Stop 936
gccttatgtcagatatgtgaatgat

SEQ ID NO: 272987 - DNA, 25 bp, Artificial
  probe
  misc_feature (1)..(25): SEQ ID NO: 772; WAN024FXF; Start 1012; Stop 1036
gaagaattgtatgacttactgccta

SEQ ID NO: 272988 - DNA, 25 bp, Artificial
  probe
  misc_feature (1)..(25): SEQ ID NO: 772; WAN024FXF; Start 1013; Stop 1037
aagaattgtatgacttactgcctaa

SEQ ID NO: 272989 - DNA, 25 bp, Artificial
  probe
  misc_feature (1)..(25): SEQ ID NO: 772; WAN024FXF; Start 564; Stop 588
ctataaggaagactacgacaagtta

SEQ ID NO: 272990 - DNA, 25 bp, Artificial
  probe
  misc_feature (1)..(25): SEQ ID NO: 772; WAN024FXF; Start 1099; Stop 1123
atctttaatggaaccgctagtgaaa

SEQ ID NO: 272991 - DNA, 25 bp, Artificial
  probe
  misc_feature (1)..(25): SEQ ID NO: 772; WAN024FXF; Start 1098; Stop 1122
aatctttaatggaaccgctagtgaa

SEQ ID NO: 272992 - DNA, 25 bp, Artificial
  probe
  misc_feature (1)..(25): SEQ ID NO: 772; WAN024FXF; Start 433; Stop 457
aagtatgatgcaagagtcacagata

SEQ ID NO: 272993 - DNA, 25 bp, Artificial
  probe
  misc_feature (1)..(25): SEQ ID NO: 772; WAN024FXF; Start 559; Stop 583
tttcactataaggaagactacgaca

SEQ ID NO: 272994 - DNA, 25 bp, Artificial
  probe
  misc_feature (1)..(25): SEQ ID NO: 772; WAN024FXF; Start 557; Stop 581
tgtttcactataaggaagactacga

SEQ ID NO: 272995 - DNA, 25 bp, Artificial
  probe
  misc_feature (1)..(25): SEQ ID NO: 772; WAN024FXF; Start 434; Stop 458
agtatgatgcaagagtcacagatat

SEQ ID NO: 272996 - DNA, 25 bp, Artificial
  probe
  misc_feature (1)..(25): SEQ ID NO: 772; WAN024FXF; Start 1004; Stop 1028
aaactgctgaagaattgtatgactt

SEQ ID NO: 272997 - DNA, 25 bp, Artificial
  probe
  misc_feature (1)..(25): SEQ ID NO: 772; WAN024FXF; Start 558; Stop 582
gtttcactataaggaagactacgac

SEQ ID NO: 272998 - DNA, 25 bp, Artificial
  probe
  misc_feature (1)..(25): SEQ ID NO: 772; WAN024FXF; Start 1097; Stop 1121
caatctttaatggaaccgctagtga

SEQ ID NO: 272999 - DNA, 25 bp, Artificial
  probe
  misc_feature (1)..(25): SEQ ID NO: 772; WAN024FXF; Start 438; Stop 462
tgatgcaagagtcacagatataatg

SEQ ID NO: 273000 - DNA, 25 bp, Artificial
  probe
  misc_feature (1)..(25): SEQ ID NO: 772; WAN024FXF; Start 565; Stop 589
tataaggaagactacgacaagttaa

SEQ ID NO: 273001 - DNA, 25 bp, Artificial
  probe
  misc_feature (1)..(25): SEQ ID NO: 772; WAN024FXF; Start 556; Stop 580
ttgtttcactataaggaagactacg

SEQ ID NO: 273002 - DNA, 25 bp, Artificial
  probe
  misc_feature (1)..(25): SEQ ID NO: 772; WAN024FXF; Start 1078; Stop 1102
agaaatgaaatactgtgtccaatct

SEQ ID NO: 273003 - DNA, 25 bp, Artificial
  probe
  misc_feature (1)..(25): SEQ ID NO: 773; WAN024BDK; Start 99; Stop 123
acaatacctaacaactgagtccata

SEQ ID NO: 273004 - DNA, 25 bp, Artificial
  probe
  misc_feature (1)..(25): SEQ ID NO: 773; WAN024BDK; Start 100; Stop 124
caatacctaacaactgagtccatat

SEQ ID NO: 273005 - DNA, 25 bp, Artificial
  probe
  misc_feature (1)..(25): SEQ ID NO: 773; WAN024BDK; Start 98; Stop 122
gacaatacctaacaactgagtccat

SEQ ID NO: 273006 - DNA, 25 bp, Artificial
  probe
  misc_feature (1)..(25): SEQ ID NO: 773; WAN024BDK; Start 94; Stop 118
gatcgacaatacctaacaactgagt

SEQ ID NO: 273007 - DNA, 25 bp, Artificial
  probe
  misc_feature (1)..(25): SEQ ID NO: 773; WAN024BDK; Start 93; Stop 117
ggatcgacaatacctaacaactgag

SEQ ID NO: 273008 - DNA, 25 bp, Artificial
  probe
  misc_feature (1)..(25): SEQ ID NO: 773; WAN024BDK; Start 104; Stop 128
acctaacaactgagtccatatattg

SEQ ID NO: 273009 - DNA, 25 bp, Artificial
  probe
  misc_feature (1)..(25): SEQ ID NO: 773; WAN024BDK; Start 90; Stop 114
cttggatcgacaatacctaacaact

SEQ ID NO: 273010 - DNA, 25 bp, Artificial
  probe
  misc_feature (1)..(25): SEQ ID NO: 773; WAN024BDK; Start 91; Stop 115
ttggatcgacaatacctaacaactg

SEQ ID NO: 273011 - DNA, 25 bp, Artificial
  probe
  misc_feature (1)..(25): SEQ ID NO: 773; WAN024BDK; Start 92; Stop 116
tggatcgacaatacctaacaactga

SEQ ID NO: 273012 - DNA, 25 bp, Artificial
  probe
  misc_feature (1)..(25): SEQ ID NO: 773; WAN024BDK; Start 97; Stop 121
cgacaatacctaacaactgagtcca

SEQ ID NO: 273013 - DNA, 25 bp, Artificial
  probe
  misc_feature (1)..(25): SEQ ID NO: 773; WAN024BDK; Start 95; Stop 119
atcgacaatacctaacaactgagtc

SEQ ID NO: 273014 - DNA, 25 bp, Artificial
  probe
  misc_feature (1)..(25): SEQ ID NO: 773; WAN024BDK; Start 105; Stop 129
cctaacaactgagtccatatattgg

SEQ ID NO: 273015 - DNA, 25 bp, Artificial
  probe
  misc_feature (1)..(25): SEQ ID NO: 773; WAN024BDK; Start 56; Stop 80
accaaactgctatactattccattt

SEQ ID NO: 273016 - DNA, 25 bp, Artificial
  probe
  misc_feature (1)..(25): SEQ ID NO: 773; WAN024BDK; Start 55; Stop 79
aaccaaactgctatactattccatt

SEQ ID NO: 273017 - DNA, 25 bp, Artificial
  probe
  misc_feature (1)..(25): SEQ ID NO: 773; WAN024BDK; Start 101; Stop 125
aatacctaacaactgagtccatata

SEQ ID NO: 273018 - DNA, 25 bp, Artificial
  probe
  misc_feature (1)..(25): SEQ ID NO: 773; WAN024BDK; Start 89; Stop 113
gcttggatcgacaatacctaacaac

SEQ ID NO: 273019 - DNA, 25 bp, Artificial
  probe
  misc_feature (1)..(25): SEQ ID NO: 773; WAN024BDK; Start 131; Stop 155
tgataggcacctttatatttggaaa

SEQ ID NO: 273020 - DNA, 25 bp, Artificial
  probe
  misc_feature (1)..(25): SEQ ID NO: 773; WAN024BDK; Start 85; Stop 109
gatggcttggatcgacaatacctaa

SEQ ID NO: 273021 - DNA, 25 bp, Artificial
  probe
  misc_feature (1)..(25): SEQ ID NO: 773; WAN024BDK; Start 53; Stop 77
ttaaccaaactgctatactattcca

SEQ ID NO: 273022 - DNA, 25 bp, Artificial
  probe
  misc_feature (1)..(25): SEQ ID NO: 773; WAN024BDK; Start 96; Stop 120
tcgacaatacctaacaactgagtcc

SEQ ID NO: 273023 - DNA, 25 bp, Artificial
  probe
  misc_feature (1)..(25): SEQ ID NO: 773; WAN024BDK; Start 103; Stop 127
tacctaacaactgagtccatatatt

SEQ ID NO: 273024 - DNA, 25 bp, Artificial
  probe
  misc_feature (1)..(25): SEQ ID NO: 773; WAN024BDK; Start 130; Stop 154
gtgataggcacctttatatttggaa

SEQ ID NO: 273025 - DNA, 25 bp, Artificial
  probe
  misc_feature (1)..(25): SEQ ID NO: 773; WAN024BDK; Start 54; Stop 78
taaccaaactgctatactattccat

SEQ ID NO: 273026 - DNA, 25 bp, Artificial
  probe
  misc_feature (1)..(25): SEQ ID NO: 773; WAN024BDK; Start 86; Stop 110
atggcttggatcgacaatacctaac

SEQ ID NO: 273027 - DNA, 25 bp, Artificial
  probe
  misc_feature (1)..(25): SEQ ID NO: 773; WAN024BDK; Start 102; Stop 126
atacctaacaactgagtccatatat

SEQ ID NO: 273028 - DNA, 25 bp, Artificial
  probe
  misc_feature (1)..(25): SEQ ID NO: 773; WAN024BDK; Start 88; Stop 112
ggcttggatcgacaatacctaacaa

SEQ ID NO: 273029 - DNA, 25 bp, Artificial
  probe
  misc_feature (1)..(25): SEQ ID NO: 773; WAN024BDK; Start 113; Stop 137
ctgagtccatatattgggtgatagg

SEQ ID NO: 273030 - DNA, 25 bp, Artificial
  probe
  misc_feature (1)..(25): SEQ ID NO: 773; WAN024BDK; Start 110; Stop 134
caactgagtccatatattgggtgat

SEQ ID NO: 273031 - DNA, 25 bp, Artificial
  probe
  misc_feature (1)..(25): SEQ ID NO: 773; WAN024BDK; Start 108; Stop 132
aacaactgagtccatatattgggtg

SEQ ID NO: 273032 - DNA, 25 bp, Artificial
  probe
  misc_feature (1)..(25): SEQ ID NO: 773; WAN024BDK; Start 112; Stop 136
actgagtccatatattgggtgatag

SEQ ID NO: 273033 - DNA, 25 bp, Artificial
  probe
  misc_feature (1)..(25): SEQ ID NO: 773; WAN024BDK; Start 107; Stop 131
taacaactgagtccatatattgggt

SEQ ID NO: 273034 - DNA, 25 bp, Artificial
  probe
  misc_feature (1)..(25): SEQ ID NO: 773; WAN024BDK; Start 132; Stop 156
gataggcacctttatatttggaaat

SEQ ID NO: 273035 - DNA, 25 bp, Artificial
  probe
  misc_feature (1)..(25): SEQ ID NO: 773; WAN024BDK; Start 109; Stop 133
acaactgagtccatatattgggtga

SEQ ID NO: 273036 - DNA, 25 bp, Artificial
  probe
  misc_feature (1)..(25): SEQ ID NO: 774; WAN024CX4; Start 214; Stop 238
ttcgttattgtgttagccattgaag

SEQ ID NO: 273037 - DNA, 25 bp, Artificial
  probe
  misc_feature (1)..(25): SEQ ID NO: 774; WAN024CX4; Start 215; Stop 239
tcgttattgtgttagccattgaagg

SEQ ID NO: 273038 - DNA, 25 bp, Artificial
  probe
  misc_feature (1)..(25): SEQ ID NO: 774; WAN024CX4; Start 209; Stop 233
gtgatttcgttattgtgttagccat

SEQ ID NO: 273039 - DNA, 25 bp, Artificial
  probe
  misc_feature (1)..(25): SEQ ID NO: 774; WAN024CX4; Start 212; Stop 236
atttcgttattgtgttagccattga

SEQ ID NO: 273040 - DNA, 25 bp, Artificial
  probe
  misc_feature (1)..(25): SEQ ID NO: 774; WAN024CX4; Start 210; Stop 234
tgatttcgttattgtgttagccatt

SEQ ID NO: 273041 - DNA, 25 bp, Artificial
  probe
  misc_feature (1)..(25): SEQ ID NO: 774; WAN024CX4; Start 219; Stop 243
tattgtgttagccattgaagggaaa

SEQ ID NO: 273042 - DNA, 25 bp, Artificial
  probe
  misc_feature (1)..(25): SEQ ID NO: 774; WAN024CX4; Start 218; Stop 242
ttattgtgttagccattgaagggaa

SEQ ID NO: 273043 - DNA, 25 bp, Artificial
  probe
  misc_feature (1)..(25): SEQ ID NO: 774; WAN024CX4; Start 205; Stop 229
gaccgtgatttcgttattgtgttag

SEQ ID NO: 273044 - DNA, 25 bp, Artificial
  probe
  misc_feature (1)..(25): SEQ ID NO: 774; WAN024CX4; Start 50; Stop 74
aagatggtatcgcagagtattcaaa

SEQ ID NO: 273045 - DNA, 25 bp, Artificial
  probe
  misc_feature (1)..(25): SEQ ID NO: 774; WAN024CX4; Start 49; Stop 73
aaagatggtatcgcagagtattcaa

SEQ ID NO: 273046 - DNA, 25 bp, Artificial
  probe
  misc_feature (1)..(25): SEQ ID NO: 774; WAN024CX4; Start 211; Stop 235
gatttcgttattgtgttagccattg

SEQ ID NO: 273047 - DNA, 25 bp, Artificial
  probe
  misc_feature (1)..(25): SEQ ID NO: 774; WAN024CX4; Start 213; Stop 237
tttcgttattgtgttagccattgaa

SEQ ID NO: 273048 - DNA, 25 bp, Artificial
  probe
  misc_feature (1)..(25): SEQ ID NO: 774; WAN024CX4; Start 204; Stop 228
tgaccgtgatttcgttattgtgtta

SEQ ID NO: 273049 - DNA, 25 bp, Artificial
  probe
  misc_feature (1)..(25): SEQ ID NO: 774; WAN024CX4; Start 217; Stop 241
gttattgtgttagccattgaaggga

SEQ ID NO: 273050 - DNA, 25 bp, Artificial
  probe
  misc_feature (1)..(25): SEQ ID NO: 774; WAN024CX4; Start 356; Stop 380
atagagccaatctttctgtcagttt

SEQ ID NO: 273051 - DNA, 25 bp, Artificial
  probe
  misc_feature (1)..(25): SEQ ID NO: 774; WAN024CX4; Start 355; Stop 379
aatagagccaatctttctgtcagtt

SEQ ID NO: 273052 - DNA, 25 bp, Artificial
  probe
  misc_feature (1)..(25): SEQ ID NO: 774; WAN024CX4; Start 354; Stop 378
aaatagagccaatctttctgtcagt

SEQ ID NO: 273053 - DNA, 25 bp, Artificial
  probe
  misc_feature (1)..(25): SEQ ID NO: 774; WAN024CX4; Start 198; Stop 222
aattgctgaccgtgatttcgttatt

SEQ ID NO: 273054 - DNA, 25 bp, Artificial
  probe
  misc_feature (1)..(25): SEQ ID NO: 774; WAN024CX4; Start 208; Stop 232
cgtgatttcgttattgtgttagcca

SEQ ID NO: 273055 - DNA, 25 bp, Artificial
  probe
  misc_feature (1)..(25): SEQ ID NO: 774; WAN024CX4; Start 206; Stop 230
accgtgatttcgttattgtgttagc

SEQ ID NO: 273056 - DNA, 25 bp, Artificial
  probe
  misc_feature (1)..(25): SEQ ID NO: 774; WAN024CX4; Start 203; Stop 227
ctgaccgtgatttcgttattgtgtt

SEQ ID NO: 273057 - DNA, 25 bp, Artificial
  probe
  misc_feature (1)..(25): SEQ ID NO: 774; WAN024CX4; Start 89; Stop 113
ttgctaagtttgaaatgattgagtt

SEQ ID NO: 273058 - DNA, 25 bp, Artificial
  probe
  misc_feature (1)..(25): SEQ ID NO: 774; WAN024CX4; Start 88; Stop 112
tttgctaagtttgaaatgattgagt

SEQ ID NO: 273059 - DNA, 25 bp, Artificial
  probe
  misc_feature (1)..(25): SEQ ID NO: 774; WAN024CX4; Start 7; Stop 31
attaaagttgtaacagttgggaaac

SEQ ID NO: 273060 - DNA, 25 bp, Artificial
  probe
  misc_feature (1)..(25): SEQ ID NO: 774; WAN024CX4; Start 216; Stop 240
cgttattgtgttagccattgaaggg

SEQ ID NO: 273061 - DNA, 25 bp, Artificial
  probe
  misc_feature (1)..(25): SEQ ID NO: 774; WAN024CX4; Start 199; Stop 223
attgctgaccgtgatttcgttattg

SEQ ID NO: 273062 - DNA, 25 bp, Artificial
  probe
  misc_feature (1)..(25): SEQ ID NO: 774; WAN024CX4; Start 251; Stop 275
tctcagaagaatttagtaagcagtt

SEQ ID NO: 273063 - DNA, 25 bp, Artificial
  probe
  misc_feature (1)..(25): SEQ ID NO: 774; WAN024CX4; Start 197; Stop 221
aaattgctgaccgtgatttcgttat

SEQ ID NO: 273064 - DNA, 25 bp, Artificial
  probe
  misc_feature (1)..(25): SEQ ID NO: 774; WAN024CX4; Start 6; Stop 30
aattaaagttgtaacagttgggaaa

SEQ ID NO: 273065 - DNA, 25 bp, Artificial
  probe
  misc_feature (1)..(25): SEQ ID NO: 774; WAN024CX4; Start 5; Stop 29
aaattaaagttgtaacagttgggaa

SEQ ID NO: 273066 - DNA, 25 bp, Artificial
  probe
  misc_feature (1)..(25): SEQ ID NO: 774; WAN024CX4; Start 207; Stop 231
ccgtgatttcgttattgtgttagcc

SEQ ID NO: 273067 - DNA, 25 bp, Artificial
  probe
  misc_feature (1)..(25): SEQ ID NO: 774; WAN024CX4; Start 90; Stop 114
tgctaagtttgaaatgattgagtta

SEQ ID NO: 273068 - DNA, 25 bp, Artificial
  probe
  misc_feature (1)..(25): SEQ ID NO: 774; WAN024CX4; Start 52; Stop 76
gatggtatcgcagagtattcaaaac

SEQ ID NO: 273069 - DNA, 25 bp, Artificial
  probe
  misc_feature (1)..(25): SEQ ID NO: 775; WAN024CK7; Start 736; Stop 760
atgccaatcttatattcttgccatc

SEQ ID NO: 273070 - DNA, 25 bp, Artificial
  probe
  misc_feature (1)..(25): SEQ ID NO: 775; WAN024CK7; Start 738; Stop 762
gccaatcttatattcttgccatcct

SEQ ID NO: 273071 - DNA, 25 bp, Artificial
  probe
  misc_feature (1)..(25): SEQ ID NO: 775; WAN024CK7; Start 737; Stop 761
tgccaatcttatattcttgccatcc

SEQ ID NO: 273072 - DNA, 25 bp, Artificial
  probe
  misc_feature (1)..(25): SEQ ID NO: 775; WAN024CK7; Start 825; Stop 849
gccactaggattccatgactataat

SEQ ID NO: 273073 - DNA, 25 bp, Artificial
  probe
  misc_feature (1)..(25): SEQ ID NO: 775; WAN024CK7; Start 824; Stop 848
agccactaggattccatgactataa

SEQ ID NO: 273074 - DNA, 25 bp, Artificial
  probe
  misc_feature (1)..(25): SEQ ID NO: 775; WAN024CK7; Start 823; Stop 847
gagccactaggattccatgactata

SEQ ID NO: 273075 - DNA, 25 bp, Artificial
  probe
  misc_feature (1)..(25): SEQ ID NO: 775; WAN024CK7; Start 735; Stop 759
tatgccaatcttatattcttgccat

SEQ ID NO: 273076 - DNA, 25 bp, Artificial
  probe
  misc_feature (1)..(25): SEQ ID NO: 775; WAN024CK7; Start 734; Stop 758
atatgccaatcttatattcttgcca

SEQ ID NO: 273077 - DNA, 25 bp, Artificial
  probe
  misc_feature (1)..(25): SEQ ID NO: 775; WAN024CK7; Start 739; Stop 763
ccaatcttatattcttgccatccta

SEQ ID NO: 273078 - DNA, 25 bp, Artificial
  probe
  misc_feature (1)..(25): SEQ ID NO: 775; WAN024CK7; Start 221; Stop 245
tatacatggatgctgttggagatga

SEQ ID NO: 273079 - DNA, 25 bp, Artificial
  probe
  misc_feature (1)..(25): SEQ ID NO: 775; WAN024CK7; Start 867; Stop 891
atttgttgtagtatctgattcggga

SEQ ID NO: 273080 - DNA, 25 bp, Artificial
  probe
  misc_feature (1)..(25): SEQ ID NO: 775; WAN024CK7; Start 866; Stop 890
catttgttgtagtatctgattcggg

SEQ ID NO: 273081 - DNA, 25 bp, Artificial
  probe
  misc_feature (1)..(25): SEQ ID NO: 775; WAN024CK7; Start 868; Stop 892
tttgttgtagtatctgattcgggaa

SEQ ID NO: 273082 - DNA, 25 bp, Artificial
  probe
  misc_feature (1)..(25): SEQ ID NO: 775; WAN024CK7; Start 865; Stop 889
gcatttgttgtagtatctgattcgg

SEQ ID NO: 273083 - DNA, 25 bp, Artificial
  probe
  misc_feature (1)..(25): SEQ ID NO: 775; WAN024CK7; Start 239; Stop 263
gagatgatcttggtgctactgtagg

SEQ ID NO: 273084 - DNA, 25 bp, Artificial
  probe
  misc_feature (1)..(25): SEQ ID NO: 775; WAN024CK7; Start 238; Stop 262
ggagatgatcttggtgctactgtag

SEQ ID NO: 273085 - DNA, 25 bp, Artificial
  probe
  misc_feature (1)..(25): SEQ ID NO: 775; WAN024CK7; Start 744; Stop 768
cttatattcttgccatcctagatca

SEQ ID NO: 273086 - DNA, 25 bp, Artificial
  probe
  misc_feature (1)..(25): SEQ ID NO: 775; WAN024CK7; Start 430; Stop 454
gaagagactaatcgtcggattgttg

SEQ ID NO: 273087 - DNA, 25 bp, Artificial
  probe
  misc_feature (1)..(25): SEQ ID NO: 775; WAN024CK7; Start 826; Stop 850
ccactaggattccatgactataatt

SEQ ID NO: 273088 - DNA, 25 bp, Artificial
  probe
  misc_feature (1)..(25): SEQ ID NO: 775; WAN024CK7; Start 361; Stop 385
gccaagcgtttacatattccaattt

SEQ ID NO: 273089 - DNA, 25 bp, Artificial
  probe
  misc_feature (1)..(25): SEQ ID NO: 775; WAN024CK7; Start 869; Stop 893
ttgttgtagtatctgattcgggaac

SEQ ID NO: 273090 - DNA, 25 bp, Artificial
  probe
  misc_feature (1)..(25): SEQ ID NO: 775; WAN024CK7; Start 432; Stop 456
agagactaatcgtcggattgttgat

SEQ ID NO: 273091 - DNA, 25 bp, Artificial
  probe
  misc_feature (1)..(25): SEQ ID NO: 775; WAN024CK7; Start 222; Stop 246
atacatggatgctgttggagatgat

SEQ ID NO: 273092 - DNA, 25 bp, Artificial
  probe
  misc_feature (1)..(25): SEQ ID NO: 775; WAN024CK7; Start 966; Stop 990
agaacgtcctgagtccttagataag

SEQ ID NO: 273093 - DNA, 25 bp, Artificial
  probe
  misc_feature (1)..(25): SEQ ID NO: 775; WAN024CK7; Start 822; Stop 846
tgagccactaggattccatgactat

SEQ ID NO: 273094 - DNA, 25 bp, Artificial
  probe
  misc_feature (1)..(25): SEQ ID NO: 775; WAN024CK7; Start 743; Stop 767
tcttatattcttgccatcctagatc

SEQ ID NO: 273095 - DNA, 25 bp, Artificial
  probe
  misc_feature (1)..(25): SEQ ID NO: 775; WAN024CK7; Start 431; Stop 455
aagagactaatcgtcggattgttga

SEQ ID NO: 273096 - DNA, 25 bp, Artificial
  probe
  misc_feature (1)..(25): SEQ ID NO: 775; WAN024CK7; Start 872; Stop 896
ttgtagtatctgattcgggaacttt

SEQ ID NO: 273097 - DNA, 25 bp, Artificial
  probe
  misc_feature (1)..(25): SEQ ID NO: 775; WAN024CK7; Start 875; Stop 899
tagtatctgattcgggaactttacc

SEQ ID NO: 273098 - DNA, 25 bp, Artificial
  probe
  misc_feature (1)..(25): SEQ ID NO: 775; WAN024CK7; Start 871; Stop 895
gttgtagtatctgattcgggaactt

SEQ ID NO: 273099 - DNA, 25 bp, Artificial
  probe
  misc_feature (1)..(25): SEQ ID NO: 775; WAN024CK7; Start 821; Stop 845
atgagccactaggattccatgacta

SEQ ID NO: 273100 - DNA, 25 bp, Artificial
  probe
  misc_feature (1)..(25): SEQ ID NO: 775; WAN024CK7; Start 245; Stop 269
atcttggtgctactgtagggaatat

SEQ ID NO: 273101 - DNA, 25 bp, Artificial
  probe
  misc_feature (1)..(25): SEQ ID NO: 775; WAN024CK7; Start 237; Stop 261
tggagatgatcttggtgctactgta

SEQ ID NO: 273102 - DNA, 25 bp, Artificial
  probe
  misc_feature (1)..(25): SEQ ID NO: 776; WAN024DJM; Start 28; Stop 52
aagagaatgacaggtggaataagag

SEQ ID NO: 273103 - DNA, 25 bp, Artificial
  probe
  misc_feature (1)..(25): SEQ ID NO: 776; WAN024DJM; Start 30; Stop 54
gagaatgacaggtggaataagagtt

SEQ ID NO: 273104 - DNA, 25 bp, Artificial
  probe
  misc_feature (1)..(25): SEQ ID NO: 776; WAN024DJM; Start 725; Stop 749
tgtatcaggaatcggatgtctatct

SEQ ID NO: 273105 - DNA, 25 bp, Artificial
  probe
  misc_feature (1)..(25): SEQ ID NO: 776; WAN024DJM; Start 724; Stop 748
atgtatcaggaatcggatgtctatc

SEQ ID NO: 273106 - DNA, 25 bp, Artificial
  probe
  misc_feature (1)..(25): SEQ ID NO: 776; WAN024DJM; Start 723; Stop 747
gatgtatcaggaatcggatgtctat

SEQ ID NO: 273107 - DNA, 25 bp, Artificial
  probe
  misc_feature (1)..(25): SEQ ID NO: 776; WAN024DJM; Start 726; Stop 750
gtatcaggaatcggatgtctatctt

SEQ ID NO: 273108 - DNA, 25 bp, Artificial
  probe
  misc_feature (1)..(25): SEQ ID NO: 776; WAN024DJM; Start 31; Stop 55
agaatgacaggtggaataagagtta

SEQ ID NO: 273109 - DNA, 25 bp, Artificial
  probe
  misc_feature (1)..(25): SEQ ID NO: 776; WAN024DJM; Start 29; Stop 53
agagaatgacaggtggaataagagt

SEQ ID NO: 273110 - DNA, 25 bp, Artificial
  probe
  misc_feature (1)..(25): SEQ ID NO: 776; WAN024DJM; Start 27; Stop 51
taagagaatgacaggtggaataaga

SEQ ID NO: 273111 - DNA, 25 bp, Artificial
  probe
  misc_feature (1)..(25): SEQ ID NO: 776; WAN024DJM; Start 722; Stop 746
agatgtatcaggaatcggatgtcta

SEQ ID NO: 273112 - DNA, 25 bp, Artificial
  probe
  misc_feature (1)..(25): SEQ ID NO: 776; WAN024DJM; Start 721; Stop 745
aagatgtatcaggaatcggatgtct

SEQ ID NO: 273113 - DNA, 25 bp, Artificial
  probe
  misc_feature (1)..(25): SEQ ID NO: 776; WAN024DJM; Start 34; Stop 58
atgacaggtggaataagagttatct

SEQ ID NO: 273114 - DNA, 25 bp, Artificial
  probe
  misc_feature (1)..(25): SEQ ID NO: 776; WAN024DJM; Start 26; Stop 50
ttaagagaatgacaggtggaataag

SEQ ID NO: 273115 - DNA, 25 bp, Artificial
  probe
  misc_feature (1)..(25): SEQ ID NO: 776; WAN024DJM; Start 35; Stop 59
tgacaggtggaataagagttatcta

SEQ ID NO: 273116 - DNA, 25 bp, Artificial
  probe
  misc_feature (1)..(25): SEQ ID NO: 776; WAN024DJM; Start 33; Stop 57
aatgacaggtggaataagagttatc

SEQ ID NO: 273117 - DNA, 25 bp, Artificial
  probe
  misc_feature (1)..(25): SEQ ID NO: 776; WAN024DJM; Start 32; Stop 56
gaatgacaggtggaataagagttat

SEQ ID NO: 273118 - DNA, 25 bp, Artificial
  probe
  misc_feature (1)..(25): SEQ ID NO: 776; WAN024DJM; Start 395; Stop 419
atcgcttgccacttacattaattac

SEQ ID NO: 273119 - DNA, 25 bp, Artificial
  probe
  misc_feature (1)..(25): SEQ ID NO: 776; WAN024DJM; Start 393; Stop 417
gtatcgcttgccacttacattaatt

SEQ ID NO: 273120 - DNA, 25 bp, Artificial
  probe
  misc_feature (1)..(25): SEQ ID NO: 776; WAN024DJM; Start 494; Stop 518
ctgacaacgagtatcttcatacaga

SEQ ID NO: 273121 - DNA, 25 bp, Artificial
  probe
  misc_feature (1)..(25): SEQ ID NO: 776; WAN024DJM; Start 493; Stop 517
tctgacaacgagtatcttcatacag

SEQ ID NO: 273122 - DNA, 25 bp, Artificial
  probe
  misc_feature (1)..(25): SEQ ID NO: 776; WAN024DJM; Start 495; Stop 519
tgacaacgagtatcttcatacagaa

SEQ ID NO: 273123 - DNA, 25 bp, Artificial
  probe
  misc_feature (1)..(25): SEQ ID NO: 776; WAN024DJM; Start 492; Stop 516
ttctgacaacgagtatcttcataca

SEQ ID NO: 273124 - DNA, 25 bp, Artificial
  probe
  misc_feature (1)..(25): SEQ ID NO: 776; WAN024DJM; Start 397; Stop 421
cgcttgccacttacattaattactg

SEQ ID NO: 273125 - DNA, 25 bp, Artificial
  probe
  misc_feature (1)..(25): SEQ ID NO: 776; WAN024DJM; Start 396; Stop 420
tcgcttgccacttacattaattact

SEQ ID NO: 273126 - DNA, 25 bp, Artificial
  probe
  misc_feature (1)..(25): SEQ ID NO: 776; WAN024DJM; Start 390; Stop 414
atcgtatcgcttgccacttacatta

SEQ ID NO: 273127 - DNA, 25 bp, Artificial
  probe
  misc_feature (1)..(25): SEQ ID NO: 776; WAN024DJM; Start 672; Stop 696
acctgatacctataatgtgttgatt

SEQ ID NO: 273128 - DNA, 25 bp, Artificial
  probe
  misc_feature (1)..(25): SEQ ID NO: 776; WAN024DJM; Start 394; Stop 418
tatcgcttgccacttacattaatta

SEQ ID NO: 273129 - DNA, 25 bp, Artificial
  probe
  misc_feature (1)..(25): SEQ ID NO: 776; WAN024DJM; Start 391; Stop 415
tcgtatcgcttgccacttacattaa

SEQ ID NO: 273130 - DNA, 25 bp, Artificial
  probe
  misc_feature (1)..(25): SEQ ID NO: 776; WAN024DJM; Start 398; Stop 422
gcttgccacttacattaattactgt

SEQ ID NO: 273131 - DNA, 25 bp, Artificial
  probe
  misc_feature (1)..(25): SEQ ID NO: 776; WAN024DJM; Start 36; Stop 60
gacaggtggaataagagttatctat

SEQ ID NO: 273132 - DNA, 25 bp, Artificial
  probe
  misc_feature (1)..(25): SEQ ID NO: 776; WAN024DJM; Start 392; Stop 416
cgtatcgcttgccacttacattaat

SEQ ID NO: 273133 - DNA, 25 bp, Artificial
  probe
  misc_feature (1)..(25): SEQ ID NO: 776; WAN024DJM; Start 93; Stop 117
tgatgtggtttgttatgttcctatg

SEQ ID NO: 273134 - DNA, 25 bp, Artificial
  probe
  misc_feature (1)..(25): SEQ ID NO: 776; WAN024DJM; Start 720; Stop 744
aaagatgtatcaggaatcggatgtc

SEQ ID NO: 273135 - DNA, 25 bp, Artificial
  probe
  misc_feature (1)..(25): SEQ ID NO: 777; WAN024DJF; Start 241; Stop 265
gctcctacagattatgatacacaca

SEQ ID NO: 273136 - DNA, 25 bp, Artificial
  probe
  misc_feature (1)..(25): SEQ ID NO: 777; WAN024DJF; Start 240; Stop 264
tgctcctacagattatgatacacac

SEQ ID NO: 273137 - DNA, 25 bp, Artificial
  probe
  misc_feature (1)..(25): SEQ ID NO: 777; WAN024DJF; Start 278; Stop 302
atacatctgccgtagaacaagtaat

SEQ ID NO: 273138 - DNA, 25 bp, Artificial
  probe
  misc_feature (1)..(25): SEQ ID NO: 777; WAN024DJF; Start 279; Stop 303
tacatctgccgtagaacaagtaatc

SEQ ID NO: 273139 - DNA, 25 bp, Artificial
  probe
  misc_feature (1)..(25): SEQ ID NO: 777; WAN024DJF; Start 277; Stop 301
gatacatctgccgtagaacaagtaa

SEQ ID NO: 273140 - DNA, 25 bp, Artificial
  probe
  misc_feature (1)..(25): SEQ ID NO: 777; WAN024DJF; Start 276; Stop 300
tgatacatctgccgtagaacaagta

SEQ ID NO: 273141 - DNA, 25 bp, Artificial
  probe
  misc_feature (1)..(25): SEQ ID NO: 777; WAN024DJF; Start 652; Stop 676
aatgagttggatacttatgctgaac

SEQ ID NO: 273142 - DNA, 25 bp, Artificial
  probe
  misc_feature (1)..(25): SEQ ID NO: 777; WAN024DJF; Start 35; Stop 59
gattgtccttggcggtattattagc

SEQ ID NO: 273143 - DNA, 25 bp, Artificial
  probe
  misc_feature (1)..(25): SEQ ID NO: 777; WAN024DJF; Start 699; Stop 723
cattattgatggagtaggattggat

SEQ ID NO: 273144 - DNA, 25 bp, Artificial
  probe
  misc_feature (1)..(25): SEQ ID NO: 777; WAN024DJF; Start 1054; Stop 1078
atgatctatgaaccttcacttccag

SEQ ID NO: 273145 - DNA, 25 bp, Artificial
  probe
  misc_feature (1)..(25): SEQ ID NO: 777; WAN024DJF; Start 239; Stop 263
ctgctcctacagattatgatacaca

SEQ ID NO: 273146 - DNA, 25 bp, Artificial
  probe
  misc_feature (1)..(25): SEQ ID NO: 777; WAN024DJF; Start 1053; Stop 1077
aatgatctatgaaccttcacttcca

SEQ ID NO: 273147 - DNA, 25 bp, Artificial
  probe
  misc_feature (1)..(25): SEQ ID NO: 777; WAN024DJF; Start 242; Stop 266
ctcctacagattatgatacacacaa

SEQ ID NO: 273148 - DNA, 25 bp, Artificial
  probe
  misc_feature (1)..(25): SEQ ID NO: 777; WAN024DJF; Start 238; Stop 262
gctgctcctacagattatgatacac

SEQ ID NO: 273149 - DNA, 25 bp, Artificial
  probe
  misc_feature (1)..(25): SEQ ID NO: 777; WAN024DJF; Start 1055; Stop 1079
tgatctatgaaccttcacttccaga

SEQ ID NO: 273150 - DNA, 25 bp, Artificial
  probe
  misc_feature (1)..(25): SEQ ID NO: 777; WAN024DJF; Start 784; Stop 808
aaggatagtaagcaactgttgtcaa

SEQ ID NO: 273151 - DNA, 25 bp, Artificial
  probe
  misc_feature (1)..(25): SEQ ID NO: 777; WAN024DJF; Start 275; Stop 299
ttgatacatctgccgtagaacaagt

SEQ ID NO: 273152 - DNA, 25 bp, Artificial
  probe
  misc_feature (1)..(25): SEQ ID NO: 777; WAN024DJF; Start 651; Stop 675
taatgagttggatacttatgctgaa

SEQ ID NO: 273153 - DNA, 25 bp, Artificial
  probe
  misc_feature (1)..(25): SEQ ID NO: 777; WAN024DJF; Start 650; Stop 674
ttaatgagttggatacttatgctga

SEQ ID NO: 273154 - DNA, 25 bp, Artificial
  probe
  misc_feature (1)..(25): SEQ ID NO: 777; WAN024DJF; Start 1058; Stop 1082
tctatgaaccttcacttccagatgg

SEQ ID NO: 273155 - DNA, 25 bp, Artificial
  probe
  misc_feature (1)..(25): SEQ ID NO: 777; WAN024DJF; Start 700; Stop 724
attattgatggagtaggattggatc

SEQ ID NO: 273156 - DNA, 25 bp, Artificial
  probe
  misc_feature (1)..(25): SEQ ID NO: 777; WAN024DJF; Start 34; Stop 58
ggattgtccttggcggtattattag

SEQ ID NO: 273157 - DNA, 25 bp, Artificial
  probe
  misc_feature (1)..(25): SEQ ID NO: 777; WAN024DJF; Start 678; Stop 702
gaaaggattgaatacgaaagccatt

SEQ ID NO: 273158 - DNA, 25 bp, Artificial
  probe
  misc_feature (1)..(25): SEQ ID NO: 777; WAN024DJF; Start 674; Stop 698
aactgaaaggattgaatacgaaagc

SEQ ID NO: 273159 - DNA, 25 bp, Artificial
  probe
  misc_feature (1)..(25): SEQ ID NO: 777; WAN024DJF; Start 208; Stop 232
gcgtataaagatgcggaaatgatta

SEQ ID NO: 273160 - DNA, 25 bp, Artificial
  probe
  misc_feature (1)..(25): SEQ ID NO: 777; WAN024DJF; Start 1052; Stop 1076
taatgatctatgaaccttcacttcc

SEQ ID NO: 273161 - DNA, 25 bp, Artificial
  probe
  misc_feature (1)..(25): SEQ ID NO: 777; WAN024DJF; Start 668; Stop 692
atgctgaactgaaaggattgaatac

SEQ ID NO: 273162 - DNA, 25 bp, Artificial
  probe
  misc_feature (1)..(25): SEQ ID NO: 777; WAN024DJF; Start 14; Stop 38
tagtaggaatgggatatgtcggatt

SEQ ID NO: 273163 - DNA, 25 bp, Artificial
  probe
  misc_feature (1)..(25): SEQ ID NO: 777; WAN024DJF; Start 757; Stop 781
tttggttatggtggttactgtttac

SEQ ID NO: 273164 - DNA, 25 bp, Artificial
  probe
  misc_feature (1)..(25): SEQ ID NO: 777; WAN024DJF; Start 671; Stop 695
ctgaactgaaaggattgaatacgaa

SEQ ID NO: 273165 - DNA, 25 bp, Artificial
  probe
  misc_feature (1)..(25): SEQ ID NO: 777; WAN024DJF; Start 756; Stop 780
ctttggttatggtggttactgttta

SEQ ID NO: 273166 - DNA, 25 bp, Artificial
  probe
  misc_feature (1)..(25): SEQ ID NO: 777; WAN024DJF; Start 660; Stop 684
ggatacttatgctgaactgaaagga

SEQ ID NO: 273167 - DNA, 25 bp, Artificial
  probe
  misc_feature (1)..(25): SEQ ID NO: 777; WAN024DJF; Start 679; Stop 703
aaaggattgaatacgaaagccatta

SEQ ID NO: 273168 - DNA, 25 bp, Artificial
  probe
  misc_feature (1)..(25): SEQ ID NO: 778; WAN024FUE; Start 213; Stop 237
taattctctgattgatggattggct

SEQ ID NO: 273169 - DNA, 25 bp, Artificial
  probe
  misc_feature (1)..(25): SEQ ID NO: 778; WAN024FUE; Start 212; Stop 236
ttaattctctgattgatggattggc

SEQ ID NO: 273170 - DNA, 25 bp, Artificial
  probe
  misc_feature (1)..(25): SEQ ID NO: 778; WAN024FUE; Start 1024; Stop 1048
tctgagagactaagaagtattggct

SEQ ID NO: 273171 - DNA, 25 bp, Artificial
  probe
  misc_feature (1)..(25): SEQ ID NO: 778; WAN024FUE; Start 1023; Stop 1047
atctgagagactaagaagtattggc

SEQ ID NO: 273172 - DNA, 25 bp, Artificial
  probe
  misc_feature (1)..(25): SEQ ID NO: 778; WAN024FUE; Start 1015; Stop 1039
tgtgattcatctgagagactaagaa

SEQ ID NO: 273173 - DNA, 25 bp, Artificial
  probe
  misc_feature (1)..(25): SEQ ID NO: 778; WAN024FUE; Start 214; Stop 238
aattctctgattgatggattggctg

SEQ ID NO: 273174 - DNA, 25 bp, Artificial
  probe
  misc_feature (1)..(25): SEQ ID NO: 778; WAN024FUE; Start 1014; Stop 1038
atgtgattcatctgagagactaaga

SEQ ID NO: 273175 - DNA, 25 bp, Artificial
  probe
  misc_feature (1)..(25): SEQ ID NO: 778; WAN024FUE; Start 1025; Stop 1049
ctgagagactaagaagtattggcta

SEQ ID NO: 273176 - DNA, 25 bp, Artificial
  probe
  misc_feature (1)..(25): SEQ ID NO: 778; WAN024FUE; Start 227; Stop 251
atggattggctgttcaagtgttatt

SEQ ID NO: 273177 - DNA, 25 bp, Artificial
  probe
  misc_feature (1)..(25): SEQ ID NO: 778; WAN024FUE; Start 1016; Stop 1040
gtgattcatctgagagactaagaag

SEQ ID NO: 273178 - DNA, 25 bp, Artificial
  probe
  misc_feature (1)..(25): SEQ ID NO: 778; WAN024FUE; Start 1017; Stop 1041
tgattcatctgagagactaagaagt

SEQ ID NO: 273179 - DNA, 25 bp, Artificial
  probe
  misc_feature (1)..(25): SEQ ID NO: 778; WAN024FUE; Start 226; Stop 250
gatggattggctgttcaagtgttat

SEQ ID NO: 273180 - DNA, 25 bp, Artificial
  probe
  misc_feature (1)..(25): SEQ ID NO: 778; WAN024FUE; Start 1026; Stop 1050
tgagagactaagaagtattggctat

SEQ ID NO: 273181 - DNA, 25 bp, Artificial
  probe
  misc_feature (1)..(25): SEQ ID NO: 778; WAN024FUE; Start 1013; Stop 1037
aatgtgattcatctgagagactaag

SEQ ID NO: 273182 - DNA, 25 bp, Artificial
  probe
  misc_feature (1)..(25): SEQ ID NO: 778; WAN024FUE; Start 1022; Stop 1046
catctgagagactaagaagtattgg

SEQ ID NO: 273183 - DNA, 25 bp, Artificial
  probe
  misc_feature (1)..(25): SEQ ID NO: 778; WAN024FUE; Start 215; Stop 239
attctctgattgatggattggctgt

SEQ ID NO: 273184 - DNA, 25 bp, Artificial
  probe
  misc_feature (1)..(25): SEQ ID NO: 778; WAN024FUE; Start 216; Stop 240
ttctctgattgatggattggctgtt

SEQ ID NO: 273185 - DNA, 25 bp, Artificial
  probe
  misc_feature (1)..(25): SEQ ID NO: 778; WAN024FUE; Start 849; Stop 873
taatggaatggaaatgttacttggc

SEQ ID NO: 273186 - DNA, 25 bp, Artificial
  probe
  misc_feature (1)..(25): SEQ ID NO: 778; WAN024FUE; Start 439; Stop 463
ttagactgggacggatttacattag

SEQ ID NO: 273187 - DNA, 25 bp, Artificial
  probe
  misc_feature (1)..(25): SEQ ID NO: 778; WAN024FUE; Start 438; Stop 462
gttagactgggacggatttacatta

SEQ ID NO: 273188 - DNA, 25 bp, Artificial
  probe
  misc_feature (1)..(25): SEQ ID NO: 778; WAN024FUE; Start 217; Stop 241
tctctgattgatggattggctgttc

SEQ ID NO: 273189 - DNA, 25 bp, Artificial
  probe
  misc_feature (1)..(25): SEQ ID NO: 778; WAN024FUE; Start 1083; Stop 1107
agagttagatccacattattggtgt

SEQ ID NO: 273190 - DNA, 25 bp, Artificial
  probe
  misc_feature (1)..(25): SEQ ID NO: 778; WAN024FUE; Start 1021; Stop 1045
tcatctgagagactaagaagtattg

SEQ ID NO: 273191 - DNA, 25 bp, Artificial
  probe
  misc_feature (1)..(25): SEQ ID NO: 778; WAN024FUE; Start 225; Stop 249
tgatggattggctgttcaagtgtta

SEQ ID NO: 273192 - DNA, 25 bp, Artificial
  probe
  misc_feature (1)..(25): SEQ ID NO: 778; WAN024FUE; Start 1084; Stop 1108
gagttagatccacattattggtgtt

SEQ ID NO: 273193 - DNA, 25 bp, Artificial
  probe
  misc_feature (1)..(25): SEQ ID NO: 778; WAN024FUE; Start 1082; Stop 1106
aagagttagatccacattattggtg

SEQ ID NO: 273194 - DNA, 25 bp, Artificial
  probe
  misc_feature (1)..(25): SEQ ID NO: 778; WAN024FUE; Start 1018; Stop 1042
gattcatctgagagactaagaagta

SEQ ID NO: 273195 - DNA, 25 bp, Artificial
  probe
  misc_feature (1)..(25): SEQ ID NO: 778; WAN024FUE; Start 423; Stop 447
gtttggaagaagtttgttagactgg

SEQ ID NO: 273196 - DNA, 25 bp, Artificial
  probe
  misc_feature (1)..(25): SEQ ID NO: 778; WAN024FUE; Start 422; Stop 446
tgtttggaagaagtttgttagactg

SEQ ID NO: 273197 - DNA, 25 bp, Artificial
  probe
  misc_feature (1)..(25): SEQ ID NO: 778; WAN024FUE; Start 168; Stop 192
ttgtatggtgctatggactattata

SEQ ID NO: 273198 - DNA, 25 bp, Artificial
  probe
  misc_feature (1)..(25): SEQ ID NO: 778; WAN024FUE; Start 434; Stop 458
gtttgttagactgggacggatttac

SEQ ID NO: 273199 - DNA, 25 bp, Artificial
  probe
  misc_feature (1)..(25): SEQ ID NO: 778; WAN024FUE; Start 420; Stop 444
tttgtttggaagaagtttgttagac

SEQ ID NO: 273200 - DNA, 25 bp, Artificial
  probe
  misc_feature (1)..(25): SEQ ID NO: 778; WAN024FUE; Start 1081; Stop 1105
gaagagttagatccacattattggt

SEQ ID NO: 273201 - DNA, 25 bp, Artificial
  probe
  misc_feature (1)..(25): SEQ ID NO: 779; WAN024FUF; Start 224; Stop 248
ttagtggcttacctattcaagtgtt

SEQ ID NO: 273202 - DNA, 25 bp, Artificial
  probe
  misc_feature (1)..(25): SEQ ID NO: 779; WAN024FUF; Start 223; Stop 247
attagtggcttacctattcaagtgt

SEQ ID NO: 273203 - DNA, 25 bp, Artificial
  probe
  misc_feature (1)..(25): SEQ ID NO: 779; WAN024FUF; Start 692; Stop 716
ttaataagcggatgattgtagcgtt

SEQ ID NO: 273204 - DNA, 25 bp, Artificial
  probe
  misc_feature (1)..(25): SEQ ID NO: 779; WAN024FUF; Start 875; Stop 899
caggaatcagaacacaatctacagt

SEQ ID NO: 273205 - DNA, 25 bp, Artificial
  probe
  misc_feature (1)..(25): SEQ ID NO: 779; WAN024FUF; Start 876; Stop 900
aggaatcagaacacaatctacagta

SEQ ID NO: 273206 - DNA, 25 bp, Artificial
  probe
  misc_feature (1)..(25): SEQ ID NO: 779; WAN024FUF; Start 225; Stop 249
tagtggcttacctattcaagtgttg

SEQ ID NO: 273207 - DNA, 25 bp, Artificial
  probe
  misc_feature (1)..(25): SEQ ID NO: 779; WAN024FUF; Start 222; Stop 246
aattagtggcttacctattcaagtg

SEQ ID NO: 273208 - DNA, 25 bp, Artificial
  probe
  misc_feature (1)..(25): SEQ ID NO: 779; WAN024FUF; Start 872; Stop 896
gagcaggaatcagaacacaatctac

SEQ ID NO: 273209 - DNA, 25 bp, Artificial
  probe
  misc_feature (1)..(25): SEQ ID NO: 779; WAN024FUF; Start 879; Stop 903
aatcagaacacaatctacagtaggt

SEQ ID NO: 273210 - DNA, 25 bp, Artificial
  probe
  misc_feature (1)..(25): SEQ ID NO: 779; WAN024FUF; Start 789; Stop 813
ttcaagaacaggtagtaatgtgaca

SEQ ID NO: 273211 - DNA, 25 bp, Artificial
  probe
  misc_feature (1)..(25): SEQ ID NO: 779; WAN024FUF; Start 227; Stop 251
gtggcttacctattcaagtgttgtt

SEQ ID NO: 273212 - DNA, 25 bp, Artificial
  probe
  misc_feature (1)..(25): SEQ ID NO: 779; WAN024FUF; Start 878; Stop 902
gaatcagaacacaatctacagtagg

SEQ ID NO: 273213 - DNA, 25 bp, Artificial
  probe
  misc_feature (1)..(25): SEQ ID NO: 779; WAN024FUF; Start 877; Stop 901
ggaatcagaacacaatctacagtag

SEQ ID NO: 273214 - DNA, 25 bp, Artificial
  probe
  misc_feature (1)..(25): SEQ ID NO: 779; WAN024FUF; Start 790; Stop 814
tcaagaacaggtagtaatgtgacac

SEQ ID NO: 273215 - DNA, 25 bp, Artificial
  probe
  misc_feature (1)..(25): SEQ ID NO: 779; WAN024FUF; Start 874; Stop 898
gcaggaatcagaacacaatctacag

SEQ ID NO: 273216 - DNA, 25 bp, Artificial
  probe
  misc_feature (1)..(25): SEQ ID NO: 779; WAN024FUF; Start 881; Stop 905
tcagaacacaatctacagtaggtat

SEQ ID NO: 273217 - DNA, 25 bp, Artificial
  probe
  misc_feature (1)..(25): SEQ ID NO: 779; WAN024FUF; Start 880; Stop 904
atcagaacacaatctacagtaggta

SEQ ID NO: 273218 - DNA, 25 bp, Artificial
  probe
  misc_feature (1)..(25): SEQ ID NO: 779; WAN024FUF; Start 690; Stop 714
aattaataagcggatgattgtagcg

SEQ ID NO: 273219 - DNA, 25 bp, Artificial
  probe
  misc_feature (1)..(25): SEQ ID NO: 779; WAN024FUF; Start 873; Stop 897
agcaggaatcagaacacaatctaca

SEQ ID NO: 273220 - DNA, 25 bp, Artificial
  probe
  misc_feature (1)..(25): SEQ ID NO: 779; WAN024FUF; Start 788; Stop 812
attcaagaacaggtagtaatgtgac

SEQ ID NO: 273221 - DNA, 25 bp, Artificial
  probe
  misc_feature (1)..(25): SEQ ID NO: 779; WAN024FUF; Start 691; Stop 715
attaataagcggatgattgtagcgt

SEQ ID NO: 273222 - DNA, 25 bp, Artificial
  probe
  misc_feature (1)..(25): SEQ ID NO: 779; WAN024FUF; Start 464; Stop 488
ctaccagttacggagtaagatatgc

SEQ ID NO: 273223 - DNA, 25 bp, Artificial
  probe
  misc_feature (1)..(25): SEQ ID NO: 779; WAN024FUF; Start 463; Stop 487
gctaccagttacggagtaagatatg

SEQ ID NO: 273224 - DNA, 25 bp, Artificial
  probe
  misc_feature (1)..(25): SEQ ID NO: 779; WAN024FUF; Start 226; Stop 250
agtggcttacctattcaagtgttgt

SEQ ID NO: 273225 - DNA, 25 bp, Artificial
  probe
  misc_feature (1)..(25): SEQ ID NO: 779; WAN024FUF; Start 791; Stop 815
caagaacaggtagtaatgtgacacg

SEQ ID NO: 273226 - DNA, 25 bp, Artificial
  probe
  misc_feature (1)..(25): SEQ ID NO: 779; WAN024FUF; Start 871; Stop 895
ggagcaggaatcagaacacaatcta

SEQ ID NO: 273227 - DNA, 25 bp, Artificial
  probe
  misc_feature (1)..(25): SEQ ID NO: 779; WAN024FUF; Start 787; Stop 811
aattcaagaacaggtagtaatgtga

SEQ ID NO: 273228 - DNA, 25 bp, Artificial
  probe
  misc_feature (1)..(25): SEQ ID NO: 779; WAN024FUF; Start 865; Stop 889
ttacttggagcaggaatcagaacac

SEQ ID NO: 273229 - DNA, 25 bp, Artificial
  probe
  misc_feature (1)..(25): SEQ ID NO: 779; WAN024FUF; Start 408; Stop 432
cgctaatgtagtattgtttggaaga

SEQ ID NO: 273230 - DNA, 25 bp, Artificial
  probe
  misc_feature (1)..(25): SEQ ID NO: 779; WAN024FUF; Start 693; Stop 717
taataagcggatgattgtagcgttt

SEQ ID NO: 273231 - DNA, 25 bp, Artificial
  probe
  misc_feature (1)..(25): SEQ ID NO: 779; WAN024FUF; Start 882; Stop 906
cagaacacaatctacagtaggtata

SEQ ID NO: 273232 - DNA, 25 bp, Artificial
  probe
  misc_feature (1)..(25): SEQ ID NO: 779; WAN024FUF; Start 228; Stop 252
tggcttacctattcaagtgttgttt

SEQ ID NO: 273233 - DNA, 25 bp, Artificial
  probe
  misc_feature (1)..(25): SEQ ID NO: 779; WAN024FUF; Start 508; Stop 532
acattaaatgggcagttgattcttt

SEQ ID NO: 273234 - DNA, 25 bp, Artificial
  probe
  misc_feature (1)..(25): SEQ ID NO: 780; WAN024GLV; Start 131; Stop 155
atatcattggtatccttggtaacgg

SEQ ID NO: 273235 - DNA, 25 bp, Artificial
  probe
  misc_feature (1)..(25): SEQ ID NO: 780; WAN024GLV; Start 528; Stop 552
taatgtcattgtctgtgcgatagag

SEQ ID NO: 273236 - DNA, 25 bp, Artificial
  probe
  misc_feature (1)..(25): SEQ ID NO: 780; WAN024GLV; Start 527; Stop 551
gtaatgtcattgtctgtgcgataga

SEQ ID NO: 273237 - DNA, 25 bp, Artificial
  probe
  misc_feature (1)..(25): SEQ ID NO: 780; WAN024GLV; Start 526; Stop 550
ggtaatgtcattgtctgtgcgatag

SEQ ID NO: 273238 - DNA, 25 bp, Artificial
  probe
  misc_feature (1)..(25): SEQ ID NO: 780; WAN024GLV; Start 1266; Stop 1290
ggatatgttggaagttggagacaag

SEQ ID NO: 273239 - DNA, 25 bp, Artificial
  probe
  misc_feature (1)..(25): SEQ ID NO: 780; WAN024GLV; Start 1265; Stop 1289
aggatatgttggaagttggagacaa

SEQ ID NO: 273240 - DNA, 25 bp, Artificial
  probe
  misc_feature (1)..(25): SEQ ID NO: 780; WAN024GLV; Start 624; Stop 648
taaccgtgtcgatatgatactcttc

SEQ ID NO: 273241 - DNA, 25 bp, Artificial
  probe
  misc_feature (1)..(25): SEQ ID NO: 780; WAN024GLV; Start 623; Stop 647
gtaaccgtgtcgatatgatactctt

SEQ ID NO: 273242 - DNA, 25 bp, Artificial
  probe
  misc_feature (1)..(25): SEQ ID NO: 780; WAN024GLV; Start 1263; Stop 1287
ggaggatatgttggaagttggagac

SEQ ID NO: 273243 - DNA, 25 bp, Artificial
  probe
  misc_feature (1)..(25): SEQ ID NO: 780; WAN024GLV; Start 709; Stop 733
gcctattatctacttggtattctca

SEQ ID NO: 273244 - DNA, 25 bp, Artificial
  probe
  misc_feature (1)..(25): SEQ ID NO: 780; WAN024GLV; Start 708; Stop 732
tgcctattatctacttggtattctc

SEQ ID NO: 273245 - DNA, 25 bp, Artificial
  probe
  misc_feature (1)..(25): SEQ ID NO: 780; WAN024GLV; Start 93; Stop 117
agacgaagctgttctcaatcatatt

SEQ ID NO: 273246 - DNA, 25 bp, Artificial
  probe
  misc_feature (1)..(25): SEQ ID NO: 780; WAN024GLV; Start 92; Stop 116
aagacgaagctgttctcaatcatat

SEQ ID NO: 273247 - DNA, 25 bp, Artificial
  probe
  misc_feature (1)..(25): SEQ ID NO: 780; WAN024GLV; Start 530; Stop 554
atgtcattgtctgtgcgatagagag

SEQ ID NO: 273248 - DNA, 25 bp, Artificial
  probe
  misc_feature (1)..(25): SEQ ID NO: 780; WAN024GLV; Start 1267; Stop 1291
gatatgttggaagttggagacaagc

SEQ ID NO: 273249 - DNA, 25 bp, Artificial
  probe
  misc_feature (1)..(25): SEQ ID NO: 780; WAN024GLV; Start 525; Stop 549
tggtaatgtcattgtctgtgcgata

SEQ ID NO: 273250 - DNA, 25 bp, Artificial
  probe
  misc_feature (1)..(25): SEQ ID NO: 780; WAN024GLV; Start 529; Stop 553
aatgtcattgtctgtgcgatagaga

SEQ ID NO: 273251 - DNA, 25 bp, Artificial
  probe
  misc_feature (1)..(25): SEQ ID NO: 780; WAN024GLV; Start 1264; Stop 1288
gaggatatgttggaagttggagaca

SEQ ID NO: 273252 - DNA, 25 bp, Artificial
  probe
  misc_feature (1)..(25): SEQ ID NO: 780; WAN024GLV; Start 918; Stop 942
gattacatctatgttccttgacagg

SEQ ID NO: 273253 - DNA, 25 bp, Artificial
  probe
  misc_feature (1)..(25): SEQ ID NO: 780; WAN024GLV; Start 917; Stop 941
tgattacatctatgttccttgacag

SEQ ID NO: 273254 - DNA, 25 bp, Artificial
  probe
  misc_feature (1)..(25): SEQ ID NO: 780; WAN024GLV; Start 916; Stop 940
ctgattacatctatgttccttgaca

SEQ ID NO: 273255 - DNA, 25 bp, Artificial
  probe
  misc_feature (1)..(25): SEQ ID NO: 780; WAN024GLV; Start 801; Stop 825
attcccaaatctctacatcgttcaa

SEQ ID NO: 273256 - DNA, 25 bp, Artificial
  probe
  misc_feature (1)..(25): SEQ ID NO: 780; WAN024GLV; Start 961; Stop 985
attactaaggtcaatcgtaccagtc

SEQ ID NO: 273257 - DNA, 25 bp, Artificial
  probe
  misc_feature (1)..(25): SEQ ID NO: 780; WAN024GLV; Start 91; Stop 115
caagacgaagctgttctcaatcata

SEQ ID NO: 273258 - DNA, 25 bp, Artificial
  probe
  misc_feature (1)..(25): SEQ ID NO: 780; WAN024GLV; Start 962; Stop 986
ttactaaggtcaatcgtaccagtct

SEQ ID NO: 273259 - DNA, 25 bp, Artificial
  probe
  misc_feature (1)..(25): SEQ ID NO: 780; WAN024GLV; Start 802; Stop 826
ttcccaaatctctacatcgttcaag

SEQ ID NO: 273260 - DNA, 25 bp, Artificial
  probe
  misc_feature (1)..(25): SEQ ID NO: 780; WAN024GLV; Start 800; Stop 824
aattcccaaatctctacatcgttca

SEQ ID NO: 273261 - DNA, 25 bp, Artificial
  probe
  misc_feature (1)..(25): SEQ ID NO: 780; WAN024GLV; Start 622; Stop 646
ggtaaccgtgtcgatatgatactct

SEQ ID NO: 273262 - DNA, 25 bp, Artificial
  probe
  misc_feature (1)..(25): SEQ ID NO: 780; WAN024GLV; Start 564; Stop 588
aattatcattccaagcggtgacatg

SEQ ID NO: 273263 - DNA, 25 bp, Artificial
  probe
  misc_feature (1)..(25): SEQ ID NO: 780; WAN024GLV; Start 799; Stop 823
aaattcccaaatctctacatcgttc

SEQ ID NO: 273264 - DNA, 25 bp, Artificial
  probe
  misc_feature (1)..(25): SEQ ID NO: 780; WAN024GLV; Start 798; Stop 822
gaaattcccaaatctctacatcgtt

SEQ ID NO: 273265 - DNA, 25 bp, Artificial
  probe
  misc_feature (1)..(25): SEQ ID NO: 780; WAN024GLV; Start 915; Stop 939
tctgattacatctatgttccttgac

SEQ ID NO: 273266 - DNA, 25 bp, Artificial
  probe
  misc_feature (1)..(25): SEQ ID NO: 780; WAN024GLV; Start 101; Stop 125
ctgttctcaatcatattgtcagtcg

SEQ ID NO: 273267 - DNA, 25 bp, Artificial
  probe
  misc_feature (1)..(25): SEQ ID NO: 781; WAN024CFC; Start 482; Stop 506
atcctaatatgtgtgtgacgaactt

SEQ ID NO: 273268 - DNA, 25 bp, Artificial
  probe
  misc_feature (1)..(25): SEQ ID NO: 781; WAN024CFC; Start 478; Stop 502
ctgtatcctaatatgtgtgtgacga

SEQ ID NO: 273269 - DNA, 25 bp, Artificial
  probe
  misc_feature (1)..(25): SEQ ID NO: 781; WAN024CFC; Start 477; Stop 501
actgtatcctaatatgtgtgtgacg

SEQ ID NO: 273270 - DNA, 25 bp, Artificial
  probe
  misc_feature (1)..(25): SEQ ID NO: 781; WAN024CFC; Start 73; Stop 97
tataacagtggagcgattacagaat

SEQ ID NO: 273271 - DNA, 25 bp, Artificial
  probe
  misc_feature (1)..(25): SEQ ID NO: 781; WAN024CFC; Start 1120; Stop 1144
cttctgcgatattatgtggattctg

SEQ ID NO: 273272 - DNA, 25 bp, Artificial
  probe
  misc_feature (1)..(25): SEQ ID NO: 781; WAN024CFC; Start 479; Stop 503
tgtatcctaatatgtgtgtgacgaa

SEQ ID NO: 273273 - DNA, 25 bp, Artificial
  probe
  misc_feature (1)..(25): SEQ ID NO: 781; WAN024CFC; Start 72; Stop 96
atataacagtggagcgattacagaa

SEQ ID NO: 273274 - DNA, 25 bp, Artificial
  probe
  misc_feature (1)..(25): SEQ ID NO: 781; WAN024CFC; Start 480; Stop 504
gtatcctaatatgtgtgtgacgaac

SEQ ID NO: 273275 - DNA, 25 bp, Artificial
  probe
  misc_feature (1)..(25): SEQ ID NO: 781; WAN024CFC; Start 481; Stop 505
tatcctaatatgtgtgtgacgaact

SEQ ID NO: 273276 - DNA, 25 bp, Artificial
  probe
  misc_feature (1)..(25): SEQ ID NO: 781; WAN024CFC; Start 75; Stop 99
taacagtggagcgattacagaatta

SEQ ID NO: 273277 - DNA, 25 bp, Artificial
  probe
  misc_feature (1)..(25): SEQ ID NO: 781; WAN024CFC; Start 74; Stop 98
ataacagtggagcgattacagaatt

SEQ ID NO: 273278 - DNA, 25 bp, Artificial
  probe
  misc_feature (1)..(25): SEQ ID NO: 781; WAN024CFC; Start 1119; Stop 1143
gcttctgcgatattatgtggattct

SEQ ID NO: 273279 - DNA, 25 bp, Artificial
  probe
  misc_feature (1)..(25): SEQ ID NO: 781; WAN024CFC; Start 1460; Stop 1484
aaggattgtatggttggaatgtgac

SEQ ID NO: 273280 - DNA, 25 bp, Artificial
  probe
  misc_feature (1)..(25): SEQ ID NO: 781; WAN024CFC; Start 76; Stop 100
aacagtggagcgattacagaattag

SEQ ID NO: 273281 - DNA, 25 bp, Artificial
  probe
  misc_feature (1)..(25): SEQ ID NO: 781; WAN024CFC; Start 994; Stop 1018
ctattgccacagagagagagaattg

SEQ ID NO: 273282 - DNA, 25 bp, Artificial
  probe
  misc_feature (1)..(25): SEQ ID NO: 781; WAN024CFC; Start 1121; Stop 1145
ttctgcgatattatgtggattctgc

SEQ ID NO: 273283 - DNA, 25 bp, Artificial
  probe
  misc_feature (1)..(25): SEQ ID NO: 781; WAN024CFC; Start 995; Stop 1019
tattgccacagagagagagaattga

SEQ ID NO: 273284 - DNA, 25 bp, Artificial
  probe
  misc_feature (1)..(25): SEQ ID NO: 781; WAN024CFC; Start 199; Stop 223
aatacgaaggtgaacatcatagaca

SEQ ID NO: 273285 - DNA, 25 bp, Artificial
  probe
  misc_feature (1)..(25): SEQ ID NO: 781; WAN024CFC; Start 80; Stop 104
gtggagcgattacagaattaggaag

SEQ ID NO: 273286 - DNA, 25 bp, Artificial
  probe
  misc_feature (1)..(25): SEQ ID NO: 781; WAN024CFC; Start 476; Stop 500
aactgtatcctaatatgtgtgtgac

SEQ ID NO: 273287 - DNA, 25 bp, Artificial
  probe
  misc_feature (1)..(25): SEQ ID NO: 781; WAN024CFC; Start 79; Stop 103
agtggagcgattacagaattaggaa

SEQ ID NO: 273288 - DNA, 25 bp, Artificial
  probe
  misc_feature (1)..(25): SEQ ID NO: 781; WAN024CFC; Start 1459; Stop 1483
caaggattgtatggttggaatgtga

SEQ ID NO: 273289 - DNA, 25 bp, Artificial
  probe
  misc_feature (1)..(25): SEQ ID NO: 781; WAN024CFC; Start 475; Stop 499
gaactgtatcctaatatgtgtgtga

SEQ ID NO: 273290 - DNA, 25 bp, Artificial
  probe
  misc_feature (1)..(25): SEQ ID NO: 781; WAN024CFC; Start 71; Stop 95
tatataacagtggagcgattacaga

SEQ ID NO: 273291 - DNA, 25 bp, Artificial
  probe
  misc_feature (1)..(25): SEQ ID NO: 781; WAN024CFC; Start 474; Stop 498
agaactgtatcctaatatgtgtgtg

SEQ ID NO: 273292 - DNA, 25 bp, Artificial
  probe
  misc_feature (1)..(25): SEQ ID NO: 781; WAN024CFC; Start 1750; Stop 1774
cggtgtattcaagaatatcgtagtg

SEQ ID NO: 273293 - DNA, 25 bp, Artificial
  probe
  misc_feature (1)..(25): SEQ ID NO: 781; WAN024CFC; Start 996; Stop 1020
attgccacagagagagagaattgaa

SEQ ID NO: 273294 - DNA, 25 bp, Artificial
  probe
  misc_feature (1)..(25): SEQ ID NO: 781; WAN024CFC; Start 1749; Stop 1773
tcggtgtattcaagaatatcgtagt

SEQ ID NO: 273295 - DNA, 25 bp, Artificial
  probe
  misc_feature (1)..(25): SEQ ID NO: 781; WAN024CFC; Start 1747; Stop 1771
gctcggtgtattcaagaatatcgta

SEQ ID NO: 273296 - DNA, 25 bp, Artificial
  probe
  misc_feature (1)..(25): SEQ ID NO: 781; WAN024CFC; Start 1748; Stop 1772
ctcggtgtattcaagaatatcgtag

SEQ ID NO: 273297 - DNA, 25 bp, Artificial
  probe
  misc_feature (1)..(25): SEQ ID NO: 781; WAN024CFC; Start 200; Stop 224
atacgaaggtgaacatcatagacac

SEQ ID NO: 273298 - DNA, 25 bp, Artificial
  probe
  misc_feature (1)..(25): SEQ ID NO: 781; WAN024CFC; Start 78; Stop 102
cagtggagcgattacagaattagga

SEQ ID NO: 273299 - DNA, 25 bp, Artificial
  probe
  misc_feature (1)..(25): SEQ ID NO: 781; WAN024CFC; Start 1744; Stop 1768
cctgctcggtgtattcaagaatatc

SEQ ID NO: 273300 - DNA, 25 bp, Artificial
  probe
  misc_feature (1)..(25): SEQ ID NO: 782; WAN024BHB; Start 1080; Stop 1104
ttatgttgcctactctattgctgaa

SEQ ID NO: 273301 - DNA, 25 bp, Artificial
  probe
  misc_feature (1)..(25): SEQ ID NO: 782; WAN024BHB; Start 1079; Stop 1103
gttatgttgcctactctattgctga

SEQ ID NO: 273302 - DNA, 25 bp, Artificial
  probe
  misc_feature (1)..(25): SEQ ID NO: 782; WAN024BHB; Start 1404; Stop 1428
caacactgctatgaatgacttccta

SEQ ID NO: 273303 - DNA, 25 bp, Artificial
  probe
  misc_feature (1)..(25): SEQ ID NO: 782; WAN024BHB; Start 1400; Stop 1424
caatcaacactgctatgaatgactt

SEQ ID NO: 273304 - DNA, 25 bp, Artificial
  probe
  misc_feature (1)..(25): SEQ ID NO: 782; WAN024BHB; Start 1078; Stop 1102
ggttatgttgcctactctattgctg

SEQ ID NO: 273305 - DNA, 25 bp, Artificial
  probe
  misc_feature (1)..(25): SEQ ID NO: 782; WAN024BHB; Start 1405; Stop 1429
aacactgctatgaatgacttcctag

SEQ ID NO: 273306 - DNA, 25 bp, Artificial
  probe
  misc_feature (1)..(25): SEQ ID NO: 782; WAN024BHB; Start 1401; Stop 1425
aatcaacactgctatgaatgacttc

SEQ ID NO: 273307 - DNA, 25 bp, Artificial
  probe
  misc_feature (1)..(25): SEQ ID NO: 782; WAN024BHB; Start 1342; Stop 1366
cttcttggaacaatcttgacaggat

SEQ ID NO: 273308 - DNA, 25 bp, Artificial
  probe
  misc_feature (1)..(25): SEQ ID NO: 782; WAN024BHB; Start 1402; Stop 1426
atcaacactgctatgaatgacttcc

SEQ ID NO: 273309 - DNA, 25 bp, Artificial
  probe
  misc_feature (1)..(25): SEQ ID NO: 782; WAN024BHB; Start 1341; Stop 1365
acttcttggaacaatcttgacagga

SEQ ID NO: 273310 - DNA, 25 bp, Artificial
  probe
  misc_feature (1)..(25): SEQ ID NO: 782; WAN024BHB; Start 1340; Stop 1364
cacttcttggaacaatcttgacagg

SEQ ID NO: 273311 - DNA, 25 bp, Artificial
  probe
  misc_feature (1)..(25): SEQ ID NO: 782; WAN024BHB; Start 1403; Stop 1427
tcaacactgctatgaatgacttcct

SEQ ID NO: 273312 - DNA, 25 bp, Artificial
  probe
  misc_feature (1)..(25): SEQ ID NO: 782; WAN024BHB; Start 749; Stop 773
gtatccgtaagacagaagagctaat

SEQ ID NO: 273313 - DNA, 25 bp, Artificial
  probe
  misc_feature (1)..(25): SEQ ID NO: 782; WAN024BHB; Start 753; Stop 777
ccgtaagacagaagagctaattaac

SEQ ID NO: 273314 - DNA, 25 bp, Artificial
  probe
  misc_feature (1)..(25): SEQ ID NO: 782; WAN024BHB; Start 752; Stop 776
tccgtaagacagaagagctaattaa

SEQ ID NO: 273315 - DNA, 25 bp, Artificial
  probe
  misc_feature (1)..(25): SEQ ID NO: 782; WAN024BHB; Start 751; Stop 775
atccgtaagacagaagagctaatta

SEQ ID NO: 273316 - DNA, 25 bp, Artificial
  probe
  misc_feature (1)..(25): SEQ ID NO: 782; WAN024BHB; Start 750; Stop 774
tatccgtaagacagaagagctaatt

SEQ ID NO: 273317 - DNA, 25 bp, Artificial
  probe
  misc_feature (1)..(25): SEQ ID NO: 782; WAN024BHB; Start 1343; Stop 1367
ttcttggaacaatcttgacaggatt

SEQ ID NO: 273318 - DNA, 25 bp, Artificial
  probe
  misc_feature (1)..(25): SEQ ID NO: 782; WAN024BHB; Start 758; Stop 782
agacagaagagctaattaacttggc

SEQ ID NO: 273319 - DNA, 25 bp, Artificial
  probe
  misc_feature (1)..(25): SEQ ID NO: 782; WAN024BHB; Start 911; Stop 935
cattcgttatcggtggtggtatcat

SEQ ID NO: 273320 - DNA, 25 bp, Artificial
  probe
  misc_feature (1)..(25): SEQ ID NO: 782; WAN024BHB; Start 1003; Stop 1027
tcttaccatgagttagcttctatgt

SEQ ID NO: 273321 - DNA, 25 bp, Artificial
  probe
  misc_feature (1)..(25): SEQ ID NO: 782; WAN024BHB; Start 748; Stop 772
ggtatccgtaagacagaagagctaa

SEQ ID NO: 273322 - DNA, 25 bp, Artificial
  probe
  misc_feature (1)..(25): SEQ ID NO: 782; WAN024BHB; Start 1859; Stop 1883
ttacttcaaatgctctcctttacct

SEQ ID NO: 273323 - DNA, 25 bp, Artificial
  probe
  misc_feature (1)..(25): SEQ ID NO: 782; WAN024BHB; Start 1081; Stop 1105
tatgttgcctactctattgctgaaa

SEQ ID NO: 273324 - DNA, 25 bp, Artificial
  probe
  misc_feature (1)..(25): SEQ ID NO: 782; WAN024BHB; Start 1860; Stop 1884
tacttcaaatgctctcctttacctc

SEQ ID NO: 273325 - DNA, 25 bp, Artificial
  probe
  misc_feature (1)..(25): SEQ ID NO: 782; WAN024BHB; Start 1858; Stop 1882
cttacttcaaatgctctcctttacc

SEQ ID NO: 273326 - DNA, 25 bp, Artificial
  probe
  misc_feature (1)..(25): SEQ ID NO: 782; WAN024BHB; Start 1857; Stop 1881
ccttacttcaaatgctctcctttac

SEQ ID NO: 273327 - DNA, 25 bp, Artificial
  probe
  misc_feature (1)..(25): SEQ ID NO: 782; WAN024BHB; Start 757; Stop 781
aagacagaagagctaattaacttgg

SEQ ID NO: 273328 - DNA, 25 bp, Artificial
  probe
  misc_feature (1)..(25): SEQ ID NO: 782; WAN024BHB; Start 1856; Stop 1880
cccttacttcaaatgctctccttta

SEQ ID NO: 273329 - DNA, 25 bp, Artificial
  probe
  misc_feature (1)..(25): SEQ ID NO: 782; WAN024BHB; Start 754; Stop 778
cgtaagacagaagagctaattaact

SEQ ID NO: 273330 - DNA, 25 bp, Artificial
  probe
  misc_feature (1)..(25): SEQ ID NO: 782; WAN024BHB; Start 1006; Stop 1030
taccatgagttagcttctatgttca

SEQ ID NO: 273331 - DNA, 25 bp, Artificial
  probe
  misc_feature (1)..(25): SEQ ID NO: 782; WAN024BHB; Start 1330; Stop 1354
cttctattgccacttcttggaacaa

SEQ ID NO: 273332 - DNA, 25 bp, Artificial
  probe
  misc_feature (1)..(25): SEQ ID NO: 782; WAN024BHB; Start 1656; Stop 1680
tactaaggaagaacgtaactctggt

SEQ ID NO: 273333 - DNA, 25 bp, Artificial
  probe
  misc_feature (1)..(25): SEQ ID NO: 783; WAN024DBW; Start 153; Stop 177
gatagacagtagaggtactccagat

SEQ ID NO: 273334 - DNA, 25 bp, Artificial
  probe
  misc_feature (1)..(25): SEQ ID NO: 783; WAN024DBW; Start 155; Stop 179
tagacagtagaggtactccagattg

SEQ ID NO: 273335 - DNA, 25 bp, Artificial
  probe
  misc_feature (1)..(25): SEQ ID NO: 783; WAN024DBW; Start 154; Stop 178
atagacagtagaggtactccagatt

SEQ ID NO: 273336 - DNA, 25 bp, Artificial
  probe
  misc_feature (1)..(25): SEQ ID NO: 783; WAN024DBW; Start 152; Stop 176
cgatagacagtagaggtactccaga

SEQ ID NO: 273337 - DNA, 25 bp, Artificial
  probe
  misc_feature (1)..(25): SEQ ID NO: 783; WAN024DBW; Start 111; Stop 135
aatatctagcacagtattgccagat

SEQ ID NO: 273338 - DNA, 25 bp, Artificial
  probe
  misc_feature (1)..(25): SEQ ID NO: 783; WAN024DBW; Start 156; Stop 180
agacagtagaggtactccagattgg

SEQ ID NO: 273339 - DNA, 25 bp, Artificial
  probe
  misc_feature (1)..(25): SEQ ID NO: 783; WAN024DBW; Start 151; Stop 175
ccgatagacagtagaggtactccag

SEQ ID NO: 273340 - DNA, 25 bp, Artificial
  probe
  misc_feature (1)..(25): SEQ ID NO: 783; WAN024DBW; Start 148; Stop 172
ttaccgatagacagtagaggtactc

SEQ ID NO: 273341 - DNA, 25 bp, Artificial
  probe
  misc_feature (1)..(25): SEQ ID NO: 783; WAN024DBW; Start 143; Stop 167
ttaaattaccgatagacagtagagg

SEQ ID NO: 273342 - DNA, 25 bp, Artificial
  probe
  misc_feature (1)..(25): SEQ ID NO: 783; WAN024DBW; Start 147; Stop 171
attaccgatagacagtagaggtact

SEQ ID NO: 273343 - DNA, 25 bp, Artificial
  probe
  misc_feature (1)..(25): SEQ ID NO: 783; WAN024DBW; Start 146; Stop 170
aattaccgatagacagtagaggtac

SEQ ID NO: 273344 - DNA, 25 bp, Artificial
  probe
  misc_feature (1)..(25): SEQ ID NO: 783; WAN024DBW; Start 172; Stop 196
ccagattggaattacatggaaagat

SEQ ID NO: 273345 - DNA, 25 bp, Artificial
  probe
  misc_feature (1)..(25): SEQ ID NO: 783; WAN024DBW; Start 144; Stop 168
taaattaccgatagacagtagaggt

SEQ ID NO: 273346 - DNA, 25 bp, Artificial
  probe
  misc_feature (1)..(25): SEQ ID NO: 783; WAN024DBW; Start 149; Stop 173
taccgatagacagtagaggtactcc

SEQ ID NO: 273347 - DNA, 25 bp, Artificial
  probe
  misc_feature (1)..(25): SEQ ID NO: 783; WAN024DBW; Start 113; Stop 137
tatctagcacagtattgccagatat

SEQ ID NO: 273348 - DNA, 25 bp, Artificial
  probe
  misc_feature (1)..(25): SEQ ID NO: 783; WAN024DBW; Start 112; Stop 136
atatctagcacagtattgccagata

SEQ ID NO: 273349 - DNA, 25 bp, Artificial
  probe
  misc_feature (1)..(25): SEQ ID NO: 783; WAN024DBW; Start 150; Stop 174
accgatagacagtagaggtactcca

SEQ ID NO: 273350 - DNA, 25 bp, Artificial
  probe
  misc_feature (1)..(25): SEQ ID NO: 783; WAN024DBW; Start 114; Stop 138
atctagcacagtattgccagatatc

SEQ ID NO: 273351 - DNA, 25 bp, Artificial
  probe
  misc_feature (1)..(25): SEQ ID NO: 783; WAN024DBW; Start 116; Stop 140
ctagcacagtattgccagatatcaa

SEQ ID NO: 273352 - DNA, 25 bp, Artificial
  probe
  misc_feature (1)..(25): SEQ ID NO: 783; WAN024DBW; Start 115; Stop 139
tctagcacagtattgccagatatca

SEQ ID NO: 273353 - DNA, 25 bp, Artificial
  probe
  misc_feature (1)..(25): SEQ ID NO: 783; WAN024DBW; Start 108; Stop 132
tcaaatatctagcacagtattgcca

SEQ ID NO: 273354 - DNA, 25 bp, Artificial
  probe
  misc_feature (1)..(25): SEQ ID NO: 783; WAN024DBW; Start 110; Stop 134
aaatatctagcacagtattgccaga

SEQ ID NO: 273355 - DNA, 25 bp, Artificial
  probe
  misc_feature (1)..(25): SEQ ID NO: 783; WAN024DBW; Start 109; Stop 133
caaatatctagcacagtattgccag

SEQ ID NO: 273356 - DNA, 25 bp, Artificial
  probe
  misc_feature (1)..(25): SEQ ID NO: 783; WAN024DBW; Start 173; Stop 197
cagattggaattacatggaaagata

SEQ ID NO: 273357 - DNA, 25 bp, Artificial
  probe
  misc_feature (1)..(25): SEQ ID NO: 783; WAN024DBW; Start 107; Stop 131
atcaaatatctagcacagtattgcc

SEQ ID NO: 273358 - DNA, 25 bp, Artificial
  probe
  misc_feature (1)..(25): SEQ ID NO: 783; WAN024DBW; Start 59; Stop 83
atttaacttcaattattaggcaagc

SEQ ID NO: 273359 - DNA, 25 bp, Artificial
  probe
  misc_feature (1)..(25): SEQ ID NO: 783; WAN024DBW; Start 60; Stop 84
tttaacttcaattattaggcaagct

SEQ ID NO: 273360 - DNA, 25 bp, Artificial
  probe
  misc_feature (1)..(25): SEQ ID NO: 783; WAN024DBW; Start 106; Stop 130
gatcaaatatctagcacagtattgc

SEQ ID NO: 273361 - DNA, 25 bp, Artificial
  probe
  misc_feature (1)..(25): SEQ ID NO: 783; WAN024DBW; Start 167; Stop 191
gtactccagattggaattacatgga

SEQ ID NO: 273362 - DNA, 25 bp, Artificial
  probe
  misc_feature (1)..(25): SEQ ID NO: 783; WAN024DBW; Start 165; Stop 189
aggtactccagattggaattacatg

SEQ ID NO: 273363 - DNA, 25 bp, Artificial
  probe
  misc_feature (1)..(25): SEQ ID NO: 783; WAN024DBW; Start 164; Stop 188
gaggtactccagattggaattacat

SEQ ID NO: 273364 - DNA, 25 bp, Artificial
  probe
  misc_feature (1)..(25): SEQ ID NO: 783; WAN024DBW; Start 160; Stop 184
agtagaggtactccagattggaatt

SEQ ID NO: 273365 - DNA, 25 bp, Artificial
  probe
  misc_feature (1)..(25): SEQ ID NO: 783; WAN024DBW; Start 168; Stop 192
tactccagattggaattacatggaa

SEQ ID NO: 273366 - DNA, 25 bp, Artificial
  probe
  misc_feature (1)..(25): SEQ ID NO: 784; WAN024DML; Start 178; Stop 202
gttctctacctctatgatcgttctt

SEQ ID NO: 273367 - DNA, 25 bp, Artificial
  probe
  misc_feature (1)..(25): SEQ ID NO: 784; WAN024DML; Start 179; Stop 203
ttctctacctctatgatcgttcttc

SEQ ID NO: 273368 - DNA, 25 bp, Artificial
  probe
  misc_feature (1)..(25): SEQ ID NO: 784; WAN024DML; Start 180; Stop 204
tctctacctctatgatcgttcttca

SEQ ID NO: 273369 - DNA, 25 bp, Artificial
  probe
  misc_feature (1)..(25): SEQ ID NO: 784; WAN024DML; Start 181; Stop 205
ctctacctctatgatcgttcttcaa

SEQ ID NO: 273370 - DNA, 25 bp, Artificial
  probe
  misc_feature (1)..(25): SEQ ID NO: 784; WAN024DML; Start 177; Stop 201
ggttctctacctctatgatcgttct

SEQ ID NO: 273371 - DNA, 25 bp, Artificial
  probe
  misc_feature (1)..(25): SEQ ID NO: 784; WAN024DML; Start 186; Stop 210
cctctatgatcgttcttcaaatcct

SEQ ID NO: 273372 - DNA, 25 bp, Artificial
  probe
  misc_feature (1)..(25): SEQ ID NO: 784; WAN024DML; Start 190; Stop 214
tatgatcgttcttcaaatcctcgta

SEQ ID NO: 273373 - DNA, 25 bp, Artificial
  probe
  misc_feature (1)..(25): SEQ ID NO: 784; WAN024DML; Start 191; Stop 215
atgatcgttcttcaaatcctcgtaa

SEQ ID NO: 273374 - DNA, 25 bp, Artificial
  probe
  misc_feature (1)..(25): SEQ ID NO: 784; WAN024DML; Start 185; Stop 209
acctctatgatcgttcttcaaatcc

SEQ ID NO: 273375 - DNA, 25 bp, Artificial
  probe
  misc_feature (1)..(25): SEQ ID NO: 784; WAN024DML; Start 188; Stop 212
tctatgatcgttcttcaaatcctcg

SEQ ID NO: 273376 - DNA, 25 bp, Artificial
  probe
  misc_feature (1)..(25): SEQ ID NO: 784; WAN024DML; Start 189; Stop 213
ctatgatcgttcttcaaatcctcgt

SEQ ID NO: 273377 - DNA, 25 bp, Artificial
  probe
  misc_feature (1)..(25): SEQ ID NO: 784; WAN024DML; Start 192; Stop 216
tgatcgttcttcaaatcctcgtaag

SEQ ID NO: 273378 - DNA, 25 bp, Artificial
  probe
  misc_feature (1)..(25): SEQ ID NO: 784; WAN024DML; Start 187; Stop 211
ctctatgatcgttcttcaaatcctc

SEQ ID NO: 273379 - DNA, 25 bp, Artificial
  probe
  misc_feature (1)..(25): SEQ ID NO: 784; WAN024DML; Start 182; Stop 206
tctacctctatgatcgttcttcaaa

SEQ ID NO: 273380 - DNA, 25 bp, Artificial
  probe
  misc_feature (1)..(25): SEQ ID NO: 784; WAN024DML; Start 271; Stop 295
aatcctggaaatgaagggcatattt

SEQ ID NO: 273381 - DNA, 25 bp, Artificial
  probe
  misc_feature (1)..(25): SEQ ID NO: 784; WAN024DML; Start 270; Stop 294
aaatcctggaaatgaagggcatatt

SEQ ID NO: 273382 - DNA, 25 bp, Artificial
  probe
  misc_feature (1)..(25): SEQ ID NO: 784; WAN024DML; Start 264; Stop 288
ttatggaaatcctggaaatgaaggg

SEQ ID NO: 273383 - DNA, 25 bp, Artificial
  probe
  misc_feature (1)..(25): SEQ ID NO: 784; WAN024DML; Start 263; Stop 287
attatggaaatcctggaaatgaagg

SEQ ID NO: 273384 - DNA, 25 bp, Artificial
  probe
  misc_feature (1)..(25): SEQ ID NO: 784; WAN024DML; Start 269; Stop 293
gaaatcctggaaatgaagggcatat

SEQ ID NO: 273385 - DNA, 25 bp, Artificial
  probe
  misc_feature (1)..(25): SEQ ID NO: 784; WAN024DML; Start 184; Stop 208
tacctctatgatcgttcttcaaatc

SEQ ID NO: 273386 - DNA, 25 bp, Artificial
  probe
  misc_feature (1)..(25): SEQ ID NO: 784; WAN024DML; Start 183; Stop 207
ctacctctatgatcgttcttcaaat

SEQ ID NO: 273387 - DNA, 25 bp, Artificial
  probe
  misc_feature (1)..(25): SEQ ID NO: 784; WAN024DML; Start 370; Stop 394
gctactttcttaattgcagatggag

SEQ ID NO: 273388 - DNA, 25 bp, Artificial
  probe
  misc_feature (1)..(25): SEQ ID NO: 784; WAN024DML; Start 373; Stop 397
actttcttaattgcagatggagatg

SEQ ID NO: 273389 - DNA, 25 bp, Artificial
  probe
  misc_feature (1)..(25): SEQ ID NO: 784; WAN024DML; Start 371; Stop 395
ctactttcttaattgcagatggaga

SEQ ID NO: 273390 - DNA, 25 bp, Artificial
  probe
  misc_feature (1)..(25): SEQ ID NO: 784; WAN024DML; Start 80; Stop 104
ctggttacgacttaaaggttgctgt

SEQ ID NO: 273391 - DNA, 25 bp, Artificial
  probe
  misc_feature (1)..(25): SEQ ID NO: 784; WAN024DML; Start 193; Stop 217
gatcgttcttcaaatcctcgtaaga

SEQ ID NO: 273392 - DNA, 25 bp, Artificial
  probe
  misc_feature (1)..(25): SEQ ID NO: 784; WAN024DML; Start 262; Stop 286
tattatggaaatcctggaaatgaag

SEQ ID NO: 273393 - DNA, 25 bp, Artificial
  probe
  misc_feature (1)..(25): SEQ ID NO: 784; WAN024DML; Start 81; Stop 105
tggttacgacttaaaggttgctgtg

SEQ ID NO: 273394 - DNA, 25 bp, Artificial
  probe
  misc_feature (1)..(25): SEQ ID NO: 784; WAN024DML; Start 372; Stop 396
tactttcttaattgcagatggagat

SEQ ID NO: 273395 - DNA, 25 bp, Artificial
  probe
  misc_feature (1)..(25): SEQ ID NO: 784; WAN024DML; Start 268; Stop 292
ggaaatcctggaaatgaagggcata

SEQ ID NO: 273396 - DNA, 25 bp, Artificial
  probe
  misc_feature (1)..(25): SEQ ID NO: 784; WAN024DML; Start 265; Stop 289
tatggaaatcctggaaatgaagggc

SEQ ID NO: 273397 - DNA, 25 bp, Artificial
  probe
  misc_feature (1)..(25): SEQ ID NO: 784; WAN024DML; Start 210; Stop 234
tcgtaagaagggcttggttttaatt

SEQ ID NO: 273398 - DNA, 25 bp, Artificial
  probe
  misc_feature (1)..(25): SEQ ID NO: 784; WAN024DML; Start 209; Stop 233
ctcgtaagaagggcttggttttaat

SEQ ID NO: 273399 - DNA, 25 bp, Artificial
  probe
  misc_feature (1)..(25): SEQ ID NO: 785; WAN024DNJ; Start 17; Stop 41
tttcaaaagctaattggagtgattt

SEQ ID NO: 273400 - DNA, 25 bp, Artificial
  probe
  misc_feature (1)..(25): SEQ ID NO: 785; WAN024DNJ; Start 16; Stop 40
ttttcaaaagctaattggagtgatt

SEQ ID NO: 273401 - DNA, 25 bp, Artificial
  probe
  misc_feature (1)..(25): SEQ ID NO: 785; WAN024DNJ; Start 15; Stop 39
attttcaaaagctaattggagtgat

SEQ ID NO: 273402 - DNA, 25 bp, Artificial
  probe
  misc_feature (1)..(25): SEQ ID NO: 785; WAN024DNJ; Start 44; Stop 68
ttcatgatgggataaatgatctggc

SEQ ID NO: 273403 - DNA, 25 bp, Artificial
  probe
  misc_feature (1)..(25): SEQ ID NO: 785; WAN024DNJ; Start 18; Stop 42
ttcaaaagctaattggagtgatttt

SEQ ID NO: 273404 - DNA, 25 bp, Artificial
  probe
  misc_feature (1)..(25): SEQ ID NO: 785; WAN024DNJ; Start 25; Stop 49
gctaattggagtgattttattcatg

SEQ ID NO: 273405 - DNA, 25 bp, Artificial
  probe
  misc_feature (1)..(25): SEQ ID NO: 785; WAN024DNJ; Start 13; Stop 37
gtattttcaaaagctaattggagtg

SEQ ID NO: 273406 - DNA, 25 bp, Artificial
  probe
  misc_feature (1)..(25): SEQ ID NO: 785; WAN024DNJ; Start 43; Stop 67
attcatgatgggataaatgatctgg

SEQ ID NO: 273407 - DNA, 25 bp, Artificial
  probe
  misc_feature (1)..(25): SEQ ID NO: 785; WAN024DNJ; Start 14; Stop 38
tattttcaaaagctaattggagtga

SEQ ID NO: 273408 - DNA, 25 bp, Artificial
  probe
  misc_feature (1)..(25): SEQ ID NO: 785; WAN024DNJ; Start 12; Stop 36
agtattttcaaaagctaattggagt

SEQ ID NO: 273409 - DNA, 25 bp, Artificial
  probe
  misc_feature (1)..(25): SEQ ID NO: 785; WAN024DNJ; Start 23; Stop 47
aagctaattggagtgattttattca

SEQ ID NO: 273410 - DNA, 25 bp, Artificial
  probe
  misc_feature (1)..(25): SEQ ID NO: 785; WAN024DNJ; Start 31; Stop 55
tggagtgattttattcatgatggga

SEQ ID NO: 273411 - DNA, 25 bp, Artificial
  probe
  misc_feature (1)..(25): SEQ ID NO: 785; WAN024DNJ; Start 30; Stop 54
ttggagtgattttattcatgatggg

SEQ ID NO: 273412 - DNA, 25 bp, Artificial
  probe
  misc_feature (1)..(25): SEQ ID NO: 785; WAN024DNJ; Start 19; Stop 43
tcaaaagctaattggagtgatttta

SEQ ID NO: 273413 - DNA, 25 bp, Artificial
  probe
  misc_feature (1)..(25): SEQ ID NO: 785; WAN024DNJ; Start 24; Stop 48
agctaattggagtgattttattcat

SEQ ID NO: 273414 - DNA, 25 bp, Artificial
  probe
  misc_feature (1)..(25): SEQ ID NO: 785; WAN024DNJ; Start 32; Stop 56
ggagtgattttattcatgatgggat

SEQ ID NO: 273415 - DNA, 25 bp, Artificial
  probe
  misc_feature (1)..(25): SEQ ID NO: 785; WAN024DNJ; Start 45; Stop 69
tcatgatgggataaatgatctggcc

SEQ ID NO: 273416 - DNA, 25 bp, Artificial
  probe
  misc_feature (1)..(25): SEQ ID NO: 785; WAN024DNJ; Start 11; Stop 35
aagtattttcaaaagctaattggag

SEQ ID NO: 273417 - DNA, 25 bp, Artificial
  probe
  misc_feature (1)..(25): SEQ ID NO: 785; WAN024DNJ; Start 10; Stop 34
gaagtattttcaaaagctaattgga

SEQ ID NO: 273418 - DNA, 25 bp, Artificial
  probe
  misc_feature (1)..(25): SEQ ID NO: 785; WAN024DNJ; Start 22; Stop 46
aaagctaattggagtgattttattc

SEQ ID NO: 273419 - DNA, 25 bp, Artificial
  probe
  misc_feature (1)..(25): SEQ ID NO: 785; WAN024DNJ; Start 29; Stop 53
attggagtgattttattcatgatgg

SEQ ID NO: 273420 - DNA, 25 bp, Artificial
  probe
  misc_feature (1)..(25): SEQ ID NO: 785; WAN024DNJ; Start 20; Stop 44
caaaagctaattggagtgattttat

SEQ ID NO: 273421 - DNA, 25 bp, Artificial
  probe
  misc_feature (1)..(25): SEQ ID NO: 785; WAN024DNJ; Start 42; Stop 66
tattcatgatgggataaatgatctg

SEQ ID NO: 273422 - DNA, 25 bp, Artificial
  probe
  misc_feature (1)..(25): SEQ ID NO: 785; WAN024DNJ; Start 9; Stop 33
tgaagtattttcaaaagctaattgg

SEQ ID NO: 273423 - DNA, 25 bp, Artificial
  probe
  misc_feature (1)..(25): SEQ ID NO: 785; WAN024DNJ; Start 33; Stop 57
gagtgattttattcatgatgggata

SEQ ID NO: 273424 - DNA, 25 bp, Artificial
  probe
  misc_feature (1)..(25): SEQ ID NO: 785; WAN024DNJ; Start 21; Stop 45
aaaagctaattggagtgattttatt

SEQ ID NO: 273425 - DNA, 25 bp, Artificial
  probe
  misc_feature (1)..(25): SEQ ID NO: 785; WAN024DNJ; Start 41; Stop 65
ttattcatgatgggataaatgatct

SEQ ID NO: 273426 - DNA, 25 bp, Artificial
  probe
  misc_feature (1)..(25): SEQ ID NO: 785; WAN024DNJ; Start 34; Stop 58
agtgattttattcatgatgggataa

SEQ ID NO: 273427 - DNA, 25 bp, Artificial
  probe
  misc_feature (1)..(25): SEQ ID NO: 785; WAN024DNJ; Start 28; Stop 52
aattggagtgattttattcatgatg

SEQ ID NO: 273428 - DNA, 25 bp, Artificial
  probe
  misc_feature (1)..(25): SEQ ID NO: 785; WAN024DNJ; Start 40; Stop 64
tttattcatgatgggataaatgatc

SEQ ID NO: 273429 - DNA, 25 bp, Artificial
  probe
  misc_feature (1)..(25): SEQ ID NO: 785; WAN024DNJ; Start 26; Stop 50
ctaattggagtgattttattcatga

SEQ ID NO: 273430 - DNA, 25 bp, Artificial
  probe
  misc_feature (1)..(25): SEQ ID NO: 785; WAN024DNJ; Start 35; Stop 59
gtgattttattcatgatgggataaa

SEQ ID NO: 273431 - DNA, 25 bp, Artificial
  probe
  misc_feature (1)..(25): SEQ ID NO: 785; WAN024DNJ; Start 8; Stop 32
ttgaagtattttcaaaagctaattg

SEQ ID NO: 273432 - DNA, 25 bp, Artificial
  probe
  misc_feature (1)..(25): SEQ ID NO: 786; WAN024DJH; Start 1022; Stop 1046
acgaacctactattgagtgtgatac

SEQ ID NO: 273433 - DNA, 25 bp, Artificial
  probe
  misc_feature (1)..(25): SEQ ID NO: 786; WAN024DJH; Start 1023; Stop 1047
cgaacctactattgagtgtgatact

SEQ ID NO: 273434 - DNA, 25 bp, Artificial
  probe
  misc_feature (1)..(25): SEQ ID NO: 786; WAN024DJH; Start 1020; Stop 1044
ttacgaacctactattgagtgtgat

SEQ ID NO: 273435 - DNA, 25 bp, Artificial
  probe
  misc_feature (1)..(25): SEQ ID NO: 786; WAN024DJH; Start 1101; Stop 1125
cattgttgtagcgaatcgtatgaac

SEQ ID NO: 273436 - DNA, 25 bp, Artificial
  probe
  misc_feature (1)..(25): SEQ ID NO: 786; WAN024DJH; Start 1021; Stop 1045
tacgaacctactattgagtgtgata

SEQ ID NO: 273437 - DNA, 25 bp, Artificial
  probe
  misc_feature (1)..(25): SEQ ID NO: 786; WAN024DJH; Start 653; Stop 677
atgagatagatacatatagcgaggt

SEQ ID NO: 273438 - DNA, 25 bp, Artificial
  probe
  misc_feature (1)..(25): SEQ ID NO: 786; WAN024DJH; Start 1100; Stop 1124
acattgttgtagcgaatcgtatgaa

SEQ ID NO: 273439 - DNA, 25 bp, Artificial
  probe
  misc_feature (1)..(25): SEQ ID NO: 786; WAN024DJH; Start 654; Stop 678
tgagatagatacatatagcgaggta

SEQ ID NO: 273440 - DNA, 25 bp, Artificial
  probe
  misc_feature (1)..(25): SEQ ID NO: 786; WAN024DJH; Start 1099; Stop 1123
gacattgttgtagcgaatcgtatga

SEQ ID NO: 273441 - DNA, 25 bp, Artificial
  probe
  misc_feature (1)..(25): SEQ ID NO: 786; WAN024DJH; Start 1097; Stop 1121
ctgacattgttgtagcgaatcgtat

SEQ ID NO: 273442 - DNA, 25 bp, Artificial
  probe
  misc_feature (1)..(25): SEQ ID NO: 786; WAN024DJH; Start 1024; Stop 1048
gaacctactattgagtgtgatactt

SEQ ID NO: 273443 - DNA, 25 bp, Artificial
  probe
  misc_feature (1)..(25): SEQ ID NO: 786; WAN024DJH; Start 1098; Stop 1122
tgacattgttgtagcgaatcgtatg

SEQ ID NO: 273444 - DNA, 25 bp, Artificial
  probe
  misc_feature (1)..(25): SEQ ID NO: 786; WAN024DJH; Start 652; Stop 676
aatgagatagatacatatagcgagg

SEQ ID NO: 273445 - DNA, 25 bp, Artificial
  probe
  misc_feature (1)..(25): SEQ ID NO: 786; WAN024DJH; Start 477; Stop 501
tgtaggaactgatttggatgattct

SEQ ID NO: 273446 - DNA, 25 bp, Artificial
  probe
  misc_feature (1)..(25): SEQ ID NO: 786; WAN024DJH; Start 480; Stop 504
aggaactgatttggatgattctgag

SEQ ID NO: 273447 - DNA, 25 bp, Artificial
  probe
  misc_feature (1)..(25): SEQ ID NO: 786; WAN024DJH; Start 478; Stop 502
gtaggaactgatttggatgattctg

SEQ ID NO: 273448 - DNA, 25 bp, Artificial
  probe
  misc_feature (1)..(25): SEQ ID NO: 786; WAN024DJH; Start 479; Stop 503
taggaactgatttggatgattctga

SEQ ID NO: 273449 - DNA, 25 bp, Artificial
  probe
  misc_feature (1)..(25): SEQ ID NO: 786; WAN024DJH; Start 474; Stop 498
tgttgtaggaactgatttggatgat

SEQ ID NO: 273450 - DNA, 25 bp, Artificial
  probe
  misc_feature (1)..(25): SEQ ID NO: 786; WAN024DJH; Start 473; Stop 497
ttgttgtaggaactgatttggatga

SEQ ID NO: 273451 - DNA, 25 bp, Artificial
  probe
  misc_feature (1)..(25): SEQ ID NO: 786; WAN024DJH; Start 472; Stop 496
attgttgtaggaactgatttggatg

SEQ ID NO: 273452 - DNA, 25 bp, Artificial
  probe
  misc_feature (1)..(25): SEQ ID NO: 786; WAN024DJH; Start 963; Stop 987
tagtgctgttaagggagttatggaa

SEQ ID NO: 273453 - DNA, 25 bp, Artificial
  probe
  misc_feature (1)..(25): SEQ ID NO: 786; WAN024DJH; Start 960; Stop 984
ttctagtgctgttaagggagttatg

SEQ ID NO: 273454 - DNA, 25 bp, Artificial
  probe
  misc_feature (1)..(25): SEQ ID NO: 786; WAN024DJH; Start 959; Stop 983
gttctagtgctgttaagggagttat

SEQ ID NO: 273455 - DNA, 25 bp, Artificial
  probe
  misc_feature (1)..(25): SEQ ID NO: 786; WAN024DJH; Start 476; Stop 500
ttgtaggaactgatttggatgattc

SEQ ID NO: 273456 - DNA, 25 bp, Artificial
  probe
  misc_feature (1)..(25): SEQ ID NO: 786; WAN024DJH; Start 475; Stop 499
gttgtaggaactgatttggatgatt

SEQ ID NO: 273457 - DNA, 25 bp, Artificial
  probe
  misc_feature (1)..(25): SEQ ID NO: 786; WAN024DJH; Start 470; Stop 494
gaattgttgtaggaactgatttgga

SEQ ID NO: 273458 - DNA, 25 bp, Artificial
  probe
  misc_feature (1)..(25): SEQ ID NO: 786; WAN024DJH; Start 469; Stop 493
agaattgttgtaggaactgatttgg

SEQ ID NO: 273459 - DNA, 25 bp, Artificial
  probe
  misc_feature (1)..(25): SEQ ID NO: 786; WAN024DJH; Start 1096; Stop 1120
tctgacattgttgtagcgaatcgta

SEQ ID NO: 273460 - DNA, 25 bp, Artificial
  probe
  misc_feature (1)..(25): SEQ ID NO: 786; WAN024DJH; Start 1019; Stop 1043
tttacgaacctactattgagtgtga

SEQ ID NO: 273461 - DNA, 25 bp, Artificial
  probe
  misc_feature (1)..(25): SEQ ID NO: 786; WAN024DJH; Start 481; Stop 505
ggaactgatttggatgattctgagt

SEQ ID NO: 273462 - DNA, 25 bp, Artificial
  probe
  misc_feature (1)..(25): SEQ ID NO: 786; WAN024DJH; Start 471; Stop 495
aattgttgtaggaactgatttggat

SEQ ID NO: 273463 - DNA, 25 bp, Artificial
  probe
  misc_feature (1)..(25): SEQ ID NO: 786; WAN024DJH; Start 655; Stop 679
gagatagatacatatagcgaggtaa

SEQ ID NO: 273464 - DNA, 25 bp, Artificial
  probe
  misc_feature (1)..(25): SEQ ID NO: 786; WAN024DJH; Start 1093; Stop 1117
atttctgacattgttgtagcgaatc

SEQ ID NO: 273465 - DNA, 25 bp, Artificial
  probe
  misc_feature (1)..(25): SEQ ID NO: 787; WAN024DJG; Start 315; Stop 339
agagactaatcctaacgctgtaatg

SEQ ID NO: 273466 - DNA, 25 bp, Artificial
  probe
  misc_feature (1)..(25): SEQ ID NO: 787; WAN024DJG; Start 316; Stop 340
gagactaatcctaacgctgtaatgg

SEQ ID NO: 273467 - DNA, 25 bp, Artificial
  probe
  misc_feature (1)..(25): SEQ ID NO: 787; WAN024DJG; Start 351; Stop 375
tactgttcctgtaggctatactcaa

SEQ ID NO: 273468 - DNA, 25 bp, Artificial
  probe
  misc_feature (1)..(25): SEQ ID NO: 787; WAN024DJG; Start 353; Stop 377
ctgttcctgtaggctatactcaatc

SEQ ID NO: 273469 - DNA, 25 bp, Artificial
  probe
  misc_feature (1)..(25): SEQ ID NO: 787; WAN024DJG; Start 352; Stop 376
actgttcctgtaggctatactcaat

SEQ ID NO: 273470 - DNA, 25 bp, Artificial
  probe
  misc_feature (1)..(25): SEQ ID NO: 787; WAN024DJG; Start 317; Stop 341
agactaatcctaacgctgtaatggt

SEQ ID NO: 273471 - DNA, 25 bp, Artificial
  probe
  misc_feature (1)..(25): SEQ ID NO: 787; WAN024DJG; Start 314; Stop 338
tagagactaatcctaacgctgtaat

SEQ ID NO: 273472 - DNA, 25 bp, Artificial
  probe
  misc_feature (1)..(25): SEQ ID NO: 787; WAN024DJG; Start 178; Stop 202
aacttagtggcaacattggatacaa

SEQ ID NO: 273473 - DNA, 25 bp, Artificial
  probe
  misc_feature (1)..(25): SEQ ID NO: 787; WAN024DJG; Start 175; Stop 199
ctcaacttagtggcaacattggata

SEQ ID NO: 273474 - DNA, 25 bp, Artificial
  probe
  misc_feature (1)..(25): SEQ ID NO: 787; WAN024DJG; Start 350; Stop 374
gtactgttcctgtaggctatactca

SEQ ID NO: 273475 - DNA, 25 bp, Artificial
  probe
  misc_feature (1)..(25): SEQ ID NO: 787; WAN024DJG; Start 176; Stop 200
tcaacttagtggcaacattggatac

SEQ ID NO: 273476 - DNA, 25 bp, Artificial
  probe
  misc_feature (1)..(25): SEQ ID NO: 787; WAN024DJG; Start 354; Stop 378
tgttcctgtaggctatactcaatcg

SEQ ID NO: 273477 - DNA, 25 bp, Artificial
  probe
  misc_feature (1)..(25): SEQ ID NO: 787; WAN024DJG; Start 177; Stop 201
caacttagtggcaacattggataca

SEQ ID NO: 273478 - DNA, 25 bp, Artificial
  probe
  misc_feature (1)..(25): SEQ ID NO: 787; WAN024DJG; Start 313; Stop 337
ttagagactaatcctaacgctgtaa

SEQ ID NO: 273479 - DNA, 25 bp, Artificial
  probe
  misc_feature (1)..(25): SEQ ID NO: 787; WAN024DJG; Start 67; Stop 91
catgaggtggtagctgttgatatta

SEQ ID NO: 273480 - DNA, 25 bp, Artificial
  probe
  misc_feature (1)..(25): SEQ ID NO: 787; WAN024DJG; Start 69; Stop 93
tgaggtggtagctgttgatattatt

SEQ ID NO: 273481 - DNA, 25 bp, Artificial
  probe
  misc_feature (1)..(25): SEQ ID NO: 787; WAN024DJG; Start 68; Stop 92
atgaggtggtagctgttgatattat

SEQ ID NO: 273482 - DNA, 25 bp, Artificial
  probe
  misc_feature (1)..(25): SEQ ID NO: 787; WAN024DJG; Start 469; Stop 493
cgtataattgttgggcttgatatgg

SEQ ID NO: 273483 - DNA, 25 bp, Artificial
  probe
  misc_feature (1)..(25): SEQ ID NO: 787; WAN024DJG; Start 468; Stop 492
ccgtataattgttgggcttgatatg

SEQ ID NO: 273484 - DNA, 25 bp, Artificial
  probe
  misc_feature (1)..(25): SEQ ID NO: 787; WAN024DJG; Start 296; Stop 320
cagttattgaaacggtgttagagac

SEQ ID NO: 273485 - DNA, 25 bp, Artificial
  probe
  misc_feature (1)..(25): SEQ ID NO: 787; WAN024DJG; Start 823; Stop 847
ccacagaatatgataacagctatcg

SEQ ID NO: 273486 - DNA, 25 bp, Artificial
  probe
  misc_feature (1)..(25): SEQ ID NO: 787; WAN024DJG; Start 459; Stop 483
atatcctagccgtataattgttggg

SEQ ID NO: 273487 - DNA, 25 bp, Artificial
  probe
  misc_feature (1)..(25): SEQ ID NO: 787; WAN024DJG; Start 1012; Stop 1036
gttatgaaacgattgaaggcagaag

SEQ ID NO: 273488 - DNA, 25 bp, Artificial
  probe
  misc_feature (1)..(25): SEQ ID NO: 787; WAN024DJG; Start 180; Stop 204
cttagtggcaacattggatacaaat

SEQ ID NO: 273489 - DNA, 25 bp, Artificial
  probe
  misc_feature (1)..(25): SEQ ID NO: 787; WAN024DJG; Start 471; Stop 495
tataattgttgggcttgatatggac

SEQ ID NO: 273490 - DNA, 25 bp, Artificial
  probe
  misc_feature (1)..(25): SEQ ID NO: 787; WAN024DJG; Start 470; Stop 494
gtataattgttgggcttgatatgga

SEQ ID NO: 273491 - DNA, 25 bp, Artificial
  probe
  misc_feature (1)..(25): SEQ ID NO: 787; WAN024DJG; Start 1006; Stop 1030
caaggtgttatgaaacgattgaagg

SEQ ID NO: 273492 - DNA, 25 bp, Artificial
  probe
  misc_feature (1)..(25): SEQ ID NO: 787; WAN024DJG; Start 297; Stop 321
agttattgaaacggtgttagagact

SEQ ID NO: 273493 - DNA, 25 bp, Artificial
  probe
  misc_feature (1)..(25): SEQ ID NO: 787; WAN024DJG; Start 1013; Stop 1037
ttatgaaacgattgaaggcagaagg

SEQ ID NO: 273494 - DNA, 25 bp, Artificial
  probe
  misc_feature (1)..(25): SEQ ID NO: 787; WAN024DJG; Start 472; Stop 496
ataattgttgggcttgatatggacg

SEQ ID NO: 273495 - DNA, 25 bp, Artificial
  probe
  misc_feature (1)..(25): SEQ ID NO: 787; WAN024DJG; Start 179; Stop 203
acttagtggcaacattggatacaaa

SEQ ID NO: 273496 - DNA, 25 bp, Artificial
  probe
  misc_feature (1)..(25): SEQ ID NO: 787; WAN024DJG; Start 1011; Stop 1035
tgttatgaaacgattgaaggcagaa

SEQ ID NO: 273497 - DNA, 25 bp, Artificial
  probe
  misc_feature (1)..(25): SEQ ID NO: 787; WAN024DJG; Start 824; Stop 848
cacagaatatgataacagctatcgt

SEQ ID NO: 273498 - DNA, 25 bp, Artificial
  probe
  misc_feature (1)..(25): SEQ ID NO: 788; WAN024CU5; Start 455; Stop 479
aagaatatggattggaactgattgc

SEQ ID NO: 273499 - DNA, 25 bp, Artificial
  probe
  misc_feature (1)..(25): SEQ ID NO: 788; WAN024CU5; Start 451; Stop 475
gctgaagaatatggattggaactga

SEQ ID NO: 273500 - DNA, 25 bp, Artificial
  probe
  misc_feature (1)..(25): SEQ ID NO: 788; WAN024CU5; Start 449; Stop 473
ctgctgaagaatatggattggaact

SEQ ID NO: 273501 - DNA, 25 bp, Artificial
  probe
  misc_feature (1)..(25): SEQ ID NO: 788; WAN024CU5; Start 720; Stop 744
tgtggattataccgataaggacttg

SEQ ID NO: 273502 - DNA, 25 bp, Artificial
  probe
  misc_feature (1)..(25): SEQ ID NO: 788; WAN024CU5; Start 456; Stop 480
agaatatggattggaactgattgcc

SEQ ID NO: 273503 - DNA, 25 bp, Artificial
  probe
  misc_feature (1)..(25): SEQ ID NO: 788; WAN024CU5; Start 450; Stop 474
tgctgaagaatatggattggaactg

SEQ ID NO: 273504 - DNA, 25 bp, Artificial
  probe
  misc_feature (1)..(25): SEQ ID NO: 788; WAN024CU5; Start 721; Stop 745
gtggattataccgataaggacttgg

SEQ ID NO: 273505 - DNA, 25 bp, Artificial
  probe
  misc_feature (1)..(25): SEQ ID NO: 788; WAN024CU5; Start 718; Stop 742
gatgtggattataccgataaggact

SEQ ID NO: 273506 - DNA, 25 bp, Artificial
  probe
  misc_feature (1)..(25): SEQ ID NO: 788; WAN024CU5; Start 717; Stop 741
cgatgtggattataccgataaggac

SEQ ID NO: 273507 - DNA, 25 bp, Artificial
  probe
  misc_feature (1)..(25): SEQ ID NO: 788; WAN024CU5; Start 448; Stop 472
tctgctgaagaatatggattggaac

SEQ ID NO: 273508 - DNA, 25 bp, Artificial
  probe
  misc_feature (1)..(25): SEQ ID NO: 788; WAN024CU5; Start 719; Stop 743
atgtggattataccgataaggactt

SEQ ID NO: 273509 - DNA, 25 bp, Artificial
  probe
  misc_feature (1)..(25): SEQ ID NO: 788; WAN024CU5; Start 452; Stop 476
ctgaagaatatggattggaactgat

SEQ ID NO: 273510 - DNA, 25 bp, Artificial
  probe
  misc_feature (1)..(25): SEQ ID NO: 788; WAN024CU5; Start 453; Stop 477
tgaagaatatggattggaactgatt

SEQ ID NO: 273511 - DNA, 25 bp, Artificial
  probe
  misc_feature (1)..(25): SEQ ID NO: 788; WAN024CU5; Start 454; Stop 478
gaagaatatggattggaactgattg

SEQ ID NO: 273512 - DNA, 25 bp, Artificial
  probe
  misc_feature (1)..(25): SEQ ID NO: 788; WAN024CU5; Start 94; Stop 118
attacagatgtcatcaaggcttatg

SEQ ID NO: 273513 - DNA, 25 bp, Artificial
  probe
  misc_feature (1)..(25): SEQ ID NO: 788; WAN024CU5; Start 93; Stop 117
cattacagatgtcatcaaggcttat

SEQ ID NO: 273514 - DNA, 25 bp, Artificial
  probe
  misc_feature (1)..(25): SEQ ID NO: 788; WAN024CU5; Start 465; Stop 489
attggaactgattgccgaggatatt

SEQ ID NO: 273515 - DNA, 25 bp, Artificial
  probe
  misc_feature (1)..(25): SEQ ID NO: 788; WAN024CU5; Start 457; Stop 481
gaatatggattggaactgattgccg

SEQ ID NO: 273516 - DNA, 25 bp, Artificial
  probe
  misc_feature (1)..(25): SEQ ID NO: 788; WAN024CU5; Start 723; Stop 747
ggattataccgataaggacttggtc

SEQ ID NO: 273517 - DNA, 25 bp, Artificial
  probe
  misc_feature (1)..(25): SEQ ID NO: 788; WAN024CU5; Start 458; Stop 482
aatatggattggaactgattgccga

SEQ ID NO: 273518 - DNA, 25 bp, Artificial
  probe
  misc_feature (1)..(25): SEQ ID NO: 788; WAN024CU5; Start 464; Stop 488
gattggaactgattgccgaggatat

SEQ ID NO: 273519 - DNA, 25 bp, Artificial
  probe
  misc_feature (1)..(25): SEQ ID NO: 788; WAN024CU5; Start 722; Stop 746
tggattataccgataaggacttggt

SEQ ID NO: 273520 - DNA, 25 bp, Artificial
  probe
  misc_feature (1)..(25): SEQ ID NO: 788; WAN024CU5; Start 585; Stop 609
cttgacattacctgacaaccttcca

SEQ ID NO: 273521 - DNA, 25 bp, Artificial
  probe
  misc_feature (1)..(25): SEQ ID NO: 788; WAN024CU5; Start 459; Stop 483
atatggattggaactgattgccgag

SEQ ID NO: 273522 - DNA, 25 bp, Artificial
  probe
  misc_feature (1)..(25): SEQ ID NO: 788; WAN024CU5; Start 466; Stop 490
ttggaactgattgccgaggatattc

SEQ ID NO: 273523 - DNA, 25 bp, Artificial
  probe
  misc_feature (1)..(25): SEQ ID NO: 788; WAN024CU5; Start 798; Stop 822
gggtgcctatcctatttatccaata

SEQ ID NO: 273524 - DNA, 25 bp, Artificial
  probe
  misc_feature (1)..(25): SEQ ID NO: 788; WAN024CU5; Start 228; Stop 252
agaaatcgttcagcctattcatcag

SEQ ID NO: 273525 - DNA, 25 bp, Artificial
  probe
  misc_feature (1)..(25): SEQ ID NO: 788; WAN024CU5; Start 760; Stop 784
aaagaattagaagcgattggaatcc

SEQ ID NO: 273526 - DNA, 25 bp, Artificial
  probe
  misc_feature (1)..(25): SEQ ID NO: 788; WAN024CU5; Start 336; Stop 360
cgatgaacaatatccagaggctcaa

SEQ ID NO: 273527 - DNA, 25 bp, Artificial
  probe
  misc_feature (1)..(25): SEQ ID NO: 788; WAN024CU5; Start 437; Stop 461
cacctagaagttctgctgaagaata

SEQ ID NO: 273528 - DNA, 25 bp, Artificial
  probe
  misc_feature (1)..(25): SEQ ID NO: 788; WAN024CU5; Start 447; Stop 471
ttctgctgaagaatatggattggaa

SEQ ID NO: 273529 - DNA, 25 bp, Artificial
  probe
  misc_feature (1)..(25): SEQ ID NO: 788; WAN024CU5; Start 442; Stop 466
agaagttctgctgaagaatatggat

SEQ ID NO: 273530 - DNA, 25 bp, Artificial
  probe
  misc_feature (1)..(25): SEQ ID NO: 788; WAN024CU5; Start 227; Stop 251
cagaaatcgttcagcctattcatca

SEQ ID NO: 273531 - DNA, 25 bp, Artificial
  probe
  misc_feature (1)..(25): SEQ ID NO: 789; WAN024C5V; Start 107; Stop 131
aaggaatgtcagcagatgaactcaa

SEQ ID NO: 273532 - DNA, 25 bp, Artificial
  probe
  misc_feature (1)..(25): SEQ ID NO: 789; WAN024C5V; Start 328; Stop 352
gttgttaataaatcagtagtggcgg

SEQ ID NO: 273533 - DNA, 25 bp, Artificial
  probe
  misc_feature (1)..(25): SEQ ID NO: 789; WAN024C5V; Start 360; Stop 384
cggagtcgtaaatggtaaagaattg

SEQ ID NO: 273534 - DNA, 25 bp, Artificial
  probe
  misc_feature (1)..(25): SEQ ID NO: 789; WAN024C5V; Start 361; Stop 385
ggagtcgtaaatggtaaagaattgt

SEQ ID NO: 273535 - DNA, 25 bp, Artificial
  probe
  misc_feature (1)..(25): SEQ ID NO: 789; WAN024C5V; Start 108; Stop 132
aggaatgtcagcagatgaactcaag

SEQ ID NO: 273536 - DNA, 25 bp, Artificial
  probe
  misc_feature (1)..(25): SEQ ID NO: 789; WAN024C5V; Start 106; Stop 130
gaaggaatgtcagcagatgaactca

SEQ ID NO: 273537 - DNA, 25 bp, Artificial
  probe
  misc_feature (1)..(25): SEQ ID NO: 789; WAN024C5V; Start 329; Stop 353
ttgttaataaatcagtagtggcggc

SEQ ID NO: 273538 - DNA, 25 bp, Artificial
  probe
  misc_feature (1)..(25): SEQ ID NO: 789; WAN024C5V; Start 359; Stop 383
gcggagtcgtaaatggtaaagaatt

SEQ ID NO: 273539 - DNA, 25 bp, Artificial
  probe
  misc_feature (1)..(25): SEQ ID NO: 789; WAN024C5V; Start 394; Stop 418
gatgcagaggaagaggaagaagatt

SEQ ID NO: 273540 - DNA, 25 bp, Artificial
  probe
  misc_feature (1)..(25): SEQ ID NO: 789; WAN024C5V; Start 293; Stop 317
cagtctttgctagaatggctcatag

SEQ ID NO: 273541 - DNA, 25 bp, Artificial
  probe
  misc_feature (1)..(25): SEQ ID NO: 789; WAN024C5V; Start 32; Stop 56
ttgctacagggatttatagttcttt

SEQ ID NO: 273542 - DNA, 25 bp, Artificial
  probe
  misc_feature (1)..(25): SEQ ID NO: 789; WAN024C5V; Start 31; Stop 55
tttgctacagggatttatagttctt

SEQ ID NO: 273543 - DNA, 25 bp, Artificial
  probe
  misc_feature (1)..(25): SEQ ID NO: 789; WAN024C5V; Start 111; Stop 135
aatgtcagcagatgaactcaagcaa

SEQ ID NO: 273544 - DNA, 25 bp, Artificial
  probe
  misc_feature (1)..(25): SEQ ID NO: 789; WAN024C5V; Start 264; Stop 288
gggtttgaacttagccatgttaatg

SEQ ID NO: 273545 - DNA, 25 bp, Artificial
  probe
  misc_feature (1)..(25): SEQ ID NO: 789; WAN024C5V; Start 362; Stop 386
gagtcgtaaatggtaaagaattgtt

SEQ ID NO: 273546 - DNA, 25 bp, Artificial
  probe
  misc_feature (1)..(25): SEQ ID NO: 789; WAN024C5V; Start 105; Stop 129
ggaaggaatgtcagcagatgaactc

SEQ ID NO: 273547 - DNA, 25 bp, Artificial
  probe
  misc_feature (1)..(25): SEQ ID NO: 789; WAN024C5V; Start 110; Stop 134
gaatgtcagcagatgaactcaagca

SEQ ID NO: 273548 - DNA, 25 bp, Artificial
  probe
  misc_feature (1)..(25): SEQ ID NO: 789; WAN024C5V; Start 363; Stop 387
agtcgtaaatggtaaagaattgttt

SEQ ID NO: 273549 - DNA, 25 bp, Artificial
  probe
  misc_feature (1)..(25): SEQ ID NO: 789; WAN024C5V; Start 201; Stop 225
gccattcaaggtttcttctaccata

SEQ ID NO: 273550 - DNA, 25 bp, Artificial
  probe
  misc_feature (1)..(25): SEQ ID NO: 789; WAN024C5V; Start 263; Stop 287
cgggtttgaacttagccatgttaat

SEQ ID NO: 273551 - DNA, 25 bp, Artificial
  probe
  misc_feature (1)..(25): SEQ ID NO: 789; WAN024C5V; Start 172; Stop 196
ttaatcctaagtgatctcttgggag

SEQ ID NO: 273552 - DNA, 25 bp, Artificial
  probe
  misc_feature (1)..(25): SEQ ID NO: 789; WAN024C5V; Start 173; Stop 197
taatcctaagtgatctcttgggagg

SEQ ID NO: 273553 - DNA, 25 bp, Artificial
  probe
  misc_feature (1)..(25): SEQ ID NO: 789; WAN024C5V; Start 33; Stop 57
tgctacagggatttatagttcttta

SEQ ID NO: 273554 - DNA, 25 bp, Artificial
  probe
  misc_feature (1)..(25): SEQ ID NO: 789; WAN024C5V; Start 202; Stop 226
ccattcaaggtttcttctaccataa

SEQ ID NO: 273555 - DNA, 25 bp, Artificial
  probe
  misc_feature (1)..(25): SEQ ID NO: 789; WAN024C5V; Start 171; Stop 195
tttaatcctaagtgatctcttggga

SEQ ID NO: 273556 - DNA, 25 bp, Artificial
  probe
  misc_feature (1)..(25): SEQ ID NO: 789; WAN024C5V; Start 103; Stop 127
gtggaaggaatgtcagcagatgaac

SEQ ID NO: 273557 - DNA, 25 bp, Artificial
  probe
  misc_feature (1)..(25): SEQ ID NO: 789; WAN024C5V; Start 34; Stop 58
gctacagggatttatagttctttac

SEQ ID NO: 273558 - DNA, 25 bp, Artificial
  probe
  misc_feature (1)..(25): SEQ ID NO: 789; WAN024C5V; Start 208; Stop 232
aaggtttcttctaccataatgggag

SEQ ID NO: 273559 - DNA, 25 bp, Artificial
  probe
  misc_feature (1)..(25): SEQ ID NO: 789; WAN024C5V; Start 148; Stop 172
gcaatttcaaatgaagaagaagttt

SEQ ID NO: 273560 - DNA, 25 bp, Artificial
  probe
  misc_feature (1)..(25): SEQ ID NO: 789; WAN024C5V; Start 207; Stop 231
caaggtttcttctaccataatggga

SEQ ID NO: 273561 - DNA, 25 bp, Artificial
  probe
  misc_feature (1)..(25): SEQ ID NO: 789; WAN024C5V; Start 206; Stop 230
tcaaggtttcttctaccataatggg

SEQ ID NO: 273562 - DNA, 25 bp, Artificial
  probe
  misc_feature (1)..(25): SEQ ID NO: 789; WAN024C5V; Start 358; Stop 382
ggcggagtcgtaaatggtaaagaat

SEQ ID NO: 273563 - DNA, 25 bp, Artificial
  probe
  misc_feature (1)..(25): SEQ ID NO: 789; WAN024C5V; Start 104; Stop 128
tggaaggaatgtcagcagatgaact

SEQ ID NO: 273564 - DNA, 25 bp, Artificial
  probe
  misc_feature (1)..(25): SEQ ID NO: 790; WAN024D8Z; Start 50; Stop 74
atctgccaggtattgacattctatt

SEQ ID NO: 273565 - DNA, 25 bp, Artificial
  probe
  misc_feature (1)..(25): SEQ ID NO: 790; WAN024D8Z; Start 48; Stop 72
ttatctgccaggtattgacattcta

SEQ ID NO: 273566 - DNA, 25 bp, Artificial
  probe
  misc_feature (1)..(25): SEQ ID NO: 790; WAN024D8Z; Start 49; Stop 73
tatctgccaggtattgacattctat

SEQ ID NO: 273567 - DNA, 25 bp, Artificial
  probe
  misc_feature (1)..(25): SEQ ID NO: 790; WAN024D8Z; Start 90; Stop 114
agatgccaaggataaagaagatgta

SEQ ID NO: 273568 - DNA, 25 bp, Artificial
  probe
  misc_feature (1)..(25): SEQ ID NO: 790; WAN024D8Z; Start 89; Stop 113
cagatgccaaggataaagaagatgt

SEQ ID NO: 273569 - DNA, 25 bp, Artificial
  probe
  misc_feature (1)..(25): SEQ ID NO: 790; WAN024D8Z; Start 52; Stop 76
ctgccaggtattgacattctatttg

SEQ ID NO: 273570 - DNA, 25 bp, Artificial
  probe
  misc_feature (1)..(25): SEQ ID NO: 790; WAN024D8Z; Start 51; Stop 75
tctgccaggtattgacattctattt

SEQ ID NO: 273571 - DNA, 25 bp, Artificial
  probe
  misc_feature (1)..(25): SEQ ID NO: 790; WAN024D8Z; Start 47; Stop 71
tttatctgccaggtattgacattct

SEQ ID NO: 273572 - DNA, 25 bp, Artificial
  probe
  misc_feature (1)..(25): SEQ ID NO: 790; WAN024D8Z; Start 91; Stop 115
gatgccaaggataaagaagatgtaa

SEQ ID NO: 273573 - DNA, 25 bp, Artificial
  probe
  misc_feature (1)..(25): SEQ ID NO: 790; WAN024D8Z; Start 17; Stop 41
tcaaaccaactaaacaaatagacga

SEQ ID NO: 273574 - DNA, 25 bp, Artificial
  probe
  misc_feature (1)..(25): SEQ ID NO: 790; WAN024D8Z; Start 23; Stop 47
caactaaacaaatagacgatgggtt

SEQ ID NO: 273575 - DNA, 25 bp, Artificial
  probe
  misc_feature (1)..(25): SEQ ID NO: 790; WAN024D8Z; Start 126; Stop 150
ttcaagaaatgggttaaacaagtct

SEQ ID NO: 273576 - DNA, 25 bp, Artificial
  probe
  misc_feature (1)..(25): SEQ ID NO: 790; WAN024D8Z; Start 92; Stop 116
atgccaaggataaagaagatgtaat

SEQ ID NO: 273577 - DNA, 25 bp, Artificial
  probe
  misc_feature (1)..(25): SEQ ID NO: 790; WAN024D8Z; Start 16; Stop 40
ttcaaaccaactaaacaaatagacg

SEQ ID NO: 273578 - DNA, 25 bp, Artificial
  probe
  misc_feature (1)..(25): SEQ ID NO: 790; WAN024D8Z; Start 93; Stop 117
tgccaaggataaagaagatgtaatt

SEQ ID NO: 273579 - DNA, 25 bp, Artificial
  probe
  misc_feature (1)..(25): SEQ ID NO: 790; WAN024D8Z; Start 19; Stop 43
aaaccaactaaacaaatagacgatg

SEQ ID NO: 273580 - DNA, 25 bp, Artificial
  probe
  misc_feature (1)..(25): SEQ ID NO: 790; WAN024D8Z; Start 18; Stop 42
caaaccaactaaacaaatagacgat

SEQ ID NO: 273581 - DNA, 25 bp, Artificial
  probe
  misc_feature (1)..(25): SEQ ID NO: 790; WAN024D8Z; Start 53; Stop 77
tgccaggtattgacattctatttgt

SEQ ID NO: 273582 - DNA, 25 bp, Artificial
  probe
  misc_feature (1)..(25): SEQ ID NO: 790; WAN024D8Z; Start 125; Stop 149
tttcaagaaatgggttaaacaagtc

SEQ ID NO: 273583 - DNA, 25 bp, Artificial
  probe
  misc_feature (1)..(25): SEQ ID NO: 790; WAN024D8Z; Start 85; Stop 109
aaagcagatgccaaggataaagaag

SEQ ID NO: 273584 - DNA, 25 bp, Artificial
  probe
  misc_feature (1)..(25): SEQ ID NO: 790; WAN024D8Z; Start 124; Stop 148
ctttcaagaaatgggttaaacaagt

SEQ ID NO: 273585 - DNA, 25 bp, Artificial
  probe
  misc_feature (1)..(25): SEQ ID NO: 790; WAN024D8Z; Start 84; Stop 108
caaagcagatgccaaggataaagaa

SEQ ID NO: 273586 - DNA, 25 bp, Artificial
  probe
  misc_feature (1)..(25): SEQ ID NO: 790; WAN024D8Z; Start 123; Stop 147
tctttcaagaaatgggttaaacaag

SEQ ID NO: 273587 - DNA, 25 bp, Artificial
  probe
  misc_feature (1)..(25): SEQ ID NO: 790; WAN024D8Z; Start 94; Stop 118
gccaaggataaagaagatgtaattt

SEQ ID NO: 273588 - DNA, 25 bp, Artificial
  probe
  misc_feature (1)..(25): SEQ ID NO: 790; WAN024D8Z; Start 88; Stop 112
gcagatgccaaggataaagaagatg

SEQ ID NO: 273589 - DNA, 25 bp, Artificial
  probe
  misc_feature (1)..(25): SEQ ID NO: 790; WAN024D8Z; Start 87; Stop 111
agcagatgccaaggataaagaagat

SEQ ID NO: 273590 - DNA, 25 bp, Artificial
  probe
  misc_feature (1)..(25): SEQ ID NO: 790; WAN024D8Z; Start 20; Stop 44
aaccaactaaacaaatagacgatgg

SEQ ID NO: 273591 - DNA, 25 bp, Artificial
  probe
  misc_feature (1)..(25): SEQ ID NO: 790; WAN024D8Z; Start 86; Stop 110
aagcagatgccaaggataaagaaga

SEQ ID NO: 273592 - DNA, 25 bp, Artificial
  probe
  misc_feature (1)..(25): SEQ ID NO: 790; WAN024D8Z; Start 22; Stop 46
ccaactaaacaaatagacgatgggt

SEQ ID NO: 273593 - DNA, 25 bp, Artificial
  probe
  misc_feature (1)..(25): SEQ ID NO: 790; WAN024D8Z; Start 21; Stop 45
accaactaaacaaatagacgatggg

SEQ ID NO: 273594 - DNA, 25 bp, Artificial
  probe
  misc_feature (1)..(25): SEQ ID NO: 790; WAN024D8Z; Start 82; Stop 106
gacaaagcagatgccaaggataaag

SEQ ID NO: 273595 - DNA, 25 bp, Artificial
  probe
  misc_feature (1)..(25): SEQ ID NO: 790; WAN024D8Z; Start 83; Stop 107
acaaagcagatgccaaggataaaga

SEQ ID NO: 273596 - DNA, 25 bp, Artificial
  probe
  misc_feature (1)..(25): SEQ ID NO: 790; WAN024D8Z; Start 81; Stop 105
agacaaagcagatgccaaggataaa

SEQ ID NO: 273597 - DNA, 25 bp, Artificial
  probe
  misc_feature (1)..(25): SEQ ID NO: 791; WAN024DQB; Start 80; Stop 104
aaatcatgtttcagtggctaactaa

SEQ ID NO: 273598 - DNA, 25 bp, Artificial
  probe
  misc_feature (1)..(25): SEQ ID NO: 791; WAN024DQB; Start 81; Stop 105
aatcatgtttcagtggctaactaat

SEQ ID NO: 273599 - DNA, 25 bp, Artificial
  probe
  misc_feature (1)..(25): SEQ ID NO: 791; WAN024DQB; Start 79; Stop 103
aaaatcatgtttcagtggctaacta

SEQ ID NO: 273600 - DNA, 25 bp, Artificial
  probe
  misc_feature (1)..(25): SEQ ID NO: 791; WAN024DQB; Start 78; Stop 102
taaaatcatgtttcagtggctaact

SEQ ID NO: 273601 - DNA, 25 bp, Artificial
  probe
  misc_feature (1)..(25): SEQ ID NO: 791; WAN024DQB; Start 77; Stop 101
ttaaaatcatgtttcagtggctaac

SEQ ID NO: 273602 - DNA, 25 bp, Artificial
  probe
  misc_feature (1)..(25): SEQ ID NO: 791; WAN024DQB; Start 76; Stop 100
tttaaaatcatgtttcagtggctaa

SEQ ID NO: 273603 - DNA, 25 bp, Artificial
  probe
  misc_feature (1)..(25): SEQ ID NO: 791; WAN024DQB; Start 75; Stop 99
ttttaaaatcatgtttcagtggcta

SEQ ID NO: 273604 - DNA, 25 bp, Artificial
  probe
  misc_feature (1)..(25): SEQ ID NO: 792; WAN024FN4; Start 146; Stop 170
aaggattatatggacaggattcacg

SEQ ID NO: 273605 - DNA, 25 bp, Artificial
  probe
  misc_feature (1)..(25): SEQ ID NO: 792; WAN024FN4; Start 144; Stop 168
acaaggattatatggacaggattca

SEQ ID NO: 273606 - DNA, 25 bp, Artificial
  probe
  misc_feature (1)..(25): SEQ ID NO: 792; WAN024FN4; Start 145; Stop 169
caaggattatatggacaggattcac

SEQ ID NO: 273607 - DNA, 25 bp, Artificial
  probe
  misc_feature (1)..(25): SEQ ID NO: 792; WAN024FN4; Start 140; Stop 164
agttacaaggattatatggacagga

SEQ ID NO: 273608 - DNA, 25 bp, Artificial
  probe
  misc_feature (1)..(25): SEQ ID NO: 792; WAN024FN4; Start 365; Stop 389
ttgatggagaagtagttgtaggtac

SEQ ID NO: 273609 - DNA, 25 bp, Artificial
  probe
  misc_feature (1)..(25): SEQ ID NO: 792; WAN024FN4; Start 139; Stop 163
aagttacaaggattatatggacagg

SEQ ID NO: 273610 - DNA, 25 bp, Artificial
  probe
  misc_feature (1)..(25): SEQ ID NO: 792; WAN024FN4; Start 141; Stop 165
gttacaaggattatatggacaggat

SEQ ID NO: 273611 - DNA, 25 bp, Artificial
  probe
  misc_feature (1)..(25): SEQ ID NO: 792; WAN024FN4; Start 227; Stop 251
gcattgaagcaagtagtggagaatt

SEQ ID NO: 273612 - DNA, 25 bp, Artificial
  probe
  misc_feature (1)..(25): SEQ ID NO: 792; WAN024FN4; Start 367; Stop 391
gatggagaagtagttgtaggtacac

SEQ ID NO: 273613 - DNA, 25 bp, Artificial
  probe
  misc_feature (1)..(25): SEQ ID NO: 792; WAN024FN4; Start 366; Stop 390
tgatggagaagtagttgtaggtaca

SEQ ID NO: 273614 - DNA, 25 bp, Artificial
  probe
  misc_feature (1)..(25): SEQ ID NO: 792; WAN024FN4; Start 143; Stop 167
tacaaggattatatggacaggattc

SEQ ID NO: 273615 - DNA, 25 bp, Artificial
  probe
  misc_feature (1)..(25): SEQ ID NO: 792; WAN024FN4; Start 251; Stop 275
ttattgctagaatggatgatgatga

SEQ ID NO: 273616 - DNA, 25 bp, Artificial
  probe
  misc_feature (1)..(25): SEQ ID NO: 792; WAN024FN4; Start 372; Stop 396
agaagtagttgtaggtacacggatt

SEQ ID NO: 273617 - DNA, 25 bp, Artificial
  probe
  misc_feature (1)..(25): SEQ ID NO: 792; WAN024FN4; Start 255; Stop 279
tgctagaatggatgatgatgatatt

SEQ ID NO: 273618 - DNA, 25 bp, Artificial
  probe
  misc_feature (1)..(25): SEQ ID NO: 792; WAN024FN4; Start 254; Stop 278
ttgctagaatggatgatgatgatat

SEQ ID NO: 273619 - DNA, 25 bp, Artificial
  probe
  misc_feature (1)..(25): SEQ ID NO: 792; WAN024FN4; Start 253; Stop 277
attgctagaatggatgatgatgata

SEQ ID NO: 273620 - DNA, 25 bp, Artificial
  probe
  misc_feature (1)..(25): SEQ ID NO: 792; WAN024FN4; Start 252; Stop 276
tattgctagaatggatgatgatgat

SEQ ID NO: 273621 - DNA, 25 bp, Artificial
  probe
  misc_feature (1)..(25): SEQ ID NO: 792; WAN024FN4; Start 371; Stop 395
gagaagtagttgtaggtacacggat

SEQ ID NO: 273622 - DNA, 25 bp, Artificial
  probe
  misc_feature (1)..(25): SEQ ID NO: 792; WAN024FN4; Start 731; Stop 755
tagtagctcatctagtaacactcgt

SEQ ID NO: 273623 - DNA, 25 bp, Artificial
  probe
  misc_feature (1)..(25): SEQ ID NO: 792; WAN024FN4; Start 148; Stop 172
ggattatatggacaggattcacgtt

SEQ ID NO: 273624 - DNA, 25 bp, Artificial
  probe
  misc_feature (1)..(25): SEQ ID NO: 792; WAN024FN4; Start 368; Stop 392
atggagaagtagttgtaggtacacg

SEQ ID NO: 273625 - DNA, 25 bp, Artificial
  probe
  misc_feature (1)..(25): SEQ ID NO: 792; WAN024FN4; Start 310; Stop 334
gactatttgttccatcatccagaga

SEQ ID NO: 273626 - DNA, 25 bp, Artificial
  probe
  misc_feature (1)..(25): SEQ ID NO: 792; WAN024FN4; Start 142; Stop 166
ttacaaggattatatggacaggatt

SEQ ID NO: 273627 - DNA, 25 bp, Artificial
  probe
  misc_feature (1)..(25): SEQ ID NO: 792; WAN024FN4; Start 726; Stop 750
accattagtagctcatctagtaaca

SEQ ID NO: 273628 - DNA, 25 bp, Artificial
  probe
  misc_feature (1)..(25): SEQ ID NO: 792; WAN024FN4; Start 732; Stop 756
agtagctcatctagtaacactcgtt

SEQ ID NO: 273629 - DNA, 25 bp, Artificial
  probe
  misc_feature (1)..(25): SEQ ID NO: 792; WAN024FN4; Start 730; Stop 754
ttagtagctcatctagtaacactcg

SEQ ID NO: 273630 - DNA, 25 bp, Artificial
  probe
  misc_feature (1)..(25): SEQ ID NO: 792; WAN024FN4; Start 311; Stop 335
actatttgttccatcatccagagat

SEQ ID NO: 273631 - DNA, 25 bp, Artificial
  probe
  misc_feature (1)..(25): SEQ ID NO: 792; WAN024FN4; Start 727; Stop 751
ccattagtagctcatctagtaacac

SEQ ID NO: 273632 - DNA, 25 bp, Artificial
  probe
  misc_feature (1)..(25): SEQ ID NO: 792; WAN024FN4; Start 147; Stop 171
aggattatatggacaggattcacgt

SEQ ID NO: 273633 - DNA, 25 bp, Artificial
  probe
  misc_feature (1)..(25): SEQ ID NO: 792; WAN024FN4; Start 364; Stop 388
tttgatggagaagtagttgtaggta

SEQ ID NO: 273634 - DNA, 25 bp, Artificial
  probe
  misc_feature (1)..(25): SEQ ID NO: 792; WAN024FN4; Start 313; Stop 337
tatttgttccatcatccagagattg

SEQ ID NO: 273635 - DNA, 25 bp, Artificial
  probe
  misc_feature (1)..(25): SEQ ID NO: 792; WAN024FN4; Start 662; Stop 686
ttattcgctataaaggttatcgtgc

SEQ ID NO: 273636 - DNA, 25 bp, Artificial
  probe
  misc_feature (1)..(25): SEQ ID NO: 792; WAN024FN4; Start 309; Stop 333
cgactatttgttccatcatccagag

SEQ ID NO: 273637 - DNA, 25 bp, Artificial
  probe
  misc_feature (1)..(25): SEQ ID NO: 793; WAN024FPF; Start 1073; Stop 1097
aatgctcttcggttattacttctaa

SEQ ID NO: 273638 - DNA, 25 bp, Artificial
  probe
  misc_feature (1)..(25): SEQ ID NO: 793; WAN024FPF; Start 1074; Stop 1098
atgctcttcggttattacttctaat

SEQ ID NO: 273639 - DNA, 25 bp, Artificial
  probe
  misc_feature (1)..(25): SEQ ID NO: 793; WAN024FPF; Start 513; Stop 537
tccgatacagactgtctataatggt

SEQ ID NO: 273640 - DNA, 25 bp, Artificial
  probe
  misc_feature (1)..(25): SEQ ID NO: 793; WAN024FPF; Start 509; Stop 533
gtgttccgatacagactgtctataa

SEQ ID NO: 273641 - DNA, 25 bp, Artificial
  probe
  misc_feature (1)..(25): SEQ ID NO: 793; WAN024FPF; Start 512; Stop 536
ttccgatacagactgtctataatgg

SEQ ID NO: 273642 - DNA, 25 bp, Artificial
  probe
  misc_feature (1)..(25): SEQ ID NO: 793; WAN024FPF; Start 1002; Stop 1026
tgtggtagcaaatgatgagtgtata

SEQ ID NO: 273643 - DNA, 25 bp, Artificial
  probe
  misc_feature (1)..(25): SEQ ID NO: 793; WAN024FPF; Start 274; Stop 298
gtagggaacgcttatatcagtcaat

SEQ ID NO: 273644 - DNA, 25 bp, Artificial
  probe
  misc_feature (1)..(25): SEQ ID NO: 793; WAN024FPF; Start 1004; Stop 1028
tggtagcaaatgatgagtgtatagt

SEQ ID NO: 273645 - DNA, 25 bp, Artificial
  probe
  misc_feature (1)..(25): SEQ ID NO: 793; WAN024FPF; Start 423; Stop 447
tgagtattctgtagattatagcgtt

SEQ ID NO: 273646 - DNA, 25 bp, Artificial
  probe
  misc_feature (1)..(25): SEQ ID NO: 793; WAN024FPF; Start 724; Stop 748
gctgttggtagttctatatttggtc

SEQ ID NO: 273647 - DNA, 25 bp, Artificial
  probe
  misc_feature (1)..(25): SEQ ID NO: 793; WAN024FPF; Start 514; Stop 538
ccgatacagactgtctataatggta

SEQ ID NO: 273648 - DNA, 25 bp, Artificial
  probe
  misc_feature (1)..(25): SEQ ID NO: 793; WAN024FPF; Start 1003; Stop 1027
gtggtagcaaatgatgagtgtatag

SEQ ID NO: 273649 - DNA, 25 bp, Artificial
  probe
  misc_feature (1)..(25): SEQ ID NO: 793; WAN024FPF; Start 510; Stop 534
tgttccgatacagactgtctataat

SEQ ID NO: 273650 - DNA, 25 bp, Artificial
  probe
  misc_feature (1)..(25): SEQ ID NO: 793; WAN024FPF; Start 508; Stop 532
ggtgttccgatacagactgtctata

SEQ ID NO: 273651 - DNA, 25 bp, Artificial
  probe
  misc_feature (1)..(25): SEQ ID NO: 793; WAN024FPF; Start 1070; Stop 1094
ggaaatgctcttcggttattacttc

SEQ ID NO: 273652 - DNA, 25 bp, Artificial
  probe
  misc_feature (1)..(25): SEQ ID NO: 793; WAN024FPF; Start 275; Stop 299
tagggaacgcttatatcagtcaatt

SEQ ID NO: 273653 - DNA, 25 bp, Artificial
  probe
  misc_feature (1)..(25): SEQ ID NO: 793; WAN024FPF; Start 511; Stop 535
gttccgatacagactgtctataatg

SEQ ID NO: 273654 - DNA, 25 bp, Artificial
  probe
  misc_feature (1)..(25): SEQ ID NO: 793; WAN024FPF; Start 1066; Stop 1090
aaagggaaatgctcttcggttatta

SEQ ID NO: 273655 - DNA, 25 bp, Artificial
  probe
  misc_feature (1)..(25): SEQ ID NO: 793; WAN024FPF; Start 339; Stop 363
tcgccctgaatacggttattatatt

SEQ ID NO: 273656 - DNA, 25 bp, Artificial
  probe
  misc_feature (1)..(25): SEQ ID NO: 793; WAN024FPF; Start 337; Stop 361
aatcgccctgaatacggttattata

SEQ ID NO: 273657 - DNA, 25 bp, Artificial
  probe
  misc_feature (1)..(25): SEQ ID NO: 793; WAN024FPF; Start 422; Stop 446
atgagtattctgtagattatagcgt

SEQ ID NO: 273658 - DNA, 25 bp, Artificial
  probe
  misc_feature (1)..(25): SEQ ID NO: 793; WAN024FPF; Start 336; Stop 360
aaatcgccctgaatacggttattat

SEQ ID NO: 273659 - DNA, 25 bp, Artificial
  probe
  misc_feature (1)..(25): SEQ ID NO: 793; WAN024FPF; Start 1071; Stop 1095
gaaatgctcttcggttattacttct

SEQ ID NO: 273660 - DNA, 25 bp, Artificial
  probe
  misc_feature (1)..(25): SEQ ID NO: 793; WAN024FPF; Start 338; Stop 362
atcgccctgaatacggttattatat

SEQ ID NO: 273661 - DNA, 25 bp, Artificial
  probe
  misc_feature (1)..(25): SEQ ID NO: 793; WAN024FPF; Start 1005; Stop 1029
ggtagcaaatgatgagtgtatagtt

SEQ ID NO: 273662 - DNA, 25 bp, Artificial
  probe
  misc_feature (1)..(25): SEQ ID NO: 793; WAN024FPF; Start 729; Stop 753
tggtagttctatatttggtcagacg

SEQ ID NO: 273663 - DNA, 25 bp, Artificial
  probe
  misc_feature (1)..(25): SEQ ID NO: 793; WAN024FPF; Start 415; Stop 439
atggacaatgagtattctgtagatt

SEQ ID NO: 273664 - DNA, 25 bp, Artificial
  probe
  misc_feature (1)..(25): SEQ ID NO: 793; WAN024FPF; Start 414; Stop 438
aatggacaatgagtattctgtagat

SEQ ID NO: 273665 - DNA, 25 bp, Artificial
  probe
  misc_feature (1)..(25): SEQ ID NO: 793; WAN024FPF; Start 1001; Stop 1025
ttgtggtagcaaatgatgagtgtat

SEQ ID NO: 273666 - DNA, 25 bp, Artificial
  probe
  misc_feature (1)..(25): SEQ ID NO: 793; WAN024FPF; Start 735; Stop 759
ttctatatttggtcagacggagttg

SEQ ID NO: 273667 - DNA, 25 bp, Artificial
  probe
  misc_feature (1)..(25): SEQ ID NO: 793; WAN024FPF; Start 734; Stop 758
gttctatatttggtcagacggagtt

SEQ ID NO: 273668 - DNA, 25 bp, Artificial
  probe
  misc_feature (1)..(25): SEQ ID NO: 793; WAN024FPF; Start 731; Stop 755
gtagttctatatttggtcagacgga

SEQ ID NO: 273669 - DNA, 25 bp, Artificial
  probe
  misc_feature (1)..(25): SEQ ID NO: 793; WAN024FPF; Start 1069; Stop 1093
gggaaatgctcttcggttattactt

SEQ ID NO: 273670 - DNA, 25 bp, Artificial
  probe
  misc_feature (1)..(25): SEQ ID NO: 794; WAN024DH4; Start 14; Stop 38
ttgtagaagatgaagagatgatccg

SEQ ID NO: 273671 - DNA, 25 bp, Artificial
  probe
  misc_feature (1)..(25): SEQ ID NO: 794; WAN024DH4; Start 17; Stop 41
tagaagatgaagagatgatccgtga

SEQ ID NO: 273672 - DNA, 25 bp, Artificial
  probe
  misc_feature (1)..(25): SEQ ID NO: 794; WAN024DH4; Start 16; Stop 40
gtagaagatgaagagatgatccgtg

SEQ ID NO: 273673 - DNA, 25 bp, Artificial
  probe
  misc_feature (1)..(25): SEQ ID NO: 794; WAN024DH4; Start 15; Stop 39
tgtagaagatgaagagatgatccgt

SEQ ID NO: 273674 - DNA, 25 bp, Artificial
  probe
  misc_feature (1)..(25): SEQ ID NO: 794; WAN024DH4; Start 350; Stop 374
gctactacgatacaggacgaatctt

SEQ ID NO: 273675 - DNA, 25 bp, Artificial
  probe
  misc_feature (1)..(25): SEQ ID NO: 794; WAN024DH4; Start 18; Stop 42
agaagatgaagagatgatccgtgag

SEQ ID NO: 273676 - DNA, 25 bp, Artificial
  probe
  misc_feature (1)..(25): SEQ ID NO: 794; WAN024DH4; Start 13; Stop 37
attgtagaagatgaagagatgatcc

SEQ ID NO: 273677 - DNA, 25 bp, Artificial
  probe
  misc_feature (1)..(25): SEQ ID NO: 794; WAN024DH4; Start 551; Stop 575
cctttgaccgtgttattgatgttta

SEQ ID NO: 273678 - DNA, 25 bp, Artificial
  probe
  misc_feature (1)..(25): SEQ ID NO: 794; WAN024DH4; Start 64; Stop 88
gattgtggctatgaaactattgagg

SEQ ID NO: 273679 - DNA, 25 bp, Artificial
  probe
  misc_feature (1)..(25): SEQ ID NO: 794; WAN024DH4; Start 63; Stop 87
ggattgtggctatgaaactattgag

SEQ ID NO: 273680 - DNA, 25 bp, Artificial
  probe
  misc_feature (1)..(25): SEQ ID NO: 794; WAN024DH4; Start 245; Stop 269
atgaggaatacaagatgagtgcctt

SEQ ID NO: 273681 - DNA, 25 bp, Artificial
  probe
  misc_feature (1)..(25): SEQ ID NO: 794; WAN024DH4; Start 52; Stop 76
gattatttgacggattgtggctatg

SEQ ID NO: 273682 - DNA, 25 bp, Artificial
  probe
  misc_feature (1)..(25): SEQ ID NO: 794; WAN024DH4; Start 351; Stop 375
ctactacgatacaggacgaatcttt

SEQ ID NO: 273683 - DNA, 25 bp, Artificial
  probe
  misc_feature (1)..(25): SEQ ID NO: 794; WAN024DH4; Start 53; Stop 77
attatttgacggattgtggctatga

SEQ ID NO: 273684 - DNA, 25 bp, Artificial
  probe
  misc_feature (1)..(25): SEQ ID NO: 794; WAN024DH4; Start 51; Stop 75
tgattatttgacggattgtggctat

SEQ ID NO: 273685 - DNA, 25 bp, Artificial
  probe
  misc_feature (1)..(25): SEQ ID NO: 794; WAN024DH4; Start 54; Stop 78
ttatttgacggattgtggctatgaa

SEQ ID NO: 273686 - DNA, 25 bp, Artificial
  probe
  misc_feature (1)..(25): SEQ ID NO: 794; WAN024DH4; Start 55; Stop 79
tatttgacggattgtggctatgaaa

SEQ ID NO: 273687 - DNA, 25 bp, Artificial
  probe
  misc_feature (1)..(25): SEQ ID NO: 794; WAN024DH4; Start 19; Stop 43
gaagatgaagagatgatccgtgagg

SEQ ID NO: 273688 - DNA, 25 bp, Artificial
  probe
  misc_feature (1)..(25): SEQ ID NO: 794; WAN024DH4; Start 62; Stop 86
cggattgtggctatgaaactattga

SEQ ID NO: 273689 - DNA, 25 bp, Artificial
  probe
  misc_feature (1)..(25): SEQ ID NO: 794; WAN024DH4; Start 60; Stop 84
gacggattgtggctatgaaactatt

SEQ ID NO: 273690 - DNA, 25 bp, Artificial
  probe
  misc_feature (1)..(25): SEQ ID NO: 794; WAN024DH4; Start 244; Stop 268
gatgaggaatacaagatgagtgcct

SEQ ID NO: 273691 - DNA, 25 bp, Artificial
  probe
  misc_feature (1)..(25): SEQ ID NO: 794; WAN024DH4; Start 65; Stop 89
attgtggctatgaaactattgaggc

SEQ ID NO: 273692 - DNA, 25 bp, Artificial
  probe
  misc_feature (1)..(25): SEQ ID NO: 794; WAN024DH4; Start 61; Stop 85
acggattgtggctatgaaactattg

SEQ ID NO: 273693 - DNA, 25 bp, Artificial
  probe
  misc_feature (1)..(25): SEQ ID NO: 794; WAN024DH4; Start 50; Stop 74
gtgattatttgacggattgtggcta

SEQ ID NO: 273694 - DNA, 25 bp, Artificial
  probe
  misc_feature (1)..(25): SEQ ID NO: 794; WAN024DH4; Start 377; Stop 401
cttacaaggataccaaggtggactt

SEQ ID NO: 273695 - DNA, 25 bp, Artificial
  probe
  misc_feature (1)..(25): SEQ ID NO: 794; WAN024DH4; Start 375; Stop 399
ttcttacaaggataccaaggtggac

SEQ ID NO: 273696 - DNA, 25 bp, Artificial
  probe
  misc_feature (1)..(25): SEQ ID NO: 794; WAN024DH4; Start 452; Stop 476
aagagttggaaattctggactatct

SEQ ID NO: 273697 - DNA, 25 bp, Artificial
  probe
  misc_feature (1)..(25): SEQ ID NO: 794; WAN024DH4; Start 552; Stop 576
ctttgaccgtgttattgatgtttat

SEQ ID NO: 273698 - DNA, 25 bp, Artificial
  probe
  misc_feature (1)..(25): SEQ ID NO: 794; WAN024DH4; Start 450; Stop 474
caaagagttggaaattctggactat

SEQ ID NO: 273699 - DNA, 25 bp, Artificial
  probe
  misc_feature (1)..(25): SEQ ID NO: 794; WAN024DH4; Start 451; Stop 475
aaagagttggaaattctggactatc

SEQ ID NO: 273700 - DNA, 25 bp, Artificial
  probe
  misc_feature (1)..(25): SEQ ID NO: 794; WAN024DH4; Start 550; Stop 574
ccctttgaccgtgttattgatgttt

SEQ ID NO: 273701 - DNA, 25 bp, Artificial
  probe
  misc_feature (1)..(25): SEQ ID NO: 794; WAN024DH4; Start 47; Stop 71
tcagtgattatttgacggattgtgg

SEQ ID NO: 273702 - DNA, 25 bp, Artificial
  probe
  misc_feature (1)..(25): SEQ ID NO: 794; WAN024DH4; Start 629; Stop 653
atgttggttataaattggagcgaaa

SEQ ID NO: 273703 - DNA, 25 bp, Artificial
  probe
  misc_feature (1)..(25): SEQ ID NO: 795; WAN024CJT; Start 208; Stop 232
atgtattctcgtcagtgtacttctt

SEQ ID NO: 273704 - DNA, 25 bp, Artificial
  probe
  misc_feature (1)..(25): SEQ ID NO: 795; WAN024CJT; Start 207; Stop 231
catgtattctcgtcagtgtacttct

SEQ ID NO: 273705 - DNA, 25 bp, Artificial
  probe
  misc_feature (1)..(25): SEQ ID NO: 795; WAN024CJT; Start 106; Stop 130
gatagtgtctatgcctattccagag

SEQ ID NO: 273706 - DNA, 25 bp, Artificial
  probe
  misc_feature (1)..(25): SEQ ID NO: 795; WAN024CJT; Start 105; Stop 129
tgatagtgtctatgcctattccaga

SEQ ID NO: 273707 - DNA, 25 bp, Artificial
  probe
  misc_feature (1)..(25): SEQ ID NO: 795; WAN024CJT; Start 104; Stop 128
gtgatagtgtctatgcctattccag

SEQ ID NO: 273708 - DNA, 25 bp, Artificial
  probe
  misc_feature (1)..(25): SEQ ID NO: 795; WAN024CJT; Start 101; Stop 125
ctggtgatagtgtctatgcctattc

SEQ ID NO: 273709 - DNA, 25 bp, Artificial
  probe
  misc_feature (1)..(25): SEQ ID NO: 795; WAN024CJT; Start 418; Stop 442
ggagatcagattgagattgaggaat

SEQ ID NO: 273710 - DNA, 25 bp, Artificial
  probe
  misc_feature (1)..(25): SEQ ID NO: 795; WAN024CJT; Start 641; Stop 665
actattatcctggagagaaggttca

SEQ ID NO: 273711 - DNA, 25 bp, Artificial
  probe
  misc_feature (1)..(25): SEQ ID NO: 795; WAN024CJT; Start 103; Stop 127
ggtgatagtgtctatgcctattcca

SEQ ID NO: 273712 - DNA, 25 bp, Artificial
  probe
  misc_feature (1)..(25): SEQ ID NO: 795; WAN024CJT; Start 102; Stop 126
tggtgatagtgtctatgcctattcc

SEQ ID NO: 273713 - DNA, 25 bp, Artificial
  probe
  misc_feature (1)..(25): SEQ ID NO: 795; WAN024CJT; Start 646; Stop 670
tatcctggagagaaggttcattatg

SEQ ID NO: 273714 - DNA, 25 bp, Artificial
  probe
  misc_feature (1)..(25): SEQ ID NO: 795; WAN024CJT; Start 206; Stop 230
gcatgtattctcgtcagtgtacttc

SEQ ID NO: 273715 - DNA, 25 bp, Artificial
  probe
  misc_feature (1)..(25): SEQ ID NO: 795; WAN024CJT; Start 107; Stop 131
atagtgtctatgcctattccagagg

SEQ ID NO: 273716 - DNA, 25 bp, Artificial
  probe
  misc_feature (1)..(25): SEQ ID NO: 795; WAN024CJT; Start 642; Stop 666
ctattatcctggagagaaggttcat

SEQ ID NO: 273717 - DNA, 25 bp, Artificial
  probe
  misc_feature (1)..(25): SEQ ID NO: 795; WAN024CJT; Start 649; Stop 673
cctggagagaaggttcattatgatc

SEQ ID NO: 273718 - DNA, 25 bp, Artificial
  probe
  misc_feature (1)..(25): SEQ ID NO: 795; WAN024CJT; Start 648; Stop 672
tcctggagagaaggttcattatgat

SEQ ID NO: 273719 - DNA, 25 bp, Artificial
  probe
  misc_feature (1)..(25): SEQ ID NO: 795; WAN024CJT; Start 647; Stop 671
atcctggagagaaggttcattatga

SEQ ID NO: 273720 - DNA, 25 bp, Artificial
  probe
  misc_feature (1)..(25): SEQ ID NO: 795; WAN024CJT; Start 645; Stop 669
ttatcctggagagaaggttcattat

SEQ ID NO: 273721 - DNA, 25 bp, Artificial
  probe
  misc_feature (1)..(25): SEQ ID NO: 795; WAN024CJT; Start 644; Stop 668
attatcctggagagaaggttcatta

SEQ ID NO: 273722 - DNA, 25 bp, Artificial
  probe
  misc_feature (1)..(25): SEQ ID NO: 795; WAN024CJT; Start 643; Stop 667
tattatcctggagagaaggttcatt

SEQ ID NO: 273723 - DNA, 25 bp, Artificial
  probe
  misc_feature (1)..(25): SEQ ID NO: 795; WAN024CJT; Start 351; Stop 375
gattggttccattacttggtctact

SEQ ID NO: 273724 - DNA, 25 bp, Artificial
  probe
  misc_feature (1)..(25): SEQ ID NO: 795; WAN024CJT; Start 335; Stop 359
tagataatacaccgacgattggttc

SEQ ID NO: 273725 - DNA, 25 bp, Artificial
  probe
  misc_feature (1)..(25): SEQ ID NO: 795; WAN024CJT; Start 352; Stop 376
attggttccattacttggtctactg

SEQ ID NO: 273726 - DNA, 25 bp, Artificial
  probe
  misc_feature (1)..(25): SEQ ID NO: 795; WAN024CJT; Start 334; Stop 358
gtagataatacaccgacgattggtt

SEQ ID NO: 273727 - DNA, 25 bp, Artificial
  probe
  misc_feature (1)..(25): SEQ ID NO: 795; WAN024CJT; Start 640; Stop 664
tactattatcctggagagaaggttc

SEQ ID NO: 273728 - DNA, 25 bp, Artificial
  probe
  misc_feature (1)..(25): SEQ ID NO: 795; WAN024CJT; Start 100; Stop 124
gctggtgatagtgtctatgcctatt

SEQ ID NO: 273729 - DNA, 25 bp, Artificial
  probe
  misc_feature (1)..(25): SEQ ID NO: 795; WAN024CJT; Start 19; Stop 43
atagcaagaggaacaagttattact

SEQ ID NO: 273730 - DNA, 25 bp, Artificial
  probe
  misc_feature (1)..(25): SEQ ID NO: 795; WAN024CJT; Start 232; Stop 256
tttgtagcctttcgtttgagtaatg

SEQ ID NO: 273731 - DNA, 25 bp, Artificial
  probe
  misc_feature (1)..(25): SEQ ID NO: 795; WAN024CJT; Start 233; Stop 257
ttgtagcctttcgtttgagtaatgt

SEQ ID NO: 273732 - DNA, 25 bp, Artificial
  probe
  misc_feature (1)..(25): SEQ ID NO: 795; WAN024CJT; Start 639; Stop 663
ttactattatcctggagagaaggtt

SEQ ID NO: 273733 - DNA, 25 bp, Artificial
  probe
  misc_feature (1)..(25): SEQ ID NO: 795; WAN024CJT; Start 350; Stop 374
cgattggttccattacttggtctac

SEQ ID NO: 273734 - DNA, 25 bp, Artificial
  probe
  misc_feature (1)..(25): SEQ ID NO: 795; WAN024CJT; Start 487; Stop 511
gcaaacacgatgacaggatttattc

SEQ ID NO: 273735 - DNA, 25 bp, Artificial
  probe
  misc_feature (1)..(25): SEQ ID NO: 795; WAN024CJT; Start 10; Stop 34
ttaccgtttatagcaagaggaacaa

SEQ ID NO: 273736 - DNA, 25 bp, Artificial
  probe
  misc_feature (1)..(25): SEQ ID NO: 796; WAN024C3Q; Start 377; Stop 401
aagaggttagcaagaaggttgaata

SEQ ID NO: 273737 - DNA, 25 bp, Artificial
  probe
  misc_feature (1)..(25): SEQ ID NO: 796; WAN024C3Q; Start 378; Stop 402
agaggttagcaagaaggttgaatac

SEQ ID NO: 273738 - DNA, 25 bp, Artificial
  probe
  misc_feature (1)..(25): SEQ ID NO: 796; WAN024C3Q; Start 293; Stop 317
aaggctatatgctcaagacttctag

SEQ ID NO: 273739 - DNA, 25 bp, Artificial
  probe
  misc_feature (1)..(25): SEQ ID NO: 796; WAN024C3Q; Start 376; Stop 400
caagaggttagcaagaaggttgaat

SEQ ID NO: 273740 - DNA, 25 bp, Artificial
  probe
  misc_feature (1)..(25): SEQ ID NO: 796; WAN024C3Q; Start 295; Stop 319
ggctatatgctcaagacttctagtg

SEQ ID NO: 273741 - DNA, 25 bp, Artificial
  probe
  misc_feature (1)..(25): SEQ ID NO: 796; WAN024C3Q; Start 294; Stop 318
aggctatatgctcaagacttctagt

SEQ ID NO: 273742 - DNA, 25 bp, Artificial
  probe
  misc_feature (1)..(25): SEQ ID NO: 796; WAN024C3Q; Start 509; Stop 533
ttatctctctcaagacggtcaagac

SEQ ID NO: 273743 - DNA, 25 bp, Artificial
  probe
  misc_feature (1)..(25): SEQ ID NO: 796; WAN024C3Q; Start 296; Stop 320
gctatatgctcaagacttctagtgc

SEQ ID NO: 273744 - DNA, 25 bp, Artificial
  probe
  misc_feature (1)..(25): SEQ ID NO: 796; WAN024C3Q; Start 142; Stop 166
gatgtcattgtcatggatattgtca

SEQ ID NO: 273745 - DNA, 25 bp, Artificial
  probe
  misc_feature (1)..(25): SEQ ID NO: 796; WAN024C3Q; Start 140; Stop 164
cagatgtcattgtcatggatattgt

SEQ ID NO: 273746 - DNA, 25 bp, Artificial
  probe
  misc_feature (1)..(25): SEQ ID NO: 796; WAN024C3Q; Start 141; Stop 165
agatgtcattgtcatggatattgtc

SEQ ID NO: 273747 - DNA, 25 bp, Artificial
  probe
  misc_feature (1)..(25): SEQ ID NO: 796; WAN024C3Q; Start 143; Stop 167
atgtcattgtcatggatattgtcat

SEQ ID NO: 273748 - DNA, 25 bp, Artificial
  probe
  misc_feature (1)..(25): SEQ ID NO: 796; WAN024C3Q; Start 369; Stop 393
cattgagcaagaggttagcaagaag

SEQ ID NO: 273749 - DNA, 25 bp, Artificial
  probe
  misc_feature (1)..(25): SEQ ID NO: 796; WAN024C3Q; Start 231; Stop 255
tttgattgtgacctcttatttggac

SEQ ID NO: 273750 - DNA, 25 bp, Artificial
  probe
  misc_feature (1)..(25): SEQ ID NO: 796; WAN024C3Q; Start 238; Stop 262
gtgacctcttatttggacaatgaaa

SEQ ID NO: 273751 - DNA, 25 bp, Artificial
  probe
  misc_feature (1)..(25): SEQ ID NO: 796; WAN024C3Q; Start 379; Stop 403
gaggttagcaagaaggttgaatacc

SEQ ID NO: 273752 - DNA, 25 bp, Artificial
  probe
  misc_feature (1)..(25): SEQ ID NO: 796; WAN024C3Q; Start 191; Stop 215
cgaccttagcaatccttaaagaatg

SEQ ID NO: 273753 - DNA, 25 bp, Artificial
  probe
  misc_feature (1)..(25): SEQ ID NO: 796; WAN024C3Q; Start 139; Stop 163
ccagatgtcattgtcatggatattg

SEQ ID NO: 273754 - DNA, 25 bp, Artificial
  probe
  misc_feature (1)..(25): SEQ ID NO: 796; WAN024C3Q; Start 192; Stop 216
gaccttagcaatccttaaagaatgg

SEQ ID NO: 273755 - DNA, 25 bp, Artificial
  probe
  misc_feature (1)..(25): SEQ ID NO: 796; WAN024C3Q; Start 291; Stop 315
caaaggctatatgctcaagacttct

SEQ ID NO: 273756 - DNA, 25 bp, Artificial
  probe
  misc_feature (1)..(25): SEQ ID NO: 796; WAN024C3Q; Start 292; Stop 316
aaaggctatatgctcaagacttcta

SEQ ID NO: 273757 - DNA, 25 bp, Artificial
  probe
  misc_feature (1)..(25): SEQ ID NO: 796; WAN024C3Q; Start 306; Stop 330
caagacttctagtgcagatgaattg

SEQ ID NO: 273758 - DNA, 25 bp, Artificial
  probe
  misc_feature (1)..(25): SEQ ID NO: 796; WAN024C3Q; Start 305; Stop 329
tcaagacttctagtgcagatgaatt

SEQ ID NO: 273759 - DNA, 25 bp, Artificial
  probe
  misc_feature (1)..(25): SEQ ID NO: 796; WAN024C3Q; Start 304; Stop 328
ctcaagacttctagtgcagatgaat

SEQ ID NO: 273760 - DNA, 25 bp, Artificial
  probe
  misc_feature (1)..(25): SEQ ID NO: 796; WAN024C3Q; Start 60; Stop 84
tgacctccaagacgatgtagaagtt

SEQ ID NO: 273761 - DNA, 25 bp, Artificial
  probe
  misc_feature (1)..(25): SEQ ID NO: 796; WAN024C3Q; Start 382; Stop 406
gttagcaagaaggttgaataccacc

SEQ ID NO: 273762 - DNA, 25 bp, Artificial
  probe
  misc_feature (1)..(25): SEQ ID NO: 796; WAN024C3Q; Start 381; Stop 405
ggttagcaagaaggttgaataccac

SEQ ID NO: 273763 - DNA, 25 bp, Artificial
  probe
  misc_feature (1)..(25): SEQ ID NO: 796; WAN024C3Q; Start 380; Stop 404
aggttagcaagaaggttgaatacca

SEQ ID NO: 273764 - DNA, 25 bp, Artificial
  probe
  misc_feature (1)..(25): SEQ ID NO: 796; WAN024C3Q; Start 507; Stop 531
ctttatctctctcaagacggtcaag

SEQ ID NO: 273765 - DNA, 25 bp, Artificial
  probe
  misc_feature (1)..(25): SEQ ID NO: 796; WAN024C3Q; Start 61; Stop 85
gacctccaagacgatgtagaagttg

SEQ ID NO: 273766 - DNA, 25 bp, Artificial
  probe
  misc_feature (1)..(25): SEQ ID NO: 796; WAN024C3Q; Start 193; Stop 217
accttagcaatccttaaagaatggc

SEQ ID NO: 273767 - DNA, 25 bp, Artificial
  probe
  misc_feature (1)..(25): SEQ ID NO: 796; WAN024C3Q; Start 508; Stop 532
tttatctctctcaagacggtcaaga

SEQ ID NO: 273768 - DNA, 25 bp, Artificial
  probe
  misc_feature (1)..(25): SEQ ID NO: 796; WAN024C3Q; Start 370; Stop 394
attgagcaagaggttagcaagaagg

SEQ ID NO: 273769 - DNA, 25 bp, Artificial
  probe
  misc_feature (1)..(25): SEQ ID NO: 797; WAN024G5E; Start 598; Stop 622
tggatgaaggcaggtattctctatg

SEQ ID NO: 273770 - DNA, 25 bp, Artificial
  probe
  misc_feature (1)..(25): SEQ ID NO: 797; WAN024G5E; Start 582; Stop 606
gaacaactgtctgaactggatgaag

SEQ ID NO: 273771 - DNA, 25 bp, Artificial
  probe
  misc_feature (1)..(25): SEQ ID NO: 797; WAN024G5E; Start 373; Stop 397
attcctgatcttctccatgttcatg

SEQ ID NO: 273772 - DNA, 25 bp, Artificial
  probe
  misc_feature (1)..(25): SEQ ID NO: 797; WAN024G5E; Start 371; Stop 395
ttattcctgatcttctccatgttca

SEQ ID NO: 273773 - DNA, 25 bp, Artificial
  probe
  misc_feature (1)..(25): SEQ ID NO: 797; WAN024G5E; Start 372; Stop 396
tattcctgatcttctccatgttcat

SEQ ID NO: 273774 - DNA, 25 bp, Artificial
  probe
  misc_feature (1)..(25): SEQ ID NO: 797; WAN024G5E; Start 597; Stop 621
ctggatgaaggcaggtattctctat

SEQ ID NO: 273775 - DNA, 25 bp, Artificial
  probe
  misc_feature (1)..(25): SEQ ID NO: 797; WAN024G5E; Start 720; Stop 744
taaagtatctggtatcgtgaatggg

SEQ ID NO: 273776 - DNA, 25 bp, Artificial
  probe
  misc_feature (1)..(25): SEQ ID NO: 797; WAN024G5E; Start 716; Stop 740
ctggtaaagtatctggtatcgtgaa

SEQ ID NO: 273777 - DNA, 25 bp, Artificial
  probe
  misc_feature (1)..(25): SEQ ID NO: 797; WAN024G5E; Start 712; Stop 736
gagtctggtaaagtatctggtatcg

SEQ ID NO: 273778 - DNA, 25 bp, Artificial
  probe
  misc_feature (1)..(25): SEQ ID NO: 797; WAN024G5E; Start 710; Stop 734
tggagtctggtaaagtatctggtat

SEQ ID NO: 273779 - DNA, 25 bp, Artificial
  probe
  misc_feature (1)..(25): SEQ ID NO: 797; WAN024G5E; Start 709; Stop 733
atggagtctggtaaagtatctggta

SEQ ID NO: 273780 - DNA, 25 bp, Artificial
  probe
  misc_feature (1)..(25): SEQ ID NO: 797; WAN024G5E; Start 707; Stop 731
aaatggagtctggtaaagtatctgg

SEQ ID NO: 273781 - DNA, 25 bp, Artificial
  probe
  misc_feature (1)..(25): SEQ ID NO: 797; WAN024G5E; Start 711; Stop 735
ggagtctggtaaagtatctggtatc

SEQ ID NO: 273782 - DNA, 25 bp, Artificial
  probe
  misc_feature (1)..(25): SEQ ID NO: 797; WAN024G5E; Start 578; Stop 602
gatggaacaactgtctgaactggat

SEQ ID NO: 273783 - DNA, 25 bp, Artificial
  probe
  misc_feature (1)..(25): SEQ ID NO: 797; WAN024G5E; Start 715; Stop 739
tctggtaaagtatctggtatcgtga

SEQ ID NO: 273784 - DNA, 25 bp, Artificial
  probe
  misc_feature (1)..(25): SEQ ID NO: 797; WAN024G5E; Start 714; Stop 738
gtctggtaaagtatctggtatcgtg

SEQ ID NO: 273785 - DNA, 25 bp, Artificial
  probe
  misc_feature (1)..(25): SEQ ID NO: 797; WAN024G5E; Start 713; Stop 737
agtctggtaaagtatctggtatcgt

SEQ ID NO: 273786 - DNA, 25 bp, Artificial
  probe
  misc_feature (1)..(25): SEQ ID NO: 797; WAN024G5E; Start 1070; Stop 1094
atgtcaaacttgctcaggaaatcta

SEQ ID NO: 273787 - DNA, 25 bp, Artificial
  probe
  misc_feature (1)..(25): SEQ ID NO: 797; WAN024G5E; Start 717; Stop 741
tggtaaagtatctggtatcgtgaat

SEQ ID NO: 273788 - DNA, 25 bp, Artificial
  probe
  misc_feature (1)..(25): SEQ ID NO: 797; WAN024G5E; Start 719; Stop 743
gtaaagtatctggtatcgtgaatgg

SEQ ID NO: 273789 - DNA, 25 bp, Artificial
  probe
  misc_feature (1)..(25): SEQ ID NO: 797; WAN024G5E; Start 718; Stop 742
ggtaaagtatctggtatcgtgaatg

SEQ ID NO: 273790 - DNA, 25 bp, Artificial
  probe
  misc_feature (1)..(25): SEQ ID NO: 797; WAN024G5E; Start 708; Stop 732
aatggagtctggtaaagtatctggt

SEQ ID NO: 273791 - DNA, 25 bp, Artificial
  probe
  misc_feature (1)..(25): SEQ ID NO: 797; WAN024G5E; Start 444; Stop 468
ttggattcaagcctatgaggacatt

SEQ ID NO: 273792 - DNA, 25 bp, Artificial
  probe
  misc_feature (1)..(25): SEQ ID NO: 797; WAN024G5E; Start 583; Stop 607
aacaactgtctgaactggatgaagg

SEQ ID NO: 273793 - DNA, 25 bp, Artificial
  probe
  misc_feature (1)..(25): SEQ ID NO: 797; WAN024G5E; Start 581; Stop 605
ggaacaactgtctgaactggatgaa

SEQ ID NO: 273794 - DNA, 25 bp, Artificial
  probe
  misc_feature (1)..(25): SEQ ID NO: 797; WAN024G5E; Start 579; Stop 603
atggaacaactgtctgaactggatg

SEQ ID NO: 273795 - DNA, 25 bp, Artificial
  probe
  misc_feature (1)..(25): SEQ ID NO: 797; WAN024G5E; Start 725; Stop 749
tatctggtatcgtgaatgggattga

SEQ ID NO: 273796 - DNA, 25 bp, Artificial
  probe
  misc_feature (1)..(25): SEQ ID NO: 797; WAN024G5E; Start 724; Stop 748
gtatctggtatcgtgaatgggattg

SEQ ID NO: 273797 - DNA, 25 bp, Artificial
  probe
  misc_feature (1)..(25): SEQ ID NO: 797; WAN024G5E; Start 723; Stop 747
agtatctggtatcgtgaatgggatt

SEQ ID NO: 273798 - DNA, 25 bp, Artificial
  probe
  misc_feature (1)..(25): SEQ ID NO: 797; WAN024G5E; Start 722; Stop 746
aagtatctggtatcgtgaatgggat

SEQ ID NO: 273799 - DNA, 25 bp, Artificial
  probe
  misc_feature (1)..(25): SEQ ID NO: 797; WAN024G5E; Start 721; Stop 745
aaagtatctggtatcgtgaatggga

SEQ ID NO: 273800 - DNA, 25 bp, Artificial
  probe
  misc_feature (1)..(25): SEQ ID NO: 797; WAN024G5E; Start 517; Stop 541
gaaggaatgttgggtgatttgtttg

SEQ ID NO: 273801 - DNA, 25 bp, Artificial
  probe
  misc_feature (1)..(25): SEQ ID NO: 797; WAN024G5E; Start 516; Stop 540
agaaggaatgttgggtgatttgttt

SEQ ID NO: 273802 - DNA, 25 bp, Artificial
  probe
  misc_feature (1)..(25): SEQ ID NO: 798; WAN024CLZ; Start 59; Stop 83
tttacttagacatgcagggacaatc

SEQ ID NO: 273803 - DNA, 25 bp, Artificial
  probe
  misc_feature (1)..(25): SEQ ID NO: 798; WAN024CLZ; Start 60; Stop 84
ttacttagacatgcagggacaatcc

SEQ ID NO: 273804 - DNA, 25 bp, Artificial
  probe
  misc_feature (1)..(25): SEQ ID NO: 798; WAN024CLZ; Start 58; Stop 82
ttttacttagacatgcagggacaat

SEQ ID NO: 273805 - DNA, 25 bp, Artificial
  probe
  misc_feature (1)..(25): SEQ ID NO: 798; WAN024CLZ; Start 57; Stop 81
attttacttagacatgcagggacaa

SEQ ID NO: 273806 - DNA, 25 bp, Artificial
  probe
  misc_feature (1)..(25): SEQ ID NO: 798; WAN024CLZ; Start 56; Stop 80
gattttacttagacatgcagggaca

SEQ ID NO: 273807 - DNA, 25 bp, Artificial
  probe
  misc_feature (1)..(25): SEQ ID NO: 798; WAN024CLZ; Start 52; Stop 76
aaaggattttacttagacatgcagg

SEQ ID NO: 273808 - DNA, 25 bp, Artificial
  probe
  misc_feature (1)..(25): SEQ ID NO: 798; WAN024CLZ; Start 53; Stop 77
aaggattttacttagacatgcaggg

SEQ ID NO: 273809 - DNA, 25 bp, Artificial
  probe
  misc_feature (1)..(25): SEQ ID NO: 798; WAN024CLZ; Start 55; Stop 79
ggattttacttagacatgcagggac

SEQ ID NO: 273810 - DNA, 25 bp, Artificial
  probe
  misc_feature (1)..(25): SEQ ID NO: 798; WAN024CLZ; Start 54; Stop 78
aggattttacttagacatgcaggga

SEQ ID NO: 273811 - DNA, 25 bp, Artificial
  probe
  misc_feature (1)..(25): SEQ ID NO: 798; WAN024CLZ; Start 51; Stop 75
aaaaggattttacttagacatgcag

SEQ ID NO: 273812 - DNA, 25 bp, Artificial
  probe
  misc_feature (1)..(25): SEQ ID NO: 798; WAN024CLZ; Start 76; Stop 100
ggacaatcccagcttgttttagatc

SEQ ID NO: 273813 - DNA, 25 bp, Artificial
  probe
  misc_feature (1)..(25): SEQ ID NO: 798; WAN024CLZ; Start 77; Stop 101
gacaatcccagcttgttttagatct

SEQ ID NO: 273814 - DNA, 25 bp, Artificial
  probe
  misc_feature (1)..(25): SEQ ID NO: 798; WAN024CLZ; Start 78; Stop 102
acaatcccagcttgttttagatcta

SEQ ID NO: 273815 - DNA, 25 bp, Artificial
  probe
  misc_feature (1)..(25): SEQ ID NO: 800; WAN024D5Q; Start 42; Stop 66
aatgataagtgctgttggaactact

SEQ ID NO: 273816 - DNA, 25 bp, Artificial
  probe
  misc_feature (1)..(25): SEQ ID NO: 800; WAN024D5Q; Start 41; Stop 65
taatgataagtgctgttggaactac

SEQ ID NO: 273817 - DNA, 25 bp, Artificial
  probe
  misc_feature (1)..(25): SEQ ID NO: 800; WAN024D5Q; Start 274; Stop 298
ggtactcgttcaactcatggtaatt

SEQ ID NO: 273818 - DNA, 25 bp, Artificial
  probe
  misc_feature (1)..(25): SEQ ID NO: 800; WAN024D5Q; Start 275; Stop 299
gtactcgttcaactcatggtaattg

SEQ ID NO: 273819 - DNA, 25 bp, Artificial
  probe
  misc_feature (1)..(25): SEQ ID NO: 800; WAN024D5Q; Start 276; Stop 300
tactcgttcaactcatggtaattgg

SEQ ID NO: 273820 - DNA, 25 bp, Artificial
  probe
  misc_feature (1)..(25): SEQ ID NO: 800; WAN024D5Q; Start 203; Stop 227
ccatgactgttaagcatcgtatagt

SEQ ID NO: 273821 - DNA, 25 bp, Artificial
  probe
  misc_feature (1)..(25): SEQ ID NO: 800; WAN024D5Q; Start 40; Stop 64
ttaatgataagtgctgttggaacta

SEQ ID NO: 273822 - DNA, 25 bp, Artificial
  probe
  misc_feature (1)..(25): SEQ ID NO: 800; WAN024D5Q; Start 273; Stop 297
tggtactcgttcaactcatggtaat

SEQ ID NO: 273823 - DNA, 25 bp, Artificial
  probe
  misc_feature (1)..(25): SEQ ID NO: 800; WAN024D5Q; Start 205; Stop 229
atgactgttaagcatcgtatagtaa

SEQ ID NO: 273824 - DNA, 25 bp, Artificial
  probe
  misc_feature (1)..(25): SEQ ID NO: 800; WAN024D5Q; Start 204; Stop 228
catgactgttaagcatcgtatagta

SEQ ID NO: 273825 - DNA, 25 bp, Artificial
  probe
  misc_feature (1)..(25): SEQ ID NO: 800; WAN024D5Q; Start 66; Stop 90
tttcgtagaagcaaatcagataggt

SEQ ID NO: 273826 - DNA, 25 bp, Artificial
  probe
  misc_feature (1)..(25): SEQ ID NO: 800; WAN024D5Q; Start 65; Stop 89
ctttcgtagaagcaaatcagatagg

SEQ ID NO: 273827 - DNA, 25 bp, Artificial
  probe
  misc_feature (1)..(25): SEQ ID NO: 800; WAN024D5Q; Start 67; Stop 91
ttcgtagaagcaaatcagataggtg

SEQ ID NO: 273828 - DNA, 25 bp, Artificial
  probe
  misc_feature (1)..(25): SEQ ID NO: 800; WAN024D5Q; Start 272; Stop 296
gtggtactcgttcaactcatggtaa

SEQ ID NO: 273829 - DNA, 25 bp, Artificial
  probe
  misc_feature (1)..(25): SEQ ID NO: 800; WAN024D5Q; Start 64; Stop 88
actttcgtagaagcaaatcagatag

SEQ ID NO: 273830 - DNA, 25 bp, Artificial
  probe
  misc_feature (1)..(25): SEQ ID NO: 800; WAN024D5Q; Start 112; Stop 136
actaccagttataagagaacaggtt

SEQ ID NO: 273831 - DNA, 25 bp, Artificial
  probe
  misc_feature (1)..(25): SEQ ID NO: 800; WAN024D5Q; Start 39; Stop 63
tttaatgataagtgctgttggaact

SEQ ID NO: 273832 - DNA, 25 bp, Artificial
  probe
  misc_feature (1)..(25): SEQ ID NO: 800; WAN024D5Q; Start 43; Stop 67
atgataagtgctgttggaactactt

SEQ ID NO: 273833 - DNA, 25 bp, Artificial
  probe
  misc_feature (1)..(25): SEQ ID NO: 800; WAN024D5Q; Start 202; Stop 226
cccatgactgttaagcatcgtatag

SEQ ID NO: 273834 - DNA, 25 bp, Artificial
  probe
  misc_feature (1)..(25): SEQ ID NO: 800; WAN024D5Q; Start 111; Stop 135
tactaccagttataagagaacaggt

SEQ ID NO: 273835 - DNA, 25 bp, Artificial
  probe
  misc_feature (1)..(25): SEQ ID NO: 800; WAN024D5Q; Start 110; Stop 134
ttactaccagttataagagaacagg

SEQ ID NO: 273836 - DNA, 25 bp, Artificial
  probe
  misc_feature (1)..(25): SEQ ID NO: 800; WAN024D5Q; Start 63; Stop 87
tactttcgtagaagcaaatcagata

SEQ ID NO: 273837 - DNA, 25 bp, Artificial
  probe
  misc_feature (1)..(25): SEQ ID NO: 800; WAN024D5Q; Start 262; Stop 286
ttaacaacctgtggtactcgttcaa

SEQ ID NO: 273838 - DNA, 25 bp, Artificial
  probe
  misc_feature (1)..(25): SEQ ID NO: 800; WAN024D5Q; Start 241; Stop 265
gaagctcgtagtggagaatcgttaa

SEQ ID NO: 273839 - DNA, 25 bp, Artificial
  probe
  misc_feature (1)..(25): SEQ ID NO: 800; WAN024D5Q; Start 201; Stop 225
tcccatgactgttaagcatcgtata

SEQ ID NO: 273840 - DNA, 25 bp, Artificial
  probe
  misc_feature (1)..(25): SEQ ID NO: 800; WAN024D5Q; Start 125; Stop 149
agagaacaggttatttgactaaaga

SEQ ID NO: 273841 - DNA, 25 bp, Artificial
  probe
  misc_feature (1)..(25): SEQ ID NO: 800; WAN024D5Q; Start 229; Stop 253
aattctaatggagaagctcgtagtg

SEQ ID NO: 273842 - DNA, 25 bp, Artificial
  probe
  misc_feature (1)..(25): SEQ ID NO: 800; WAN024D5Q; Start 193; Stop 217
aatttacatcccatgactgttaagc

SEQ ID NO: 273843 - DNA, 25 bp, Artificial
  probe
  misc_feature (1)..(25): SEQ ID NO: 800; WAN024D5Q; Start 195; Stop 219
tttacatcccatgactgttaagcat

SEQ ID NO: 273844 - DNA, 25 bp, Artificial
  probe
  misc_feature (1)..(25): SEQ ID NO: 800; WAN024D5Q; Start 194; Stop 218
atttacatcccatgactgttaagca

SEQ ID NO: 273845 - DNA, 25 bp, Artificial
  probe
  misc_feature (1)..(25): SEQ ID NO: 800; WAN024D5Q; Start 206; Stop 230
tgactgttaagcatcgtatagtaaa

SEQ ID NO: 273846 - DNA, 25 bp, Artificial
  probe
  misc_feature (1)..(25): SEQ ID NO: 800; WAN024D5Q; Start 248; Stop 272
gtagtggagaatcgttaacaacctg

SEQ ID NO: 273847 - DNA, 25 bp, Artificial
  probe
  misc_feature (1)..(25): SEQ ID NO: 800; WAN024D5Q; Start 196; Stop 220
ttacatcccatgactgttaagcatc

SEQ ID NO: 273848 - DNA, 25 bp, Artificial
  probe
  misc_feature (1)..(25): SEQ ID NO: 801; WAN024BEH; Start 317; Stop 341
accacaagaatacctctaataccat

SEQ ID NO: 273849 - DNA, 25 bp, Artificial
  probe
  misc_feature (1)..(25): SEQ ID NO: 801; WAN024BEH; Start 316; Stop 340
taccacaagaatacctctaatacca

SEQ ID NO: 273850 - DNA, 25 bp, Artificial
  probe
  misc_feature (1)..(25): SEQ ID NO: 801; WAN024BEH; Start 315; Stop 339
ttaccacaagaatacctctaatacc

SEQ ID NO: 273851 - DNA, 25 bp, Artificial
  probe
  misc_feature (1)..(25): SEQ ID NO: 801; WAN024BEH; Start 221; Stop 245
ggaatattgcttgcagttgttatca

SEQ ID NO: 273852 - DNA, 25 bp, Artificial
  probe
  misc_feature (1)..(25): SEQ ID NO: 801; WAN024BEH; Start 220; Stop 244
tggaatattgcttgcagttgttatc

SEQ ID NO: 273853 - DNA, 25 bp, Artificial
  probe
  misc_feature (1)..(25): SEQ ID NO: 801; WAN024BEH; Start 402; Stop 426
agaagcgacacctgaatacatttat

SEQ ID NO: 273854 - DNA, 25 bp, Artificial
  probe
  misc_feature (1)..(25): SEQ ID NO: 801; WAN024BEH; Start 318; Stop 342
ccacaagaatacctctaataccata

SEQ ID NO: 273855 - DNA, 25 bp, Artificial
  probe
  misc_feature (1)..(25): SEQ ID NO: 801; WAN024BEH; Start 403; Stop 427
gaagcgacacctgaatacatttatg

SEQ ID NO: 273856 - DNA, 25 bp, Artificial
  probe
  misc_feature (1)..(25): SEQ ID NO: 801; WAN024BEH; Start 226; Stop 250
attgcttgcagttgttatcataagg

SEQ ID NO: 273857 - DNA, 25 bp, Artificial
  probe
  misc_feature (1)..(25): SEQ ID NO: 801; WAN024BEH; Start 401; Stop 425
gagaagcgacacctgaatacattta

SEQ ID NO: 273858 - DNA, 25 bp, Artificial
  probe
  misc_feature (1)..(25): SEQ ID NO: 801; WAN024BEH; Start 143; Stop 167
catttgcgaacttgattaaagaagc

SEQ ID NO: 273859 - DNA, 25 bp, Artificial
  probe
  misc_feature (1)..(25): SEQ ID NO: 801; WAN024BEH; Start 150; Stop 174
gaacttgattaaagaagcgtatggg

SEQ ID NO: 273860 - DNA, 25 bp, Artificial
  probe
  misc_feature (1)..(25): SEQ ID NO: 801; WAN024BEH; Start 149; Stop 173
cgaacttgattaaagaagcgtatgg

SEQ ID NO: 273861 - DNA, 25 bp, Artificial
  probe
  misc_feature (1)..(25): SEQ ID NO: 801; WAN024BEH; Start 244; Stop 268
cataaggctgatgggtattctttag

SEQ ID NO: 273862 - DNA, 25 bp, Artificial
  probe
  misc_feature (1)..(25): SEQ ID NO: 801; WAN024BEH; Start 222; Stop 246
gaatattgcttgcagttgttatcat

SEQ ID NO: 273863 - DNA, 25 bp, Artificial
  probe
  misc_feature (1)..(25): SEQ ID NO: 801; WAN024BEH; Start 31; Stop 55
acgaaacaacatacatttgaagagc

SEQ ID NO: 273864 - DNA, 25 bp, Artificial
  probe
  misc_feature (1)..(25): SEQ ID NO: 801; WAN024BEH; Start 148; Stop 172
gcgaacttgattaaagaagcgtatg

SEQ ID NO: 273865 - DNA, 25 bp, Artificial
  probe
  misc_feature (1)..(25): SEQ ID NO: 801; WAN024BEH; Start 144; Stop 168
atttgcgaacttgattaaagaagcg

SEQ ID NO: 273866 - DNA, 25 bp, Artificial
  probe
  misc_feature (1)..(25): SEQ ID NO: 801; WAN024BEH; Start 480; Stop 504
agttctgggattatcgtttagtacc

SEQ ID NO: 273867 - DNA, 25 bp, Artificial
  probe
  misc_feature (1)..(25): SEQ ID NO: 801; WAN024BEH; Start 137; Stop 161
cgtcttcatttgcgaacttgattaa

SEQ ID NO: 273868 - DNA, 25 bp, Artificial
  probe
  misc_feature (1)..(25): SEQ ID NO: 801; WAN024BEH; Start 243; Stop 267
tcataaggctgatgggtattcttta

SEQ ID NO: 273869 - DNA, 25 bp, Artificial
  probe
  misc_feature (1)..(25): SEQ ID NO: 801; WAN024BEH; Start 147; Stop 171
tgcgaacttgattaaagaagcgtat

SEQ ID NO: 273870 - DNA, 25 bp, Artificial
  probe
  misc_feature (1)..(25): SEQ ID NO: 801; WAN024BEH; Start 219; Stop 243
ctggaatattgcttgcagttgttat

SEQ ID NO: 273871 - DNA, 25 bp, Artificial
  probe
  misc_feature (1)..(25): SEQ ID NO: 801; WAN024BEH; Start 208; Stop 232
atgttggctctctggaatattgctt

SEQ ID NO: 273872 - DNA, 25 bp, Artificial
  probe
  misc_feature (1)..(25): SEQ ID NO: 801; WAN024BEH; Start 477; Stop 501
agaagttctgggattatcgtttagt

SEQ ID NO: 273873 - DNA, 25 bp, Artificial
  probe
  misc_feature (1)..(25): SEQ ID NO: 801; WAN024BEH; Start 478; Stop 502
gaagttctgggattatcgtttagta

SEQ ID NO: 273874 - DNA, 25 bp, Artificial
  probe
  misc_feature (1)..(25): SEQ ID NO: 801; WAN024BEH; Start 138; Stop 162
gtcttcatttgcgaacttgattaaa

SEQ ID NO: 273875 - DNA, 25 bp, Artificial
  probe
  misc_feature (1)..(25): SEQ ID NO: 801; WAN024BEH; Start 475; Stop 499
agagaagttctgggattatcgttta

SEQ ID NO: 273876 - DNA, 25 bp, Artificial
  probe
  misc_feature (1)..(25): SEQ ID NO: 801; WAN024BEH; Start 474; Stop 498
tagagaagttctgggattatcgttt

SEQ ID NO: 273877 - DNA, 25 bp, Artificial
  probe
  misc_feature (1)..(25): SEQ ID NO: 801; WAN024BEH; Start 473; Stop 497
ttagagaagttctgggattatcgtt

SEQ ID NO: 273878 - DNA, 25 bp, Artificial
  probe
  misc_feature (1)..(25): SEQ ID NO: 801; WAN024BEH; Start 146; Stop 170
ttgcgaacttgattaaagaagcgta

SEQ ID NO: 273879 - DNA, 25 bp, Artificial
  probe
  misc_feature (1)..(25): SEQ ID NO: 801; WAN024BEH; Start 30; Stop 54
aacgaaacaacatacatttgaagag

SEQ ID NO: 273880 - DNA, 25 bp, Artificial
  probe
  misc_feature (1)..(25): SEQ ID NO: 801; WAN024BEH; Start 29; Stop 53
gaacgaaacaacatacatttgaaga

SEQ ID NO: 273881 - DNA, 25 bp, Artificial
  probe
  misc_feature (1)..(25): SEQ ID NO: 802; WAN024GHR; Start 166; Stop 190
taccatagttcaacagttgttagca

SEQ ID NO: 273882 - DNA, 25 bp, Artificial
  probe
  misc_feature (1)..(25): SEQ ID NO: 802; WAN024GHR; Start 169; Stop 193
catagttcaacagttgttagcagaa

SEQ ID NO: 273883 - DNA, 25 bp, Artificial
  probe
  misc_feature (1)..(25): SEQ ID NO: 802; WAN024GHR; Start 165; Stop 189
ataccatagttcaacagttgttagc

SEQ ID NO: 273884 - DNA, 25 bp, Artificial
  probe
  misc_feature (1)..(25): SEQ ID NO: 802; WAN024GHR; Start 168; Stop 192
ccatagttcaacagttgttagcaga

SEQ ID NO: 273885 - DNA, 25 bp, Artificial
  probe
  misc_feature (1)..(25): SEQ ID NO: 802; WAN024GHR; Start 167; Stop 191
accatagttcaacagttgttagcag

SEQ ID NO: 273886 - DNA, 25 bp, Artificial
  probe
  misc_feature (1)..(25): SEQ ID NO: 802; WAN024GHR; Start 136; Stop 160
gcttactcaaactactatcaccctt

SEQ ID NO: 273887 - DNA, 25 bp, Artificial
  probe
  misc_feature (1)..(25): SEQ ID NO: 802; WAN024GHR; Start 131; Stop 155
gtggtgcttactcaaactactatca

SEQ ID NO: 273888 - DNA, 25 bp, Artificial
  probe
  misc_feature (1)..(25): SEQ ID NO: 802; WAN024GHR; Start 140; Stop 164
actcaaactactatcacccttcaaa

SEQ ID NO: 273889 - DNA, 25 bp, Artificial
  probe
  misc_feature (1)..(25): SEQ ID NO: 802; WAN024GHR; Start 135; Stop 159
tgcttactcaaactactatcaccct

SEQ ID NO: 273890 - DNA, 25 bp, Artificial
  probe
  misc_feature (1)..(25): SEQ ID NO: 802; WAN024GHR; Start 130; Stop 154
ggtggtgcttactcaaactactatc

SEQ ID NO: 273891 - DNA, 25 bp, Artificial
  probe
  misc_feature (1)..(25): SEQ ID NO: 802; WAN024GHR; Start 104; Stop 128
gtgtttggacttatggttcaggtaa

SEQ ID NO: 273892 - DNA, 25 bp, Artificial
  probe
  misc_feature (1)..(25): SEQ ID NO: 802; WAN024GHR; Start 139; Stop 163
tactcaaactactatcacccttcaa

SEQ ID NO: 273893 - DNA, 25 bp, Artificial
  probe
  misc_feature (1)..(25): SEQ ID NO: 802; WAN024GHR; Start 138; Stop 162
ttactcaaactactatcacccttca

SEQ ID NO: 273894 - DNA, 25 bp, Artificial
  probe
  misc_feature (1)..(25): SEQ ID NO: 802; WAN024GHR; Start 105; Stop 129
tgtttggacttatggttcaggtaac

SEQ ID NO: 273895 - DNA, 25 bp, Artificial
  probe
  misc_feature (1)..(25): SEQ ID NO: 802; WAN024GHR; Start 137; Stop 161
cttactcaaactactatcacccttc

SEQ ID NO: 273896 - DNA, 25 bp, Artificial
  probe
  misc_feature (1)..(25): SEQ ID NO: 802; WAN024GHR; Start 195; Stop 219
aactggttcatctgacaagggatat

SEQ ID NO: 273897 - DNA, 25 bp, Artificial
  probe
  misc_feature (1)..(25): SEQ ID NO: 802; WAN024GHR; Start 194; Stop 218
aaactggttcatctgacaagggata

SEQ ID NO: 273898 - DNA, 25 bp, Artificial
  probe
  misc_feature (1)..(25): SEQ ID NO: 802; WAN024GHR; Start 106; Stop 130
gtttggacttatggttcaggtaacg

SEQ ID NO: 273899 - DNA, 25 bp, Artificial
  probe
  misc_feature (1)..(25): SEQ ID NO: 802; WAN024GHR; Start 132; Stop 156
tggtgcttactcaaactactatcac

SEQ ID NO: 273900 - DNA, 25 bp, Artificial
  probe
  misc_feature (1)..(25): SEQ ID NO: 802; WAN024GHR; Start 196; Stop 220
actggttcatctgacaagggatatg

SEQ ID NO: 273901 - DNA, 25 bp, Artificial
  probe
  misc_feature (1)..(25): SEQ ID NO: 802; WAN024GHR; Start 129; Stop 153
cggtggtgcttactcaaactactat

SEQ ID NO: 273902 - DNA, 25 bp, Artificial
  probe
  misc_feature (1)..(25): SEQ ID NO: 802; WAN024GHR; Start 164; Stop 188
aataccatagttcaacagttgttag

SEQ ID NO: 273903 - DNA, 25 bp, Artificial
  probe
  misc_feature (1)..(25): SEQ ID NO: 802; WAN024GHR; Start 134; Stop 158
gtgcttactcaaactactatcaccc

SEQ ID NO: 273904 - DNA, 25 bp, Artificial
  probe
  misc_feature (1)..(25): SEQ ID NO: 802; WAN024GHR; Start 103; Stop 127
ggtgtttggacttatggttcaggta

SEQ ID NO: 273905 - DNA, 25 bp, Artificial
  probe
  misc_feature (1)..(25): SEQ ID NO: 802; WAN024GHR; Start 170; Stop 194
atagttcaacagttgttagcagaaa

SEQ ID NO: 273906 - DNA, 25 bp, Artificial
  probe
  misc_feature (1)..(25): SEQ ID NO: 802; WAN024GHR; Start 108; Stop 132
ttggacttatggttcaggtaacggt

SEQ ID NO: 273907 - DNA, 25 bp, Artificial
  probe
  misc_feature (1)..(25): SEQ ID NO: 802; WAN024GHR; Start 126; Stop 150
taacggtggtgcttactcaaactac

SEQ ID NO: 273908 - DNA, 25 bp, Artificial
  probe
  misc_feature (1)..(25): SEQ ID NO: 802; WAN024GHR; Start 107; Stop 131
tttggacttatggttcaggtaacgg

SEQ ID NO: 273909 - DNA, 25 bp, Artificial
  probe
  misc_feature (1)..(25): SEQ ID NO: 802; WAN024GHR; Start 98; Stop 122
aaggtggtgtttggacttatggttc

SEQ ID NO: 273910 - DNA, 25 bp, Artificial
  probe
  misc_feature (1)..(25): SEQ ID NO: 802; WAN024GHR; Start 97; Stop 121
gaaggtggtgtttggacttatggtt

SEQ ID NO: 273911 - DNA, 25 bp, Artificial
  probe
  misc_feature (1)..(25): SEQ ID NO: 802; WAN024GHR; Start 153; Stop 177
tcacccttcaaaataccatagttca

SEQ ID NO: 273912 - DNA, 25 bp, Artificial
  probe
  misc_feature (1)..(25): SEQ ID NO: 802; WAN024GHR; Start 111; Stop 135
gacttatggttcaggtaacggtggt

SEQ ID NO: 273913 - DNA, 25 bp, Artificial
  probe
  misc_feature (1)..(25): SEQ ID NO: 802; WAN024GHR; Start 109; Stop 133
tggacttatggttcaggtaacggtg

SEQ ID NO: 273914 - DNA, 25 bp, Artificial
  probe
  misc_feature (1)..(25): SEQ ID NO: 803; WAN024B3B; Start 717; Stop 741
ttatgactacgatgccaagtatatc

SEQ ID NO: 273915 - DNA, 25 bp, Artificial
  probe
  misc_feature (1)..(25): SEQ ID NO: 803; WAN024B3B; Start 494; Stop 518
cttatccagtcttcaccaaaccatc

SEQ ID NO: 273916 - DNA, 25 bp, Artificial
  probe
  misc_feature (1)..(25): SEQ ID NO: 803; WAN024B3B; Start 579; Stop 603
tttgaaacttgccttccaatatgac

SEQ ID NO: 273917 - DNA, 25 bp, Artificial
  probe
  misc_feature (1)..(25): SEQ ID NO: 803; WAN024B3B; Start 578; Stop 602
ctttgaaacttgccttccaatatga

SEQ ID NO: 273918 - DNA, 25 bp, Artificial
  probe
  misc_feature (1)..(25): SEQ ID NO: 803; WAN024B3B; Start 496; Stop 520
tatccagtcttcaccaaaccatcaa

SEQ ID NO: 273919 - DNA, 25 bp, Artificial
  probe
  misc_feature (1)..(25): SEQ ID NO: 803; WAN024B3B; Start 495; Stop 519
ttatccagtcttcaccaaaccatca

SEQ ID NO: 273920 - DNA, 25 bp, Artificial
  probe
  misc_feature (1)..(25): SEQ ID NO: 803; WAN024B3B; Start 500; Stop 524
cagtcttcaccaaaccatcaaacat

SEQ ID NO: 273921 - DNA, 25 bp, Artificial
  probe
  misc_feature (1)..(25): SEQ ID NO: 803; WAN024B3B; Start 577; Stop 601
gctttgaaacttgccttccaatatg

SEQ ID NO: 273922 - DNA, 25 bp, Artificial
  probe
  misc_feature (1)..(25): SEQ ID NO: 803; WAN024B3B; Start 692; Stop 716
gagaagttgtcaaagatgttgcctt

SEQ ID NO: 273923 - DNA, 25 bp, Artificial
  probe
  misc_feature (1)..(25): SEQ ID NO: 803; WAN024B3B; Start 493; Stop 517
acttatccagtcttcaccaaaccat

SEQ ID NO: 273924 - DNA, 25 bp, Artificial
  probe
  misc_feature (1)..(25): SEQ ID NO: 803; WAN024B3B; Start 688; Stop 712
ccaggagaagttgtcaaagatgttg

SEQ ID NO: 273925 - DNA, 25 bp, Artificial
  probe
  misc_feature (1)..(25): SEQ ID NO: 803; WAN024B3B; Start 497; Stop 521
atccagtcttcaccaaaccatcaaa

SEQ ID NO: 273926 - DNA, 25 bp, Artificial
  probe
  misc_feature (1)..(25): SEQ ID NO: 803; WAN024B3B; Start 97; Stop 121
gatcgtttcacagtcaagactttct

SEQ ID NO: 273927 - DNA, 25 bp, Artificial
  probe
  misc_feature (1)..(25): SEQ ID NO: 803; WAN024B3B; Start 501; Stop 525
agtcttcaccaaaccatcaaacatg

SEQ ID NO: 273928 - DNA, 25 bp, Artificial
  probe
  misc_feature (1)..(25): SEQ ID NO: 803; WAN024B3B; Start 689; Stop 713
caggagaagttgtcaaagatgttgc

SEQ ID NO: 273929 - DNA, 25 bp, Artificial
  probe
  misc_feature (1)..(25): SEQ ID NO: 803; WAN024B3B; Start 116; Stop 140
ctttctttatcagccagtcaggtga

SEQ ID NO: 273930 - DNA, 25 bp, Artificial
  probe
  misc_feature (1)..(25): SEQ ID NO: 803; WAN024B3B; Start 576; Stop 600
agctttgaaacttgccttccaatat

SEQ ID NO: 273931 - DNA, 25 bp, Artificial
  probe
  misc_feature (1)..(25): SEQ ID NO: 803; WAN024B3B; Start 115; Stop 139
actttctttatcagccagtcaggtg

SEQ ID NO: 273932 - DNA, 25 bp, Artificial
  probe
  misc_feature (1)..(25): SEQ ID NO: 803; WAN024B3B; Start 300; Stop 324
ctctgttcaaggattcttggaagtt

SEQ ID NO: 273933 - DNA, 25 bp, Artificial
  probe
  misc_feature (1)..(25): SEQ ID NO: 803; WAN024B3B; Start 488; Stop 512
aattgacttatccagtcttcaccaa

SEQ ID NO: 273934 - DNA, 25 bp, Artificial
  probe
  misc_feature (1)..(25): SEQ ID NO: 803; WAN024B3B; Start 498; Stop 522
tccagtcttcaccaaaccatcaaac

SEQ ID NO: 273935 - DNA, 25 bp, Artificial
  probe
  misc_feature (1)..(25): SEQ ID NO: 803; WAN024B3B; Start 705; Stop 729
agatgttgccttttatgactacgat

SEQ ID NO: 273936 - DNA, 25 bp, Artificial
  probe
  misc_feature (1)..(25): SEQ ID NO: 803; WAN024B3B; Start 109; Stop 133
gtcaagactttctttatcagccagt

SEQ ID NO: 273937 - DNA, 25 bp, Artificial
  probe
  misc_feature (1)..(25): SEQ ID NO: 803; WAN024B3B; Start 693; Stop 717
agaagttgtcaaagatgttgccttt

SEQ ID NO: 273938 - DNA, 25 bp, Artificial
  probe
  misc_feature (1)..(25): SEQ ID NO: 803; WAN024B3B; Start 105; Stop 129
cacagtcaagactttctttatcagc

SEQ ID NO: 273939 - DNA, 25 bp, Artificial
  probe
  misc_feature (1)..(25): SEQ ID NO: 803; WAN024B3B; Start 100; Stop 124
cgtttcacagtcaagactttcttta

SEQ ID NO: 273940 - DNA, 25 bp, Artificial
  probe
  misc_feature (1)..(25): SEQ ID NO: 803; WAN024B3B; Start 687; Stop 711
gccaggagaagttgtcaaagatgtt

SEQ ID NO: 273941 - DNA, 25 bp, Artificial
  probe
  misc_feature (1)..(25): SEQ ID NO: 803; WAN024B3B; Start 463; Stop 487
gctaaaattgctgaagtggaagaaa

SEQ ID NO: 273942 - DNA, 25 bp, Artificial
  probe
  misc_feature (1)..(25): SEQ ID NO: 803; WAN024B3B; Start 860; Stop 884
atttcttctatacagataagggtga

SEQ ID NO: 273943 - DNA, 25 bp, Artificial
  probe
  misc_feature (1)..(25): SEQ ID NO: 803; WAN024B3B; Start 704; Stop 728
aagatgttgccttttatgactacga

SEQ ID NO: 273944 - DNA, 25 bp, Artificial
  probe
  misc_feature (1)..(25): SEQ ID NO: 803; WAN024B3B; Start 108; Stop 132
agtcaagactttctttatcagccag

SEQ ID NO: 273945 - DNA, 25 bp, Artificial
  probe
  misc_feature (1)..(25): SEQ ID NO: 803; WAN024B3B; Start 445; Stop 469
gaaggggatgatttgactgctaaaa

SEQ ID NO: 273946 - DNA, 25 bp, Artificial
  probe
  misc_feature (1)..(25): SEQ ID NO: 803; WAN024B3B; Start 98; Stop 122
atcgtttcacagtcaagactttctt

SEQ ID NO: 273947 - DNA, 25 bp, Artificial
  probe
  misc_feature (1)..(25): SEQ ID NO: 804; WAN024B3A; Start 410; Stop 434
ctggtattgctcaagttccttatgt

SEQ ID NO: 273948 - DNA, 25 bp, Artificial
  probe
  misc_feature (1)..(25): SEQ ID NO: 804; WAN024B3A; Start 411; Stop 435
tggtattgctcaagttccttatgtg

SEQ ID NO: 273949 - DNA, 25 bp, Artificial
  probe
  misc_feature (1)..(25): SEQ ID NO: 804; WAN024B3A; Start 295; Stop 319
gatggctctgttcaaggattcttag

SEQ ID NO: 273950 - DNA, 25 bp, Artificial
  probe
  misc_feature (1)..(25): SEQ ID NO: 804; WAN024B3A; Start 296; Stop 320
atggctctgttcaaggattcttaga

SEQ ID NO: 273951 - DNA, 25 bp, Artificial
  probe
  misc_feature (1)..(25): SEQ ID NO: 804; WAN024B3A; Start 294; Stop 318
agatggctctgttcaaggattctta

SEQ ID NO: 273952 - DNA, 25 bp, Artificial
  probe
  misc_feature (1)..(25): SEQ ID NO: 804; WAN024B3A; Start 299; Stop 323
gctctgttcaaggattcttagaagt

SEQ ID NO: 273953 - DNA, 25 bp, Artificial
  probe
  misc_feature (1)..(25): SEQ ID NO: 804; WAN024B3A; Start 412; Stop 436
ggtattgctcaagttccttatgtgg

SEQ ID NO: 273954 - DNA, 25 bp, Artificial
  probe
  misc_feature (1)..(25): SEQ ID NO: 804; WAN024B3A; Start 298; Stop 322
ggctctgttcaaggattcttagaag

SEQ ID NO: 273955 - DNA, 25 bp, Artificial
  probe
  misc_feature (1)..(25): SEQ ID NO: 804; WAN024B3A; Start 409; Stop 433
gctggtattgctcaagttccttatg

SEQ ID NO: 273956 - DNA, 25 bp, Artificial
  probe
  misc_feature (1)..(25): SEQ ID NO: 804; WAN024B3A; Start 300; Stop 324
ctctgttcaaggattcttagaagtt

SEQ ID NO: 273957 - DNA, 25 bp, Artificial
  probe
  misc_feature (1)..(25): SEQ ID NO: 804; WAN024B3A; Start 297; Stop 321
tggctctgttcaaggattcttagaa

SEQ ID NO: 273958 - DNA, 25 bp, Artificial
  probe
  misc_feature (1)..(25): SEQ ID NO: 804; WAN024B3A; Start 413; Stop 437
gtattgctcaagttccttatgtggc

SEQ ID NO: 273959 - DNA, 25 bp, Artificial
  probe
  misc_feature (1)..(25): SEQ ID NO: 804; WAN024B3A; Start 408; Stop 432
tgctggtattgctcaagttccttat

SEQ ID NO: 273960 - DNA, 25 bp, Artificial
  probe
  misc_feature (1)..(25): SEQ ID NO: 804; WAN024B3A; Start 403; Stop 427
gaatctgctggtattgctcaagttc

SEQ ID NO: 273961 - DNA, 25 bp, Artificial
  probe
  misc_feature (1)..(25): SEQ ID NO: 804; WAN024B3A; Start 230; Stop 254
taccaagtgctatttacgaagaagg

SEQ ID NO: 273962 - DNA, 25 bp, Artificial
  probe
  misc_feature (1)..(25): SEQ ID NO: 804; WAN024B3A; Start 945; Stop 969
actttgggataatatgggaatcagc

SEQ ID NO: 273963 - DNA, 25 bp, Artificial
  probe
  misc_feature (1)..(25): SEQ ID NO: 804; WAN024B3A; Start 407; Stop 431
ctgctggtattgctcaagttcctta

SEQ ID NO: 273964 - DNA, 25 bp, Artificial
  probe
  misc_feature (1)..(25): SEQ ID NO: 804; WAN024B3A; Start 92; Stop 116
attacaaccgtttcacagttaagac

SEQ ID NO: 273965 - DNA, 25 bp, Artificial
  probe
  misc_feature (1)..(25): SEQ ID NO: 804; WAN024B3A; Start 88; Stop 112
gtcaattacaaccgtttcacagtta

SEQ ID NO: 273966 - DNA, 25 bp, Artificial
  probe
  misc_feature (1)..(25): SEQ ID NO: 804; WAN024B3A; Start 207; Stop 231
cattgattgggataagcaagttgta

SEQ ID NO: 273967 - DNA, 25 bp, Artificial
  probe
  misc_feature (1)..(25): SEQ ID NO: 804; WAN024B3A; Start 89; Stop 113
tcaattacaaccgtttcacagttaa

SEQ ID NO: 273968 - DNA, 25 bp, Artificial
  probe
  misc_feature (1)..(25): SEQ ID NO: 804; WAN024B3A; Start 90; Stop 114
caattacaaccgtttcacagttaag

SEQ ID NO: 273969 - DNA, 25 bp, Artificial
  probe
  misc_feature (1)..(25): SEQ ID NO: 804; WAN024B3A; Start 91; Stop 115
aattacaaccgtttcacagttaaga

SEQ ID NO: 273970 - DNA, 25 bp, Artificial
  probe
  misc_feature (1)..(25): SEQ ID NO: 804; WAN024B3A; Start 229; Stop 253
gtaccaagtgctatttacgaagaag

SEQ ID NO: 273971 - DNA, 25 bp, Artificial
  probe
  misc_feature (1)..(25): SEQ ID NO: 804; WAN024B3A; Start 228; Stop 252
tgtaccaagtgctatttacgaagaa

SEQ ID NO: 273972 - DNA, 25 bp, Artificial
  probe
  misc_feature (1)..(25): SEQ ID NO: 804; WAN024B3A; Start 94; Stop 118
tacaaccgtttcacagttaagactt

SEQ ID NO: 273973 - DNA, 25 bp, Artificial
  probe
  misc_feature (1)..(25): SEQ ID NO: 804; WAN024B3A; Start 93; Stop 117
ttacaaccgtttcacagttaagact

SEQ ID NO: 273974 - DNA, 25 bp, Artificial
  probe
  misc_feature (1)..(25): SEQ ID NO: 804; WAN024B3A; Start 97; Stop 121
aaccgtttcacagttaagactttct

SEQ ID NO: 273975 - DNA, 25 bp, Artificial
  probe
  misc_feature (1)..(25): SEQ ID NO: 804; WAN024B3A; Start 96; Stop 120
caaccgtttcacagttaagactttc

SEQ ID NO: 273976 - DNA, 25 bp, Artificial
  probe
  misc_feature (1)..(25): SEQ ID NO: 804; WAN024B3A; Start 404; Stop 428
aatctgctggtattgctcaagttcc

SEQ ID NO: 273977 - DNA, 25 bp, Artificial
  probe
  misc_feature (1)..(25): SEQ ID NO: 804; WAN024B3A; Start 402; Stop 426
ggaatctgctggtattgctcaagtt

SEQ ID NO: 273978 - DNA, 25 bp, Artificial
  probe
  misc_feature (1)..(25): SEQ ID NO: 804; WAN024B3A; Start 232; Stop 256
ccaagtgctatttacgaagaaggtg

SEQ ID NO: 273979 - DNA, 25 bp, Artificial
  probe
  misc_feature (1)..(25): SEQ ID NO: 804; WAN024B3A; Start 941; Stop 965
cactactttgggataatatgggaat

SEQ ID NO: 273980 - DNA, 25 bp, Artificial
  probe
  misc_feature (1)..(25): SEQ ID NO: 805; WAN024B3C; Start 623; Stop 647
aaggagtgaatgcccgtgaaattga

SEQ ID NO: 273981 - DNA, 25 bp, Artificial
  probe
  misc_feature (1)..(25): SEQ ID NO: 805; WAN024B3C; Start 622; Stop 646
caaggagtgaatgcccgtgaaattg

SEQ ID NO: 273982 - DNA, 25 bp, Artificial
  probe
  misc_feature (1)..(25): SEQ ID NO: 805; WAN024B3C; Start 628; Stop 652
gtgaatgcccgtgaaattgaggttg

SEQ ID NO: 273983 - DNA, 25 bp, Artificial
  probe
  misc_feature (1)..(25): SEQ ID NO: 806; WAN024F64; Start 118; Stop 142
tattcttatctaccacttgccaacc

SEQ ID NO: 273984 - DNA, 25 bp, Artificial
  probe
  misc_feature (1)..(25): SEQ ID NO: 806; WAN024F64; Start 1754; Stop 1778
ccgatggcattgtagaagttaagat

SEQ ID NO: 273985 - DNA, 25 bp, Artificial
  probe
  misc_feature (1)..(25): SEQ ID NO: 806; WAN024F64; Start 749; Stop 773
aatggatagtctctggtgaagatac

SEQ ID NO: 273986 - DNA, 25 bp, Artificial
  probe
  misc_feature (1)..(25): SEQ ID NO: 806; WAN024F64; Start 117; Stop 141
ttattcttatctaccacttgccaac

SEQ ID NO: 273987 - DNA, 25 bp, Artificial
  probe
  misc_feature (1)..(25): SEQ ID NO: 806; WAN024F64; Start 767; Stop 791
aagataccattgcttactcaagtga

SEQ ID NO: 273988 - DNA, 25 bp, Artificial
  probe
  misc_feature (1)..(25): SEQ ID NO: 806; WAN024F64; Start 766; Stop 790
gaagataccattgcttactcaagtg

SEQ ID NO: 273989 - DNA, 25 bp, Artificial
  probe
  misc_feature (1)..(25): SEQ ID NO: 806; WAN024F64; Start 1578; Stop 1602
tactgtcaatgtcaaggatgaagaa

SEQ ID NO: 273990 - DNA, 25 bp, Artificial
  probe
  misc_feature (1)..(25): SEQ ID NO: 806; WAN024F64; Start 1577; Stop 1601
ttactgtcaatgtcaaggatgaaga

SEQ ID NO: 273991 - DNA, 25 bp, Artificial
  probe
  misc_feature (1)..(25): SEQ ID NO: 806; WAN024F64; Start 1574; Stop 1598
tgattactgtcaatgtcaaggatga

SEQ ID NO: 273992 - DNA, 25 bp, Artificial
  probe
  misc_feature (1)..(25): SEQ ID NO: 806; WAN024F64; Start 765; Stop 789
tgaagataccattgcttactcaagt

SEQ ID NO: 273993 - DNA, 25 bp, Artificial
  probe
  misc_feature (1)..(25): SEQ ID NO: 806; WAN024F64; Start 764; Stop 788
gtgaagataccattgcttactcaag

SEQ ID NO: 273994 - DNA, 25 bp, Artificial
  probe
  misc_feature (1)..(25): SEQ ID NO: 806; WAN024F64; Start 570; Stop 594
agacttcaaggctattattggtgac

SEQ ID NO: 273995 - DNA, 25 bp, Artificial
  probe
  misc_feature (1)..(25): SEQ ID NO: 806; WAN024F64; Start 1755; Stop 1779
cgatggcattgtagaagttaagatc

SEQ ID NO: 273996 - DNA, 25 bp, Artificial
  probe
  misc_feature (1)..(25): SEQ ID NO: 806; WAN024F64; Start 569; Stop 593
tagacttcaaggctattattggtga

SEQ ID NO: 273997 - DNA, 25 bp, Artificial
  probe
  misc_feature (1)..(25): SEQ ID NO: 806; WAN024F64; Start 1576; Stop 1600
attactgtcaatgtcaaggatgaag

SEQ ID NO: 273998 - DNA, 25 bp, Artificial
  probe
  misc_feature (1)..(25): SEQ ID NO: 806; WAN024F64; Start 1575; Stop 1599
gattactgtcaatgtcaaggatgaa

SEQ ID NO: 273999 - DNA, 25 bp, Artificial
  probe
  misc_feature (1)..(25): SEQ ID NO: 806; WAN024F64; Start 1579; Stop 1603
actgtcaatgtcaaggatgaagaag

SEQ ID NO: 274000 - DNA, 25 bp, Artificial
  probe
  misc_feature (1)..(25): SEQ ID NO: 806; WAN024F64; Start 568; Stop 592
ttagacttcaaggctattattggtg

SEQ ID NO: 274001 - DNA, 25 bp, Artificial
  probe
  misc_feature (1)..(25): SEQ ID NO: 806; WAN024F64; Start 1760; Stop 1784
gcattgtagaagttaagatcaaggc

SEQ ID NO: 274002 - DNA, 25 bp, Artificial
  probe
  misc_feature (1)..(25): SEQ ID NO: 806; WAN024F64; Start 1759; Stop 1783
ggcattgtagaagttaagatcaagg

SEQ ID NO: 274003 - DNA, 25 bp, Artificial
  probe
  misc_feature (1)..(25): SEQ ID NO: 806; WAN024F64; Start 1756; Stop 1780
gatggcattgtagaagttaagatca

SEQ ID NO: 274004 - DNA, 25 bp, Artificial
  probe
  misc_feature (1)..(25): SEQ ID NO: 806; WAN024F64; Start 850; Stop 874
gttgtcgctgaagaagaagttactc

SEQ ID NO: 274005 - DNA, 25 bp, Artificial
  probe
  misc_feature (1)..(25): SEQ ID NO: 806; WAN024F64; Start 1646; Stop 1670
ctggttatgaagtcttgacagatga

SEQ ID NO: 274006 - DNA, 25 bp, Artificial
  probe
  misc_feature (1)..(25): SEQ ID NO: 806; WAN024F64; Start 1763; Stop 1787
ttgtagaagttaagatcaaggcaac

SEQ ID NO: 274007 - DNA, 25 bp, Artificial
  probe
  misc_feature (1)..(25): SEQ ID NO: 806; WAN024F64; Start 1647; Stop 1671
tggttatgaagtcttgacagatgac

SEQ ID NO: 274008 - DNA, 25 bp, Artificial
  probe
  misc_feature (1)..(25): SEQ ID NO: 806; WAN024F64; Start 1761; Stop 1785
cattgtagaagttaagatcaaggca

SEQ ID NO: 274009 - DNA, 25 bp, Artificial
  probe
  misc_feature (1)..(25): SEQ ID NO: 806; WAN024F64; Start 1758; Stop 1782
tggcattgtagaagttaagatcaag

SEQ ID NO: 274010 - DNA, 25 bp, Artificial
  probe
  misc_feature (1)..(25): SEQ ID NO: 806; WAN024F64; Start 857; Stop 881
ctgaagaagaagttactcgtgttgc

SEQ ID NO: 274011 - DNA, 25 bp, Artificial
  probe
  misc_feature (1)..(25): SEQ ID NO: 806; WAN024F64; Start 856; Stop 880
gctgaagaagaagttactcgtgttg

SEQ ID NO: 274012 - DNA, 25 bp, Artificial
  probe
  misc_feature (1)..(25): SEQ ID NO: 806; WAN024F64; Start 571; Stop 595
gacttcaaggctattattggtgacg

SEQ ID NO: 274013 - DNA, 25 bp, Artificial
  probe
  misc_feature (1)..(25): SEQ ID NO: 806; WAN024F64; Start 1651; Stop 1675
tatgaagtcttgacagatgaccgta

SEQ ID NO: 274014 - DNA, 25 bp, Artificial
  probe
  misc_feature (1)..(25): SEQ ID NO: 806; WAN024F64; Start 848; Stop 872
gtgttgtcgctgaagaagaagttac

SEQ ID NO: 274015 - DNA, 25 bp, Artificial
  probe
  misc_feature (1)..(25): SEQ ID NO: 806; WAN024F64; Start 768; Stop 792
agataccattgcttactcaagtgag

SEQ ID NO: 274016 - DNA, 25 bp, Artificial
  probe
  misc_feature (1)..(25): SEQ ID NO: 807; WAN024CZT; Start 172; Stop 196
attcgttatgagttacttgctgtga

SEQ ID NO: 274017 - DNA, 25 bp, Artificial
  probe
  misc_feature (1)..(25): SEQ ID NO: 807; WAN024CZT; Start 171; Stop 195
aattcgttatgagttacttgctgtg

SEQ ID NO: 274018 - DNA, 25 bp, Artificial
  probe
  misc_feature (1)..(25): SEQ ID NO: 807; WAN024CZT; Start 173; Stop 197
ttcgttatgagttacttgctgtgaa

SEQ ID NO: 274019 - DNA, 25 bp, Artificial
  probe
  misc_feature (1)..(25): SEQ ID NO: 807; WAN024CZT; Start 241; Stop 265
gattacggaatgatgaatggagcaa

SEQ ID NO: 274020 - DNA, 25 bp, Artificial
  probe
  misc_feature (1)..(25): SEQ ID NO: 807; WAN024CZT; Start 240; Stop 264
ggattacggaatgatgaatggagca

SEQ ID NO: 274021 - DNA, 25 bp, Artificial
  probe
  misc_feature (1)..(25): SEQ ID NO: 807; WAN024CZT; Start 165; Stop 189
gccacaaattcgttatgagttactt

SEQ ID NO: 274022 - DNA, 25 bp, Artificial
  probe
  misc_feature (1)..(25): SEQ ID NO: 807; WAN024CZT; Start 222; Stop 246
agataccattgatatgcgggattac

SEQ ID NO: 274023 - DNA, 25 bp, Artificial
  probe
  misc_feature (1)..(25): SEQ ID NO: 807; WAN024CZT; Start 220; Stop 244
gtagataccattgatatgcgggatt

SEQ ID NO: 274024 - DNA, 25 bp, Artificial
  probe
  misc_feature (1)..(25): SEQ ID NO: 807; WAN024CZT; Start 174; Stop 198
tcgttatgagttacttgctgtgaaa

SEQ ID NO: 274025 - DNA, 25 bp, Artificial
  probe
  misc_feature (1)..(25): SEQ ID NO: 807; WAN024CZT; Start 242; Stop 266
attacggaatgatgaatggagcaaa

SEQ ID NO: 274026 - DNA, 25 bp, Artificial
  probe
  misc_feature (1)..(25): SEQ ID NO: 807; WAN024CZT; Start 170; Stop 194
aaattcgttatgagttacttgctgt

SEQ ID NO: 274027 - DNA, 25 bp, Artificial
  probe
  misc_feature (1)..(25): SEQ ID NO: 807; WAN024CZT; Start 175; Stop 199
cgttatgagttacttgctgtgaaag

SEQ ID NO: 274028 - DNA, 25 bp, Artificial
  probe
  misc_feature (1)..(25): SEQ ID NO: 807; WAN024CZT; Start 176; Stop 200
gttatgagttacttgctgtgaaaga

SEQ ID NO: 274029 - DNA, 25 bp, Artificial
  probe
  misc_feature (1)..(25): SEQ ID NO: 807; WAN024CZT; Start 180; Stop 204
tgagttacttgctgtgaaagaaatt

SEQ ID NO: 274030 - DNA, 25 bp, Artificial
  probe
  misc_feature (1)..(25): SEQ ID NO: 807; WAN024CZT; Start 179; Stop 203
atgagttacttgctgtgaaagaaat

SEQ ID NO: 274031 - DNA, 25 bp, Artificial
  probe
  misc_feature (1)..(25): SEQ ID NO: 807; WAN024CZT; Start 221; Stop 245
tagataccattgatatgcgggatta

SEQ ID NO: 274032 - DNA, 25 bp, Artificial
  probe
  misc_feature (1)..(25): SEQ ID NO: 807; WAN024CZT; Start 182; Stop 206
agttacttgctgtgaaagaaattgc

SEQ ID NO: 274033 - DNA, 25 bp, Artificial
  probe
  misc_feature (1)..(25): SEQ ID NO: 807; WAN024CZT; Start 181; Stop 205
gagttacttgctgtgaaagaaattg

SEQ ID NO: 274034 - DNA, 25 bp, Artificial
  probe
  misc_feature (1)..(25): SEQ ID NO: 807; WAN024CZT; Start 219; Stop 243
tgtagataccattgatatgcgggat

SEQ ID NO: 274035 - DNA, 25 bp, Artificial
  probe
  misc_feature (1)..(25): SEQ ID NO: 807; WAN024CZT; Start 15; Stop 39
attagtatgtaatgcgggaatgtcg

SEQ ID NO: 274036 - DNA, 25 bp, Artificial
  probe
  misc_feature (1)..(25): SEQ ID NO: 807; WAN024CZT; Start 168; Stop 192
acaaattcgttatgagttacttgct

SEQ ID NO: 274037 - DNA, 25 bp, Artificial
  probe
  misc_feature (1)..(25): SEQ ID NO: 807; WAN024CZT; Start 167; Stop 191
cacaaattcgttatgagttacttgc

SEQ ID NO: 274038 - DNA, 25 bp, Artificial
  probe
  misc_feature (1)..(25): SEQ ID NO: 807; WAN024CZT; Start 178; Stop 202
tatgagttacttgctgtgaaagaaa

SEQ ID NO: 274039 - DNA, 25 bp, Artificial
  probe
  misc_feature (1)..(25): SEQ ID NO: 807; WAN024CZT; Start 177; Stop 201
ttatgagttacttgctgtgaaagaa

SEQ ID NO: 274040 - DNA, 25 bp, Artificial
  probe
  misc_feature (1)..(25): SEQ ID NO: 807; WAN024CZT; Start 169; Stop 193
caaattcgttatgagttacttgctg

SEQ ID NO: 274041 - DNA, 25 bp, Artificial
  probe
  misc_feature (1)..(25): SEQ ID NO: 807; WAN024CZT; Start 223; Stop 247
gataccattgatatgcgggattacg

SEQ ID NO: 274042 - DNA, 25 bp, Artificial
  probe
  misc_feature (1)..(25): SEQ ID NO: 807; WAN024CZT; Start 14; Stop 38
tattagtatgtaatgcgggaatgtc

SEQ ID NO: 274043 - DNA, 25 bp, Artificial
  probe
  misc_feature (1)..(25): SEQ ID NO: 807; WAN024CZT; Start 166; Stop 190
ccacaaattcgttatgagttacttg

SEQ ID NO: 274044 - DNA, 25 bp, Artificial
  probe
  misc_feature (1)..(25): SEQ ID NO: 807; WAN024CZT; Start 141; Stop 165
tgaagcagatgtcattctaattggg

SEQ ID NO: 274045 - DNA, 25 bp, Artificial
  probe
  misc_feature (1)..(25): SEQ ID NO: 807; WAN024CZT; Start 140; Stop 164
atgaagcagatgtcattctaattgg

SEQ ID NO: 274046 - DNA, 25 bp, Artificial
  probe
  misc_feature (1)..(25): SEQ ID NO: 807; WAN024CZT; Start 218; Stop 242
ctgtagataccattgatatgcggga

SEQ ID NO: 274047 - DNA, 25 bp, Artificial
  probe
  misc_feature (1)..(25): SEQ ID NO: 807; WAN024CZT; Start 13; Stop 37
ttattagtatgtaatgcgggaatgt

SEQ ID NO: 274048 - DNA, 25 bp, Artificial
  probe
  misc_feature (1)..(25): SEQ ID NO: 807; WAN024CZT; Start 137; Stop 161
tccatgaagcagatgtcattctaat

SEQ ID NO: 274049 - DNA, 25 bp, Artificial
  probe
  misc_feature (1)..(25): SEQ ID NO: 808; WAN024FYV; Start 275; Stop 299
ttatcaagataaccgacagtacgac

SEQ ID NO: 274050 - DNA, 25 bp, Artificial
  probe
  misc_feature (1)..(25): SEQ ID NO: 808; WAN024FYV; Start 378; Stop 402
tgatcctaaggtcattgatacttgt

SEQ ID NO: 274051 - DNA, 25 bp, Artificial
  probe
  misc_feature (1)..(25): SEQ ID NO: 808; WAN024FYV; Start 277; Stop 301
atcaagataaccgacagtacgacta

SEQ ID NO: 274052 - DNA, 25 bp, Artificial
  probe
  misc_feature (1)..(25): SEQ ID NO: 808; WAN024FYV; Start 276; Stop 300
tatcaagataaccgacagtacgact

SEQ ID NO: 274053 - DNA, 25 bp, Artificial
  probe
  misc_feature (1)..(25): SEQ ID NO: 808; WAN024FYV; Start 278; Stop 302
tcaagataaccgacagtacgactaa

SEQ ID NO: 274054 - DNA, 25 bp, Artificial
  probe
  misc_feature (1)..(25): SEQ ID NO: 808; WAN024FYV; Start 379; Stop 403
gatcctaaggtcattgatacttgtt

SEQ ID NO: 274055 - DNA, 25 bp, Artificial
  probe
  misc_feature (1)..(25): SEQ ID NO: 808; WAN024FYV; Start 95; Stop 119
ttattaactacggtactctgattgg

SEQ ID NO: 274056 - DNA, 25 bp, Artificial
  probe
  misc_feature (1)..(25): SEQ ID NO: 808; WAN024FYV; Start 730; Stop 754
gattatatgaccctaccaccagaag

SEQ ID NO: 274057 - DNA, 25 bp, Artificial
  probe
  misc_feature (1)..(25): SEQ ID NO: 808; WAN024FYV; Start 731; Stop 755
attatatgaccctaccaccagaaga

SEQ ID NO: 274058 - DNA, 25 bp, Artificial
  probe
  misc_feature (1)..(25): SEQ ID NO: 808; WAN024FYV; Start 729; Stop 753
agattatatgaccctaccaccagaa

SEQ ID NO: 274059 - DNA, 25 bp, Artificial
  probe
  misc_feature (1)..(25): SEQ ID NO: 808; WAN024FYV; Start 733; Stop 757
tatatgaccctaccaccagaagaaa

SEQ ID NO: 274060 - DNA, 25 bp, Artificial
  probe
  misc_feature (1)..(25): SEQ ID NO: 808; WAN024FYV; Start 732; Stop 756
ttatatgaccctaccaccagaagaa

SEQ ID NO: 274061 - DNA, 25 bp, Artificial
  probe
  misc_feature (1)..(25): SEQ ID NO: 808; WAN024FYV; Start 728; Stop 752
gagattatatgaccctaccaccaga

SEQ ID NO: 274062 - DNA, 25 bp, Artificial
  probe
  misc_feature (1)..(25): SEQ ID NO: 808; WAN024FYV; Start 172; Stop 196
atgcctagagaagactaccaacgat

SEQ ID NO: 274063 - DNA, 25 bp, Artificial
  probe
  misc_feature (1)..(25): SEQ ID NO: 808; WAN024FYV; Start 381; Stop 405
tcctaaggtcattgatacttgttat

SEQ ID NO: 274064 - DNA, 25 bp, Artificial
  probe
  misc_feature (1)..(25): SEQ ID NO: 808; WAN024FYV; Start 380; Stop 404
atcctaaggtcattgatacttgtta

SEQ ID NO: 274065 - DNA, 25 bp, Artificial
  probe
  misc_feature (1)..(25): SEQ ID NO: 808; WAN024FYV; Start 662; Stop 686
taccctttgagaatttaagccttcc

SEQ ID NO: 274066 - DNA, 25 bp, Artificial
  probe
  misc_feature (1)..(25): SEQ ID NO: 808; WAN024FYV; Start 175; Stop 199
cctagagaagactaccaacgattta

SEQ ID NO: 274067 - DNA, 25 bp, Artificial
  probe
  misc_feature (1)..(25): SEQ ID NO: 808; WAN024FYV; Start 661; Stop 685
ttaccctttgagaatttaagccttc

SEQ ID NO: 274068 - DNA, 25 bp, Artificial
  probe
  misc_feature (1)..(25): SEQ ID NO: 808; WAN024FYV; Start 224; Stop 248
gcaagtataagctcctatccttaga

SEQ ID NO: 274069 - DNA, 25 bp, Artificial
  probe
  misc_feature (1)..(25): SEQ ID NO: 808; WAN024FYV; Start 727; Stop 751
ggagattatatgaccctaccaccag

SEQ ID NO: 274070 - DNA, 25 bp, Artificial
  probe
  misc_feature (1)..(25): SEQ ID NO: 808; WAN024FYV; Start 173; Stop 197
tgcctagagaagactaccaacgatt

SEQ ID NO: 274071 - DNA, 25 bp, Artificial
  probe
  misc_feature (1)..(25): SEQ ID NO: 808; WAN024FYV; Start 660; Stop 684
tttaccctttgagaatttaagcctt

SEQ ID NO: 274072 - DNA, 25 bp, Artificial
  probe
  misc_feature (1)..(25): SEQ ID NO: 808; WAN024FYV; Start 657; Stop 681
cgatttaccctttgagaatttaagc

SEQ ID NO: 274073 - DNA, 25 bp, Artificial
  probe
  misc_feature (1)..(25): SEQ ID NO: 808; WAN024FYV; Start 96; Stop 120
tattaactacggtactctgattggg

SEQ ID NO: 274074 - DNA, 25 bp, Artificial
  probe
  misc_feature (1)..(25): SEQ ID NO: 808; WAN024FYV; Start 17; Stop 41
ttgaagatgccaaacaaattgaatt

SEQ ID NO: 274075 - DNA, 25 bp, Artificial
  probe
  misc_feature (1)..(25): SEQ ID NO: 808; WAN024FYV; Start 659; Stop 683
atttaccctttgagaatttaagcct

SEQ ID NO: 274076 - DNA, 25 bp, Artificial
  probe
  misc_feature (1)..(25): SEQ ID NO: 808; WAN024FYV; Start 658; Stop 682
gatttaccctttgagaatttaagcc

SEQ ID NO: 274077 - DNA, 25 bp, Artificial
  probe
  misc_feature (1)..(25): SEQ ID NO: 808; WAN024FYV; Start 274; Stop 298
tttatcaagataaccgacagtacga

SEQ ID NO: 274078 - DNA, 25 bp, Artificial
  probe
  misc_feature (1)..(25): SEQ ID NO: 808; WAN024FYV; Start 279; Stop 303
caagataaccgacagtacgactaaa

SEQ ID NO: 274079 - DNA, 25 bp, Artificial
  probe
  misc_feature (1)..(25): SEQ ID NO: 808; WAN024FYV; Start 273; Stop 297
ctttatcaagataaccgacagtacg

SEQ ID NO: 274080 - DNA, 25 bp, Artificial
  probe
  misc_feature (1)..(25): SEQ ID NO: 808; WAN024FYV; Start 664; Stop 688
ccctttgagaatttaagccttcctg

SEQ ID NO: 274081 - DNA, 25 bp, Artificial
  probe
  misc_feature (1)..(25): SEQ ID NO: 808; WAN024FYV; Start 269; Stop 293
acaactttatcaagataaccgacag

SEQ ID NO: 274082 - DNA, 25 bp, Artificial
  probe
  misc_feature (1)..(25): SEQ ID NO: 809; WAN024CSU; Start 1976; Stop 2000
tgactatcggtgactactctattga

SEQ ID NO: 274083 - DNA, 25 bp, Artificial
  probe
  misc_feature (1)..(25): SEQ ID NO: 809; WAN024CSU; Start 1975; Stop 1999
gtgactatcggtgactactctattg

SEQ ID NO: 274084 - DNA, 25 bp, Artificial
  probe
  misc_feature (1)..(25): SEQ ID NO: 809; WAN024CSU; Start 666; Stop 690
attgccacataagaacattgatacg

SEQ ID NO: 274085 - DNA, 25 bp, Artificial
  probe
  misc_feature (1)..(25): SEQ ID NO: 809; WAN024CSU; Start 1978; Stop 2002
actatcggtgactactctattgaac

SEQ ID NO: 274086 - DNA, 25 bp, Artificial
  probe
  misc_feature (1)..(25): SEQ ID NO: 809; WAN024CSU; Start 1979; Stop 2003
ctatcggtgactactctattgaact

SEQ ID NO: 274087 - DNA, 25 bp, Artificial
  probe
  misc_feature (1)..(25): SEQ ID NO: 809; WAN024CSU; Start 1977; Stop 2001
gactatcggtgactactctattgaa

SEQ ID NO: 274088 - DNA, 25 bp, Artificial
  probe
  misc_feature (1)..(25): SEQ ID NO: 809; WAN024CSU; Start 663; Stop 687
ggaattgccacataagaacattgat

SEQ ID NO: 274089 - DNA, 25 bp, Artificial
  probe
  misc_feature (1)..(25): SEQ ID NO: 809; WAN024CSU; Start 661; Stop 685
aaggaattgccacataagaacattg

SEQ ID NO: 274090 - DNA, 25 bp, Artificial
  probe
  misc_feature (1)..(25): SEQ ID NO: 809; WAN024CSU; Start 1980; Stop 2004
tatcggtgactactctattgaactt

SEQ ID NO: 274091 - DNA, 25 bp, Artificial
  probe
  misc_feature (1)..(25): SEQ ID NO: 809; WAN024CSU; Start 2215; Stop 2239
cttcaagaacaacttcgtcaacttc

SEQ ID NO: 274092 - DNA, 25 bp, Artificial
  probe
  misc_feature (1)..(25): SEQ ID NO: 809; WAN024CSU; Start 662; Stop 686
aggaattgccacataagaacattga

SEQ ID NO: 274093 - DNA, 25 bp, Artificial
  probe
  misc_feature (1)..(25): SEQ ID NO: 809; WAN024CSU; Start 1974; Stop 1998
cgtgactatcggtgactactctatt

SEQ ID NO: 274094 - DNA, 25 bp, Artificial
  probe
  misc_feature (1)..(25): SEQ ID NO: 809; WAN024CSU; Start 660; Stop 684
caaggaattgccacataagaacatt

SEQ ID NO: 274095 - DNA, 25 bp, Artificial
  probe
  misc_feature (1)..(25): SEQ ID NO: 809; WAN024CSU; Start 657; Stop 681
atacaaggaattgccacataagaac

SEQ ID NO: 274096 - DNA, 25 bp, Artificial
  probe
  misc_feature (1)..(25): SEQ ID NO: 809; WAN024CSU; Start 64; Stop 88
cactcagtagaaccatcagtaagtt

SEQ ID NO: 274097 - DNA, 25 bp, Artificial
  probe
  misc_feature (1)..(25): SEQ ID NO: 809; WAN024CSU; Start 654; Stop 678
cgaatacaaggaattgccacataag

SEQ ID NO: 274098 - DNA, 25 bp, Artificial
  probe
  misc_feature (1)..(25): SEQ ID NO: 809; WAN024CSU; Start 658; Stop 682
tacaaggaattgccacataagaaca

SEQ ID NO: 274099 - DNA, 25 bp, Artificial
  probe
  misc_feature (1)..(25): SEQ ID NO: 809; WAN024CSU; Start 655; Stop 679
gaatacaaggaattgccacataaga

SEQ ID NO: 274100 - DNA, 25 bp, Artificial
  probe
  misc_feature (1)..(25): SEQ ID NO: 809; WAN024CSU; Start 2217; Stop 2241
tcaagaacaacttcgtcaacttcaa

SEQ ID NO: 274101 - DNA, 25 bp, Artificial
  probe
  misc_feature (1)..(25): SEQ ID NO: 809; WAN024CSU; Start 2216; Stop 2240
ttcaagaacaacttcgtcaacttca

SEQ ID NO: 274102 - DNA, 25 bp, Artificial
  probe
  misc_feature (1)..(25): SEQ ID NO: 809; WAN024CSU; Start 2214; Stop 2238
acttcaagaacaacttcgtcaactt

SEQ ID NO: 274103 - DNA, 25 bp, Artificial
  probe
  misc_feature (1)..(25): SEQ ID NO: 809; WAN024CSU; Start 667; Stop 691
ttgccacataagaacattgatacgg

SEQ ID NO: 274104 - DNA, 25 bp, Artificial
  probe
  misc_feature (1)..(25): SEQ ID NO: 809; WAN024CSU; Start 63; Stop 87
tcactcagtagaaccatcagtaagt

SEQ ID NO: 274105 - DNA, 25 bp, Artificial
  probe
  misc_feature (1)..(25): SEQ ID NO: 809; WAN024CSU; Start 656; Stop 680
aatacaaggaattgccacataagaa

SEQ ID NO: 274106 - DNA, 25 bp, Artificial
  probe
  misc_feature (1)..(25): SEQ ID NO: 809; WAN024CSU; Start 659; Stop 683
acaaggaattgccacataagaacat

SEQ ID NO: 274107 - DNA, 25 bp, Artificial
  probe
  misc_feature (1)..(25): SEQ ID NO: 809; WAN024CSU; Start 1973; Stop 1997
tcgtgactatcggtgactactctat

SEQ ID NO: 274108 - DNA, 25 bp, Artificial
  probe
  misc_feature (1)..(25): SEQ ID NO: 809; WAN024CSU; Start 2205; Stop 2229
ggtagaaggacttcaagaacaactt

SEQ ID NO: 274109 - DNA, 25 bp, Artificial
  probe
  misc_feature (1)..(25): SEQ ID NO: 809; WAN024CSU; Start 2203; Stop 2227
aaggtagaaggacttcaagaacaac

SEQ ID NO: 274110 - DNA, 25 bp, Artificial
  probe
  misc_feature (1)..(25): SEQ ID NO: 809; WAN024CSU; Start 2202; Stop 2226
caaggtagaaggacttcaagaacaa

SEQ ID NO: 274111 - DNA, 25 bp, Artificial
  probe
  misc_feature (1)..(25): SEQ ID NO: 809; WAN024CSU; Start 665; Stop 689
aattgccacataagaacattgatac

SEQ ID NO: 274112 - DNA, 25 bp, Artificial
  probe
  misc_feature (1)..(25): SEQ ID NO: 809; WAN024CSU; Start 1763; Stop 1787
caggatctcttaacgaagttgaatt

SEQ ID NO: 274113 - DNA, 25 bp, Artificial
  probe
  misc_feature (1)..(25): SEQ ID NO: 809; WAN024CSU; Start 1762; Stop 1786
gcaggatctcttaacgaagttgaat

SEQ ID NO: 274114 - DNA, 25 bp, Artificial
  probe
  misc_feature (1)..(25): SEQ ID NO: 809; WAN024CSU; Start 2404; Stop 2428
tactctgatcttcttgtcctagttg

SEQ ID NO: 274115 - DNA, 25 bp, Artificial
  probe
  misc_feature (1)..(25): SEQ ID NO: 810; WAN024D3X; Start 69; Stop 93
tctctatgatgagtctgatctgatc

SEQ ID NO: 274116 - DNA, 25 bp, Artificial
  probe
  misc_feature (1)..(25): SEQ ID NO: 810; WAN024D3X; Start 427; Stop 451
cagtctcattatatcttggcggaag

SEQ ID NO: 274117 - DNA, 25 bp, Artificial
  probe
  misc_feature (1)..(25): SEQ ID NO: 810; WAN024D3X; Start 466; Stop 490
cctaccaagaatgaagaagtgtcag

SEQ ID NO: 274118 - DNA, 25 bp, Artificial
  probe
  misc_feature (1)..(25): SEQ ID NO: 810; WAN024D3X; Start 68; Stop 92
atctctatgatgagtctgatctgat

SEQ ID NO: 274119 - DNA, 25 bp, Artificial
  probe
  misc_feature (1)..(25): SEQ ID NO: 810; WAN024D3X; Start 467; Stop 491
ctaccaagaatgaagaagtgtcagc

SEQ ID NO: 274120 - DNA, 25 bp, Artificial
  probe
  misc_feature (1)..(25): SEQ ID NO: 810; WAN024D3X; Start 587; Stop 611
aagagttgaatctgaccagaatgac

SEQ ID NO: 274121 - DNA, 25 bp, Artificial
  probe
  misc_feature (1)..(25): SEQ ID NO: 810; WAN024D3X; Start 586; Stop 610
caagagttgaatctgaccagaatga

SEQ ID NO: 274122 - DNA, 25 bp, Artificial
  probe
  misc_feature (1)..(25): SEQ ID NO: 810; WAN024D3X; Start 468; Stop 492
taccaagaatgaagaagtgtcagca

SEQ ID NO: 274123 - DNA, 25 bp, Artificial
  probe
  misc_feature (1)..(25): SEQ ID NO: 810; WAN024D3X; Start 588; Stop 612
agagttgaatctgaccagaatgaca

SEQ ID NO: 274124 - DNA, 25 bp, Artificial
  probe
  misc_feature (1)..(25): SEQ ID NO: 810; WAN024D3X; Start 585; Stop 609
ccaagagttgaatctgaccagaatg

SEQ ID NO: 274125 - DNA, 25 bp, Artificial
  probe
  misc_feature (1)..(25): SEQ ID NO: 810; WAN024D3X; Start 67; Stop 91
aatctctatgatgagtctgatctga

SEQ ID NO: 274126 - DNA, 25 bp, Artificial
  probe
  misc_feature (1)..(25): SEQ ID NO: 810; WAN024D3X; Start 65; Stop 89
tgaatctctatgatgagtctgatct

SEQ ID NO: 274127 - DNA, 25 bp, Artificial
  probe
  misc_feature (1)..(25): SEQ ID NO: 810; WAN024D3X; Start 462; Stop 486
tatccctaccaagaatgaagaagtg

SEQ ID NO: 274128 - DNA, 25 bp, Artificial
  probe
  misc_feature (1)..(25): SEQ ID NO: 810; WAN024D3X; Start 461; Stop 485
ctatccctaccaagaatgaagaagt

SEQ ID NO: 274129 - DNA, 25 bp, Artificial
  probe
  misc_feature (1)..(25): SEQ ID NO: 810; WAN024D3X; Start 66; Stop 90
gaatctctatgatgagtctgatctg

SEQ ID NO: 274130 - DNA, 25 bp, Artificial
  probe
  misc_feature (1)..(25): SEQ ID NO: 810; WAN024D3X; Start 551; Stop 575
aaagtaaacaaacagaacaagaacg

SEQ ID NO: 274131 - DNA, 25 bp, Artificial
  probe
  misc_feature (1)..(25): SEQ ID NO: 810; WAN024D3X; Start 589; Stop 613
gagttgaatctgaccagaatgacag

SEQ ID NO: 274132 - DNA, 25 bp, Artificial
  probe
  misc_feature (1)..(25): SEQ ID NO: 810; WAN024D3X; Start 451; Stop 475
gaagttcattctatccctaccaaga

SEQ ID NO: 274133 - DNA, 25 bp, Artificial
  probe
  misc_feature (1)..(25): SEQ ID NO: 810; WAN024D3X; Start 460; Stop 484
tctatccctaccaagaatgaagaag

SEQ ID NO: 274134 - DNA, 25 bp, Artificial
  probe
  misc_feature (1)..(25): SEQ ID NO: 810; WAN024D3X; Start 463; Stop 487
atccctaccaagaatgaagaagtgt

SEQ ID NO: 274135 - DNA, 25 bp, Artificial
  probe
  misc_feature (1)..(25): SEQ ID NO: 810; WAN024D3X; Start 436; Stop 460
tatatcttggcggaagaagttcatt

SEQ ID NO: 274136 - DNA, 25 bp, Artificial
  probe
  misc_feature (1)..(25): SEQ ID NO: 810; WAN024D3X; Start 435; Stop 459
ttatatcttggcggaagaagttcat

SEQ ID NO: 274137 - DNA, 25 bp, Artificial
  probe
  misc_feature (1)..(25): SEQ ID NO: 810; WAN024D3X; Start 434; Stop 458
attatatcttggcggaagaagttca

SEQ ID NO: 274138 - DNA, 25 bp, Artificial
  probe
  misc_feature (1)..(25): SEQ ID NO: 810; WAN024D3X; Start 432; Stop 456
tcattatatcttggcggaagaagtt

SEQ ID NO: 274139 - DNA, 25 bp, Artificial
  probe
  misc_feature (1)..(25): SEQ ID NO: 810; WAN024D3X; Start 433; Stop 457
cattatatcttggcggaagaagttc

SEQ ID NO: 274140 - DNA, 25 bp, Artificial
  probe
  misc_feature (1)..(25): SEQ ID NO: 810; WAN024D3X; Start 430; Stop 454
tctcattatatcttggcggaagaag

SEQ ID NO: 274141 - DNA, 25 bp, Artificial
  probe
  misc_feature (1)..(25): SEQ ID NO: 810; WAN024D3X; Start 431; Stop 455
ctcattatatcttggcggaagaagt

SEQ ID NO: 274142 - DNA, 25 bp, Artificial
  probe
  misc_feature (1)..(25): SEQ ID NO: 810; WAN024D3X; Start 429; Stop 453
gtctcattatatcttggcggaagaa

SEQ ID NO: 274143 - DNA, 25 bp, Artificial
  probe
  misc_feature (1)..(25): SEQ ID NO: 810; WAN024D3X; Start 92; Stop 116
tcagtaatatcaagggtgagtatcg

SEQ ID NO: 274144 - DNA, 25 bp, Artificial
  probe
  misc_feature (1)..(25): SEQ ID NO: 810; WAN024D3X; Start 63; Stop 87
catgaatctctatgatgagtctgat

SEQ ID NO: 274145 - DNA, 25 bp, Artificial
  probe
  misc_feature (1)..(25): SEQ ID NO: 810; WAN024D3X; Start 64; Stop 88
atgaatctctatgatgagtctgatc

SEQ ID NO: 274146 - DNA, 25 bp, Artificial
  probe
  misc_feature (1)..(25): SEQ ID NO: 810; WAN024D3X; Start 428; Stop 452
agtctcattatatcttggcggaaga

SEQ ID NO: 274147 - DNA, 25 bp, Artificial
  probe
  misc_feature (1)..(25): SEQ ID NO: 810; WAN024D3X; Start 464; Stop 488
tccctaccaagaatgaagaagtgtc

SEQ ID NO: 274148 - DNA, 25 bp, Artificial
  probe
  misc_feature (1)..(25): SEQ ID NO: 811; WAN024CDO; Start 600; Stop 624
tggacatatagcaagcattaacagt

SEQ ID NO: 274149 - DNA, 25 bp, Artificial
  probe
  misc_feature (1)..(25): SEQ ID NO: 811; WAN024CDO; Start 502; Stop 526
acaagtatcacacacagttacacag

SEQ ID NO: 274150 - DNA, 25 bp, Artificial
  probe
  misc_feature (1)..(25): SEQ ID NO: 811; WAN024CDO; Start 963; Stop 987
attattcttgtctgtccttgtgaac

SEQ ID NO: 274151 - DNA, 25 bp, Artificial
  probe
  misc_feature (1)..(25): SEQ ID NO: 811; WAN024CDO; Start 767; Stop 791
acaaggttctccaacaatatagtca

SEQ ID NO: 274152 - DNA, 25 bp, Artificial
  probe
  misc_feature (1)..(25): SEQ ID NO: 811; WAN024CDO; Start 599; Stop 623
atggacatatagcaagcattaacag

SEQ ID NO: 274153 - DNA, 25 bp, Artificial
  probe
  misc_feature (1)..(25): SEQ ID NO: 811; WAN024CDO; Start 765; Stop 789
agacaaggttctccaacaatatagt

SEQ ID NO: 274154 - DNA, 25 bp, Artificial
  probe
  misc_feature (1)..(25): SEQ ID NO: 811; WAN024CDO; Start 501; Stop 525
aacaagtatcacacacagttacaca

SEQ ID NO: 274155 - DNA, 25 bp, Artificial
  probe
  misc_feature (1)..(25): SEQ ID NO: 811; WAN024CDO; Start 946; Stop 970
accgactccttctatcaattattct

SEQ ID NO: 274156 - DNA, 25 bp, Artificial
  probe
  misc_feature (1)..(25): SEQ ID NO: 811; WAN024CDO; Start 770; Stop 794
aggttctccaacaatatagtcaact

SEQ ID NO: 274157 - DNA, 25 bp, Artificial
  probe
  misc_feature (1)..(25): SEQ ID NO: 811; WAN024CDO; Start 909; Stop 933
tctccatatcattacaagaccaagt

SEQ ID NO: 274158 - DNA, 25 bp, Artificial
  probe
  misc_feature (1)..(25): SEQ ID NO: 811; WAN024CDO; Start 778; Stop 802
caacaatatagtcaactcttggcaa

SEQ ID NO: 274159 - DNA, 25 bp, Artificial
  probe
  misc_feature (1)..(25): SEQ ID NO: 811; WAN024CDO; Start 902; Stop 926
ttgccagtctccatatcattacaag

SEQ ID NO: 274160 - DNA, 25 bp, Artificial
  probe
  misc_feature (1)..(25): SEQ ID NO: 811; WAN024CDO; Start 901; Stop 925
cttgccagtctccatatcattacaa

SEQ ID NO: 274161 - DNA, 25 bp, Artificial
  probe
  misc_feature (1)..(25): SEQ ID NO: 811; WAN024CDO; Start 771; Stop 795
ggttctccaacaatatagtcaactc

SEQ ID NO: 274162 - DNA, 25 bp, Artificial
  probe
  misc_feature (1)..(25): SEQ ID NO: 811; WAN024CDO; Start 964; Stop 988
ttattcttgtctgtccttgtgaacg

SEQ ID NO: 274163 - DNA, 25 bp, Artificial
  probe
  misc_feature (1)..(25): SEQ ID NO: 811; WAN024CDO; Start 961; Stop 985
caattattcttgtctgtccttgtga

SEQ ID NO: 274164 - DNA, 25 bp, Artificial
  probe
  misc_feature (1)..(25): SEQ ID NO: 811; WAN024CDO; Start 960; Stop 984
tcaattattcttgtctgtccttgtg

SEQ ID NO: 274165 - DNA, 25 bp, Artificial
  probe
  misc_feature (1)..(25): SEQ ID NO: 811; WAN024CDO; Start 769; Stop 793
aaggttctccaacaatatagtcaac

SEQ ID NO: 274166 - DNA, 25 bp, Artificial
  probe
  misc_feature (1)..(25): SEQ ID NO: 811; WAN024CDO; Start 768; Stop 792
caaggttctccaacaatatagtcaa

SEQ ID NO: 274167 - DNA, 25 bp, Artificial
  probe
  misc_feature (1)..(25): SEQ ID NO: 811; WAN024CDO; Start 782; Stop 806
aatatagtcaactcttggcaattcc

SEQ ID NO: 274168 - DNA, 25 bp, Artificial
  probe
  misc_feature (1)..(25): SEQ ID NO: 811; WAN024CDO; Start 903; Stop 927
tgccagtctccatatcattacaaga

SEQ ID NO: 274169 - DNA, 25 bp, Artificial
  probe
  misc_feature (1)..(25): SEQ ID NO: 811; WAN024CDO; Start 762; Stop 786
gctagacaaggttctccaacaatat

SEQ ID NO: 274170 - DNA, 25 bp, Artificial
  probe
  misc_feature (1)..(25): SEQ ID NO: 811; WAN024CDO; Start 1024; Stop 1048
gcactgattggagattatcttcgta

SEQ ID NO: 274171 - DNA, 25 bp, Artificial
  probe
  misc_feature (1)..(25): SEQ ID NO: 811; WAN024CDO; Start 945; Stop 969
aaccgactccttctatcaattattc

SEQ ID NO: 274172 - DNA, 25 bp, Artificial
  probe
  misc_feature (1)..(25): SEQ ID NO: 811; WAN024CDO; Start 962; Stop 986
aattattcttgtctgtccttgtgaa

SEQ ID NO: 274173 - DNA, 25 bp, Artificial
  probe
  misc_feature (1)..(25): SEQ ID NO: 811; WAN024CDO; Start 779; Stop 803
aacaatatagtcaactcttggcaat

SEQ ID NO: 274174 - DNA, 25 bp, Artificial
  probe
  misc_feature (1)..(25): SEQ ID NO: 811; WAN024CDO; Start 603; Stop 627
acatatagcaagcattaacagtcgc

SEQ ID NO: 274175 - DNA, 25 bp, Artificial
  probe
  misc_feature (1)..(25): SEQ ID NO: 811; WAN024CDO; Start 780; Stop 804
acaatatagtcaactcttggcaatt

SEQ ID NO: 274176 - DNA, 25 bp, Artificial
  probe
  misc_feature (1)..(25): SEQ ID NO: 811; WAN024CDO; Start 947; Stop 971
ccgactccttctatcaattattctt

SEQ ID NO: 274177 - DNA, 25 bp, Artificial
  probe
  misc_feature (1)..(25): SEQ ID NO: 811; WAN024CDO; Start 677; Stop 701
tagtagcgacaacactcttcttctt

SEQ ID NO: 274178 - DNA, 25 bp, Artificial
  probe
  misc_feature (1)..(25): SEQ ID NO: 811; WAN024CDO; Start 915; Stop 939
tatcattacaagaccaagtcaagca

SEQ ID NO: 274179 - DNA, 25 bp, Artificial
  probe
  misc_feature (1)..(25): SEQ ID NO: 811; WAN024CDO; Start 602; Stop 626
gacatatagcaagcattaacagtcg

SEQ ID NO: 274180 - DNA, 25 bp, Artificial
  probe
  misc_feature (1)..(25): SEQ ID NO: 811; WAN024CDO; Start 601; Stop 625
ggacatatagcaagcattaacagtc

SEQ ID NO: 274181 - DNA, 25 bp, Artificial
  probe
  misc_feature (1)..(25): SEQ ID NO: 812; WAN024EZJ; Start 780; Stop 804
gcaggtaagagtaagagtgattcta

SEQ ID NO: 274182 - DNA, 25 bp, Artificial
  probe
  misc_feature (1)..(25): SEQ ID NO: 812; WAN024EZJ; Start 782; Stop 806
aggtaagagtaagagtgattctaca

SEQ ID NO: 274183 - DNA, 25 bp, Artificial
  probe
  misc_feature (1)..(25): SEQ ID NO: 812; WAN024EZJ; Start 781; Stop 805
caggtaagagtaagagtgattctac

SEQ ID NO: 274184 - DNA, 25 bp, Artificial
  probe
  misc_feature (1)..(25): SEQ ID NO: 812; WAN024EZJ; Start 783; Stop 807
ggtaagagtaagagtgattctacaa

SEQ ID NO: 274185 - DNA, 25 bp, Artificial
  probe
  misc_feature (1)..(25): SEQ ID NO: 812; WAN024EZJ; Start 778; Stop 802
ttgcaggtaagagtaagagtgattc

SEQ ID NO: 274186 - DNA, 25 bp, Artificial
  probe
  misc_feature (1)..(25): SEQ ID NO: 812; WAN024EZJ; Start 777; Stop 801
cttgcaggtaagagtaagagtgatt

SEQ ID NO: 274187 - DNA, 25 bp, Artificial
  probe
  misc_feature (1)..(25): SEQ ID NO: 812; WAN024EZJ; Start 676; Stop 700
gaaagttatctacaggttgccaaat

SEQ ID NO: 274188 - DNA, 25 bp, Artificial
  probe
  misc_feature (1)..(25): SEQ ID NO: 812; WAN024EZJ; Start 680; Stop 704
gttatctacaggttgccaaattagc

SEQ ID NO: 274189 - DNA, 25 bp, Artificial
  probe
  misc_feature (1)..(25): SEQ ID NO: 812; WAN024EZJ; Start 60; Stop 84
cttagaacaagaccagctcaatcac

SEQ ID NO: 274190 - DNA, 25 bp, Artificial
  probe
  misc_feature (1)..(25): SEQ ID NO: 812; WAN024EZJ; Start 673; Stop 697
aaagaaagttatctacaggttgcca

SEQ ID NO: 274191 - DNA, 25 bp, Artificial
  probe
  misc_feature (1)..(25): SEQ ID NO: 812; WAN024EZJ; Start 675; Stop 699
agaaagttatctacaggttgccaaa

SEQ ID NO: 274192 - DNA, 25 bp, Artificial
  probe
  misc_feature (1)..(25): SEQ ID NO: 812; WAN024EZJ; Start 674; Stop 698
aagaaagttatctacaggttgccaa

SEQ ID NO: 274193 - DNA, 25 bp, Artificial
  probe
  misc_feature (1)..(25): SEQ ID NO: 812; WAN024EZJ; Start 677; Stop 701
aaagttatctacaggttgccaaatt

SEQ ID NO: 274194 - DNA, 25 bp, Artificial
  probe
  misc_feature (1)..(25): SEQ ID NO: 812; WAN024EZJ; Start 779; Stop 803
tgcaggtaagagtaagagtgattct

SEQ ID NO: 274195 - DNA, 25 bp, Artificial
  probe
  misc_feature (1)..(25): SEQ ID NO: 812; WAN024EZJ; Start 681; Stop 705
ttatctacaggttgccaaattagcc

SEQ ID NO: 274196 - DNA, 25 bp, Artificial
  probe
  misc_feature (1)..(25): SEQ ID NO: 812; WAN024EZJ; Start 512; Stop 536
tcttactcttagaacaaatgggact

SEQ ID NO: 274197 - DNA, 25 bp, Artificial
  probe
  misc_feature (1)..(25): SEQ ID NO: 812; WAN024EZJ; Start 679; Stop 703
agttatctacaggttgccaaattag

SEQ ID NO: 274198 - DNA, 25 bp, Artificial
  probe
  misc_feature (1)..(25): SEQ ID NO: 812; WAN024EZJ; Start 513; Stop 537
cttactcttagaacaaatgggactt

SEQ ID NO: 274199 - DNA, 25 bp, Artificial
  probe
  misc_feature (1)..(25): SEQ ID NO: 812; WAN024EZJ; Start 787; Stop 811
agagtaagagtgattctacaagatt

SEQ ID NO: 274200 - DNA, 25 bp, Artificial
  probe
  misc_feature (1)..(25): SEQ ID NO: 812; WAN024EZJ; Start 786; Stop 810
aagagtaagagtgattctacaagat

SEQ ID NO: 274201 - DNA, 25 bp, Artificial
  probe
  misc_feature (1)..(25): SEQ ID NO: 812; WAN024EZJ; Start 678; Stop 702
aagttatctacaggttgccaaatta

SEQ ID NO: 274202 - DNA, 25 bp, Artificial
  probe
  misc_feature (1)..(25): SEQ ID NO: 812; WAN024EZJ; Start 514; Stop 538
ttactcttagaacaaatgggacttg

SEQ ID NO: 274203 - DNA, 25 bp, Artificial
  probe
  misc_feature (1)..(25): SEQ ID NO: 812; WAN024EZJ; Start 511; Stop 535
atcttactcttagaacaaatgggac

SEQ ID NO: 274204 - DNA, 25 bp, Artificial
  probe
  misc_feature (1)..(25): SEQ ID NO: 812; WAN024EZJ; Start 445; Stop 469
aagatgttaccgacaatccgaagtc

SEQ ID NO: 274205 - DNA, 25 bp, Artificial
  probe
  misc_feature (1)..(25): SEQ ID NO: 812; WAN024EZJ; Start 682; Stop 706
tatctacaggttgccaaattagcca

SEQ ID NO: 274206 - DNA, 25 bp, Artificial
  probe
  misc_feature (1)..(25): SEQ ID NO: 812; WAN024EZJ; Start 1; Stop 25
atgaaacaagatcaactaaaggctt

SEQ ID NO: 274207 - DNA, 25 bp, Artificial
  probe
  misc_feature (1)..(25): SEQ ID NO: 812; WAN024EZJ; Start 421; Stop 445
ttcttcttgactagcgatgaggaaa

SEQ ID NO: 274208 - DNA, 25 bp, Artificial
  probe
  misc_feature (1)..(25): SEQ ID NO: 812; WAN024EZJ; Start 420; Stop 444
tttcttcttgactagcgatgaggaa

SEQ ID NO: 274209 - DNA, 25 bp, Artificial
  probe
  misc_feature (1)..(25): SEQ ID NO: 812; WAN024EZJ; Start 51; Stop 75
tgtccgtatcttagaacaagaccag

SEQ ID NO: 274210 - DNA, 25 bp, Artificial
  probe
  misc_feature (1)..(25): SEQ ID NO: 812; WAN024EZJ; Start 784; Stop 808
gtaagagtaagagtgattctacaag

SEQ ID NO: 274211 - DNA, 25 bp, Artificial
  probe
  misc_feature (1)..(25): SEQ ID NO: 812; WAN024EZJ; Start 861; Stop 885
catggaatatctggtcttgaaagaa

SEQ ID NO: 274212 - DNA, 25 bp, Artificial
  probe
  misc_feature (1)..(25): SEQ ID NO: 812; WAN024EZJ; Start 56; Stop 80
gtatcttagaacaagaccagctcaa

SEQ ID NO: 274213 - DNA, 25 bp, Artificial
  probe
  misc_feature (1)..(25): SEQ ID NO: 812; WAN024EZJ; Start 57; Stop 81
tatcttagaacaagaccagctcaat

SEQ ID NO: 274214 - DNA, 25 bp, Artificial
  probe
  misc_feature (1)..(25): SEQ ID NO: 813; WAN024CA6; Start 908; Stop 932
cgctcactctctatctcatccataa

SEQ ID NO: 274215 - DNA, 25 bp, Artificial
  probe
  misc_feature (1)..(25): SEQ ID NO: 813; WAN024CA6; Start 477; Stop 501
gcatcaatcaactcgtaatgaagaa

SEQ ID NO: 274216 - DNA, 25 bp, Artificial
  probe
  misc_feature (1)..(25): SEQ ID NO: 813; WAN024CA6; Start 267; Stop 291
gcttggtattatcatcactgaggaa

SEQ ID NO: 274217 - DNA, 25 bp, Artificial
  probe
  misc_feature (1)..(25): SEQ ID NO: 813; WAN024CA6; Start 487; Stop 511
actcgtaatgaagaattgattgagc

SEQ ID NO: 274218 - DNA, 25 bp, Artificial
  probe
  misc_feature (1)..(25): SEQ ID NO: 813; WAN024CA6; Start 587; Stop 611
ccagttcaaccagcaatatcaagaa

SEQ ID NO: 274219 - DNA, 25 bp, Artificial
  probe
  misc_feature (1)..(25): SEQ ID NO: 813; WAN024CA6; Start 907; Stop 931
tcgctcactctctatctcatccata

SEQ ID NO: 274220 - DNA, 25 bp, Artificial
  probe
  misc_feature (1)..(25): SEQ ID NO: 813; WAN024CA6; Start 903; Stop 927
tgtctcgctcactctctatctcatc

SEQ ID NO: 274221 - DNA, 25 bp, Artificial
  probe
  misc_feature (1)..(25): SEQ ID NO: 813; WAN024CA6; Start 585; Stop 609
gaccagttcaaccagcaatatcaag

SEQ ID NO: 274222 - DNA, 25 bp, Artificial
  probe
  misc_feature (1)..(25): SEQ ID NO: 813; WAN024CA6; Start 61; Stop 85
ggtacttggatcaatctcgtcaatc

SEQ ID NO: 274223 - DNA, 25 bp, Artificial
  probe
  misc_feature (1)..(25): SEQ ID NO: 813; WAN024CA6; Start 586; Stop 610
accagttcaaccagcaatatcaaga

SEQ ID NO: 274224 - DNA, 25 bp, Artificial
  probe
  misc_feature (1)..(25): SEQ ID NO: 813; WAN024CA6; Start 485; Stop 509
caactcgtaatgaagaattgattga

SEQ ID NO: 274225 - DNA, 25 bp, Artificial
  probe
  misc_feature (1)..(25): SEQ ID NO: 813; WAN024CA6; Start 478; Stop 502
catcaatcaactcgtaatgaagaat

SEQ ID NO: 274226 - DNA, 25 bp, Artificial
  probe
  misc_feature (1)..(25): SEQ ID NO: 813; WAN024CA6; Start 266; Stop 290
cgcttggtattatcatcactgagga

SEQ ID NO: 274227 - DNA, 25 bp, Artificial
  probe
  misc_feature (1)..(25): SEQ ID NO: 813; WAN024CA6; Start 113; Stop 137
ccaacaccttcgatattgatattgc

SEQ ID NO: 274228 - DNA, 25 bp, Artificial
  probe
  misc_feature (1)..(25): SEQ ID NO: 813; WAN024CA6; Start 112; Stop 136
gccaacaccttcgatattgatattg

SEQ ID NO: 274229 - DNA, 25 bp, Artificial
  probe
  misc_feature (1)..(25): SEQ ID NO: 813; WAN024CA6; Start 715; Stop 739
acctttgcctctatcatttctaaca

SEQ ID NO: 274230 - DNA, 25 bp, Artificial
  probe
  misc_feature (1)..(25): SEQ ID NO: 813; WAN024CA6; Start 317; Stop 341
cactacctgtccttgatgtctttat

SEQ ID NO: 274231 - DNA, 25 bp, Artificial
  probe
  misc_feature (1)..(25): SEQ ID NO: 813; WAN024CA6; Start 670; Stop 694
gagatggcagatatttatggaaacg

SEQ ID NO: 274232 - DNA, 25 bp, Artificial
  probe
  misc_feature (1)..(25): SEQ ID NO: 813; WAN024CA6; Start 669; Stop 693
cgagatggcagatatttatggaaac

SEQ ID NO: 274233 - DNA, 25 bp, Artificial
  probe
  misc_feature (1)..(25): SEQ ID NO: 813; WAN024CA6; Start 909; Stop 933
gctcactctctatctcatccataaa

SEQ ID NO: 274234 - DNA, 25 bp, Artificial
  probe
  misc_feature (1)..(25): SEQ ID NO: 813; WAN024CA6; Start 875; Stop 899
taatcgtctttatcgcctttgctat

SEQ ID NO: 274235 - DNA, 25 bp, Artificial
  probe
  misc_feature (1)..(25): SEQ ID NO: 813; WAN024CA6; Start 714; Stop 738
gacctttgcctctatcatttctaac

SEQ ID NO: 274236 - DNA, 25 bp, Artificial
  probe
  misc_feature (1)..(25): SEQ ID NO: 813; WAN024CA6; Start 720; Stop 744
tgcctctatcatttctaacaaccag

SEQ ID NO: 274237 - DNA, 25 bp, Artificial
  probe
  misc_feature (1)..(25): SEQ ID NO: 813; WAN024CA6; Start 318; Stop 342
actacctgtccttgatgtctttatc

SEQ ID NO: 274238 - DNA, 25 bp, Artificial
  probe
  misc_feature (1)..(25): SEQ ID NO: 813; WAN024CA6; Start 863; Stop 887
atgccttctggttaatcgtctttat

SEQ ID NO: 274239 - DNA, 25 bp, Artificial
  probe
  misc_feature (1)..(25): SEQ ID NO: 813; WAN024CA6; Start 815; Stop 839
acgggatgaactttaaggataatga

SEQ ID NO: 274240 - DNA, 25 bp, Artificial
  probe
  misc_feature (1)..(25): SEQ ID NO: 813; WAN024CA6; Start 486; Stop 510
aactcgtaatgaagaattgattgag

SEQ ID NO: 274241 - DNA, 25 bp, Artificial
  probe
  misc_feature (1)..(25): SEQ ID NO: 813; WAN024CA6; Start 592; Stop 616
tcaaccagcaatatcaagaaatacc

SEQ ID NO: 274242 - DNA, 25 bp, Artificial
  probe
  misc_feature (1)..(25): SEQ ID NO: 813; WAN024CA6; Start 862; Stop 886
aatgccttctggttaatcgtcttta

SEQ ID NO: 274243 - DNA, 25 bp, Artificial
  probe
  misc_feature (1)..(25): SEQ ID NO: 813; WAN024CA6; Start 488; Stop 512
ctcgtaatgaagaattgattgagct

SEQ ID NO: 274244 - DNA, 25 bp, Artificial
  probe
  misc_feature (1)..(25): SEQ ID NO: 813; WAN024CA6; Start 593; Stop 617
caaccagcaatatcaagaaatacct

SEQ ID NO: 274245 - DNA, 25 bp, Artificial
  probe
  misc_feature (1)..(25): SEQ ID NO: 813; WAN024CA6; Start 874; Stop 898
ttaatcgtctttatcgcctttgcta

SEQ ID NO: 274246 - DNA, 25 bp, Artificial
  probe
  misc_feature (1)..(25): SEQ ID NO: 813; WAN024CA6; Start 588; Stop 612
cagttcaaccagcaatatcaagaaa

SEQ ID NO: 274247 - DNA, 25 bp, Artificial
  probe
  misc_feature (1)..(25): SEQ ID NO: 814; WAN024DXE; Start 778; Stop 802
gaaggaacctataatcacgagagaa

SEQ ID NO: 274248 - DNA, 25 bp, Artificial
  probe
  misc_feature (1)..(25): SEQ ID NO: 814; WAN024DXE; Start 777; Stop 801
agaaggaacctataatcacgagaga

SEQ ID NO: 274249 - DNA, 25 bp, Artificial
  probe
  misc_feature (1)..(25): SEQ ID NO: 814; WAN024DXE; Start 776; Stop 800
cagaaggaacctataatcacgagag

SEQ ID NO: 274250 - DNA, 25 bp, Artificial
  probe
  misc_feature (1)..(25): SEQ ID NO: 814; WAN024DXE; Start 349; Stop 373
atcacggtatctatgagttccttct

SEQ ID NO: 274251 - DNA, 25 bp, Artificial
  probe
  misc_feature (1)..(25): SEQ ID NO: 814; WAN024DXE; Start 218; Stop 242
ttatctctgccttgagtaatcactg

SEQ ID NO: 274252 - DNA, 25 bp, Artificial
  probe
  misc_feature (1)..(25): SEQ ID NO: 814; WAN024DXE; Start 350; Stop 374
tcacggtatctatgagttccttctt

SEQ ID NO: 274253 - DNA, 25 bp, Artificial
  probe
  misc_feature (1)..(25): SEQ ID NO: 814; WAN024DXE; Start 348; Stop 372
tatcacggtatctatgagttccttc

SEQ ID NO: 274254 - DNA, 25 bp, Artificial
  probe
  misc_feature (1)..(25): SEQ ID NO: 814; WAN024DXE; Start 217; Stop 241
attatctctgccttgagtaatcact

SEQ ID NO: 274255 - DNA, 25 bp, Artificial
  probe
  misc_feature (1)..(25): SEQ ID NO: 814; WAN024DXE; Start 347; Stop 371
ttatcacggtatctatgagttcctt

SEQ ID NO: 274256 - DNA, 25 bp, Artificial
  probe
  misc_feature (1)..(25): SEQ ID NO: 814; WAN024DXE; Start 775; Stop 799
gcagaaggaacctataatcacgaga

SEQ ID NO: 274257 - DNA, 25 bp, Artificial
  probe
  misc_feature (1)..(25): SEQ ID NO: 814; WAN024DXE; Start 219; Stop 243
tatctctgccttgagtaatcactgg

SEQ ID NO: 274258 - DNA, 25 bp, Artificial
  probe
  misc_feature (1)..(25): SEQ ID NO: 814; WAN024DXE; Start 297; Stop 321
gatggtcttagcttggtatcagatt

SEQ ID NO: 274259 - DNA, 25 bp, Artificial
  probe
  misc_feature (1)..(25): SEQ ID NO: 814; WAN024DXE; Start 298; Stop 322
atggtcttagcttggtatcagattg

SEQ ID NO: 274260 - DNA, 25 bp, Artificial
  probe
  misc_feature (1)..(25): SEQ ID NO: 814; WAN024DXE; Start 787; Stop 811
tataatcacgagagaaaggcagttt

SEQ ID NO: 274261 - DNA, 25 bp, Artificial
  probe
  misc_feature (1)..(25): SEQ ID NO: 814; WAN024DXE; Start 597; Stop 621
ctttggttggaaatacgctctttat

SEQ ID NO: 274262 - DNA, 25 bp, Artificial
  probe
  misc_feature (1)..(25): SEQ ID NO: 814; WAN024DXE; Start 539; Stop 563
atgtcggtagtatttctttcttggt

SEQ ID NO: 274263 - DNA, 25 bp, Artificial
  probe
  misc_feature (1)..(25): SEQ ID NO: 814; WAN024DXE; Start 362; Stop 386
tgagttccttctttatccagtttgt

SEQ ID NO: 274264 - DNA, 25 bp, Artificial
  probe
  misc_feature (1)..(25): SEQ ID NO: 814; WAN024DXE; Start 351; Stop 375
cacggtatctatgagttccttcttt

SEQ ID NO: 274265 - DNA, 25 bp, Artificial
  probe
  misc_feature (1)..(25): SEQ ID NO: 814; WAN024DXE; Start 786; Stop 810
ctataatcacgagagaaaggcagtt

SEQ ID NO: 274266 - DNA, 25 bp, Artificial
  probe
  misc_feature (1)..(25): SEQ ID NO: 814; WAN024DXE; Start 363; Stop 387
gagttccttctttatccagtttgtc

SEQ ID NO: 274267 - DNA, 25 bp, Artificial
  probe
  misc_feature (1)..(25): SEQ ID NO: 814; WAN024DXE; Start 540; Stop 564
tgtcggtagtatttctttcttggta

SEQ ID NO: 274268 - DNA, 25 bp, Artificial
  probe
  misc_feature (1)..(25): SEQ ID NO: 814; WAN024DXE; Start 364; Stop 388
agttccttctttatccagtttgtcc

SEQ ID NO: 274269 - DNA, 25 bp, Artificial
  probe
  misc_feature (1)..(25): SEQ ID NO: 814; WAN024DXE; Start 329; Stop 353
agttcaccgtctttacctttatcac

SEQ ID NO: 274270 - DNA, 25 bp, Artificial
  probe
  misc_feature (1)..(25): SEQ ID NO: 814; WAN024DXE; Start 538; Stop 562
aatgtcggtagtatttctttcttgg

SEQ ID NO: 274271 - DNA, 25 bp, Artificial
  probe
  misc_feature (1)..(25): SEQ ID NO: 814; WAN024DXE; Start 328; Stop 352
aagttcaccgtctttacctttatca

SEQ ID NO: 274272 - DNA, 25 bp, Artificial
  probe
  misc_feature (1)..(25): SEQ ID NO: 814; WAN024DXE; Start 284; Stop 308
ttaacttccctttgatggtcttagc

SEQ ID NO: 274273 - DNA, 25 bp, Artificial
  probe
  misc_feature (1)..(25): SEQ ID NO: 814; WAN024DXE; Start 361; Stop 385
atgagttccttctttatccagtttg

SEQ ID NO: 274274 - DNA, 25 bp, Artificial
  probe
  misc_feature (1)..(25): SEQ ID NO: 814; WAN024DXE; Start 780; Stop 804
aggaacctataatcacgagagaaag

SEQ ID NO: 274275 - DNA, 25 bp, Artificial
  probe
  misc_feature (1)..(25): SEQ ID NO: 814; WAN024DXE; Start 599; Stop 623
ttggttggaaatacgctctttattc

SEQ ID NO: 274276 - DNA, 25 bp, Artificial
  probe
  misc_feature (1)..(25): SEQ ID NO: 814; WAN024DXE; Start 352; Stop 376
acggtatctatgagttccttcttta

SEQ ID NO: 274277 - DNA, 25 bp, Artificial
  probe
  misc_feature (1)..(25): SEQ ID NO: 814; WAN024DXE; Start 600; Stop 624
tggttggaaatacgctctttattct

SEQ ID NO: 274278 - DNA, 25 bp, Artificial
  probe
  misc_feature (1)..(25): SEQ ID NO: 814; WAN024DXE; Start 598; Stop 622
tttggttggaaatacgctctttatt

SEQ ID NO: 274279 - DNA, 25 bp, Artificial
  probe
  misc_feature (1)..(25): SEQ ID NO: 814; WAN024DXE; Start 779; Stop 803
aaggaacctataatcacgagagaaa

SEQ ID NO: 274280 - DNA, 25 bp, Artificial
  probe
  misc_feature (1)..(25): SEQ ID NO: 815; WAN024CBY; Start 4; Stop 28
aaacaatttcaactaaggaggagaa

SEQ ID NO: 274281 - DNA, 25 bp, Artificial
  probe
  misc_feature (1)..(25): SEQ ID NO: 815; WAN024CBY; Start 3; Stop 27
gaaacaatttcaactaaggaggaga

SEQ ID NO: 274282 - DNA, 25 bp, Artificial
  probe
  misc_feature (1)..(25): SEQ ID NO: 815; WAN024CBY; Start 17; Stop 41
taaggaggagaaaacaaatggaact

SEQ ID NO: 274283 - DNA, 25 bp, Artificial
  probe
  misc_feature (1)..(25): SEQ ID NO: 815; WAN024CBY; Start 16; Stop 40
ctaaggaggagaaaacaaatggaac

SEQ ID NO: 274284 - DNA, 25 bp, Artificial
  probe
  misc_feature (1)..(25): SEQ ID NO: 815; WAN024CBY; Start 15; Stop 39
actaaggaggagaaaacaaatggaa

SEQ ID NO: 274285 - DNA, 25 bp, Artificial
  probe
  misc_feature (1)..(25): SEQ ID NO: 815; WAN024CBY; Start 14; Stop 38
aactaaggaggagaaaacaaatgga

SEQ ID NO: 274286 - DNA, 25 bp, Artificial
  probe
  misc_feature (1)..(25): SEQ ID NO: 815; WAN024CBY; Start 13; Stop 37
caactaaggaggagaaaacaaatgg

SEQ ID NO: 274287 - DNA, 25 bp, Artificial
  probe
  misc_feature (1)..(25): SEQ ID NO: 815; WAN024CBY; Start 5; Stop 29
aacaatttcaactaaggaggagaaa

SEQ ID NO: 274288 - DNA, 25 bp, Artificial
  probe
  misc_feature (1)..(25): SEQ ID NO: 815; WAN024CBY; Start 12; Stop 36
tcaactaaggaggagaaaacaaatg

SEQ ID NO: 274289 - DNA, 25 bp, Artificial
  probe
  misc_feature (1)..(25): SEQ ID NO: 815; WAN024CBY; Start 18; Stop 42
aaggaggagaaaacaaatggaactt

SEQ ID NO: 274290 - DNA, 25 bp, Artificial
  probe
  misc_feature (1)..(25): SEQ ID NO: 815; WAN024CBY; Start 11; Stop 35
ttcaactaaggaggagaaaacaaat

SEQ ID NO: 274291 - DNA, 25 bp, Artificial
  probe
  misc_feature (1)..(25): SEQ ID NO: 815; WAN024CBY; Start 19; Stop 43
aggaggagaaaacaaatggaacttg

SEQ ID NO: 274292 - DNA, 25 bp, Artificial
  probe
  misc_feature (1)..(25): SEQ ID NO: 815; WAN024CBY; Start 346; Stop 370
ccttatccttgggatggattcatat

SEQ ID NO: 274293 - DNA, 25 bp, Artificial
  probe
  misc_feature (1)..(25): SEQ ID NO: 815; WAN024CBY; Start 349; Stop 373
tatccttgggatggattcatatctg

SEQ ID NO: 274294 - DNA, 25 bp, Artificial
  probe
  misc_feature (1)..(25): SEQ ID NO: 815; WAN024CBY; Start 348; Stop 372
ttatccttgggatggattcatatct

SEQ ID NO: 274295 - DNA, 25 bp, Artificial
  probe
  misc_feature (1)..(25): SEQ ID NO: 815; WAN024CBY; Start 345; Stop 369
cccttatccttgggatggattcata

SEQ ID NO: 274296 - DNA, 25 bp, Artificial
  probe
  misc_feature (1)..(25): SEQ ID NO: 815; WAN024CBY; Start 347; Stop 371
cttatccttgggatggattcatatc

SEQ ID NO: 274297 - DNA, 25 bp, Artificial
  probe
  misc_feature (1)..(25): SEQ ID NO: 815; WAN024CBY; Start 29; Stop 53
aacaaatggaacttgtattaccaaa

SEQ ID NO: 274298 - DNA, 25 bp, Artificial
  probe
  misc_feature (1)..(25): SEQ ID NO: 815; WAN024CBY; Start 28; Stop 52
aaacaaatggaacttgtattaccaa

SEQ ID NO: 274299 - DNA, 25 bp, Artificial
  probe
  misc_feature (1)..(25): SEQ ID NO: 815; WAN024CBY; Start 10; Stop 34
tttcaactaaggaggagaaaacaaa

SEQ ID NO: 274300 - DNA, 25 bp, Artificial
  probe
  misc_feature (1)..(25): SEQ ID NO: 815; WAN024CBY; Start 350; Stop 374
atccttgggatggattcatatctgc

SEQ ID NO: 274301 - DNA, 25 bp, Artificial
  probe
  misc_feature (1)..(25): SEQ ID NO: 815; WAN024CBY; Start 30; Stop 54
acaaatggaacttgtattaccaaat

SEQ ID NO: 274302 - DNA, 25 bp, Artificial
  probe
  misc_feature (1)..(25): SEQ ID NO: 815; WAN024CBY; Start 9; Stop 33
atttcaactaaggaggagaaaacaa

SEQ ID NO: 274303 - DNA, 25 bp, Artificial
  probe
  misc_feature (1)..(25): SEQ ID NO: 815; WAN024CBY; Start 8; Stop 32
aatttcaactaaggaggagaaaaca

SEQ ID NO: 274304 - DNA, 25 bp, Artificial
  probe
  misc_feature (1)..(25): SEQ ID NO: 815; WAN024CBY; Start 6; Stop 30
acaatttcaactaaggaggagaaaa

SEQ ID NO: 274305 - DNA, 25 bp, Artificial
  probe
  misc_feature (1)..(25): SEQ ID NO: 815; WAN024CBY; Start 7; Stop 31
caatttcaactaaggaggagaaaac

SEQ ID NO: 274306 - DNA, 25 bp, Artificial
  probe
  misc_feature (1)..(25): SEQ ID NO: 815; WAN024CBY; Start 342; Stop 366
gaacccttatccttgggatggattc

SEQ ID NO: 274307 - DNA, 25 bp, Artificial
  probe
  misc_feature (1)..(25): SEQ ID NO: 815; WAN024CBY; Start 31; Stop 55
caaatggaacttgtattaccaaata

SEQ ID NO: 274308 - DNA, 25 bp, Artificial
  probe
  misc_feature (1)..(25): SEQ ID NO: 815; WAN024CBY; Start 344; Stop 368
acccttatccttgggatggattcat

SEQ ID NO: 274309 - DNA, 25 bp, Artificial
  probe
  misc_feature (1)..(25): SEQ ID NO: 815; WAN024CBY; Start 343; Stop 367
aacccttatccttgggatggattca

SEQ ID NO: 274310 - DNA, 25 bp, Artificial
  probe
  misc_feature (1)..(25): SEQ ID NO: 815; WAN024CBY; Start 21; Stop 45
gaggagaaaacaaatggaacttgta

SEQ ID NO: 274311 - DNA, 25 bp, Artificial
  probe
  misc_feature (1)..(25): SEQ ID NO: 815; WAN024CBY; Start 22; Stop 46
aggagaaaacaaatggaacttgtat

SEQ ID NO: 274312 - DNA, 25 bp, Artificial
  probe
  misc_feature (1)..(25): SEQ ID NO: 815; WAN024CBY; Start 20; Stop 44
ggaggagaaaacaaatggaacttgt

SEQ ID NO: 274313 - DNA, 25 bp, Artificial
  probe
  misc_feature (1)..(25): SEQ ID NO: 816; WAN024BFO; Start 1088; Stop 1112
tcttaggaggttggttgattgtaat

SEQ ID NO: 274314 - DNA, 25 bp, Artificial
  probe
  misc_feature (1)..(25): SEQ ID NO: 816; WAN024BFO; Start 1084; Stop 1108
agtatcttaggaggttggttgattg

SEQ ID NO: 274315 - DNA, 25 bp, Artificial
  probe
  misc_feature (1)..(25): SEQ ID NO: 816; WAN024BFO; Start 1085; Stop 1109
gtatcttaggaggttggttgattgt

SEQ ID NO: 274316 - DNA, 25 bp, Artificial
  probe
  misc_feature (1)..(25): SEQ ID NO: 816; WAN024BFO; Start 1087; Stop 1111
atcttaggaggttggttgattgtaa

SEQ ID NO: 274317 - DNA, 25 bp, Artificial
  probe
  misc_feature (1)..(25): SEQ ID NO: 816; WAN024BFO; Start 346; Stop 370
tctattatcagtgaacgctaccaag

SEQ ID NO: 274318 - DNA, 25 bp, Artificial
  probe
  misc_feature (1)..(25): SEQ ID NO: 816; WAN024BFO; Start 661; Stop 685
gctattaccatccgtattccaagtt

SEQ ID NO: 274319 - DNA, 25 bp, Artificial
  probe
  misc_feature (1)..(25): SEQ ID NO: 816; WAN024BFO; Start 345; Stop 369
ttctattatcagtgaacgctaccaa

SEQ ID NO: 274320 - DNA, 25 bp, Artificial
  probe
  misc_feature (1)..(25): SEQ ID NO: 816; WAN024BFO; Start 347; Stop 371
ctattatcagtgaacgctaccaagg

SEQ ID NO: 274321 - DNA, 25 bp, Artificial
  probe
  misc_feature (1)..(25): SEQ ID NO: 816; WAN024BFO; Start 1086; Stop 1110
tatcttaggaggttggttgattgta

SEQ ID NO: 274322 - DNA, 25 bp, Artificial
  probe
  misc_feature (1)..(25): SEQ ID NO: 816; WAN024BFO; Start 1090; Stop 1114
ttaggaggttggttgattgtaatct

SEQ ID NO: 274323 - DNA, 25 bp, Artificial
  probe
  misc_feature (1)..(25): SEQ ID NO: 816; WAN024BFO; Start 1089; Stop 1113
cttaggaggttggttgattgtaatc

SEQ ID NO: 274324 - DNA, 25 bp, Artificial
  probe
  misc_feature (1)..(25): SEQ ID NO: 816; WAN024BFO; Start 968; Stop 992
aactcctcaatcaagcaacttcatt

SEQ ID NO: 274325 - DNA, 25 bp, Artificial
  probe
  misc_feature (1)..(25): SEQ ID NO: 816; WAN024BFO; Start 348; Stop 372
tattatcagtgaacgctaccaagga

SEQ ID NO: 274326 - DNA, 25 bp, Artificial
  probe
  misc_feature (1)..(25): SEQ ID NO: 816; WAN024BFO; Start 1083; Stop 1107
tagtatcttaggaggttggttgatt

SEQ ID NO: 274327 - DNA, 25 bp, Artificial
  probe
  misc_feature (1)..(25): SEQ ID NO: 816; WAN024BFO; Start 1082; Stop 1106
ttagtatcttaggaggttggttgat

SEQ ID NO: 274328 - DNA, 25 bp, Artificial
  probe
  misc_feature (1)..(25): SEQ ID NO: 816; WAN024BFO; Start 1093; Stop 1117
ggaggttggttgattgtaatctcta

SEQ ID NO: 274329 - DNA, 25 bp, Artificial
  probe
  misc_feature (1)..(25): SEQ ID NO: 816; WAN024BFO; Start 1091; Stop 1115
taggaggttggttgattgtaatctc

SEQ ID NO: 274330 - DNA, 25 bp, Artificial
  probe
  misc_feature (1)..(25): SEQ ID NO: 816; WAN024BFO; Start 1123; Stop 1147
gtcatgtacctacttcagaagagag

SEQ ID NO: 274331 - DNA, 25 bp, Artificial
  probe
  misc_feature (1)..(25): SEQ ID NO: 816; WAN024BFO; Start 1121; Stop 1145
ttgtcatgtacctacttcagaagag

SEQ ID NO: 274332 - DNA, 25 bp, Artificial
  probe
  misc_feature (1)..(25): SEQ ID NO: 816; WAN024BFO; Start 1122; Stop 1146
tgtcatgtacctacttcagaagaga

SEQ ID NO: 274333 - DNA, 25 bp, Artificial
  probe
  misc_feature (1)..(25): SEQ ID NO: 816; WAN024BFO; Start 349; Stop 373
attatcagtgaacgctaccaaggaa

SEQ ID NO: 274334 - DNA, 25 bp, Artificial
  probe
  misc_feature (1)..(25): SEQ ID NO: 816; WAN024BFO; Start 1096; Stop 1120
ggttggttgattgtaatctctatct

SEQ ID NO: 274335 - DNA, 25 bp, Artificial
  probe
  misc_feature (1)..(25): SEQ ID NO: 816; WAN024BFO; Start 1095; Stop 1119
aggttggttgattgtaatctctatc

SEQ ID NO: 274336 - DNA, 25 bp, Artificial
  probe
  misc_feature (1)..(25): SEQ ID NO: 816; WAN024BFO; Start 1092; Stop 1116
aggaggttggttgattgtaatctct

SEQ ID NO: 274337 - DNA, 25 bp, Artificial
  probe
  misc_feature (1)..(25): SEQ ID NO: 816; WAN024BFO; Start 1124; Stop 1148
tcatgtacctacttcagaagagagc

SEQ ID NO: 274338 - DNA, 25 bp, Artificial
  probe
  misc_feature (1)..(25): SEQ ID NO: 816; WAN024BFO; Start 1094; Stop 1118
gaggttggttgattgtaatctctat

SEQ ID NO: 274339 - DNA, 25 bp, Artificial
  probe
  misc_feature (1)..(25): SEQ ID NO: 816; WAN024BFO; Start 1127; Stop 1151
tgtacctacttcagaagagagctta

SEQ ID NO: 274340 - DNA, 25 bp, Artificial
  probe
  misc_feature (1)..(25): SEQ ID NO: 816; WAN024BFO; Start 657; Stop 681
tacagctattaccatccgtattcca

SEQ ID NO: 274341 - DNA, 25 bp, Artificial
  probe
  misc_feature (1)..(25): SEQ ID NO: 816; WAN024BFO; Start 1126; Stop 1150
atgtacctacttcagaagagagctt

SEQ ID NO: 274342 - DNA, 25 bp, Artificial
  probe
  misc_feature (1)..(25): SEQ ID NO: 816; WAN024BFO; Start 659; Stop 683
cagctattaccatccgtattccaag

SEQ ID NO: 274343 - DNA, 25 bp, Artificial
  probe
  misc_feature (1)..(25): SEQ ID NO: 816; WAN024BFO; Start 660; Stop 684
agctattaccatccgtattccaagt

SEQ ID NO: 274344 - DNA, 25 bp, Artificial
  probe
  misc_feature (1)..(25): SEQ ID NO: 816; WAN024BFO; Start 650; Stop 674
gtaccaatacagctattaccatccg

SEQ ID NO: 274345 - DNA, 25 bp, Artificial
  probe
  misc_feature (1)..(25): SEQ ID NO: 816; WAN024BFO; Start 1077; Stop 1101
ggtctttagtatcttaggaggttgg

SEQ ID NO: 274346 - DNA, 25 bp, Artificial
  probe
  misc_feature (1)..(25): SEQ ID NO: 817; WAN024DDJ; Start 129; Stop 153
gttatcagttgttatcagcatccac

SEQ ID NO: 274347 - DNA, 25 bp, Artificial
  probe
  misc_feature (1)..(25): SEQ ID NO: 817; WAN024DDJ; Start 32; Stop 56
ttctctatctgctctctccattcat

SEQ ID NO: 274348 - DNA, 25 bp, Artificial
  probe
  misc_feature (1)..(25): SEQ ID NO: 817; WAN024DDJ; Start 130; Stop 154
ttatcagttgttatcagcatccacc

SEQ ID NO: 274349 - DNA, 25 bp, Artificial
  probe
  misc_feature (1)..(25): SEQ ID NO: 817; WAN024DDJ; Start 128; Stop 152
ggttatcagttgttatcagcatcca

SEQ ID NO: 274350 - DNA, 25 bp, Artificial
  probe
  misc_feature (1)..(25): SEQ ID NO: 817; WAN024DDJ; Start 127; Stop 151
tggttatcagttgttatcagcatcc

SEQ ID NO: 274351 - DNA, 25 bp, Artificial
  probe
  misc_feature (1)..(25): SEQ ID NO: 817; WAN024DDJ; Start 33; Stop 57
tctctatctgctctctccattcatc

SEQ ID NO: 274352 - DNA, 25 bp, Artificial
  probe
  misc_feature (1)..(25): SEQ ID NO: 817; WAN024DDJ; Start 13; Stop 37
gaacatatactcatcggacttctct

SEQ ID NO: 274353 - DNA, 25 bp, Artificial
  probe
  misc_feature (1)..(25): SEQ ID NO: 817; WAN024DDJ; Start 31; Stop 55
cttctctatctgctctctccattca

SEQ ID NO: 274354 - DNA, 25 bp, Artificial
  probe
  misc_feature (1)..(25): SEQ ID NO: 817; WAN024DDJ; Start 30; Stop 54
acttctctatctgctctctccattc

SEQ ID NO: 274355 - DNA, 25 bp, Artificial
  probe
  misc_feature (1)..(25): SEQ ID NO: 817; WAN024DDJ; Start 29; Stop 53
gacttctctatctgctctctccatt

SEQ ID NO: 274356 - DNA, 25 bp, Artificial
  probe
  misc_feature (1)..(25): SEQ ID NO: 817; WAN024DDJ; Start 19; Stop 43
atactcatcggacttctctatctgc

SEQ ID NO: 274357 - DNA, 25 bp, Artificial
  probe
  misc_feature (1)..(25): SEQ ID NO: 817; WAN024DDJ; Start 18; Stop 42
tatactcatcggacttctctatctg

SEQ ID NO: 274358 - DNA, 25 bp, Artificial
  probe
  misc_feature (1)..(25): SEQ ID NO: 817; WAN024DDJ; Start 14; Stop 38
aacatatactcatcggacttctcta

SEQ ID NO: 274359 - DNA, 25 bp, Artificial
  probe
  misc_feature (1)..(25): SEQ ID NO: 817; WAN024DDJ; Start 131; Stop 155
tatcagttgttatcagcatccacca

SEQ ID NO: 274360 - DNA, 25 bp, Artificial
  probe
  misc_feature (1)..(25): SEQ ID NO: 817; WAN024DDJ; Start 15; Stop 39
acatatactcatcggacttctctat

SEQ ID NO: 274361 - DNA, 25 bp, Artificial
  probe
  misc_feature (1)..(25): SEQ ID NO: 817; WAN024DDJ; Start 126; Stop 150
ctggttatcagttgttatcagcatc

SEQ ID NO: 274362 - DNA, 25 bp, Artificial
  probe
  misc_feature (1)..(25): SEQ ID NO: 817; WAN024DDJ; Start 34; Stop 58
ctctatctgctctctccattcatcg

SEQ ID NO: 274363 - DNA, 25 bp, Artificial
  probe
  misc_feature (1)..(25): SEQ ID NO: 817; WAN024DDJ; Start 20; Stop 44
tactcatcggacttctctatctgct

SEQ ID NO: 274364 - DNA, 25 bp, Artificial
  probe
  misc_feature (1)..(25): SEQ ID NO: 817; WAN024DDJ; Start 16; Stop 40
catatactcatcggacttctctatc

SEQ ID NO: 274365 - DNA, 25 bp, Artificial
  probe
  misc_feature (1)..(25): SEQ ID NO: 817; WAN024DDJ; Start 132; Stop 156
atcagttgttatcagcatccaccat

SEQ ID NO: 274366 - DNA, 25 bp, Artificial
  probe
  misc_feature (1)..(25): SEQ ID NO: 817; WAN024DDJ; Start 17; Stop 41
atatactcatcggacttctctatct

SEQ ID NO: 274367 - DNA, 25 bp, Artificial
  probe
  misc_feature (1)..(25): SEQ ID NO: 817; WAN024DDJ; Start 133; Stop 157
tcagttgttatcagcatccaccatt

SEQ ID NO: 274368 - DNA, 25 bp, Artificial
  probe
  misc_feature (1)..(25): SEQ ID NO: 817; WAN024DDJ; Start 25; Stop 49
atcggacttctctatctgctctctc

SEQ ID NO: 274369 - DNA, 25 bp, Artificial
  probe
  misc_feature (1)..(25): SEQ ID NO: 817; WAN024DDJ; Start 108; Stop 132
cactgcttatgttatttgctggtta

SEQ ID NO: 274370 - DNA, 25 bp, Artificial
  probe
  misc_feature (1)..(25): SEQ ID NO: 817; WAN024DDJ; Start 6; Stop 30
acacaaagaacatatactcatcgga

SEQ ID NO: 274371 - DNA, 25 bp, Artificial
  probe
  misc_feature (1)..(25): SEQ ID NO: 817; WAN024DDJ; Start 8; Stop 32
acaaagaacatatactcatcggact

SEQ ID NO: 274372 - DNA, 25 bp, Artificial
  probe
  misc_feature (1)..(25): SEQ ID NO: 817; WAN024DDJ; Start 7; Stop 31
cacaaagaacatatactcatcggac

SEQ ID NO: 274373 - DNA, 25 bp, Artificial
  probe
  misc_feature (1)..(25): SEQ ID NO: 817; WAN024DDJ; Start 24; Stop 48
catcggacttctctatctgctctct

SEQ ID NO: 274374 - DNA, 25 bp, Artificial
  probe
  misc_feature (1)..(25): SEQ ID NO: 817; WAN024DDJ; Start 23; Stop 47
tcatcggacttctctatctgctctc

SEQ ID NO: 274375 - DNA, 25 bp, Artificial
  probe
  misc_feature (1)..(25): SEQ ID NO: 817; WAN024DDJ; Start 22; Stop 46
ctcatcggacttctctatctgctct

SEQ ID NO: 274376 - DNA, 25 bp, Artificial
  probe
  misc_feature (1)..(25): SEQ ID NO: 817; WAN024DDJ; Start 5; Stop 29
aacacaaagaacatatactcatcgg

SEQ ID NO: 274377 - DNA, 25 bp, Artificial
  probe
  misc_feature (1)..(25): SEQ ID NO: 817; WAN024DDJ; Start 111; Stop 135
tgcttatgttatttgctggttatca

SEQ ID NO: 274378 - DNA, 25 bp, Artificial
  probe
  misc_feature (1)..(25): SEQ ID NO: 817; WAN024DDJ; Start 109; Stop 133
actgcttatgttatttgctggttat

SEQ ID NO: 274379 - DNA, 25 bp, Artificial
  probe
  misc_feature (1)..(25): SEQ ID NO: 818; WAN024CEX; Start 710; Stop 734
ttatactgacactgattgaagcctt

SEQ ID NO: 274380 - DNA, 25 bp, Artificial
  probe
  misc_feature (1)..(25): SEQ ID NO: 818; WAN024CEX; Start 896; Stop 920
agatgaagaactataagactggcaa

SEQ ID NO: 274381 - DNA, 25 bp, Artificial
  probe
  misc_feature (1)..(25): SEQ ID NO: 818; WAN024CEX; Start 711; Stop 735
tatactgacactgattgaagccttg

SEQ ID NO: 274382 - DNA, 25 bp, Artificial
  probe
  misc_feature (1)..(25): SEQ ID NO: 818; WAN024CEX; Start 1246; Stop 1270
gtaggaacaagtgtcatatcagagt

SEQ ID NO: 274383 - DNA, 25 bp, Artificial
  probe
  misc_feature (1)..(25): SEQ ID NO: 818; WAN024CEX; Start 152; Stop 176
cacaagcagataagattgacattcc

SEQ ID NO: 274384 - DNA, 25 bp, Artificial
  probe
  misc_feature (1)..(25): SEQ ID NO: 818; WAN024CEX; Start 307; Stop 331
aacaagtggtatgaatctgaacagg

SEQ ID NO: 274385 - DNA, 25 bp, Artificial
  probe
  misc_feature (1)..(25): SEQ ID NO: 818; WAN024CEX; Start 1247; Stop 1271
taggaacaagtgtcatatcagagtt

SEQ ID NO: 274386 - DNA, 25 bp, Artificial
  probe
  misc_feature (1)..(25): SEQ ID NO: 818; WAN024CEX; Start 890; Stop 914
tgaagcagatgaagaactataagac

SEQ ID NO: 274387 - DNA, 25 bp, Artificial
  probe
  misc_feature (1)..(25): SEQ ID NO: 818; WAN024CEX; Start 151; Stop 175
tcacaagcagataagattgacattc

SEQ ID NO: 274388 - DNA, 25 bp, Artificial
  probe
  misc_feature (1)..(25): SEQ ID NO: 818; WAN024CEX; Start 309; Stop 333
caagtggtatgaatctgaacaggtc

SEQ ID NO: 274389 - DNA, 25 bp, Artificial
  probe
  misc_feature (1)..(25): SEQ ID NO: 818; WAN024CEX; Start 891; Stop 915
gaagcagatgaagaactataagact

SEQ ID NO: 274390 - DNA, 25 bp, Artificial
  probe
  misc_feature (1)..(25): SEQ ID NO: 818; WAN024CEX; Start 1245; Stop 1269
tgtaggaacaagtgtcatatcagag

SEQ ID NO: 274391 - DNA, 25 bp, Artificial
  probe
  misc_feature (1)..(25): SEQ ID NO: 818; WAN024CEX; Start 150; Stop 174
atcacaagcagataagattgacatt

SEQ ID NO: 274392 - DNA, 25 bp, Artificial
  probe
  misc_feature (1)..(25): SEQ ID NO: 818; WAN024CEX; Start 146; Stop 170
acctatcacaagcagataagattga

SEQ ID NO: 274393 - DNA, 25 bp, Artificial
  probe
  misc_feature (1)..(25): SEQ ID NO: 818; WAN024CEX; Start 147; Stop 171
cctatcacaagcagataagattgac

SEQ ID NO: 274394 - DNA, 25 bp, Artificial
  probe
  misc_feature (1)..(25): SEQ ID NO: 818; WAN024CEX; Start 1244; Stop 1268
atgtaggaacaagtgtcatatcaga

SEQ ID NO: 274395 - DNA, 25 bp, Artificial
  probe
  misc_feature (1)..(25): SEQ ID NO: 818; WAN024CEX; Start 895; Stop 919
cagatgaagaactataagactggca

SEQ ID NO: 274396 - DNA, 25 bp, Artificial
  probe
  misc_feature (1)..(25): SEQ ID NO: 818; WAN024CEX; Start 893; Stop 917
agcagatgaagaactataagactgg

SEQ ID NO: 274397 - DNA, 25 bp, Artificial
  probe
  misc_feature (1)..(25): SEQ ID NO: 818; WAN024CEX; Start 1243; Stop 1267
gatgtaggaacaagtgtcatatcag

SEQ ID NO: 274398 - DNA, 25 bp, Artificial
  probe
  misc_feature (1)..(25): SEQ ID NO: 818; WAN024CEX; Start 308; Stop 332
acaagtggtatgaatctgaacaggt

SEQ ID NO: 274399 - DNA, 25 bp, Artificial
  probe
  misc_feature (1)..(25): SEQ ID NO: 818; WAN024CEX; Start 1240; Stop 1264
gttgatgtaggaacaagtgtcatat

SEQ ID NO: 274400 - DNA, 25 bp, Artificial
  probe
  misc_feature (1)..(25): SEQ ID NO: 818; WAN024CEX; Start 145; Stop 169
aacctatcacaagcagataagattg

SEQ ID NO: 274401 - DNA, 25 bp, Artificial
  probe
  misc_feature (1)..(25): SEQ ID NO: 818; WAN024CEX; Start 148; Stop 172
ctatcacaagcagataagattgaca

SEQ ID NO: 274402 - DNA, 25 bp, Artificial
  probe
  misc_feature (1)..(25): SEQ ID NO: 818; WAN024CEX; Start 311; Stop 335
agtggtatgaatctgaacaggtcaa

SEQ ID NO: 274403 - DNA, 25 bp, Artificial
  probe
  misc_feature (1)..(25): SEQ ID NO: 818; WAN024CEX; Start 310; Stop 334
aagtggtatgaatctgaacaggtca

SEQ ID NO: 274404 - DNA, 25 bp, Artificial
  probe
  misc_feature (1)..(25): SEQ ID NO: 818; WAN024CEX; Start 1241; Stop 1265
ttgatgtaggaacaagtgtcatatc

SEQ ID NO: 274405 - DNA, 25 bp, Artificial
  probe
  misc_feature (1)..(25): SEQ ID NO: 818; WAN024CEX; Start 894; Stop 918
gcagatgaagaactataagactggc

SEQ ID NO: 274406 - DNA, 25 bp, Artificial
  probe
  misc_feature (1)..(25): SEQ ID NO: 818; WAN024CEX; Start 889; Stop 913
atgaagcagatgaagaactataaga

SEQ ID NO: 274407 - DNA, 25 bp, Artificial
  probe
  misc_feature (1)..(25): SEQ ID NO: 818; WAN024CEX; Start 491; Stop 515
aattagagagtggcttgtactgtga

SEQ ID NO: 274408 - DNA, 25 bp, Artificial
  probe
  misc_feature (1)..(25): SEQ ID NO: 818; WAN024CEX; Start 892; Stop 916
aagcagatgaagaactataagactg

SEQ ID NO: 274409 - DNA, 25 bp, Artificial
  probe
  misc_feature (1)..(25): SEQ ID NO: 818; WAN024CEX; Start 149; Stop 173
tatcacaagcagataagattgacat

SEQ ID NO: 274410 - DNA, 25 bp, Artificial
  probe
  misc_feature (1)..(25): SEQ ID NO: 818; WAN024CEX; Start 492; Stop 516
attagagagtggcttgtactgtgag

SEQ ID NO: 274411 - DNA, 25 bp, Artificial
  probe
  misc_feature (1)..(25): SEQ ID NO: 818; WAN024CEX; Start 1033; Stop 1057
cagattgtcatgttaggtcgtcaag

SEQ ID NO: 274412 - DNA, 25 bp, Artificial
  probe
  misc_feature (1)..(25): SEQ ID NO: 819; WAN024DY6; Start 555; Stop 579
gacttatatcgcctatggaacagat

SEQ ID NO: 274413 - DNA, 25 bp, Artificial
  probe
  misc_feature (1)..(25): SEQ ID NO: 819; WAN024DY6; Start 570; Stop 594
tggaacagatacaagcaagtctatt

SEQ ID NO: 274414 - DNA, 25 bp, Artificial
  probe
  misc_feature (1)..(25): SEQ ID NO: 819; WAN024DY6; Start 569; Stop 593
atggaacagatacaagcaagtctat

SEQ ID NO: 274415 - DNA, 25 bp, Artificial
  probe
  misc_feature (1)..(25): SEQ ID NO: 819; WAN024DY6; Start 567; Stop 591
ctatggaacagatacaagcaagtct

SEQ ID NO: 274416 - DNA, 25 bp, Artificial
  probe
  misc_feature (1)..(25): SEQ ID NO: 819; WAN024DY6; Start 566; Stop 590
cctatggaacagatacaagcaagtc

SEQ ID NO: 274417 - DNA, 25 bp, Artificial
  probe
  misc_feature (1)..(25): SEQ ID NO: 819; WAN024DY6; Start 568; Stop 592
tatggaacagatacaagcaagtcta

SEQ ID NO: 274418 - DNA, 25 bp, Artificial
  probe
  misc_feature (1)..(25): SEQ ID NO: 819; WAN024DY6; Start 1139; Stop 1163
ttgtgtcagattatgaggaagtgtt

SEQ ID NO: 274419 - DNA, 25 bp, Artificial
  probe
  misc_feature (1)..(25): SEQ ID NO: 819; WAN024DY6; Start 1138; Stop 1162
attgtgtcagattatgaggaagtgt

SEQ ID NO: 274420 - DNA, 25 bp, Artificial
  probe
  misc_feature (1)..(25): SEQ ID NO: 819; WAN024DY6; Start 1137; Stop 1161
gattgtgtcagattatgaggaagtg

SEQ ID NO: 274421 - DNA, 25 bp, Artificial
  probe
  misc_feature (1)..(25): SEQ ID NO: 819; WAN024DY6; Start 1136; Stop 1160
agattgtgtcagattatgaggaagt

SEQ ID NO: 274422 - DNA, 25 bp, Artificial
  probe
  misc_feature (1)..(25): SEQ ID NO: 819; WAN024DY6; Start 560; Stop 584
atatcgcctatggaacagatacaag

SEQ ID NO: 274423 - DNA, 25 bp, Artificial
  probe
  misc_feature (1)..(25): SEQ ID NO: 819; WAN024DY6; Start 1135; Stop 1159
aagattgtgtcagattatgaggaag

SEQ ID NO: 274424 - DNA, 25 bp, Artificial
  probe
  misc_feature (1)..(25): SEQ ID NO: 819; WAN024DY6; Start 559; Stop 583
tatatcgcctatggaacagatacaa

SEQ ID NO: 274425 - DNA, 25 bp, Artificial
  probe
  misc_feature (1)..(25): SEQ ID NO: 819; WAN024DY6; Start 558; Stop 582
ttatatcgcctatggaacagataca

SEQ ID NO: 274426 - DNA, 25 bp, Artificial
  probe
  misc_feature (1)..(25): SEQ ID NO: 819; WAN024DY6; Start 556; Stop 580
acttatatcgcctatggaacagata

SEQ ID NO: 274427 - DNA, 25 bp, Artificial
  probe
  misc_feature (1)..(25): SEQ ID NO: 819; WAN024DY6; Start 557; Stop 581
cttatatcgcctatggaacagatac

SEQ ID NO: 274428 - DNA, 25 bp, Artificial
  probe
  misc_feature (1)..(25): SEQ ID NO: 819; WAN024DY6; Start 780; Stop 804
ttacgatcagttgctcaaggataca

SEQ ID NO: 274429 - DNA, 25 bp, Artificial
  probe
  misc_feature (1)..(25): SEQ ID NO: 819; WAN024DY6; Start 781; Stop 805
tacgatcagttgctcaaggatacag

SEQ ID NO: 274430 - DNA, 25 bp, Artificial
  probe
  misc_feature (1)..(25): SEQ ID NO: 819; WAN024DY6; Start 1057; Stop 1081
gaacgatttgatgaaggtgctattt

SEQ ID NO: 274431 - DNA, 25 bp, Artificial
  probe
  misc_feature (1)..(25): SEQ ID NO: 819; WAN024DY6; Start 565; Stop 589
gcctatggaacagatacaagcaagt

SEQ ID NO: 274432 - DNA, 25 bp, Artificial
  probe
  misc_feature (1)..(25): SEQ ID NO: 819; WAN024DY6; Start 1048; Stop 1072
gaagaagtggaacgatttgatgaag

SEQ ID NO: 274433 - DNA, 25 bp, Artificial
  probe
  misc_feature (1)..(25): SEQ ID NO: 819; WAN024DY6; Start 152; Stop 176
gatttacagcagacacatttgagta

SEQ ID NO: 274434 - DNA, 25 bp, Artificial
  probe
  misc_feature (1)..(25): SEQ ID NO: 819; WAN024DY6; Start 261; Stop 285
ggctattgaattgtctaagggaaac

SEQ ID NO: 274435 - DNA, 25 bp, Artificial
  probe
  misc_feature (1)..(25): SEQ ID NO: 819; WAN024DY6; Start 260; Stop 284
aggctattgaattgtctaagggaaa

SEQ ID NO: 274436 - DNA, 25 bp, Artificial
  probe
  misc_feature (1)..(25): SEQ ID NO: 819; WAN024DY6; Start 259; Stop 283
aaggctattgaattgtctaagggaa

SEQ ID NO: 274437 - DNA, 25 bp, Artificial
  probe
  misc_feature (1)..(25): SEQ ID NO: 819; WAN024DY6; Start 1058; Stop 1082
aacgatttgatgaaggtgctatttc

SEQ ID NO: 274438 - DNA, 25 bp, Artificial
  probe
  misc_feature (1)..(25): SEQ ID NO: 819; WAN024DY6; Start 561; Stop 585
tatcgcctatggaacagatacaagc

SEQ ID NO: 274439 - DNA, 25 bp, Artificial
  probe
  misc_feature (1)..(25): SEQ ID NO: 819; WAN024DY6; Start 540; Stop 564
gtatcagcccaagacgacttatatc

SEQ ID NO: 274440 - DNA, 25 bp, Artificial
  probe
  misc_feature (1)..(25): SEQ ID NO: 819; WAN024DY6; Start 258; Stop 282
taaggctattgaattgtctaaggga

SEQ ID NO: 274441 - DNA, 25 bp, Artificial
  probe
  misc_feature (1)..(25): SEQ ID NO: 819; WAN024DY6; Start 1067; Stop 1091
atgaaggtgctatttcggaattaga

SEQ ID NO: 274442 - DNA, 25 bp, Artificial
  probe
  misc_feature (1)..(25): SEQ ID NO: 819; WAN024DY6; Start 1066; Stop 1090
gatgaaggtgctatttcggaattag

SEQ ID NO: 274443 - DNA, 25 bp, Artificial
  probe
  misc_feature (1)..(25): SEQ ID NO: 819; WAN024DY6; Start 1065; Stop 1089
tgatgaaggtgctatttcggaatta

SEQ ID NO: 274444 - DNA, 25 bp, Artificial
  probe
  misc_feature (1)..(25): SEQ ID NO: 819; WAN024DY6; Start 150; Stop 174
aggatttacagcagacacatttgag

SEQ ID NO: 274445 - DNA, 25 bp, Artificial
  probe
  misc_feature (1)..(25): SEQ ID NO: 820; WAN024DY5; Start 1122; Stop 1146
aacagcatatagttggcaattcatt

SEQ ID NO: 274446 - DNA, 25 bp, Artificial
  probe
  misc_feature (1)..(25): SEQ ID NO: 820; WAN024DY5; Start 1124; Stop 1148
cagcatatagttggcaattcattga

SEQ ID NO: 274447 - DNA, 25 bp, Artificial
  probe
  misc_feature (1)..(25): SEQ ID NO: 820; WAN024DY5; Start 1123; Stop 1147
acagcatatagttggcaattcattg

SEQ ID NO: 274448 - DNA, 25 bp, Artificial
  probe
  misc_feature (1)..(25): SEQ ID NO: 820; WAN024DY5; Start 1125; Stop 1149
agcatatagttggcaattcattgaa

SEQ ID NO: 274449 - DNA, 25 bp, Artificial
  probe
  misc_feature (1)..(25): SEQ ID NO: 820; WAN024DY5; Start 1041; Stop 1065
agccagattaattgacattgttgac

SEQ ID NO: 274450 - DNA, 25 bp, Artificial
  probe
  misc_feature (1)..(25): SEQ ID NO: 820; WAN024DY5; Start 1042; Stop 1066
gccagattaattgacattgttgaca

SEQ ID NO: 274451 - DNA, 25 bp, Artificial
  probe
  misc_feature (1)..(25): SEQ ID NO: 820; WAN024DY5; Start 842; Stop 866
cagtctatgaccaagaattgctcaa

SEQ ID NO: 274452 - DNA, 25 bp, Artificial
  probe
  misc_feature (1)..(25): SEQ ID NO: 820; WAN024DY5; Start 840; Stop 864
aacagtctatgaccaagaattgctc

SEQ ID NO: 274453 - DNA, 25 bp, Artificial
  probe
  misc_feature (1)..(25): SEQ ID NO: 820; WAN024DY5; Start 839; Stop 863
gaacagtctatgaccaagaattgct

SEQ ID NO: 274454 - DNA, 25 bp, Artificial
  probe
  misc_feature (1)..(25): SEQ ID NO: 820; WAN024DY5; Start 1043; Stop 1067
ccagattaattgacattgttgacag

SEQ ID NO: 274455 - DNA, 25 bp, Artificial
  probe
  misc_feature (1)..(25): SEQ ID NO: 820; WAN024DY5; Start 1040; Stop 1064
tagccagattaattgacattgttga

SEQ ID NO: 274456 - DNA, 25 bp, Artificial
  probe
  misc_feature (1)..(25): SEQ ID NO: 820; WAN024DY5; Start 549; Stop 573
caagacgacctatattgcttatggt

SEQ ID NO: 274457 - DNA, 25 bp, Artificial
  probe
  misc_feature (1)..(25): SEQ ID NO: 820; WAN024DY5; Start 550; Stop 574
aagacgacctatattgcttatggta

SEQ ID NO: 274458 - DNA, 25 bp, Artificial
  probe
  misc_feature (1)..(25): SEQ ID NO: 820; WAN024DY5; Start 1154; Stop 1178
agtataaggagatttgggatgagga

SEQ ID NO: 274459 - DNA, 25 bp, Artificial
  probe
  misc_feature (1)..(25): SEQ ID NO: 820; WAN024DY5; Start 1153; Stop 1177
gagtataaggagatttgggatgagg

SEQ ID NO: 274460 - DNA, 25 bp, Artificial
  probe
  misc_feature (1)..(25): SEQ ID NO: 820; WAN024DY5; Start 841; Stop 865
acagtctatgaccaagaattgctca

SEQ ID NO: 274461 - DNA, 25 bp, Artificial
  probe
  misc_feature (1)..(25): SEQ ID NO: 820; WAN024DY5; Start 838; Stop 862
ggaacagtctatgaccaagaattgc

SEQ ID NO: 274462 - DNA, 25 bp, Artificial
  probe
  misc_feature (1)..(25): SEQ ID NO: 820; WAN024DY5; Start 146; Stop 170
agtcaggatttacagcagatacatt

SEQ ID NO: 274463 - DNA, 25 bp, Artificial
  probe
  misc_feature (1)..(25): SEQ ID NO: 820; WAN024DY5; Start 145; Stop 169
aagtcaggatttacagcagatacat

SEQ ID NO: 274464 - DNA, 25 bp, Artificial
  probe
  misc_feature (1)..(25): SEQ ID NO: 820; WAN024DY5; Start 144; Stop 168
aaagtcaggatttacagcagataca

SEQ ID NO: 274465 - DNA, 25 bp, Artificial
  probe
  misc_feature (1)..(25): SEQ ID NO: 820; WAN024DY5; Start 553; Stop 577
acgacctatattgcttatggtacag

SEQ ID NO: 274466 - DNA, 25 bp, Artificial
  probe
  misc_feature (1)..(25): SEQ ID NO: 820; WAN024DY5; Start 552; Stop 576
gacgacctatattgcttatggtaca

SEQ ID NO: 274467 - DNA, 25 bp, Artificial
  probe
  misc_feature (1)..(25): SEQ ID NO: 820; WAN024DY5; Start 143; Stop 167
caaagtcaggatttacagcagatac

SEQ ID NO: 274468 - DNA, 25 bp, Artificial
  probe
  misc_feature (1)..(25): SEQ ID NO: 820; WAN024DY5; Start 1155; Stop 1179
gtataaggagatttgggatgaggaa

SEQ ID NO: 274469 - DNA, 25 bp, Artificial
  probe
  misc_feature (1)..(25): SEQ ID NO: 820; WAN024DY5; Start 554; Stop 578
cgacctatattgcttatggtacaga

SEQ ID NO: 274470 - DNA, 25 bp, Artificial
  probe
  misc_feature (1)..(25): SEQ ID NO: 820; WAN024DY5; Start 551; Stop 575
agacgacctatattgcttatggtac

SEQ ID NO: 274471 - DNA, 25 bp, Artificial
  probe
  misc_feature (1)..(25): SEQ ID NO: 820; WAN024DY5; Start 548; Stop 572
ccaagacgacctatattgcttatgg

SEQ ID NO: 274472 - DNA, 25 bp, Artificial
  probe
  misc_feature (1)..(25): SEQ ID NO: 820; WAN024DY5; Start 1156; Stop 1180
tataaggagatttgggatgaggaag

SEQ ID NO: 274473 - DNA, 25 bp, Artificial
  probe
  misc_feature (1)..(25): SEQ ID NO: 820; WAN024DY5; Start 1039; Stop 1063
ttagccagattaattgacattgttg

SEQ ID NO: 274474 - DNA, 25 bp, Artificial
  probe
  misc_feature (1)..(25): SEQ ID NO: 820; WAN024DY5; Start 1102; Stop 1126
atggcgaaagatagaattgaaacag

SEQ ID NO: 274475 - DNA, 25 bp, Artificial
  probe
  misc_feature (1)..(25): SEQ ID NO: 820; WAN024DY5; Start 1152; Stop 1176
agagtataaggagatttgggatgag

SEQ ID NO: 274476 - DNA, 25 bp, Artificial
  probe
  misc_feature (1)..(25): SEQ ID NO: 820; WAN024DY5; Start 147; Stop 171
gtcaggatttacagcagatacattt

SEQ ID NO: 274477 - DNA, 25 bp, Artificial
  probe
  misc_feature (1)..(25): SEQ ID NO: 820; WAN024DY5; Start 1105; Stop 1129
gcgaaagatagaattgaaacagcat

SEQ ID NO: 274478 - DNA, 25 bp, Artificial
  probe
  misc_feature (1)..(25): SEQ ID NO: 821; WAN024DYB; Start 560; Stop 584
atattgcctatggaacggatactac

SEQ ID NO: 274479 - DNA, 25 bp, Artificial
  probe
  misc_feature (1)..(25): SEQ ID NO: 821; WAN024DYB; Start 558; Stop 582
ctatattgcctatggaacggatact

SEQ ID NO: 274480 - DNA, 25 bp, Artificial
  probe
  misc_feature (1)..(25): SEQ ID NO: 821; WAN024DYB; Start 557; Stop 581
cctatattgcctatggaacggatac

SEQ ID NO: 274481 - DNA, 25 bp, Artificial
  probe
  misc_feature (1)..(25): SEQ ID NO: 821; WAN024DYB; Start 561; Stop 585
tattgcctatggaacggatactact

SEQ ID NO: 274482 - DNA, 25 bp, Artificial
  probe
  misc_feature (1)..(25): SEQ ID NO: 821; WAN024DYB; Start 1040; Stop 1064
gtgtcattgaggaagtagaaggatt

SEQ ID NO: 274483 - DNA, 25 bp, Artificial
  probe
  misc_feature (1)..(25): SEQ ID NO: 821; WAN024DYB; Start 556; Stop 580
acctatattgcctatggaacggata

SEQ ID NO: 274484 - DNA, 25 bp, Artificial
  probe
  misc_feature (1)..(25): SEQ ID NO: 821; WAN024DYB; Start 559; Stop 583
tatattgcctatggaacggatacta

SEQ ID NO: 274485 - DNA, 25 bp, Artificial
  probe
  misc_feature (1)..(25): SEQ ID NO: 821; WAN024DYB; Start 562; Stop 586
attgcctatggaacggatactactc

SEQ ID NO: 274486 - DNA, 25 bp, Artificial
  probe
  misc_feature (1)..(25): SEQ ID NO: 821; WAN024DYB; Start 780; Stop 804
ttacgaccagttgttacaggatact

SEQ ID NO: 274487 - DNA, 25 bp, Artificial
  probe
  misc_feature (1)..(25): SEQ ID NO: 821; WAN024DYB; Start 524; Stop 548
aagaggattataagcagtaccaacc

SEQ ID NO: 274488 - DNA, 25 bp, Artificial
  probe
  misc_feature (1)..(25): SEQ ID NO: 821; WAN024DYB; Start 522; Stop 546
ccaagaggattataagcagtaccaa

SEQ ID NO: 274489 - DNA, 25 bp, Artificial
  probe
  misc_feature (1)..(25): SEQ ID NO: 821; WAN024DYB; Start 526; Stop 550
gaggattataagcagtaccaaccaa

SEQ ID NO: 274490 - DNA, 25 bp, Artificial
  probe
  misc_feature (1)..(25): SEQ ID NO: 821; WAN024DYB; Start 555; Stop 579
cacctatattgcctatggaacggat

SEQ ID NO: 274491 - DNA, 25 bp, Artificial
  probe
  misc_feature (1)..(25): SEQ ID NO: 821; WAN024DYB; Start 1139; Stop 1163
ttgtgtcagattatgaagaagtgtt

SEQ ID NO: 274492 - DNA, 25 bp, Artificial
  probe
  misc_feature (1)..(25): SEQ ID NO: 821; WAN024DYB; Start 845; Stop 869
tctatgaccaagagttgctcaagta

SEQ ID NO: 274493 - DNA, 25 bp, Artificial
  probe
  misc_feature (1)..(25): SEQ ID NO: 821; WAN024DYB; Start 1138; Stop 1162
attgtgtcagattatgaagaagtgt

SEQ ID NO: 274494 - DNA, 25 bp, Artificial
  probe
  misc_feature (1)..(25): SEQ ID NO: 821; WAN024DYB; Start 523; Stop 547
caagaggattataagcagtaccaac

SEQ ID NO: 274495 - DNA, 25 bp, Artificial
  probe
  misc_feature (1)..(25): SEQ ID NO: 821; WAN024DYB; Start 525; Stop 549
agaggattataagcagtaccaacca

SEQ ID NO: 274496 - DNA, 25 bp, Artificial
  probe
  misc_feature (1)..(25): SEQ ID NO: 821; WAN024DYB; Start 1039; Stop 1063
cgtgtcattgaggaagtagaaggat

SEQ ID NO: 274497 - DNA, 25 bp, Artificial
  probe
  misc_feature (1)..(25): SEQ ID NO: 821; WAN024DYB; Start 111; Stop 135
atactatgttgcttgtatgcgtgaa

SEQ ID NO: 274498 - DNA, 25 bp, Artificial
  probe
  misc_feature (1)..(25): SEQ ID NO: 821; WAN024DYB; Start 110; Stop 134
aatactatgttgcttgtatgcgtga

SEQ ID NO: 274499 - DNA, 25 bp, Artificial
  probe
  misc_feature (1)..(25): SEQ ID NO: 821; WAN024DYB; Start 109; Stop 133
caatactatgttgcttgtatgcgtg

SEQ ID NO: 274500 - DNA, 25 bp, Artificial
  probe
  misc_feature (1)..(25): SEQ ID NO: 821; WAN024DYB; Start 568; Stop 592
tatggaacggatactactccttcaa

SEQ ID NO: 274501 - DNA, 25 bp, Artificial
  probe
  misc_feature (1)..(25): SEQ ID NO: 821; WAN024DYB; Start 846; Stop 870
ctatgaccaagagttgctcaagtac

SEQ ID NO: 274502 - DNA, 25 bp, Artificial
  probe
  misc_feature (1)..(25): SEQ ID NO: 821; WAN024DYB; Start 1137; Stop 1161
gattgtgtcagattatgaagaagtg

SEQ ID NO: 274503 - DNA, 25 bp, Artificial
  probe
  misc_feature (1)..(25): SEQ ID NO: 821; WAN024DYB; Start 1136; Stop 1160
agattgtgtcagattatgaagaagt

SEQ ID NO: 274504 - DNA, 25 bp, Artificial
  probe
  misc_feature (1)..(25): SEQ ID NO: 821; WAN024DYB; Start 567; Stop 591
ctatggaacggatactactccttca

SEQ ID NO: 274505 - DNA, 25 bp, Artificial
  probe
  misc_feature (1)..(25): SEQ ID NO: 821; WAN024DYB; Start 569; Stop 593
atggaacggatactactccttcaat

SEQ ID NO: 274506 - DNA, 25 bp, Artificial
  probe
  misc_feature (1)..(25): SEQ ID NO: 821; WAN024DYB; Start 847; Stop 871
tatgaccaagagttgctcaagtaca

SEQ ID NO: 274507 - DNA, 25 bp, Artificial
  probe
  misc_feature (1)..(25): SEQ ID NO: 821; WAN024DYB; Start 719; Stop 743
ttatcaagtccaagtccaagaagga

SEQ ID NO: 274508 - DNA, 25 bp, Artificial
  probe
  misc_feature (1)..(25): SEQ ID NO: 821; WAN024DYB; Start 550; Stop 574
aagaccacctatattgcctatggaa

SEQ ID NO: 274509 - DNA, 25 bp, Artificial
  probe
  misc_feature (1)..(25): SEQ ID NO: 821; WAN024DYB; Start 566; Stop 590
cctatggaacggatactactccttc

SEQ ID NO: 274510 - DNA, 25 bp, Artificial
  probe
  misc_feature (1)..(25): SEQ ID NO: 821; WAN024DYB; Start 718; Stop 742
tttatcaagtccaagtccaagaagg

SEQ ID NO: 274511 - DNA, 25 bp, Artificial
  probe
  misc_feature (1)..(25): SEQ ID NO: 822; WAN024C4F; Start 1269; Stop 1293
tccattaccagacttgattgatagc

SEQ ID NO: 274512 - DNA, 25 bp, Artificial
  probe
  misc_feature (1)..(25): SEQ ID NO: 822; WAN024C4F; Start 1274; Stop 1298
taccagacttgattgatagcgtaat

SEQ ID NO: 274513 - DNA, 25 bp, Artificial
  probe
  misc_feature (1)..(25): SEQ ID NO: 822; WAN024C4F; Start 1272; Stop 1296
attaccagacttgattgatagcgta

SEQ ID NO: 274514 - DNA, 25 bp, Artificial
  probe
  misc_feature (1)..(25): SEQ ID NO: 822; WAN024C4F; Start 1264; Stop 1288
acctatccattaccagacttgattg

SEQ ID NO: 274515 - DNA, 25 bp, Artificial
  probe
  misc_feature (1)..(25): SEQ ID NO: 822; WAN024C4F; Start 1265; Stop 1289
cctatccattaccagacttgattga

SEQ ID NO: 274516 - DNA, 25 bp, Artificial
  probe
  misc_feature (1)..(25): SEQ ID NO: 822; WAN024C4F; Start 680; Stop 704
gattcggaagtatcgttacagatga

SEQ ID NO: 274517 - DNA, 25 bp, Artificial
  probe
  misc_feature (1)..(25): SEQ ID NO: 822; WAN024C4F; Start 681; Stop 705
attcggaagtatcgttacagatgaa

SEQ ID NO: 274518 - DNA, 25 bp, Artificial
  probe
  misc_feature (1)..(25): SEQ ID NO: 822; WAN024C4F; Start 1271; Stop 1295
cattaccagacttgattgatagcgt

SEQ ID NO: 274519 - DNA, 25 bp, Artificial
  probe
  misc_feature (1)..(25): SEQ ID NO: 822; WAN024C4F; Start 679; Stop 703
ggattcggaagtatcgttacagatg

SEQ ID NO: 274520 - DNA, 25 bp, Artificial
  probe
  misc_feature (1)..(25): SEQ ID NO: 822; WAN024C4F; Start 678; Stop 702
aggattcggaagtatcgttacagat

SEQ ID NO: 274521 - DNA, 25 bp, Artificial
  probe
  misc_feature (1)..(25): SEQ ID NO: 822; WAN024C4F; Start 1263; Stop 1287
tacctatccattaccagacttgatt

SEQ ID NO: 274522 - DNA, 25 bp, Artificial
  probe
  misc_feature (1)..(25): SEQ ID NO: 822; WAN024C4F; Start 1262; Stop 1286
ttacctatccattaccagacttgat

SEQ ID NO: 274523 - DNA, 25 bp, Artificial
  probe
  misc_feature (1)..(25): SEQ ID NO: 822; WAN024C4F; Start 676; Stop 700
gaaggattcggaagtatcgttacag

SEQ ID NO: 274524 - DNA, 25 bp, Artificial
  probe
  misc_feature (1)..(25): SEQ ID NO: 822; WAN024C4F; Start 677; Stop 701
aaggattcggaagtatcgttacaga

SEQ ID NO: 274525 - DNA, 25 bp, Artificial
  probe
  misc_feature (1)..(25): SEQ ID NO: 822; WAN024C4F; Start 674; Stop 698
gtgaaggattcggaagtatcgttac

SEQ ID NO: 274526 - DNA, 25 bp, Artificial
  probe
  misc_feature (1)..(25): SEQ ID NO: 822; WAN024C4F; Start 1270; Stop 1294
ccattaccagacttgattgatagcg

SEQ ID NO: 274527 - DNA, 25 bp, Artificial
  probe
  misc_feature (1)..(25): SEQ ID NO: 822; WAN024C4F; Start 675; Stop 699
tgaaggattcggaagtatcgttaca

SEQ ID NO: 274528 - DNA, 25 bp, Artificial
  probe
  misc_feature (1)..(25): SEQ ID NO: 822; WAN024C4F; Start 1268; Stop 1292
atccattaccagacttgattgatag

SEQ ID NO: 274529 - DNA, 25 bp, Artificial
  probe
  misc_feature (1)..(25): SEQ ID NO: 822; WAN024C4F; Start 1266; Stop 1290
ctatccattaccagacttgattgat

SEQ ID NO: 274530 - DNA, 25 bp, Artificial
  probe
  misc_feature (1)..(25): SEQ ID NO: 822; WAN024C4F; Start 524; Stop 548
ttgtaactggttatggtcagattga

SEQ ID NO: 274531 - DNA, 25 bp, Artificial
  probe
  misc_feature (1)..(25): SEQ ID NO: 822; WAN024C4F; Start 669; Stop 693
atcaggtgaaggattcggaagtatc

SEQ ID NO: 274532 - DNA, 25 bp, Artificial
  probe
  misc_feature (1)..(25): SEQ ID NO: 822; WAN024C4F; Start 673; Stop 697
ggtgaaggattcggaagtatcgtta

SEQ ID NO: 274533 - DNA, 25 bp, Artificial
  probe
  misc_feature (1)..(25): SEQ ID NO: 822; WAN024C4F; Start 523; Stop 547
attgtaactggttatggtcagattg

SEQ ID NO: 274534 - DNA, 25 bp, Artificial
  probe
  misc_feature (1)..(25): SEQ ID NO: 822; WAN024C4F; Start 668; Stop 692
catcaggtgaaggattcggaagtat

SEQ ID NO: 274535 - DNA, 25 bp, Artificial
  probe
  misc_feature (1)..(25): SEQ ID NO: 822; WAN024C4F; Start 1273; Stop 1297
ttaccagacttgattgatagcgtaa

SEQ ID NO: 274536 - DNA, 25 bp, Artificial
  probe
  misc_feature (1)..(25): SEQ ID NO: 822; WAN024C4F; Start 522; Stop 546
aattgtaactggttatggtcagatt

SEQ ID NO: 274537 - DNA, 25 bp, Artificial
  probe
  misc_feature (1)..(25): SEQ ID NO: 822; WAN024C4F; Start 1275; Stop 1299
accagacttgattgatagcgtaatc

SEQ ID NO: 274538 - DNA, 25 bp, Artificial
  probe
  misc_feature (1)..(25): SEQ ID NO: 822; WAN024C4F; Start 613; Stop 637
atagacatggttcgtcattatcagc

SEQ ID NO: 274539 - DNA, 25 bp, Artificial
  probe
  misc_feature (1)..(25): SEQ ID NO: 822; WAN024C4F; Start 790; Stop 814
ccttgggaactttgtctaactatga

SEQ ID NO: 274540 - DNA, 25 bp, Artificial
  probe
  misc_feature (1)..(25): SEQ ID NO: 822; WAN024C4F; Start 36; Stop 60
tcagtggtttagagaagcaagattt

SEQ ID NO: 274541 - DNA, 25 bp, Artificial
  probe
  misc_feature (1)..(25): SEQ ID NO: 822; WAN024C4F; Start 683; Stop 707
tcggaagtatcgttacagatgaaat

SEQ ID NO: 274542 - DNA, 25 bp, Artificial
  probe
  misc_feature (1)..(25): SEQ ID NO: 822; WAN024C4F; Start 612; Stop 636
aatagacatggttcgtcattatcag

SEQ ID NO: 274543 - DNA, 25 bp, Artificial
  probe
  misc_feature (1)..(25): SEQ ID NO: 822; WAN024C4F; Start 1070; Stop 1094
gtaatggaaatacggtttatgctca

SEQ ID NO: 274544 - DNA, 25 bp, Artificial
  probe
  misc_feature (1)..(25): SEQ ID NO: 823; WAN024CZI; Start 49; Stop 73
aatatcttcctcgcaaacttggtat

SEQ ID NO: 274545 - DNA, 25 bp, Artificial
  probe
  misc_feature (1)..(25): SEQ ID NO: 823; WAN024CZI; Start 48; Stop 72
aaatatcttcctcgcaaacttggta

SEQ ID NO: 274546 - DNA, 25 bp, Artificial
  probe
  misc_feature (1)..(25): SEQ ID NO: 823; WAN024CZI; Start 50; Stop 74
atatcttcctcgcaaacttggtatg

SEQ ID NO: 274547 - DNA, 25 bp, Artificial
  probe
  misc_feature (1)..(25): SEQ ID NO: 823; WAN024CZI; Start 51; Stop 75
tatcttcctcgcaaacttggtatgt

SEQ ID NO: 274548 - DNA, 25 bp, Artificial
  probe
  misc_feature (1)..(25): SEQ ID NO: 823; WAN024CZI; Start 13; Stop 37
tttaaccacaaagcagaaactttcg

SEQ ID NO: 274549 - DNA, 25 bp, Artificial
  probe
  misc_feature (1)..(25): SEQ ID NO: 823; WAN024CZI; Start 52; Stop 76
atcttcctcgcaaacttggtatgtc

SEQ ID NO: 274550 - DNA, 25 bp, Artificial
  probe
  misc_feature (1)..(25): SEQ ID NO: 823; WAN024CZI; Start 189; Stop 213
ttactcttgtagacatttctgagaa

SEQ ID NO: 274551 - DNA, 25 bp, Artificial
  probe
  misc_feature (1)..(25): SEQ ID NO: 823; WAN024CZI; Start 9; Stop 33
tgattttaaccacaaagcagaaact

SEQ ID NO: 274552 - DNA, 25 bp, Artificial
  probe
  misc_feature (1)..(25): SEQ ID NO: 823; WAN024CZI; Start 8; Stop 32
atgattttaaccacaaagcagaaac

SEQ ID NO: 274553 - DNA, 25 bp, Artificial
  probe
  misc_feature (1)..(25): SEQ ID NO: 823; WAN024CZI; Start 47; Stop 71
aaaatatcttcctcgcaaacttggt

SEQ ID NO: 274554 - DNA, 25 bp, Artificial
  probe
  misc_feature (1)..(25): SEQ ID NO: 823; WAN024CZI; Start 10; Stop 34
gattttaaccacaaagcagaaactt

SEQ ID NO: 274555 - DNA, 25 bp, Artificial
  probe
  misc_feature (1)..(25): SEQ ID NO: 823; WAN024CZI; Start 54; Stop 78
cttcctcgcaaacttggtatgtcaa

SEQ ID NO: 274556 - DNA, 25 bp, Artificial
  probe
  misc_feature (1)..(25): SEQ ID NO: 823; WAN024CZI; Start 6; Stop 30
acatgattttaaccacaaagcagaa

SEQ ID NO: 274557 - DNA, 25 bp, Artificial
  probe
  misc_feature (1)..(25): SEQ ID NO: 823; WAN024CZI; Start 5; Stop 29
aacatgattttaaccacaaagcaga

SEQ ID NO: 274558 - DNA, 25 bp, Artificial
  probe
  misc_feature (1)..(25): SEQ ID NO: 823; WAN024CZI; Start 3; Stop 27
gaaacatgattttaaccacaaagca

SEQ ID NO: 274559 - DNA, 25 bp, Artificial
  probe
  misc_feature (1)..(25): SEQ ID NO: 823; WAN024CZI; Start 2; Stop 26
tgaaacatgattttaaccacaaagc

SEQ ID NO: 274560 - DNA, 25 bp, Artificial
  probe
  misc_feature (1)..(25): SEQ ID NO: 823; WAN024CZI; Start 4; Stop 28
aaacatgattttaaccacaaagcag

SEQ ID NO: 274561 - DNA, 25 bp, Artificial
  probe
  misc_feature (1)..(25): SEQ ID NO: 823; WAN024CZI; Start 15; Stop 39
taaccacaaagcagaaactttcgat

SEQ ID NO: 274562 - DNA, 25 bp, Artificial
  probe
  misc_feature (1)..(25): SEQ ID NO: 823; WAN024CZI; Start 7; Stop 31
catgattttaaccacaaagcagaaa

SEQ ID NO: 274563 - DNA, 25 bp, Artificial
  probe
  misc_feature (1)..(25): SEQ ID NO: 823; WAN024CZI; Start 14; Stop 38
ttaaccacaaagcagaaactttcga

SEQ ID NO: 274564 - DNA, 25 bp, Artificial
  probe
  misc_feature (1)..(25): SEQ ID NO: 823; WAN024CZI; Start 53; Stop 77
tcttcctcgcaaacttggtatgtca

SEQ ID NO: 274565 - DNA, 25 bp, Artificial
  probe
  misc_feature (1)..(25): SEQ ID NO: 823; WAN024CZI; Start 16; Stop 40
aaccacaaagcagaaactttcgatt

SEQ ID NO: 274566 - DNA, 25 bp, Artificial
  probe
  misc_feature (1)..(25): SEQ ID NO: 823; WAN024CZI; Start 190; Stop 214
tactcttgtagacatttctgagaaa

SEQ ID NO: 274567 - DNA, 25 bp, Artificial
  probe
  misc_feature (1)..(25): SEQ ID NO: 823; WAN024CZI; Start 12; Stop 36
ttttaaccacaaagcagaaactttc

SEQ ID NO: 274568 - DNA, 25 bp, Artificial
  probe
  misc_feature (1)..(25): SEQ ID NO: 823; WAN024CZI; Start 11; Stop 35
attttaaccacaaagcagaaacttt

SEQ ID NO: 274569 - DNA, 25 bp, Artificial
  probe
  misc_feature (1)..(25): SEQ ID NO: 823; WAN024CZI; Start 1; Stop 25
atgaaacatgattttaaccacaaag

SEQ ID NO: 274570 - DNA, 25 bp, Artificial
  probe
  misc_feature (1)..(25): SEQ ID NO: 823; WAN024CZI; Start 191; Stop 215
actcttgtagacatttctgagaaaa

SEQ ID NO: 274571 - DNA, 25 bp, Artificial
  probe
  misc_feature (1)..(25): SEQ ID NO: 823; WAN024CZI; Start 55; Stop 79
ttcctcgcaaacttggtatgtcaag

SEQ ID NO: 274572 - DNA, 25 bp, Artificial
  probe
  misc_feature (1)..(25): SEQ ID NO: 823; WAN024CZI; Start 192; Stop 216
ctcttgtagacatttctgagaaaat

SEQ ID NO: 274573 - DNA, 25 bp, Artificial
  probe
  misc_feature (1)..(25): SEQ ID NO: 823; WAN024CZI; Start 117; Stop 141
aattttagatttcggtggtggcacg

SEQ ID NO: 274574 - DNA, 25 bp, Artificial
  probe
  misc_feature (1)..(25): SEQ ID NO: 823; WAN024CZI; Start 58; Stop 82
ctcgcaaacttggtatgtcaagcag

SEQ ID NO: 274575 - DNA, 25 bp, Artificial
  probe
  misc_feature (1)..(25): SEQ ID NO: 823; WAN024CZI; Start 145; Stop 169
ctattagccttgcccctaaccccta

SEQ ID NO: 274576 - DNA, 25 bp, Artificial
  probe
  misc_feature (1)..(25): SEQ ID NO: 823; WAN024CZI; Start 146; Stop 170
tattagccttgcccctaacccctag

SEQ ID NO: 274577 - DNA, 25 bp, Artificial
  probe
  misc_feature (1)..(25): SEQ ID NO: 823; WAN024CZI; Start 193; Stop 217
tcttgtagacatttctgagaaaatg

SEQ ID NO: 274578 - DNA, 25 bp, Artificial
  probe
  misc_feature (1)..(25): SEQ ID NO: 824; WAN024FJX; Start 1578; Stop 1602
aggattgccgattagtaatagtgtt

SEQ ID NO: 274579 - DNA, 25 bp, Artificial
  probe
  misc_feature (1)..(25): SEQ ID NO: 824; WAN024FJX; Start 1744; Stop 1768
tatactgaaggtgtagacgaacttg

SEQ ID NO: 274580 - DNA, 25 bp, Artificial
  probe
  misc_feature (1)..(25): SEQ ID NO: 824; WAN024FJX; Start 1577; Stop 1601
taggattgccgattagtaatagtgt

SEQ ID NO: 274581 - DNA, 25 bp, Artificial
  probe
  misc_feature (1)..(25): SEQ ID NO: 824; WAN024FJX; Start 1743; Stop 1767
ttatactgaaggtgtagacgaactt

SEQ ID NO: 274582 - DNA, 25 bp, Artificial
  probe
  misc_feature (1)..(25): SEQ ID NO: 824; WAN024FJX; Start 527; Stop 551
cagcagagtcatctattcaatcatt

SEQ ID NO: 274583 - DNA, 25 bp, Artificial
  probe
  misc_feature (1)..(25): SEQ ID NO: 824; WAN024FJX; Start 1579; Stop 1603
ggattgccgattagtaatagtgtta

SEQ ID NO: 274584 - DNA, 25 bp, Artificial
  probe
  misc_feature (1)..(25): SEQ ID NO: 824; WAN024FJX; Start 1745; Stop 1769
atactgaaggtgtagacgaacttgt

SEQ ID NO: 274585 - DNA, 25 bp, Artificial
  probe
  misc_feature (1)..(25): SEQ ID NO: 824; WAN024FJX; Start 1576; Stop 1600
ttaggattgccgattagtaatagtg

SEQ ID NO: 274586 - DNA, 25 bp, Artificial
  probe
  misc_feature (1)..(25): SEQ ID NO: 824; WAN024FJX; Start 1746; Stop 1770
tactgaaggtgtagacgaacttgtt

SEQ ID NO: 274587 - DNA, 25 bp, Artificial
  probe
  misc_feature (1)..(25): SEQ ID NO: 824; WAN024FJX; Start 1194; Stop 1218
aggatacagtatgacctctgctatt

SEQ ID NO: 274588 - DNA, 25 bp, Artificial
  probe
  misc_feature (1)..(25): SEQ ID NO: 824; WAN024FJX; Start 1193; Stop 1217
caggatacagtatgacctctgctat

SEQ ID NO: 274589 - DNA, 25 bp, Artificial
  probe
  misc_feature (1)..(25): SEQ ID NO: 824; WAN024FJX; Start 729; Stop 753
aacttcagctccagcatctattaat

SEQ ID NO: 274590 - DNA, 25 bp, Artificial
  probe
  misc_feature (1)..(25): SEQ ID NO: 824; WAN024FJX; Start 806; Stop 830
tccgtaaggaagatgttaatagagg

SEQ ID NO: 274591 - DNA, 25 bp, Artificial
  probe
  misc_feature (1)..(25): SEQ ID NO: 824; WAN024FJX; Start 728; Stop 752
caacttcagctccagcatctattaa

SEQ ID NO: 274592 - DNA, 25 bp, Artificial
  probe
  misc_feature (1)..(25): SEQ ID NO: 824; WAN024FJX; Start 730; Stop 754
acttcagctccagcatctattaatg

SEQ ID NO: 274593 - DNA, 25 bp, Artificial
  probe
  misc_feature (1)..(25): SEQ ID NO: 824; WAN024FJX; Start 974; Stop 998
ttcattacgatgtaacaacagtacg

SEQ ID NO: 274594 - DNA, 25 bp, Artificial
  probe
  misc_feature (1)..(25): SEQ ID NO: 824; WAN024FJX; Start 731; Stop 755
cttcagctccagcatctattaatga

SEQ ID NO: 274595 - DNA, 25 bp, Artificial
  probe
  misc_feature (1)..(25): SEQ ID NO: 824; WAN024FJX; Start 1739; Stop 1763
gtgtttatactgaaggtgtagacga

SEQ ID NO: 274596 - DNA, 25 bp, Artificial
  probe
  misc_feature (1)..(25): SEQ ID NO: 824; WAN024FJX; Start 1740; Stop 1764
tgtttatactgaaggtgtagacgaa

SEQ ID NO: 274597 - DNA, 25 bp, Artificial
  probe
  misc_feature (1)..(25): SEQ ID NO: 824; WAN024FJX; Start 807; Stop 831
ccgtaaggaagatgttaatagaggg

SEQ ID NO: 274598 - DNA, 25 bp, Artificial
  probe
  misc_feature (1)..(25): SEQ ID NO: 824; WAN024FJX; Start 808; Stop 832
cgtaaggaagatgttaatagagggt

SEQ ID NO: 274599 - DNA, 25 bp, Artificial
  probe
  misc_feature (1)..(25): SEQ ID NO: 824; WAN024FJX; Start 1742; Stop 1766
tttatactgaaggtgtagacgaact

SEQ ID NO: 274600 - DNA, 25 bp, Artificial
  probe
  misc_feature (1)..(25): SEQ ID NO: 824; WAN024FJX; Start 1738; Stop 1762
ggtgtttatactgaaggtgtagacg

SEQ ID NO: 274601 - DNA, 25 bp, Artificial
  probe
  misc_feature (1)..(25): SEQ ID NO: 824; WAN024FJX; Start 1737; Stop 1761
cggtgtttatactgaaggtgtagac

SEQ ID NO: 274602 - DNA, 25 bp, Artificial
  probe
  misc_feature (1)..(25): SEQ ID NO: 824; WAN024FJX; Start 727; Stop 751
acaacttcagctccagcatctatta

SEQ ID NO: 274603 - DNA, 25 bp, Artificial
  probe
  misc_feature (1)..(25): SEQ ID NO: 824; WAN024FJX; Start 1343; Stop 1367
gcaatgacccatacagtaactctaa

SEQ ID NO: 274604 - DNA, 25 bp, Artificial
  probe
  misc_feature (1)..(25): SEQ ID NO: 824; WAN024FJX; Start 1735; Stop 1759
aacggtgtttatactgaaggtgtag

SEQ ID NO: 274605 - DNA, 25 bp, Artificial
  probe
  misc_feature (1)..(25): SEQ ID NO: 824; WAN024FJX; Start 297; Stop 321
tgaagaagttactaaaccagcagaa

SEQ ID NO: 274606 - DNA, 25 bp, Artificial
  probe
  misc_feature (1)..(25): SEQ ID NO: 824; WAN024FJX; Start 1736; Stop 1760
acggtgtttatactgaaggtgtaga

SEQ ID NO: 274607 - DNA, 25 bp, Artificial
  probe
  misc_feature (1)..(25): SEQ ID NO: 824; WAN024FJX; Start 1741; Stop 1765
gtttatactgaaggtgtagacgaac

SEQ ID NO: 274608 - DNA, 25 bp, Artificial
  probe
  misc_feature (1)..(25): SEQ ID NO: 824; WAN024FJX; Start 959; Stop 983
gtggtggaaattctattcattacga

SEQ ID NO: 274609 - DNA, 25 bp, Artificial
  probe
  misc_feature (1)..(25): SEQ ID NO: 824; WAN024FJX; Start 802; Stop 826
gctatccgtaaggaagatgttaata

SEQ ID NO: 274610 - DNA, 25 bp, Artificial
  probe
  misc_feature (1)..(25): SEQ ID NO: 824; WAN024FJX; Start 298; Stop 322
gaagaagttactaaaccagcagaaa

SEQ ID NO: 274611 - DNA, 25 bp, Artificial
  probe
  misc_feature (1)..(25): SEQ ID NO: 825; WAN024DIZ; Start 172; Stop 196
cgtatagaagtaactaatgtggctg

SEQ ID NO: 274612 - DNA, 25 bp, Artificial
  probe
  misc_feature (1)..(25): SEQ ID NO: 825; WAN024DIZ; Start 171; Stop 195
tcgtatagaagtaactaatgtggct

SEQ ID NO: 274613 - DNA, 25 bp, Artificial
  probe
  misc_feature (1)..(25): SEQ ID NO: 825; WAN024DIZ; Start 170; Stop 194
ctcgtatagaagtaactaatgtggc

SEQ ID NO: 274614 - DNA, 25 bp, Artificial
  probe
  misc_feature (1)..(25): SEQ ID NO: 825; WAN024DIZ; Start 173; Stop 197
gtatagaagtaactaatgtggctgg

SEQ ID NO: 274615 - DNA, 25 bp, Artificial
  probe
  misc_feature (1)..(25): SEQ ID NO: 825; WAN024DIZ; Start 161; Stop 185
aaggacagtctcgtatagaagtaac

SEQ ID NO: 274616 - DNA, 25 bp, Artificial
  probe
  misc_feature (1)..(25): SEQ ID NO: 825; WAN024DIZ; Start 162; Stop 186
aggacagtctcgtatagaagtaact

SEQ ID NO: 274617 - DNA, 25 bp, Artificial
  probe
  misc_feature (1)..(25): SEQ ID NO: 825; WAN024DIZ; Start 1093; Stop 1117
ttagacgaccaagaattgattgagc

SEQ ID NO: 274618 - DNA, 25 bp, Artificial
  probe
  misc_feature (1)..(25): SEQ ID NO: 825; WAN024DIZ; Start 163; Stop 187
ggacagtctcgtatagaagtaacta

SEQ ID NO: 274619 - DNA, 25 bp, Artificial
  probe
  misc_feature (1)..(25): SEQ ID NO: 825; WAN024DIZ; Start 741; Stop 765
tcggattgaatctgtattagctgaa

SEQ ID NO: 274620 - DNA, 25 bp, Artificial
  probe
  misc_feature (1)..(25): SEQ ID NO: 825; WAN024DIZ; Start 740; Stop 764
ctcggattgaatctgtattagctga

SEQ ID NO: 274621 - DNA, 25 bp, Artificial
  probe
  misc_feature (1)..(25): SEQ ID NO: 825; WAN024DIZ; Start 739; Stop 763
tctcggattgaatctgtattagctg

SEQ ID NO: 274622 - DNA, 25 bp, Artificial
  probe
  misc_feature (1)..(25): SEQ ID NO: 825; WAN024DIZ; Start 738; Stop 762
atctcggattgaatctgtattagct

SEQ ID NO: 274623 - DNA, 25 bp, Artificial
  probe
  misc_feature (1)..(25): SEQ ID NO: 825; WAN024DIZ; Start 211; Stop 235
gaacatcctgagcaagtcattgaag

SEQ ID NO: 274624 - DNA, 25 bp, Artificial
  probe
  misc_feature (1)..(25): SEQ ID NO: 825; WAN024DIZ; Start 259; Stop 283
actactgcaatcggacctaatatac

SEQ ID NO: 274625 - DNA, 25 bp, Artificial
  probe
  misc_feature (1)..(25): SEQ ID NO: 825; WAN024DIZ; Start 169; Stop 193
tctcgtatagaagtaactaatgtgg

SEQ ID NO: 274626 - DNA, 25 bp, Artificial
  probe
  misc_feature (1)..(25): SEQ ID NO: 825; WAN024DIZ; Start 612; Stop 636
agatttagaaccctttattgagcga

SEQ ID NO: 274627 - DNA, 25 bp, Artificial
  probe
  misc_feature (1)..(25): SEQ ID NO: 825; WAN024DIZ; Start 261; Stop 285
tactgcaatcggacctaatatactc

SEQ ID NO: 274628 - DNA, 25 bp, Artificial
  probe
  misc_feature (1)..(25): SEQ ID NO: 825; WAN024DIZ; Start 260; Stop 284
ctactgcaatcggacctaatatact

SEQ ID NO: 274629 - DNA, 25 bp, Artificial
  probe
  misc_feature (1)..(25): SEQ ID NO: 825; WAN024DIZ; Start 210; Stop 234
agaacatcctgagcaagtcattgaa

SEQ ID NO: 274630 - DNA, 25 bp, Artificial
  probe
  misc_feature (1)..(25): SEQ ID NO: 825; WAN024DIZ; Start 209; Stop 233
aagaacatcctgagcaagtcattga

SEQ ID NO: 274631 - DNA, 25 bp, Artificial
  probe
  misc_feature (1)..(25): SEQ ID NO: 825; WAN024DIZ; Start 254; Stop 278
ttattactactgcaatcggacctaa

SEQ ID NO: 274632 - DNA, 25 bp, Artificial
  probe
  misc_feature (1)..(25): SEQ ID NO: 825; WAN024DIZ; Start 201; Stop 225
taatagcaaagaacatcctgagcaa

SEQ ID NO: 274633 - DNA, 25 bp, Artificial
  probe
  misc_feature (1)..(25): SEQ ID NO: 825; WAN024DIZ; Start 613; Stop 637
gatttagaaccctttattgagcgaa

SEQ ID NO: 274634 - DNA, 25 bp, Artificial
  probe
  misc_feature (1)..(25): SEQ ID NO: 825; WAN024DIZ; Start 737; Stop 761
aatctcggattgaatctgtattagc

SEQ ID NO: 274635 - DNA, 25 bp, Artificial
  probe
  misc_feature (1)..(25): SEQ ID NO: 825; WAN024DIZ; Start 248; Stop 272
cggatattattactactgcaatcgg

SEQ ID NO: 274636 - DNA, 25 bp, Artificial
  probe
  misc_feature (1)..(25): SEQ ID NO: 825; WAN024DIZ; Start 257; Stop 281
ttactactgcaatcggacctaatat

SEQ ID NO: 274637 - DNA, 25 bp, Artificial
  probe
  misc_feature (1)..(25): SEQ ID NO: 825; WAN024DIZ; Start 253; Stop 277
attattactactgcaatcggaccta

SEQ ID NO: 274638 - DNA, 25 bp, Artificial
  probe
  misc_feature (1)..(25): SEQ ID NO: 825; WAN024DIZ; Start 252; Stop 276
tattattactactgcaatcggacct

SEQ ID NO: 274639 - DNA, 25 bp, Artificial
  probe
  misc_feature (1)..(25): SEQ ID NO: 825; WAN024DIZ; Start 200; Stop 224
ttaatagcaaagaacatcctgagca

SEQ ID NO: 274640 - DNA, 25 bp, Artificial
  probe
  misc_feature (1)..(25): SEQ ID NO: 825; WAN024DIZ; Start 614; Stop 638
atttagaaccctttattgagcgaaa

SEQ ID NO: 274641 - DNA, 25 bp, Artificial
  probe
  misc_feature (1)..(25): SEQ ID NO: 825; WAN024DIZ; Start 611; Stop 635
aagatttagaaccctttattgagcg

SEQ ID NO: 274642 - DNA, 25 bp, Artificial
  probe
  misc_feature (1)..(25): SEQ ID NO: 825; WAN024DIZ; Start 433; Stop 457
ggtttgacatttgctgataactaca

SEQ ID NO: 274643 - DNA, 25 bp, Artificial
  probe
  misc_feature (1)..(25): SEQ ID NO: 825; WAN024DIZ; Start 430; Stop 454
gaaggtttgacatttgctgataact

SEQ ID NO: 274644 - DNA, 25 bp, Artificial
  probe
  misc_feature (1)..(25): SEQ ID NO: 826; WAN024G45; Start 81; Stop 105
caattccatctatgccgttaaagtt

SEQ ID NO: 274645 - DNA, 25 bp, Artificial
  probe
  misc_feature (1)..(25): SEQ ID NO: 826; WAN024G45; Start 117; Stop 141
gttcagtatcatttccagcaagaat

SEQ ID NO: 274646 - DNA, 25 bp, Artificial
  probe
  misc_feature (1)..(25): SEQ ID NO: 826; WAN024G45; Start 82; Stop 106
aattccatctatgccgttaaagttt

SEQ ID NO: 274647 - DNA, 25 bp, Artificial
  probe
  misc_feature (1)..(25): SEQ ID NO: 826; WAN024G45; Start 118; Stop 142
ttcagtatcatttccagcaagaatc

SEQ ID NO: 274648 - DNA, 25 bp, Artificial
  probe
  misc_feature (1)..(25): SEQ ID NO: 826; WAN024G45; Start 116; Stop 140
tgttcagtatcatttccagcaagaa

SEQ ID NO: 274649 - DNA, 25 bp, Artificial
  probe
  misc_feature (1)..(25): SEQ ID NO: 826; WAN024G45; Start 119; Stop 143
tcagtatcatttccagcaagaatcc

SEQ ID NO: 274650 - DNA, 25 bp, Artificial
  probe
  misc_feature (1)..(25): SEQ ID NO: 826; WAN024G45; Start 115; Stop 139
ttgttcagtatcatttccagcaaga

SEQ ID NO: 274651 - DNA, 25 bp, Artificial
  probe
  misc_feature (1)..(25): SEQ ID NO: 826; WAN024G45; Start 113; Stop 137
tcttgttcagtatcatttccagcaa

SEQ ID NO: 274652 - DNA, 25 bp, Artificial
  probe
  misc_feature (1)..(25): SEQ ID NO: 826; WAN024G45; Start 121; Stop 145
agtatcatttccagcaagaatccct

SEQ ID NO: 274653 - DNA, 25 bp, Artificial
  probe
  misc_feature (1)..(25): SEQ ID NO: 826; WAN024G45; Start 120; Stop 144
cagtatcatttccagcaagaatccc

SEQ ID NO: 274654 - DNA, 25 bp, Artificial
  probe
  misc_feature (1)..(25): SEQ ID NO: 826; WAN024G45; Start 221; Stop 245
taataattgaacgcatgagggattt

SEQ ID NO: 274655 - DNA, 25 bp, Artificial
  probe
  misc_feature (1)..(25): SEQ ID NO: 826; WAN024G45; Start 220; Stop 244
ataataattgaacgcatgagggatt

SEQ ID NO: 274656 - DNA, 25 bp, Artificial
  probe
  misc_feature (1)..(25): SEQ ID NO: 826; WAN024G45; Start 211; Stop 235
gccaccattataataattgaacgca

SEQ ID NO: 274657 - DNA, 25 bp, Artificial
  probe
  misc_feature (1)..(25): SEQ ID NO: 826; WAN024G45; Start 210; Stop 234
tgccaccattataataattgaacgc

SEQ ID NO: 274658 - DNA, 25 bp, Artificial
  probe
  misc_feature (1)..(25): SEQ ID NO: 826; WAN024G45; Start 219; Stop 243
tataataattgaacgcatgagggat

SEQ ID NO: 274659 - DNA, 25 bp, Artificial
  probe
  misc_feature (1)..(25): SEQ ID NO: 826; WAN024G45; Start 218; Stop 242
ttataataattgaacgcatgaggga

SEQ ID NO: 274660 - DNA, 25 bp, Artificial
  probe
  misc_feature (1)..(25): SEQ ID NO: 826; WAN024G45; Start 122; Stop 146
gtatcatttccagcaagaatccctg

SEQ ID NO: 274661 - DNA, 25 bp, Artificial
  probe
  misc_feature (1)..(25): SEQ ID NO: 826; WAN024G45; Start 209; Stop 233
ttgccaccattataataattgaacg

SEQ ID NO: 274662 - DNA, 25 bp, Artificial
  probe
  misc_feature (1)..(25): SEQ ID NO: 826; WAN024G45; Start 212; Stop 236
ccaccattataataattgaacgcat

SEQ ID NO: 274663 - DNA, 25 bp, Artificial
  probe
  misc_feature (1)..(25): SEQ ID NO: 826; WAN024G45; Start 165; Stop 189
ggtcaaaataatcccttccatcatc

SEQ ID NO: 274664 - DNA, 25 bp, Artificial
  probe
  misc_feature (1)..(25): SEQ ID NO: 826; WAN024G45; Start 166; Stop 190
gtcaaaataatcccttccatcatca

SEQ ID NO: 274665 - DNA, 25 bp, Artificial
  probe
  misc_feature (1)..(25): SEQ ID NO: 826; WAN024G45; Start 83; Stop 107
attccatctatgccgttaaagtttt

SEQ ID NO: 274666 - DNA, 25 bp, Artificial
  probe
  misc_feature (1)..(25): SEQ ID NO: 826; WAN024G45; Start 213; Stop 237
caccattataataattgaacgcatg

SEQ ID NO: 274667 - DNA, 25 bp, Artificial
  probe
  misc_feature (1)..(25): SEQ ID NO: 826; WAN024G45; Start 214; Stop 238
accattataataattgaacgcatga

SEQ ID NO: 274668 - DNA, 25 bp, Artificial
  probe
  misc_feature (1)..(25): SEQ ID NO: 826; WAN024G45; Start 72; Stop 96
cattaggtgcaattccatctatgcc

SEQ ID NO: 274669 - DNA, 25 bp, Artificial
  probe
  misc_feature (1)..(25): SEQ ID NO: 826; WAN024G45; Start 167; Stop 191
tcaaaataatcccttccatcatcat

SEQ ID NO: 274670 - DNA, 25 bp, Artificial
  probe
  misc_feature (1)..(25): SEQ ID NO: 826; WAN024G45; Start 222; Stop 246
aataattgaacgcatgagggatttt

SEQ ID NO: 274671 - DNA, 25 bp, Artificial
  probe
  misc_feature (1)..(25): SEQ ID NO: 826; WAN024G45; Start 29; Stop 53
ccagatcctgcgtcagaatacattt

SEQ ID NO: 274672 - DNA, 25 bp, Artificial
  probe
  misc_feature (1)..(25): SEQ ID NO: 826; WAN024G45; Start 225; Stop 249
aattgaacgcatgagggattttatc

SEQ ID NO: 274673 - DNA, 25 bp, Artificial
  probe
  misc_feature (1)..(25): SEQ ID NO: 826; WAN024G45; Start 224; Stop 248
taattgaacgcatgagggattttat

SEQ ID NO: 274674 - DNA, 25 bp, Artificial
  probe
  misc_feature (1)..(25): SEQ ID NO: 826; WAN024G45; Start 223; Stop 247
ataattgaacgcatgagggatttta

SEQ ID NO: 274675 - DNA, 25 bp, Artificial
  probe
  misc_feature (1)..(25): SEQ ID NO: 826; WAN024G45; Start 237; Stop 261
gagggattttatcactcaaccaata

SEQ ID NO: 274676 - DNA, 25 bp, Artificial
  probe
  misc_feature (1)..(25): SEQ ID NO: 826; WAN024G45; Start 216; Stop 240
cattataataattgaacgcatgagg

SEQ ID NO: 274677 - DNA, 25 bp, Artificial
  probe
  misc_feature (1)..(25): SEQ ID NO: 827; WAN024DB4; Start 250; Stop 274
gctgagaactatctgagtaaggaag

SEQ ID NO: 274678 - DNA, 25 bp, Artificial
  probe
  misc_feature (1)..(25): SEQ ID NO: 827; WAN024DB4; Start 247; Stop 271
gatgctgagaactatctgagtaagg

SEQ ID NO: 274679 - DNA, 25 bp, Artificial
  probe
  misc_feature (1)..(25): SEQ ID NO: 827; WAN024DB4; Start 248; Stop 272
atgctgagaactatctgagtaagga

SEQ ID NO: 274680 - DNA, 25 bp, Artificial
  probe
  misc_feature (1)..(25): SEQ ID NO: 827; WAN024DB4; Start 249; Stop 273
tgctgagaactatctgagtaaggaa

SEQ ID NO: 274681 - DNA, 25 bp, Artificial
  probe
  misc_feature (1)..(25): SEQ ID NO: 827; WAN024DB4; Start 251; Stop 275
ctgagaactatctgagtaaggaaga

SEQ ID NO: 274682 - DNA, 25 bp, Artificial
  probe
  misc_feature (1)..(25): SEQ ID NO: 827; WAN024DB4; Start 254; Stop 278
agaactatctgagtaaggaagaact

SEQ ID NO: 274683 - DNA, 25 bp, Artificial
  probe
  misc_feature (1)..(25): SEQ ID NO: 827; WAN024DB4; Start 252; Stop 276
tgagaactatctgagtaaggaagaa

SEQ ID NO: 274684 - DNA, 25 bp, Artificial
  probe
  misc_feature (1)..(25): SEQ ID NO: 827; WAN024DB4; Start 253; Stop 277
gagaactatctgagtaaggaagaac

SEQ ID NO: 274685 - DNA, 25 bp, Artificial
  probe
  misc_feature (1)..(25): SEQ ID NO: 827; WAN024DB4; Start 255; Stop 279
gaactatctgagtaaggaagaactt

SEQ ID NO: 274686 - DNA, 25 bp, Artificial
  probe
  misc_feature (1)..(25): SEQ ID NO: 827; WAN024DB4; Start 246; Stop 270
agatgctgagaactatctgagtaag

SEQ ID NO: 274687 - DNA, 25 bp, Artificial
  probe
  misc_feature (1)..(25): SEQ ID NO: 827; WAN024DB4; Start 256; Stop 280
aactatctgagtaaggaagaacttc

SEQ ID NO: 274688 - DNA, 25 bp, Artificial
  probe
  misc_feature (1)..(25): SEQ ID NO: 827; WAN024DB4; Start 245; Stop 269
aagatgctgagaactatctgagtaa

SEQ ID NO: 274689 - DNA, 25 bp, Artificial
  probe
  misc_feature (1)..(25): SEQ ID NO: 827; WAN024DB4; Start 353; Stop 377
taacaacgcttcgctatgaaatgaa

SEQ ID NO: 274690 - DNA, 25 bp, Artificial
  probe
  misc_feature (1)..(25): SEQ ID NO: 827; WAN024DB4; Start 352; Stop 376
ctaacaacgcttcgctatgaaatga

SEQ ID NO: 274691 - DNA, 25 bp, Artificial
  probe
  misc_feature (1)..(25): SEQ ID NO: 827; WAN024DB4; Start 351; Stop 375
tctaacaacgcttcgctatgaaatg

SEQ ID NO: 274692 - DNA, 25 bp, Artificial
  probe
  misc_feature (1)..(25): SEQ ID NO: 827; WAN024DB4; Start 350; Stop 374
gtctaacaacgcttcgctatgaaat

SEQ ID NO: 274693 - DNA, 25 bp, Artificial
  probe
  misc_feature (1)..(25): SEQ ID NO: 827; WAN024DB4; Start 354; Stop 378
aacaacgcttcgctatgaaatgaaa

SEQ ID NO: 274694 - DNA, 25 bp, Artificial
  probe
  misc_feature (1)..(25): SEQ ID NO: 827; WAN024DB4; Start 93; Stop 117
tcaaacaaattactacatcgacacg

SEQ ID NO: 274695 - DNA, 25 bp, Artificial
  probe
  misc_feature (1)..(25): SEQ ID NO: 827; WAN024DB4; Start 94; Stop 118
caaacaaattactacatcgacacgc

SEQ ID NO: 274696 - DNA, 25 bp, Artificial
  probe
  misc_feature (1)..(25): SEQ ID NO: 827; WAN024DB4; Start 312; Stop 336
acatggtatccaaagtaagaactgg

SEQ ID NO: 274697 - DNA, 25 bp, Artificial
  probe
  misc_feature (1)..(25): SEQ ID NO: 827; WAN024DB4; Start 308; Stop 332
cgaaacatggtatccaaagtaagaa

SEQ ID NO: 274698 - DNA, 25 bp, Artificial
  probe
  misc_feature (1)..(25): SEQ ID NO: 827; WAN024DB4; Start 92; Stop 116
ttcaaacaaattactacatcgacac

SEQ ID NO: 274699 - DNA, 25 bp, Artificial
  probe
  misc_feature (1)..(25): SEQ ID NO: 827; WAN024DB4; Start 311; Stop 335
aacatggtatccaaagtaagaactg

SEQ ID NO: 274700 - DNA, 25 bp, Artificial
  probe
  misc_feature (1)..(25): SEQ ID NO: 827; WAN024DB4; Start 271; Stop 295
gaagaacttcctcaagggctagtac

SEQ ID NO: 274701 - DNA, 25 bp, Artificial
  probe
  misc_feature (1)..(25): SEQ ID NO: 827; WAN024DB4; Start 244; Stop 268
aaagatgctgagaactatctgagta

SEQ ID NO: 274702 - DNA, 25 bp, Artificial
  probe
  misc_feature (1)..(25): SEQ ID NO: 827; WAN024DB4; Start 318; Stop 342
tatccaaagtaagaactggcaggtt

SEQ ID NO: 274703 - DNA, 25 bp, Artificial
  probe
  misc_feature (1)..(25): SEQ ID NO: 827; WAN024DB4; Start 88; Stop 112
gttcttcaaacaaattactacatcg

SEQ ID NO: 274704 - DNA, 25 bp, Artificial
  probe
  misc_feature (1)..(25): SEQ ID NO: 827; WAN024DB4; Start 298; Stop 322
gatgaattggcgaaacatggtatcc

SEQ ID NO: 274705 - DNA, 25 bp, Artificial
  probe
  misc_feature (1)..(25): SEQ ID NO: 827; WAN024DB4; Start 297; Stop 321
ggatgaattggcgaaacatggtatc

SEQ ID NO: 274706 - DNA, 25 bp, Artificial
  probe
  misc_feature (1)..(25): SEQ ID NO: 827; WAN024DB4; Start 314; Stop 338
atggtatccaaagtaagaactggca

SEQ ID NO: 274707 - DNA, 25 bp, Artificial
  probe
  misc_feature (1)..(25): SEQ ID NO: 827; WAN024DB4; Start 91; Stop 115
cttcaaacaaattactacatcgaca

SEQ ID NO: 274708 - DNA, 25 bp, Artificial
  probe
  misc_feature (1)..(25): SEQ ID NO: 827; WAN024DB4; Start 307; Stop 331
gcgaaacatggtatccaaagtaaga

SEQ ID NO: 274709 - DNA, 25 bp, Artificial
  probe
  misc_feature (1)..(25): SEQ ID NO: 827; WAN024DB4; Start 313; Stop 337
catggtatccaaagtaagaactggc

SEQ ID NO: 274710 - DNA, 25 bp, Artificial
  probe
  misc_feature (1)..(25): SEQ ID NO: 828; WAN024AUB; Start 542; Stop 566
gcattaccaaggagcaaatagagat

SEQ ID NO: 274711 - DNA, 25 bp, Artificial
  probe
  misc_feature (1)..(25): SEQ ID NO: 828; WAN024AUB; Start 33; Stop 57
aagaatgattgcccttacagatact

SEQ ID NO: 274712 - DNA, 25 bp, Artificial
  probe
  misc_feature (1)..(25): SEQ ID NO: 828; WAN024AUB; Start 579; Stop 603
ttatcaaggtcagagggagcaatat

SEQ ID NO: 274713 - DNA, 25 bp, Artificial
  probe
  misc_feature (1)..(25): SEQ ID NO: 828; WAN024AUB; Start 543; Stop 567
cattaccaaggagcaaatagagatt

SEQ ID NO: 274714 - DNA, 25 bp, Artificial
  probe
  misc_feature (1)..(25): SEQ ID NO: 828; WAN024AUB; Start 547; Stop 571
accaaggagcaaatagagattcttt

SEQ ID NO: 274715 - DNA, 25 bp, Artificial
  probe
  misc_feature (1)..(25): SEQ ID NO: 828; WAN024AUB; Start 560; Stop 584
tagagattctttggcaggtttatca

SEQ ID NO: 274716 - DNA, 25 bp, Artificial
  probe
  misc_feature (1)..(25): SEQ ID NO: 828; WAN024AUB; Start 578; Stop 602
tttatcaaggtcagagggagcaata

SEQ ID NO: 274717 - DNA, 25 bp, Artificial
  probe
  misc_feature (1)..(25): SEQ ID NO: 828; WAN024AUB; Start 546; Stop 570
taccaaggagcaaatagagattctt

SEQ ID NO: 274718 - DNA, 25 bp, Artificial
  probe
  misc_feature (1)..(25): SEQ ID NO: 828; WAN024AUB; Start 545; Stop 569
ttaccaaggagcaaatagagattct

SEQ ID NO: 274719 - DNA, 25 bp, Artificial
  probe
  misc_feature (1)..(25): SEQ ID NO: 828; WAN024AUB; Start 32; Stop 56
aaagaatgattgcccttacagatac

SEQ ID NO: 274720 - DNA, 25 bp, Artificial
  probe
  misc_feature (1)..(25): SEQ ID NO: 828; WAN024AUB; Start 562; Stop 586
gagattctttggcaggtttatcaag

SEQ ID NO: 274721 - DNA, 25 bp, Artificial
  probe
  misc_feature (1)..(25): SEQ ID NO: 828; WAN024AUB; Start 561; Stop 585
agagattctttggcaggtttatcaa

SEQ ID NO: 274722 - DNA, 25 bp, Artificial
  probe
  misc_feature (1)..(25): SEQ ID NO: 828; WAN024AUB; Start 544; Stop 568
attaccaaggagcaaatagagattc

SEQ ID NO: 274723 - DNA, 25 bp, Artificial
  probe
  misc_feature (1)..(25): SEQ ID NO: 828; WAN024AUB; Start 580; Stop 604
tatcaaggtcagagggagcaatatc

SEQ ID NO: 274724 - DNA, 25 bp, Artificial
  probe
  misc_feature (1)..(25): SEQ ID NO: 828; WAN024AUB; Start 396; Stop 420
tatcaatcgtttccaactacagagc

SEQ ID NO: 274725 - DNA, 25 bp, Artificial
  probe
  misc_feature (1)..(25): SEQ ID NO: 828; WAN024AUB; Start 155; Stop 179
cagaagaagtagcagaagtcttgaa

SEQ ID NO: 274726 - DNA, 25 bp, Artificial
  probe
  misc_feature (1)..(25): SEQ ID NO: 828; WAN024AUB; Start 31; Stop 55
caaagaatgattgcccttacagata

SEQ ID NO: 274727 - DNA, 25 bp, Artificial
  probe
  misc_feature (1)..(25): SEQ ID NO: 828; WAN024AUB; Start 588; Stop 612
tcagagggagcaatatcttgactaa

SEQ ID NO: 274728 - DNA, 25 bp, Artificial
  probe
  misc_feature (1)..(25): SEQ ID NO: 828; WAN024AUB; Start 395; Stop 419
atatcaatcgtttccaactacagag

SEQ ID NO: 274729 - DNA, 25 bp, Artificial
  probe
  misc_feature (1)..(25): SEQ ID NO: 828; WAN024AUB; Start 563; Stop 587
agattctttggcaggtttatcaagg

SEQ ID NO: 274730 - DNA, 25 bp, Artificial
  probe
  misc_feature (1)..(25): SEQ ID NO: 828; WAN024AUB; Start 160; Stop 184
gaagtagcagaagtcttgaaaccaa

SEQ ID NO: 274731 - DNA, 25 bp, Artificial
  probe
  misc_feature (1)..(25): SEQ ID NO: 828; WAN024AUB; Start 559; Stop 583
atagagattctttggcaggtttatc

SEQ ID NO: 274732 - DNA, 25 bp, Artificial
  probe
  misc_feature (1)..(25): SEQ ID NO: 828; WAN024AUB; Start 161; Stop 185
aagtagcagaagtcttgaaaccaac

SEQ ID NO: 274733 - DNA, 25 bp, Artificial
  probe
  misc_feature (1)..(25): SEQ ID NO: 828; WAN024AUB; Start 557; Stop 581
aaatagagattctttggcaggttta

SEQ ID NO: 274734 - DNA, 25 bp, Artificial
  probe
  misc_feature (1)..(25): SEQ ID NO: 828; WAN024AUB; Start 565; Stop 589
attctttggcaggtttatcaaggtc

SEQ ID NO: 274735 - DNA, 25 bp, Artificial
  probe
  misc_feature (1)..(25): SEQ ID NO: 828; WAN024AUB; Start 564; Stop 588
gattctttggcaggtttatcaaggt

SEQ ID NO: 274736 - DNA, 25 bp, Artificial
  probe
  misc_feature (1)..(25): SEQ ID NO: 828; WAN024AUB; Start 45; Stop 69
ccttacagatactggcttaaccttt

SEQ ID NO: 274737 - DNA, 25 bp, Artificial
  probe
  misc_feature (1)..(25): SEQ ID NO: 828; WAN024AUB; Start 34; Stop 58
agaatgattgcccttacagatactg

SEQ ID NO: 274738 - DNA, 25 bp, Artificial
  probe
  misc_feature (1)..(25): SEQ ID NO: 828; WAN024AUB; Start 558; Stop 582
aatagagattctttggcaggtttat

SEQ ID NO: 274739 - DNA, 25 bp, Artificial
  probe
  misc_feature (1)..(25): SEQ ID NO: 828; WAN024AUB; Start 159; Stop 183
agaagtagcagaagtcttgaaacca

SEQ ID NO: 274740 - DNA, 25 bp, Artificial
  probe
  misc_feature (1)..(25): SEQ ID NO: 828; WAN024AUB; Start 123; Stop 147
tgaaatgttgaatcagggatcagac

SEQ ID NO: 274741 - DNA, 25 bp, Artificial
  probe
  misc_feature (1)..(25): SEQ ID NO: 828; WAN024AUB; Start 35; Stop 59
gaatgattgcccttacagatactgg

SEQ ID NO: 274742 - DNA, 25 bp, Artificial
  probe
  misc_feature (1)..(25): SEQ ID NO: 828; WAN024AUB; Start 577; Stop 601
gtttatcaaggtcagagggagcaat

SEQ ID NO: 274743 - DNA, 25 bp, Artificial
  probe
  misc_feature (1)..(25): SEQ ID NO: 829; WAN024C4K; Start 41; Stop 65
gtgtctacgattcaactgctactat

SEQ ID NO: 274744 - DNA, 25 bp, Artificial
  probe
  misc_feature (1)..(25): SEQ ID NO: 829; WAN024C4K; Start 42; Stop 66
tgtctacgattcaactgctactatc

SEQ ID NO: 274745 - DNA, 25 bp, Artificial
  probe
  misc_feature (1)..(25): SEQ ID NO: 829; WAN024C4K; Start 40; Stop 64
ggtgtctacgattcaactgctacta

SEQ ID NO: 274746 - DNA, 25 bp, Artificial
  probe
  misc_feature (1)..(25): SEQ ID NO: 829; WAN024C4K; Start 283; Stop 307
tcaagtaatacaactgaatccaaca

SEQ ID NO: 274747 - DNA, 25 bp, Artificial
  probe
  misc_feature (1)..(25): SEQ ID NO: 829; WAN024C4K; Start 563; Stop 587
gtacctctaactatactgacgaaga

SEQ ID NO: 274748 - DNA, 25 bp, Artificial
  probe
  misc_feature (1)..(25): SEQ ID NO: 829; WAN024C4K; Start 564; Stop 588
tacctctaactatactgacgaagaa

SEQ ID NO: 274749 - DNA, 25 bp, Artificial
  probe
  misc_feature (1)..(25): SEQ ID NO: 829; WAN024C4K; Start 49; Stop 73
gattcaactgctactatcgttcacg

SEQ ID NO: 274750 - DNA, 25 bp, Artificial
  probe
  misc_feature (1)..(25): SEQ ID NO: 829; WAN024C4K; Start 284; Stop 308
caagtaatacaactgaatccaacaa

SEQ ID NO: 274751 - DNA, 25 bp, Artificial
  probe
  misc_feature (1)..(25): SEQ ID NO: 829; WAN024C4K; Start 273; Stop 297
aaacgccatttcaagtaatacaact

SEQ ID NO: 274752 - DNA, 25 bp, Artificial
  probe
  misc_feature (1)..(25): SEQ ID NO: 829; WAN024C4K; Start 274; Stop 298
aacgccatttcaagtaatacaactg

SEQ ID NO: 274753 - DNA, 25 bp, Artificial
  probe
  misc_feature (1)..(25): SEQ ID NO: 829; WAN024C4K; Start 565; Stop 589
acctctaactatactgacgaagaaa

SEQ ID NO: 274754 - DNA, 25 bp, Artificial
  probe
  misc_feature (1)..(25): SEQ ID NO: 829; WAN024C4K; Start 37; Stop 61
tacggtgtctacgattcaactgcta

SEQ ID NO: 274755 - DNA, 25 bp, Artificial
  probe
  misc_feature (1)..(25): SEQ ID NO: 829; WAN024C4K; Start 275; Stop 299
acgccatttcaagtaatacaactga

SEQ ID NO: 274756 - DNA, 25 bp, Artificial
  probe
  misc_feature (1)..(25): SEQ ID NO: 829; WAN024C4K; Start 190; Stop 214
gaaacactaaacaaggtcggtctag

SEQ ID NO: 274757 - DNA, 25 bp, Artificial
  probe
  misc_feature (1)..(25): SEQ ID NO: 829; WAN024C4K; Start 189; Stop 213
tgaaacactaaacaaggtcggtcta

SEQ ID NO: 274758 - DNA, 25 bp, Artificial
  probe
  misc_feature (1)..(25): SEQ ID NO: 829; WAN024C4K; Start 1; Stop 25
atgaaaccaatcacagactatgctc

SEQ ID NO: 274759 - DNA, 25 bp, Artificial
  probe
  misc_feature (1)..(25): SEQ ID NO: 829; WAN024C4K; Start 468; Stop 492
tgcttacatgatgacagaaatgatg

SEQ ID NO: 274760 - DNA, 25 bp, Artificial
  probe
  misc_feature (1)..(25): SEQ ID NO: 829; WAN024C4K; Start 469; Stop 493
gcttacatgatgacagaaatgatga

SEQ ID NO: 274761 - DNA, 25 bp, Artificial
  probe
  misc_feature (1)..(25): SEQ ID NO: 829; WAN024C4K; Start 34; Stop 58
gagtacggtgtctacgattcaactg

SEQ ID NO: 274762 - DNA, 25 bp, Artificial
  probe
  misc_feature (1)..(25): SEQ ID NO: 829; WAN024C4K; Start 462; Stop 486
aacgactgcttacatgatgacagaa

SEQ ID NO: 274763 - DNA, 25 bp, Artificial
  probe
  misc_feature (1)..(25): SEQ ID NO: 829; WAN024C4K; Start 80; Stop 104
cctataactaccctgggacagatat

SEQ ID NO: 274764 - DNA, 25 bp, Artificial
  probe
  misc_feature (1)..(25): SEQ ID NO: 829; WAN024C4K; Start 3; Stop 27
gaaaccaatcacagactatgctcct

SEQ ID NO: 274765 - DNA, 25 bp, Artificial
  probe
  misc_feature (1)..(25): SEQ ID NO: 829; WAN024C4K; Start 566; Stop 590
cctctaactatactgacgaagaaat

SEQ ID NO: 274766 - DNA, 25 bp, Artificial
  probe
  misc_feature (1)..(25): SEQ ID NO: 829; WAN024C4K; Start 465; Stop 489
gactgcttacatgatgacagaaatg

SEQ ID NO: 274767 - DNA, 25 bp, Artificial
  probe
  misc_feature (1)..(25): SEQ ID NO: 829; WAN024C4K; Start 110; Stop 134
tctataactgggatcgagcatattt

SEQ ID NO: 274768 - DNA, 25 bp, Artificial
  probe
  misc_feature (1)..(25): SEQ ID NO: 829; WAN024C4K; Start 467; Stop 491
ctgcttacatgatgacagaaatgat

SEQ ID NO: 274769 - DNA, 25 bp, Artificial
  probe
  misc_feature (1)..(25): SEQ ID NO: 829; WAN024C4K; Start 466; Stop 490
actgcttacatgatgacagaaatga

SEQ ID NO: 274770 - DNA, 25 bp, Artificial
  probe
  misc_feature (1)..(25): SEQ ID NO: 829; WAN024C4K; Start 111; Stop 135
ctataactgggatcgagcatatttc

SEQ ID NO: 274771 - DNA, 25 bp, Artificial
  probe
  misc_feature (1)..(25): SEQ ID NO: 829; WAN024C4K; Start 188; Stop 212
ttgaaacactaaacaaggtcggtct

SEQ ID NO: 274772 - DNA, 25 bp, Artificial
  probe
  misc_feature (1)..(25): SEQ ID NO: 829; WAN024C4K; Start 187; Stop 211
gttgaaacactaaacaaggtcggtc

SEQ ID NO: 274773 - DNA, 25 bp, Artificial
  probe
  misc_feature (1)..(25): SEQ ID NO: 829; WAN024C4K; Start 31; Stop 55
ttggagtacggtgtctacgattcaa

SEQ ID NO: 274774 - DNA, 25 bp, Artificial
  probe
  misc_feature (1)..(25): SEQ ID NO: 829; WAN024C4K; Start 599; Stop 623
atatcaagaacactggttacgtagc

SEQ ID NO: 274775 - DNA, 25 bp, Artificial
  probe
  misc_feature (1)..(25): SEQ ID NO: 829; WAN024C4K; Start 67; Stop 91
gttcacgatgagccctataactacc

SEQ ID NO: 274776 - DNA, 25 bp, Artificial
  probe
  misc_feature (1)..(25): SEQ ID NO: 830; WAN024DWF; Start 2007; Stop 2031
cgtatcaactattcaacaccaagac

SEQ ID NO: 274777 - DNA, 25 bp, Artificial
  probe
  misc_feature (1)..(25): SEQ ID NO: 830; WAN024DWF; Start 2006; Stop 2030
tcgtatcaactattcaacaccaaga

SEQ ID NO: 274778 - DNA, 25 bp, Artificial
  probe
  misc_feature (1)..(25): SEQ ID NO: 830; WAN024DWF; Start 2005; Stop 2029
ctcgtatcaactattcaacaccaag

SEQ ID NO: 274779 - DNA, 25 bp, Artificial
  probe
  misc_feature (1)..(25): SEQ ID NO: 830; WAN024DWF; Start 2004; Stop 2028
actcgtatcaactattcaacaccaa

SEQ ID NO: 274780 - DNA, 25 bp, Artificial
  probe
  misc_feature (1)..(25): SEQ ID NO: 830; WAN024DWF; Start 2008; Stop 2032
gtatcaactattcaacaccaagacc

SEQ ID NO: 274781 - DNA, 25 bp, Artificial
  probe
  misc_feature (1)..(25): SEQ ID NO: 830; WAN024DWF; Start 2009; Stop 2033
tatcaactattcaacaccaagacct

SEQ ID NO: 274782 - DNA, 25 bp, Artificial
  probe
  misc_feature (1)..(25): SEQ ID NO: 830; WAN024DWF; Start 2001; Stop 2025
aacactcgtatcaactattcaacac

SEQ ID NO: 274783 - DNA, 25 bp, Artificial
  probe
  misc_feature (1)..(25): SEQ ID NO: 830; WAN024DWF; Start 2010; Stop 2034
atcaactattcaacaccaagacctc

SEQ ID NO: 274784 - DNA, 25 bp, Artificial
  probe
  misc_feature (1)..(25): SEQ ID NO: 830; WAN024DWF; Start 277; Stop 301
caccgccagtcttcttatgatatag

SEQ ID NO: 274785 - DNA, 25 bp, Artificial
  probe
  misc_feature (1)..(25): SEQ ID NO: 830; WAN024DWF; Start 2003; Stop 2027
cactcgtatcaactattcaacacca

SEQ ID NO: 274786 - DNA, 25 bp, Artificial
  probe
  misc_feature (1)..(25): SEQ ID NO: 830; WAN024DWF; Start 2002; Stop 2026
acactcgtatcaactattcaacacc

SEQ ID NO: 274787 - DNA, 25 bp, Artificial
  probe
  misc_feature (1)..(25): SEQ ID NO: 830; WAN024DWF; Start 279; Stop 303
ccgccagtcttcttatgatatagat

SEQ ID NO: 274788 - DNA, 25 bp, Artificial
  probe
  misc_feature (1)..(25): SEQ ID NO: 830; WAN024DWF; Start 278; Stop 302
accgccagtcttcttatgatataga

SEQ ID NO: 274789 - DNA, 25 bp, Artificial
  probe
  misc_feature (1)..(25): SEQ ID NO: 830; WAN024DWF; Start 1783; Stop 1807
tatcctggagatgaagacaatggta

SEQ ID NO: 274790 - DNA, 25 bp, Artificial
  probe
  misc_feature (1)..(25): SEQ ID NO: 830; WAN024DWF; Start 746; Stop 770
ttgacattatagagacaggagaggc

SEQ ID NO: 274791 - DNA, 25 bp, Artificial
  probe
  misc_feature (1)..(25): SEQ ID NO: 830; WAN024DWF; Start 664; Stop 688
gctctaatcaatctacctcaagaag

SEQ ID NO: 274792 - DNA, 25 bp, Artificial
  probe
  misc_feature (1)..(25): SEQ ID NO: 830; WAN024DWF; Start 276; Stop 300
tcaccgccagtcttcttatgatata

SEQ ID NO: 274793 - DNA, 25 bp, Artificial
  probe
  misc_feature (1)..(25): SEQ ID NO: 830; WAN024DWF; Start 553; Stop 577
atgaacacggatattcttgctatca

SEQ ID NO: 274794 - DNA, 25 bp, Artificial
  probe
  misc_feature (1)..(25): SEQ ID NO: 830; WAN024DWF; Start 554; Stop 578
tgaacacggatattcttgctatcag

SEQ ID NO: 274795 - DNA, 25 bp, Artificial
  probe
  misc_feature (1)..(25): SEQ ID NO: 830; WAN024DWF; Start 552; Stop 576
aatgaacacggatattcttgctatc

SEQ ID NO: 274796 - DNA, 25 bp, Artificial
  probe
  misc_feature (1)..(25): SEQ ID NO: 830; WAN024DWF; Start 1784; Stop 1808
atcctggagatgaagacaatggtag

SEQ ID NO: 274797 - DNA, 25 bp, Artificial
  probe
  misc_feature (1)..(25): SEQ ID NO: 830; WAN024DWF; Start 1782; Stop 1806
ctatcctggagatgaagacaatggt

SEQ ID NO: 274798 - DNA, 25 bp, Artificial
  probe
  misc_feature (1)..(25): SEQ ID NO: 830; WAN024DWF; Start 747; Stop 771
tgacattatagagacaggagaggct

SEQ ID NO: 274799 - DNA, 25 bp, Artificial
  probe
  misc_feature (1)..(25): SEQ ID NO: 830; WAN024DWF; Start 275; Stop 299
ttcaccgccagtcttcttatgatat

SEQ ID NO: 274800 - DNA, 25 bp, Artificial
  probe
  misc_feature (1)..(25): SEQ ID NO: 830; WAN024DWF; Start 659; Stop 683
ctcaagctctaatcaatctacctca

SEQ ID NO: 274801 - DNA, 25 bp, Artificial
  probe
  misc_feature (1)..(25): SEQ ID NO: 830; WAN024DWF; Start 658; Stop 682
tctcaagctctaatcaatctacctc

SEQ ID NO: 274802 - DNA, 25 bp, Artificial
  probe
  misc_feature (1)..(25): SEQ ID NO: 830; WAN024DWF; Start 1781; Stop 1805
cctatcctggagatgaagacaatgg

SEQ ID NO: 274803 - DNA, 25 bp, Artificial
  probe
  misc_feature (1)..(25): SEQ ID NO: 830; WAN024DWF; Start 376; Stop 400
acttgctatggtgcttctattcgtt

SEQ ID NO: 274804 - DNA, 25 bp, Artificial
  probe
  misc_feature (1)..(25): SEQ ID NO: 830; WAN024DWF; Start 660; Stop 684
tcaagctctaatcaatctacctcaa

SEQ ID NO: 274805 - DNA, 25 bp, Artificial
  probe
  misc_feature (1)..(25): SEQ ID NO: 830; WAN024DWF; Start 653; Stop 677
ctccttctcaagctctaatcaatct

SEQ ID NO: 274806 - DNA, 25 bp, Artificial
  probe
  misc_feature (1)..(25): SEQ ID NO: 830; WAN024DWF; Start 652; Stop 676
tctccttctcaagctctaatcaatc

SEQ ID NO: 274807 - DNA, 25 bp, Artificial
  probe
  misc_feature (1)..(25): SEQ ID NO: 830; WAN024DWF; Start 651; Stop 675
ctctccttctcaagctctaatcaat

SEQ ID NO: 274808 - DNA, 25 bp, Artificial
  probe
  misc_feature (1)..(25): SEQ ID NO: 830; WAN024DWF; Start 648; Stop 672
catctctccttctcaagctctaatc

SEQ ID NO: 274809 - DNA, 25 bp, Artificial
  probe
  misc_feature (1)..(25): SEQ ID NO: 831; WAN024CHK; Start 189; Stop 213
gtcaactagcaacaatcgtattctt

SEQ ID NO: 274810 - DNA, 25 bp, Artificial
  probe
  misc_feature (1)..(25): SEQ ID NO: 831; WAN024CHK; Start 188; Stop 212
agtcaactagcaacaatcgtattct

SEQ ID NO: 274811 - DNA, 25 bp, Artificial
  probe
  misc_feature (1)..(25): SEQ ID NO: 831; WAN024CHK; Start 187; Stop 211
cagtcaactagcaacaatcgtattc

SEQ ID NO: 274812 - DNA, 25 bp, Artificial
  probe
  misc_feature (1)..(25): SEQ ID NO: 831; WAN024CHK; Start 1160; Stop 1184
ctattacaagtattgatgcgacagc

SEQ ID NO: 274813 - DNA, 25 bp, Artificial
  probe
  misc_feature (1)..(25): SEQ ID NO: 831; WAN024CHK; Start 181; Stop 205
aatatccagtcaactagcaacaatc

SEQ ID NO: 274814 - DNA, 25 bp, Artificial
  probe
  misc_feature (1)..(25): SEQ ID NO: 831; WAN024CHK; Start 182; Stop 206
atatccagtcaactagcaacaatcg

SEQ ID NO: 274815 - DNA, 25 bp, Artificial
  probe
  misc_feature (1)..(25): SEQ ID NO: 831; WAN024CHK; Start 190; Stop 214
tcaactagcaacaatcgtattcttg

SEQ ID NO: 274816 - DNA, 25 bp, Artificial
  probe
  misc_feature (1)..(25): SEQ ID NO: 831; WAN024CHK; Start 1159; Stop 1183
actattacaagtattgatgcgacag

SEQ ID NO: 274817 - DNA, 25 bp, Artificial
  probe
  misc_feature (1)..(25): SEQ ID NO: 831; WAN024CHK; Start 186; Stop 210
ccagtcaactagcaacaatcgtatt

SEQ ID NO: 274818 - DNA, 25 bp, Artificial
  probe
  misc_feature (1)..(25): SEQ ID NO: 831; WAN024CHK; Start 1097; Stop 1121
tcggtgattctgttcgctatactac

SEQ ID NO: 274819 - DNA, 25 bp, Artificial
  probe
  misc_feature (1)..(25): SEQ ID NO: 831; WAN024CHK; Start 1096; Stop 1120
gtcggtgattctgttcgctatacta

SEQ ID NO: 274820 - DNA, 25 bp, Artificial
  probe
  misc_feature (1)..(25): SEQ ID NO: 831; WAN024CHK; Start 727; Stop 751
gaatctagtcttgctacttaccgtg

SEQ ID NO: 274821 - DNA, 25 bp, Artificial
  probe
  misc_feature (1)..(25): SEQ ID NO: 831; WAN024CHK; Start 726; Stop 750
agaatctagtcttgctacttaccgt

SEQ ID NO: 274822 - DNA, 25 bp, Artificial
  probe
  misc_feature (1)..(25): SEQ ID NO: 831; WAN024CHK; Start 725; Stop 749
tagaatctagtcttgctacttaccg

SEQ ID NO: 274823 - DNA, 25 bp, Artificial
  probe
  misc_feature (1)..(25): SEQ ID NO: 831; WAN024CHK; Start 957; Stop 981
tcatcttaatcctgagaccagtgat

SEQ ID NO: 274824 - DNA, 25 bp, Artificial
  probe
  misc_feature (1)..(25): SEQ ID NO: 831; WAN024CHK; Start 955; Stop 979
cttcatcttaatcctgagaccagtg

SEQ ID NO: 274825 - DNA, 25 bp, Artificial
  probe
  misc_feature (1)..(25): SEQ ID NO: 831; WAN024CHK; Start 728; Stop 752
aatctagtcttgctacttaccgtgt

SEQ ID NO: 274826 - DNA, 25 bp, Artificial
  probe
  misc_feature (1)..(25): SEQ ID NO: 831; WAN024CHK; Start 956; Stop 980
ttcatcttaatcctgagaccagtga

SEQ ID NO: 274827 - DNA, 25 bp, Artificial
  probe
  misc_feature (1)..(25): SEQ ID NO: 831; WAN024CHK; Start 719; Stop 743
ctcagttagaatctagtcttgctac

SEQ ID NO: 274828 - DNA, 25 bp, Artificial
  probe
  misc_feature (1)..(25): SEQ ID NO: 831; WAN024CHK; Start 185; Stop 209
tccagtcaactagcaacaatcgtat

SEQ ID NO: 274829 - DNA, 25 bp, Artificial
  probe
  misc_feature (1)..(25): SEQ ID NO: 831; WAN024CHK; Start 184; Stop 208
atccagtcaactagcaacaatcgta

SEQ ID NO: 274830 - DNA, 25 bp, Artificial
  probe
  misc_feature (1)..(25): SEQ ID NO: 831; WAN024CHK; Start 183; Stop 207
tatccagtcaactagcaacaatcgt

SEQ ID NO: 274831 - DNA, 25 bp, Artificial
  probe
  misc_feature (1)..(25): SEQ ID NO: 831; WAN024CHK; Start 720; Stop 744
tcagttagaatctagtcttgctact

SEQ ID NO: 274832 - DNA, 25 bp, Artificial
  probe
  misc_feature (1)..(25): SEQ ID NO: 831; WAN024CHK; Start 718; Stop 742
tctcagttagaatctagtcttgcta

SEQ ID NO: 274833 - DNA, 25 bp, Artificial
  probe
  misc_feature (1)..(25): SEQ ID NO: 831; WAN024CHK; Start 729; Stop 753
atctagtcttgctacttaccgtgtc

SEQ ID NO: 274834 - DNA, 25 bp, Artificial
  probe
  misc_feature (1)..(25): SEQ ID NO: 831; WAN024CHK; Start 1225; Stop 1249
gagactaatctaacttcggagcagg

SEQ ID NO: 274835 - DNA, 25 bp, Artificial
  probe
  misc_feature (1)..(25): SEQ ID NO: 831; WAN024CHK; Start 1224; Stop 1248
ggagactaatctaacttcggagcag

SEQ ID NO: 274836 - DNA, 25 bp, Artificial
  probe
  misc_feature (1)..(25): SEQ ID NO: 831; WAN024CHK; Start 958; Stop 982
catcttaatcctgagaccagtgatt

SEQ ID NO: 274837 - DNA, 25 bp, Artificial
  probe
  misc_feature (1)..(25): SEQ ID NO: 831; WAN024CHK; Start 959; Stop 983
atcttaatcctgagaccagtgattc

SEQ ID NO: 274838 - DNA, 25 bp, Artificial
  probe
  misc_feature (1)..(25): SEQ ID NO: 831; WAN024CHK; Start 961; Stop 985
cttaatcctgagaccagtgattcta

SEQ ID NO: 274839 - DNA, 25 bp, Artificial
  probe
  misc_feature (1)..(25): SEQ ID NO: 831; WAN024CHK; Start 960; Stop 984
tcttaatcctgagaccagtgattct

SEQ ID NO: 274840 - DNA, 25 bp, Artificial
  probe
  misc_feature (1)..(25): SEQ ID NO: 831; WAN024CHK; Start 1162; Stop 1186
attacaagtattgatgcgacagcta

SEQ ID NO: 274841 - DNA, 25 bp, Artificial
  probe
  misc_feature (1)..(25): SEQ ID NO: 831; WAN024CHK; Start 1161; Stop 1185
tattacaagtattgatgcgacagct

SEQ ID NO: 274842 - DNA, 25 bp, Artificial
  probe
  misc_feature (1)..(25): SEQ ID NO: 832; WAN024CFE; Start 162; Stop 186
tgcgacaacagataactattcaact

SEQ ID NO: 274843 - DNA, 25 bp, Artificial
  probe
  misc_feature (1)..(25): SEQ ID NO: 832; WAN024CFE; Start 161; Stop 185
ttgcgacaacagataactattcaac

SEQ ID NO: 274844 - DNA, 25 bp, Artificial
  probe
  misc_feature (1)..(25): SEQ ID NO: 832; WAN024CFE; Start 368; Stop 392
atagaaccagtggactagccttaat

SEQ ID NO: 274845 - DNA, 25 bp, Artificial
  probe
  misc_feature (1)..(25): SEQ ID NO: 832; WAN024CFE; Start 369; Stop 393
tagaaccagtggactagccttaatt

SEQ ID NO: 274846 - DNA, 25 bp, Artificial
  probe
  misc_feature (1)..(25): SEQ ID NO: 832; WAN024CFE; Start 367; Stop 391
catagaaccagtggactagccttaa

SEQ ID NO: 274847 - DNA, 25 bp, Artificial
  probe
  misc_feature (1)..(25): SEQ ID NO: 832; WAN024CFE; Start 163; Stop 187
gcgacaacagataactattcaactg

SEQ ID NO: 274848 - DNA, 25 bp, Artificial
  probe
  misc_feature (1)..(25): SEQ ID NO: 832; WAN024CFE; Start 341; Stop 365
aattgaaccgttctactgtctatcg

SEQ ID NO: 274849 - DNA, 25 bp, Artificial
  probe
  misc_feature (1)..(25): SEQ ID NO: 832; WAN024CFE; Start 131; Stop 155
cggatgttggcgattatcttgttag

SEQ ID NO: 274850 - DNA, 25 bp, Artificial
  probe
  misc_feature (1)..(25): SEQ ID NO: 832; WAN024CFE; Start 370; Stop 394
agaaccagtggactagccttaatta

SEQ ID NO: 274851 - DNA, 25 bp, Artificial
  probe
  misc_feature (1)..(25): SEQ ID NO: 832; WAN024CFE; Start 164; Stop 188
cgacaacagataactattcaactga

SEQ ID NO: 274852 - DNA, 25 bp, Artificial
  probe
  misc_feature (1)..(25): SEQ ID NO: 832; WAN024CFE; Start 132; Stop 156
ggatgttggcgattatcttgttagc

SEQ ID NO: 274853 - DNA, 25 bp, Artificial
  probe
  misc_feature (1)..(25): SEQ ID NO: 832; WAN024CFE; Start 66; Stop 90
ggaagacgagcgaaagaattatatg

SEQ ID NO: 274854 - DNA, 25 bp, Artificial
  probe
  misc_feature (1)..(25): SEQ ID NO: 832; WAN024CFE; Start 65; Stop 89
tggaagacgagcgaaagaattatat

SEQ ID NO: 274855 - DNA, 25 bp, Artificial
  probe
  misc_feature (1)..(25): SEQ ID NO: 832; WAN024CFE; Start 64; Stop 88
atggaagacgagcgaaagaattata

SEQ ID NO: 274856 - DNA, 25 bp, Artificial
  probe
  misc_feature (1)..(25): SEQ ID NO: 832; WAN024CFE; Start 63; Stop 87
tatggaagacgagcgaaagaattat

SEQ ID NO: 274857 - DNA, 25 bp, Artificial
  probe
  misc_feature (1)..(25): SEQ ID NO: 832; WAN024CFE; Start 166; Stop 190
acaacagataactattcaactgact

SEQ ID NO: 274858 - DNA, 25 bp, Artificial
  probe
  misc_feature (1)..(25): SEQ ID NO: 832; WAN024CFE; Start 67; Stop 91
gaagacgagcgaaagaattatatgc

SEQ ID NO: 274859 - DNA, 25 bp, Artificial
  probe
  misc_feature (1)..(25): SEQ ID NO: 832; WAN024CFE; Start 233; Stop 257
atgatttgttgagtgaagcattacg

SEQ ID NO: 274860 - DNA, 25 bp, Artificial
  probe
  misc_feature (1)..(25): SEQ ID NO: 832; WAN024CFE; Start 165; Stop 189
gacaacagataactattcaactgac

SEQ ID NO: 274861 - DNA, 25 bp, Artificial
  probe
  misc_feature (1)..(25): SEQ ID NO: 832; WAN024CFE; Start 62; Stop 86
ctatggaagacgagcgaaagaatta

SEQ ID NO: 274862 - DNA, 25 bp, Artificial
  probe
  misc_feature (1)..(25): SEQ ID NO: 832; WAN024CFE; Start 159; Stop 183
gtttgcgacaacagataactattca

SEQ ID NO: 274863 - DNA, 25 bp, Artificial
  probe
  misc_feature (1)..(25): SEQ ID NO: 832; WAN024CFE; Start 160; Stop 184
tttgcgacaacagataactattcaa

SEQ ID NO: 274864 - DNA, 25 bp, Artificial
  probe
  misc_feature (1)..(25): SEQ ID NO: 832; WAN024CFE; Start 200; Stop 224
ttacactcaatgggttatcagtagg

SEQ ID NO: 274865 - DNA, 25 bp, Artificial
  probe
  misc_feature (1)..(25): SEQ ID NO: 832; WAN024CFE; Start 142; Stop 166
gattatcttgttagccagtttgcga

SEQ ID NO: 274866 - DNA, 25 bp, Artificial
  probe
  misc_feature (1)..(25): SEQ ID NO: 832; WAN024CFE; Start 296; Stop 320
tttactttatggacatgagcgattc

SEQ ID NO: 274867 - DNA, 25 bp, Artificial
  probe
  misc_feature (1)..(25): SEQ ID NO: 832; WAN024CFE; Start 143; Stop 167
attatcttgttagccagtttgcgac

SEQ ID NO: 274868 - DNA, 25 bp, Artificial
  probe
  misc_feature (1)..(25): SEQ ID NO: 832; WAN024CFE; Start 361; Stop 385
tatcggcatagaaccagtggactag

SEQ ID NO: 274869 - DNA, 25 bp, Artificial
  probe
  misc_feature (1)..(25): SEQ ID NO: 832; WAN024CFE; Start 338; Stop 362
tgaaattgaaccgttctactgtcta

SEQ ID NO: 274870 - DNA, 25 bp, Artificial
  probe
  misc_feature (1)..(25): SEQ ID NO: 832; WAN024CFE; Start 337; Stop 361
ttgaaattgaaccgttctactgtct

SEQ ID NO: 274871 - DNA, 25 bp, Artificial
  probe
  misc_feature (1)..(25): SEQ ID NO: 832; WAN024CFE; Start 336; Stop 360
gttgaaattgaaccgttctactgtc

SEQ ID NO: 274872 - DNA, 25 bp, Artificial
  probe
  misc_feature (1)..(25): SEQ ID NO: 832; WAN024CFE; Start 334; Stop 358
ctgttgaaattgaaccgttctactg

SEQ ID NO: 274873 - DNA, 25 bp, Artificial
  probe
  misc_feature (1)..(25): SEQ ID NO: 832; WAN024CFE; Start 167; Stop 191
caacagataactattcaactgactt

SEQ ID NO: 274874 - DNA, 25 bp, Artificial
  probe
  misc_feature (1)..(25): SEQ ID NO: 832; WAN024CFE; Start 199; Stop 223
tttacactcaatgggttatcagtag

SEQ ID NO: 274875 - DNA, 25 bp, Artificial
  probe
  misc_feature (1)..(25): SEQ ID NO: 833; WAN024GCQ; Start 257; Stop 281
acggtatgttaattgagactgtact

SEQ ID NO: 274876 - DNA, 25 bp, Artificial
  probe
  misc_feature (1)..(25): SEQ ID NO: 833; WAN024GCQ; Start 256; Stop 280
gacggtatgttaattgagactgtac

SEQ ID NO: 274877 - DNA, 25 bp, Artificial
  probe
  misc_feature (1)..(25): SEQ ID NO: 833; WAN024GCQ; Start 258; Stop 282
cggtatgttaattgagactgtactc

SEQ ID NO: 274878 - DNA, 25 bp, Artificial
  probe
  misc_feature (1)..(25): SEQ ID NO: 833; WAN024GCQ; Start 801; Stop 825
tcgtcaagagcatggtacagatatt

SEQ ID NO: 274879 - DNA, 25 bp, Artificial
  probe
  misc_feature (1)..(25): SEQ ID NO: 833; WAN024GCQ; Start 800; Stop 824
ttcgtcaagagcatggtacagatat

SEQ ID NO: 274880 - DNA, 25 bp, Artificial
  probe
  misc_feature (1)..(25): SEQ ID NO: 833; WAN024GCQ; Start 649; Stop 673
gctgaattgctcaagaacatcaaga

SEQ ID NO: 274881 - DNA, 25 bp, Artificial
  probe
  misc_feature (1)..(25): SEQ ID NO: 833; WAN024GCQ; Start 644; Stop 668
aattggctgaattgctcaagaacat

SEQ ID NO: 274882 - DNA, 25 bp, Artificial
  probe
  misc_feature (1)..(25): SEQ ID NO: 833; WAN024GCQ; Start 805; Stop 829
caagagcatggtacagatattgacg

SEQ ID NO: 274883 - DNA, 25 bp, Artificial
  probe
  misc_feature (1)..(25): SEQ ID NO: 833; WAN024GCQ; Start 802; Stop 826
cgtcaagagcatggtacagatattg

SEQ ID NO: 274884 - DNA, 25 bp, Artificial
  probe
  misc_feature (1)..(25): SEQ ID NO: 833; WAN024GCQ; Start 645; Stop 669
attggctgaattgctcaagaacatc

SEQ ID NO: 274885 - DNA, 25 bp, Artificial
  probe
  misc_feature (1)..(25): SEQ ID NO: 833; WAN024GCQ; Start 331; Stop 355
tgtaatatcggttgtaccttctgtg

SEQ ID NO: 274886 - DNA, 25 bp, Artificial
  probe
  misc_feature (1)..(25): SEQ ID NO: 833; WAN024GCQ; Start 799; Stop 823
gttcgtcaagagcatggtacagata

SEQ ID NO: 274887 - DNA, 25 bp, Artificial
  probe
  misc_feature (1)..(25): SEQ ID NO: 833; WAN024GCQ; Start 329; Stop 353
gctgtaatatcggttgtaccttctg

SEQ ID NO: 274888 - DNA, 25 bp, Artificial
  probe
  misc_feature (1)..(25): SEQ ID NO: 833; WAN024GCQ; Start 643; Stop 667
gaattggctgaattgctcaagaaca

SEQ ID NO: 274889 - DNA, 25 bp, Artificial
  probe
  misc_feature (1)..(25): SEQ ID NO: 833; WAN024GCQ; Start 332; Stop 356
gtaatatcggttgtaccttctgtgc

SEQ ID NO: 274890 - DNA, 25 bp, Artificial
  probe
  misc_feature (1)..(25): SEQ ID NO: 833; WAN024GCQ; Start 648; Stop 672
ggctgaattgctcaagaacatcaag

SEQ ID NO: 274891 - DNA, 25 bp, Artificial
  probe
  misc_feature (1)..(25): SEQ ID NO: 833; WAN024GCQ; Start 283; Stop 307
atgcgtcaacactatggtttatctg

SEQ ID NO: 274892 - DNA, 25 bp, Artificial
  probe
  misc_feature (1)..(25): SEQ ID NO: 833; WAN024GCQ; Start 286; Stop 310
cgtcaacactatggtttatctgtct

SEQ ID NO: 274893 - DNA, 25 bp, Artificial
  probe
  misc_feature (1)..(25): SEQ ID NO: 833; WAN024GCQ; Start 348; Stop 372
cttctgtgcctctggtttgattaag

SEQ ID NO: 274894 - DNA, 25 bp, Artificial
  probe
  misc_feature (1)..(25): SEQ ID NO: 833; WAN024GCQ; Start 806; Stop 830
aagagcatggtacagatattgacgc

SEQ ID NO: 274895 - DNA, 25 bp, Artificial
  probe
  misc_feature (1)..(25): SEQ ID NO: 833; WAN024GCQ; Start 351; Stop 375
ctgtgcctctggtttgattaagaag

SEQ ID NO: 274896 - DNA, 25 bp, Artificial
  probe
  misc_feature (1)..(25): SEQ ID NO: 833; WAN024GCQ; Start 328; Stop 352
ggctgtaatatcggttgtaccttct

SEQ ID NO: 274897 - DNA, 25 bp, Artificial
  probe
  misc_feature (1)..(25): SEQ ID NO: 833; WAN024GCQ; Start 642; Stop 666
ggaattggctgaattgctcaagaac

SEQ ID NO: 274898 - DNA, 25 bp, Artificial
  probe
  misc_feature (1)..(25): SEQ ID NO: 833; WAN024GCQ; Start 273; Stop 297
gactgtactcatgcgtcaacactat

SEQ ID NO: 274899 - DNA, 25 bp, Artificial
  probe
  misc_feature (1)..(25): SEQ ID NO: 833; WAN024GCQ; Start 804; Stop 828
tcaagagcatggtacagatattgac

SEQ ID NO: 274900 - DNA, 25 bp, Artificial
  probe
  misc_feature (1)..(25): SEQ ID NO: 833; WAN024GCQ; Start 803; Stop 827
gtcaagagcatggtacagatattga

SEQ ID NO: 274901 - DNA, 25 bp, Artificial
  probe
  misc_feature (1)..(25): SEQ ID NO: 833; WAN024GCQ; Start 350; Stop 374
tctgtgcctctggtttgattaagaa

SEQ ID NO: 274902 - DNA, 25 bp, Artificial
  probe
  misc_feature (1)..(25): SEQ ID NO: 833; WAN024GCQ; Start 349; Stop 373
ttctgtgcctctggtttgattaaga

SEQ ID NO: 274903 - DNA, 25 bp, Artificial
  probe
  misc_feature (1)..(25): SEQ ID NO: 833; WAN024GCQ; Start 333; Stop 357
taatatcggttgtaccttctgtgcc

SEQ ID NO: 274904 - DNA, 25 bp, Artificial
  probe
  misc_feature (1)..(25): SEQ ID NO: 833; WAN024GCQ; Start 277; Stop 301
gtactcatgcgtcaacactatggtt

SEQ ID NO: 274905 - DNA, 25 bp, Artificial
  probe
  misc_feature (1)..(25): SEQ ID NO: 833; WAN024GCQ; Start 647; Stop 671
tggctgaattgctcaagaacatcaa

SEQ ID NO: 274906 - DNA, 25 bp, Artificial
  probe
  misc_feature (1)..(25): SEQ ID NO: 833; WAN024GCQ; Start 646; Stop 670
ttggctgaattgctcaagaacatca

SEQ ID NO: 274907 - DNA, 25 bp, Artificial
  probe
  misc_feature (1)..(25): SEQ ID NO: 833; WAN024GCQ; Start 282; Stop 306
catgcgtcaacactatggtttatct

SEQ ID NO: 274908 - DNA, 25 bp, Artificial
  probe
  misc_feature (1)..(25): SEQ ID NO: 834; WAN024GCS; Start 367; Stop 391
attaagaagcaacgtgacctcaata

SEQ ID NO: 274909 - DNA, 25 bp, Artificial
  probe
  misc_feature (1)..(25): SEQ ID NO: 834; WAN024GCS; Start 368; Stop 392
ttaagaagcaacgtgacctcaataa

SEQ ID NO: 274910 - DNA, 25 bp, Artificial
  probe
  misc_feature (1)..(25): SEQ ID NO: 834; WAN024GCS; Start 369; Stop 393
taagaagcaacgtgacctcaataac

SEQ ID NO: 274911 - DNA, 25 bp, Artificial
  probe
  misc_feature (1)..(25): SEQ ID NO: 834; WAN024GCS; Start 366; Stop 390
gattaagaagcaacgtgacctcaat

SEQ ID NO: 274912 - DNA, 25 bp, Artificial
  probe
  misc_feature (1)..(25): SEQ ID NO: 834; WAN024GCS; Start 539; Stop 563
atgatgataaaggaatggctatcgg

SEQ ID NO: 274913 - DNA, 25 bp, Artificial
  probe
  misc_feature (1)..(25): SEQ ID NO: 834; WAN024GCS; Start 538; Stop 562
aatgatgataaaggaatggctatcg

SEQ ID NO: 274914 - DNA, 25 bp, Artificial
  probe
  misc_feature (1)..(25): SEQ ID NO: 834; WAN024GCS; Start 482; Stop 506
gaatcggtgagccctttgataatta

SEQ ID NO: 274915 - DNA, 25 bp, Artificial
  probe
  misc_feature (1)..(25): SEQ ID NO: 834; WAN024GCS; Start 541; Stop 565
gatgataaaggaatggctatcggtg

SEQ ID NO: 274916 - DNA, 25 bp, Artificial
  probe
  misc_feature (1)..(25): SEQ ID NO: 834; WAN024GCS; Start 488; Stop 512
gtgagccctttgataattacaacaa

SEQ ID NO: 274917 - DNA, 25 bp, Artificial
  probe
  misc_feature (1)..(25): SEQ ID NO: 834; WAN024GCS; Start 483; Stop 507
aatcggtgagccctttgataattac

SEQ ID NO: 274918 - DNA, 25 bp, Artificial
  probe
  misc_feature (1)..(25): SEQ ID NO: 834; WAN024GCS; Start 536; Stop 560
tcaatgatgataaaggaatggctat

SEQ ID NO: 274919 - DNA, 25 bp, Artificial
  probe
  misc_feature (1)..(25): SEQ ID NO: 834; WAN024GCS; Start 540; Stop 564
tgatgataaaggaatggctatcggt

SEQ ID NO: 274920 - DNA, 25 bp, Artificial
  probe
  misc_feature (1)..(25): SEQ ID NO: 834; WAN024GCS; Start 489; Stop 513
tgagccctttgataattacaacaat

SEQ ID NO: 274921 - DNA, 25 bp, Artificial
  probe
  misc_feature (1)..(25): SEQ ID NO: 834; WAN024GCS; Start 490; Stop 514
gagccctttgataattacaacaatg

SEQ ID NO: 274922 - DNA, 25 bp, Artificial
  probe
  misc_feature (1)..(25): SEQ ID NO: 834; WAN024GCS; Start 487; Stop 511
ggtgagccctttgataattacaaca

SEQ ID NO: 274923 - DNA, 25 bp, Artificial
  probe
  misc_feature (1)..(25): SEQ ID NO: 834; WAN024GCS; Start 491; Stop 515
agccctttgataattacaacaatgt

SEQ ID NO: 274924 - DNA, 25 bp, Artificial
  probe
  misc_feature (1)..(25): SEQ ID NO: 834; WAN024GCS; Start 492; Stop 516
gccctttgataattacaacaatgtc

SEQ ID NO: 274925 - DNA, 25 bp, Artificial
  probe
  misc_feature (1)..(25): SEQ ID NO: 834; WAN024GCS; Start 683; Stop 707
caagtatcatgaagattaaccgtgc

SEQ ID NO: 274926 - DNA, 25 bp, Artificial
  probe
  misc_feature (1)..(25): SEQ ID NO: 834; WAN024GCS; Start 537; Stop 561
caatgatgataaaggaatggctatc

SEQ ID NO: 274927 - DNA, 25 bp, Artificial
  probe
  misc_feature (1)..(25): SEQ ID NO: 834; WAN024GCS; Start 484; Stop 508
atcggtgagccctttgataattaca

SEQ ID NO: 274928 - DNA, 25 bp, Artificial
  probe
  misc_feature (1)..(25): SEQ ID NO: 834; WAN024GCS; Start 365; Stop 389
tgattaagaagcaacgtgacctcaa

SEQ ID NO: 274929 - DNA, 25 bp, Artificial
  probe
  misc_feature (1)..(25): SEQ ID NO: 834; WAN024GCS; Start 364; Stop 388
ttgattaagaagcaacgtgacctca

SEQ ID NO: 274930 - DNA, 25 bp, Artificial
  probe
  misc_feature (1)..(25): SEQ ID NO: 834; WAN024GCS; Start 684; Stop 708
aagtatcatgaagattaaccgtgcc

SEQ ID NO: 274931 - DNA, 25 bp, Artificial
  probe
  misc_feature (1)..(25): SEQ ID NO: 834; WAN024GCS; Start 686; Stop 710
gtatcatgaagattaaccgtgcctt

SEQ ID NO: 274932 - DNA, 25 bp, Artificial
  probe
  misc_feature (1)..(25): SEQ ID NO: 834; WAN024GCS; Start 486; Stop 510
cggtgagccctttgataattacaac

SEQ ID NO: 274933 - DNA, 25 bp, Artificial
  probe
  misc_feature (1)..(25): SEQ ID NO: 834; WAN024GCS; Start 485; Stop 509
tcggtgagccctttgataattacaa

SEQ ID NO: 274934 - DNA, 25 bp, Artificial
  probe
  misc_feature (1)..(25): SEQ ID NO: 834; WAN024GCS; Start 682; Stop 706
tcaagtatcatgaagattaaccgtg

SEQ ID NO: 274935 - DNA, 25 bp, Artificial
  probe
  misc_feature (1)..(25): SEQ ID NO: 834; WAN024GCS; Start 481; Stop 505
ggaatcggtgagccctttgataatt

SEQ ID NO: 274936 - DNA, 25 bp, Artificial
  probe
  misc_feature (1)..(25): SEQ ID NO: 834; WAN024GCS; Start 685; Stop 709
agtatcatgaagattaaccgtgcct

SEQ ID NO: 274937 - DNA, 25 bp, Artificial
  probe
  misc_feature (1)..(25): SEQ ID NO: 834; WAN024GCS; Start 363; Stop 387
tttgattaagaagcaacgtgacctc

SEQ ID NO: 274938 - DNA, 25 bp, Artificial
  probe
  misc_feature (1)..(25): SEQ ID NO: 834; WAN024GCS; Start 542; Stop 566
atgataaaggaatggctatcggtgc

SEQ ID NO: 274939 - DNA, 25 bp, Artificial
  probe
  misc_feature (1)..(25): SEQ ID NO: 834; WAN024GCS; Start 493; Stop 517
ccctttgataattacaacaatgtct

SEQ ID NO: 274940 - DNA, 25 bp, Artificial
  probe
  misc_feature (1)..(25): SEQ ID NO: 834; WAN024GCS; Start 544; Stop 568
gataaaggaatggctatcggtgctc

SEQ ID NO: 274941 - DNA, 25 bp, Artificial
  probe
  misc_feature (1)..(25): SEQ ID NO: 835; WAN024G29; Start 131; Stop 155
gtatcttcaatcttctcacgcagac

SEQ ID NO: 274942 - DNA, 25 bp, Artificial
  probe
  misc_feature (1)..(25): SEQ ID NO: 835; WAN024G29; Start 132; Stop 156
tatcttcaatcttctcacgcagacg

SEQ ID NO: 274943 - DNA, 25 bp, Artificial
  probe
  misc_feature (1)..(25): SEQ ID NO: 835; WAN024G29; Start 47; Stop 71
tggtttgtttcagtaaatcaagcat

SEQ ID NO: 274944 - DNA, 25 bp, Artificial
  probe
  misc_feature (1)..(25): SEQ ID NO: 835; WAN024G29; Start 46; Stop 70
atggtttgtttcagtaaatcaagca

SEQ ID NO: 274945 - DNA, 25 bp, Artificial
  probe
  misc_feature (1)..(25): SEQ ID NO: 835; WAN024G29; Start 48; Stop 72
ggtttgtttcagtaaatcaagcatt

SEQ ID NO: 274946 - DNA, 25 bp, Artificial
  probe
  misc_feature (1)..(25): SEQ ID NO: 835; WAN024G29; Start 45; Stop 69
aatggtttgtttcagtaaatcaagc

SEQ ID NO: 274947 - DNA, 25 bp, Artificial
  probe
  misc_feature (1)..(25): SEQ ID NO: 835; WAN024G29; Start 233; Stop 257
gtgatgacttgacctgtatgcgatg

SEQ ID NO: 274948 - DNA, 25 bp, Artificial
  probe
  misc_feature (1)..(25): SEQ ID NO: 835; WAN024G29; Start 236; Stop 260
atgacttgacctgtatgcgatgcta

SEQ ID NO: 274949 - DNA, 25 bp, Artificial
  probe
  misc_feature (1)..(25): SEQ ID NO: 835; WAN024G29; Start 237; Stop 261
tgacttgacctgtatgcgatgctaa

SEQ ID NO: 274950 - DNA, 25 bp, Artificial
  probe
  misc_feature (1)..(25): SEQ ID NO: 835; WAN024G29; Start 67; Stop 91
agcattatttctcatgtaataccct

SEQ ID NO: 274951 - DNA, 25 bp, Artificial
  probe
  misc_feature (1)..(25): SEQ ID NO: 835; WAN024G29; Start 125; Stop 149
ctgggcgtatcttcaatcttctcac

SEQ ID NO: 274952 - DNA, 25 bp, Artificial
  probe
  misc_feature (1)..(25): SEQ ID NO: 835; WAN024G29; Start 74; Stop 98
tttctcatgtaataccctacaccac

SEQ ID NO: 274953 - DNA, 25 bp, Artificial
  probe
  misc_feature (1)..(25): SEQ ID NO: 835; WAN024G29; Start 44; Stop 68
aaatggtttgtttcagtaaatcaag

SEQ ID NO: 274954 - DNA, 25 bp, Artificial
  probe
  misc_feature (1)..(25): SEQ ID NO: 835; WAN024G29; Start 104; Stop 128
gtcaagatatactctggtcggctgg

SEQ ID NO: 274955 - DNA, 25 bp, Artificial
  probe
  misc_feature (1)..(25): SEQ ID NO: 835; WAN024G29; Start 73; Stop 97
atttctcatgtaataccctacacca

SEQ ID NO: 274956 - DNA, 25 bp, Artificial
  probe
  misc_feature (1)..(25): SEQ ID NO: 835; WAN024G29; Start 184; Stop 208
atcaccaaaatagtcataaccccag

SEQ ID NO: 274957 - DNA, 25 bp, Artificial
  probe
  misc_feature (1)..(25): SEQ ID NO: 835; WAN024G29; Start 49; Stop 73
gtttgtttcagtaaatcaagcatta

SEQ ID NO: 274958 - DNA, 25 bp, Artificial
  probe
  misc_feature (1)..(25): SEQ ID NO: 835; WAN024G29; Start 183; Stop 207
catcaccaaaatagtcataacccca

SEQ ID NO: 274959 - DNA, 25 bp, Artificial
  probe
  misc_feature (1)..(25): SEQ ID NO: 835; WAN024G29; Start 182; Stop 206
acatcaccaaaatagtcataacccc

SEQ ID NO: 274960 - DNA, 25 bp, Artificial
  probe
  misc_feature (1)..(25): SEQ ID NO: 835; WAN024G29; Start 130; Stop 154
cgtatcttcaatcttctcacgcaga

SEQ ID NO: 274961 - DNA, 25 bp, Artificial
  probe
  misc_feature (1)..(25): SEQ ID NO: 835; WAN024G29; Start 66; Stop 90
aagcattatttctcatgtaataccc

SEQ ID NO: 274962 - DNA, 25 bp, Artificial
  probe
  misc_feature (1)..(25): SEQ ID NO: 835; WAN024G29; Start 185; Stop 209
tcaccaaaatagtcataaccccaga

SEQ ID NO: 274963 - DNA, 25 bp, Artificial
  probe
  misc_feature (1)..(25): SEQ ID NO: 835; WAN024G29; Start 103; Stop 127
cgtcaagatatactctggtcggctg

SEQ ID NO: 274964 - DNA, 25 bp, Artificial
  probe
  misc_feature (1)..(25): SEQ ID NO: 835; WAN024G29; Start 75; Stop 99
ttctcatgtaataccctacaccacg

SEQ ID NO: 274965 - DNA, 25 bp, Artificial
  probe
  misc_feature (1)..(25): SEQ ID NO: 835; WAN024G29; Start 56; Stop 80
tcagtaaatcaagcattatttctca

SEQ ID NO: 274966 - DNA, 25 bp, Artificial
  probe
  misc_feature (1)..(25): SEQ ID NO: 835; WAN024G29; Start 190; Stop 214
aaaatagtcataaccccagacagtc

SEQ ID NO: 274967 - DNA, 25 bp, Artificial
  probe
  misc_feature (1)..(25): SEQ ID NO: 835; WAN024G29; Start 179; Stop 203
cggacatcaccaaaatagtcataac

SEQ ID NO: 274968 - DNA, 25 bp, Artificial
  probe
  misc_feature (1)..(25): SEQ ID NO: 835; WAN024G29; Start 181; Stop 205
gacatcaccaaaatagtcataaccc

SEQ ID NO: 274969 - DNA, 25 bp, Artificial
  probe
  misc_feature (1)..(25): SEQ ID NO: 835; WAN024G29; Start 180; Stop 204
ggacatcaccaaaatagtcataacc

SEQ ID NO: 274970 - DNA, 25 bp, Artificial
  probe
  misc_feature (1)..(25): SEQ ID NO: 835; WAN024G29; Start 189; Stop 213
caaaatagtcataaccccagacagt

SEQ ID NO: 274971 - DNA, 25 bp, Artificial
  probe
  misc_feature (1)..(25): SEQ ID NO: 835; WAN024G29; Start 235; Stop 259
gatgacttgacctgtatgcgatgct

SEQ ID NO: 274972 - DNA, 25 bp, Artificial
  probe
  misc_feature (1)..(25): SEQ ID NO: 835; WAN024G29; Start 232; Stop 256
cgtgatgacttgacctgtatgcgat

SEQ ID NO: 274973 - DNA, 25 bp, Artificial
  probe
  misc_feature (1)..(25): SEQ ID NO: 835; WAN024G29; Start 72; Stop 96
tatttctcatgtaataccctacacc

SEQ ID NO: 274974 - DNA, 25 bp, Artificial
  probe
  misc_feature (1)..(25): SEQ ID NO: 836; WAN024C83; Start 213; Stop 237
cgtaatccctgaacctgatagaatt

SEQ ID NO: 274975 - DNA, 25 bp, Artificial
  probe
  misc_feature (1)..(25): SEQ ID NO: 836; WAN024C83; Start 88; Stop 112
acaatcggaaatccaaatacaactg

SEQ ID NO: 274976 - DNA, 25 bp, Artificial
  probe
  misc_feature (1)..(25): SEQ ID NO: 836; WAN024C83; Start 87; Stop 111
gacaatcggaaatccaaatacaact

SEQ ID NO: 274977 - DNA, 25 bp, Artificial
  probe
  misc_feature (1)..(25): SEQ ID NO: 836; WAN024C83; Start 86; Stop 110
tgacaatcggaaatccaaatacaac

SEQ ID NO: 274978 - DNA, 25 bp, Artificial
  probe
  misc_feature (1)..(25): SEQ ID NO: 836; WAN024C83; Start 85; Stop 109
atgacaatcggaaatccaaatacaa

SEQ ID NO: 274979 - DNA, 25 bp, Artificial
  probe
  misc_feature (1)..(25): SEQ ID NO: 836; WAN024C83; Start 49; Stop 73
ggaacaagaatgaaaggtacaaaca

SEQ ID NO: 274980 - DNA, 25 bp, Artificial
  probe
  misc_feature (1)..(25): SEQ ID NO: 836; WAN024C83; Start 41; Stop 65
caagtacaggaacaagaatgaaagg

SEQ ID NO: 274981 - DNA, 25 bp, Artificial
  probe
  misc_feature (1)..(25): SEQ ID NO: 836; WAN024C83; Start 13; Stop 37
gcaatagctccatatactatcacag

SEQ ID NO: 274982 - DNA, 25 bp, Artificial
  probe
  misc_feature (1)..(25): SEQ ID NO: 836; WAN024C83; Start 48; Stop 72
aggaacaagaatgaaaggtacaaac

SEQ ID NO: 274983 - DNA, 25 bp, Artificial
  probe
  misc_feature (1)..(25): SEQ ID NO: 836; WAN024C83; Start 47; Stop 71
caggaacaagaatgaaaggtacaaa

SEQ ID NO: 274984 - DNA, 25 bp, Artificial
  probe
  misc_feature (1)..(25): SEQ ID NO: 836; WAN024C83; Start 45; Stop 69
tacaggaacaagaatgaaaggtaca

SEQ ID NO: 274985 - DNA, 25 bp, Artificial
  probe
  misc_feature (1)..(25): SEQ ID NO: 836; WAN024C83; Start 42; Stop 66
aagtacaggaacaagaatgaaaggt

SEQ ID NO: 274986 - DNA, 25 bp, Artificial
  probe
  misc_feature (1)..(25): SEQ ID NO: 836; WAN024C83; Start 46; Stop 70
acaggaacaagaatgaaaggtacaa

SEQ ID NO: 274987 - DNA, 25 bp, Artificial
  probe
  misc_feature (1)..(25): SEQ ID NO: 836; WAN024C83; Start 43; Stop 67
agtacaggaacaagaatgaaaggta

SEQ ID NO: 274988 - DNA, 25 bp, Artificial
  probe
  misc_feature (1)..(25): SEQ ID NO: 836; WAN024C83; Start 40; Stop 64
gcaagtacaggaacaagaatgaaag

SEQ ID NO: 274989 - DNA, 25 bp, Artificial
  probe
  misc_feature (1)..(25): SEQ ID NO: 836; WAN024C83; Start 12; Stop 36
tgcaatagctccatatactatcaca

SEQ ID NO: 274990 - DNA, 25 bp, Artificial
  probe
  misc_feature (1)..(25): SEQ ID NO: 836; WAN024C83; Start 84; Stop 108
catgacaatcggaaatccaaataca

SEQ ID NO: 274991 - DNA, 25 bp, Artificial
  probe
  misc_feature (1)..(25): SEQ ID NO: 836; WAN024C83; Start 61; Stop 85
aaaggtacaaacataactggattca

SEQ ID NO: 274992 - DNA, 25 bp, Artificial
  probe
  misc_feature (1)..(25): SEQ ID NO: 836; WAN024C83; Start 59; Stop 83
tgaaaggtacaaacataactggatt

SEQ ID NO: 274993 - DNA, 25 bp, Artificial
  probe
  misc_feature (1)..(25): SEQ ID NO: 836; WAN024C83; Start 63; Stop 87
aggtacaaacataactggattcatg

SEQ ID NO: 274994 - DNA, 25 bp, Artificial
  probe
  misc_feature (1)..(25): SEQ ID NO: 836; WAN024C83; Start 62; Stop 86
aaggtacaaacataactggattcat

SEQ ID NO: 274995 - DNA, 25 bp, Artificial
  probe
  misc_feature (1)..(25): SEQ ID NO: 836; WAN024C83; Start 57; Stop 81
aatgaaaggtacaaacataactgga

SEQ ID NO: 274996 - DNA, 25 bp, Artificial
  probe
  misc_feature (1)..(25): SEQ ID NO: 836; WAN024C83; Start 38; Stop 62
ctgcaagtacaggaacaagaatgaa

SEQ ID NO: 274997 - DNA, 25 bp, Artificial
  probe
  misc_feature (1)..(25): SEQ ID NO: 836; WAN024C83; Start 58; Stop 82
atgaaaggtacaaacataactggat

SEQ ID NO: 274998 - DNA, 25 bp, Artificial
  probe
  misc_feature (1)..(25): SEQ ID NO: 836; WAN024C83; Start 56; Stop 80
gaatgaaaggtacaaacataactgg

SEQ ID NO: 274999 - DNA, 25 bp, Artificial
  probe
  misc_feature (1)..(25): SEQ ID NO: 836; WAN024C83; Start 60; Stop 84
gaaaggtacaaacataactggattc

SEQ ID NO: 275000 - DNA, 25 bp, Artificial
  probe
  misc_feature (1)..(25): SEQ ID NO: 836; WAN024C83; Start 50; Stop 74
gaacaagaatgaaaggtacaaacat

SEQ ID NO: 275001 - DNA, 25 bp, Artificial
  probe
  misc_feature (1)..(25): SEQ ID NO: 836; WAN024C83; Start 216; Stop 240
aatccctgaacctgatagaattaaa

SEQ ID NO: 275002 - DNA, 25 bp, Artificial
  probe
  misc_feature (1)..(25): SEQ ID NO: 836; WAN024C83; Start 95; Stop 119
gaaatccaaatacaactggctcatt

SEQ ID NO: 275003 - DNA, 25 bp, Artificial
  probe
  misc_feature (1)..(25): SEQ ID NO: 836; WAN024C83; Start 98; Stop 122
atccaaatacaactggctcatttac

SEQ ID NO: 275004 - DNA, 25 bp, Artificial
  probe
  misc_feature (1)..(25): SEQ ID NO: 836; WAN024C83; Start 96; Stop 120
aaatccaaatacaactggctcattt

SEQ ID NO: 275005 - DNA, 25 bp, Artificial
  probe
  misc_feature (1)..(25): SEQ ID NO: 836; WAN024C83; Start 89; Stop 113
caatcggaaatccaaatacaactgg

SEQ ID NO: 275006 - DNA, 25 bp, Artificial
  probe
  misc_feature (1)..(25): SEQ ID NO: 836; WAN024C83; Start 214; Stop 238
gtaatccctgaacctgatagaatta

SEQ ID NO: 275007 - DNA, 25 bp, Artificial
  probe
  misc_feature (1)..(25): SEQ ID NO: 837; WAN024C56; Start 48; Stop 72
tttcaatagggaaatccatacaaaa

SEQ ID NO: 275008 - DNA, 25 bp, Artificial
  probe
  misc_feature (1)..(25): SEQ ID NO: 837; WAN024C56; Start 45; Stop 69
gaatttcaatagggaaatccataca

SEQ ID NO: 275009 - DNA, 25 bp, Artificial
  probe
  misc_feature (1)..(25): SEQ ID NO: 837; WAN024C56; Start 44; Stop 68
tgaatttcaatagggaaatccatac

SEQ ID NO: 275010 - DNA, 25 bp, Artificial
  probe
  misc_feature (1)..(25): SEQ ID NO: 837; WAN024C56; Start 42; Stop 66
aatgaatttcaatagggaaatccat

SEQ ID NO: 275011 - DNA, 25 bp, Artificial
  probe
  misc_feature (1)..(25): SEQ ID NO: 837; WAN024C56; Start 47; Stop 71
atttcaatagggaaatccatacaaa

SEQ ID NO: 275012 - DNA, 25 bp, Artificial
  probe
  misc_feature (1)..(25): SEQ ID NO: 837; WAN024C56; Start 46; Stop 70
aatttcaatagggaaatccatacaa

SEQ ID NO: 275013 - DNA, 25 bp, Artificial
  probe
  misc_feature (1)..(25): SEQ ID NO: 837; WAN024C56; Start 41; Stop 65
taatgaatttcaatagggaaatcca

SEQ ID NO: 275014 - DNA, 25 bp, Artificial
  probe
  misc_feature (1)..(25): SEQ ID NO: 837; WAN024C56; Start 43; Stop 67
atgaatttcaatagggaaatccata

SEQ ID NO: 275015 - DNA, 25 bp, Artificial
  probe
  misc_feature (1)..(25): SEQ ID NO: 837; WAN024C56; Start 40; Stop 64
ttaatgaatttcaatagggaaatcc

SEQ ID NO: 275016 - DNA, 25 bp, Artificial
  probe
  misc_feature (1)..(25): SEQ ID NO: 838; WAN024GH2; Start 766; Stop 790
aatatgagagagaatatcggtcgtt

SEQ ID NO: 275017 - DNA, 25 bp, Artificial
  probe
  misc_feature (1)..(25): SEQ ID NO: 838; WAN024GH2; Start 54; Stop 78
tagtgttctggttatctgccttcat

SEQ ID NO: 275018 - DNA, 25 bp, Artificial
  probe
  misc_feature (1)..(25): SEQ ID NO: 838; WAN024GH2; Start 769; Stop 793
atgagagagaatatcggtcgttata

SEQ ID NO: 275019 - DNA, 25 bp, Artificial
  probe
  misc_feature (1)..(25): SEQ ID NO: 838; WAN024GH2; Start 768; Stop 792
tatgagagagaatatcggtcgttat

SEQ ID NO: 275020 - DNA, 25 bp, Artificial
  probe
  misc_feature (1)..(25): SEQ ID NO: 838; WAN024GH2; Start 53; Stop 77
ttagtgttctggttatctgccttca

SEQ ID NO: 275021 - DNA, 25 bp, Artificial
  probe
  misc_feature (1)..(25): SEQ ID NO: 838; WAN024GH2; Start 570; Stop 594
cgtggattctaaggatgagataggt

SEQ ID NO: 275022 - DNA, 25 bp, Artificial
  probe
  misc_feature (1)..(25): SEQ ID NO: 838; WAN024GH2; Start 767; Stop 791
atatgagagagaatatcggtcgtta

SEQ ID NO: 275023 - DNA, 25 bp, Artificial
  probe
  misc_feature (1)..(25): SEQ ID NO: 838; WAN024GH2; Start 571; Stop 595
gtggattctaaggatgagataggta

SEQ ID NO: 275024 - DNA, 25 bp, Artificial
  probe
  misc_feature (1)..(25): SEQ ID NO: 838; WAN024GH2; Start 1045; Stop 1069
tctaatctcatcagcaatgccatta

SEQ ID NO: 275025 - DNA, 25 bp, Artificial
  probe
  misc_feature (1)..(25): SEQ ID NO: 838; WAN024GH2; Start 609; Stop 633
aatcaatagcctctaccagcatctc

SEQ ID NO: 275026 - DNA, 25 bp, Artificial
  probe
  misc_feature (1)..(25): SEQ ID NO: 838; WAN024GH2; Start 1047; Stop 1071
taatctcatcagcaatgccattaag

SEQ ID NO: 275027 - DNA, 25 bp, Artificial
  probe
  misc_feature (1)..(25): SEQ ID NO: 838; WAN024GH2; Start 1046; Stop 1070
ctaatctcatcagcaatgccattaa

SEQ ID NO: 275028 - DNA, 25 bp, Artificial
  probe
  misc_feature (1)..(25): SEQ ID NO: 838; WAN024GH2; Start 1044; Stop 1068
ttctaatctcatcagcaatgccatt

SEQ ID NO: 275029 - DNA, 25 bp, Artificial
  probe
  misc_feature (1)..(25): SEQ ID NO: 838; WAN024GH2; Start 621; Stop 645
ctaccagcatctcttgactgttatt

SEQ ID NO: 275030 - DNA, 25 bp, Artificial
  probe
  misc_feature (1)..(25): SEQ ID NO: 838; WAN024GH2; Start 264; Stop 288
caagttagaagtcaaggacagtctt

SEQ ID NO: 275031 - DNA, 25 bp, Artificial
  probe
  misc_feature (1)..(25): SEQ ID NO: 838; WAN024GH2; Start 55; Stop 79
agtgttctggttatctgccttcatt

SEQ ID NO: 275032 - DNA, 25 bp, Artificial
  probe
  misc_feature (1)..(25): SEQ ID NO: 838; WAN024GH2; Start 773; Stop 797
gagagaatatcggtcgttataagga

SEQ ID NO: 275033 - DNA, 25 bp, Artificial
  probe
  misc_feature (1)..(25): SEQ ID NO: 838; WAN024GH2; Start 772; Stop 796
agagagaatatcggtcgttataagg

SEQ ID NO: 275034 - DNA, 25 bp, Artificial
  probe
  misc_feature (1)..(25): SEQ ID NO: 838; WAN024GH2; Start 622; Stop 646
taccagcatctcttgactgttattg

SEQ ID NO: 275035 - DNA, 25 bp, Artificial
  probe
  misc_feature (1)..(25): SEQ ID NO: 838; WAN024GH2; Start 629; Stop 653
atctcttgactgttattgcggactt

SEQ ID NO: 275036 - DNA, 25 bp, Artificial
  probe
  misc_feature (1)..(25): SEQ ID NO: 838; WAN024GH2; Start 620; Stop 644
tctaccagcatctcttgactgttat

SEQ ID NO: 275037 - DNA, 25 bp, Artificial
  probe
  misc_feature (1)..(25): SEQ ID NO: 838; WAN024GH2; Start 262; Stop 286
gacaagttagaagtcaaggacagtc

SEQ ID NO: 275038 - DNA, 25 bp, Artificial
  probe
  misc_feature (1)..(25): SEQ ID NO: 838; WAN024GH2; Start 572; Stop 596
tggattctaaggatgagataggtaa

SEQ ID NO: 275039 - DNA, 25 bp, Artificial
  probe
  misc_feature (1)..(25): SEQ ID NO: 838; WAN024GH2; Start 770; Stop 794
tgagagagaatatcggtcgttataa

SEQ ID NO: 275040 - DNA, 25 bp, Artificial
  probe
  misc_feature (1)..(25): SEQ ID NO: 838; WAN024GH2; Start 263; Stop 287
acaagttagaagtcaaggacagtct

SEQ ID NO: 275041 - DNA, 25 bp, Artificial
  probe
  misc_feature (1)..(25): SEQ ID NO: 838; WAN024GH2; Start 774; Stop 798
agagaatatcggtcgttataaggat

SEQ ID NO: 275042 - DNA, 25 bp, Artificial
  probe
  misc_feature (1)..(25): SEQ ID NO: 838; WAN024GH2; Start 569; Stop 593
gcgtggattctaaggatgagatagg

SEQ ID NO: 275043 - DNA, 25 bp, Artificial
  probe
  misc_feature (1)..(25): SEQ ID NO: 838; WAN024GH2; Start 619; Stop 643
ctctaccagcatctcttgactgtta

SEQ ID NO: 275044 - DNA, 25 bp, Artificial
  probe
  misc_feature (1)..(25): SEQ ID NO: 838; WAN024GH2; Start 610; Stop 634
atcaatagcctctaccagcatctct

SEQ ID NO: 275045 - DNA, 25 bp, Artificial
  probe
  misc_feature (1)..(25): SEQ ID NO: 838; WAN024GH2; Start 771; Stop 795
gagagagaatatcggtcgttataag

SEQ ID NO: 275046 - DNA, 25 bp, Artificial
  probe
  misc_feature (1)..(25): SEQ ID NO: 838; WAN024GH2; Start 628; Stop 652
catctcttgactgttattgcggact

SEQ ID NO: 275047 - DNA, 25 bp, Artificial
  probe
  misc_feature (1)..(25): SEQ ID NO: 838; WAN024GH2; Start 613; Stop 637
aatagcctctaccagcatctcttga

SEQ ID NO: 275048 - DNA, 25 bp, Artificial
  probe
  misc_feature (1)..(25): SEQ ID NO: 838; WAN024GH2; Start 611; Stop 635
tcaatagcctctaccagcatctctt

SEQ ID NO: 275049 - DNA, 25 bp, Artificial
  probe
  misc_feature (1)..(25): SEQ ID NO: 839; WAN024BFQ; Start 1023; Stop 1047
cggtaatgacatctatctctacaca

SEQ ID NO: 275050 - DNA, 25 bp, Artificial
  probe
  misc_feature (1)..(25): SEQ ID NO: 839; WAN024BFQ; Start 1022; Stop 1046
tcggtaatgacatctatctctacac

SEQ ID NO: 275051 - DNA, 25 bp, Artificial
  probe
  misc_feature (1)..(25): SEQ ID NO: 839; WAN024BFQ; Start 816; Stop 840
ttcagtcattatcttggatgctaca

SEQ ID NO: 275052 - DNA, 25 bp, Artificial
  probe
  misc_feature (1)..(25): SEQ ID NO: 839; WAN024BFQ; Start 633; Stop 657
gaagacaccaatcaagtattcagac

SEQ ID NO: 275053 - DNA, 25 bp, Artificial
  probe
  misc_feature (1)..(25): SEQ ID NO: 839; WAN024BFQ; Start 1027; Stop 1051
aatgacatctatctctacacaggtg

SEQ ID NO: 275054 - DNA, 25 bp, Artificial
  probe
  misc_feature (1)..(25): SEQ ID NO: 839; WAN024BFQ; Start 815; Stop 839
cttcagtcattatcttggatgctac

SEQ ID NO: 275055 - DNA, 25 bp, Artificial
  probe
  misc_feature (1)..(25): SEQ ID NO: 839; WAN024BFQ; Start 814; Stop 838
gcttcagtcattatcttggatgcta

SEQ ID NO: 275056 - DNA, 25 bp, Artificial
  probe
  misc_feature (1)..(25): SEQ ID NO: 839; WAN024BFQ; Start 817; Stop 841
tcagtcattatcttggatgctacaa

SEQ ID NO: 275057 - DNA, 25 bp, Artificial
  probe
  misc_feature (1)..(25): SEQ ID NO: 839; WAN024BFQ; Start 1318; Stop 1342
gttatcgttgctactacagtggaag

SEQ ID NO: 275058 - DNA, 25 bp, Artificial
  probe
  misc_feature (1)..(25): SEQ ID NO: 839; WAN024BFQ; Start 1319; Stop 1343
ttatcgttgctactacagtggaaga

SEQ ID NO: 275059 - DNA, 25 bp, Artificial
  probe
  misc_feature (1)..(25): SEQ ID NO: 839; WAN024BFQ; Start 634; Stop 658
aagacaccaatcaagtattcagact

SEQ ID NO: 275060 - DNA, 25 bp, Artificial
  probe
  misc_feature (1)..(25): SEQ ID NO: 839; WAN024BFQ; Start 635; Stop 659
agacaccaatcaagtattcagactc

SEQ ID NO: 275061 - DNA, 25 bp, Artificial
  probe
  misc_feature (1)..(25): SEQ ID NO: 839; WAN024BFQ; Start 1061; Stop 1085
ctaatgcggatgagagtaatcttgg

SEQ ID NO: 275062 - DNA, 25 bp, Artificial
  probe
  misc_feature (1)..(25): SEQ ID NO: 839; WAN024BFQ; Start 1021; Stop 1045
atcggtaatgacatctatctctaca

SEQ ID NO: 275063 - DNA, 25 bp, Artificial
  probe
  misc_feature (1)..(25): SEQ ID NO: 839; WAN024BFQ; Start 1320; Stop 1344
tatcgttgctactacagtggaagag

SEQ ID NO: 275064 - DNA, 25 bp, Artificial
  probe
  misc_feature (1)..(25): SEQ ID NO: 839; WAN024BFQ; Start 1026; Stop 1050
taatgacatctatctctacacaggt

SEQ ID NO: 275065 - DNA, 25 bp, Artificial
  probe
  misc_feature (1)..(25): SEQ ID NO: 839; WAN024BFQ; Start 1062; Stop 1086
taatgcggatgagagtaatcttggt

SEQ ID NO: 275066 - DNA, 25 bp, Artificial
  probe
  misc_feature (1)..(25): SEQ ID NO: 839; WAN024BFQ; Start 1060; Stop 1084
gctaatgcggatgagagtaatcttg

SEQ ID NO: 275067 - DNA, 25 bp, Artificial
  probe
  misc_feature (1)..(25): SEQ ID NO: 839; WAN024BFQ; Start 1025; Stop 1049
gtaatgacatctatctctacacagg

SEQ ID NO: 275068 - DNA, 25 bp, Artificial
  probe
  misc_feature (1)..(25): SEQ ID NO: 839; WAN024BFQ; Start 1024; Stop 1048
ggtaatgacatctatctctacacag

SEQ ID NO: 275069 - DNA, 25 bp, Artificial
  probe
  misc_feature (1)..(25): SEQ ID NO: 839; WAN024BFQ; Start 1315; Stop 1339
aatgttatcgttgctactacagtgg

SEQ ID NO: 275070 - DNA, 25 bp, Artificial
  probe
  misc_feature (1)..(25): SEQ ID NO: 839; WAN024BFQ; Start 636; Stop 660
gacaccaatcaagtattcagactcg

SEQ ID NO: 275071 - DNA, 25 bp, Artificial
  probe
  misc_feature (1)..(25): SEQ ID NO: 839; WAN024BFQ; Start 1018; Stop 1042
tctatcggtaatgacatctatctct

SEQ ID NO: 275072 - DNA, 25 bp, Artificial
  probe
  misc_feature (1)..(25): SEQ ID NO: 839; WAN024BFQ; Start 641; Stop 665
caatcaagtattcagactcggagta

SEQ ID NO: 275073 - DNA, 25 bp, Artificial
  probe
  misc_feature (1)..(25): SEQ ID NO: 839; WAN024BFQ; Start 1316; Stop 1340
atgttatcgttgctactacagtgga

SEQ ID NO: 275074 - DNA, 25 bp, Artificial
  probe
  misc_feature (1)..(25): SEQ ID NO: 839; WAN024BFQ; Start 1504; Stop 1528
gtatccgatgaccttccttaccttg

SEQ ID NO: 275075 - DNA, 25 bp, Artificial
  probe
  misc_feature (1)..(25): SEQ ID NO: 839; WAN024BFQ; Start 813; Stop 837
tgcttcagtcattatcttggatgct

SEQ ID NO: 275076 - DNA, 25 bp, Artificial
  probe
  misc_feature (1)..(25): SEQ ID NO: 839; WAN024BFQ; Start 643; Stop 667
atcaagtattcagactcggagtatt

SEQ ID NO: 275077 - DNA, 25 bp, Artificial
  probe
  misc_feature (1)..(25): SEQ ID NO: 839; WAN024BFQ; Start 642; Stop 666
aatcaagtattcagactcggagtat

SEQ ID NO: 275078 - DNA, 25 bp, Artificial
  probe
  misc_feature (1)..(25): SEQ ID NO: 839; WAN024BFQ; Start 1505; Stop 1529
tatccgatgaccttccttaccttga

SEQ ID NO: 275079 - DNA, 25 bp, Artificial
  probe
  misc_feature (1)..(25): SEQ ID NO: 839; WAN024BFQ; Start 1317; Stop 1341
tgttatcgttgctactacagtggaa

SEQ ID NO: 275080 - DNA, 25 bp, Artificial
  probe
  misc_feature (1)..(25): SEQ ID NO: 839; WAN024BFQ; Start 1503; Stop 1527
agtatccgatgaccttccttacctt

SEQ ID NO: 275081 - DNA, 25 bp, Artificial
  probe
  misc_feature (1)..(25): SEQ ID NO: 839; WAN024BFQ; Start 1328; Stop 1352
ctactacagtggaagagatgctcag

SEQ ID NO: 275082 - DNA, 25 bp, Artificial
  probe
  misc_feature (1)..(25): SEQ ID NO: 840; WAN024CE8; Start 444; Stop 468
tagtgagactgaagttagtgagact

SEQ ID NO: 275083 - DNA, 25 bp, Artificial
  probe
  misc_feature (1)..(25): SEQ ID NO: 840; WAN024CE8; Start 662; Stop 686
tctatcagtatgctcttgacaatgt

SEQ ID NO: 275084 - DNA, 25 bp, Artificial
  probe
  misc_feature (1)..(25): SEQ ID NO: 840; WAN024CE8; Start 658; Stop 682
agaatctatcagtatgctcttgaca

SEQ ID NO: 275085 - DNA, 25 bp, Artificial
  probe
  misc_feature (1)..(25): SEQ ID NO: 840; WAN024CE8; Start 443; Stop 467
ctagtgagactgaagttagtgagac

SEQ ID NO: 275086 - DNA, 25 bp, Artificial
  probe
  misc_feature (1)..(25): SEQ ID NO: 840; WAN024CE8; Start 664; Stop 688
tatcagtatgctcttgacaatgttc

SEQ ID NO: 275087 - DNA, 25 bp, Artificial
  probe
  misc_feature (1)..(25): SEQ ID NO: 840; WAN024CE8; Start 663; Stop 687
ctatcagtatgctcttgacaatgtt

SEQ ID NO: 275088 - DNA, 25 bp, Artificial
  probe
  misc_feature (1)..(25): SEQ ID NO: 840; WAN024CE8; Start 442; Stop 466
cctagtgagactgaagttagtgaga

SEQ ID NO: 275089 - DNA, 25 bp, Artificial
  probe
  misc_feature (1)..(25): SEQ ID NO: 840; WAN024CE8; Start 151; Stop 175
agtcgtggttggatagatgaagaag

SEQ ID NO: 275090 - DNA, 25 bp, Artificial
  probe
  misc_feature (1)..(25): SEQ ID NO: 840; WAN024CE8; Start 665; Stop 689
atcagtatgctcttgacaatgttcg

SEQ ID NO: 275091 - DNA, 25 bp, Artificial
  probe
  misc_feature (1)..(25): SEQ ID NO: 840; WAN024CE8; Start 661; Stop 685
atctatcagtatgctcttgacaatg

SEQ ID NO: 275092 - DNA, 25 bp, Artificial
  probe
  misc_feature (1)..(25): SEQ ID NO: 840; WAN024CE8; Start 659; Stop 683
gaatctatcagtatgctcttgacaa

SEQ ID NO: 275093 - DNA, 25 bp, Artificial
  probe
  misc_feature (1)..(25): SEQ ID NO: 840; WAN024CE8; Start 657; Stop 681
gagaatctatcagtatgctcttgac

SEQ ID NO: 275094 - DNA, 25 bp, Artificial
  probe
  misc_feature (1)..(25): SEQ ID NO: 840; WAN024CE8; Start 445; Stop 469
agtgagactgaagttagtgagacta

SEQ ID NO: 275095 - DNA, 25 bp, Artificial
  probe
  misc_feature (1)..(25): SEQ ID NO: 840; WAN024CE8; Start 660; Stop 684
aatctatcagtatgctcttgacaat

SEQ ID NO: 275096 - DNA, 25 bp, Artificial
  probe
  misc_feature (1)..(25): SEQ ID NO: 840; WAN024CE8; Start 152; Stop 176
gtcgtggttggatagatgaagaagg

SEQ ID NO: 275097 - DNA, 25 bp, Artificial
  probe
  misc_feature (1)..(25): SEQ ID NO: 840; WAN024CE8; Start 668; Stop 692
agtatgctcttgacaatgttcgctt

SEQ ID NO: 275098 - DNA, 25 bp, Artificial
  probe
  misc_feature (1)..(25): SEQ ID NO: 840; WAN024CE8; Start 2; Stop 26
tgaaacgaattaccgcaaatcaata

SEQ ID NO: 275099 - DNA, 25 bp, Artificial
  probe
  misc_feature (1)..(25): SEQ ID NO: 840; WAN024CE8; Start 1; Stop 25
atgaaacgaattaccgcaaatcaat

SEQ ID NO: 275100 - DNA, 25 bp, Artificial
  probe
  misc_feature (1)..(25): SEQ ID NO: 840; WAN024CE8; Start 91; Stop 115
atgaaactagaagtaaaggtggctt

SEQ ID NO: 275101 - DNA, 25 bp, Artificial
  probe
  misc_feature (1)..(25): SEQ ID NO: 840; WAN024CE8; Start 92; Stop 116
tgaaactagaagtaaaggtggctta

SEQ ID NO: 275102 - DNA, 25 bp, Artificial
  probe
  misc_feature (1)..(25): SEQ ID NO: 840; WAN024CE8; Start 90; Stop 114
tatgaaactagaagtaaaggtggct

SEQ ID NO: 275103 - DNA, 25 bp, Artificial
  probe
  misc_feature (1)..(25): SEQ ID NO: 840; WAN024CE8; Start 89; Stop 113
atatgaaactagaagtaaaggtggc

SEQ ID NO: 275104 - DNA, 25 bp, Artificial
  probe
  misc_feature (1)..(25): SEQ ID NO: 840; WAN024CE8; Start 95; Stop 119
aactagaagtaaaggtggcttattc

SEQ ID NO: 275105 - DNA, 25 bp, Artificial
  probe
  misc_feature (1)..(25): SEQ ID NO: 840; WAN024CE8; Start 93; Stop 117
gaaactagaagtaaaggtggcttat

SEQ ID NO: 275106 - DNA, 25 bp, Artificial
  probe
  misc_feature (1)..(25): SEQ ID NO: 840; WAN024CE8; Start 667; Stop 691
cagtatgctcttgacaatgttcgct

SEQ ID NO: 275107 - DNA, 25 bp, Artificial
  probe
  misc_feature (1)..(25): SEQ ID NO: 840; WAN024CE8; Start 441; Stop 465
ccctagtgagactgaagttagtgag

SEQ ID NO: 275108 - DNA, 25 bp, Artificial
  probe
  misc_feature (1)..(25): SEQ ID NO: 840; WAN024CE8; Start 669; Stop 693
gtatgctcttgacaatgttcgcttt

SEQ ID NO: 275109 - DNA, 25 bp, Artificial
  probe
  misc_feature (1)..(25): SEQ ID NO: 840; WAN024CE8; Start 652; Stop 676
tttgagagaatctatcagtatgctc

SEQ ID NO: 275110 - DNA, 25 bp, Artificial
  probe
  misc_feature (1)..(25): SEQ ID NO: 840; WAN024CE8; Start 94; Stop 118
aaactagaagtaaaggtggcttatt

SEQ ID NO: 275111 - DNA, 25 bp, Artificial
  probe
  misc_feature (1)..(25): SEQ ID NO: 840; WAN024CE8; Start 666; Stop 690
tcagtatgctcttgacaatgttcgc

SEQ ID NO: 275112 - DNA, 25 bp, Artificial
  probe
  misc_feature (1)..(25): SEQ ID NO: 840; WAN024CE8; Start 670; Stop 694
tatgctcttgacaatgttcgctttg

SEQ ID NO: 275113 - DNA, 25 bp, Artificial
  probe
  misc_feature (1)..(25): SEQ ID NO: 840; WAN024CE8; Start 100; Stop 124
gaagtaaaggtggcttattctattt

SEQ ID NO: 275114 - DNA, 25 bp, Artificial
  probe
  misc_feature (1)..(25): SEQ ID NO: 840; WAN024CE8; Start 656; Stop 680
agagaatctatcagtatgctcttga

SEQ ID NO: 275115 - DNA, 25 bp, Artificial
  probe
  misc_feature (1)..(25): SEQ ID NO: 841; WAN024D42; Start 90; Stop 114
ttccaactacatgattcaggctatt

SEQ ID NO: 275116 - DNA, 25 bp, Artificial
  probe
  misc_feature (1)..(25): SEQ ID NO: 841; WAN024D42; Start 89; Stop 113
gttccaactacatgattcaggctat

SEQ ID NO: 275117 - DNA, 25 bp, Artificial
  probe
  misc_feature (1)..(25): SEQ ID NO: 841; WAN024D42; Start 91; Stop 115
tccaactacatgattcaggctattg

SEQ ID NO: 275118 - DNA, 25 bp, Artificial
  probe
  misc_feature (1)..(25): SEQ ID NO: 841; WAN024D42; Start 92; Stop 116
ccaactacatgattcaggctattga

SEQ ID NO: 275119 - DNA, 25 bp, Artificial
  probe
  misc_feature (1)..(25): SEQ ID NO: 841; WAN024D42; Start 84; Stop 108
gacttgttccaactacatgattcag

SEQ ID NO: 275120 - DNA, 25 bp, Artificial
  probe
  misc_feature (1)..(25): SEQ ID NO: 841; WAN024D42; Start 82; Stop 106
ctgacttgttccaactacatgattc

SEQ ID NO: 275121 - DNA, 25 bp, Artificial
  probe
  misc_feature (1)..(25): SEQ ID NO: 841; WAN024D42; Start 83; Stop 107
tgacttgttccaactacatgattca

SEQ ID NO: 275122 - DNA, 25 bp, Artificial
  probe
  misc_feature (1)..(25): SEQ ID NO: 841; WAN024D42; Start 85; Stop 109
acttgttccaactacatgattcagg

SEQ ID NO: 275123 - DNA, 25 bp, Artificial
  probe
  misc_feature (1)..(25): SEQ ID NO: 841; WAN024D42; Start 81; Stop 105
gctgacttgttccaactacatgatt

SEQ ID NO: 275124 - DNA, 25 bp, Artificial
  probe
  misc_feature (1)..(25): SEQ ID NO: 841; WAN024D42; Start 88; Stop 112
tgttccaactacatgattcaggcta

SEQ ID NO: 275125 - DNA, 25 bp, Artificial
  probe
  misc_feature (1)..(25): SEQ ID NO: 841; WAN024D42; Start 86; Stop 110
cttgttccaactacatgattcaggc

SEQ ID NO: 275126 - DNA, 25 bp, Artificial
  probe
  misc_feature (1)..(25): SEQ ID NO: 841; WAN024D42; Start 87; Stop 111
ttgttccaactacatgattcaggct

SEQ ID NO: 275127 - DNA, 25 bp, Artificial
  probe
  misc_feature (1)..(25): SEQ ID NO: 841; WAN024D42; Start 80; Stop 104
agctgacttgttccaactacatgat

SEQ ID NO: 275128 - DNA, 25 bp, Artificial
  probe
  misc_feature (1)..(25): SEQ ID NO: 841; WAN024D42; Start 77; Stop 101
ttgagctgacttgttccaactacat

SEQ ID NO: 275129 - DNA, 25 bp, Artificial
  probe
  misc_feature (1)..(25): SEQ ID NO: 841; WAN024D42; Start 93; Stop 117
caactacatgattcaggctattgaa

SEQ ID NO: 275130 - DNA, 25 bp, Artificial
  probe
  misc_feature (1)..(25): SEQ ID NO: 841; WAN024D42; Start 79; Stop 103
gagctgacttgttccaactacatga

SEQ ID NO: 275131 - DNA, 25 bp, Artificial
  probe
  misc_feature (1)..(25): SEQ ID NO: 841; WAN024D42; Start 78; Stop 102
tgagctgacttgttccaactacatg

SEQ ID NO: 275132 - DNA, 25 bp, Artificial
  probe
  misc_feature (1)..(25): SEQ ID NO: 841; WAN024D42; Start 43; Stop 67
tttatctcaccagtctttccaccct

SEQ ID NO: 275133 - DNA, 25 bp, Artificial
  probe
  misc_feature (1)..(25): SEQ ID NO: 841; WAN024D42; Start 75; Stop 99
ctttgagctgacttgttccaactac

SEQ ID NO: 275134 - DNA, 25 bp, Artificial
  probe
  misc_feature (1)..(25): SEQ ID NO: 841; WAN024D42; Start 44; Stop 68
ttatctcaccagtctttccaccctc

SEQ ID NO: 275135 - DNA, 25 bp, Artificial
  probe
  misc_feature (1)..(25): SEQ ID NO: 841; WAN024D42; Start 41; Stop 65
gttttatctcaccagtctttccacc

SEQ ID NO: 275136 - DNA, 25 bp, Artificial
  probe
  misc_feature (1)..(25): SEQ ID NO: 841; WAN024D42; Start 40; Stop 64
cgttttatctcaccagtctttccac

SEQ ID NO: 275137 - DNA, 25 bp, Artificial
  probe
  misc_feature (1)..(25): SEQ ID NO: 841; WAN024D42; Start 76; Stop 100
tttgagctgacttgttccaactaca

SEQ ID NO: 275138 - DNA, 25 bp, Artificial
  probe
  misc_feature (1)..(25): SEQ ID NO: 841; WAN024D42; Start 94; Stop 118
aactacatgattcaggctattgaaa

SEQ ID NO: 275139 - DNA, 25 bp, Artificial
  probe
  misc_feature (1)..(25): SEQ ID NO: 841; WAN024D42; Start 42; Stop 66
ttttatctcaccagtctttccaccc

SEQ ID NO: 275140 - DNA, 25 bp, Artificial
  probe
  misc_feature (1)..(25): SEQ ID NO: 841; WAN024D42; Start 45; Stop 69
tatctcaccagtctttccaccctct

SEQ ID NO: 275141 - DNA, 25 bp, Artificial
  probe
  misc_feature (1)..(25): SEQ ID NO: 841; WAN024D42; Start 212; Stop 236
tttcccttaaacgaaatcaagaagg

SEQ ID NO: 275142 - DNA, 25 bp, Artificial
  probe
  misc_feature (1)..(25): SEQ ID NO: 841; WAN024D42; Start 211; Stop 235
ttttcccttaaacgaaatcaagaag

SEQ ID NO: 275143 - DNA, 25 bp, Artificial
  probe
  misc_feature (1)..(25): SEQ ID NO: 841; WAN024D42; Start 210; Stop 234
cttttcccttaaacgaaatcaagaa

SEQ ID NO: 275144 - DNA, 25 bp, Artificial
  probe
  misc_feature (1)..(25): SEQ ID NO: 841; WAN024D42; Start 39; Stop 63
acgttttatctcaccagtctttcca

SEQ ID NO: 275145 - DNA, 25 bp, Artificial
  probe
  misc_feature (1)..(25): SEQ ID NO: 841; WAN024D42; Start 46; Stop 70
atctcaccagtctttccaccctctt

SEQ ID NO: 275146 - DNA, 25 bp, Artificial
  probe
  misc_feature (1)..(25): SEQ ID NO: 841; WAN024D42; Start 74; Stop 98
gctttgagctgacttgttccaacta

SEQ ID NO: 275147 - DNA, 25 bp, Artificial
  probe
  misc_feature (1)..(25): SEQ ID NO: 841; WAN024D42; Start 95; Stop 119
actacatgattcaggctattgaaaa

SEQ ID NO: 275148 - DNA, 25 bp, Artificial
  probe
  misc_feature (1)..(25): SEQ ID NO: 842; WAN024CJJ; Start 338; Stop 362
gtgagaagtacatgaggctaactaa

SEQ ID NO: 275149 - DNA, 25 bp, Artificial
  probe
  misc_feature (1)..(25): SEQ ID NO: 842; WAN024CJJ; Start 339; Stop 363
tgagaagtacatgaggctaactaat

SEQ ID NO: 275150 - DNA, 25 bp, Artificial
  probe
  misc_feature (1)..(25): SEQ ID NO: 842; WAN024CJJ; Start 260; Stop 284
atgtatctattctcttaacgtgcgt

SEQ ID NO: 275151 - DNA, 25 bp, Artificial
  probe
  misc_feature (1)..(25): SEQ ID NO: 842; WAN024CJJ; Start 259; Stop 283
catgtatctattctcttaacgtgcg

SEQ ID NO: 275152 - DNA, 25 bp, Artificial
  probe
  misc_feature (1)..(25): SEQ ID NO: 842; WAN024CJJ; Start 337; Stop 361
cgtgagaagtacatgaggctaacta

SEQ ID NO: 275153 - DNA, 25 bp, Artificial
  probe
  misc_feature (1)..(25): SEQ ID NO: 842; WAN024CJJ; Start 261; Stop 285
tgtatctattctcttaacgtgcgtg

SEQ ID NO: 275154 - DNA, 25 bp, Artificial
  probe
  misc_feature (1)..(25): SEQ ID NO: 842; WAN024CJJ; Start 33; Stop 57
atttcgtttaacagaagcagaagaa

SEQ ID NO: 275155 - DNA, 25 bp, Artificial
  probe
  misc_feature (1)..(25): SEQ ID NO: 842; WAN024CJJ; Start 30; Stop 54
acaatttcgtttaacagaagcagaa

SEQ ID NO: 275156 - DNA, 25 bp, Artificial
  probe
  misc_feature (1)..(25): SEQ ID NO: 842; WAN024CJJ; Start 335; Stop 359
ttcgtgagaagtacatgaggctaac

SEQ ID NO: 275157 - DNA, 25 bp, Artificial
  probe
  misc_feature (1)..(25): SEQ ID NO: 842; WAN024CJJ; Start 32; Stop 56
aatttcgtttaacagaagcagaaga

SEQ ID NO: 275158 - DNA, 25 bp, Artificial
  probe
  misc_feature (1)..(25): SEQ ID NO: 842; WAN024CJJ; Start 31; Stop 55
caatttcgtttaacagaagcagaag

SEQ ID NO: 275159 - DNA, 25 bp, Artificial
  probe
  misc_feature (1)..(25): SEQ ID NO: 842; WAN024CJJ; Start 257; Stop 281
agcatgtatctattctcttaacgtg

SEQ ID NO: 275160 - DNA, 25 bp, Artificial
  probe
  misc_feature (1)..(25): SEQ ID NO: 842; WAN024CJJ; Start 29; Stop 53
aacaatttcgtttaacagaagcaga

SEQ ID NO: 275161 - DNA, 25 bp, Artificial
  probe
  misc_feature (1)..(25): SEQ ID NO: 842; WAN024CJJ; Start 262; Stop 286
gtatctattctcttaacgtgcgtgc

SEQ ID NO: 275162 - DNA, 25 bp, Artificial
  probe
  misc_feature (1)..(25): SEQ ID NO: 842; WAN024CJJ; Start 330; Stop 354
agaatttcgtgagaagtacatgagg

SEQ ID NO: 275163 - DNA, 25 bp, Artificial
  probe
  misc_feature (1)..(25): SEQ ID NO: 842; WAN024CJJ; Start 263; Stop 287
tatctattctcttaacgtgcgtgca

SEQ ID NO: 275164 - DNA, 25 bp, Artificial
  probe
  misc_feature (1)..(25): SEQ ID NO: 842; WAN024CJJ; Start 329; Stop 353
aagaatttcgtgagaagtacatgag

SEQ ID NO: 275165 - DNA, 25 bp, Artificial
  probe
  misc_feature (1)..(25): SEQ ID NO: 842; WAN024CJJ; Start 256; Stop 280
gagcatgtatctattctcttaacgt

SEQ ID NO: 275166 - DNA, 25 bp, Artificial
  probe
  misc_feature (1)..(25): SEQ ID NO: 842; WAN024CJJ; Start 248; Stop 272
tcacccaagagcatgtatctattct

SEQ ID NO: 275167 - DNA, 25 bp, Artificial
  probe
  misc_feature (1)..(25): SEQ ID NO: 842; WAN024CJJ; Start 247; Stop 271
gtcacccaagagcatgtatctattc

SEQ ID NO: 275168 - DNA, 25 bp, Artificial
  probe
  misc_feature (1)..(25): SEQ ID NO: 842; WAN024CJJ; Start 328; Stop 352
aaagaatttcgtgagaagtacatga

SEQ ID NO: 275169 - DNA, 25 bp, Artificial
  probe
  misc_feature (1)..(25): SEQ ID NO: 842; WAN024CJJ; Start 246; Stop 270
agtcacccaagagcatgtatctatt

SEQ ID NO: 275170 - DNA, 25 bp, Artificial
  probe
  misc_feature (1)..(25): SEQ ID NO: 842; WAN024CJJ; Start 245; Stop 269
aagtcacccaagagcatgtatctat

SEQ ID NO: 275171 - DNA, 25 bp, Artificial
  probe
  misc_feature (1)..(25): SEQ ID NO: 842; WAN024CJJ; Start 249; Stop 273
cacccaagagcatgtatctattctc

SEQ ID NO: 275172 - DNA, 25 bp, Artificial
  probe
  misc_feature (1)..(25): SEQ ID NO: 842; WAN024CJJ; Start 336; Stop 360
tcgtgagaagtacatgaggctaact

SEQ ID NO: 275173 - DNA, 25 bp, Artificial
  probe
  misc_feature (1)..(25): SEQ ID NO: 842; WAN024CJJ; Start 333; Stop 357
atttcgtgagaagtacatgaggcta

SEQ ID NO: 275174 - DNA, 25 bp, Artificial
  probe
  misc_feature (1)..(25): SEQ ID NO: 842; WAN024CJJ; Start 325; Stop 349
agtaaagaatttcgtgagaagtaca

SEQ ID NO: 275175 - DNA, 25 bp, Artificial
  probe
  misc_feature (1)..(25): SEQ ID NO: 842; WAN024CJJ; Start 323; Stop 347
tcagtaaagaatttcgtgagaagta

SEQ ID NO: 275176 - DNA, 25 bp, Artificial
  probe
  misc_feature (1)..(25): SEQ ID NO: 842; WAN024CJJ; Start 184; Stop 208
aaactagaacaaatcagtcgtgacg

SEQ ID NO: 275177 - DNA, 25 bp, Artificial
  probe
  misc_feature (1)..(25): SEQ ID NO: 842; WAN024CJJ; Start 334; Stop 358
tttcgtgagaagtacatgaggctaa

SEQ ID NO: 275178 - DNA, 25 bp, Artificial
  probe
  misc_feature (1)..(25): SEQ ID NO: 842; WAN024CJJ; Start 11; Stop 35
atgtgcgtgatattcggaaacaatt

SEQ ID NO: 275179 - DNA, 25 bp, Artificial
  probe
  misc_feature (1)..(25): SEQ ID NO: 842; WAN024CJJ; Start 324; Stop 348
cagtaaagaatttcgtgagaagtac

SEQ ID NO: 275180 - DNA, 25 bp, Artificial
  probe
  misc_feature (1)..(25): SEQ ID NO: 842; WAN024CJJ; Start 283; Stop 307
gtgcaggaattgattcaagaggttg

SEQ ID NO: 275181 - DNA, 25 bp, Artificial
  probe
  misc_feature (1)..(25): SEQ ID NO: 843; WAN024FQ9; Start 723; Stop 747
ggaatcgttatattcatcttcaccg

SEQ ID NO: 275182 - DNA, 25 bp, Artificial
  probe
  misc_feature (1)..(25): SEQ ID NO: 843; WAN024FQ9; Start 722; Stop 746
tggaatcgttatattcatcttcacc

SEQ ID NO: 275183 - DNA, 25 bp, Artificial
  probe
  misc_feature (1)..(25): SEQ ID NO: 843; WAN024FQ9; Start 499; Stop 523
gcatattaccgtaagctagagatta

SEQ ID NO: 275184 - DNA, 25 bp, Artificial
  probe
  misc_feature (1)..(25): SEQ ID NO: 843; WAN024FQ9; Start 40; Stop 64
gcacataataagtttgaacagttga

SEQ ID NO: 275185 - DNA, 25 bp, Artificial
  probe
  misc_feature (1)..(25): SEQ ID NO: 843; WAN024FQ9; Start 724; Stop 748
gaatcgttatattcatcttcaccga

SEQ ID NO: 275186 - DNA, 25 bp, Artificial
  probe
  misc_feature (1)..(25): SEQ ID NO: 843; WAN024FQ9; Start 498; Stop 522
agcatattaccgtaagctagagatt

SEQ ID NO: 275187 - DNA, 25 bp, Artificial
  probe
  misc_feature (1)..(25): SEQ ID NO: 843; WAN024FQ9; Start 721; Stop 745
atggaatcgttatattcatcttcac

SEQ ID NO: 275188 - DNA, 25 bp, Artificial
  probe
  misc_feature (1)..(25): SEQ ID NO: 843; WAN024FQ9; Start 39; Stop 63
tgcacataataagtttgaacagttg

SEQ ID NO: 275189 - DNA, 25 bp, Artificial
  probe
  misc_feature (1)..(25): SEQ ID NO: 843; WAN024FQ9; Start 490; Stop 514
aaatttgtagcatattaccgtaagc

SEQ ID NO: 275190 - DNA, 25 bp, Artificial
  probe
  misc_feature (1)..(25): SEQ ID NO: 843; WAN024FQ9; Start 829; Stop 853
tctgagcatgatatagaacaattga

SEQ ID NO: 275191 - DNA, 25 bp, Artificial
  probe
  misc_feature (1)..(25): SEQ ID NO: 843; WAN024FQ9; Start 77; Stop 101
ctctgttggattataaggaacatga

SEQ ID NO: 275192 - DNA, 25 bp, Artificial
  probe
  misc_feature (1)..(25): SEQ ID NO: 843; WAN024FQ9; Start 76; Stop 100
tctctgttggattataaggaacatg

SEQ ID NO: 275193 - DNA, 25 bp, Artificial
  probe
  misc_feature (1)..(25): SEQ ID NO: 843; WAN024FQ9; Start 38; Stop 62
ttgcacataataagtttgaacagtt

SEQ ID NO: 275194 - DNA, 25 bp, Artificial
  probe
  misc_feature (1)..(25): SEQ ID NO: 843; WAN024FQ9; Start 37; Stop 61
attgcacataataagtttgaacagt

SEQ ID NO: 275195 - DNA, 25 bp, Artificial
  probe
  misc_feature (1)..(25): SEQ ID NO: 843; WAN024FQ9; Start 830; Stop 854
ctgagcatgatatagaacaattgaa

SEQ ID NO: 275196 - DNA, 25 bp, Artificial
  probe
  misc_feature (1)..(25): SEQ ID NO: 843; WAN024FQ9; Start 486; Stop 510
tcgtaaatttgtagcatattaccgt

SEQ ID NO: 275197 - DNA, 25 bp, Artificial
  probe
  misc_feature (1)..(25): SEQ ID NO: 843; WAN024FQ9; Start 78; Stop 102
tctgttggattataaggaacatgat

SEQ ID NO: 275198 - DNA, 25 bp, Artificial
  probe
  misc_feature (1)..(25): SEQ ID NO: 843; WAN024FQ9; Start 75; Stop 99
ttctctgttggattataaggaacat

SEQ ID NO: 275199 - DNA, 25 bp, Artificial
  probe
  misc_feature (1)..(25): SEQ ID NO: 843; WAN024FQ9; Start 41; Stop 65
cacataataagtttgaacagttgaa

SEQ ID NO: 275200 - DNA, 25 bp, Artificial
  probe
  misc_feature (1)..(25): SEQ ID NO: 843; WAN024FQ9; Start 495; Stop 519
tgtagcatattaccgtaagctagag

SEQ ID NO: 275201 - DNA, 25 bp, Artificial
  probe
  misc_feature (1)..(25): SEQ ID NO: 843; WAN024FQ9; Start 496; Stop 520
gtagcatattaccgtaagctagaga

SEQ ID NO: 275202 - DNA, 25 bp, Artificial
  probe
  misc_feature (1)..(25): SEQ ID NO: 843; WAN024FQ9; Start 494; Stop 518
ttgtagcatattaccgtaagctaga

SEQ ID NO: 275203 - DNA, 25 bp, Artificial
  probe
  misc_feature (1)..(25): SEQ ID NO: 843; WAN024FQ9; Start 500; Stop 524
catattaccgtaagctagagattaa

SEQ ID NO: 275204 - DNA, 25 bp, Artificial
  probe
  misc_feature (1)..(25): SEQ ID NO: 843; WAN024FQ9; Start 73; Stop 97
atttctctgttggattataaggaac

SEQ ID NO: 275205 - DNA, 25 bp, Artificial
  probe
  misc_feature (1)..(25): SEQ ID NO: 843; WAN024FQ9; Start 491; Stop 515
aatttgtagcatattaccgtaagct

SEQ ID NO: 275206 - DNA, 25 bp, Artificial
  probe
  misc_feature (1)..(25): SEQ ID NO: 843; WAN024FQ9; Start 720; Stop 744
gatggaatcgttatattcatcttca

SEQ ID NO: 275207 - DNA, 25 bp, Artificial
  probe
  misc_feature (1)..(25): SEQ ID NO: 843; WAN024FQ9; Start 719; Stop 743
tgatggaatcgttatattcatcttc

SEQ ID NO: 275208 - DNA, 25 bp, Artificial
  probe
  misc_feature (1)..(25): SEQ ID NO: 843; WAN024FQ9; Start 497; Stop 521
tagcatattaccgtaagctagagat

SEQ ID NO: 275209 - DNA, 25 bp, Artificial
  probe
  misc_feature (1)..(25): SEQ ID NO: 843; WAN024FQ9; Start 485; Stop 509
ttcgtaaatttgtagcatattaccg

SEQ ID NO: 275210 - DNA, 25 bp, Artificial
  probe
  misc_feature (1)..(25): SEQ ID NO: 843; WAN024FQ9; Start 36; Stop 60
aattgcacataataagtttgaacag

SEQ ID NO: 275211 - DNA, 25 bp, Artificial
  probe
  misc_feature (1)..(25): SEQ ID NO: 843; WAN024FQ9; Start 487; Stop 511
cgtaaatttgtagcatattaccgta

SEQ ID NO: 275212 - DNA, 25 bp, Artificial
  probe
  misc_feature (1)..(25): SEQ ID NO: 843; WAN024FQ9; Start 783; Stop 807
aagatatatcaattggtgggatgga

SEQ ID NO: 275213 - DNA, 25 bp, Artificial
  probe
  misc_feature (1)..(25): SEQ ID NO: 843; WAN024FQ9; Start 718; Stop 742
ttgatggaatcgttatattcatctt

SEQ ID NO: 275214 - DNA, 25 bp, Artificial
  probe
  misc_feature (1)..(25): SEQ ID NO: 844; WAN024CYV; Start 76; Stop 100
ttcaaaggcgatttcttctataact

SEQ ID NO: 275215 - DNA, 25 bp, Artificial
  probe
  misc_feature (1)..(25): SEQ ID NO: 844; WAN024CYV; Start 75; Stop 99
cttcaaaggcgatttcttctataac

SEQ ID NO: 275216 - DNA, 25 bp, Artificial
  probe
  misc_feature (1)..(25): SEQ ID NO: 844; WAN024CYV; Start 152; Stop 176
cttacataacggaaattgtcttgcc

SEQ ID NO: 275217 - DNA, 25 bp, Artificial
  probe
  misc_feature (1)..(25): SEQ ID NO: 844; WAN024CYV; Start 150; Stop 174
ggcttacataacggaaattgtcttg

SEQ ID NO: 275218 - DNA, 25 bp, Artificial
  probe
  misc_feature (1)..(25): SEQ ID NO: 844; WAN024CYV; Start 153; Stop 177
ttacataacggaaattgtcttgcct

SEQ ID NO: 275219 - DNA, 25 bp, Artificial
  probe
  misc_feature (1)..(25): SEQ ID NO: 844; WAN024CYV; Start 151; Stop 175
gcttacataacggaaattgtcttgc

SEQ ID NO: 275220 - DNA, 25 bp, Artificial
  probe
  misc_feature (1)..(25): SEQ ID NO: 844; WAN024CYV; Start 154; Stop 178
tacataacggaaattgtcttgcctc

SEQ ID NO: 275221 - DNA, 25 bp, Artificial
  probe
  misc_feature (1)..(25): SEQ ID NO: 844; WAN024CYV; Start 77; Stop 101
tcaaaggcgatttcttctataacta

SEQ ID NO: 275222 - DNA, 25 bp, Artificial
  probe
  misc_feature (1)..(25): SEQ ID NO: 844; WAN024CYV; Start 149; Stop 173
cggcttacataacggaaattgtctt

SEQ ID NO: 275223 - DNA, 25 bp, Artificial
  probe
  misc_feature (1)..(25): SEQ ID NO: 844; WAN024CYV; Start 80; Stop 104
aaggcgatttcttctataactatct

SEQ ID NO: 275224 - DNA, 25 bp, Artificial
  probe
  misc_feature (1)..(25): SEQ ID NO: 844; WAN024CYV; Start 74; Stop 98
ccttcaaaggcgatttcttctataa

SEQ ID NO: 275225 - DNA, 25 bp, Artificial
  probe
  misc_feature (1)..(25): SEQ ID NO: 844; WAN024CYV; Start 78; Stop 102
caaaggcgatttcttctataactat

SEQ ID NO: 275226 - DNA, 25 bp, Artificial
  probe
  misc_feature (1)..(25): SEQ ID NO: 844; WAN024CYV; Start 83; Stop 107
gcgatttcttctataactatctagc

SEQ ID NO: 275227 - DNA, 25 bp, Artificial
  probe
  misc_feature (1)..(25): SEQ ID NO: 844; WAN024CYV; Start 147; Stop 171
gacggcttacataacggaaattgtc

SEQ ID NO: 275228 - DNA, 25 bp, Artificial
  probe
  misc_feature (1)..(25): SEQ ID NO: 844; WAN024CYV; Start 79; Stop 103
aaaggcgatttcttctataactatc

SEQ ID NO: 275229 - DNA, 25 bp, Artificial
  probe
  misc_feature (1)..(25): SEQ ID NO: 844; WAN024CYV; Start 81; Stop 105
aggcgatttcttctataactatcta

SEQ ID NO: 275230 - DNA, 25 bp, Artificial
  probe
  misc_feature (1)..(25): SEQ ID NO: 844; WAN024CYV; Start 148; Stop 172
acggcttacataacggaaattgtct

SEQ ID NO: 275231 - DNA, 25 bp, Artificial
  probe
  misc_feature (1)..(25): SEQ ID NO: 844; WAN024CYV; Start 13; Stop 37
attttattagcagtgattcaggcag

SEQ ID NO: 275232 - DNA, 25 bp, Artificial
  probe
  misc_feature (1)..(25): SEQ ID NO: 844; WAN024CYV; Start 14; Stop 38
ttttattagcagtgattcaggcagt

SEQ ID NO: 275233 - DNA, 25 bp, Artificial
  probe
  misc_feature (1)..(25): SEQ ID NO: 844; WAN024CYV; Start 12; Stop 36
aattttattagcagtgattcaggca

SEQ ID NO: 275234 - DNA, 25 bp, Artificial
  probe
  misc_feature (1)..(25): SEQ ID NO: 844; WAN024CYV; Start 95; Stop 119
ataactatctagcagttgtctttgc

SEQ ID NO: 275235 - DNA, 25 bp, Artificial
  probe
  misc_feature (1)..(25): SEQ ID NO: 844; WAN024CYV; Start 82; Stop 106
ggcgatttcttctataactatctag

SEQ ID NO: 275236 - DNA, 25 bp, Artificial
  probe
  misc_feature (1)..(25): SEQ ID NO: 844; WAN024CYV; Start 157; Stop 181
ataacggaaattgtcttgcctcgaa

SEQ ID NO: 275237 - DNA, 25 bp, Artificial
  probe
  misc_feature (1)..(25): SEQ ID NO: 844; WAN024CYV; Start 158; Stop 182
taacggaaattgtcttgcctcgaaa

SEQ ID NO: 275238 - DNA, 25 bp, Artificial
  probe
  misc_feature (1)..(25): SEQ ID NO: 844; WAN024CYV; Start 146; Stop 170
ggacggcttacataacggaaattgt

SEQ ID NO: 275239 - DNA, 25 bp, Artificial
  probe
  misc_feature (1)..(25): SEQ ID NO: 844; WAN024CYV; Start 92; Stop 116
tctataactatctagcagttgtctt

SEQ ID NO: 275240 - DNA, 25 bp, Artificial
  probe
  misc_feature (1)..(25): SEQ ID NO: 844; WAN024CYV; Start 91; Stop 115
ttctataactatctagcagttgtct

SEQ ID NO: 275241 - DNA, 25 bp, Artificial
  probe
  misc_feature (1)..(25): SEQ ID NO: 844; WAN024CYV; Start 89; Stop 113
tcttctataactatctagcagttgt

SEQ ID NO: 275242 - DNA, 25 bp, Artificial
  probe
  misc_feature (1)..(25): SEQ ID NO: 844; WAN024CYV; Start 90; Stop 114
cttctataactatctagcagttgtc

SEQ ID NO: 275243 - DNA, 25 bp, Artificial
  probe
  misc_feature (1)..(25): SEQ ID NO: 844; WAN024CYV; Start 155; Stop 179
acataacggaaattgtcttgcctcg

SEQ ID NO: 275244 - DNA, 25 bp, Artificial
  probe
  misc_feature (1)..(25): SEQ ID NO: 844; WAN024CYV; Start 11; Stop 35
taattttattagcagtgattcaggc

SEQ ID NO: 275245 - DNA, 25 bp, Artificial
  probe
  misc_feature (1)..(25): SEQ ID NO: 844; WAN024CYV; Start 145; Stop 169
gggacggcttacataacggaaattg

SEQ ID NO: 275246 - DNA, 25 bp, Artificial
  probe
  misc_feature (1)..(25): SEQ ID NO: 844; WAN024CYV; Start 84; Stop 108
cgatttcttctataactatctagca

SEQ ID NO: 275247 - DNA, 25 bp, Artificial
  probe
  misc_feature (1)..(25): SEQ ID NO: 845; WAN024DYT; Start 807; Stop 831
gcatattgttgagcatcttcttacc

SEQ ID NO: 275248 - DNA, 25 bp, Artificial
  probe
  misc_feature (1)..(25): SEQ ID NO: 845; WAN024DYT; Start 813; Stop 837
tgttgagcatcttcttaccttatct

SEQ ID NO: 275249 - DNA, 25 bp, Artificial
  probe
  misc_feature (1)..(25): SEQ ID NO: 845; WAN024DYT; Start 806; Stop 830
agcatattgttgagcatcttcttac

SEQ ID NO: 275250 - DNA, 25 bp, Artificial
  probe
  misc_feature (1)..(25): SEQ ID NO: 845; WAN024DYT; Start 371; Stop 395
aaggtcagatgttattatccagtcg

SEQ ID NO: 275251 - DNA, 25 bp, Artificial
  probe
  misc_feature (1)..(25): SEQ ID NO: 845; WAN024DYT; Start 185; Stop 209
aacctctcttgaccagtagtgaata

SEQ ID NO: 275252 - DNA, 25 bp, Artificial
  probe
  misc_feature (1)..(25): SEQ ID NO: 845; WAN024DYT; Start 802; Stop 826
cttgagcatattgttgagcatcttc

SEQ ID NO: 275253 - DNA, 25 bp, Artificial
  probe
  misc_feature (1)..(25): SEQ ID NO: 845; WAN024DYT; Start 367; Stop 391
gctcaaggtcagatgttattatcca

SEQ ID NO: 275254 - DNA, 25 bp, Artificial
  probe
  misc_feature (1)..(25): SEQ ID NO: 845; WAN024DYT; Start 805; Stop 829
gagcatattgttgagcatcttctta

SEQ ID NO: 275255 - DNA, 25 bp, Artificial
  probe
  misc_feature (1)..(25): SEQ ID NO: 845; WAN024DYT; Start 804; Stop 828
tgagcatattgttgagcatcttctt

SEQ ID NO: 275256 - DNA, 25 bp, Artificial
  probe
  misc_feature (1)..(25): SEQ ID NO: 845; WAN024DYT; Start 803; Stop 827
ttgagcatattgttgagcatcttct

SEQ ID NO: 275257 - DNA, 25 bp, Artificial
  probe
  misc_feature (1)..(25): SEQ ID NO: 845; WAN024DYT; Start 801; Stop 825
tcttgagcatattgttgagcatctt

SEQ ID NO: 275258 - DNA, 25 bp, Artificial
  probe
  misc_feature (1)..(25): SEQ ID NO: 845; WAN024DYT; Start 369; Stop 393
tcaaggtcagatgttattatccagt

SEQ ID NO: 275259 - DNA, 25 bp, Artificial
  probe
  misc_feature (1)..(25): SEQ ID NO: 845; WAN024DYT; Start 1227; Stop 1251
agaactcagtcaattattaggtggc

SEQ ID NO: 275260 - DNA, 25 bp, Artificial
  probe
  misc_feature (1)..(25): SEQ ID NO: 845; WAN024DYT; Start 812; Stop 836
ttgttgagcatcttcttaccttatc

SEQ ID NO: 275261 - DNA, 25 bp, Artificial
  probe
  misc_feature (1)..(25): SEQ ID NO: 845; WAN024DYT; Start 808; Stop 832
catattgttgagcatcttcttacct

SEQ ID NO: 275262 - DNA, 25 bp, Artificial
  probe
  misc_feature (1)..(25): SEQ ID NO: 845; WAN024DYT; Start 370; Stop 394
caaggtcagatgttattatccagtc

SEQ ID NO: 275263 - DNA, 25 bp, Artificial
  probe
  misc_feature (1)..(25): SEQ ID NO: 845; WAN024DYT; Start 374; Stop 398
gtcagatgttattatccagtcgctc

SEQ ID NO: 275264 - DNA, 25 bp, Artificial
  probe
  misc_feature (1)..(25): SEQ ID NO: 845; WAN024DYT; Start 186; Stop 210
acctctcttgaccagtagtgaatac

SEQ ID NO: 275265 - DNA, 25 bp, Artificial
  probe
  misc_feature (1)..(25): SEQ ID NO: 845; WAN024DYT; Start 1119; Stop 1143
tggtattagtcaattagagcaggat

SEQ ID NO: 275266 - DNA, 25 bp, Artificial
  probe
  misc_feature (1)..(25): SEQ ID NO: 845; WAN024DYT; Start 368; Stop 392
ctcaaggtcagatgttattatccag

SEQ ID NO: 275267 - DNA, 25 bp, Artificial
  probe
  misc_feature (1)..(25): SEQ ID NO: 845; WAN024DYT; Start 680; Stop 704
atgaattgaggacaccagttacttc

SEQ ID NO: 275268 - DNA, 25 bp, Artificial
  probe
  misc_feature (1)..(25): SEQ ID NO: 845; WAN024DYT; Start 366; Stop 390
cgctcaaggtcagatgttattatcc

SEQ ID NO: 275269 - DNA, 25 bp, Artificial
  probe
  misc_feature (1)..(25): SEQ ID NO: 845; WAN024DYT; Start 365; Stop 389
ccgctcaaggtcagatgttattatc

SEQ ID NO: 275270 - DNA, 25 bp, Artificial
  probe
  misc_feature (1)..(25): SEQ ID NO: 845; WAN024DYT; Start 800; Stop 824
gtcttgagcatattgttgagcatct

SEQ ID NO: 275271 - DNA, 25 bp, Artificial
  probe
  misc_feature (1)..(25): SEQ ID NO: 845; WAN024DYT; Start 377; Stop 401
agatgttattatccagtcgctctct

SEQ ID NO: 275272 - DNA, 25 bp, Artificial
  probe
  misc_feature (1)..(25): SEQ ID NO: 845; WAN024DYT; Start 376; Stop 400
cagatgttattatccagtcgctctc

SEQ ID NO: 275273 - DNA, 25 bp, Artificial
  probe
  misc_feature (1)..(25): SEQ ID NO: 845; WAN024DYT; Start 375; Stop 399
tcagatgttattatccagtcgctct

SEQ ID NO: 275274 - DNA, 25 bp, Artificial
  probe
  misc_feature (1)..(25): SEQ ID NO: 845; WAN024DYT; Start 364; Stop 388
tccgctcaaggtcagatgttattat

SEQ ID NO: 275275 - DNA, 25 bp, Artificial
  probe
  misc_feature (1)..(25): SEQ ID NO: 845; WAN024DYT; Start 1118; Stop 1142
ttggtattagtcaattagagcagga

SEQ ID NO: 275276 - DNA, 25 bp, Artificial
  probe
  misc_feature (1)..(25): SEQ ID NO: 845; WAN024DYT; Start 1226; Stop 1250
aagaactcagtcaattattaggtgg

SEQ ID NO: 275277 - DNA, 25 bp, Artificial
  probe
  misc_feature (1)..(25): SEQ ID NO: 845; WAN024DYT; Start 811; Stop 835
attgttgagcatcttcttaccttat

SEQ ID NO: 275278 - DNA, 25 bp, Artificial
  probe
  misc_feature (1)..(25): SEQ ID NO: 845; WAN024DYT; Start 363; Stop 387
ttccgctcaaggtcagatgttatta

SEQ ID NO: 275279 - DNA, 25 bp, Artificial
  probe
  misc_feature (1)..(25): SEQ ID NO: 845; WAN024DYT; Start 1125; Stop 1149
tagtcaattagagcaggatcgtatt

SEQ ID NO: 275280 - DNA, 25 bp, Artificial
  probe
  misc_feature (1)..(25): SEQ ID NO: 846; WAN024FRH; Start 599; Stop 623
aatctcttgtcattggtatggtagg

SEQ ID NO: 275281 - DNA, 25 bp, Artificial
  probe
  misc_feature (1)..(25): SEQ ID NO: 846; WAN024FRH; Start 804; Stop 828
tgactattatgagcatacgactgag

SEQ ID NO: 275282 - DNA, 25 bp, Artificial
  probe
  misc_feature (1)..(25): SEQ ID NO: 846; WAN024FRH; Start 803; Stop 827
ttgactattatgagcatacgactga

SEQ ID NO: 275283 - DNA, 25 bp, Artificial
  probe
  misc_feature (1)..(25): SEQ ID NO: 846; WAN024FRH; Start 315; Stop 339
cgttctggaaggaatctatctcaag

SEQ ID NO: 275284 - DNA, 25 bp, Artificial
  probe
  misc_feature (1)..(25): SEQ ID NO: 846; WAN024FRH; Start 316; Stop 340
gttctggaaggaatctatctcaaga

SEQ ID NO: 275285 - DNA, 25 bp, Artificial
  probe
  misc_feature (1)..(25): SEQ ID NO: 846; WAN024FRH; Start 798; Stop 822
acgaattgactattatgagcatacg

SEQ ID NO: 275286 - DNA, 25 bp, Artificial
  probe
  misc_feature (1)..(25): SEQ ID NO: 846; WAN024FRH; Start 598; Stop 622
gaatctcttgtcattggtatggtag

SEQ ID NO: 275287 - DNA, 25 bp, Artificial
  probe
  misc_feature (1)..(25): SEQ ID NO: 846; WAN024FRH; Start 597; Stop 621
agaatctcttgtcattggtatggta

SEQ ID NO: 275288 - DNA, 25 bp, Artificial
  probe
  misc_feature (1)..(25): SEQ ID NO: 846; WAN024FRH; Start 805; Stop 829
gactattatgagcatacgactgagc

SEQ ID NO: 275289 - DNA, 25 bp, Artificial
  probe
  misc_feature (1)..(25): SEQ ID NO: 846; WAN024FRH; Start 799; Stop 823
cgaattgactattatgagcatacga

SEQ ID NO: 275290 - DNA, 25 bp, Artificial
  probe
  misc_feature (1)..(25): SEQ ID NO: 846; WAN024FRH; Start 317; Stop 341
ttctggaaggaatctatctcaagag

SEQ ID NO: 275291 - DNA, 25 bp, Artificial
  probe
  misc_feature (1)..(25): SEQ ID NO: 846; WAN024FRH; Start 802; Stop 826
attgactattatgagcatacgactg

SEQ ID NO: 275292 - DNA, 25 bp, Artificial
  probe
  misc_feature (1)..(25): SEQ ID NO: 846; WAN024FRH; Start 1012; Stop 1036
tctaaggctattcaagaattggctg

SEQ ID NO: 275293 - DNA, 25 bp, Artificial
  probe
  misc_feature (1)..(25): SEQ ID NO: 846; WAN024FRH; Start 1011; Stop 1035
gtctaaggctattcaagaattggct

SEQ ID NO: 275294 - DNA, 25 bp, Artificial
  probe
  misc_feature (1)..(25): SEQ ID NO: 846; WAN024FRH; Start 1009; Stop 1033
ttgtctaaggctattcaagaattgg

SEQ ID NO: 275295 - DNA, 25 bp, Artificial
  probe
  misc_feature (1)..(25): SEQ ID NO: 846; WAN024FRH; Start 1013; Stop 1037
ctaaggctattcaagaattggctga

SEQ ID NO: 275296 - DNA, 25 bp, Artificial
  probe
  misc_feature (1)..(25): SEQ ID NO: 846; WAN024FRH; Start 1010; Stop 1034
tgtctaaggctattcaagaattggc

SEQ ID NO: 275297 - DNA, 25 bp, Artificial
  probe
  misc_feature (1)..(25): SEQ ID NO: 846; WAN024FRH; Start 520; Stop 544
gtatataacggagtggacaatgctg

SEQ ID NO: 275298 - DNA, 25 bp, Artificial
  probe
  misc_feature (1)..(25): SEQ ID NO: 846; WAN024FRH; Start 314; Stop 338
ccgttctggaaggaatctatctcaa

SEQ ID NO: 275299 - DNA, 25 bp, Artificial
  probe
  misc_feature (1)..(25): SEQ ID NO: 846; WAN024FRH; Start 1014; Stop 1038
taaggctattcaagaattggctgac

SEQ ID NO: 275300 - DNA, 25 bp, Artificial
  probe
  misc_feature (1)..(25): SEQ ID NO: 846; WAN024FRH; Start 318; Stop 342
tctggaaggaatctatctcaagaga

SEQ ID NO: 275301 - DNA, 25 bp, Artificial
  probe
  misc_feature (1)..(25): SEQ ID NO: 846; WAN024FRH; Start 319; Stop 343
ctggaaggaatctatctcaagagaa

SEQ ID NO: 275302 - DNA, 25 bp, Artificial
  probe
  misc_feature (1)..(25): SEQ ID NO: 846; WAN024FRH; Start 801; Stop 825
aattgactattatgagcatacgact

SEQ ID NO: 275303 - DNA, 25 bp, Artificial
  probe
  misc_feature (1)..(25): SEQ ID NO: 846; WAN024FRH; Start 600; Stop 624
atctcttgtcattggtatggtaggc

SEQ ID NO: 275304 - DNA, 25 bp, Artificial
  probe
  misc_feature (1)..(25): SEQ ID NO: 846; WAN024FRH; Start 800; Stop 824
gaattgactattatgagcatacgac

SEQ ID NO: 275305 - DNA, 25 bp, Artificial
  probe
  misc_feature (1)..(25): SEQ ID NO: 846; WAN024FRH; Start 1003; Stop 1027
gcagaattgtctaaggctattcaag

SEQ ID NO: 275306 - DNA, 25 bp, Artificial
  probe
  misc_feature (1)..(25): SEQ ID NO: 846; WAN024FRH; Start 521; Stop 545
tatataacggagtggacaatgctgt

SEQ ID NO: 275307 - DNA, 25 bp, Artificial
  probe
  misc_feature (1)..(25): SEQ ID NO: 846; WAN024FRH; Start 519; Stop 543
tgtatataacggagtggacaatgct

SEQ ID NO: 275308 - DNA, 25 bp, Artificial
  probe
  misc_feature (1)..(25): SEQ ID NO: 846; WAN024FRH; Start 797; Stop 821
aacgaattgactattatgagcatac

SEQ ID NO: 275309 - DNA, 25 bp, Artificial
  probe
  misc_feature (1)..(25): SEQ ID NO: 846; WAN024FRH; Start 514; Stop 538
caggttgtatataacggagtggaca

SEQ ID NO: 275310 - DNA, 25 bp, Artificial
  probe
  misc_feature (1)..(25): SEQ ID NO: 846; WAN024FRH; Start 513; Stop 537
acaggttgtatataacggagtggac

SEQ ID NO: 275311 - DNA, 25 bp, Artificial
  probe
  misc_feature (1)..(25): SEQ ID NO: 846; WAN024FRH; Start 938; Stop 962
atggtggtgtctgtgaaatgattaa

SEQ ID NO: 275312 - DNA, 25 bp, Artificial
  probe
  misc_feature (1)..(25): SEQ ID NO: 846; WAN024FRH; Start 942; Stop 966
tggtgtctgtgaaatgattaaggag

SEQ ID NO: 275313 - DNA, 25 bp, Artificial
  probe
  misc_feature (1)..(25): SEQ ID NO: 847; WAN024FRG; Start 1071; Stop 1095
atcagtaagaagacaaggagaatcg

SEQ ID NO: 275314 - DNA, 25 bp, Artificial
  probe
  misc_feature (1)..(25): SEQ ID NO: 847; WAN024FRG; Start 1073; Stop 1097
cagtaagaagacaaggagaatcgtt

SEQ ID NO: 275315 - DNA, 25 bp, Artificial
  probe
  misc_feature (1)..(25): SEQ ID NO: 847; WAN024FRG; Start 1069; Stop 1093
gcatcagtaagaagacaaggagaat

SEQ ID NO: 275316 - DNA, 25 bp, Artificial
  probe
  misc_feature (1)..(25): SEQ ID NO: 847; WAN024FRG; Start 518; Stop 542
ttatctataacggagtggacaatgc

SEQ ID NO: 275317 - DNA, 25 bp, Artificial
  probe
  misc_feature (1)..(25): SEQ ID NO: 847; WAN024FRG; Start 1070; Stop 1094
catcagtaagaagacaaggagaatc

SEQ ID NO: 275318 - DNA, 25 bp, Artificial
  probe
  misc_feature (1)..(25): SEQ ID NO: 847; WAN024FRG; Start 1072; Stop 1096
tcagtaagaagacaaggagaatcgt

SEQ ID NO: 275319 - DNA, 25 bp, Artificial
  probe
  misc_feature (1)..(25): SEQ ID NO: 847; WAN024FRG; Start 314; Stop 338
ctgtcttggaaggaatctatctcaa

SEQ ID NO: 275320 - DNA, 25 bp, Artificial
  probe
  misc_feature (1)..(25): SEQ ID NO: 847; WAN024FRG; Start 1068; Stop 1092
agcatcagtaagaagacaaggagaa

SEQ ID NO: 275321 - DNA, 25 bp, Artificial
  probe
  misc_feature (1)..(25): SEQ ID NO: 847; WAN024FRG; Start 1067; Stop 1091
aagcatcagtaagaagacaaggaga

SEQ ID NO: 275322 - DNA, 25 bp, Artificial
  probe
  misc_feature (1)..(25): SEQ ID NO: 847; WAN024FRG; Start 1066; Stop 1090
caagcatcagtaagaagacaaggag

SEQ ID NO: 275323 - DNA, 25 bp, Artificial
  probe
  misc_feature (1)..(25): SEQ ID NO: 847; WAN024FRG; Start 103; Stop 127
catattatcctgcctaatgacggtg

SEQ ID NO: 275324 - DNA, 25 bp, Artificial
  probe
  misc_feature (1)..(25): SEQ ID NO: 847; WAN024FRG; Start 436; Stop 460
gcagataagattgtaacagtctctc

SEQ ID NO: 275325 - DNA, 25 bp, Artificial
  probe
  misc_feature (1)..(25): SEQ ID NO: 847; WAN024FRG; Start 994; Stop 1018
ggacaatcacaagaactatcggatg

SEQ ID NO: 275326 - DNA, 25 bp, Artificial
  probe
  misc_feature (1)..(25): SEQ ID NO: 847; WAN024FRG; Start 993; Stop 1017
aggacaatcacaagaactatcggat

SEQ ID NO: 275327 - DNA, 25 bp, Artificial
  probe
  misc_feature (1)..(25): SEQ ID NO: 847; WAN024FRG; Start 104; Stop 128
atattatcctgcctaatgacggtgt

SEQ ID NO: 275328 - DNA, 25 bp, Artificial
  probe
  misc_feature (1)..(25): SEQ ID NO: 847; WAN024FRG; Start 313; Stop 337
gctgtcttggaaggaatctatctca

SEQ ID NO: 275329 - DNA, 25 bp, Artificial
  probe
  misc_feature (1)..(25): SEQ ID NO: 847; WAN024FRG; Start 733; Stop 757
gaagagtggcgagttgaagaattag

SEQ ID NO: 275330 - DNA, 25 bp, Artificial
  probe
  misc_feature (1)..(25): SEQ ID NO: 847; WAN024FRG; Start 105; Stop 129
tattatcctgcctaatgacggtgtt

SEQ ID NO: 275331 - DNA, 25 bp, Artificial
  probe
  misc_feature (1)..(25): SEQ ID NO: 847; WAN024FRG; Start 739; Stop 763
tggcgagttgaagaattagagtcta

SEQ ID NO: 275332 - DNA, 25 bp, Artificial
  probe
  misc_feature (1)..(25): SEQ ID NO: 847; WAN024FRG; Start 440; Stop 464
ataagattgtaacagtctctcaagc

SEQ ID NO: 275333 - DNA, 25 bp, Artificial
  probe
  misc_feature (1)..(25): SEQ ID NO: 847; WAN024FRG; Start 995; Stop 1019
gacaatcacaagaactatcggatgc

SEQ ID NO: 275334 - DNA, 25 bp, Artificial
  probe
  misc_feature (1)..(25): SEQ ID NO: 847; WAN024FRG; Start 734; Stop 758
aagagtggcgagttgaagaattaga

SEQ ID NO: 275335 - DNA, 25 bp, Artificial
  probe
  misc_feature (1)..(25): SEQ ID NO: 847; WAN024FRG; Start 992; Stop 1016
caggacaatcacaagaactatcgga

SEQ ID NO: 275336 - DNA, 25 bp, Artificial
  probe
  misc_feature (1)..(25): SEQ ID NO: 847; WAN024FRG; Start 519; Stop 543
tatctataacggagtggacaatgcg

SEQ ID NO: 275337 - DNA, 25 bp, Artificial
  probe
  misc_feature (1)..(25): SEQ ID NO: 847; WAN024FRG; Start 732; Stop 756
tgaagagtggcgagttgaagaatta

SEQ ID NO: 275338 - DNA, 25 bp, Artificial
  probe
  misc_feature (1)..(25): SEQ ID NO: 847; WAN024FRG; Start 735; Stop 759
agagtggcgagttgaagaattagag

SEQ ID NO: 275339 - DNA, 25 bp, Artificial
  probe
  misc_feature (1)..(25): SEQ ID NO: 847; WAN024FRG; Start 437; Stop 461
cagataagattgtaacagtctctca

SEQ ID NO: 275340 - DNA, 25 bp, Artificial
  probe
  misc_feature (1)..(25): SEQ ID NO: 847; WAN024FRG; Start 1065; Stop 1089
ccaagcatcagtaagaagacaagga

SEQ ID NO: 275341 - DNA, 25 bp, Artificial
  probe
  misc_feature (1)..(25): SEQ ID NO: 847; WAN024FRG; Start 737; Stop 761
agtggcgagttgaagaattagagtc

SEQ ID NO: 275342 - DNA, 25 bp, Artificial
  probe
  misc_feature (1)..(25): SEQ ID NO: 847; WAN024FRG; Start 736; Stop 760
gagtggcgagttgaagaattagagt

SEQ ID NO: 275343 - DNA, 25 bp, Artificial
  probe
  misc_feature (1)..(25): SEQ ID NO: 847; WAN024FRG; Start 97; Stop 121
gaagctcatattatcctgcctaatg

SEQ ID NO: 275344 - DNA, 25 bp, Artificial
  probe
  misc_feature (1)..(25): SEQ ID NO: 847; WAN024FRG; Start 740; Stop 764
ggcgagttgaagaattagagtctaa

SEQ ID NO: 275345 - DNA, 25 bp, Artificial
  probe
  misc_feature (1)..(25): SEQ ID NO: 847; WAN024FRG; Start 441; Stop 465
taagattgtaacagtctctcaagct

SEQ ID NO: 275346 - DNA, 25 bp, Artificial
  probe
  misc_feature (1)..(25): SEQ ID NO: 848; WAN024EW3-5; Start 308; Stop 332
ttaacacagctaagacaacaccatt

SEQ ID NO: 275347 - DNA, 25 bp, Artificial
  probe
  misc_feature (1)..(25): SEQ ID NO: 848; WAN024EW3-5; Start 538; Stop 562
ttagtgccgtctcgtgttaataagg

SEQ ID NO: 275348 - DNA, 25 bp, Artificial
  probe
  misc_feature (1)..(25): SEQ ID NO: 848; WAN024EW3-5; Start 536; Stop 560
atttagtgccgtctcgtgttaataa

SEQ ID NO: 275349 - DNA, 25 bp, Artificial
  probe
  misc_feature (1)..(25): SEQ ID NO: 848; WAN024EW3-5; Start 534; Stop 558
ttatttagtgccgtctcgtgttaat

SEQ ID NO: 275350 - DNA, 25 bp, Artificial
  probe
  misc_feature (1)..(25): SEQ ID NO: 848; WAN024EW3-5; Start 533; Stop 557
attatttagtgccgtctcgtgttaa

SEQ ID NO: 275351 - DNA, 25 bp, Artificial
  probe
  misc_feature (1)..(25): SEQ ID NO: 848; WAN024EW3-5; Start 330; Stop 354
atttgagattaaggatggcattgag

SEQ ID NO: 275352 - DNA, 25 bp, Artificial
  probe
  misc_feature (1)..(25): SEQ ID NO: 848; WAN024EW3-5; Start 205; Stop 229
gaatttgttattgaggtgactggtc

SEQ ID NO: 275353 - DNA, 25 bp, Artificial
  probe
  misc_feature (1)..(25): SEQ ID NO: 848; WAN024EW3-5; Start 201; Stop 225
tagcgaatttgttattgaggtgact

SEQ ID NO: 275354 - DNA, 25 bp, Artificial
  probe
  misc_feature (1)..(25): SEQ ID NO: 848; WAN024EW3-5; Start 200; Stop 224
gtagcgaatttgttattgaggtgac

SEQ ID NO: 275355 - DNA, 25 bp, Artificial
  probe
  misc_feature (1)..(25): SEQ ID NO: 848; WAN024EW3-5; Start 532; Stop 556
gattatttagtgccgtctcgtgtta

SEQ ID NO: 275356 - DNA, 25 bp, Artificial
  probe
  misc_feature (1)..(25): SEQ ID NO: 848; WAN024EW3-5; Start 329; Stop 353
catttgagattaaggatggcattga

SEQ ID NO: 275357 - DNA, 25 bp, Artificial
  probe
  misc_feature (1)..(25): SEQ ID NO: 848; WAN024EW3-5; Start 34; Stop 58
gaggaacacatcggacaagaaataa

SEQ ID NO: 275358 - DNA, 25 bp, Artificial
  probe
  misc_feature (1)..(25): SEQ ID NO: 848; WAN024EW3-5; Start 535; Stop 559
tatttagtgccgtctcgtgttaata

SEQ ID NO: 275359 - DNA, 25 bp, Artificial
  probe
  misc_feature (1)..(25): SEQ ID NO: 848; WAN024EW3-5; Start 127; Stop 151
gaaggaatcatgcagttggttatca

SEQ ID NO: 275360 - DNA, 25 bp, Artificial
  probe
  misc_feature (1)..(25): SEQ ID NO: 848; WAN024EW3-5; Start 331; Stop 355
tttgagattaaggatggcattgagg

SEQ ID NO: 275361 - DNA, 25 bp, Artificial
  probe
  misc_feature (1)..(25): SEQ ID NO: 848; WAN024EW3-5; Start 38; Stop 62
aacacatcggacaagaaataacctt

SEQ ID NO: 275362 - DNA, 25 bp, Artificial
  probe
  misc_feature (1)..(25): SEQ ID NO: 848; WAN024EW3-5; Start 37; Stop 61
gaacacatcggacaagaaataacct

SEQ ID NO: 275363 - DNA, 25 bp, Artificial
  probe
  misc_feature (1)..(25): SEQ ID NO: 848; WAN024EW3-5; Start 35; Stop 59
aggaacacatcggacaagaaataac

SEQ ID NO: 275364 - DNA, 25 bp, Artificial
  probe
  misc_feature (1)..(25): SEQ ID NO: 848; WAN024EW3-5; Start 320; Stop 344
agacaacaccatttgagattaagga

SEQ ID NO: 275365 - DNA, 25 bp, Artificial
  probe
  misc_feature (1)..(25): SEQ ID NO: 848; WAN024EW3-5; Start 537; Stop 561
tttagtgccgtctcgtgttaataag

SEQ ID NO: 275366 - DNA, 25 bp, Artificial
  probe
  misc_feature (1)..(25): SEQ ID NO: 848; WAN024EW3-5; Start 128; Stop 152
aaggaatcatgcagttggttatcaa

SEQ ID NO: 275367 - DNA, 25 bp, Artificial
  probe
  misc_feature (1)..(25): SEQ ID NO: 848; WAN024EW3-5; Start 322; Stop 346
acaacaccatttgagattaaggatg

SEQ ID NO: 275368 - DNA, 25 bp, Artificial
  probe
  misc_feature (1)..(25): SEQ ID NO: 848; WAN024EW3-5; Start 319; Stop 343
aagacaacaccatttgagattaagg

SEQ ID NO: 275369 - DNA, 25 bp, Artificial
  probe
  misc_feature (1)..(25): SEQ ID NO: 848; WAN024EW3-5; Start 332; Stop 356
ttgagattaaggatggcattgaggc

SEQ ID NO: 275370 - DNA, 25 bp, Artificial
  probe
  misc_feature (1)..(25): SEQ ID NO: 848; WAN024EW3-5; Start 321; Stop 345
gacaacaccatttgagattaaggat

SEQ ID NO: 275371 - DNA, 25 bp, Artificial
  probe
  misc_feature (1)..(25): SEQ ID NO: 848; WAN024EW3-5; Start 316; Stop 340
gctaagacaacaccatttgagatta

SEQ ID NO: 275372 - DNA, 25 bp, Artificial
  probe
  misc_feature (1)..(25): SEQ ID NO: 848; WAN024EW3-5; Start 460; Stop 484
tacttggatgagttggagtttatcg

SEQ ID NO: 275373 - DNA, 25 bp, Artificial
  probe
  misc_feature (1)..(25): SEQ ID NO: 848; WAN024EW3-5; Start 458; Stop 482
actacttggatgagttggagtttat

SEQ ID NO: 275374 - DNA, 25 bp, Artificial
  probe
  misc_feature (1)..(25): SEQ ID NO: 848; WAN024EW3-5; Start 307; Stop 331
cttaacacagctaagacaacaccat

SEQ ID NO: 275375 - DNA, 25 bp, Artificial
  probe
  misc_feature (1)..(25): SEQ ID NO: 848; WAN024EW3-5; Start 204; Stop 228
cgaatttgttattgaggtgactggt

SEQ ID NO: 275376 - DNA, 25 bp, Artificial
  probe
  misc_feature (1)..(25): SEQ ID NO: 848; WAN024EW3-5; Start 8; Stop 32
gtagtatgtatgctggtcgtgttcg

SEQ ID NO: 275377 - DNA, 25 bp, Artificial
  probe
  misc_feature (1)..(25): SEQ ID NO: 848; WAN024EW3-5; Start 7; Stop 31
cgtagtatgtatgctggtcgtgttc

SEQ ID NO: 275378 - DNA, 25 bp, Artificial
  probe
  misc_feature (1)..(25): SEQ ID NO: 848; WAN024EW3-5; Start 126; Stop 150
tgaaggaatcatgcagttggttatc

SEQ ID NO: 275379 - DNA, 25 bp, Artificial
  probe
  misc_feature (1)..(25): SEQ ID NO: 849; WAN024G9Y; Start 278; Stop 302
gaattgaaggtgtagttgttatcgg

SEQ ID NO: 275380 - DNA, 25 bp, Artificial
  probe
  misc_feature (1)..(25): SEQ ID NO: 849; WAN024G9Y; Start 277; Stop 301
ggaattgaaggtgtagttgttatcg

SEQ ID NO: 275381 - DNA, 25 bp, Artificial
  probe
  misc_feature (1)..(25): SEQ ID NO: 849; WAN024G9Y; Start 276; Stop 300
cggaattgaaggtgtagttgttatc

SEQ ID NO: 275382 - DNA, 25 bp, Artificial
  probe
  misc_feature (1)..(25): SEQ ID NO: 849; WAN024G9Y; Start 279; Stop 303
aattgaaggtgtagttgttatcggt

SEQ ID NO: 275383 - DNA, 25 bp, Artificial
  probe
  misc_feature (1)..(25): SEQ ID NO: 849; WAN024G9Y; Start 275; Stop 299
acggaattgaaggtgtagttgttat

SEQ ID NO: 275384 - DNA, 25 bp, Artificial
  probe
  misc_feature (1)..(25): SEQ ID NO: 849; WAN024G9Y; Start 280; Stop 304
attgaaggtgtagttgttatcggtg

SEQ ID NO: 275385 - DNA, 25 bp, Artificial
  probe
  misc_feature (1)..(25): SEQ ID NO: 849; WAN024G9Y; Start 734; Stop 758
taacagaacttggacatattcaacg

SEQ ID NO: 275386 - DNA, 25 bp, Artificial
  probe
  misc_feature (1)..(25): SEQ ID NO: 849; WAN024G9Y; Start 109; Stop 133
atctatgacggatatgctggtatgg

SEQ ID NO: 275387 - DNA, 25 bp, Artificial
  probe
  misc_feature (1)..(25): SEQ ID NO: 849; WAN024G9Y; Start 730; Stop 754
cgtgtaacagaacttggacatattc

SEQ ID NO: 275388 - DNA, 25 bp, Artificial
  probe
  misc_feature (1)..(25): SEQ ID NO: 849; WAN024G9Y; Start 729; Stop 753
tcgtgtaacagaacttggacatatt

SEQ ID NO: 275389 - DNA, 25 bp, Artificial
  probe
  misc_feature (1)..(25): SEQ ID NO: 849; WAN024G9Y; Start 728; Stop 752
ttcgtgtaacagaacttggacatat

SEQ ID NO: 275390 - DNA, 25 bp, Artificial
  probe
  misc_feature (1)..(25): SEQ ID NO: 849; WAN024G9Y; Start 108; Stop 132
tatctatgacggatatgctggtatg

SEQ ID NO: 275391 - DNA, 25 bp, Artificial
  probe
  misc_feature (1)..(25): SEQ ID NO: 849; WAN024G9Y; Start 107; Stop 131
gtatctatgacggatatgctggtat

SEQ ID NO: 275392 - DNA, 25 bp, Artificial
  probe
  misc_feature (1)..(25): SEQ ID NO: 849; WAN024G9Y; Start 727; Stop 751
cttcgtgtaacagaacttggacata

SEQ ID NO: 275393 - DNA, 25 bp, Artificial
  probe
  misc_feature (1)..(25): SEQ ID NO: 849; WAN024G9Y; Start 111; Stop 135
ctatgacggatatgctggtatggtt

SEQ ID NO: 275394 - DNA, 25 bp, Artificial
  probe
  misc_feature (1)..(25): SEQ ID NO: 849; WAN024G9Y; Start 731; Stop 755
gtgtaacagaacttggacatattca

SEQ ID NO: 275395 - DNA, 25 bp, Artificial
  probe
  misc_feature (1)..(25): SEQ ID NO: 849; WAN024G9Y; Start 106; Stop 130
ggtatctatgacggatatgctggta

SEQ ID NO: 275396 - DNA, 25 bp, Artificial
  probe
  misc_feature (1)..(25): SEQ ID NO: 849; WAN024G9Y; Start 733; Stop 757
gtaacagaacttggacatattcaac

SEQ ID NO: 275397 - DNA, 25 bp, Artificial
  probe
  misc_feature (1)..(25): SEQ ID NO: 849; WAN024G9Y; Start 112; Stop 136
tatgacggatatgctggtatggttg

SEQ ID NO: 275398 - DNA, 25 bp, Artificial
  probe
  misc_feature (1)..(25): SEQ ID NO: 849; WAN024G9Y; Start 463; Stop 487
gatacatcatcaagtcaccgtcgta

SEQ ID NO: 275399 - DNA, 25 bp, Artificial
  probe
  misc_feature (1)..(25): SEQ ID NO: 849; WAN024G9Y; Start 732; Stop 756
tgtaacagaacttggacatattcaa

SEQ ID NO: 275400 - DNA, 25 bp, Artificial
  probe
  misc_feature (1)..(25): SEQ ID NO: 849; WAN024G9Y; Start 274; Stop 298
cacggaattgaaggtgtagttgtta

SEQ ID NO: 275401 - DNA, 25 bp, Artificial
  probe
  misc_feature (1)..(25): SEQ ID NO: 849; WAN024G9Y; Start 104; Stop 128
ttggtatctatgacggatatgctgg

SEQ ID NO: 275402 - DNA, 25 bp, Artificial
  probe
  misc_feature (1)..(25): SEQ ID NO: 849; WAN024G9Y; Start 281; Stop 305
ttgaaggtgtagttgttatcggtgg

SEQ ID NO: 275403 - DNA, 25 bp, Artificial
  probe
  misc_feature (1)..(25): SEQ ID NO: 849; WAN024G9Y; Start 110; Stop 134
tctatgacggatatgctggtatggt

SEQ ID NO: 275404 - DNA, 25 bp, Artificial
  probe
  misc_feature (1)..(25): SEQ ID NO: 849; WAN024G9Y; Start 587; Stop 611
tcaagatggaagatatcgtagcaag

SEQ ID NO: 275405 - DNA, 25 bp, Artificial
  probe
  misc_feature (1)..(25): SEQ ID NO: 849; WAN024G9Y; Start 464; Stop 488
atacatcatcaagtcaccgtcgtac

SEQ ID NO: 275406 - DNA, 25 bp, Artificial
  probe
  misc_feature (1)..(25): SEQ ID NO: 849; WAN024G9Y; Start 586; Stop 610
ttcaagatggaagatatcgtagcaa

SEQ ID NO: 275407 - DNA, 25 bp, Artificial
  probe
  misc_feature (1)..(25): SEQ ID NO: 849; WAN024G9Y; Start 735; Stop 759
aacagaacttggacatattcaacgt

SEQ ID NO: 275408 - DNA, 25 bp, Artificial
  probe
  misc_feature (1)..(25): SEQ ID NO: 849; WAN024G9Y; Start 76; Stop 100
caagcaatttcagaaggaatggaag

SEQ ID NO: 275409 - DNA, 25 bp, Artificial
  probe
  misc_feature (1)..(25): SEQ ID NO: 849; WAN024G9Y; Start 77; Stop 101
aagcaatttcagaaggaatggaagt

SEQ ID NO: 275410 - DNA, 25 bp, Artificial
  probe
  misc_feature (1)..(25): SEQ ID NO: 849; WAN024G9Y; Start 75; Stop 99
tcaagcaatttcagaaggaatggaa

SEQ ID NO: 275411 - DNA, 25 bp, Artificial
  probe
  misc_feature (1)..(25): SEQ ID NO: 849; WAN024G9Y; Start 105; Stop 129
tggtatctatgacggatatgctggt

SEQ ID NO: 275412 - DNA, 25 bp, Artificial
  probe
  misc_feature (1)..(25): SEQ ID NO: 850; WAN024DAP; Start 825; Stop 849
ctacagaggtgttcctaatcgtatc

SEQ ID NO: 275413 - DNA, 25 bp, Artificial
  probe
  misc_feature (1)..(25): SEQ ID NO: 850; WAN024DAP; Start 824; Stop 848
tctacagaggtgttcctaatcgtat

SEQ ID NO: 275414 - DNA, 25 bp, Artificial
  probe
  misc_feature (1)..(25): SEQ ID NO: 850; WAN024DAP; Start 315; Stop 339
tatcaatcgaaccttatcagcactt

SEQ ID NO: 275415 - DNA, 25 bp, Artificial
  probe
  misc_feature (1)..(25): SEQ ID NO: 850; WAN024DAP; Start 312; Stop 336
aactatcaatcgaaccttatcagca

SEQ ID NO: 275416 - DNA, 25 bp, Artificial
  probe
  misc_feature (1)..(25): SEQ ID NO: 850; WAN024DAP; Start 311; Stop 335
caactatcaatcgaaccttatcagc

SEQ ID NO: 275417 - DNA, 25 bp, Artificial
  probe
  misc_feature (1)..(25): SEQ ID NO: 850; WAN024DAP; Start 306; Stop 330
acagacaactatcaatcgaacctta

SEQ ID NO: 275418 - DNA, 25 bp, Artificial
  probe
  misc_feature (1)..(25): SEQ ID NO: 850; WAN024DAP; Start 314; Stop 338
ctatcaatcgaaccttatcagcact

SEQ ID NO: 275419 - DNA, 25 bp, Artificial
  probe
  misc_feature (1)..(25): SEQ ID NO: 850; WAN024DAP; Start 313; Stop 337
actatcaatcgaaccttatcagcac

SEQ ID NO: 275420 - DNA, 25 bp, Artificial
  probe
  misc_feature (1)..(25): SEQ ID NO: 850; WAN024DAP; Start 826; Stop 850
tacagaggtgttcctaatcgtatcg

SEQ ID NO: 275421 - DNA, 25 bp, Artificial
  probe
  misc_feature (1)..(25): SEQ ID NO: 850; WAN024DAP; Start 305; Stop 329
cacagacaactatcaatcgaacctt

SEQ ID NO: 275422 - DNA, 25 bp, Artificial
  probe
  misc_feature (1)..(25): SEQ ID NO: 850; WAN024DAP; Start 823; Stop 847
ctctacagaggtgttcctaatcgta

SEQ ID NO: 275423 - DNA, 25 bp, Artificial
  probe
  misc_feature (1)..(25): SEQ ID NO: 850; WAN024DAP; Start 310; Stop 334
acaactatcaatcgaaccttatcag

SEQ ID NO: 275424 - DNA, 25 bp, Artificial
  probe
  misc_feature (1)..(25): SEQ ID NO: 850; WAN024DAP; Start 309; Stop 333
gacaactatcaatcgaaccttatca

SEQ ID NO: 275425 - DNA, 25 bp, Artificial
  probe
  misc_feature (1)..(25): SEQ ID NO: 850; WAN024DAP; Start 307; Stop 331
cagacaactatcaatcgaaccttat

SEQ ID NO: 275426 - DNA, 25 bp, Artificial
  probe
  misc_feature (1)..(25): SEQ ID NO: 850; WAN024DAP; Start 1011; Stop 1035
cactgacctctatacccatattgtt

SEQ ID NO: 275427 - DNA, 25 bp, Artificial
  probe
  misc_feature (1)..(25): SEQ ID NO: 850; WAN024DAP; Start 590; Stop 614
atttagccattattgcccttctctt

SEQ ID NO: 275428 - DNA, 25 bp, Artificial
  probe
  misc_feature (1)..(25): SEQ ID NO: 850; WAN024DAP; Start 303; Stop 327
ttcacagacaactatcaatcgaacc

SEQ ID NO: 275429 - DNA, 25 bp, Artificial
  probe
  misc_feature (1)..(25): SEQ ID NO: 850; WAN024DAP; Start 1010; Stop 1034
tcactgacctctatacccatattgt

SEQ ID NO: 275430 - DNA, 25 bp, Artificial
  probe
  misc_feature (1)..(25): SEQ ID NO: 850; WAN024DAP; Start 869; Stop 893
aaatggttgctaaatactcagagga

SEQ ID NO: 275431 - DNA, 25 bp, Artificial
  probe
  misc_feature (1)..(25): SEQ ID NO: 850; WAN024DAP; Start 871; Stop 895
atggttgctaaatactcagaggatt

SEQ ID NO: 275432 - DNA, 25 bp, Artificial
  probe
  misc_feature (1)..(25): SEQ ID NO: 850; WAN024DAP; Start 870; Stop 894
aatggttgctaaatactcagaggat

SEQ ID NO: 275433 - DNA, 25 bp, Artificial
  probe
  misc_feature (1)..(25): SEQ ID NO: 850; WAN024DAP; Start 308; Stop 332
agacaactatcaatcgaaccttatc

SEQ ID NO: 275434 - DNA, 25 bp, Artificial
  probe
  misc_feature (1)..(25): SEQ ID NO: 850; WAN024DAP; Start 589; Stop 613
gatttagccattattgcccttctct

SEQ ID NO: 275435 - DNA, 25 bp, Artificial
  probe
  misc_feature (1)..(25): SEQ ID NO: 850; WAN024DAP; Start 346; Stop 370
ctttacaagtatctaaccgaggagg

SEQ ID NO: 275436 - DNA, 25 bp, Artificial
  probe
  misc_feature (1)..(25): SEQ ID NO: 850; WAN024DAP; Start 344; Stop 368
gtctttacaagtatctaaccgagga

SEQ ID NO: 275437 - DNA, 25 bp, Artificial
  probe
  misc_feature (1)..(25): SEQ ID NO: 850; WAN024DAP; Start 343; Stop 367
agtctttacaagtatctaaccgagg

SEQ ID NO: 275438 - DNA, 25 bp, Artificial
  probe
  misc_feature (1)..(25): SEQ ID NO: 850; WAN024DAP; Start 345; Stop 369
tctttacaagtatctaaccgaggag

SEQ ID NO: 275439 - DNA, 25 bp, Artificial
  probe
  misc_feature (1)..(25): SEQ ID NO: 850; WAN024DAP; Start 304; Stop 328
tcacagacaactatcaatcgaacct

SEQ ID NO: 275440 - DNA, 25 bp, Artificial
  probe
  misc_feature (1)..(25): SEQ ID NO: 850; WAN024DAP; Start 591; Stop 615
tttagccattattgcccttctcttg

SEQ ID NO: 275441 - DNA, 25 bp, Artificial
  probe
  misc_feature (1)..(25): SEQ ID NO: 850; WAN024DAP; Start 269; Stop 293
ccttgctgaatgctaatacaacaaa

SEQ ID NO: 275442 - DNA, 25 bp, Artificial
  probe
  misc_feature (1)..(25): SEQ ID NO: 850; WAN024DAP; Start 162; Stop 186
gtctggtatttcaaacgctgataaa

SEQ ID NO: 275443 - DNA, 25 bp, Artificial
  probe
  misc_feature (1)..(25): SEQ ID NO: 850; WAN024DAP; Start 161; Stop 185
agtctggtatttcaaacgctgataa

SEQ ID NO: 275444 - DNA, 25 bp, Artificial
  probe
  misc_feature (1)..(25): SEQ ID NO: 850; WAN024DAP; Start 160; Stop 184
gagtctggtatttcaaacgctgata

SEQ ID NO: 275445 - DNA, 25 bp, Artificial
  probe
  misc_feature (1)..(25): SEQ ID NO: 851; WAN024ETN; Start 245; Stop 269
gacttatgatcttgccgattgtatt

SEQ ID NO: 275446 - DNA, 25 bp, Artificial
  probe
  misc_feature (1)..(25): SEQ ID NO: 851; WAN024ETN; Start 244; Stop 268
ggacttatgatcttgccgattgtat

SEQ ID NO: 275447 - DNA, 25 bp, Artificial
  probe
  misc_feature (1)..(25): SEQ ID NO: 851; WAN024ETN; Start 991; Stop 1015
ttgattatgatgttgctcttccaca

SEQ ID NO: 275448 - DNA, 25 bp, Artificial
  probe
  misc_feature (1)..(25): SEQ ID NO: 851; WAN024ETN; Start 66; Stop 90
catcggtgtggtggctatctatata

SEQ ID NO: 275449 - DNA, 25 bp, Artificial
  probe
  misc_feature (1)..(25): SEQ ID NO: 851; WAN024ETN; Start 361; Stop 385
atatcctatatcctcatgttggctc

SEQ ID NO: 275450 - DNA, 25 bp, Artificial
  probe
  misc_feature (1)..(25): SEQ ID NO: 851; WAN024ETN; Start 362; Stop 386
tatcctatatcctcatgttggctcg

SEQ ID NO: 275451 - DNA, 25 bp, Artificial
  probe
  misc_feature (1)..(25): SEQ ID NO: 851; WAN024ETN; Start 65; Stop 89
tcatcggtgtggtggctatctatat

SEQ ID NO: 275452 - DNA, 25 bp, Artificial
  probe
  misc_feature (1)..(25): SEQ ID NO: 851; WAN024ETN; Start 990; Stop 1014
tttgattatgatgttgctcttccac

SEQ ID NO: 275453 - DNA, 25 bp, Artificial
  probe
  misc_feature (1)..(25): SEQ ID NO: 851; WAN024ETN; Start 989; Stop 1013
gtttgattatgatgttgctcttcca

SEQ ID NO: 275454 - DNA, 25 bp, Artificial
  probe
  misc_feature (1)..(25): SEQ ID NO: 851; WAN024ETN; Start 986; Stop 1010
caggtttgattatgatgttgctctt

SEQ ID NO: 275455 - DNA, 25 bp, Artificial
  probe
  misc_feature (1)..(25): SEQ ID NO: 851; WAN024ETN; Start 987; Stop 1011
aggtttgattatgatgttgctcttc

SEQ ID NO: 275456 - DNA, 25 bp, Artificial
  probe
  misc_feature (1)..(25): SEQ ID NO: 851; WAN024ETN; Start 988; Stop 1012
ggtttgattatgatgttgctcttcc

SEQ ID NO: 275457 - DNA, 25 bp, Artificial
  probe
  misc_feature (1)..(25): SEQ ID NO: 851; WAN024ETN; Start 465; Stop 489
gattctctttaccattccagtccta

SEQ ID NO: 275458 - DNA, 25 bp, Artificial
  probe
  misc_feature (1)..(25): SEQ ID NO: 851; WAN024ETN; Start 882; Stop 906
ctttattggctctgtcctggttatt

SEQ ID NO: 275459 - DNA, 25 bp, Artificial
  probe
  misc_feature (1)..(25): SEQ ID NO: 851; WAN024ETN; Start 463; Stop 487
atgattctctttaccattccagtcc

SEQ ID NO: 275460 - DNA, 25 bp, Artificial
  probe
  misc_feature (1)..(25): SEQ ID NO: 851; WAN024ETN; Start 404; Stop 428
caaagaaacataaggaatggagacg

SEQ ID NO: 275461 - DNA, 25 bp, Artificial
  probe
  misc_feature (1)..(25): SEQ ID NO: 851; WAN024ETN; Start 883; Stop 907
tttattggctctgtcctggttattg

SEQ ID NO: 275462 - DNA, 25 bp, Artificial
  probe
  misc_feature (1)..(25): SEQ ID NO: 851; WAN024ETN; Start 884; Stop 908
ttattggctctgtcctggttattgc

SEQ ID NO: 275463 - DNA, 25 bp, Artificial
  probe
  misc_feature (1)..(25): SEQ ID NO: 851; WAN024ETN; Start 464; Stop 488
tgattctctttaccattccagtcct

SEQ ID NO: 275464 - DNA, 25 bp, Artificial
  probe
  misc_feature (1)..(25): SEQ ID NO: 851; WAN024ETN; Start 1007; Stop 1031
tcttccacatctttgagaatatcgg

SEQ ID NO: 275465 - DNA, 25 bp, Artificial
  probe
  misc_feature (1)..(25): SEQ ID NO: 851; WAN024ETN; Start 920; Stop 944
tgttgatttaccgtatgttgaagat

SEQ ID NO: 275466 - DNA, 25 bp, Artificial
  probe
  misc_feature (1)..(25): SEQ ID NO: 851; WAN024ETN; Start 919; Stop 943
atgttgatttaccgtatgttgaaga

SEQ ID NO: 275467 - DNA, 25 bp, Artificial
  probe
  misc_feature (1)..(25): SEQ ID NO: 851; WAN024ETN; Start 462; Stop 486
gatgattctctttaccattccagtc

SEQ ID NO: 275468 - DNA, 25 bp, Artificial
  probe
  misc_feature (1)..(25): SEQ ID NO: 851; WAN024ETN; Start 403; Stop 427
acaaagaaacataaggaatggagac

SEQ ID NO: 275469 - DNA, 25 bp, Artificial
  probe
  misc_feature (1)..(25): SEQ ID NO: 851; WAN024ETN; Start 1008; Stop 1032
cttccacatctttgagaatatcggt

SEQ ID NO: 275470 - DNA, 25 bp, Artificial
  probe
  misc_feature (1)..(25): SEQ ID NO: 851; WAN024ETN; Start 471; Stop 495
ctttaccattccagtcctagttctt

SEQ ID NO: 275471 - DNA, 25 bp, Artificial
  probe
  misc_feature (1)..(25): SEQ ID NO: 851; WAN024ETN; Start 469; Stop 493
ctctttaccattccagtcctagttc

SEQ ID NO: 275472 - DNA, 25 bp, Artificial
  probe
  misc_feature (1)..(25): SEQ ID NO: 851; WAN024ETN; Start 472; Stop 496
tttaccattccagtcctagttcttt

SEQ ID NO: 275473 - DNA, 25 bp, Artificial
  probe
  misc_feature (1)..(25): SEQ ID NO: 851; WAN024ETN; Start 466; Stop 490
attctctttaccattccagtcctag

SEQ ID NO: 275474 - DNA, 25 bp, Artificial
  probe
  misc_feature (1)..(25): SEQ ID NO: 851; WAN024ETN; Start 470; Stop 494
tctttaccattccagtcctagttct

SEQ ID NO: 275475 - DNA, 25 bp, Artificial
  probe
  misc_feature (1)..(25): SEQ ID NO: 851; WAN024ETN; Start 468; Stop 492
tctctttaccattccagtcctagtt

SEQ ID NO: 275476 - DNA, 25 bp, Artificial
  probe
  misc_feature (1)..(25): SEQ ID NO: 851; WAN024ETN; Start 467; Stop 491
ttctctttaccattccagtcctagt

SEQ ID NO: 275477 - DNA, 25 bp, Artificial
  probe
  misc_feature (1)..(25): SEQ ID NO: 851; WAN024ETN; Start 635; Stop 659
ctatctttattagcaaggacggacg

SEQ ID NO: 275478 - DNA, 25 bp, Artificial
  probe
  misc_feature (1)..(25): SEQ ID NO: 852; WAN024DF6; Start 176; Stop 200
gcaaagggattactctctcaaatga

SEQ ID NO: 275479 - DNA, 25 bp, Artificial
  probe
  misc_feature (1)..(25): SEQ ID NO: 852; WAN024DF6; Start 177; Stop 201
caaagggattactctctcaaatgaa

SEQ ID NO: 275480 - DNA, 25 bp, Artificial
  probe
  misc_feature (1)..(25): SEQ ID NO: 852; WAN024DF6; Start 199; Stop 223
gaagaatttcaaacgatggtggatg

SEQ ID NO: 275481 - DNA, 25 bp, Artificial
  probe
  misc_feature (1)..(25): SEQ ID NO: 852; WAN024DF6; Start 180; Stop 204
agggattactctctcaaatgaagaa

SEQ ID NO: 275482 - DNA, 25 bp, Artificial
  probe
  misc_feature (1)..(25): SEQ ID NO: 852; WAN024DF6; Start 179; Stop 203
aagggattactctctcaaatgaaga

SEQ ID NO: 275483 - DNA, 25 bp, Artificial
  probe
  misc_feature (1)..(25): SEQ ID NO: 852; WAN024DF6; Start 132; Stop 156
aaagtttgatattcgtgcttggagt

SEQ ID NO: 275484 - DNA, 25 bp, Artificial
  probe
  misc_feature (1)..(25): SEQ ID NO: 852; WAN024DF6; Start 175; Stop 199
ggcaaagggattactctctcaaatg

SEQ ID NO: 275485 - DNA, 25 bp, Artificial
  probe
  misc_feature (1)..(25): SEQ ID NO: 852; WAN024DF6; Start 178; Stop 202
aaagggattactctctcaaatgaag

SEQ ID NO: 275486 - DNA, 25 bp, Artificial
  probe
  misc_feature (1)..(25): SEQ ID NO: 852; WAN024DF6; Start 133; Stop 157
aagtttgatattcgtgcttggagtc

SEQ ID NO: 275487 - DNA, 25 bp, Artificial
  probe
  misc_feature (1)..(25): SEQ ID NO: 852; WAN024DF6; Start 181; Stop 205
gggattactctctcaaatgaagaat

SEQ ID NO: 275488 - DNA, 25 bp, Artificial
  probe
  misc_feature (1)..(25): SEQ ID NO: 852; WAN024DF6; Start 131; Stop 155
caaagtttgatattcgtgcttggag

SEQ ID NO: 275489 - DNA, 25 bp, Artificial
  probe
  misc_feature (1)..(25): SEQ ID NO: 852; WAN024DF6; Start 174; Stop 198
gggcaaagggattactctctcaaat

SEQ ID NO: 275490 - DNA, 25 bp, Artificial
  probe
  misc_feature (1)..(25): SEQ ID NO: 852; WAN024DF6; Start 170; Stop 194
aaatgggcaaagggattactctctc

SEQ ID NO: 275491 - DNA, 25 bp, Artificial
  probe
  misc_feature (1)..(25): SEQ ID NO: 852; WAN024DF6; Start 34; Stop 58
tttacatttgaaatcgaagagcact

SEQ ID NO: 275492 - DNA, 25 bp, Artificial
  probe
  misc_feature (1)..(25): SEQ ID NO: 852; WAN024DF6; Start 52; Stop 76
gagcacttgttgactctttctgaaa

SEQ ID NO: 275493 - DNA, 25 bp, Artificial
  probe
  misc_feature (1)..(25): SEQ ID NO: 852; WAN024DF6; Start 36; Stop 60
tacatttgaaatcgaagagcacttg

SEQ ID NO: 275494 - DNA, 25 bp, Artificial
  probe
  misc_feature (1)..(25): SEQ ID NO: 852; WAN024DF6; Start 35; Stop 59
ttacatttgaaatcgaagagcactt

SEQ ID NO: 275495 - DNA, 25 bp, Artificial
  probe
  misc_feature (1)..(25): SEQ ID NO: 852; WAN024DF6; Start 94; Stop 118
aaggaaattaaccgtgtgagcttta

SEQ ID NO: 275496 - DNA, 25 bp, Artificial
  probe
  misc_feature (1)..(25): SEQ ID NO: 852; WAN024DF6; Start 200; Stop 224
aagaatttcaaacgatggtggatgc

SEQ ID NO: 275497 - DNA, 25 bp, Artificial
  probe
  misc_feature (1)..(25): SEQ ID NO: 852; WAN024DF6; Start 39; Stop 63
atttgaaatcgaagagcacttgttg

SEQ ID NO: 275498 - DNA, 25 bp, Artificial
  probe
  misc_feature (1)..(25): SEQ ID NO: 852; WAN024DF6; Start 38; Stop 62
catttgaaatcgaagagcacttgtt

SEQ ID NO: 275499 - DNA, 25 bp, Artificial
  probe
  misc_feature (1)..(25): SEQ ID NO: 852; WAN024DF6; Start 95; Stop 119
aggaaattaaccgtgtgagctttaa

SEQ ID NO: 275500 - DNA, 25 bp, Artificial
  probe
  misc_feature (1)..(25): SEQ ID NO: 852; WAN024DF6; Start 40; Stop 64
tttgaaatcgaagagcacttgttga

SEQ ID NO: 275501 - DNA, 25 bp, Artificial
  probe
  misc_feature (1)..(25): SEQ ID NO: 852; WAN024DF6; Start 205; Stop 229
tttcaaacgatggtggatgccttta

SEQ ID NO: 275502 - DNA, 25 bp, Artificial
  probe
  misc_feature (1)..(25): SEQ ID NO: 852; WAN024DF6; Start 206; Stop 230
ttcaaacgatggtggatgcctttaa

SEQ ID NO: 275503 - DNA, 25 bp, Artificial
  probe
  misc_feature (1)..(25): SEQ ID NO: 852; WAN024DF6; Start 33; Stop 57
atttacatttgaaatcgaagagcac

SEQ ID NO: 275504 - DNA, 25 bp, Artificial
  probe
  misc_feature (1)..(25): SEQ ID NO: 852; WAN024DF6; Start 134; Stop 158
agtttgatattcgtgcttggagtcc

SEQ ID NO: 275505 - DNA, 25 bp, Artificial
  probe
  misc_feature (1)..(25): SEQ ID NO: 852; WAN024DF6; Start 165; Stop 189
tactaaaatgggcaaagggattact

SEQ ID NO: 275506 - DNA, 25 bp, Artificial
  probe
  misc_feature (1)..(25): SEQ ID NO: 852; WAN024DF6; Start 167; Stop 191
ctaaaatgggcaaagggattactct

SEQ ID NO: 275507 - DNA, 25 bp, Artificial
  probe
  misc_feature (1)..(25): SEQ ID NO: 852; WAN024DF6; Start 93; Stop 117
caaggaaattaaccgtgtgagcttt

SEQ ID NO: 275508 - DNA, 25 bp, Artificial
  probe
  misc_feature (1)..(25): SEQ ID NO: 852; WAN024DF6; Start 172; Stop 196
atgggcaaagggattactctctcaa

SEQ ID NO: 275509 - DNA, 25 bp, Artificial
  probe
  misc_feature (1)..(25): SEQ ID NO: 852; WAN024DF6; Start 171; Stop 195
aatgggcaaagggattactctctca

SEQ ID NO: 275510 - DNA, 25 bp, Artificial
  probe
  misc_feature (1)..(25): SEQ ID NO: 852; WAN024DF6; Start 168; Stop 192
taaaatgggcaaagggattactctc

SEQ ID NO: 275511 - DNA, 25 bp, Artificial
  probe
  misc_feature (1)..(25): SEQ ID NO: 853; WAN024CUP; Start 634; Stop 658
ttgattgagcaggagagaagagatg

SEQ ID NO: 275512 - DNA, 25 bp, Artificial
  probe
  misc_feature (1)..(25): SEQ ID NO: 853; WAN024CUP; Start 714; Stop 738
ttctcgtatcttggtgaatctggtc

SEQ ID NO: 275513 - DNA, 25 bp, Artificial
  probe
  misc_feature (1)..(25): SEQ ID NO: 853; WAN024CUP; Start 467; Stop 491
ctcattatctagcaaccattggacg

SEQ ID NO: 275514 - DNA, 25 bp, Artificial
  probe
  misc_feature (1)..(25): SEQ ID NO: 853; WAN024CUP; Start 636; Stop 660
gattgagcaggagagaagagatgtc

SEQ ID NO: 275515 - DNA, 25 bp, Artificial
  probe
  misc_feature (1)..(25): SEQ ID NO: 853; WAN024CUP; Start 163; Stop 187
ctctttctcctattgccagtcttta

SEQ ID NO: 275516 - DNA, 25 bp, Artificial
  probe
  misc_feature (1)..(25): SEQ ID NO: 853; WAN024CUP; Start 157; Stop 181
attagtctctttctcctattgccag

SEQ ID NO: 275517 - DNA, 25 bp, Artificial
  probe
  misc_feature (1)..(25): SEQ ID NO: 853; WAN024CUP; Start 156; Stop 180
gattagtctctttctcctattgcca

SEQ ID NO: 275518 - DNA, 25 bp, Artificial
  probe
  misc_feature (1)..(25): SEQ ID NO: 853; WAN024CUP; Start 164; Stop 188
tctttctcctattgccagtctttac

SEQ ID NO: 275519 - DNA, 25 bp, Artificial
  probe
  misc_feature (1)..(25): SEQ ID NO: 853; WAN024CUP; Start 158; Stop 182
ttagtctctttctcctattgccagt

SEQ ID NO: 275520 - DNA, 25 bp, Artificial
  probe
  misc_feature (1)..(25): SEQ ID NO: 853; WAN024CUP; Start 635; Stop 659
tgattgagcaggagagaagagatgt

SEQ ID NO: 275521 - DNA, 25 bp, Artificial
  probe
  misc_feature (1)..(25): SEQ ID NO: 853; WAN024CUP; Start 720; Stop 744
tatcttggtgaatctggtcgataac

SEQ ID NO: 275522 - DNA, 25 bp, Artificial
  probe
  misc_feature (1)..(25): SEQ ID NO: 853; WAN024CUP; Start 719; Stop 743
gtatcttggtgaatctggtcgataa

SEQ ID NO: 275523 - DNA, 25 bp, Artificial
  probe
  misc_feature (1)..(25): SEQ ID NO: 853; WAN024CUP; Start 590; Stop 614
ttctggacaagctcttaattgagtg

SEQ ID NO: 275524 - DNA, 25 bp, Artificial
  probe
  misc_feature (1)..(25): SEQ ID NO: 853; WAN024CUP; Start 159; Stop 183
tagtctctttctcctattgccagtc

SEQ ID NO: 275525 - DNA, 25 bp, Artificial
  probe
  misc_feature (1)..(25): SEQ ID NO: 853; WAN024CUP; Start 633; Stop 657
tttgattgagcaggagagaagagat

SEQ ID NO: 275526 - DNA, 25 bp, Artificial
  probe
  misc_feature (1)..(25): SEQ ID NO: 853; WAN024CUP; Start 165; Stop 189
ctttctcctattgccagtctttacg

SEQ ID NO: 275527 - DNA, 25 bp, Artificial
  probe
  misc_feature (1)..(25): SEQ ID NO: 853; WAN024CUP; Start 162; Stop 186
tctctttctcctattgccagtcttt

SEQ ID NO: 275528 - DNA, 25 bp, Artificial
  probe
  misc_feature (1)..(25): SEQ ID NO: 853; WAN024CUP; Start 712; Stop 736
ctttctcgtatcttggtgaatctgg

SEQ ID NO: 275529 - DNA, 25 bp, Artificial
  probe
  misc_feature (1)..(25): SEQ ID NO: 853; WAN024CUP; Start 601; Stop 625
ctcttaattgagtgcatgagtgaat

SEQ ID NO: 275530 - DNA, 25 bp, Artificial
  probe
  misc_feature (1)..(25): SEQ ID NO: 853; WAN024CUP; Start 602; Stop 626
tcttaattgagtgcatgagtgaatt

SEQ ID NO: 275531 - DNA, 25 bp, Artificial
  probe
  misc_feature (1)..(25): SEQ ID NO: 853; WAN024CUP; Start 713; Stop 737
tttctcgtatcttggtgaatctggt

SEQ ID NO: 275532 - DNA, 25 bp, Artificial
  probe
  misc_feature (1)..(25): SEQ ID NO: 853; WAN024CUP; Start 711; Stop 735
gctttctcgtatcttggtgaatctg

SEQ ID NO: 275533 - DNA, 25 bp, Artificial
  probe
  misc_feature (1)..(25): SEQ ID NO: 853; WAN024CUP; Start 161; Stop 185
gtctctttctcctattgccagtctt

SEQ ID NO: 275534 - DNA, 25 bp, Artificial
  probe
  misc_feature (1)..(25): SEQ ID NO: 853; WAN024CUP; Start 600; Stop 624
gctcttaattgagtgcatgagtgaa

SEQ ID NO: 275535 - DNA, 25 bp, Artificial
  probe
  misc_feature (1)..(25): SEQ ID NO: 853; WAN024CUP; Start 598; Stop 622
aagctcttaattgagtgcatgagtg

SEQ ID NO: 275536 - DNA, 25 bp, Artificial
  probe
  misc_feature (1)..(25): SEQ ID NO: 853; WAN024CUP; Start 597; Stop 621
caagctcttaattgagtgcatgagt

SEQ ID NO: 275537 - DNA, 25 bp, Artificial
  probe
  misc_feature (1)..(25): SEQ ID NO: 853; WAN024CUP; Start 596; Stop 620
acaagctcttaattgagtgcatgag

SEQ ID NO: 275538 - DNA, 25 bp, Artificial
  probe
  misc_feature (1)..(25): SEQ ID NO: 853; WAN024CUP; Start 595; Stop 619
gacaagctcttaattgagtgcatga

SEQ ID NO: 275539 - DNA, 25 bp, Artificial
  probe
  misc_feature (1)..(25): SEQ ID NO: 853; WAN024CUP; Start 718; Stop 742
cgtatcttggtgaatctggtcgata

SEQ ID NO: 275540 - DNA, 25 bp, Artificial
  probe
  misc_feature (1)..(25): SEQ ID NO: 853; WAN024CUP; Start 468; Stop 492
tcattatctagcaaccattggacgc

SEQ ID NO: 275541 - DNA, 25 bp, Artificial
  probe
  misc_feature (1)..(25): SEQ ID NO: 853; WAN024CUP; Start 564; Stop 588
ggaaactaccagtaaagacagtatt

SEQ ID NO: 275542 - DNA, 25 bp, Artificial
  probe
  misc_feature (1)..(25): SEQ ID NO: 853; WAN024CUP; Start 466; Stop 490
gctcattatctagcaaccattggac

SEQ ID NO: 275543 - DNA, 25 bp, Artificial
  probe
  misc_feature (1)..(25): SEQ ID NO: 853; WAN024CUP; Start 721; Stop 745
atcttggtgaatctggtcgataacg

SEQ ID NO: 275544 - DNA, 25 bp, Artificial
  probe
  misc_feature (1)..(25): SEQ ID NO: 854; WAN024F42; Start 473; Stop 497
aatctatcaatactgcctgctcttc

SEQ ID NO: 275545 - DNA, 25 bp, Artificial
  probe
  misc_feature (1)..(25): SEQ ID NO: 854; WAN024F42; Start 15; Stop 39
agtagtggtaacaggttatggagta

SEQ ID NO: 275546 - DNA, 25 bp, Artificial
  probe
  misc_feature (1)..(25): SEQ ID NO: 854; WAN024F42; Start 476; Stop 500
ctatcaatactgcctgctcttcatc

SEQ ID NO: 275547 - DNA, 25 bp, Artificial
  probe
  misc_feature (1)..(25): SEQ ID NO: 854; WAN024F42; Start 16; Stop 40
gtagtggtaacaggttatggagtaa

SEQ ID NO: 275548 - DNA, 25 bp, Artificial
  probe
  misc_feature (1)..(25): SEQ ID NO: 854; WAN024F42; Start 475; Stop 499
tctatcaatactgcctgctcttcat

SEQ ID NO: 275549 - DNA, 25 bp, Artificial
  probe
  misc_feature (1)..(25): SEQ ID NO: 854; WAN024F42; Start 474; Stop 498
atctatcaatactgcctgctcttca

SEQ ID NO: 275550 - DNA, 25 bp, Artificial
  probe
  misc_feature (1)..(25): SEQ ID NO: 854; WAN024F42; Start 976; Stop 1000
gtacctgtatcatcaaccaagtctt

SEQ ID NO: 275551 - DNA, 25 bp, Artificial
  probe
  misc_feature (1)..(25): SEQ ID NO: 854; WAN024F42; Start 974; Stop 998
aagtacctgtatcatcaaccaagtc

SEQ ID NO: 275552 - DNA, 25 bp, Artificial
  probe
  misc_feature (1)..(25): SEQ ID NO: 854; WAN024F42; Start 973; Stop 997
gaagtacctgtatcatcaaccaagt

SEQ ID NO: 275553 - DNA, 25 bp, Artificial
  probe
  misc_feature (1)..(25): SEQ ID NO: 854; WAN024F42; Start 477; Stop 501
tatcaatactgcctgctcttcatca

SEQ ID NO: 275554 - DNA, 25 bp, Artificial
  probe
  misc_feature (1)..(25): SEQ ID NO: 854; WAN024F42; Start 14; Stop 38
gagtagtggtaacaggttatggagt

SEQ ID NO: 275555 - DNA, 25 bp, Artificial
  probe
  misc_feature (1)..(25): SEQ ID NO: 854; WAN024F42; Start 975; Stop 999
agtacctgtatcatcaaccaagtct

SEQ ID NO: 275556 - DNA, 25 bp, Artificial
  probe
  misc_feature (1)..(25): SEQ ID NO: 854; WAN024F42; Start 972; Stop 996
ggaagtacctgtatcatcaaccaag

SEQ ID NO: 275557 - DNA, 25 bp, Artificial
  probe
  misc_feature (1)..(25): SEQ ID NO: 854; WAN024F42; Start 266; Stop 290
ccaatcttgatgtagaggctcttaa

SEQ ID NO: 275558 - DNA, 25 bp, Artificial
  probe
  misc_feature (1)..(25): SEQ ID NO: 854; WAN024F42; Start 318; Stop 342
atctggtattggtggaatcaaggaa

SEQ ID NO: 275559 - DNA, 25 bp, Artificial
  probe
  misc_feature (1)..(25): SEQ ID NO: 854; WAN024F42; Start 270; Stop 294
tcttgatgtagaggctcttaatagg

SEQ ID NO: 275560 - DNA, 25 bp, Artificial
  probe
  misc_feature (1)..(25): SEQ ID NO: 854; WAN024F42; Start 478; Stop 502
atcaatactgcctgctcttcatcaa

SEQ ID NO: 275561 - DNA, 25 bp, Artificial
  probe
  misc_feature (1)..(25): SEQ ID NO: 854; WAN024F42; Start 21; Stop 45
ggtaacaggttatggagtaacatct

SEQ ID NO: 275562 - DNA, 25 bp, Artificial
  probe
  misc_feature (1)..(25): SEQ ID NO: 854; WAN024F42; Start 20; Stop 44
tggtaacaggttatggagtaacatc

SEQ ID NO: 275563 - DNA, 25 bp, Artificial
  probe
  misc_feature (1)..(25): SEQ ID NO: 854; WAN024F42; Start 19; Stop 43
gtggtaacaggttatggagtaacat

SEQ ID NO: 275564 - DNA, 25 bp, Artificial
  probe
  misc_feature (1)..(25): SEQ ID NO: 854; WAN024F42; Start 13; Stop 37
cgagtagtggtaacaggttatggag

SEQ ID NO: 275565 - DNA, 25 bp, Artificial
  probe
  misc_feature (1)..(25): SEQ ID NO: 854; WAN024F42; Start 17; Stop 41
tagtggtaacaggttatggagtaac

SEQ ID NO: 275566 - DNA, 25 bp, Artificial
  probe
  misc_feature (1)..(25): SEQ ID NO: 854; WAN024F42; Start 10; Stop 34
aatcgagtagtggtaacaggttatg

SEQ ID NO: 275567 - DNA, 25 bp, Artificial
  probe
  misc_feature (1)..(25): SEQ ID NO: 854; WAN024F42; Start 267; Stop 291
caatcttgatgtagaggctcttaat

SEQ ID NO: 275568 - DNA, 25 bp, Artificial
  probe
  misc_feature (1)..(25): SEQ ID NO: 854; WAN024F42; Start 969; Stop 993
taaggaagtacctgtatcatcaacc

SEQ ID NO: 275569 - DNA, 25 bp, Artificial
  probe
  misc_feature (1)..(25): SEQ ID NO: 854; WAN024F42; Start 317; Stop 341
catctggtattggtggaatcaagga

SEQ ID NO: 275570 - DNA, 25 bp, Artificial
  probe
  misc_feature (1)..(25): SEQ ID NO: 854; WAN024F42; Start 18; Stop 42
agtggtaacaggttatggagtaaca

SEQ ID NO: 275571 - DNA, 25 bp, Artificial
  probe
  misc_feature (1)..(25): SEQ ID NO: 854; WAN024F42; Start 614; Stop 638
ccttaacagctctctctactacaga

SEQ ID NO: 275572 - DNA, 25 bp, Artificial
  probe
  misc_feature (1)..(25): SEQ ID NO: 854; WAN024F42; Start 955; Stop 979
gtagctgttcttggtaaggaagtac

SEQ ID NO: 275573 - DNA, 25 bp, Artificial
  probe
  misc_feature (1)..(25): SEQ ID NO: 854; WAN024F42; Start 22; Stop 46
gtaacaggttatggagtaacatctc

SEQ ID NO: 275574 - DNA, 25 bp, Artificial
  probe
  misc_feature (1)..(25): SEQ ID NO: 854; WAN024F42; Start 971; Stop 995
aggaagtacctgtatcatcaaccaa

SEQ ID NO: 275575 - DNA, 25 bp, Artificial
  probe
  misc_feature (1)..(25): SEQ ID NO: 854; WAN024F42; Start 970; Stop 994
aaggaagtacctgtatcatcaacca

SEQ ID NO: 275576 - DNA, 25 bp, Artificial
  probe
  misc_feature (1)..(25): SEQ ID NO: 854; WAN024F42; Start 472; Stop 496
aaatctatcaatactgcctgctctt

SEQ ID NO: 275577 - DNA, 25 bp, Artificial
  probe
  misc_feature (1)..(25): SEQ ID NO: 855; WAN024AYU; Start 66; Stop 90
tgctgatcgtacaattcttctatcg

SEQ ID NO: 275578 - DNA, 25 bp, Artificial
  probe
  misc_feature (1)..(25): SEQ ID NO: 855; WAN024AYU; Start 63; Stop 87
acttgctgatcgtacaattcttcta

SEQ ID NO: 275579 - DNA, 25 bp, Artificial
  probe
  misc_feature (1)..(25): SEQ ID NO: 855; WAN024AYU; Start 55; Stop 79
caattagaacttgctgatcgtacaa

SEQ ID NO: 275580 - DNA, 25 bp, Artificial
  probe
  misc_feature (1)..(25): SEQ ID NO: 855; WAN024AYU; Start 61; Stop 85
gaacttgctgatcgtacaattcttc

SEQ ID NO: 275581 - DNA, 25 bp, Artificial
  probe
  misc_feature (1)..(25): SEQ ID NO: 855; WAN024AYU; Start 58; Stop 82
ttagaacttgctgatcgtacaattc

SEQ ID NO: 275582 - DNA, 25 bp, Artificial
  probe
  misc_feature (1)..(25): SEQ ID NO: 855; WAN024AYU; Start 54; Stop 78
tcaattagaacttgctgatcgtaca

SEQ ID NO: 275583 - DNA, 25 bp, Artificial
  probe
  misc_feature (1)..(25): SEQ ID NO: 855; WAN024AYU; Start 62; Stop 86
aacttgctgatcgtacaattcttct

SEQ ID NO: 275584 - DNA, 25 bp, Artificial
  probe
  misc_feature (1)..(25): SEQ ID NO: 855; WAN024AYU; Start 65; Stop 89
ttgctgatcgtacaattcttctatc

SEQ ID NO: 275585 - DNA, 25 bp, Artificial
  probe
  misc_feature (1)..(25): SEQ ID NO: 855; WAN024AYU; Start 64; Stop 88
cttgctgatcgtacaattcttctat

SEQ ID NO: 275586 - DNA, 25 bp, Artificial
  probe
  misc_feature (1)..(25): SEQ ID NO: 855; WAN024AYU; Start 57; Stop 81
attagaacttgctgatcgtacaatt

SEQ ID NO: 275587 - DNA, 25 bp, Artificial
  probe
  misc_feature (1)..(25): SEQ ID NO: 855; WAN024AYU; Start 56; Stop 80
aattagaacttgctgatcgtacaat

SEQ ID NO: 275588 - DNA, 25 bp, Artificial
  probe
  misc_feature (1)..(25): SEQ ID NO: 855; WAN024AYU; Start 75; Stop 99
tacaattcttctatcgacagcactc

SEQ ID NO: 275589 - DNA, 25 bp, Artificial
  probe
  misc_feature (1)..(25): SEQ ID NO: 855; WAN024AYU; Start 74; Stop 98
gtacaattcttctatcgacagcact

SEQ ID NO: 275590 - DNA, 25 bp, Artificial
  probe
  misc_feature (1)..(25): SEQ ID NO: 855; WAN024AYU; Start 78; Stop 102
aattcttctatcgacagcactcttg

SEQ ID NO: 275591 - DNA, 25 bp, Artificial
  probe
  misc_feature (1)..(25): SEQ ID NO: 855; WAN024AYU; Start 77; Stop 101
caattcttctatcgacagcactctt

SEQ ID NO: 275592 - DNA, 25 bp, Artificial
  probe
  misc_feature (1)..(25): SEQ ID NO: 855; WAN024AYU; Start 76; Stop 100
acaattcttctatcgacagcactct

SEQ ID NO: 275593 - DNA, 25 bp, Artificial
  probe
  misc_feature (1)..(25): SEQ ID NO: 855; WAN024AYU; Start 73; Stop 97
cgtacaattcttctatcgacagcac

SEQ ID NO: 275594 - DNA, 25 bp, Artificial
  probe
  misc_feature (1)..(25): SEQ ID NO: 855; WAN024AYU; Start 59; Stop 83
tagaacttgctgatcgtacaattct

SEQ ID NO: 275595 - DNA, 25 bp, Artificial
  probe
  misc_feature (1)..(25): SEQ ID NO: 855; WAN024AYU; Start 60; Stop 84
agaacttgctgatcgtacaattctt

SEQ ID NO: 275596 - DNA, 25 bp, Artificial
  probe
  misc_feature (1)..(25): SEQ ID NO: 855; WAN024AYU; Start 32; Stop 56
cggctaagaaggtatttgaatatca

SEQ ID NO: 275597 - DNA, 25 bp, Artificial
  probe
  misc_feature (1)..(25): SEQ ID NO: 855; WAN024AYU; Start 53; Stop 77
atcaattagaacttgctgatcgtac

SEQ ID NO: 275598 - DNA, 25 bp, Artificial
  probe
  misc_feature (1)..(25): SEQ ID NO: 855; WAN024AYU; Start 79; Stop 103
attcttctatcgacagcactcttgt

SEQ ID NO: 275599 - DNA, 25 bp, Artificial
  probe
  misc_feature (1)..(25): SEQ ID NO: 855; WAN024AYU; Start 8; Stop 32
taagaatatttgcggaagataagcc

SEQ ID NO: 275600 - DNA, 25 bp, Artificial
  probe
  misc_feature (1)..(25): SEQ ID NO: 855; WAN024AYU; Start 2; Stop 26
tgaaactaagaatatttgcggaaga

SEQ ID NO: 275601 - DNA, 25 bp, Artificial
  probe
  misc_feature (1)..(25): SEQ ID NO: 855; WAN024AYU; Start 51; Stop 75
atatcaattagaacttgctgatcgt

SEQ ID NO: 275602 - DNA, 25 bp, Artificial
  probe
  misc_feature (1)..(25): SEQ ID NO: 855; WAN024AYU; Start 69; Stop 93
tgatcgtacaattcttctatcgaca

SEQ ID NO: 275603 - DNA, 25 bp, Artificial
  probe
  misc_feature (1)..(25): SEQ ID NO: 855; WAN024AYU; Start 67; Stop 91
gctgatcgtacaattcttctatcga

SEQ ID NO: 275604 - DNA, 25 bp, Artificial
  probe
  misc_feature (1)..(25): SEQ ID NO: 855; WAN024AYU; Start 71; Stop 95
atcgtacaattcttctatcgacagc

SEQ ID NO: 275605 - DNA, 25 bp, Artificial
  probe
  misc_feature (1)..(25): SEQ ID NO: 855; WAN024AYU; Start 70; Stop 94
gatcgtacaattcttctatcgacag

SEQ ID NO: 275606 - DNA, 25 bp, Artificial
  probe
  misc_feature (1)..(25): SEQ ID NO: 855; WAN024AYU; Start 68; Stop 92
ctgatcgtacaattcttctatcgac

SEQ ID NO: 275607 - DNA, 25 bp, Artificial
  probe
  misc_feature (1)..(25): SEQ ID NO: 855; WAN024AYU; Start 7; Stop 31
ctaagaatatttgcggaagataagc

SEQ ID NO: 275608 - DNA, 25 bp, Artificial
  probe
  misc_feature (1)..(25): SEQ ID NO: 855; WAN024AYU; Start 52; Stop 76
tatcaattagaacttgctgatcgta

SEQ ID NO: 275609 - DNA, 25 bp, Artificial
  probe
  misc_feature (1)..(25): SEQ ID NO: 855; WAN024AYU; Start 1; Stop 25
atgaaactaagaatatttgcggaag

SEQ ID NO: 275610 - DNA, 25 bp, Artificial
  probe
  misc_feature (1)..(25): SEQ ID NO: 856; WAN024DTU; Start 55; Stop 79
tctactgtcaagagatcattaccaa

SEQ ID NO: 275611 - DNA, 25 bp, Artificial
  probe
  misc_feature (1)..(25): SEQ ID NO: 856; WAN024DTU; Start 54; Stop 78
ttctactgtcaagagatcattacca

SEQ ID NO: 275612 - DNA, 25 bp, Artificial
  probe
  misc_feature (1)..(25): SEQ ID NO: 856; WAN024DTU; Start 185; Stop 209
ttgacttagaagcattggcagagaa

SEQ ID NO: 275613 - DNA, 25 bp, Artificial
  probe
  misc_feature (1)..(25): SEQ ID NO: 856; WAN024DTU; Start 56; Stop 80
ctactgtcaagagatcattaccaat

SEQ ID NO: 275614 - DNA, 25 bp, Artificial
  probe
  misc_feature (1)..(25): SEQ ID NO: 856; WAN024DTU; Start 57; Stop 81
tactgtcaagagatcattaccaatc

SEQ ID NO: 275615 - DNA, 25 bp, Artificial
  probe
  misc_feature (1)..(25): SEQ ID NO: 856; WAN024DTU; Start 184; Stop 208
cttgacttagaagcattggcagaga

SEQ ID NO: 275616 - DNA, 25 bp, Artificial
  probe
  misc_feature (1)..(25): SEQ ID NO: 856; WAN024DTU; Start 24; Stop 48
agtttcaccatcaatctttacagtt

SEQ ID NO: 275617 - DNA, 25 bp, Artificial
  probe
  misc_feature (1)..(25): SEQ ID NO: 856; WAN024DTU; Start 15; Stop 39
atccaagatagtttcaccatcaatc

SEQ ID NO: 275618 - DNA, 25 bp, Artificial
  probe
  misc_feature (1)..(25): SEQ ID NO: 856; WAN024DTU; Start 58; Stop 82
actgtcaagagatcattaccaatct

SEQ ID NO: 275619 - DNA, 25 bp, Artificial
  probe
  misc_feature (1)..(25): SEQ ID NO: 856; WAN024DTU; Start 23; Stop 47
tagtttcaccatcaatctttacagt

SEQ ID NO: 275620 - DNA, 25 bp, Artificial
  probe
  misc_feature (1)..(25): SEQ ID NO: 856; WAN024DTU; Start 134; Stop 158
tctcttctagctcaatcttatcaag

SEQ ID NO: 275621 - DNA, 25 bp, Artificial
  probe
  misc_feature (1)..(25): SEQ ID NO: 856; WAN024DTU; Start 187; Stop 211
gacttagaagcattggcagagaaac

SEQ ID NO: 275622 - DNA, 25 bp, Artificial
  probe
  misc_feature (1)..(25): SEQ ID NO: 856; WAN024DTU; Start 130; Stop 154
acaatctcttctagctcaatcttat

SEQ ID NO: 275623 - DNA, 25 bp, Artificial
  probe
  misc_feature (1)..(25): SEQ ID NO: 856; WAN024DTU; Start 186; Stop 210
tgacttagaagcattggcagagaaa

SEQ ID NO: 275624 - DNA, 25 bp, Artificial
  probe
  misc_feature (1)..(25): SEQ ID NO: 856; WAN024DTU; Start 183; Stop 207
ccttgacttagaagcattggcagag

SEQ ID NO: 275625 - DNA, 25 bp, Artificial
  probe
  misc_feature (1)..(25): SEQ ID NO: 856; WAN024DTU; Start 25; Stop 49
gtttcaccatcaatctttacagtta

SEQ ID NO: 275626 - DNA, 25 bp, Artificial
  probe
  misc_feature (1)..(25): SEQ ID NO: 856; WAN024DTU; Start 136; Stop 160
tcttctagctcaatcttatcaagca

SEQ ID NO: 275627 - DNA, 25 bp, Artificial
  probe
  misc_feature (1)..(25): SEQ ID NO: 856; WAN024DTU; Start 133; Stop 157
atctcttctagctcaatcttatcaa

SEQ ID NO: 275628 - DNA, 25 bp, Artificial
  probe
  misc_feature (1)..(25): SEQ ID NO: 856; WAN024DTU; Start 132; Stop 156
aatctcttctagctcaatcttatca

SEQ ID NO: 275629 - DNA, 25 bp, Artificial
  probe
  misc_feature (1)..(25): SEQ ID NO: 856; WAN024DTU; Start 135; Stop 159
ctcttctagctcaatcttatcaagc

SEQ ID NO: 275630 - DNA, 25 bp, Artificial
  probe
  misc_feature (1)..(25): SEQ ID NO: 856; WAN024DTU; Start 53; Stop 77
tttctactgtcaagagatcattacc

SEQ ID NO: 275631 - DNA, 25 bp, Artificial
  probe
  misc_feature (1)..(25): SEQ ID NO: 856; WAN024DTU; Start 172; Stop 196
gatgttgcctgccttgacttagaag

SEQ ID NO: 275632 - DNA, 25 bp, Artificial
  probe
  misc_feature (1)..(25): SEQ ID NO: 856; WAN024DTU; Start 131; Stop 155
caatctcttctagctcaatcttatc

SEQ ID NO: 275633 - DNA, 25 bp, Artificial
  probe
  misc_feature (1)..(25): SEQ ID NO: 856; WAN024DTU; Start 137; Stop 161
cttctagctcaatcttatcaagcat

SEQ ID NO: 275634 - DNA, 25 bp, Artificial
  probe
  misc_feature (1)..(25): SEQ ID NO: 856; WAN024DTU; Start 13; Stop 37
ttatccaagatagtttcaccatcaa

SEQ ID NO: 275635 - DNA, 25 bp, Artificial
  probe
  misc_feature (1)..(25): SEQ ID NO: 856; WAN024DTU; Start 291; Stop 315
agaagattccttccagaagtcgtag

SEQ ID NO: 275636 - DNA, 25 bp, Artificial
  probe
  misc_feature (1)..(25): SEQ ID NO: 856; WAN024DTU; Start 22; Stop 46
atagtttcaccatcaatctttacag

SEQ ID NO: 275637 - DNA, 25 bp, Artificial
  probe
  misc_feature (1)..(25): SEQ ID NO: 856; WAN024DTU; Start 21; Stop 45
gatagtttcaccatcaatctttaca

SEQ ID NO: 275638 - DNA, 25 bp, Artificial
  probe
  misc_feature (1)..(25): SEQ ID NO: 856; WAN024DTU; Start 14; Stop 38
tatccaagatagtttcaccatcaat

SEQ ID NO: 275639 - DNA, 25 bp, Artificial
  probe
  misc_feature (1)..(25): SEQ ID NO: 856; WAN024DTU; Start 12; Stop 36
attatccaagatagtttcaccatca

SEQ ID NO: 275640 - DNA, 25 bp, Artificial
  probe
  misc_feature (1)..(25): SEQ ID NO: 856; WAN024DTU; Start 138; Stop 162
ttctagctcaatcttatcaagcatt

SEQ ID NO: 275641 - DNA, 25 bp, Artificial
  probe
  misc_feature (1)..(25): SEQ ID NO: 856; WAN024DTU; Start 16; Stop 40
tccaagatagtttcaccatcaatct

SEQ ID NO: 275642 - DNA, 25 bp, Artificial
  probe
  misc_feature (1)..(25): SEQ ID NO: 856; WAN024DTU; Start 290; Stop 314
cagaagattccttccagaagtcgta

SEQ ID NO: 275643 - DNA, 25 bp, Artificial
  probe
  misc_feature (1)..(25): SEQ ID NO: 857; WAN024F3Z; Start 547; Stop 571
ccaggaatgattgagtctgatatga

SEQ ID NO: 275644 - DNA, 25 bp, Artificial
  probe
  misc_feature (1)..(25): SEQ ID NO: 857; WAN024F3Z; Start 535; Stop 559
aatgtgattgctccaggaatgattg

SEQ ID NO: 275645 - DNA, 25 bp, Artificial
  probe
  misc_feature (1)..(25): SEQ ID NO: 857; WAN024F3Z; Start 546; Stop 570
tccaggaatgattgagtctgatatg

SEQ ID NO: 275646 - DNA, 25 bp, Artificial
  probe
  misc_feature (1)..(25): SEQ ID NO: 857; WAN024F3Z; Start 545; Stop 569
ctccaggaatgattgagtctgatat

SEQ ID NO: 275647 - DNA, 25 bp, Artificial
  probe
  misc_feature (1)..(25): SEQ ID NO: 857; WAN024F3Z; Start 388; Stop 412
gccagagaaggtgctatcattaata

SEQ ID NO: 275648 - DNA, 25 bp, Artificial
  probe
  misc_feature (1)..(25): SEQ ID NO: 857; WAN024F3Z; Start 548; Stop 572
caggaatgattgagtctgatatgac

SEQ ID NO: 275649 - DNA, 25 bp, Artificial
  probe
  misc_feature (1)..(25): SEQ ID NO: 857; WAN024F3Z; Start 536; Stop 560
atgtgattgctccaggaatgattga

SEQ ID NO: 275650 - DNA, 25 bp, Artificial
  probe
  misc_feature (1)..(25): SEQ ID NO: 857; WAN024F3Z; Start 143; Stop 167
tttcaaactatggtatcaaggtggt

SEQ ID NO: 275651 - DNA, 25 bp, Artificial
  probe
  misc_feature (1)..(25): SEQ ID NO: 857; WAN024F3Z; Start 544; Stop 568
gctccaggaatgattgagtctgata

SEQ ID NO: 275652 - DNA, 25 bp, Artificial
  probe
  misc_feature (1)..(25): SEQ ID NO: 857; WAN024F3Z; Start 334; Stop 358
aatctgactggtgcctttaatatga

SEQ ID NO: 275653 - DNA, 25 bp, Artificial
  probe
  misc_feature (1)..(25): SEQ ID NO: 857; WAN024F3Z; Start 333; Stop 357
caatctgactggtgcctttaatatg

SEQ ID NO: 275654 - DNA, 25 bp, Artificial
  probe
  misc_feature (1)..(25): SEQ ID NO: 857; WAN024F3Z; Start 335; Stop 359
atctgactggtgcctttaatatgac

SEQ ID NO: 275655 - DNA, 25 bp, Artificial
  probe
  misc_feature (1)..(25): SEQ ID NO: 857; WAN024F3Z; Start 389; Stop 413
ccagagaaggtgctatcattaatat

SEQ ID NO: 275656 - DNA, 25 bp, Artificial
  probe
  misc_feature (1)..(25): SEQ ID NO: 857; WAN024F3Z; Start 169; Stop 193
cccatttcaggagatgtatcagatt

SEQ ID NO: 275657 - DNA, 25 bp, Artificial
  probe
  misc_feature (1)..(25): SEQ ID NO: 857; WAN024F3Z; Start 521; Stop 545
ggaatatacgagtcaatgtgattgc

SEQ ID NO: 275658 - DNA, 25 bp, Artificial
  probe
  misc_feature (1)..(25): SEQ ID NO: 857; WAN024F3Z; Start 520; Stop 544
cggaatatacgagtcaatgtgattg

SEQ ID NO: 275659 - DNA, 25 bp, Artificial
  probe
  misc_feature (1)..(25): SEQ ID NO: 857; WAN024F3Z; Start 144; Stop 168
ttcaaactatggtatcaaggtggtt

SEQ ID NO: 275660 - DNA, 25 bp, Artificial
  probe
  misc_feature (1)..(25): SEQ ID NO: 857; WAN024F3Z; Start 145; Stop 169
tcaaactatggtatcaaggtggttc

SEQ ID NO: 275661 - DNA, 25 bp, Artificial
  probe
  misc_feature (1)..(25): SEQ ID NO: 857; WAN024F3Z; Start 523; Stop 547
aatatacgagtcaatgtgattgctc

SEQ ID NO: 275662 - DNA, 25 bp, Artificial
  probe
  misc_feature (1)..(25): SEQ ID NO: 857; WAN024F3Z; Start 522; Stop 546
gaatatacgagtcaatgtgattgct

SEQ ID NO: 275663 - DNA, 25 bp, Artificial
  probe
  misc_feature (1)..(25): SEQ ID NO: 857; WAN024F3Z; Start 524; Stop 548
atatacgagtcaatgtgattgctcc

SEQ ID NO: 275664 - DNA, 25 bp, Artificial
  probe
  misc_feature (1)..(25): SEQ ID NO: 857; WAN024F3Z; Start 411; Stop 435
tatgtctagtgttgttggtttgatg

SEQ ID NO: 275665 - DNA, 25 bp, Artificial
  probe
  misc_feature (1)..(25): SEQ ID NO: 857; WAN024F3Z; Start 519; Stop 543
tcggaatatacgagtcaatgtgatt

SEQ ID NO: 275666 - DNA, 25 bp, Artificial
  probe
  misc_feature (1)..(25): SEQ ID NO: 857; WAN024F3Z; Start 516; Stop 540
tagtcggaatatacgagtcaatgtg

SEQ ID NO: 275667 - DNA, 25 bp, Artificial
  probe
  misc_feature (1)..(25): SEQ ID NO: 857; WAN024F3Z; Start 332; Stop 356
tcaatctgactggtgcctttaatat

SEQ ID NO: 275668 - DNA, 25 bp, Artificial
  probe
  misc_feature (1)..(25): SEQ ID NO: 857; WAN024F3Z; Start 515; Stop 539
ctagtcggaatatacgagtcaatgt

SEQ ID NO: 275669 - DNA, 25 bp, Artificial
  probe
  misc_feature (1)..(25): SEQ ID NO: 857; WAN024F3Z; Start 540; Stop 564
gattgctccaggaatgattgagtct

SEQ ID NO: 275670 - DNA, 25 bp, Artificial
  probe
  misc_feature (1)..(25): SEQ ID NO: 857; WAN024F3Z; Start 27; Stop 51
tattacaggttcgagtcgtggaatt

SEQ ID NO: 275671 - DNA, 25 bp, Artificial
  probe
  misc_feature (1)..(25): SEQ ID NO: 857; WAN024F3Z; Start 26; Stop 50
ttattacaggttcgagtcgtggaat

SEQ ID NO: 275672 - DNA, 25 bp, Artificial
  probe
  misc_feature (1)..(25): SEQ ID NO: 857; WAN024F3Z; Start 584; Stop 608
cagataagattaaggaagctacact

SEQ ID NO: 275673 - DNA, 25 bp, Artificial
  probe
  misc_feature (1)..(25): SEQ ID NO: 857; WAN024F3Z; Start 583; Stop 607
tcagataagattaaggaagctacac

SEQ ID NO: 275674 - DNA, 25 bp, Artificial
  probe
  misc_feature (1)..(25): SEQ ID NO: 857; WAN024F3Z; Start 518; Stop 542
gtcggaatatacgagtcaatgtgat

SEQ ID NO: 275675 - DNA, 25 bp, Artificial
  probe
  misc_feature (1)..(25): SEQ ID NO: 857; WAN024F3Z; Start 602; Stop 626
ctacactagctcagattccgatgaa

SEQ ID NO: 275676 - DNA, 25 bp, Artificial
  probe
  misc_feature (1)..(25): SEQ ID NO: 858; WAN024D6T; Start 558; Stop 582
tgctattggattggtagatgaactt

SEQ ID NO: 275677 - DNA, 25 bp, Artificial
  probe
  misc_feature (1)..(25): SEQ ID NO: 858; WAN024D6T; Start 559; Stop 583
gctattggattggtagatgaacttg

SEQ ID NO: 275678 - DNA, 25 bp, Artificial
  probe
  misc_feature (1)..(25): SEQ ID NO: 858; WAN024D6T; Start 557; Stop 581
atgctattggattggtagatgaact

SEQ ID NO: 275679 - DNA, 25 bp, Artificial
  probe
  misc_feature (1)..(25): SEQ ID NO: 858; WAN024D6T; Start 556; Stop 580
tatgctattggattggtagatgaac

SEQ ID NO: 275680 - DNA, 25 bp, Artificial
  probe
  misc_feature (1)..(25): SEQ ID NO: 858; WAN024D6T; Start 527; Stop 551
aaggaataagccagattagttatgc

SEQ ID NO: 275681 - DNA, 25 bp, Artificial
  probe
  misc_feature (1)..(25): SEQ ID NO: 858; WAN024D6T; Start 560; Stop 584
ctattggattggtagatgaacttga

SEQ ID NO: 275682 - DNA, 25 bp, Artificial
  probe
  misc_feature (1)..(25): SEQ ID NO: 858; WAN024D6T; Start 551; Stop 575
cagattatgctattggattggtaga

SEQ ID NO: 275683 - DNA, 25 bp, Artificial
  probe
  misc_feature (1)..(25): SEQ ID NO: 858; WAN024D6T; Start 393; Stop 417
ggatgaattggatcttcttcgtaca

SEQ ID NO: 275684 - DNA, 25 bp, Artificial
  probe
  misc_feature (1)..(25): SEQ ID NO: 858; WAN024D6T; Start 561; Stop 585
tattggattggtagatgaacttgaa

SEQ ID NO: 275685 - DNA, 25 bp, Artificial
  probe
  misc_feature (1)..(25): SEQ ID NO: 858; WAN024D6T; Start 394; Stop 418
gatgaattggatcttcttcgtacaa

SEQ ID NO: 275686 - DNA, 25 bp, Artificial
  probe
  misc_feature (1)..(25): SEQ ID NO: 858; WAN024D6T; Start 555; Stop 579
ttatgctattggattggtagatgaa

SEQ ID NO: 275687 - DNA, 25 bp, Artificial
  probe
  misc_feature (1)..(25): SEQ ID NO: 858; WAN024D6T; Start 554; Stop 578
attatgctattggattggtagatga

SEQ ID NO: 275688 - DNA, 25 bp, Artificial
  probe
  misc_feature (1)..(25): SEQ ID NO: 858; WAN024D6T; Start 392; Stop 416
cggatgaattggatcttcttcgtac

SEQ ID NO: 275689 - DNA, 25 bp, Artificial
  probe
  misc_feature (1)..(25): SEQ ID NO: 858; WAN024D6T; Start 553; Stop 577
gattatgctattggattggtagatg

SEQ ID NO: 275690 - DNA, 25 bp, Artificial
  probe
  misc_feature (1)..(25): SEQ ID NO: 858; WAN024D6T; Start 552; Stop 576
agattatgctattggattggtagat

SEQ ID NO: 275691 - DNA, 25 bp, Artificial
  probe
  misc_feature (1)..(25): SEQ ID NO: 858; WAN024D6T; Start 528; Stop 552
aggaataagccagattagttatgca

SEQ ID NO: 275692 - DNA, 25 bp, Artificial
  probe
  misc_feature (1)..(25): SEQ ID NO: 858; WAN024D6T; Start 388; Stop 412
caagcggatgaattggatcttcttc

SEQ ID NO: 275693 - DNA, 25 bp, Artificial
  probe
  misc_feature (1)..(25): SEQ ID NO: 858; WAN024D6T; Start 529; Stop 553
ggaataagccagattagttatgcag

SEQ ID NO: 275694 - DNA, 25 bp, Artificial
  probe
  misc_feature (1)..(25): SEQ ID NO: 858; WAN024D6T; Start 535; Stop 559
agccagattagttatgcagattatg

SEQ ID NO: 275695 - DNA, 25 bp, Artificial
  probe
  misc_feature (1)..(25): SEQ ID NO: 858; WAN024D6T; Start 562; Stop 586
attggattggtagatgaacttgaaa

SEQ ID NO: 275696 - DNA, 25 bp, Artificial
  probe
  misc_feature (1)..(25): SEQ ID NO: 858; WAN024D6T; Start 162; Stop 186
tcttactggatttgatgctgttatt

SEQ ID NO: 275697 - DNA, 25 bp, Artificial
  probe
  misc_feature (1)..(25): SEQ ID NO: 858; WAN024D6T; Start 70; Stop 94
ggacatgaagtaacggctattgttc

SEQ ID NO: 275698 - DNA, 25 bp, Artificial
  probe
  misc_feature (1)..(25): SEQ ID NO: 858; WAN024D6T; Start 530; Stop 554
gaataagccagattagttatgcaga

SEQ ID NO: 275699 - DNA, 25 bp, Artificial
  probe
  misc_feature (1)..(25): SEQ ID NO: 858; WAN024D6T; Start 387; Stop 411
tcaagcggatgaattggatcttctt

SEQ ID NO: 275700 - DNA, 25 bp, Artificial
  probe
  misc_feature (1)..(25): SEQ ID NO: 858; WAN024D6T; Start 479; Stop 503
aaacaggaaactacattctagcagg

SEQ ID NO: 275701 - DNA, 25 bp, Artificial
  probe
  misc_feature (1)..(25): SEQ ID NO: 858; WAN024D6T; Start 157; Stop 181
gatgatcttactggatttgatgctg

SEQ ID NO: 275702 - DNA, 25 bp, Artificial
  probe
  misc_feature (1)..(25): SEQ ID NO: 858; WAN024D6T; Start 158; Stop 182
atgatcttactggatttgatgctgt

SEQ ID NO: 275703 - DNA, 25 bp, Artificial
  probe
  misc_feature (1)..(25): SEQ ID NO: 858; WAN024D6T; Start 159; Stop 183
tgatcttactggatttgatgctgtt

SEQ ID NO: 275704 - DNA, 25 bp, Artificial
  probe
  misc_feature (1)..(25): SEQ ID NO: 858; WAN024D6T; Start 161; Stop 185
atcttactggatttgatgctgttat

SEQ ID NO: 275705 - DNA, 25 bp, Artificial
  probe
  misc_feature (1)..(25): SEQ ID NO: 858; WAN024D6T; Start 69; Stop 93
aggacatgaagtaacggctattgtt

SEQ ID NO: 275706 - DNA, 25 bp, Artificial
  probe
  misc_feature (1)..(25): SEQ ID NO: 858; WAN024D6T; Start 534; Stop 558
aagccagattagttatgcagattat

SEQ ID NO: 275707 - DNA, 25 bp, Artificial
  probe
  misc_feature (1)..(25): SEQ ID NO: 858; WAN024D6T; Start 156; Stop 180
agatgatcttactggatttgatgct

SEQ ID NO: 275708 - DNA, 25 bp, Artificial
  probe
  misc_feature (1)..(25): SEQ ID NO: 858; WAN024D6T; Start 71; Stop 95
gacatgaagtaacggctattgttcg

SEQ ID NO: 275709 - DNA, 25 bp, Artificial
  probe
  misc_feature (1)..(25): SEQ ID NO: 859; WAN024D7K; Start 847; Stop 871
ctatcaggtgagcaagatactgtag

SEQ ID NO: 275710 - DNA, 25 bp, Artificial
  probe
  misc_feature (1)..(25): SEQ ID NO: 859; WAN024D7K; Start 848; Stop 872
tatcaggtgagcaagatactgtaga

SEQ ID NO: 275711 - DNA, 25 bp, Artificial
  probe
  misc_feature (1)..(25): SEQ ID NO: 859; WAN024D7K; Start 846; Stop 870
tctatcaggtgagcaagatactgta

SEQ ID NO: 275712 - DNA, 25 bp, Artificial
  probe
  misc_feature (1)..(25): SEQ ID NO: 859; WAN024D7K; Start 849; Stop 873
atcaggtgagcaagatactgtagaa

SEQ ID NO: 275713 - DNA, 25 bp, Artificial
  probe
  misc_feature (1)..(25): SEQ ID NO: 859; WAN024D7K; Start 845; Stop 869
ctctatcaggtgagcaagatactgt

SEQ ID NO: 275714 - DNA, 25 bp, Artificial
  probe
  misc_feature (1)..(25): SEQ ID NO: 859; WAN024D7K; Start 689; Stop 713
cagtggtcatcaatggtgtgtctaa

SEQ ID NO: 275715 - DNA, 25 bp, Artificial
  probe
  misc_feature (1)..(25): SEQ ID NO: 859; WAN024D7K; Start 965; Stop 989
ccttctatctcttcccaaatgtcaa

SEQ ID NO: 275716 - DNA, 25 bp, Artificial
  probe
  misc_feature (1)..(25): SEQ ID NO: 859; WAN024D7K; Start 258; Stop 282
ctattctgtagcgtcaaatcaagtg

SEQ ID NO: 275717 - DNA, 25 bp, Artificial
  probe
  misc_feature (1)..(25): SEQ ID NO: 859; WAN024D7K; Start 1155; Stop 1179
cttgaaagcatttatgggtagtgag

SEQ ID NO: 275718 - DNA, 25 bp, Artificial
  probe
  misc_feature (1)..(25): SEQ ID NO: 859; WAN024D7K; Start 309; Stop 333
tctctataccttctttatggctgtg

SEQ ID NO: 275719 - DNA, 25 bp, Artificial
  probe
  misc_feature (1)..(25): SEQ ID NO: 859; WAN024D7K; Start 1157; Stop 1181
tgaaagcatttatgggtagtgagaa

SEQ ID NO: 275720 - DNA, 25 bp, Artificial
  probe
  misc_feature (1)..(25): SEQ ID NO: 859; WAN024D7K; Start 1156; Stop 1180
ttgaaagcatttatgggtagtgaga

SEQ ID NO: 275721 - DNA, 25 bp, Artificial
  probe
  misc_feature (1)..(25): SEQ ID NO: 859; WAN024D7K; Start 310; Stop 334
ctctataccttctttatggctgtgg

SEQ ID NO: 275722 - DNA, 25 bp, Artificial
  probe
  misc_feature (1)..(25): SEQ ID NO: 859; WAN024D7K; Start 308; Stop 332
ctctctataccttctttatggctgt

SEQ ID NO: 275723 - DNA, 25 bp, Artificial
  probe
  misc_feature (1)..(25): SEQ ID NO: 859; WAN024D7K; Start 890; Stop 914
ttgaggaacgtcttaataccatcta

SEQ ID NO: 275724 - DNA, 25 bp, Artificial
  probe
  misc_feature (1)..(25): SEQ ID NO: 859; WAN024D7K; Start 307; Stop 331
tctctctataccttctttatggctg

SEQ ID NO: 275725 - DNA, 25 bp, Artificial
  probe
  misc_feature (1)..(25): SEQ ID NO: 859; WAN024D7K; Start 854; Stop 878
gtgagcaagatactgtagaaagcat

SEQ ID NO: 275726 - DNA, 25 bp, Artificial
  probe
  misc_feature (1)..(25): SEQ ID NO: 859; WAN024D7K; Start 1158; Stop 1182
gaaagcatttatgggtagtgagaat

SEQ ID NO: 275727 - DNA, 25 bp, Artificial
  probe
  misc_feature (1)..(25): SEQ ID NO: 859; WAN024D7K; Start 891; Stop 915
tgaggaacgtcttaataccatctat

SEQ ID NO: 275728 - DNA, 25 bp, Artificial
  probe
  misc_feature (1)..(25): SEQ ID NO: 859; WAN024D7K; Start 966; Stop 990
cttctatctcttcccaaatgtcaaa

SEQ ID NO: 275729 - DNA, 25 bp, Artificial
  probe
  misc_feature (1)..(25): SEQ ID NO: 859; WAN024D7K; Start 73; Stop 97
ctgaaggctgagggtagagatattt

SEQ ID NO: 275730 - DNA, 25 bp, Artificial
  probe
  misc_feature (1)..(25): SEQ ID NO: 859; WAN024D7K; Start 892; Stop 916
gaggaacgtcttaataccatctatc

SEQ ID NO: 275731 - DNA, 25 bp, Artificial
  probe
  misc_feature (1)..(25): SEQ ID NO: 859; WAN024D7K; Start 306; Stop 330
ttctctctataccttctttatggct

SEQ ID NO: 275732 - DNA, 25 bp, Artificial
  probe
  misc_feature (1)..(25): SEQ ID NO: 859; WAN024D7K; Start 259; Stop 283
tattctgtagcgtcaaatcaagtga

SEQ ID NO: 275733 - DNA, 25 bp, Artificial
  probe
  misc_feature (1)..(25): SEQ ID NO: 859; WAN024D7K; Start 431; Stop 455
ctaaggaagacaatcactttaaggt

SEQ ID NO: 275734 - DNA, 25 bp, Artificial
  probe
  misc_feature (1)..(25): SEQ ID NO: 859; WAN024D7K; Start 855; Stop 879
tgagcaagatactgtagaaagcatg

SEQ ID NO: 275735 - DNA, 25 bp, Artificial
  probe
  misc_feature (1)..(25): SEQ ID NO: 859; WAN024D7K; Start 21; Stop 45
tttagaaatggaagaaagtgtgact

SEQ ID NO: 275736 - DNA, 25 bp, Artificial
  probe
  misc_feature (1)..(25): SEQ ID NO: 859; WAN024D7K; Start 690; Stop 714
agtggtcatcaatggtgtgtctaaa

SEQ ID NO: 275737 - DNA, 25 bp, Artificial
  probe
  misc_feature (1)..(25): SEQ ID NO: 859; WAN024D7K; Start 893; Stop 917
aggaacgtcttaataccatctatcc

SEQ ID NO: 275738 - DNA, 25 bp, Artificial
  probe
  misc_feature (1)..(25): SEQ ID NO: 859; WAN024D7K; Start 851; Stop 875
caggtgagcaagatactgtagaaag

SEQ ID NO: 275739 - DNA, 25 bp, Artificial
  probe
  misc_feature (1)..(25): SEQ ID NO: 859; WAN024D7K; Start 72; Stop 96
actgaaggctgagggtagagatatt

SEQ ID NO: 275740 - DNA, 25 bp, Artificial
  probe
  misc_feature (1)..(25): SEQ ID NO: 859; WAN024D7K; Start 964; Stop 988
gccttctatctcttcccaaatgtca

SEQ ID NO: 275741 - DNA, 25 bp, Artificial
  probe
  misc_feature (1)..(25): SEQ ID NO: 859; WAN024D7K; Start 852; Stop 876
aggtgagcaagatactgtagaaagc

SEQ ID NO: 275742 - DNA, 25 bp, Artificial
  probe
  misc_feature (1)..(25): SEQ ID NO: 860; WAN024GEA; Start 550; Stop 574
atacgaccaatacagtgactcttac

SEQ ID NO: 275743 - DNA, 25 bp, Artificial
  probe
  misc_feature (1)..(25): SEQ ID NO: 860; WAN024GEA; Start 549; Stop 573
aatacgaccaatacagtgactctta

SEQ ID NO: 275744 - DNA, 25 bp, Artificial
  probe
  misc_feature (1)..(25): SEQ ID NO: 860; WAN024GEA; Start 554; Stop 578
gaccaatacagtgactcttaccaag

SEQ ID NO: 275745 - DNA, 25 bp, Artificial
  probe
  misc_feature (1)..(25): SEQ ID NO: 860; WAN024GEA; Start 718; Stop 742
caaccaagaattgctagacttcatc

SEQ ID NO: 275746 - DNA, 25 bp, Artificial
  probe
  misc_feature (1)..(25): SEQ ID NO: 860; WAN024GEA; Start 551; Stop 575
tacgaccaatacagtgactcttacc

SEQ ID NO: 275747 - DNA, 25 bp, Artificial
  probe
  misc_feature (1)..(25): SEQ ID NO: 860; WAN024GEA; Start 720; Stop 744
accaagaattgctagacttcatcaa

SEQ ID NO: 275748 - DNA, 25 bp, Artificial
  probe
  misc_feature (1)..(25): SEQ ID NO: 860; WAN024GEA; Start 719; Stop 743
aaccaagaattgctagacttcatca

SEQ ID NO: 275749 - DNA, 25 bp, Artificial
  probe
  misc_feature (1)..(25): SEQ ID NO: 860; WAN024GEA; Start 217; Stop 241
caaggtacgctacgatattgaacta

SEQ ID NO: 275750 - DNA, 25 bp, Artificial
  probe
  misc_feature (1)..(25): SEQ ID NO: 860; WAN024GEA; Start 211; Stop 235
tcttaccaaggtacgctacgatatt

SEQ ID NO: 275751 - DNA, 25 bp, Artificial
  probe
  misc_feature (1)..(25): SEQ ID NO: 860; WAN024GEA; Start 210; Stop 234
ttcttaccaaggtacgctacgatat

SEQ ID NO: 275752 - DNA, 25 bp, Artificial
  probe
  misc_feature (1)..(25): SEQ ID NO: 860; WAN024GEA; Start 212; Stop 236
cttaccaaggtacgctacgatattg

SEQ ID NO: 275753 - DNA, 25 bp, Artificial
  probe
  misc_feature (1)..(25): SEQ ID NO: 860; WAN024GEA; Start 553; Stop 577
cgaccaatacagtgactcttaccaa

SEQ ID NO: 275754 - DNA, 25 bp, Artificial
  probe
  misc_feature (1)..(25): SEQ ID NO: 860; WAN024GEA; Start 214; Stop 238
taccaaggtacgctacgatattgaa

SEQ ID NO: 275755 - DNA, 25 bp, Artificial
  probe
  misc_feature (1)..(25): SEQ ID NO: 860; WAN024GEA; Start 213; Stop 237
ttaccaaggtacgctacgatattga

SEQ ID NO: 275756 - DNA, 25 bp, Artificial
  probe
  misc_feature (1)..(25): SEQ ID NO: 860; WAN024GEA; Start 555; Stop 579
accaatacagtgactcttaccaagc

SEQ ID NO: 275757 - DNA, 25 bp, Artificial
  probe
  misc_feature (1)..(25): SEQ ID NO: 860; WAN024GEA; Start 209; Stop 233
gttcttaccaaggtacgctacgata

SEQ ID NO: 275758 - DNA, 25 bp, Artificial
  probe
  misc_feature (1)..(25): SEQ ID NO: 860; WAN024GEA; Start 192; Stop 216
ctacgttgacaatgatggttcttac

SEQ ID NO: 275759 - DNA, 25 bp, Artificial
  probe
  misc_feature (1)..(25): SEQ ID NO: 860; WAN024GEA; Start 522; Stop 546
agaatcatccagaaatcaaactcca

SEQ ID NO: 275760 - DNA, 25 bp, Artificial
  probe
  misc_feature (1)..(25): SEQ ID NO: 860; WAN024GEA; Start 559; Stop 583
atacagtgactcttaccaagctctt

SEQ ID NO: 275761 - DNA, 25 bp, Artificial
  probe
  misc_feature (1)..(25): SEQ ID NO: 860; WAN024GEA; Start 558; Stop 582
aatacagtgactcttaccaagctct

SEQ ID NO: 275762 - DNA, 25 bp, Artificial
  probe
  misc_feature (1)..(25): SEQ ID NO: 860; WAN024GEA; Start 557; Stop 581
caatacagtgactcttaccaagctc

SEQ ID NO: 275763 - DNA, 25 bp, Artificial
  probe
  misc_feature (1)..(25): SEQ ID NO: 860; WAN024GEA; Start 523; Stop 547
gaatcatccagaaatcaaactccaa

SEQ ID NO: 275764 - DNA, 25 bp, Artificial
  probe
  misc_feature (1)..(25): SEQ ID NO: 860; WAN024GEA; Start 46; Stop 70
gcccttatctttatcactgcttgta

SEQ ID NO: 275765 - DNA, 25 bp, Artificial
  probe
  misc_feature (1)..(25): SEQ ID NO: 860; WAN024GEA; Start 548; Stop 572
aaatacgaccaatacagtgactctt

SEQ ID NO: 275766 - DNA, 25 bp, Artificial
  probe
  misc_feature (1)..(25): SEQ ID NO: 860; WAN024GEA; Start 521; Stop 545
aagaatcatccagaaatcaaactcc

SEQ ID NO: 275767 - DNA, 25 bp, Artificial
  probe
  misc_feature (1)..(25): SEQ ID NO: 860; WAN024GEA; Start 43; Stop 67
tttgcccttatctttatcactgctt

SEQ ID NO: 275768 - DNA, 25 bp, Artificial
  probe
  misc_feature (1)..(25): SEQ ID NO: 860; WAN024GEA; Start 524; Stop 548
aatcatccagaaatcaaactccaaa

SEQ ID NO: 275769 - DNA, 25 bp, Artificial
  probe
  misc_feature (1)..(25): SEQ ID NO: 860; WAN024GEA; Start 47; Stop 71
cccttatctttatcactgcttgtag

SEQ ID NO: 275770 - DNA, 25 bp, Artificial
  probe
  misc_feature (1)..(25): SEQ ID NO: 860; WAN024GEA; Start 42; Stop 66
ctttgcccttatctttatcactgct

SEQ ID NO: 275771 - DNA, 25 bp, Artificial
  probe
  misc_feature (1)..(25): SEQ ID NO: 860; WAN024GEA; Start 721; Stop 745
ccaagaattgctagacttcatcaat

SEQ ID NO: 275772 - DNA, 25 bp, Artificial
  probe
  misc_feature (1)..(25): SEQ ID NO: 860; WAN024GEA; Start 612; Stop 636
ctgacaatacggaagttctagcttg

SEQ ID NO: 275773 - DNA, 25 bp, Artificial
  probe
  misc_feature (1)..(25): SEQ ID NO: 860; WAN024GEA; Start 560; Stop 584
tacagtgactcttaccaagctcttc

SEQ ID NO: 275774 - DNA, 25 bp, Artificial
  probe
  misc_feature (1)..(25): SEQ ID NO: 860; WAN024GEA; Start 44; Stop 68
ttgcccttatctttatcactgcttg

SEQ ID NO: 275775 - DNA, 25 bp, Artificial
  probe
  misc_feature (1)..(25): SEQ ID NO: 861; WAN024DX2; Start 723; Stop 747
tgctgtcttgcttattaattccttg

SEQ ID NO: 275776 - DNA, 25 bp, Artificial
  probe
  misc_feature (1)..(25): SEQ ID NO: 861; WAN024DX2; Start 724; Stop 748
gctgtcttgcttattaattccttgg

SEQ ID NO: 275777 - DNA, 25 bp, Artificial
  probe
  misc_feature (1)..(25): SEQ ID NO: 861; WAN024DX2; Start 722; Stop 746
ttgctgtcttgcttattaattcctt

SEQ ID NO: 275778 - DNA, 25 bp, Artificial
  probe
  misc_feature (1)..(25): SEQ ID NO: 861; WAN024DX2; Start 481; Stop 505
ctcttagctctatcggtcaacaatt

SEQ ID NO: 275779 - DNA, 25 bp, Artificial
  probe
  misc_feature (1)..(25): SEQ ID NO: 861; WAN024DX2; Start 899; Stop 923
agtccttgcctagattgatgatgtg

SEQ ID NO: 275780 - DNA, 25 bp, Artificial
  probe
  misc_feature (1)..(25): SEQ ID NO: 861; WAN024DX2; Start 898; Stop 922
cagtccttgcctagattgatgatgt

SEQ ID NO: 275781 - DNA, 25 bp, Artificial
  probe
  misc_feature (1)..(25): SEQ ID NO: 861; WAN024DX2; Start 978; Stop 1002
gcttggtttgctatttctcttcttt

SEQ ID NO: 275782 - DNA, 25 bp, Artificial
  probe
  misc_feature (1)..(25): SEQ ID NO: 861; WAN024DX2; Start 428; Stop 452
cacagttcatcacctatatttcagc

SEQ ID NO: 275783 - DNA, 25 bp, Artificial
  probe
  misc_feature (1)..(25): SEQ ID NO: 861; WAN024DX2; Start 1006; Stop 1030
ctgtatgtgtctggtaaagttcaac

SEQ ID NO: 275784 - DNA, 25 bp, Artificial
  probe
  misc_feature (1)..(25): SEQ ID NO: 861; WAN024DX2; Start 1179; Stop 1203
gatgctatttgttggtctttccttg

SEQ ID NO: 275785 - DNA, 25 bp, Artificial
  probe
  misc_feature (1)..(25): SEQ ID NO: 861; WAN024DX2; Start 1175; Stop 1199
cttggatgctatttgttggtctttc

SEQ ID NO: 275786 - DNA, 25 bp, Artificial
  probe
  misc_feature (1)..(25): SEQ ID NO: 861; WAN024DX2; Start 1020; Stop 1044
taaagttcaaccaaagattagtgcc

SEQ ID NO: 275787 - DNA, 25 bp, Artificial
  probe
  misc_feature (1)..(25): SEQ ID NO: 861; WAN024DX2; Start 131; Stop 155
ctgttgctatggcgaatattgtcat

SEQ ID NO: 275788 - DNA, 25 bp, Artificial
  probe
  misc_feature (1)..(25): SEQ ID NO: 861; WAN024DX2; Start 955; Stop 979
gctaatttattcaatcaagtcgtgc

SEQ ID NO: 275789 - DNA, 25 bp, Artificial
  probe
  misc_feature (1)..(25): SEQ ID NO: 861; WAN024DX2; Start 715; Stop 739
atgctctttgctgtcttgcttatta

SEQ ID NO: 275790 - DNA, 25 bp, Artificial
  probe
  misc_feature (1)..(25): SEQ ID NO: 861; WAN024DX2; Start 714; Stop 738
tatgctctttgctgtcttgcttatt

SEQ ID NO: 275791 - DNA, 25 bp, Artificial
  probe
  misc_feature (1)..(25): SEQ ID NO: 861; WAN024DX2; Start 713; Stop 737
ttatgctctttgctgtcttgcttat

SEQ ID NO: 275792 - DNA, 25 bp, Artificial
  probe
  misc_feature (1)..(25): SEQ ID NO: 861; WAN024DX2; Start 1174; Stop 1198
acttggatgctatttgttggtcttt

SEQ ID NO: 275793 - DNA, 25 bp, Artificial
  probe
  misc_feature (1)..(25): SEQ ID NO: 861; WAN024DX2; Start 977; Stop 1001
tgcttggtttgctatttctcttctt

SEQ ID NO: 275794 - DNA, 25 bp, Artificial
  probe
  misc_feature (1)..(25): SEQ ID NO: 861; WAN024DX2; Start 1168; Stop 1192
cagttgacttggatgctatttgttg

SEQ ID NO: 275795 - DNA, 25 bp, Artificial
  probe
  misc_feature (1)..(25): SEQ ID NO: 861; WAN024DX2; Start 712; Stop 736
tttatgctctttgctgtcttgctta

SEQ ID NO: 275796 - DNA, 25 bp, Artificial
  probe
  misc_feature (1)..(25): SEQ ID NO: 861; WAN024DX2; Start 1022; Stop 1046
aagttcaaccaaagattagtgccat

SEQ ID NO: 275797 - DNA, 25 bp, Artificial
  probe
  misc_feature (1)..(25): SEQ ID NO: 861; WAN024DX2; Start 1019; Stop 1043
gtaaagttcaaccaaagattagtgc

SEQ ID NO: 275798 - DNA, 25 bp, Artificial
  probe
  misc_feature (1)..(25): SEQ ID NO: 861; WAN024DX2; Start 953; Stop 977
tggctaatttattcaatcaagtcgt

SEQ ID NO: 275799 - DNA, 25 bp, Artificial
  probe
  misc_feature (1)..(25): SEQ ID NO: 861; WAN024DX2; Start 1183; Stop 1207
ctatttgttggtctttccttgctag

SEQ ID NO: 275800 - DNA, 25 bp, Artificial
  probe
  misc_feature (1)..(25): SEQ ID NO: 861; WAN024DX2; Start 132; Stop 156
tgttgctatggcgaatattgtcatg

SEQ ID NO: 275801 - DNA, 25 bp, Artificial
  probe
  misc_feature (1)..(25): SEQ ID NO: 861; WAN024DX2; Start 634; Stop 658
tctatcaaagaccagttcctaacaa

SEQ ID NO: 275802 - DNA, 25 bp, Artificial
  probe
  misc_feature (1)..(25): SEQ ID NO: 861; WAN024DX2; Start 633; Stop 657
ttctatcaaagaccagttcctaaca

SEQ ID NO: 275803 - DNA, 25 bp, Artificial
  probe
  misc_feature (1)..(25): SEQ ID NO: 861; WAN024DX2; Start 716; Stop 740
tgctctttgctgtcttgcttattaa

SEQ ID NO: 275804 - DNA, 25 bp, Artificial
  probe
  misc_feature (1)..(25): SEQ ID NO: 861; WAN024DX2; Start 954; Stop 978
ggctaatttattcaatcaagtcgtg

SEQ ID NO: 275805 - DNA, 25 bp, Artificial
  probe
  misc_feature (1)..(25): SEQ ID NO: 861; WAN024DX2; Start 1104; Stop 1128
attgtttaccttatccatacctgtg

SEQ ID NO: 275806 - DNA, 25 bp, Artificial
  probe
  misc_feature (1)..(25): SEQ ID NO: 861; WAN024DX2; Start 1021; Stop 1045
aaagttcaaccaaagattagtgcca

SEQ ID NO: 275807 - DNA, 25 bp, Artificial
  probe
  misc_feature (1)..(25): SEQ ID NO: 861; WAN024DX2; Start 644; Stop 668
accagttcctaacaatttaccgaaa

SEQ ID NO: 275808 - DNA, 25 bp, Artificial
  probe
  misc_feature (1)..(25): SEQ ID NO: 862; WAN024F5R; Start 1961; Stop 1985
tcttgattgccaatacatctgactt

SEQ ID NO: 275809 - DNA, 25 bp, Artificial
  probe
  misc_feature (1)..(25): SEQ ID NO: 862; WAN024F5R; Start 1960; Stop 1984
ttcttgattgccaatacatctgact

SEQ ID NO: 275810 - DNA, 25 bp, Artificial
  probe
  misc_feature (1)..(25): SEQ ID NO: 862; WAN024F5R; Start 2021; Stop 2045
ttcgttcagttgataagtacatgac

SEQ ID NO: 275811 - DNA, 25 bp, Artificial
  probe
  misc_feature (1)..(25): SEQ ID NO: 862; WAN024F5R; Start 2020; Stop 2044
cttcgttcagttgataagtacatga

SEQ ID NO: 275812 - DNA, 25 bp, Artificial
  probe
  misc_feature (1)..(25): SEQ ID NO: 862; WAN024F5R; Start 1766; Stop 1790
ttgatggtaaaggtgagaagatgtc

SEQ ID NO: 275813 - DNA, 25 bp, Artificial
  probe
  misc_feature (1)..(25): SEQ ID NO: 862; WAN024F5R; Start 2143; Stop 2167
gacttgtcagccttctaccttgatt

SEQ ID NO: 275814 - DNA, 25 bp, Artificial
  probe
  misc_feature (1)..(25): SEQ ID NO: 862; WAN024F5R; Start 1765; Stop 1789
cttgatggtaaaggtgagaagatgt

SEQ ID NO: 275815 - DNA, 25 bp, Artificial
  probe
  misc_feature (1)..(25): SEQ ID NO: 862; WAN024F5R; Start 1157; Stop 1181
cccaagaagaaatctctcactcata

SEQ ID NO: 275816 - DNA, 25 bp, Artificial
  probe
  misc_feature (1)..(25): SEQ ID NO: 862; WAN024F5R; Start 1768; Stop 1792
gatggtaaaggtgagaagatgtcta

SEQ ID NO: 275817 - DNA, 25 bp, Artificial
  probe
  misc_feature (1)..(25): SEQ ID NO: 862; WAN024F5R; Start 500; Stop 524
ttggtgagatggctaataagggtta

SEQ ID NO: 275818 - DNA, 25 bp, Artificial
  probe
  misc_feature (1)..(25): SEQ ID NO: 862; WAN024F5R; Start 1941; Stop 1965
gattcgtaacactcttcgtttcttg

SEQ ID NO: 275819 - DNA, 25 bp, Artificial
  probe
  misc_feature (1)..(25): SEQ ID NO: 862; WAN024F5R; Start 1940; Stop 1964
agattcgtaacactcttcgtttctt

SEQ ID NO: 275820 - DNA, 25 bp, Artificial
  probe
  misc_feature (1)..(25): SEQ ID NO: 862; WAN024F5R; Start 502; Stop 526
ggtgagatggctaataagggttata

SEQ ID NO: 275821 - DNA, 25 bp, Artificial
  probe
  misc_feature (1)..(25): SEQ ID NO: 862; WAN024F5R; Start 1945; Stop 1969
cgtaacactcttcgtttcttgattg

SEQ ID NO: 275822 - DNA, 25 bp, Artificial
  probe
  misc_feature (1)..(25): SEQ ID NO: 862; WAN024F5R; Start 1944; Stop 1968
tcgtaacactcttcgtttcttgatt

SEQ ID NO: 275823 - DNA, 25 bp, Artificial
  probe
  misc_feature (1)..(25): SEQ ID NO: 862; WAN024F5R; Start 1943; Stop 1967
ttcgtaacactcttcgtttcttgat

SEQ ID NO: 275824 - DNA, 25 bp, Artificial
  probe
  misc_feature (1)..(25): SEQ ID NO: 862; WAN024F5R; Start 1942; Stop 1966
attcgtaacactcttcgtttcttga

SEQ ID NO: 275825 - DNA, 25 bp, Artificial
  probe
  misc_feature (1)..(25): SEQ ID NO: 862; WAN024F5R; Start 1770; Stop 1794
tggtaaaggtgagaagatgtctaaa

SEQ ID NO: 275826 - DNA, 25 bp, Artificial
  probe
  misc_feature (1)..(25): SEQ ID NO: 862; WAN024F5R; Start 1966; Stop 1990
attgccaatacatctgactttaacc

SEQ ID NO: 275827 - DNA, 25 bp, Artificial
  probe
  misc_feature (1)..(25): SEQ ID NO: 862; WAN024F5R; Start 1967; Stop 1991
ttgccaatacatctgactttaaccc

SEQ ID NO: 275828 - DNA, 25 bp, Artificial
  probe
  misc_feature (1)..(25): SEQ ID NO: 862; WAN024F5R; Start 1946; Stop 1970
gtaacactcttcgtttcttgattgc

SEQ ID NO: 275829 - DNA, 25 bp, Artificial
  probe
  misc_feature (1)..(25): SEQ ID NO: 862; WAN024F5R; Start 1769; Stop 1793
atggtaaaggtgagaagatgtctaa

SEQ ID NO: 275830 - DNA, 25 bp, Artificial
  probe
  misc_feature (1)..(25): SEQ ID NO: 862; WAN024F5R; Start 501; Stop 525
tggtgagatggctaataagggttat

SEQ ID NO: 275831 - DNA, 25 bp, Artificial
  probe
  misc_feature (1)..(25): SEQ ID NO: 862; WAN024F5R; Start 1933; Stop 1957
taccgtaagattcgtaacactcttc

SEQ ID NO: 275832 - DNA, 25 bp, Artificial
  probe
  misc_feature (1)..(25): SEQ ID NO: 862; WAN024F5R; Start 1932; Stop 1956
ttaccgtaagattcgtaacactctt

SEQ ID NO: 275833 - DNA, 25 bp, Artificial
  probe
  misc_feature (1)..(25): SEQ ID NO: 862; WAN024F5R; Start 1929; Stop 1953
aacttaccgtaagattcgtaacact

SEQ ID NO: 275834 - DNA, 25 bp, Artificial
  probe
  misc_feature (1)..(25): SEQ ID NO: 862; WAN024F5R; Start 1931; Stop 1955
cttaccgtaagattcgtaacactct

SEQ ID NO: 275835 - DNA, 25 bp, Artificial
  probe
  misc_feature (1)..(25): SEQ ID NO: 862; WAN024F5R; Start 1930; Stop 1954
acttaccgtaagattcgtaacactc

SEQ ID NO: 275836 - DNA, 25 bp, Artificial
  probe
  misc_feature (1)..(25): SEQ ID NO: 862; WAN024F5R; Start 1767; Stop 1791
tgatggtaaaggtgagaagatgtct

SEQ ID NO: 275837 - DNA, 25 bp, Artificial
  probe
  misc_feature (1)..(25): SEQ ID NO: 862; WAN024F5R; Start 2180; Stop 2204
ttgtttacattgaaggtgccaaatc

SEQ ID NO: 275838 - DNA, 25 bp, Artificial
  probe
  misc_feature (1)..(25): SEQ ID NO: 862; WAN024F5R; Start 1725; Stop 1749
cgtagcaccttacaaacaaatcttg

SEQ ID NO: 275839 - DNA, 25 bp, Artificial
  probe
  misc_feature (1)..(25): SEQ ID NO: 862; WAN024F5R; Start 2479; Stop 2503
cttgaagcacacttgacagtttatc

SEQ ID NO: 275840 - DNA, 25 bp, Artificial
  probe
  misc_feature (1)..(25): SEQ ID NO: 862; WAN024F5R; Start 2179; Stop 2203
gttgtttacattgaaggtgccaaat

SEQ ID NO: 275841 - DNA, 25 bp, Artificial
  probe
  misc_feature (1)..(25): SEQ ID NO: 863; WAN024DCR; Start 75; Stop 99
ttctcctcttcttcctgaatccatt

SEQ ID NO: 275842 - DNA, 25 bp, Artificial
  probe
  misc_feature (1)..(25): SEQ ID NO: 863; WAN024DCR; Start 78; Stop 102
tcctcttcttcctgaatccattgaa

SEQ ID NO: 275843 - DNA, 25 bp, Artificial
  probe
  misc_feature (1)..(25): SEQ ID NO: 863; WAN024DCR; Start 77; Stop 101
ctcctcttcttcctgaatccattga

SEQ ID NO: 275844 - DNA, 25 bp, Artificial
  probe
  misc_feature (1)..(25): SEQ ID NO: 863; WAN024DCR; Start 76; Stop 100
tctcctcttcttcctgaatccattg

SEQ ID NO: 275845 - DNA, 25 bp, Artificial
  probe
  misc_feature (1)..(25): SEQ ID NO: 863; WAN024DCR; Start 74; Stop 98
attctcctcttcttcctgaatccat

SEQ ID NO: 275846 - DNA, 25 bp, Artificial
  probe
  misc_feature (1)..(25): SEQ ID NO: 863; WAN024DCR; Start 231; Stop 255
aatcgttcctaatctccgtgaatgg

SEQ ID NO: 275847 - DNA, 25 bp, Artificial
  probe
  misc_feature (1)..(25): SEQ ID NO: 863; WAN024DCR; Start 80; Stop 104
ctcttcttcctgaatccattgaaac

SEQ ID NO: 275848 - DNA, 25 bp, Artificial
  probe
  misc_feature (1)..(25): SEQ ID NO: 863; WAN024DCR; Start 86; Stop 110
ttcctgaatccattgaaaccctaaa

SEQ ID NO: 275849 - DNA, 25 bp, Artificial
  probe
  misc_feature (1)..(25): SEQ ID NO: 863; WAN024DCR; Start 85; Stop 109
cttcctgaatccattgaaaccctaa

SEQ ID NO: 275850 - DNA, 25 bp, Artificial
  probe
  misc_feature (1)..(25): SEQ ID NO: 863; WAN024DCR; Start 79; Stop 103
cctcttcttcctgaatccattgaaa

SEQ ID NO: 275851 - DNA, 25 bp, Artificial
  probe
  misc_feature (1)..(25): SEQ ID NO: 863; WAN024DCR; Start 81; Stop 105
tcttcttcctgaatccattgaaacc

SEQ ID NO: 275852 - DNA, 25 bp, Artificial
  probe
  misc_feature (1)..(25): SEQ ID NO: 863; WAN024DCR; Start 229; Stop 253
gaaatcgttcctaatctccgtgaat

SEQ ID NO: 275853 - DNA, 25 bp, Artificial
  probe
  misc_feature (1)..(25): SEQ ID NO: 863; WAN024DCR; Start 70; Stop 94
ggtgattctcctcttcttcctgaat

SEQ ID NO: 275854 - DNA, 25 bp, Artificial
  probe
  misc_feature (1)..(25): SEQ ID NO: 863; WAN024DCR; Start 230; Stop 254
aaatcgttcctaatctccgtgaatg

SEQ ID NO: 275855 - DNA, 25 bp, Artificial
  probe
  misc_feature (1)..(25): SEQ ID NO: 863; WAN024DCR; Start 227; Stop 251
tagaaatcgttcctaatctccgtga

SEQ ID NO: 275856 - DNA, 25 bp, Artificial
  probe
  misc_feature (1)..(25): SEQ ID NO: 863; WAN024DCR; Start 84; Stop 108
tcttcctgaatccattgaaacccta

SEQ ID NO: 275857 - DNA, 25 bp, Artificial
  probe
  misc_feature (1)..(25): SEQ ID NO: 863; WAN024DCR; Start 466; Stop 490
aatcttactgccagtcttcgtactc

SEQ ID NO: 275858 - DNA, 25 bp, Artificial
  probe
  misc_feature (1)..(25): SEQ ID NO: 863; WAN024DCR; Start 217; Stop 241
ccctgttctttagaaatcgttccta

SEQ ID NO: 275859 - DNA, 25 bp, Artificial
  probe
  misc_feature (1)..(25): SEQ ID NO: 863; WAN024DCR; Start 185; Stop 209
ctgctgagattatccaaagtcaact

SEQ ID NO: 275860 - DNA, 25 bp, Artificial
  probe
  misc_feature (1)..(25): SEQ ID NO: 863; WAN024DCR; Start 184; Stop 208
tctgctgagattatccaaagtcaac

SEQ ID NO: 275861 - DNA, 25 bp, Artificial
  probe
  misc_feature (1)..(25): SEQ ID NO: 863; WAN024DCR; Start 186; Stop 210
tgctgagattatccaaagtcaactc

SEQ ID NO: 275862 - DNA, 25 bp, Artificial
  probe
  misc_feature (1)..(25): SEQ ID NO: 863; WAN024DCR; Start 465; Stop 489
caatcttactgccagtcttcgtact

SEQ ID NO: 275863 - DNA, 25 bp, Artificial
  probe
  misc_feature (1)..(25): SEQ ID NO: 863; WAN024DCR; Start 546; Stop 570
cctgaccattatagaaacccatgat

SEQ ID NO: 275864 - DNA, 25 bp, Artificial
  probe
  misc_feature (1)..(25): SEQ ID NO: 863; WAN024DCR; Start 82; Stop 106
cttcttcctgaatccattgaaaccc

SEQ ID NO: 275865 - DNA, 25 bp, Artificial
  probe
  misc_feature (1)..(25): SEQ ID NO: 863; WAN024DCR; Start 225; Stop 249
tttagaaatcgttcctaatctccgt

SEQ ID NO: 275866 - DNA, 25 bp, Artificial
  probe
  misc_feature (1)..(25): SEQ ID NO: 863; WAN024DCR; Start 226; Stop 250
ttagaaatcgttcctaatctccgtg

SEQ ID NO: 275867 - DNA, 25 bp, Artificial
  probe
  misc_feature (1)..(25): SEQ ID NO: 863; WAN024DCR; Start 228; Stop 252
agaaatcgttcctaatctccgtgaa

SEQ ID NO: 275868 - DNA, 25 bp, Artificial
  probe
  misc_feature (1)..(25): SEQ ID NO: 863; WAN024DCR; Start 224; Stop 248
ctttagaaatcgttcctaatctccg

SEQ ID NO: 275869 - DNA, 25 bp, Artificial
  probe
  misc_feature (1)..(25): SEQ ID NO: 863; WAN024DCR; Start 83; Stop 107
ttcttcctgaatccattgaaaccct

SEQ ID NO: 275870 - DNA, 25 bp, Artificial
  probe
  misc_feature (1)..(25): SEQ ID NO: 863; WAN024DCR; Start 467; Stop 491
atcttactgccagtcttcgtactct

SEQ ID NO: 275871 - DNA, 25 bp, Artificial
  probe
  misc_feature (1)..(25): SEQ ID NO: 863; WAN024DCR; Start 394; Stop 418
cggaccatccaatttatcaaatcat

SEQ ID NO: 275872 - DNA, 25 bp, Artificial
  probe
  misc_feature (1)..(25): SEQ ID NO: 863; WAN024DCR; Start 547; Stop 571
ctgaccattatagaaacccatgatt

SEQ ID NO: 275873 - DNA, 25 bp, Artificial
  probe
  misc_feature (1)..(25): SEQ ID NO: 863; WAN024DCR; Start 543; Stop 567
cagcctgaccattatagaaacccat

SEQ ID NO: 275874 - DNA, 25 bp, Artificial
  probe
  misc_feature (1)..(25): SEQ ID NO: 864; WAN024G9N; Start 20; Stop 44
tcaagcaggtttcactagaagactt

SEQ ID NO: 275875 - DNA, 25 bp, Artificial
  probe
  misc_feature (1)..(25): SEQ ID NO: 864; WAN024G9N; Start 21; Stop 45
caagcaggtttcactagaagacttc

SEQ ID NO: 275876 - DNA, 25 bp, Artificial
  probe
  misc_feature (1)..(25): SEQ ID NO: 864; WAN024G9N; Start 19; Stop 43
gtcaagcaggtttcactagaagact

SEQ ID NO: 275877 - DNA, 25 bp, Artificial
  probe
  misc_feature (1)..(25): SEQ ID NO: 864; WAN024G9N; Start 22; Stop 46
aagcaggtttcactagaagacttcg

SEQ ID NO: 275878 - DNA, 25 bp, Artificial
  probe
  misc_feature (1)..(25): SEQ ID NO: 864; WAN024G9N; Start 249; Stop 273
ggattttaaggaactgttgaaagca

SEQ ID NO: 275879 - DNA, 25 bp, Artificial
  probe
  misc_feature (1)..(25): SEQ ID NO: 864; WAN024G9N; Start 245; Stop 269
atcgggattttaaggaactgttgaa

SEQ ID NO: 275880 - DNA, 25 bp, Artificial
  probe
  misc_feature (1)..(25): SEQ ID NO: 864; WAN024G9N; Start 247; Stop 271
cgggattttaaggaactgttgaaag

SEQ ID NO: 275881 - DNA, 25 bp, Artificial
  probe
  misc_feature (1)..(25): SEQ ID NO: 864; WAN024G9N; Start 248; Stop 272
gggattttaaggaactgttgaaagc

SEQ ID NO: 275882 - DNA, 25 bp, Artificial
  probe
  misc_feature (1)..(25): SEQ ID NO: 864; WAN024G9N; Start 246; Stop 270
tcgggattttaaggaactgttgaaa

SEQ ID NO: 275883 - DNA, 25 bp, Artificial
  probe
  misc_feature (1)..(25): SEQ ID NO: 864; WAN024G9N; Start 230; Stop 254
gctatcaacacaaggatcgggattt

SEQ ID NO: 275884 - DNA, 25 bp, Artificial
  probe
  misc_feature (1)..(25): SEQ ID NO: 864; WAN024G9N; Start 232; Stop 256
tatcaacacaaggatcgggatttta

SEQ ID NO: 275885 - DNA, 25 bp, Artificial
  probe
  misc_feature (1)..(25): SEQ ID NO: 864; WAN024G9N; Start 188; Stop 212
gacatgaactctgtcattatcacct

SEQ ID NO: 275886 - DNA, 25 bp, Artificial
  probe
  misc_feature (1)..(25): SEQ ID NO: 864; WAN024G9N; Start 233; Stop 257
atcaacacaaggatcgggattttaa

SEQ ID NO: 275887 - DNA, 25 bp, Artificial
  probe
  misc_feature (1)..(25): SEQ ID NO: 864; WAN024G9N; Start 244; Stop 268
gatcgggattttaaggaactgttga

SEQ ID NO: 275888 - DNA, 25 bp, Artificial
  probe
  misc_feature (1)..(25): SEQ ID NO: 864; WAN024G9N; Start 231; Stop 255
ctatcaacacaaggatcgggatttt

SEQ ID NO: 275889 - DNA, 25 bp, Artificial
  probe
  misc_feature (1)..(25): SEQ ID NO: 864; WAN024G9N; Start 234; Stop 258
tcaacacaaggatcgggattttaag

SEQ ID NO: 275890 - DNA, 25 bp, Artificial
  probe
  misc_feature (1)..(25): SEQ ID NO: 864; WAN024G9N; Start 184; Stop 208
gtccgacatgaactctgtcattatc

SEQ ID NO: 275891 - DNA, 25 bp, Artificial
  probe
  misc_feature (1)..(25): SEQ ID NO: 864; WAN024G9N; Start 250; Stop 274
gattttaaggaactgttgaaagcag

SEQ ID NO: 275892 - DNA, 25 bp, Artificial
  probe
  misc_feature (1)..(25): SEQ ID NO: 864; WAN024G9N; Start 240; Stop 264
caaggatcgggattttaaggaactg

SEQ ID NO: 275893 - DNA, 25 bp, Artificial
  probe
  misc_feature (1)..(25): SEQ ID NO: 864; WAN024G9N; Start 187; Stop 211
cgacatgaactctgtcattatcacc

SEQ ID NO: 275894 - DNA, 25 bp, Artificial
  probe
  misc_feature (1)..(25): SEQ ID NO: 864; WAN024G9N; Start 186; Stop 210
ccgacatgaactctgtcattatcac

SEQ ID NO: 275895 - DNA, 25 bp, Artificial
  probe
  misc_feature (1)..(25): SEQ ID NO: 864; WAN024G9N; Start 185; Stop 209
tccgacatgaactctgtcattatca

SEQ ID NO: 275896 - DNA, 25 bp, Artificial
  probe
  misc_feature (1)..(25): SEQ ID NO: 864; WAN024G9N; Start 243; Stop 267
ggatcgggattttaaggaactgttg

SEQ ID NO: 275897 - DNA, 25 bp, Artificial
  probe
  misc_feature (1)..(25): SEQ ID NO: 864; WAN024G9N; Start 242; Stop 266
aggatcgggattttaaggaactgtt

SEQ ID NO: 275898 - DNA, 25 bp, Artificial
  probe
  misc_feature (1)..(25): SEQ ID NO: 864; WAN024G9N; Start 241; Stop 265
aaggatcgggattttaaggaactgt

SEQ ID NO: 275899 - DNA, 25 bp, Artificial
  probe
  misc_feature (1)..(25): SEQ ID NO: 864; WAN024G9N; Start 239; Stop 263
acaaggatcgggattttaaggaact

SEQ ID NO: 275900 - DNA, 25 bp, Artificial
  probe
  misc_feature (1)..(25): SEQ ID NO: 864; WAN024G9N; Start 238; Stop 262
cacaaggatcgggattttaaggaac

SEQ ID NO: 275901 - DNA, 25 bp, Artificial
  probe
  misc_feature (1)..(25): SEQ ID NO: 864; WAN024G9N; Start 183; Stop 207
tgtccgacatgaactctgtcattat

SEQ ID NO: 275902 - DNA, 25 bp, Artificial
  probe
  misc_feature (1)..(25): SEQ ID NO: 864; WAN024G9N; Start 56; Stop 80
ttatccatcatgtccagtggaatag

SEQ ID NO: 275903 - DNA, 25 bp, Artificial
  probe
  misc_feature (1)..(25): SEQ ID NO: 864; WAN024G9N; Start 237; Stop 261
acacaaggatcgggattttaaggaa

SEQ ID NO: 275904 - DNA, 25 bp, Artificial
  probe
  misc_feature (1)..(25): SEQ ID NO: 864; WAN024G9N; Start 236; Stop 260
aacacaaggatcgggattttaagga

SEQ ID NO: 275905 - DNA, 25 bp, Artificial
  probe
  misc_feature (1)..(25): SEQ ID NO: 864; WAN024G9N; Start 235; Stop 259
caacacaaggatcgggattttaagg

SEQ ID NO: 275906 - DNA, 25 bp, Artificial
  probe
  misc_feature (1)..(25): SEQ ID NO: 864; WAN024G9N; Start 182; Stop 206
ttgtccgacatgaactctgtcatta

SEQ ID NO: 275907 - DNA, 25 bp, Artificial
  probe
  misc_feature (1)..(25): SEQ ID NO: 865; WAN024CGT; Start 1238; Stop 1262
atatcggaagcaaggcaattaagta

SEQ ID NO: 275908 - DNA, 25 bp, Artificial
  probe
  misc_feature (1)..(25): SEQ ID NO: 865; WAN024CGT; Start 1243; Stop 1267
ggaagcaaggcaattaagtaactaa

SEQ ID NO: 275909 - DNA, 25 bp, Artificial
  probe
  misc_feature (1)..(25): SEQ ID NO: 865; WAN024CGT; Start 1239; Stop 1263
tatcggaagcaaggcaattaagtaa

SEQ ID NO: 275910 - DNA, 25 bp, Artificial
  probe
  misc_feature (1)..(25): SEQ ID NO: 865; WAN024CGT; Start 1217; Stop 1241
aaggactcttctaccgaacagatat

SEQ ID NO: 275911 - DNA, 25 bp, Artificial
  probe
  misc_feature (1)..(25): SEQ ID NO: 865; WAN024CGT; Start 1242; Stop 1266
cggaagcaaggcaattaagtaacta

SEQ ID NO: 275912 - DNA, 25 bp, Artificial
  probe
  misc_feature (1)..(25): SEQ ID NO: 865; WAN024CGT; Start 1240; Stop 1264
atcggaagcaaggcaattaagtaac

SEQ ID NO: 275913 - DNA, 25 bp, Artificial
  probe
  misc_feature (1)..(25): SEQ ID NO: 865; WAN024CGT; Start 710; Stop 734
acttaccacagagtgtagttgatac

SEQ ID NO: 275914 - DNA, 25 bp, Artificial
  probe
  misc_feature (1)..(25): SEQ ID NO: 865; WAN024CGT; Start 1244; Stop 1268
gaagcaaggcaattaagtaactaat

SEQ ID NO: 275915 - DNA, 25 bp, Artificial
  probe
  misc_feature (1)..(25): SEQ ID NO: 865; WAN024CGT; Start 607; Stop 631
gataagttctacatcatgccaacgg

SEQ ID NO: 275916 - DNA, 25 bp, Artificial
  probe
  misc_feature (1)..(25): SEQ ID NO: 865; WAN024CGT; Start 1241; Stop 1265
tcggaagcaaggcaattaagtaact

SEQ ID NO: 275917 - DNA, 25 bp, Artificial
  probe
  misc_feature (1)..(25): SEQ ID NO: 865; WAN024CGT; Start 712; Stop 736
ttaccacagagtgtagttgatacag

SEQ ID NO: 275918 - DNA, 25 bp, Artificial
  probe
  misc_feature (1)..(25): SEQ ID NO: 865; WAN024CGT; Start 711; Stop 735
cttaccacagagtgtagttgataca

SEQ ID NO: 275919 - DNA, 25 bp, Artificial
  probe
  misc_feature (1)..(25): SEQ ID NO: 865; WAN024CGT; Start 1236; Stop 1260
agatatcggaagcaaggcaattaag

SEQ ID NO: 275920 - DNA, 25 bp, Artificial
  probe
  misc_feature (1)..(25): SEQ ID NO: 865; WAN024CGT; Start 1218; Stop 1242
aggactcttctaccgaacagatatc

SEQ ID NO: 275921 - DNA, 25 bp, Artificial
  probe
  misc_feature (1)..(25): SEQ ID NO: 865; WAN024CGT; Start 1237; Stop 1261
gatatcggaagcaaggcaattaagt

SEQ ID NO: 275922 - DNA, 25 bp, Artificial
  probe
  misc_feature (1)..(25): SEQ ID NO: 865; WAN024CGT; Start 1235; Stop 1259
cagatatcggaagcaaggcaattaa

SEQ ID NO: 275923 - DNA, 25 bp, Artificial
  probe
  misc_feature (1)..(25): SEQ ID NO: 865; WAN024CGT; Start 713; Stop 737
taccacagagtgtagttgatacagc

SEQ ID NO: 275924 - DNA, 25 bp, Artificial
  probe
  misc_feature (1)..(25): SEQ ID NO: 865; WAN024CGT; Start 605; Stop 629
gtgataagttctacatcatgccaac

SEQ ID NO: 275925 - DNA, 25 bp, Artificial
  probe
  misc_feature (1)..(25): SEQ ID NO: 865; WAN024CGT; Start 602; Stop 626
atggtgataagttctacatcatgcc

SEQ ID NO: 275926 - DNA, 25 bp, Artificial
  probe
  misc_feature (1)..(25): SEQ ID NO: 865; WAN024CGT; Start 601; Stop 625
aatggtgataagttctacatcatgc

SEQ ID NO: 275927 - DNA, 25 bp, Artificial
  probe
  misc_feature (1)..(25): SEQ ID NO: 865; WAN024CGT; Start 604; Stop 628
ggtgataagttctacatcatgccaa

SEQ ID NO: 275928 - DNA, 25 bp, Artificial
  probe
  misc_feature (1)..(25): SEQ ID NO: 865; WAN024CGT; Start 1234; Stop 1258
acagatatcggaagcaaggcaatta

SEQ ID NO: 275929 - DNA, 25 bp, Artificial
  probe
  misc_feature (1)..(25): SEQ ID NO: 865; WAN024CGT; Start 606; Stop 630
tgataagttctacatcatgccaacg

SEQ ID NO: 275930 - DNA, 25 bp, Artificial
  probe
  misc_feature (1)..(25): SEQ ID NO: 865; WAN024CGT; Start 1057; Stop 1081
gaaggcgatgtcatcacctactatg

SEQ ID NO: 275931 - DNA, 25 bp, Artificial
  probe
  misc_feature (1)..(25): SEQ ID NO: 865; WAN024CGT; Start 1056; Stop 1080
agaaggcgatgtcatcacctactat

SEQ ID NO: 275932 - DNA, 25 bp, Artificial
  probe
  misc_feature (1)..(25): SEQ ID NO: 865; WAN024CGT; Start 1216; Stop 1240
gaaggactcttctaccgaacagata

SEQ ID NO: 275933 - DNA, 25 bp, Artificial
  probe
  misc_feature (1)..(25): SEQ ID NO: 865; WAN024CGT; Start 603; Stop 627
tggtgataagttctacatcatgcca

SEQ ID NO: 275934 - DNA, 25 bp, Artificial
  probe
  misc_feature (1)..(25): SEQ ID NO: 865; WAN024CGT; Start 517; Stop 541
gacaataaatttggtgactcaggtg

SEQ ID NO: 275935 - DNA, 25 bp, Artificial
  probe
  misc_feature (1)..(25): SEQ ID NO: 865; WAN024CGT; Start 514; Stop 538
ttggacaataaatttggtgactcag

SEQ ID NO: 275936 - DNA, 25 bp, Artificial
  probe
  misc_feature (1)..(25): SEQ ID NO: 865; WAN024CGT; Start 513; Stop 537
tttggacaataaatttggtgactca

SEQ ID NO: 275937 - DNA, 25 bp, Artificial
  probe
  misc_feature (1)..(25): SEQ ID NO: 865; WAN024CGT; Start 1233; Stop 1257
aacagatatcggaagcaaggcaatt

SEQ ID NO: 275938 - DNA, 25 bp, Artificial
  probe
  misc_feature (1)..(25): SEQ ID NO: 865; WAN024CGT; Start 516; Stop 540
ggacaataaatttggtgactcaggt

SEQ ID NO: 275939 - DNA, 25 bp, Artificial
  probe
  misc_feature (1)..(25): SEQ ID NO: 865; WAN024CGT; Start 515; Stop 539
tggacaataaatttggtgactcagg

SEQ ID NO: 275940 - DNA, 25 bp, Artificial
  probe
  misc_feature (1)..(25): SEQ ID NO: 866; WAN024C94; Start 89; Stop 113
aagaattgtttgaacttcgtttcca

SEQ ID NO: 275941 - DNA, 25 bp, Artificial
  probe
  misc_feature (1)..(25): SEQ ID NO: 866; WAN024C94; Start 91; Stop 115
gaattgtttgaacttcgtttccaag

SEQ ID NO: 275942 - DNA, 25 bp, Artificial
  probe
  misc_feature (1)..(25): SEQ ID NO: 866; WAN024C94; Start 90; Stop 114
agaattgtttgaacttcgtttccaa

SEQ ID NO: 275943 - DNA, 25 bp, Artificial
  probe
  misc_feature (1)..(25): SEQ ID NO: 866; WAN024C94; Start 23; Stop 47
aatttgttaaagaacttcgtggtct

SEQ ID NO: 275944 - DNA, 25 bp, Artificial
  probe
  misc_feature (1)..(25): SEQ ID NO: 866; WAN024C94; Start 21; Stop 45
agaatttgttaaagaacttcgtggt

SEQ ID NO: 275945 - DNA, 25 bp, Artificial
  probe
  misc_feature (1)..(25): SEQ ID NO: 866; WAN024C94; Start 88; Stop 112
aaagaattgtttgaacttcgtttcc

SEQ ID NO: 275946 - DNA, 25 bp, Artificial
  probe
  misc_feature (1)..(25): SEQ ID NO: 866; WAN024C94; Start 22; Stop 46
gaatttgttaaagaacttcgtggtc

SEQ ID NO: 275947 - DNA, 25 bp, Artificial
  probe
  misc_feature (1)..(25): SEQ ID NO: 866; WAN024C94; Start 20; Stop 44
aagaatttgttaaagaacttcgtgg

SEQ ID NO: 275948 - DNA, 25 bp, Artificial
  probe
  misc_feature (1)..(25): SEQ ID NO: 866; WAN024C94; Start 92; Stop 116
aattgtttgaacttcgtttccaagc

SEQ ID NO: 275949 - DNA, 25 bp, Artificial
  probe
  misc_feature (1)..(25): SEQ ID NO: 866; WAN024C94; Start 138; Stop 162
aacagctcgcttgaaagaagttaaa

SEQ ID NO: 275950 - DNA, 25 bp, Artificial
  probe
  misc_feature (1)..(25): SEQ ID NO: 866; WAN024C94; Start 137; Stop 161
aaacagctcgcttgaaagaagttaa

SEQ ID NO: 275951 - DNA, 25 bp, Artificial
  probe
  misc_feature (1)..(25): SEQ ID NO: 866; WAN024C94; Start 19; Stop 43
aaagaatttgttaaagaacttcgtg

SEQ ID NO: 275952 - DNA, 25 bp, Artificial
  probe
  misc_feature (1)..(25): SEQ ID NO: 866; WAN024C94; Start 24; Stop 48
atttgttaaagaacttcgtggtctt

SEQ ID NO: 275953 - DNA, 25 bp, Artificial
  probe
  misc_feature (1)..(25): SEQ ID NO: 866; WAN024C94; Start 93; Stop 117
attgtttgaacttcgtttccaagct

SEQ ID NO: 275954 - DNA, 25 bp, Artificial
  probe
  misc_feature (1)..(25): SEQ ID NO: 866; WAN024C94; Start 136; Stop 160
caaacagctcgcttgaaagaagtta

SEQ ID NO: 275955 - DNA, 25 bp, Artificial
  probe
  misc_feature (1)..(25): SEQ ID NO: 866; WAN024C94; Start 185; Stop 209
cagttcaatctgaagcgaaataact

SEQ ID NO: 275956 - DNA, 25 bp, Artificial
  probe
  misc_feature (1)..(25): SEQ ID NO: 866; WAN024C94; Start 184; Stop 208
acagttcaatctgaagcgaaataac

SEQ ID NO: 275957 - DNA, 25 bp, Artificial
  probe
  misc_feature (1)..(25): SEQ ID NO: 866; WAN024C94; Start 183; Stop 207
aacagttcaatctgaagcgaaataa

SEQ ID NO: 275958 - DNA, 25 bp, Artificial
  probe
  misc_feature (1)..(25): SEQ ID NO: 866; WAN024C94; Start 182; Stop 206
aaacagttcaatctgaagcgaaata

SEQ ID NO: 275959 - DNA, 25 bp, Artificial
  probe
  misc_feature (1)..(25): SEQ ID NO: 866; WAN024C94; Start 38; Stop 62
ttcgtggtctttctcaagaagaact

SEQ ID NO: 275960 - DNA, 25 bp, Artificial
  probe
  misc_feature (1)..(25): SEQ ID NO: 866; WAN024C94; Start 33; Stop 57
agaacttcgtggtctttctcaagaa

SEQ ID NO: 275961 - DNA, 25 bp, Artificial
  probe
  misc_feature (1)..(25): SEQ ID NO: 866; WAN024C94; Start 32; Stop 56
aagaacttcgtggtctttctcaaga

SEQ ID NO: 275962 - DNA, 25 bp, Artificial
  probe
  misc_feature (1)..(25): SEQ ID NO: 866; WAN024C94; Start 186; Stop 210
agttcaatctgaagcgaaataacta

SEQ ID NO: 275963 - DNA, 25 bp, Artificial
  probe
  misc_feature (1)..(25): SEQ ID NO: 866; WAN024C94; Start 94; Stop 118
ttgtttgaacttcgtttccaagctg

SEQ ID NO: 275964 - DNA, 25 bp, Artificial
  probe
  misc_feature (1)..(25): SEQ ID NO: 866; WAN024C94; Start 39; Stop 63
tcgtggtctttctcaagaagaactc

SEQ ID NO: 275965 - DNA, 25 bp, Artificial
  probe
  misc_feature (1)..(25): SEQ ID NO: 866; WAN024C94; Start 187; Stop 211
gttcaatctgaagcgaaataactaa

SEQ ID NO: 275966 - DNA, 25 bp, Artificial
  probe
  misc_feature (1)..(25): SEQ ID NO: 866; WAN024C94; Start 37; Stop 61
cttcgtggtctttctcaagaagaac

SEQ ID NO: 275967 - DNA, 25 bp, Artificial
  probe
  misc_feature (1)..(25): SEQ ID NO: 866; WAN024C94; Start 34; Stop 58
gaacttcgtggtctttctcaagaag

SEQ ID NO: 275968 - DNA, 25 bp, Artificial
  probe
  misc_feature (1)..(25): SEQ ID NO: 866; WAN024C94; Start 87; Stop 111
aaaagaattgtttgaacttcgtttc

SEQ ID NO: 275969 - DNA, 25 bp, Artificial
  probe
  misc_feature (1)..(25): SEQ ID NO: 866; WAN024C94; Start 133; Stop 157
gaacaaacagctcgcttgaaagaag

SEQ ID NO: 275970 - DNA, 25 bp, Artificial
  probe
  misc_feature (1)..(25): SEQ ID NO: 866; WAN024C94; Start 97; Stop 121
tttgaacttcgtttccaagctgcta

SEQ ID NO: 275971 - DNA, 25 bp, Artificial
  probe
  misc_feature (1)..(25): SEQ ID NO: 866; WAN024C94; Start 36; Stop 60
acttcgtggtctttctcaagaagaa

SEQ ID NO: 275972 - DNA, 25 bp, Artificial
  probe
  misc_feature (1)..(25): SEQ ID NO: 866; WAN024C94; Start 35; Stop 59
aacttcgtggtctttctcaagaaga

SEQ ID NO: 275973 - DNA, 25 bp, Artificial
  probe
  misc_feature (1)..(25): SEQ ID NO: 867; WAN024CG3; Start 92; Stop 116
aagacttggaacaactagacgaatc

SEQ ID NO: 275974 - DNA, 25 bp, Artificial
  probe
  misc_feature (1)..(25): SEQ ID NO: 867; WAN024CG3; Start 91; Stop 115
caagacttggaacaactagacgaat

SEQ ID NO: 275975 - DNA, 25 bp, Artificial
  probe
  misc_feature (1)..(25): SEQ ID NO: 867; WAN024CG3; Start 195; Stop 219
tagagaggtttggttaaaggctatc

SEQ ID NO: 275976 - DNA, 25 bp, Artificial
  probe
  misc_feature (1)..(25): SEQ ID NO: 867; WAN024CG3; Start 193; Stop 217
gatagagaggtttggttaaaggcta

SEQ ID NO: 275977 - DNA, 25 bp, Artificial
  probe
  misc_feature (1)..(25): SEQ ID NO: 867; WAN024CG3; Start 197; Stop 221
gagaggtttggttaaaggctatcat

SEQ ID NO: 275978 - DNA, 25 bp, Artificial
  probe
  misc_feature (1)..(25): SEQ ID NO: 867; WAN024CG3; Start 191; Stop 215
atgatagagaggtttggttaaaggc

SEQ ID NO: 275979 - DNA, 25 bp, Artificial
  probe
  misc_feature (1)..(25): SEQ ID NO: 867; WAN024CG3; Start 105; Stop 129
actagacgaatccgaaataggttac

SEQ ID NO: 275980 - DNA, 25 bp, Artificial
  probe
  misc_feature (1)..(25): SEQ ID NO: 867; WAN024CG3; Start 100; Stop 124
gaacaactagacgaatccgaaatag

SEQ ID NO: 275981 - DNA, 25 bp, Artificial
  probe
  misc_feature (1)..(25): SEQ ID NO: 867; WAN024CG3; Start 101; Stop 125
aacaactagacgaatccgaaatagg

SEQ ID NO: 275982 - DNA, 25 bp, Artificial
  probe
  misc_feature (1)..(25): SEQ ID NO: 867; WAN024CG3; Start 196; Stop 220
agagaggtttggttaaaggctatca

SEQ ID NO: 275983 - DNA, 25 bp, Artificial
  probe
  misc_feature (1)..(25): SEQ ID NO: 867; WAN024CG3; Start 192; Stop 216
tgatagagaggtttggttaaaggct

SEQ ID NO: 275984 - DNA, 25 bp, Artificial
  probe
  misc_feature (1)..(25): SEQ ID NO: 867; WAN024CG3; Start 106; Stop 130
ctagacgaatccgaaataggttacg

SEQ ID NO: 275985 - DNA, 25 bp, Artificial
  probe
  misc_feature (1)..(25): SEQ ID NO: 867; WAN024CG3; Start 104; Stop 128
aactagacgaatccgaaataggtta

SEQ ID NO: 275986 - DNA, 25 bp, Artificial
  probe
  misc_feature (1)..(25): SEQ ID NO: 867; WAN024CG3; Start 103; Stop 127
caactagacgaatccgaaataggtt

SEQ ID NO: 275987 - DNA, 25 bp, Artificial
  probe
  misc_feature (1)..(25): SEQ ID NO: 867; WAN024CG3; Start 189; Stop 213
gcatgatagagaggtttggttaaag

SEQ ID NO: 275988 - DNA, 25 bp, Artificial
  probe
  misc_feature (1)..(25): SEQ ID NO: 867; WAN024CG3; Start 93; Stop 117
agacttggaacaactagacgaatcc

SEQ ID NO: 275989 - DNA, 25 bp, Artificial
  probe
  misc_feature (1)..(25): SEQ ID NO: 867; WAN024CG3; Start 102; Stop 126
acaactagacgaatccgaaataggt

SEQ ID NO: 275990 - DNA, 25 bp, Artificial
  probe
  misc_feature (1)..(25): SEQ ID NO: 867; WAN024CG3; Start 112; Stop 136
gaatccgaaataggttacgcagatg

SEQ ID NO: 275991 - DNA, 25 bp, Artificial
  probe
  misc_feature (1)..(25): SEQ ID NO: 867; WAN024CG3; Start 198; Stop 222
agaggtttggttaaaggctatcatg

SEQ ID NO: 275992 - DNA, 25 bp, Artificial
  probe
  misc_feature (1)..(25): SEQ ID NO: 867; WAN024CG3; Start 194; Stop 218
atagagaggtttggttaaaggctat

SEQ ID NO: 275993 - DNA, 25 bp, Artificial
  probe
  misc_feature (1)..(25): SEQ ID NO: 867; WAN024CG3; Start 190; Stop 214
catgatagagaggtttggttaaagg

SEQ ID NO: 275994 - DNA, 25 bp, Artificial
  probe
  misc_feature (1)..(25): SEQ ID NO: 867; WAN024CG3; Start 114; Stop 138
atccgaaataggttacgcagatgaa

SEQ ID NO: 275995 - DNA, 25 bp, Artificial
  probe
  misc_feature (1)..(25): SEQ ID NO: 867; WAN024CG3; Start 113; Stop 137
aatccgaaataggttacgcagatga

SEQ ID NO: 275996 - DNA, 25 bp, Artificial
  probe
  misc_feature (1)..(25): SEQ ID NO: 867; WAN024CG3; Start 86; Stop 110
ttctgcaagacttggaacaactaga

SEQ ID NO: 275997 - DNA, 25 bp, Artificial
  probe
  misc_feature (1)..(25): SEQ ID NO: 867; WAN024CG3; Start 107; Stop 131
tagacgaatccgaaataggttacgc

SEQ ID NO: 275998 - DNA, 25 bp, Artificial
  probe
  misc_feature (1)..(25): SEQ ID NO: 867; WAN024CG3; Start 96; Stop 120
cttggaacaactagacgaatccgaa

SEQ ID NO: 275999 - DNA, 25 bp, Artificial
  probe
  misc_feature (1)..(25): SEQ ID NO: 867; WAN024CG3; Start 99; Stop 123
ggaacaactagacgaatccgaaata

SEQ ID NO: 276000 - DNA, 25 bp, Artificial
  probe
  misc_feature (1)..(25): SEQ ID NO: 867; WAN024CG3; Start 90; Stop 114
gcaagacttggaacaactagacgaa

SEQ ID NO: 276001 - DNA, 25 bp, Artificial
  probe
  misc_feature (1)..(25): SEQ ID NO: 867; WAN024CG3; Start 115; Stop 139
tccgaaataggttacgcagatgaag

SEQ ID NO: 276002 - DNA, 25 bp, Artificial
  probe
  misc_feature (1)..(25): SEQ ID NO: 867; WAN024CG3; Start 188; Stop 212
tgcatgatagagaggtttggttaaa

SEQ ID NO: 276003 - DNA, 25 bp, Artificial
  probe
  misc_feature (1)..(25): SEQ ID NO: 867; WAN024CG3; Start 187; Stop 211
ttgcatgatagagaggtttggttaa

SEQ ID NO: 276004 - DNA, 25 bp, Artificial
  probe
  misc_feature (1)..(25): SEQ ID NO: 867; WAN024CG3; Start 186; Stop 210
attgcatgatagagaggtttggtta

SEQ ID NO: 276005 - DNA, 25 bp, Artificial
  probe
  misc_feature (1)..(25): SEQ ID NO: 867; WAN024CG3; Start 87; Stop 111
tctgcaagacttggaacaactagac

SEQ ID NO: 276006 - DNA, 25 bp, Artificial
  probe
  misc_feature (1)..(25): SEQ ID NO: 868; WAN024C8N; Start 268; Stop 292
gaagtaactccagttgttcttatcg

SEQ ID NO: 276007 - DNA, 25 bp, Artificial
  probe
  misc_feature (1)..(25): SEQ ID NO: 868; WAN024C8N; Start 331; Stop 355
attcttggtaacggtgagttgacta

SEQ ID NO: 276008 - DNA, 25 bp, Artificial
  probe
  misc_feature (1)..(25): SEQ ID NO: 868; WAN024C8N; Start 335; Stop 359
ttggtaacggtgagttgactaagaa

SEQ ID NO: 276009 - DNA, 25 bp, Artificial
  probe
  misc_feature (1)..(25): SEQ ID NO: 868; WAN024C8N; Start 332; Stop 356
ttcttggtaacggtgagttgactaa

SEQ ID NO: 276010 - DNA, 25 bp, Artificial
  probe
  misc_feature (1)..(25): SEQ ID NO: 868; WAN024C8N; Start 267; Stop 291
tgaagtaactccagttgttcttatc

SEQ ID NO: 276011 - DNA, 25 bp, Artificial
  probe
  misc_feature (1)..(25): SEQ ID NO: 868; WAN024C8N; Start 419; Stop 443
gtggttcagtagaagtcatctaact

SEQ ID NO: 276012 - DNA, 25 bp, Artificial
  probe
  misc_feature (1)..(25): SEQ ID NO: 868; WAN024C8N; Start 418; Stop 442
ggtggttcagtagaagtcatctaac

SEQ ID NO: 276013 - DNA, 25 bp, Artificial
  probe
  misc_feature (1)..(25): SEQ ID NO: 868; WAN024C8N; Start 417; Stop 441
aggtggttcagtagaagtcatctaa

SEQ ID NO: 276014 - DNA, 25 bp, Artificial
  probe
  misc_feature (1)..(25): SEQ ID NO: 868; WAN024C8N; Start 416; Stop 440
aaggtggttcagtagaagtcatcta

SEQ ID NO: 276015 - DNA, 25 bp, Artificial
  probe
  misc_feature (1)..(25): SEQ ID NO: 868; WAN024C8N; Start 334; Stop 358
cttggtaacggtgagttgactaaga

SEQ ID NO: 276016 - DNA, 25 bp, Artificial
  probe
  misc_feature (1)..(25): SEQ ID NO: 868; WAN024C8N; Start 333; Stop 357
tcttggtaacggtgagttgactaag

SEQ ID NO: 276017 - DNA, 25 bp, Artificial
  probe
  misc_feature (1)..(25): SEQ ID NO: 868; WAN024C8N; Start 265; Stop 289
gctgaagtaactccagttgttctta

SEQ ID NO: 276018 - DNA, 25 bp, Artificial
  probe
  misc_feature (1)..(25): SEQ ID NO: 868; WAN024C8N; Start 62; Stop 86
gtggtacttcatcaggtaacggtaa

SEQ ID NO: 276019 - DNA, 25 bp, Artificial
  probe
  misc_feature (1)..(25): SEQ ID NO: 868; WAN024C8N; Start 330; Stop 354
aattcttggtaacggtgagttgact

SEQ ID NO: 276020 - DNA, 25 bp, Artificial
  probe
  misc_feature (1)..(25): SEQ ID NO: 868; WAN024C8N; Start 191; Stop 215
gtggattcactaacatcaacgctaa

SEQ ID NO: 276021 - DNA, 25 bp, Artificial
  probe
  misc_feature (1)..(25): SEQ ID NO: 868; WAN024C8N; Start 283; Stop 307
gttcttatcgaagcaggaattgtta

SEQ ID NO: 276022 - DNA, 25 bp, Artificial
  probe
  misc_feature (1)..(25): SEQ ID NO: 868; WAN024C8N; Start 270; Stop 294
agtaactccagttgttcttatcgaa

SEQ ID NO: 276023 - DNA, 25 bp, Artificial
  probe
  misc_feature (1)..(25): SEQ ID NO: 868; WAN024C8N; Start 269; Stop 293
aagtaactccagttgttcttatcga

SEQ ID NO: 276024 - DNA, 25 bp, Artificial
  probe
  misc_feature (1)..(25): SEQ ID NO: 868; WAN024C8N; Start 280; Stop 304
gttgttcttatcgaagcaggaattg

SEQ ID NO: 276025 - DNA, 25 bp, Artificial
  probe
  misc_feature (1)..(25): SEQ ID NO: 868; WAN024C8N; Start 279; Stop 303
agttgttcttatcgaagcaggaatt

SEQ ID NO: 276026 - DNA, 25 bp, Artificial
  probe
  misc_feature (1)..(25): SEQ ID NO: 868; WAN024C8N; Start 271; Stop 295
gtaactccagttgttcttatcgaag

SEQ ID NO: 276027 - DNA, 25 bp, Artificial
  probe
  misc_feature (1)..(25): SEQ ID NO: 868; WAN024C8N; Start 254; Stop 278
ttgaagatggtgctgaagtaactcc

SEQ ID NO: 276028 - DNA, 25 bp, Artificial
  probe
  misc_feature (1)..(25): SEQ ID NO: 868; WAN024C8N; Start 282; Stop 306
tgttcttatcgaagcaggaattgtt

SEQ ID NO: 276029 - DNA, 25 bp, Artificial
  probe
  misc_feature (1)..(25): SEQ ID NO: 868; WAN024C8N; Start 281; Stop 305
ttgttcttatcgaagcaggaattgt

SEQ ID NO: 276030 - DNA, 25 bp, Artificial
  probe
  misc_feature (1)..(25): SEQ ID NO: 868; WAN024C8N; Start 272; Stop 296
taactccagttgttcttatcgaagc

SEQ ID NO: 276031 - DNA, 25 bp, Artificial
  probe
  misc_feature (1)..(25): SEQ ID NO: 868; WAN024C8N; Start 199; Stop 223
actaacatcaacgctaaagaatacg

SEQ ID NO: 276032 - DNA, 25 bp, Artificial
  probe
  misc_feature (1)..(25): SEQ ID NO: 868; WAN024C8N; Start 266; Stop 290
ctgaagtaactccagttgttcttat

SEQ ID NO: 276033 - DNA, 25 bp, Artificial
  probe
  misc_feature (1)..(25): SEQ ID NO: 868; WAN024C8N; Start 193; Stop 217
ggattcactaacatcaacgctaaag

SEQ ID NO: 276034 - DNA, 25 bp, Artificial
  probe
  misc_feature (1)..(25): SEQ ID NO: 868; WAN024C8N; Start 200; Stop 224
ctaacatcaacgctaaagaatacgc

SEQ ID NO: 276035 - DNA, 25 bp, Artificial
  probe
  misc_feature (1)..(25): SEQ ID NO: 868; WAN024C8N; Start 284; Stop 308
ttcttatcgaagcaggaattgttaa

SEQ ID NO: 276036 - DNA, 25 bp, Artificial
  probe
  misc_feature (1)..(25): SEQ ID NO: 868; WAN024C8N; Start 194; Stop 218
gattcactaacatcaacgctaaaga

SEQ ID NO: 276037 - DNA, 25 bp, Artificial
  probe
  misc_feature (1)..(25): SEQ ID NO: 868; WAN024C8N; Start 420; Stop 444
tggttcagtagaagtcatctaacta

SEQ ID NO: 276038 - DNA, 25 bp, Artificial
  probe
  misc_feature (1)..(25): SEQ ID NO: 868; WAN024C8N; Start 351; Stop 375
gactaagaaattgactgtgaaagca

SEQ ID NO: 276039 - DNA, 25 bp, Artificial
  probe
  misc_feature (1)..(25): SEQ ID NO: 869; WAN024C6X; Start 88; Stop 112
acaggtaaagtctttgagaggaata

SEQ ID NO: 276040 - DNA, 25 bp, Artificial
  probe
  misc_feature (1)..(25): SEQ ID NO: 869; WAN024C6X; Start 89; Stop 113
caggtaaagtctttgagaggaatac

SEQ ID NO: 276041 - DNA, 25 bp, Artificial
  probe
  misc_feature (1)..(25): SEQ ID NO: 869; WAN024C6X; Start 87; Stop 111
gacaggtaaagtctttgagaggaat

SEQ ID NO: 276042 - DNA, 25 bp, Artificial
  probe
  misc_feature (1)..(25): SEQ ID NO: 869; WAN024C6X; Start 297; Stop 321
ccaagtcatccaacaagtccagaac

SEQ ID NO: 276043 - DNA, 25 bp, Artificial
  probe
  misc_feature (1)..(25): SEQ ID NO: 869; WAN024C6X; Start 92; Stop 116
gtaaagtctttgagaggaataccct

SEQ ID NO: 276044 - DNA, 25 bp, Artificial
  probe
  misc_feature (1)..(25): SEQ ID NO: 869; WAN024C6X; Start 86; Stop 110
tgacaggtaaagtctttgagaggaa

SEQ ID NO: 276045 - DNA, 25 bp, Artificial
  probe
  misc_feature (1)..(25): SEQ ID NO: 869; WAN024C6X; Start 148; Stop 172
gattcccttgacttgtgccagataa

SEQ ID NO: 276046 - DNA, 25 bp, Artificial
  probe
  misc_feature (1)..(25): SEQ ID NO: 869; WAN024C6X; Start 298; Stop 322
caagtcatccaacaagtccagaacg

SEQ ID NO: 276047 - DNA, 25 bp, Artificial
  probe
  misc_feature (1)..(25): SEQ ID NO: 869; WAN024C6X; Start 149; Stop 173
attcccttgacttgtgccagataag

SEQ ID NO: 276048 - DNA, 25 bp, Artificial
  probe
  misc_feature (1)..(25): SEQ ID NO: 869; WAN024C6X; Start 168; Stop 192
gataagtcttgtccacatgacgctt

SEQ ID NO: 276049 - DNA, 25 bp, Artificial
  probe
  misc_feature (1)..(25): SEQ ID NO: 869; WAN024C6X; Start 165; Stop 189
ccagataagtcttgtccacatgacg

SEQ ID NO: 276050 - DNA, 25 bp, Artificial
  probe
  misc_feature (1)..(25): SEQ ID NO: 869; WAN024C6X; Start 159; Stop 183
cttgtgccagataagtcttgtccac

SEQ ID NO: 276051 - DNA, 25 bp, Artificial
  probe
  misc_feature (1)..(25): SEQ ID NO: 869; WAN024C6X; Start 169; Stop 193
ataagtcttgtccacatgacgcttg

SEQ ID NO: 276052 - DNA, 25 bp, Artificial
  probe
  misc_feature (1)..(25): SEQ ID NO: 869; WAN024C6X; Start 163; Stop 187
tgccagataagtcttgtccacatga

SEQ ID NO: 276053 - DNA, 25 bp, Artificial
  probe
  misc_feature (1)..(25): SEQ ID NO: 869; WAN024C6X; Start 164; Stop 188
gccagataagtcttgtccacatgac

SEQ ID NO: 276054 - DNA, 25 bp, Artificial
  probe
  misc_feature (1)..(25): SEQ ID NO: 869; WAN024C6X; Start 108; Stop 132
gaataccctcagcaaatgtctccac

SEQ ID NO: 276055 - DNA, 25 bp, Artificial
  probe
  misc_feature (1)..(25): SEQ ID NO: 869; WAN024C6X; Start 162; Stop 186
gtgccagataagtcttgtccacatg

SEQ ID NO: 276056 - DNA, 25 bp, Artificial
  probe
  misc_feature (1)..(25): SEQ ID NO: 869; WAN024C6X; Start 167; Stop 191
agataagtcttgtccacatgacgct

SEQ ID NO: 276057 - DNA, 25 bp, Artificial
  probe
  misc_feature (1)..(25): SEQ ID NO: 869; WAN024C6X; Start 166; Stop 190
cagataagtcttgtccacatgacgc

SEQ ID NO: 276058 - DNA, 25 bp, Artificial
  probe
  misc_feature (1)..(25): SEQ ID NO: 869; WAN024C6X; Start 147; Stop 171
tgattcccttgacttgtgccagata

SEQ ID NO: 276059 - DNA, 25 bp, Artificial
  probe
  misc_feature (1)..(25): SEQ ID NO: 869; WAN024C6X; Start 90; Stop 114
aggtaaagtctttgagaggaatacc

SEQ ID NO: 276060 - DNA, 25 bp, Artificial
  probe
  misc_feature (1)..(25): SEQ ID NO: 869; WAN024C6X; Start 91; Stop 115
ggtaaagtctttgagaggaataccc

SEQ ID NO: 276061 - DNA, 25 bp, Artificial
  probe
  misc_feature (1)..(25): SEQ ID NO: 869; WAN024C6X; Start 299; Stop 323
aagtcatccaacaagtccagaacgg

SEQ ID NO: 276062 - DNA, 25 bp, Artificial
  probe
  misc_feature (1)..(25): SEQ ID NO: 869; WAN024C6X; Start 146; Stop 170
atgattcccttgacttgtgccagat

SEQ ID NO: 276063 - DNA, 25 bp, Artificial
  probe
  misc_feature (1)..(25): SEQ ID NO: 869; WAN024C6X; Start 117; Stop 141
cagcaaatgtctccacatcttcttg

SEQ ID NO: 276064 - DNA, 25 bp, Artificial
  probe
  misc_feature (1)..(25): SEQ ID NO: 869; WAN024C6X; Start 116; Stop 140
tcagcaaatgtctccacatcttctt

SEQ ID NO: 276065 - DNA, 25 bp, Artificial
  probe
  misc_feature (1)..(25): SEQ ID NO: 869; WAN024C6X; Start 109; Stop 133
aataccctcagcaaatgtctccaca

SEQ ID NO: 276066 - DNA, 25 bp, Artificial
  probe
  misc_feature (1)..(25): SEQ ID NO: 869; WAN024C6X; Start 256; Stop 280
aatatccaagcgtcctactgggaaa

SEQ ID NO: 276067 - DNA, 25 bp, Artificial
  probe
  misc_feature (1)..(25): SEQ ID NO: 869; WAN024C6X; Start 158; Stop 182
acttgtgccagataagtcttgtcca

SEQ ID NO: 276068 - DNA, 25 bp, Artificial
  probe
  misc_feature (1)..(25): SEQ ID NO: 869; WAN024C6X; Start 1; Stop 25
atgaaacttcccttctgcaatggtc

SEQ ID NO: 276069 - DNA, 25 bp, Artificial
  probe
  misc_feature (1)..(25): SEQ ID NO: 869; WAN024C6X; Start 121; Stop 145
aaatgtctccacatcttcttgggtc

SEQ ID NO: 276070 - DNA, 25 bp, Artificial
  probe
  misc_feature (1)..(25): SEQ ID NO: 869; WAN024C6X; Start 115; Stop 139
ctcagcaaatgtctccacatcttct

SEQ ID NO: 276071 - DNA, 25 bp, Artificial
  probe
  misc_feature (1)..(25): SEQ ID NO: 869; WAN024C6X; Start 302; Stop 326
tcatccaacaagtccagaacggttc

SEQ ID NO: 276072 - DNA, 25 bp, Artificial
  probe
  misc_feature (1)..(25): SEQ ID NO: 870; WAN024DJ2; Start 298; Stop 322
ggtattgctggtattggtaatgaac

SEQ ID NO: 276073 - DNA, 25 bp, Artificial
  probe
  misc_feature (1)..(25): SEQ ID NO: 870; WAN024DJ2; Start 303; Stop 327
tgctggtattggtaatgaacactta

SEQ ID NO: 276074 - DNA, 25 bp, Artificial
  probe
  misc_feature (1)..(25): SEQ ID NO: 870; WAN024DJ2; Start 297; Stop 321
tggtattgctggtattggtaatgaa

SEQ ID NO: 276075 - DNA, 25 bp, Artificial
  probe
  misc_feature (1)..(25): SEQ ID NO: 870; WAN024DJ2; Start 296; Stop 320
ttggtattgctggtattggtaatga

SEQ ID NO: 276076 - DNA, 25 bp, Artificial
  probe
  misc_feature (1)..(25): SEQ ID NO: 870; WAN024DJ2; Start 304; Stop 328
gctggtattggtaatgaacacttag

SEQ ID NO: 276077 - DNA, 25 bp, Artificial
  probe
  misc_feature (1)..(25): SEQ ID NO: 870; WAN024DJ2; Start 300; Stop 324
tattgctggtattggtaatgaacac

SEQ ID NO: 276078 - DNA, 25 bp, Artificial
  probe
  misc_feature (1)..(25): SEQ ID NO: 870; WAN024DJ2; Start 299; Stop 323
gtattgctggtattggtaatgaaca

SEQ ID NO: 276079 - DNA, 25 bp, Artificial
  probe
  misc_feature (1)..(25): SEQ ID NO: 870; WAN024DJ2; Start 301; Stop 325
attgctggtattggtaatgaacact

SEQ ID NO: 276080 - DNA, 25 bp, Artificial
  probe
  misc_feature (1)..(25): SEQ ID NO: 870; WAN024DJ2; Start 302; Stop 326
ttgctggtattggtaatgaacactt

SEQ ID NO: 276081 - DNA, 25 bp, Artificial
  probe
  misc_feature (1)..(25): SEQ ID NO: 870; WAN024DJ2; Start 305; Stop 329
ctggtattggtaatgaacacttaga

SEQ ID NO: 276082 - DNA, 25 bp, Artificial
  probe
  misc_feature (1)..(25): SEQ ID NO: 870; WAN024DJ2; Start 109; Stop 133
gactatattgaagccatgattgagc

SEQ ID NO: 276083 - DNA, 25 bp, Artificial
  probe
  misc_feature (1)..(25): SEQ ID NO: 870; WAN024DJ2; Start 306; Stop 330
tggtattggtaatgaacacttagaa

SEQ ID NO: 276084 - DNA, 25 bp, Artificial
  probe
  misc_feature (1)..(25): SEQ ID NO: 870; WAN024DJ2; Start 214; Stop 238
aagtctggtattacagtcgttcaag

SEQ ID NO: 276085 - DNA, 25 bp, Artificial
  probe
  misc_feature (1)..(25): SEQ ID NO: 870; WAN024DJ2; Start 112; Stop 136
tatattgaagccatgattgagcgag

SEQ ID NO: 276086 - DNA, 25 bp, Artificial
  probe
  misc_feature (1)..(25): SEQ ID NO: 870; WAN024DJ2; Start 111; Stop 135
ctatattgaagccatgattgagcga

SEQ ID NO: 276087 - DNA, 25 bp, Artificial
  probe
  misc_feature (1)..(25): SEQ ID NO: 870; WAN024DJ2; Start 110; Stop 134
actatattgaagccatgattgagcg

SEQ ID NO: 276088 - DNA, 25 bp, Artificial
  probe
  misc_feature (1)..(25): SEQ ID NO: 870; WAN024DJ2; Start 216; Stop 240
gtctggtattacagtcgttcaagtc

SEQ ID NO: 276089 - DNA, 25 bp, Artificial
  probe
  misc_feature (1)..(25): SEQ ID NO: 870; WAN024DJ2; Start 108; Stop 132
agactatattgaagccatgattgag

SEQ ID NO: 276090 - DNA, 25 bp, Artificial
  probe
  misc_feature (1)..(25): SEQ ID NO: 870; WAN024DJ2; Start 215; Stop 239
agtctggtattacagtcgttcaagt

SEQ ID NO: 276091 - DNA, 25 bp, Artificial
  probe
  misc_feature (1)..(25): SEQ ID NO: 870; WAN024DJ2; Start 107; Stop 131
aagactatattgaagccatgattga

SEQ ID NO: 276092 - DNA, 25 bp, Artificial
  probe
  misc_feature (1)..(25): SEQ ID NO: 870; WAN024DJ2; Start 105; Stop 129
tgaagactatattgaagccatgatt

SEQ ID NO: 276093 - DNA, 25 bp, Artificial
  probe
  misc_feature (1)..(25): SEQ ID NO: 870; WAN024DJ2; Start 103; Stop 127
aatgaagactatattgaagccatga

SEQ ID NO: 276094 - DNA, 25 bp, Artificial
  probe
  misc_feature (1)..(25): SEQ ID NO: 870; WAN024DJ2; Start 106; Stop 130
gaagactatattgaagccatgattg

SEQ ID NO: 276095 - DNA, 25 bp, Artificial
  probe
  misc_feature (1)..(25): SEQ ID NO: 870; WAN024DJ2; Start 295; Stop 319
tttggtattgctggtattggtaatg

SEQ ID NO: 276096 - DNA, 25 bp, Artificial
  probe
  misc_feature (1)..(25): SEQ ID NO: 870; WAN024DJ2; Start 87; Stop 111
tgagggtggatatgttaatgaagac

SEQ ID NO: 276097 - DNA, 25 bp, Artificial
  probe
  misc_feature (1)..(25): SEQ ID NO: 870; WAN024DJ2; Start 217; Stop 241
tctggtattacagtcgttcaagtcc

SEQ ID NO: 276098 - DNA, 25 bp, Artificial
  probe
  misc_feature (1)..(25): SEQ ID NO: 870; WAN024DJ2; Start 88; Stop 112
gagggtggatatgttaatgaagact

SEQ ID NO: 276099 - DNA, 25 bp, Artificial
  probe
  misc_feature (1)..(25): SEQ ID NO: 870; WAN024DJ2; Start 78; Stop 102
agttctttatgagggtggatatgtt

SEQ ID NO: 276100 - DNA, 25 bp, Artificial
  probe
  misc_feature (1)..(25): SEQ ID NO: 870; WAN024DJ2; Start 77; Stop 101
aagttctttatgagggtggatatgt

SEQ ID NO: 276101 - DNA, 25 bp, Artificial
  probe
  misc_feature (1)..(25): SEQ ID NO: 870; WAN024DJ2; Start 75; Stop 99
gcaagttctttatgagggtggatat

SEQ ID NO: 276102 - DNA, 25 bp, Artificial
  probe
  misc_feature (1)..(25): SEQ ID NO: 870; WAN024DJ2; Start 104; Stop 128
atgaagactatattgaagccatgat

SEQ ID NO: 276103 - DNA, 25 bp, Artificial
  probe
  misc_feature (1)..(25): SEQ ID NO: 870; WAN024DJ2; Start 76; Stop 100
caagttctttatgagggtggatatg

SEQ ID NO: 276104 - DNA, 25 bp, Artificial
  probe
  misc_feature (1)..(25): SEQ ID NO: 870; WAN024DJ2; Start 86; Stop 110
atgagggtggatatgttaatgaaga

SEQ ID NO: 276105 - DNA, 25 bp, Artificial
  probe
  misc_feature (1)..(25): SEQ ID NO: 871; WAN024FMP; Start 324; Stop 348
aagcaagaagattcaggtaacagta

SEQ ID NO: 276106 - DNA, 25 bp, Artificial
  probe
  misc_feature (1)..(25): SEQ ID NO: 871; WAN024FMP; Start 323; Stop 347
taagcaagaagattcaggtaacagt

SEQ ID NO: 276107 - DNA, 25 bp, Artificial
  probe
  misc_feature (1)..(25): SEQ ID NO: 871; WAN024FMP; Start 453; Stop 477
ttctgtaactcgtgtatctgatgtg

SEQ ID NO: 276108 - DNA, 25 bp, Artificial
  probe
  misc_feature (1)..(25): SEQ ID NO: 871; WAN024FMP; Start 584; Stop 608
tcttgttacttgagttgttggatga

SEQ ID NO: 276109 - DNA, 25 bp, Artificial
  probe
  misc_feature (1)..(25): SEQ ID NO: 871; WAN024FMP; Start 583; Stop 607
gtcttgttacttgagttgttggatg

SEQ ID NO: 276110 - DNA, 25 bp, Artificial
  probe
  misc_feature (1)..(25): SEQ ID NO: 871; WAN024FMP; Start 585; Stop 609
cttgttacttgagttgttggatgat

SEQ ID NO: 276111 - DNA, 25 bp, Artificial
  probe
  misc_feature (1)..(25): SEQ ID NO: 871; WAN024FMP; Start 455; Stop 479
ctgtaactcgtgtatctgatgtgac

SEQ ID NO: 276112 - DNA, 25 bp, Artificial
  probe
  misc_feature (1)..(25): SEQ ID NO: 871; WAN024FMP; Start 454; Stop 478
tctgtaactcgtgtatctgatgtga

SEQ ID NO: 276113 - DNA, 25 bp, Artificial
  probe
  misc_feature (1)..(25): SEQ ID NO: 871; WAN024FMP; Start 322; Stop 346
ttaagcaagaagattcaggtaacag

SEQ ID NO: 276114 - DNA, 25 bp, Artificial
  probe
  misc_feature (1)..(25): SEQ ID NO: 871; WAN024FMP; Start 582; Stop 606
agtcttgttacttgagttgttggat

SEQ ID NO: 276115 - DNA, 25 bp, Artificial
  probe
  misc_feature (1)..(25): SEQ ID NO: 871; WAN024FMP; Start 579; Stop 603
ttcagtcttgttacttgagttgttg

SEQ ID NO: 276116 - DNA, 25 bp, Artificial
  probe
  misc_feature (1)..(25): SEQ ID NO: 871; WAN024FMP; Start 586; Stop 610
ttgttacttgagttgttggatgatc

SEQ ID NO: 276117 - DNA, 25 bp, Artificial
  probe
  misc_feature (1)..(25): SEQ ID NO: 871; WAN024FMP; Start 325; Stop 349
agcaagaagattcaggtaacagtac

SEQ ID NO: 276118 - DNA, 25 bp, Artificial
  probe
  misc_feature (1)..(25): SEQ ID NO: 871; WAN024FMP; Start 321; Stop 345
attaagcaagaagattcaggtaaca

SEQ ID NO: 276119 - DNA, 25 bp, Artificial
  probe
  misc_feature (1)..(25): SEQ ID NO: 871; WAN024FMP; Start 581; Stop 605
cagtcttgttacttgagttgttgga

SEQ ID NO: 276120 - DNA, 25 bp, Artificial
  probe
  misc_feature (1)..(25): SEQ ID NO: 871; WAN024FMP; Start 580; Stop 604
tcagtcttgttacttgagttgttgg

SEQ ID NO: 276121 - DNA, 25 bp, Artificial
  probe
  misc_feature (1)..(25): SEQ ID NO: 871; WAN024FMP; Start 130; Stop 154
ctgacacctgagtattctagtacga

SEQ ID NO: 276122 - DNA, 25 bp, Artificial
  probe
  misc_feature (1)..(25): SEQ ID NO: 871; WAN024FMP; Start 68; Stop 92
cctctattatactaactgcgattgt

SEQ ID NO: 276123 - DNA, 25 bp, Artificial
  probe
  misc_feature (1)..(25): SEQ ID NO: 871; WAN024FMP; Start 67; Stop 91
acctctattatactaactgcgattg

SEQ ID NO: 276124 - DNA, 25 bp, Artificial
  probe
  misc_feature (1)..(25): SEQ ID NO: 871; WAN024FMP; Start 458; Stop 482
taactcgtgtatctgatgtgacaac

SEQ ID NO: 276125 - DNA, 25 bp, Artificial
  probe
  misc_feature (1)..(25): SEQ ID NO: 871; WAN024FMP; Start 457; Stop 481
gtaactcgtgtatctgatgtgacaa

SEQ ID NO: 276126 - DNA, 25 bp, Artificial
  probe
  misc_feature (1)..(25): SEQ ID NO: 871; WAN024FMP; Start 132; Stop 156
gacacctgagtattctagtacgaca

SEQ ID NO: 276127 - DNA, 25 bp, Artificial
  probe
  misc_feature (1)..(25): SEQ ID NO: 871; WAN024FMP; Start 131; Stop 155
tgacacctgagtattctagtacgac

SEQ ID NO: 276128 - DNA, 25 bp, Artificial
  probe
  misc_feature (1)..(25): SEQ ID NO: 871; WAN024FMP; Start 310; Stop 334
acagttaaggaattaagcaagaaga

SEQ ID NO: 276129 - DNA, 25 bp, Artificial
  probe
  misc_feature (1)..(25): SEQ ID NO: 871; WAN024FMP; Start 133; Stop 157
acacctgagtattctagtacgacac

SEQ ID NO: 276130 - DNA, 25 bp, Artificial
  probe
  misc_feature (1)..(25): SEQ ID NO: 871; WAN024FMP; Start 511; Stop 535
ccttcatcacctaatattcgtcgta

SEQ ID NO: 276131 - DNA, 25 bp, Artificial
  probe
  misc_feature (1)..(25): SEQ ID NO: 871; WAN024FMP; Start 508; Stop 532
agtccttcatcacctaatattcgtc

SEQ ID NO: 276132 - DNA, 25 bp, Artificial
  probe
  misc_feature (1)..(25): SEQ ID NO: 871; WAN024FMP; Start 507; Stop 531
aagtccttcatcacctaatattcgt

SEQ ID NO: 276133 - DNA, 25 bp, Artificial
  probe
  misc_feature (1)..(25): SEQ ID NO: 871; WAN024FMP; Start 129; Stop 153
actgacacctgagtattctagtacg

SEQ ID NO: 276134 - DNA, 25 bp, Artificial
  probe
  misc_feature (1)..(25): SEQ ID NO: 871; WAN024FMP; Start 456; Stop 480
tgtaactcgtgtatctgatgtgaca

SEQ ID NO: 276135 - DNA, 25 bp, Artificial
  probe
  misc_feature (1)..(25): SEQ ID NO: 871; WAN024FMP; Start 509; Stop 533
gtccttcatcacctaatattcgtcg

SEQ ID NO: 276136 - DNA, 25 bp, Artificial
  probe
  misc_feature (1)..(25): SEQ ID NO: 871; WAN024FMP; Start 320; Stop 344
aattaagcaagaagattcaggtaac

SEQ ID NO: 276137 - DNA, 25 bp, Artificial
  probe
  misc_feature (1)..(25): SEQ ID NO: 871; WAN024FMP; Start 512; Stop 536
cttcatcacctaatattcgtcgtaa

SEQ ID NO: 276138 - DNA, 25 bp, Artificial
  probe
  misc_feature (1)..(25): SEQ ID NO: 872; WAN024GAZ; Start 29; Stop 53
ggaaattagagtcggatgtgaatga

SEQ ID NO: 276139 - DNA, 25 bp, Artificial
  probe
  misc_feature (1)..(25): SEQ ID NO: 872; WAN024GAZ; Start 27; Stop 51
ctggaaattagagtcggatgtgaat

SEQ ID NO: 276140 - DNA, 25 bp, Artificial
  probe
  misc_feature (1)..(25): SEQ ID NO: 872; WAN024GAZ; Start 28; Stop 52
tggaaattagagtcggatgtgaatg

SEQ ID NO: 276141 - DNA, 25 bp, Artificial
  probe
  misc_feature (1)..(25): SEQ ID NO: 872; WAN024GAZ; Start 23; Stop 47
taaactggaaattagagtcggatgt

SEQ ID NO: 276142 - DNA, 25 bp, Artificial
  probe
  misc_feature (1)..(25): SEQ ID NO: 872; WAN024GAZ; Start 22; Stop 46
gtaaactggaaattagagtcggatg

SEQ ID NO: 276143 - DNA, 25 bp, Artificial
  probe
  misc_feature (1)..(25): SEQ ID NO: 872; WAN024GAZ; Start 21; Stop 45
agtaaactggaaattagagtcggat

SEQ ID NO: 276144 - DNA, 25 bp, Artificial
  probe
  misc_feature (1)..(25): SEQ ID NO: 872; WAN024GAZ; Start 20; Stop 44
tagtaaactggaaattagagtcgga

SEQ ID NO: 276145 - DNA, 25 bp, Artificial
  probe
  misc_feature (1)..(25): SEQ ID NO: 872; WAN024GAZ; Start 24; Stop 48
aaactggaaattagagtcggatgtg

SEQ ID NO: 276146 - DNA, 25 bp, Artificial
  probe
  misc_feature (1)..(25): SEQ ID NO: 872; WAN024GAZ; Start 30; Stop 54
gaaattagagtcggatgtgaatgac

SEQ ID NO: 276147 - DNA, 25 bp, Artificial
  probe
  misc_feature (1)..(25): SEQ ID NO: 872; WAN024GAZ; Start 26; Stop 50
actggaaattagagtcggatgtgaa

SEQ ID NO: 276148 - DNA, 25 bp, Artificial
  probe
  misc_feature (1)..(25): SEQ ID NO: 872; WAN024GAZ; Start 25; Stop 49
aactggaaattagagtcggatgtga

SEQ ID NO: 276149 - DNA, 25 bp, Artificial
  probe
  misc_feature (1)..(25): SEQ ID NO: 872; WAN024GAZ; Start 19; Stop 43
ttagtaaactggaaattagagtcgg

SEQ ID NO: 276150 - DNA, 25 bp, Artificial
  probe
  misc_feature (1)..(25): SEQ ID NO: 872; WAN024GAZ; Start 39; Stop 63
gtcggatgtgaatgactatgtgaaa

SEQ ID NO: 276151 - DNA, 25 bp, Artificial
  probe
  misc_feature (1)..(25): SEQ ID NO: 872; WAN024GAZ; Start 18; Stop 42
gttagtaaactggaaattagagtcg

SEQ ID NO: 276152 - DNA, 25 bp, Artificial
  probe
  misc_feature (1)..(25): SEQ ID NO: 872; WAN024GAZ; Start 34; Stop 58
ttagagtcggatgtgaatgactatg

SEQ ID NO: 276153 - DNA, 25 bp, Artificial
  probe
  misc_feature (1)..(25): SEQ ID NO: 872; WAN024GAZ; Start 66; Stop 90
gcagtttgaaaatcttggtttgaaa

SEQ ID NO: 276154 - DNA, 25 bp, Artificial
  probe
  misc_feature (1)..(25): SEQ ID NO: 872; WAN024GAZ; Start 65; Stop 89
agcagtttgaaaatcttggtttgaa

SEQ ID NO: 276155 - DNA, 25 bp, Artificial
  probe
  misc_feature (1)..(25): SEQ ID NO: 872; WAN024GAZ; Start 32; Stop 56
aattagagtcggatgtgaatgacta

SEQ ID NO: 276156 - DNA, 25 bp, Artificial
  probe
  misc_feature (1)..(25): SEQ ID NO: 872; WAN024GAZ; Start 40; Stop 64
tcggatgtgaatgactatgtgaaaa

SEQ ID NO: 276157 - DNA, 25 bp, Artificial
  probe
  misc_feature (1)..(25): SEQ ID NO: 872; WAN024GAZ; Start 35; Stop 59
tagagtcggatgtgaatgactatgt

SEQ ID NO: 276158 - DNA, 25 bp, Artificial
  probe
  misc_feature (1)..(25): SEQ ID NO: 872; WAN024GAZ; Start 33; Stop 57
attagagtcggatgtgaatgactat

SEQ ID NO: 276159 - DNA, 25 bp, Artificial
  probe
  misc_feature (1)..(25): SEQ ID NO: 872; WAN024GAZ; Start 64; Stop 88
aagcagtttgaaaatcttggtttga

SEQ ID NO: 276160 - DNA, 25 bp, Artificial
  probe
  misc_feature (1)..(25): SEQ ID NO: 872; WAN024GAZ; Start 63; Stop 87
aaagcagtttgaaaatcttggtttg

SEQ ID NO: 276161 - DNA, 25 bp, Artificial
  probe
  misc_feature (1)..(25): SEQ ID NO: 872; WAN024GAZ; Start 62; Stop 86
aaaagcagtttgaaaatcttggttt

SEQ ID NO: 276162 - DNA, 25 bp, Artificial
  probe
  misc_feature (1)..(25): SEQ ID NO: 872; WAN024GAZ; Start 38; Stop 62
agtcggatgtgaatgactatgtgaa

SEQ ID NO: 276163 - DNA, 25 bp, Artificial
  probe
  misc_feature (1)..(25): SEQ ID NO: 872; WAN024GAZ; Start 17; Stop 41
tgttagtaaactggaaattagagtc

SEQ ID NO: 276164 - DNA, 25 bp, Artificial
  probe
  misc_feature (1)..(25): SEQ ID NO: 872; WAN024GAZ; Start 36; Stop 60
agagtcggatgtgaatgactatgtg

SEQ ID NO: 276165 - DNA, 25 bp, Artificial
  probe
  misc_feature (1)..(25): SEQ ID NO: 872; WAN024GAZ; Start 37; Stop 61
gagtcggatgtgaatgactatgtga

SEQ ID NO: 276166 - DNA, 25 bp, Artificial
  probe
  misc_feature (1)..(25): SEQ ID NO: 872; WAN024GAZ; Start 67; Stop 91
cagtttgaaaatcttggtttgaaaa

SEQ ID NO: 276167 - DNA, 25 bp, Artificial
  probe
  misc_feature (1)..(25): SEQ ID NO: 872; WAN024GAZ; Start 31; Stop 55
aaattagagtcggatgtgaatgact

SEQ ID NO: 276168 - DNA, 25 bp, Artificial
  probe
  misc_feature (1)..(25): SEQ ID NO: 872; WAN024GAZ; Start 16; Stop 40
atgttagtaaactggaaattagagt

SEQ ID NO: 276169 - DNA, 25 bp, Artificial
  probe
  misc_feature (1)..(25): SEQ ID NO: 873; WAN024DNX; Start 80; Stop 104
atgattccatcaatgacaaggagtt

SEQ ID NO: 276170 - DNA, 25 bp, Artificial
  probe
  misc_feature (1)..(25): SEQ ID NO: 873; WAN024DNX; Start 84; Stop 108
ttccatcaatgacaaggagttgaat

SEQ ID NO: 276171 - DNA, 25 bp, Artificial
  probe
  misc_feature (1)..(25): SEQ ID NO: 873; WAN024DNX; Start 83; Stop 107
attccatcaatgacaaggagttgaa

SEQ ID NO: 276172 - DNA, 25 bp, Artificial
  probe
  misc_feature (1)..(25): SEQ ID NO: 873; WAN024DNX; Start 81; Stop 105
tgattccatcaatgacaaggagttg

SEQ ID NO: 276173 - DNA, 25 bp, Artificial
  probe
  misc_feature (1)..(25): SEQ ID NO: 873; WAN024DNX; Start 88; Stop 112
atcaatgacaaggagttgaatggtt

SEQ ID NO: 276174 - DNA, 25 bp, Artificial
  probe
  misc_feature (1)..(25): SEQ ID NO: 873; WAN024DNX; Start 82; Stop 106
gattccatcaatgacaaggagttga

SEQ ID NO: 276175 - DNA, 25 bp, Artificial
  probe
  misc_feature (1)..(25): SEQ ID NO: 873; WAN024DNX; Start 79; Stop 103
catgattccatcaatgacaaggagt

SEQ ID NO: 276176 - DNA, 25 bp, Artificial
  probe
  misc_feature (1)..(25): SEQ ID NO: 873; WAN024DNX; Start 85; Stop 109
tccatcaatgacaaggagttgaatg

SEQ ID NO: 276177 - DNA, 25 bp, Artificial
  probe
  misc_feature (1)..(25): SEQ ID NO: 873; WAN024DNX; Start 87; Stop 111
catcaatgacaaggagttgaatggt

SEQ ID NO: 276178 - DNA, 25 bp, Artificial
  probe
  misc_feature (1)..(25): SEQ ID NO: 873; WAN024DNX; Start 78; Stop 102
gcatgattccatcaatgacaaggag

SEQ ID NO: 276179 - DNA, 25 bp, Artificial
  probe
  misc_feature (1)..(25): SEQ ID NO: 873; WAN024DNX; Start 76; Stop 100
cagcatgattccatcaatgacaagg

SEQ ID NO: 276180 - DNA, 25 bp, Artificial
  probe
  misc_feature (1)..(25): SEQ ID NO: 873; WAN024DNX; Start 75; Stop 99
ccagcatgattccatcaatgacaag

SEQ ID NO: 276181 - DNA, 25 bp, Artificial
  probe
  misc_feature (1)..(25): SEQ ID NO: 873; WAN024DNX; Start 77; Stop 101
agcatgattccatcaatgacaagga

SEQ ID NO: 276182 - DNA, 25 bp, Artificial
  probe
  misc_feature (1)..(25): SEQ ID NO: 873; WAN024DNX; Start 99; Stop 123
ggagttgaatggttttgatgaagat

SEQ ID NO: 276183 - DNA, 25 bp, Artificial
  probe
  misc_feature (1)..(25): SEQ ID NO: 873; WAN024DNX; Start 97; Stop 121
aaggagttgaatggttttgatgaag

SEQ ID NO: 276184 - DNA, 25 bp, Artificial
  probe
  misc_feature (1)..(25): SEQ ID NO: 873; WAN024DNX; Start 18; Stop 42
aaccgctataaatcaaaatccagtc

SEQ ID NO: 276185 - DNA, 25 bp, Artificial
  probe
  misc_feature (1)..(25): SEQ ID NO: 873; WAN024DNX; Start 17; Stop 41
caaccgctataaatcaaaatccagt

SEQ ID NO: 276186 - DNA, 25 bp, Artificial
  probe
  misc_feature (1)..(25): SEQ ID NO: 873; WAN024DNX; Start 16; Stop 40
ccaaccgctataaatcaaaatccag

SEQ ID NO: 276187 - DNA, 25 bp, Artificial
  probe
  misc_feature (1)..(25): SEQ ID NO: 873; WAN024DNX; Start 98; Stop 122
aggagttgaatggttttgatgaaga

SEQ ID NO: 276188 - DNA, 25 bp, Artificial
  probe
  misc_feature (1)..(25): SEQ ID NO: 873; WAN024DNX; Start 27; Stop 51
aaatcaaaatccagtcccaagtaag

SEQ ID NO: 276189 - DNA, 25 bp, Artificial
  probe
  misc_feature (1)..(25): SEQ ID NO: 873; WAN024DNX; Start 22; Stop 46
gctataaatcaaaatccagtcccaa

SEQ ID NO: 276190 - DNA, 25 bp, Artificial
  probe
  misc_feature (1)..(25): SEQ ID NO: 873; WAN024DNX; Start 10; Stop 34
aatgagccaaccgctataaatcaaa

SEQ ID NO: 276191 - DNA, 25 bp, Artificial
  probe
  misc_feature (1)..(25): SEQ ID NO: 873; WAN024DNX; Start 9; Stop 33
aaatgagccaaccgctataaatcaa

SEQ ID NO: 276192 - DNA, 25 bp, Artificial
  probe
  misc_feature (1)..(25): SEQ ID NO: 873; WAN024DNX; Start 101; Stop 125
agttgaatggttttgatgaagatga

SEQ ID NO: 276193 - DNA, 25 bp, Artificial
  probe
  misc_feature (1)..(25): SEQ ID NO: 873; WAN024DNX; Start 100; Stop 124
gagttgaatggttttgatgaagatg

SEQ ID NO: 276194 - DNA, 25 bp, Artificial
  probe
  misc_feature (1)..(25): SEQ ID NO: 873; WAN024DNX; Start 21; Stop 45
cgctataaatcaaaatccagtccca

SEQ ID NO: 276195 - DNA, 25 bp, Artificial
  probe
  misc_feature (1)..(25): SEQ ID NO: 873; WAN024DNX; Start 19; Stop 43
accgctataaatcaaaatccagtcc

SEQ ID NO: 276196 - DNA, 25 bp, Artificial
  probe
  misc_feature (1)..(25): SEQ ID NO: 873; WAN024DNX; Start 96; Stop 120
caaggagttgaatggttttgatgaa

SEQ ID NO: 276197 - DNA, 25 bp, Artificial
  probe
  misc_feature (1)..(25): SEQ ID NO: 873; WAN024DNX; Start 91; Stop 115
aatgacaaggagttgaatggttttg

SEQ ID NO: 276198 - DNA, 25 bp, Artificial
  probe
  misc_feature (1)..(25): SEQ ID NO: 873; WAN024DNX; Start 90; Stop 114
caatgacaaggagttgaatggtttt

SEQ ID NO: 276199 - DNA, 25 bp, Artificial
  probe
  misc_feature (1)..(25): SEQ ID NO: 873; WAN024DNX; Start 28; Stop 52
aatcaaaatccagtcccaagtaagc

SEQ ID NO: 276200 - DNA, 25 bp, Artificial
  probe
  misc_feature (1)..(25): SEQ ID NO: 873; WAN024DNX; Start 94; Stop 118
gacaaggagttgaatggttttgatg

SEQ ID NO: 276201 - DNA, 25 bp, Artificial
  probe
  misc_feature (1)..(25): SEQ ID NO: 873; WAN024DNX; Start 89; Stop 113
tcaatgacaaggagttgaatggttt

SEQ ID NO: 276202 - DNA, 25 bp, Artificial
  probe
  misc_feature (1)..(25): SEQ ID NO: 874; WAN024D84; Start 884; Stop 908
ttctcattgttgtccatcaagactc

SEQ ID NO: 276203 - DNA, 25 bp, Artificial
  probe
  misc_feature (1)..(25): SEQ ID NO: 874; WAN024D84; Start 523; Stop 547
ctctatacctatcacagcaagccag

SEQ ID NO: 276204 - DNA, 25 bp, Artificial
  probe
  misc_feature (1)..(25): SEQ ID NO: 874; WAN024D84; Start 710; Stop 734
gaaccgctgctattcatctctctaa

SEQ ID NO: 276205 - DNA, 25 bp, Artificial
  probe
  misc_feature (1)..(25): SEQ ID NO: 874; WAN024D84; Start 801; Stop 825
ggacggtagcttagagttattagaa

SEQ ID NO: 276206 - DNA, 25 bp, Artificial
  probe
  misc_feature (1)..(25): SEQ ID NO: 874; WAN024D84; Start 704; Stop 728
ttaatggaaccgctgctattcatct

SEQ ID NO: 276207 - DNA, 25 bp, Artificial
  probe
  misc_feature (1)..(25): SEQ ID NO: 874; WAN024D84; Start 886; Stop 910
ctcattgttgtccatcaagactctg

SEQ ID NO: 276208 - DNA, 25 bp, Artificial
  probe
  misc_feature (1)..(25): SEQ ID NO: 874; WAN024D84; Start 885; Stop 909
tctcattgttgtccatcaagactct

SEQ ID NO: 276209 - DNA, 25 bp, Artificial
  probe
  misc_feature (1)..(25): SEQ ID NO: 874; WAN024D84; Start 800; Stop 824
cggacggtagcttagagttattaga

SEQ ID NO: 276210 - DNA, 25 bp, Artificial
  probe
  misc_feature (1)..(25): SEQ ID NO: 874; WAN024D84; Start 888; Stop 912
cattgttgtccatcaagactctgac

SEQ ID NO: 276211 - DNA, 25 bp, Artificial
  probe
  misc_feature (1)..(25): SEQ ID NO: 874; WAN024D84; Start 24; Stop 48
aacttatacacgtcgtacttctcaa

SEQ ID NO: 276212 - DNA, 25 bp, Artificial
  probe
  misc_feature (1)..(25): SEQ ID NO: 874; WAN024D84; Start 887; Stop 911
tcattgttgtccatcaagactctga

SEQ ID NO: 276213 - DNA, 25 bp, Artificial
  probe
  misc_feature (1)..(25): SEQ ID NO: 874; WAN024D84; Start 705; Stop 729
taatggaaccgctgctattcatctc

SEQ ID NO: 276214 - DNA, 25 bp, Artificial
  probe
  misc_feature (1)..(25): SEQ ID NO: 874; WAN024D84; Start 25; Stop 49
acttatacacgtcgtacttctcaag

SEQ ID NO: 276215 - DNA, 25 bp, Artificial
  probe
  misc_feature (1)..(25): SEQ ID NO: 874; WAN024D84; Start 23; Stop 47
gaacttatacacgtcgtacttctca

SEQ ID NO: 276216 - DNA, 25 bp, Artificial
  probe
  misc_feature (1)..(25): SEQ ID NO: 874; WAN024D84; Start 740; Stop 764
gtaaatacctctacgcttctaaccg

SEQ ID NO: 276217 - DNA, 25 bp, Artificial
  probe
  misc_feature (1)..(25): SEQ ID NO: 874; WAN024D84; Start 20; Stop 44
ttggaacttatacacgtcgtacttc

SEQ ID NO: 276218 - DNA, 25 bp, Artificial
  probe
  misc_feature (1)..(25): SEQ ID NO: 874; WAN024D84; Start 26; Stop 50
cttatacacgtcgtacttctcaagg

SEQ ID NO: 276219 - DNA, 25 bp, Artificial
  probe
  misc_feature (1)..(25): SEQ ID NO: 874; WAN024D84; Start 22; Stop 46
ggaacttatacacgtcgtacttctc

SEQ ID NO: 276220 - DNA, 25 bp, Artificial
  probe
  misc_feature (1)..(25): SEQ ID NO: 874; WAN024D84; Start 718; Stop 742
gctattcatctctctaaagacggta

SEQ ID NO: 276221 - DNA, 25 bp, Artificial
  probe
  misc_feature (1)..(25): SEQ ID NO: 874; WAN024D84; Start 716; Stop 740
ctgctattcatctctctaaagacgg

SEQ ID NO: 276222 - DNA, 25 bp, Artificial
  probe
  misc_feature (1)..(25): SEQ ID NO: 874; WAN024D84; Start 55; Stop 79
tacaaggcagactttgatacagaaa

SEQ ID NO: 276223 - DNA, 25 bp, Artificial
  probe
  misc_feature (1)..(25): SEQ ID NO: 874; WAN024D84; Start 54; Stop 78
ttacaaggcagactttgatacagaa

SEQ ID NO: 276224 - DNA, 25 bp, Artificial
  probe
  misc_feature (1)..(25): SEQ ID NO: 874; WAN024D84; Start 53; Stop 77
tttacaaggcagactttgatacaga

SEQ ID NO: 276225 - DNA, 25 bp, Artificial
  probe
  misc_feature (1)..(25): SEQ ID NO: 874; WAN024D84; Start 50; Stop 74
ggatttacaaggcagactttgatac

SEQ ID NO: 276226 - DNA, 25 bp, Artificial
  probe
  misc_feature (1)..(25): SEQ ID NO: 874; WAN024D84; Start 138; Stop 162
ctttgaccagcaccaacatttatac

SEQ ID NO: 276227 - DNA, 25 bp, Artificial
  probe
  misc_feature (1)..(25): SEQ ID NO: 874; WAN024D84; Start 21; Stop 45
tggaacttatacacgtcgtacttct

SEQ ID NO: 276228 - DNA, 25 bp, Artificial
  probe
  misc_feature (1)..(25): SEQ ID NO: 874; WAN024D84; Start 591; Stop 615
cgcttatctcatttgtgaactcaat

SEQ ID NO: 276229 - DNA, 25 bp, Artificial
  probe
  misc_feature (1)..(25): SEQ ID NO: 874; WAN024D84; Start 52; Stop 76
atttacaaggcagactttgatacag

SEQ ID NO: 276230 - DNA, 25 bp, Artificial
  probe
  misc_feature (1)..(25): SEQ ID NO: 874; WAN024D84; Start 51; Stop 75
gatttacaaggcagactttgataca

SEQ ID NO: 276231 - DNA, 25 bp, Artificial
  probe
  misc_feature (1)..(25): SEQ ID NO: 874; WAN024D84; Start 588; Stop 612
aatcgcttatctcatttgtgaactc

SEQ ID NO: 276232 - DNA, 25 bp, Artificial
  probe
  misc_feature (1)..(25): SEQ ID NO: 874; WAN024D84; Start 49; Stop 73
gggatttacaaggcagactttgata

SEQ ID NO: 276233 - DNA, 25 bp, Artificial
  probe
  misc_feature (1)..(25): SEQ ID NO: 874; WAN024D84; Start 717; Stop 741
tgctattcatctctctaaagacggt

SEQ ID NO: 276234 - DNA, 25 bp, Artificial
  probe
  misc_feature (1)..(25): SEQ ID NO: 874; WAN024D84; Start 715; Stop 739
gctgctattcatctctctaaagacg

SEQ ID NO: 276235 - DNA, 25 bp, Artificial
  probe
  misc_feature (1)..(25): SEQ ID NO: 875; WAN024CPK; Start 1213; Stop 1237
aaagaagagaaacaaacagttagga

SEQ ID NO: 276236 - DNA, 25 bp, Artificial
  probe
  misc_feature (1)..(25): SEQ ID NO: 875; WAN024CPK; Start 1236; Stop 1260
gattgtcacaggttccttgtatttc

SEQ ID NO: 276237 - DNA, 25 bp, Artificial
  probe
  misc_feature (1)..(25): SEQ ID NO: 875; WAN024CPK; Start 1237; Stop 1261
attgtcacaggttccttgtatttct

SEQ ID NO: 276238 - DNA, 25 bp, Artificial
  probe
  misc_feature (1)..(25): SEQ ID NO: 875; WAN024CPK; Start 1238; Stop 1262
ttgtcacaggttccttgtatttctt

SEQ ID NO: 276239 - DNA, 25 bp, Artificial
  probe
  misc_feature (1)..(25): SEQ ID NO: 875; WAN024CPK; Start 1215; Stop 1239
agaagagaaacaaacagttaggatt

SEQ ID NO: 276240 - DNA, 25 bp, Artificial
  probe
  misc_feature (1)..(25): SEQ ID NO: 875; WAN024CPK; Start 1214; Stop 1238
aagaagagaaacaaacagttaggat

SEQ ID NO: 276241 - DNA, 25 bp, Artificial
  probe
  misc_feature (1)..(25): SEQ ID NO: 875; WAN024CPK; Start 1241; Stop 1265
tcacaggttccttgtatttcttgag

SEQ ID NO: 276242 - DNA, 25 bp, Artificial
  probe
  misc_feature (1)..(25): SEQ ID NO: 875; WAN024CPK; Start 1216; Stop 1240
gaagagaaacaaacagttaggattg

SEQ ID NO: 276243 - DNA, 25 bp, Artificial
  probe
  misc_feature (1)..(25): SEQ ID NO: 875; WAN024CPK; Start 1240; Stop 1264
gtcacaggttccttgtatttcttga

SEQ ID NO: 276244 - DNA, 25 bp, Artificial
  probe
  misc_feature (1)..(25): SEQ ID NO: 875; WAN024CPK; Start 1227; Stop 1251
aacagttaggattgtcacaggttcc

SEQ ID NO: 276245 - DNA, 25 bp, Artificial
  probe
  misc_feature (1)..(25): SEQ ID NO: 875; WAN024CPK; Start 1226; Stop 1250
aaacagttaggattgtcacaggttc

SEQ ID NO: 276246 - DNA, 25 bp, Artificial
  probe
  misc_feature (1)..(25): SEQ ID NO: 875; WAN024CPK; Start 1239; Stop 1263
tgtcacaggttccttgtatttcttg

SEQ ID NO: 276247 - DNA, 25 bp, Artificial
  probe
  misc_feature (1)..(25): SEQ ID NO: 875; WAN024CPK; Start 1225; Stop 1249
caaacagttaggattgtcacaggtt

SEQ ID NO: 276248 - DNA, 25 bp, Artificial
  probe
  misc_feature (1)..(25): SEQ ID NO: 875; WAN024CPK; Start 1235; Stop 1259
ggattgtcacaggttccttgtattt

SEQ ID NO: 276249 - DNA, 25 bp, Artificial
  probe
  misc_feature (1)..(25): SEQ ID NO: 875; WAN024CPK; Start 1245; Stop 1269
aggttccttgtatttcttgagccaa

SEQ ID NO: 276250 - DNA, 25 bp, Artificial
  probe
  misc_feature (1)..(25): SEQ ID NO: 875; WAN024CPK; Start 1242; Stop 1266
cacaggttccttgtatttcttgagc

SEQ ID NO: 276251 - DNA, 25 bp, Artificial
  probe
  misc_feature (1)..(25): SEQ ID NO: 875; WAN024CPK; Start 1244; Stop 1268
caggttccttgtatttcttgagcca

SEQ ID NO: 276252 - DNA, 25 bp, Artificial
  probe
  misc_feature (1)..(25): SEQ ID NO: 875; WAN024CPK; Start 895; Stop 919
cgtttggaaatcgtgtcaagagatc

SEQ ID NO: 276253 - DNA, 25 bp, Artificial
  probe
  misc_feature (1)..(25): SEQ ID NO: 875; WAN024CPK; Start 896; Stop 920
gtttggaaatcgtgtcaagagatcc

SEQ ID NO: 276254 - DNA, 25 bp, Artificial
  probe
  misc_feature (1)..(25): SEQ ID NO: 875; WAN024CPK; Start 1243; Stop 1267
acaggttccttgtatttcttgagcc

SEQ ID NO: 276255 - DNA, 25 bp, Artificial
  probe
  misc_feature (1)..(25): SEQ ID NO: 875; WAN024CPK; Start 1233; Stop 1257
taggattgtcacaggttccttgtat

SEQ ID NO: 276256 - DNA, 25 bp, Artificial
  probe
  misc_feature (1)..(25): SEQ ID NO: 875; WAN024CPK; Start 1222; Stop 1246
aaacaaacagttaggattgtcacag

SEQ ID NO: 276257 - DNA, 25 bp, Artificial
  probe
  misc_feature (1)..(25): SEQ ID NO: 875; WAN024CPK; Start 1221; Stop 1245
gaaacaaacagttaggattgtcaca

SEQ ID NO: 276258 - DNA, 25 bp, Artificial
  probe
  misc_feature (1)..(25): SEQ ID NO: 875; WAN024CPK; Start 1220; Stop 1244
agaaacaaacagttaggattgtcac

SEQ ID NO: 276259 - DNA, 25 bp, Artificial
  probe
  misc_feature (1)..(25): SEQ ID NO: 875; WAN024CPK; Start 1232; Stop 1256
ttaggattgtcacaggttccttgta

SEQ ID NO: 276260 - DNA, 25 bp, Artificial
  probe
  misc_feature (1)..(25): SEQ ID NO: 875; WAN024CPK; Start 1219; Stop 1243
gagaaacaaacagttaggattgtca

SEQ ID NO: 276261 - DNA, 25 bp, Artificial
  probe
  misc_feature (1)..(25): SEQ ID NO: 875; WAN024CPK; Start 1218; Stop 1242
agagaaacaaacagttaggattgtc

SEQ ID NO: 276262 - DNA, 25 bp, Artificial
  probe
  misc_feature (1)..(25): SEQ ID NO: 875; WAN024CPK; Start 897; Stop 921
tttggaaatcgtgtcaagagatccc

SEQ ID NO: 276263 - DNA, 25 bp, Artificial
  probe
  misc_feature (1)..(25): SEQ ID NO: 875; WAN024CPK; Start 1212; Stop 1236
aaaagaagagaaacaaacagttagg

SEQ ID NO: 276264 - DNA, 25 bp, Artificial
  probe
  misc_feature (1)..(25): SEQ ID NO: 875; WAN024CPK; Start 1217; Stop 1241
aagagaaacaaacagttaggattgt

SEQ ID NO: 276265 - DNA, 25 bp, Artificial
  probe
  misc_feature (1)..(25): SEQ ID NO: 875; WAN024CPK; Start 1234; Stop 1258
aggattgtcacaggttccttgtatt

SEQ ID NO: 276266 - DNA, 25 bp, Artificial
  probe
  misc_feature (1)..(25): SEQ ID NO: 875; WAN024CPK; Start 1223; Stop 1247
aacaaacagttaggattgtcacagg

SEQ ID NO: 276267 - DNA, 25 bp, Artificial
  probe
  misc_feature (1)..(25): SEQ ID NO: 875; WAN024CPK; Start 894; Stop 918
gcgtttggaaatcgtgtcaagagat

SEQ ID NO: 276268 - DNA, 25 bp, Artificial
  probe
  misc_feature (1)..(25): SEQ ID NO: 876; WAN024GI3; Start 184; Stop 208
gattatgaccgcctattggagtatt

SEQ ID NO: 276269 - DNA, 25 bp, Artificial
  probe
  misc_feature (1)..(25): SEQ ID NO: 876; WAN024GI3; Start 183; Stop 207
agattatgaccgcctattggagtat

SEQ ID NO: 276270 - DNA, 25 bp, Artificial
  probe
  misc_feature (1)..(25): SEQ ID NO: 876; WAN024GI3; Start 600; Stop 624
cagtgaatatgtaggttgcgttatt

SEQ ID NO: 276271 - DNA, 25 bp, Artificial
  probe
  misc_feature (1)..(25): SEQ ID NO: 876; WAN024GI3; Start 254; Stop 278
gagaagagtgtccagaatatcctta

SEQ ID NO: 276272 - DNA, 25 bp, Artificial
  probe
  misc_feature (1)..(25): SEQ ID NO: 876; WAN024GI3; Start 182; Stop 206
cagattatgaccgcctattggagta

SEQ ID NO: 276273 - DNA, 25 bp, Artificial
  probe
  misc_feature (1)..(25): SEQ ID NO: 876; WAN024GI3; Start 255; Stop 279
agaagagtgtccagaatatccttat

SEQ ID NO: 276274 - DNA, 25 bp, Artificial
  probe
  misc_feature (1)..(25): SEQ ID NO: 876; WAN024GI3; Start 154; Stop 178
gatgatgttgacattatgatgcctc

SEQ ID NO: 276275 - DNA, 25 bp, Artificial
  probe
  misc_feature (1)..(25): SEQ ID NO: 876; WAN024GI3; Start 152; Stop 176
atgatgatgttgacattatgatgcc

SEQ ID NO: 276276 - DNA, 25 bp, Artificial
  probe
  misc_feature (1)..(25): SEQ ID NO: 876; WAN024GI3; Start 253; Stop 277
cgagaagagtgtccagaatatcctt

SEQ ID NO: 276277 - DNA, 25 bp, Artificial
  probe
  misc_feature (1)..(25): SEQ ID NO: 876; WAN024GI3; Start 595; Stop 619
gataacagtgaatatgtaggttgcg

SEQ ID NO: 276278 - DNA, 25 bp, Artificial
  probe
  misc_feature (1)..(25): SEQ ID NO: 876; WAN024GI3; Start 594; Stop 618
cgataacagtgaatatgtaggttgc

SEQ ID NO: 276279 - DNA, 25 bp, Artificial
  probe
  misc_feature (1)..(25): SEQ ID NO: 876; WAN024GI3; Start 599; Stop 623
acagtgaatatgtaggttgcgttat

SEQ ID NO: 276280 - DNA, 25 bp, Artificial
  probe
  misc_feature (1)..(25): SEQ ID NO: 876; WAN024GI3; Start 596; Stop 620
ataacagtgaatatgtaggttgcgt

SEQ ID NO: 276281 - DNA, 25 bp, Artificial
  probe
  misc_feature (1)..(25): SEQ ID NO: 876; WAN024GI3; Start 153; Stop 177
tgatgatgttgacattatgatgcct

SEQ ID NO: 276282 - DNA, 25 bp, Artificial
  probe
  misc_feature (1)..(25): SEQ ID NO: 876; WAN024GI3; Start 598; Stop 622
aacagtgaatatgtaggttgcgtta

SEQ ID NO: 276283 - DNA, 25 bp, Artificial
  probe
  misc_feature (1)..(25): SEQ ID NO: 876; WAN024GI3; Start 597; Stop 621
taacagtgaatatgtaggttgcgtt

SEQ ID NO: 276284 - DNA, 25 bp, Artificial
  probe
  misc_feature (1)..(25): SEQ ID NO: 876; WAN024GI3; Start 737; Stop 761
tacggcatgaatatggagattacat

SEQ ID NO: 276285 - DNA, 25 bp, Artificial
  probe
  misc_feature (1)..(25): SEQ ID NO: 876; WAN024GI3; Start 736; Stop 760
ctacggcatgaatatggagattaca

SEQ ID NO: 276286 - DNA, 25 bp, Artificial
  probe
  misc_feature (1)..(25): SEQ ID NO: 876; WAN024GI3; Start 735; Stop 759
tctacggcatgaatatggagattac

SEQ ID NO: 276287 - DNA, 25 bp, Artificial
  probe
  misc_feature (1)..(25): SEQ ID NO: 876; WAN024GI3; Start 734; Stop 758
ttctacggcatgaatatggagatta

SEQ ID NO: 276288 - DNA, 25 bp, Artificial
  probe
  misc_feature (1)..(25): SEQ ID NO: 876; WAN024GI3; Start 151; Stop 175
gatgatgatgttgacattatgatgc

SEQ ID NO: 276289 - DNA, 25 bp, Artificial
  probe
  misc_feature (1)..(25): SEQ ID NO: 876; WAN024GI3; Start 733; Stop 757
gttctacggcatgaatatggagatt

SEQ ID NO: 276290 - DNA, 25 bp, Artificial
  probe
  misc_feature (1)..(25): SEQ ID NO: 876; WAN024GI3; Start 593; Stop 617
acgataacagtgaatatgtaggttg

SEQ ID NO: 276291 - DNA, 25 bp, Artificial
  probe
  misc_feature (1)..(25): SEQ ID NO: 876; WAN024GI3; Start 155; Stop 179
atgatgttgacattatgatgcctcg

SEQ ID NO: 276292 - DNA, 25 bp, Artificial
  probe
  misc_feature (1)..(25): SEQ ID NO: 876; WAN024GI3; Start 250; Stop 274
aatcgagaagagtgtccagaatatc

SEQ ID NO: 276293 - DNA, 25 bp, Artificial
  probe
  misc_feature (1)..(25): SEQ ID NO: 876; WAN024GI3; Start 732; Stop 756
agttctacggcatgaatatggagat

SEQ ID NO: 276294 - DNA, 25 bp, Artificial
  probe
  misc_feature (1)..(25): SEQ ID NO: 876; WAN024GI3; Start 249; Stop 273
caatcgagaagagtgtccagaatat

SEQ ID NO: 276295 - DNA, 25 bp, Artificial
  probe
  misc_feature (1)..(25): SEQ ID NO: 876; WAN024GI3; Start 150; Stop 174
ggatgatgatgttgacattatgatg

SEQ ID NO: 276296 - DNA, 25 bp, Artificial
  probe
  misc_feature (1)..(25): SEQ ID NO: 876; WAN024GI3; Start 166; Stop 190
attatgatgcctcgaccagattatg

SEQ ID NO: 276297 - DNA, 25 bp, Artificial
  probe
  misc_feature (1)..(25): SEQ ID NO: 876; WAN024GI3; Start 731; Stop 755
aagttctacggcatgaatatggaga

SEQ ID NO: 276298 - DNA, 25 bp, Artificial
  probe
  misc_feature (1)..(25): SEQ ID NO: 876; WAN024GI3; Start 242; Stop 266
aagtattcaatcgagaagagtgtcc

SEQ ID NO: 276299 - DNA, 25 bp, Artificial
  probe
  misc_feature (1)..(25): SEQ ID NO: 876; WAN024GI3; Start 248; Stop 272
tcaatcgagaagagtgtccagaata

SEQ ID NO: 276300 - DNA, 25 bp, Artificial
  probe
  misc_feature (1)..(25): SEQ ID NO: 876; WAN024GI3; Start 165; Stop 189
cattatgatgcctcgaccagattat

SEQ ID NO: 276301 - DNA, 25 bp, Artificial
  probe
  misc_feature (1)..(25): SEQ ID NO: 877; WAN024B5Z; Start 368; Stop 392
ccttgatgactagaaccttggatac

SEQ ID NO: 276302 - DNA, 25 bp, Artificial
  probe
  misc_feature (1)..(25): SEQ ID NO: 877; WAN024B5Z; Start 369; Stop 393
cttgatgactagaaccttggatacg

SEQ ID NO: 276303 - DNA, 25 bp, Artificial
  probe
  misc_feature (1)..(25): SEQ ID NO: 877; WAN024B5Z; Start 1528; Stop 1552
aatcagttgagactatggagtgaag

SEQ ID NO: 276304 - DNA, 25 bp, Artificial
  probe
  misc_feature (1)..(25): SEQ ID NO: 877; WAN024B5Z; Start 1533; Stop 1557
gttgagactatggagtgaagttgat

SEQ ID NO: 276305 - DNA, 25 bp, Artificial
  probe
  misc_feature (1)..(25): SEQ ID NO: 877; WAN024B5Z; Start 1527; Stop 1551
caatcagttgagactatggagtgaa

SEQ ID NO: 276306 - DNA, 25 bp, Artificial
  probe
  misc_feature (1)..(25): SEQ ID NO: 877; WAN024B5Z; Start 1534; Stop 1558
ttgagactatggagtgaagttgatt

SEQ ID NO: 276307 - DNA, 25 bp, Artificial
  probe
  misc_feature (1)..(25): SEQ ID NO: 877; WAN024B5Z; Start 561; Stop 585
aacaattccgatgcttgctatctat

SEQ ID NO: 276308 - DNA, 25 bp, Artificial
  probe
  misc_feature (1)..(25): SEQ ID NO: 877; WAN024B5Z; Start 1529; Stop 1553
atcagttgagactatggagtgaagt

SEQ ID NO: 276309 - DNA, 25 bp, Artificial
  probe
  misc_feature (1)..(25): SEQ ID NO: 877; WAN024B5Z; Start 1774; Stop 1798
ctgattctgttattaagcgaggata

SEQ ID NO: 276310 - DNA, 25 bp, Artificial
  probe
  misc_feature (1)..(25): SEQ ID NO: 877; WAN024B5Z; Start 1532; Stop 1556
agttgagactatggagtgaagttga

SEQ ID NO: 276311 - DNA, 25 bp, Artificial
  probe
  misc_feature (1)..(25): SEQ ID NO: 877; WAN024B5Z; Start 1531; Stop 1555
cagttgagactatggagtgaagttg

SEQ ID NO: 276312 - DNA, 25 bp, Artificial
  probe
  misc_feature (1)..(25): SEQ ID NO: 877; WAN024B5Z; Start 1530; Stop 1554
tcagttgagactatggagtgaagtt

SEQ ID NO: 276313 - DNA, 25 bp, Artificial
  probe
  misc_feature (1)..(25): SEQ ID NO: 877; WAN024B5Z; Start 364; Stop 388
caatccttgatgactagaaccttgg

SEQ ID NO: 276314 - DNA, 25 bp, Artificial
  probe
  misc_feature (1)..(25): SEQ ID NO: 877; WAN024B5Z; Start 1055; Stop 1079
gcattaaggatgaacatcgttatct

SEQ ID NO: 276315 - DNA, 25 bp, Artificial
  probe
  misc_feature (1)..(25): SEQ ID NO: 877; WAN024B5Z; Start 370; Stop 394
ttgatgactagaaccttggatacgg

SEQ ID NO: 276316 - DNA, 25 bp, Artificial
  probe
  misc_feature (1)..(25): SEQ ID NO: 877; WAN024B5Z; Start 332; Stop 356
attggattgagcaggtgagagaatt

SEQ ID NO: 276317 - DNA, 25 bp, Artificial
  probe
  misc_feature (1)..(25): SEQ ID NO: 877; WAN024B5Z; Start 1775; Stop 1799
tgattctgttattaagcgaggatat

SEQ ID NO: 276318 - DNA, 25 bp, Artificial
  probe
  misc_feature (1)..(25): SEQ ID NO: 877; WAN024B5Z; Start 1495; Stop 1519
gacaaggatgtgacctatcaagatg

SEQ ID NO: 276319 - DNA, 25 bp, Artificial
  probe
  misc_feature (1)..(25): SEQ ID NO: 877; WAN024B5Z; Start 1494; Stop 1518
tgacaaggatgtgacctatcaagat

SEQ ID NO: 276320 - DNA, 25 bp, Artificial
  probe
  misc_feature (1)..(25): SEQ ID NO: 877; WAN024B5Z; Start 367; Stop 391
tccttgatgactagaaccttggata

SEQ ID NO: 276321 - DNA, 25 bp, Artificial
  probe
  misc_feature (1)..(25): SEQ ID NO: 877; WAN024B5Z; Start 331; Stop 355
gattggattgagcaggtgagagaat

SEQ ID NO: 276322 - DNA, 25 bp, Artificial
  probe
  misc_feature (1)..(25): SEQ ID NO: 877; WAN024B5Z; Start 235; Stop 259
atgctcaatcgacaagaatatctct

SEQ ID NO: 276323 - DNA, 25 bp, Artificial
  probe
  misc_feature (1)..(25): SEQ ID NO: 877; WAN024B5Z; Start 365; Stop 389
aatccttgatgactagaaccttgga

SEQ ID NO: 276324 - DNA, 25 bp, Artificial
  probe
  misc_feature (1)..(25): SEQ ID NO: 877; WAN024B5Z; Start 418; Stop 442
aaactactcttgctcctcttgaaat

SEQ ID NO: 276325 - DNA, 25 bp, Artificial
  probe
  misc_feature (1)..(25): SEQ ID NO: 877; WAN024B5Z; Start 323; Stop 347
ttctatttgattggattgagcaggt

SEQ ID NO: 276326 - DNA, 25 bp, Artificial
  probe
  misc_feature (1)..(25): SEQ ID NO: 877; WAN024B5Z; Start 322; Stop 346
tttctatttgattggattgagcagg

SEQ ID NO: 276327 - DNA, 25 bp, Artificial
  probe
  misc_feature (1)..(25): SEQ ID NO: 877; WAN024B5Z; Start 789; Stop 813
aaagatggcgacctatattcaaatg

SEQ ID NO: 276328 - DNA, 25 bp, Artificial
  probe
  misc_feature (1)..(25): SEQ ID NO: 877; WAN024B5Z; Start 407; Stop 431
ttacttggttgaaactactcttgct

SEQ ID NO: 276329 - DNA, 25 bp, Artificial
  probe
  misc_feature (1)..(25): SEQ ID NO: 877; WAN024B5Z; Start 406; Stop 430
tttacttggttgaaactactcttgc

SEQ ID NO: 276330 - DNA, 25 bp, Artificial
  probe
  misc_feature (1)..(25): SEQ ID NO: 877; WAN024B5Z; Start 792; Stop 816
gatggcgacctatattcaaatgatg

SEQ ID NO: 276331 - DNA, 25 bp, Artificial
  probe
  misc_feature (1)..(25): SEQ ID NO: 877; WAN024B5Z; Start 791; Stop 815
agatggcgacctatattcaaatgat

SEQ ID NO: 276332 - DNA, 25 bp, Artificial
  probe
  misc_feature (1)..(25): SEQ ID NO: 877; WAN024B5Z; Start 790; Stop 814
aagatggcgacctatattcaaatga

SEQ ID NO: 276333 - DNA, 25 bp, Artificial
  probe
  misc_feature (1)..(25): SEQ ID NO: 877; WAN024B5Z; Start 417; Stop 441
gaaactactcttgctcctcttgaaa

SEQ ID NO: 276334 - DNA, 25 bp, Artificial
  probe
  misc_feature (1)..(25): SEQ ID NO: 878; WAN024GLM; Start 246; Stop 270
tgataagtctcatctggttagcaca

SEQ ID NO: 276335 - DNA, 25 bp, Artificial
  probe
  misc_feature (1)..(25): SEQ ID NO: 878; WAN024GLM; Start 247; Stop 271
gataagtctcatctggttagcacag

SEQ ID NO: 276336 - DNA, 25 bp, Artificial
  probe
  misc_feature (1)..(25): SEQ ID NO: 878; WAN024GLM; Start 104; Stop 128
aagtcttaattgttggaccatctgg

SEQ ID NO: 276337 - DNA, 25 bp, Artificial
  probe
  misc_feature (1)..(25): SEQ ID NO: 878; WAN024GLM; Start 248; Stop 272
ataagtctcatctggttagcacagt

SEQ ID NO: 276338 - DNA, 25 bp, Artificial
  probe
  misc_feature (1)..(25): SEQ ID NO: 878; WAN024GLM; Start 557; Stop 581
aattgattgaccagattcataagga

SEQ ID NO: 276339 - DNA, 25 bp, Artificial
  probe
  misc_feature (1)..(25): SEQ ID NO: 878; WAN024GLM; Start 249; Stop 273
taagtctcatctggttagcacagtt

SEQ ID NO: 276340 - DNA, 25 bp, Artificial
  probe
  misc_feature (1)..(25): SEQ ID NO: 878; WAN024GLM; Start 534; Stop 558
caagtcaggtcaggatattatcgaa

SEQ ID NO: 276341 - DNA, 25 bp, Artificial
  probe
  misc_feature (1)..(25): SEQ ID NO: 878; WAN024GLM; Start 537; Stop 561
gtcaggtcaggatattatcgaattg

SEQ ID NO: 276342 - DNA, 25 bp, Artificial
  probe
  misc_feature (1)..(25): SEQ ID NO: 878; WAN024GLM; Start 536; Stop 560
agtcaggtcaggatattatcgaatt

SEQ ID NO: 276343 - DNA, 25 bp, Artificial
  probe
  misc_feature (1)..(25): SEQ ID NO: 878; WAN024GLM; Start 535; Stop 559
aagtcaggtcaggatattatcgaat

SEQ ID NO: 276344 - DNA, 25 bp, Artificial
  probe
  misc_feature (1)..(25): SEQ ID NO: 878; WAN024GLM; Start 357; Stop 381
agatgagatgaaaggtcgtgtttat

SEQ ID NO: 276345 - DNA, 25 bp, Artificial
  probe
  misc_feature (1)..(25): SEQ ID NO: 878; WAN024GLM; Start 356; Stop 380
tagatgagatgaaaggtcgtgttta

SEQ ID NO: 276346 - DNA, 25 bp, Artificial
  probe
  misc_feature (1)..(25): SEQ ID NO: 878; WAN024GLM; Start 225; Stop 249
agcctttgatatgagcatctatgat

SEQ ID NO: 276347 - DNA, 25 bp, Artificial
  probe
  misc_feature (1)..(25): SEQ ID NO: 878; WAN024GLM; Start 533; Stop 557
ccaagtcaggtcaggatattatcga

SEQ ID NO: 276348 - DNA, 25 bp, Artificial
  probe
  misc_feature (1)..(25): SEQ ID NO: 878; WAN024GLM; Start 538; Stop 562
tcaggtcaggatattatcgaattga

SEQ ID NO: 276349 - DNA, 25 bp, Artificial
  probe
  misc_feature (1)..(25): SEQ ID NO: 878; WAN024GLM; Start 86; Stop 110
ccatttacaagggagagaaagtctt

SEQ ID NO: 276350 - DNA, 25 bp, Artificial
  probe
  misc_feature (1)..(25): SEQ ID NO: 878; WAN024GLM; Start 555; Stop 579
cgaattgattgaccagattcataag

SEQ ID NO: 276351 - DNA, 25 bp, Artificial
  probe
  misc_feature (1)..(25): SEQ ID NO: 878; WAN024GLM; Start 358; Stop 382
gatgagatgaaaggtcgtgtttata

SEQ ID NO: 276352 - DNA, 25 bp, Artificial
  probe
  misc_feature (1)..(25): SEQ ID NO: 878; WAN024GLM; Start 96; Stop 120
gggagagaaagtcttaattgttgga

SEQ ID NO: 276353 - DNA, 25 bp, Artificial
  probe
  misc_feature (1)..(25): SEQ ID NO: 878; WAN024GLM; Start 95; Stop 119
agggagagaaagtcttaattgttgg

SEQ ID NO: 276354 - DNA, 25 bp, Artificial
  probe
  misc_feature (1)..(25): SEQ ID NO: 878; WAN024GLM; Start 71; Stop 95
aagggatagacttgaccatttacaa

SEQ ID NO: 276355 - DNA, 25 bp, Artificial
  probe
  misc_feature (1)..(25): SEQ ID NO: 878; WAN024GLM; Start 355; Stop 379
ctagatgagatgaaaggtcgtgttt

SEQ ID NO: 276356 - DNA, 25 bp, Artificial
  probe
  misc_feature (1)..(25): SEQ ID NO: 878; WAN024GLM; Start 277; Stop 301
caggatacagatgggcagtttattg

SEQ ID NO: 276357 - DNA, 25 bp, Artificial
  probe
  misc_feature (1)..(25): SEQ ID NO: 878; WAN024GLM; Start 82; Stop 106
ttgaccatttacaagggagagaaag

SEQ ID NO: 276358 - DNA, 25 bp, Artificial
  probe
  misc_feature (1)..(25): SEQ ID NO: 878; WAN024GLM; Start 83; Stop 107
tgaccatttacaagggagagaaagt

SEQ ID NO: 276359 - DNA, 25 bp, Artificial
  probe
  misc_feature (1)..(25): SEQ ID NO: 878; WAN024GLM; Start 94; Stop 118
aagggagagaaagtcttaattgttg

SEQ ID NO: 276360 - DNA, 25 bp, Artificial
  probe
  misc_feature (1)..(25): SEQ ID NO: 878; WAN024GLM; Start 226; Stop 250
gcctttgatatgagcatctatgata

SEQ ID NO: 276361 - DNA, 25 bp, Artificial
  probe
  misc_feature (1)..(25): SEQ ID NO: 878; WAN024GLM; Start 85; Stop 109
accatttacaagggagagaaagtct

SEQ ID NO: 276362 - DNA, 25 bp, Artificial
  probe
  misc_feature (1)..(25): SEQ ID NO: 878; WAN024GLM; Start 556; Stop 580
gaattgattgaccagattcataagg

SEQ ID NO: 276363 - DNA, 25 bp, Artificial
  probe
  misc_feature (1)..(25): SEQ ID NO: 878; WAN024GLM; Start 545; Stop 569
aggatattatcgaattgattgacca

SEQ ID NO: 276364 - DNA, 25 bp, Artificial
  probe
  misc_feature (1)..(25): SEQ ID NO: 878; WAN024GLM; Start 539; Stop 563
caggtcaggatattatcgaattgat

SEQ ID NO: 276365 - DNA, 25 bp, Artificial
  probe
  misc_feature (1)..(25): SEQ ID NO: 878; WAN024GLM; Start 93; Stop 117
caagggagagaaagtcttaattgtt

SEQ ID NO: 276366 - DNA, 25 bp, Artificial
  probe
  misc_feature (1)..(25): SEQ ID NO: 878; WAN024GLM; Start 245; Stop 269
atgataagtctcatctggttagcac

SEQ ID NO: 276367 - DNA, 25 bp, Artificial
  probe
  misc_feature (1)..(25): SEQ ID NO: 879; WAN024D8B; Start 751; Stop 775
tatacaacagatggaaccttgactc

SEQ ID NO: 276368 - DNA, 25 bp, Artificial
  probe
  misc_feature (1)..(25): SEQ ID NO: 879; WAN024D8B; Start 750; Stop 774
ttatacaacagatggaaccttgact

SEQ ID NO: 276369 - DNA, 25 bp, Artificial
  probe
  misc_feature (1)..(25): SEQ ID NO: 879; WAN024D8B; Start 166; Stop 190
tctcgctatcagaatatccaactat

SEQ ID NO: 276370 - DNA, 25 bp, Artificial
  probe
  misc_feature (1)..(25): SEQ ID NO: 879; WAN024D8B; Start 688; Stop 712
ccagactatcaagttcacatcaagg

SEQ ID NO: 276371 - DNA, 25 bp, Artificial
  probe
  misc_feature (1)..(25): SEQ ID NO: 879; WAN024D8B; Start 752; Stop 776
atacaacagatggaaccttgactct

SEQ ID NO: 276372 - DNA, 25 bp, Artificial
  probe
  misc_feature (1)..(25): SEQ ID NO: 879; WAN024D8B; Start 167; Stop 191
ctcgctatcagaatatccaactatt

SEQ ID NO: 276373 - DNA, 25 bp, Artificial
  probe
  misc_feature (1)..(25): SEQ ID NO: 879; WAN024D8B; Start 691; Stop 715
gactatcaagttcacatcaaggctg

SEQ ID NO: 276374 - DNA, 25 bp, Artificial
  probe
  misc_feature (1)..(25): SEQ ID NO: 879; WAN024D8B; Start 690; Stop 714
agactatcaagttcacatcaaggct

SEQ ID NO: 276375 - DNA, 25 bp, Artificial
  probe
  misc_feature (1)..(25): SEQ ID NO: 879; WAN024D8B; Start 689; Stop 713
cagactatcaagttcacatcaaggc

SEQ ID NO: 276376 - DNA, 25 bp, Artificial
  probe
  misc_feature (1)..(25): SEQ ID NO: 879; WAN024D8B; Start 753; Stop 777
tacaacagatggaaccttgactctc

SEQ ID NO: 276377 - DNA, 25 bp, Artificial
  probe
  misc_feature (1)..(25): SEQ ID NO: 879; WAN024D8B; Start 694; Stop 718
tatcaagttcacatcaaggctggaa

SEQ ID NO: 276378 - DNA, 25 bp, Artificial
  probe
  misc_feature (1)..(25): SEQ ID NO: 879; WAN024D8B; Start 693; Stop 717
ctatcaagttcacatcaaggctgga

SEQ ID NO: 276379 - DNA, 25 bp, Artificial
  probe
  misc_feature (1)..(25): SEQ ID NO: 879; WAN024D8B; Start 743; Stop 767
gcgagatttatacaacagatggaac

SEQ ID NO: 276380 - DNA, 25 bp, Artificial
  probe
  misc_feature (1)..(25): SEQ ID NO: 879; WAN024D8B; Start 742; Stop 766
tgcgagatttatacaacagatggaa

SEQ ID NO: 276381 - DNA, 25 bp, Artificial
  probe
  misc_feature (1)..(25): SEQ ID NO: 879; WAN024D8B; Start 744; Stop 768
cgagatttatacaacagatggaacc

SEQ ID NO: 276382 - DNA, 25 bp, Artificial
  probe
  misc_feature (1)..(25): SEQ ID NO: 879; WAN024D8B; Start 228; Stop 252
tttagtctatatcgccagtccaaac

SEQ ID NO: 276383 - DNA, 25 bp, Artificial
  probe
  misc_feature (1)..(25): SEQ ID NO: 879; WAN024D8B; Start 227; Stop 251
atttagtctatatcgccagtccaaa

SEQ ID NO: 276384 - DNA, 25 bp, Artificial
  probe
  misc_feature (1)..(25): SEQ ID NO: 879; WAN024D8B; Start 226; Stop 250
gatttagtctatatcgccagtccaa

SEQ ID NO: 276385 - DNA, 25 bp, Artificial
  probe
  misc_feature (1)..(25): SEQ ID NO: 879; WAN024D8B; Start 224; Stop 248
ttgatttagtctatatcgccagtcc

SEQ ID NO: 276386 - DNA, 25 bp, Artificial
  probe
  misc_feature (1)..(25): SEQ ID NO: 879; WAN024D8B; Start 69; Stop 93
tatcagccatcatttcatagaagca

SEQ ID NO: 276387 - DNA, 25 bp, Artificial
  probe
  misc_feature (1)..(25): SEQ ID NO: 879; WAN024D8B; Start 225; Stop 249
tgatttagtctatatcgccagtcca

SEQ ID NO: 276388 - DNA, 25 bp, Artificial
  probe
  misc_feature (1)..(25): SEQ ID NO: 879; WAN024D8B; Start 674; Stop 698
gtatcctcttctacccagactatca

SEQ ID NO: 276389 - DNA, 25 bp, Artificial
  probe
  misc_feature (1)..(25): SEQ ID NO: 879; WAN024D8B; Start 676; Stop 700
atcctcttctacccagactatcaag

SEQ ID NO: 276390 - DNA, 25 bp, Artificial
  probe
  misc_feature (1)..(25): SEQ ID NO: 879; WAN024D8B; Start 675; Stop 699
tatcctcttctacccagactatcaa

SEQ ID NO: 276391 - DNA, 25 bp, Artificial
  probe
  misc_feature (1)..(25): SEQ ID NO: 879; WAN024D8B; Start 740; Stop 764
cttgcgagatttatacaacagatgg

SEQ ID NO: 276392 - DNA, 25 bp, Artificial
  probe
  misc_feature (1)..(25): SEQ ID NO: 879; WAN024D8B; Start 739; Stop 763
ccttgcgagatttatacaacagatg

SEQ ID NO: 276393 - DNA, 25 bp, Artificial
  probe
  misc_feature (1)..(25): SEQ ID NO: 879; WAN024D8B; Start 738; Stop 762
tccttgcgagatttatacaacagat

SEQ ID NO: 276394 - DNA, 25 bp, Artificial
  probe
  misc_feature (1)..(25): SEQ ID NO: 879; WAN024D8B; Start 736; Stop 760
cttccttgcgagatttatacaacag

SEQ ID NO: 276395 - DNA, 25 bp, Artificial
  probe
  misc_feature (1)..(25): SEQ ID NO: 879; WAN024D8B; Start 741; Stop 765
ttgcgagatttatacaacagatgga

SEQ ID NO: 276396 - DNA, 25 bp, Artificial
  probe
  misc_feature (1)..(25): SEQ ID NO: 879; WAN024D8B; Start 737; Stop 761
ttccttgcgagatttatacaacaga

SEQ ID NO: 276397 - DNA, 25 bp, Artificial
  probe
  misc_feature (1)..(25): SEQ ID NO: 879; WAN024D8B; Start 735; Stop 759
tcttccttgcgagatttatacaaca

SEQ ID NO: 276398 - DNA, 25 bp, Artificial
  probe
  misc_feature (1)..(25): SEQ ID NO: 879; WAN024D8B; Start 406; Stop 430
cacgagaaagcctttactactatca

SEQ ID NO: 276399 - DNA, 25 bp, Artificial
  probe
  misc_feature (1)..(25): SEQ ID NO: 879; WAN024D8B; Start 77; Stop 101
atcatttcatagaagcagcccatac

SEQ ID NO: 276400 - DNA, 25 bp, Artificial
  probe
  misc_feature (1)..(25): SEQ ID NO: 880; WAN024ESG; Start 942; Stop 966
taatgccattcaagatattccaggt

SEQ ID NO: 276401 - DNA, 25 bp, Artificial
  probe
  misc_feature (1)..(25): SEQ ID NO: 880; WAN024ESG; Start 943; Stop 967
aatgccattcaagatattccaggtt

SEQ ID NO: 276402 - DNA, 25 bp, Artificial
  probe
  misc_feature (1)..(25): SEQ ID NO: 880; WAN024ESG; Start 566; Stop 590
tcttgctggagattattgagattgc

SEQ ID NO: 276403 - DNA, 25 bp, Artificial
  probe
  misc_feature (1)..(25): SEQ ID NO: 880; WAN024ESG; Start 557; Stop 581
ctaaggaactcttgctggagattat

SEQ ID NO: 276404 - DNA, 25 bp, Artificial
  probe
  misc_feature (1)..(25): SEQ ID NO: 880; WAN024ESG; Start 564; Stop 588
actcttgctggagattattgagatt

SEQ ID NO: 276405 - DNA, 25 bp, Artificial
  probe
  misc_feature (1)..(25): SEQ ID NO: 880; WAN024ESG; Start 563; Stop 587
aactcttgctggagattattgagat

SEQ ID NO: 276406 - DNA, 25 bp, Artificial
  probe
  misc_feature (1)..(25): SEQ ID NO: 880; WAN024ESG; Start 562; Stop 586
gaactcttgctggagattattgaga

SEQ ID NO: 276407 - DNA, 25 bp, Artificial
  probe
  misc_feature (1)..(25): SEQ ID NO: 880; WAN024ESG; Start 941; Stop 965
ataatgccattcaagatattccagg

SEQ ID NO: 276408 - DNA, 25 bp, Artificial
  probe
  misc_feature (1)..(25): SEQ ID NO: 880; WAN024ESG; Start 565; Stop 589
ctcttgctggagattattgagattg

SEQ ID NO: 276409 - DNA, 25 bp, Artificial
  probe
  misc_feature (1)..(25): SEQ ID NO: 880; WAN024ESG; Start 558; Stop 582
taaggaactcttgctggagattatt

SEQ ID NO: 276410 - DNA, 25 bp, Artificial
  probe
  misc_feature (1)..(25): SEQ ID NO: 880; WAN024ESG; Start 559; Stop 583
aaggaactcttgctggagattattg

SEQ ID NO: 276411 - DNA, 25 bp, Artificial
  probe
  misc_feature (1)..(25): SEQ ID NO: 880; WAN024ESG; Start 188; Stop 212
gtgatagtgaaggctattctgactc

SEQ ID NO: 276412 - DNA, 25 bp, Artificial
  probe
  misc_feature (1)..(25): SEQ ID NO: 880; WAN024ESG; Start 567; Stop 591
cttgctggagattattgagattgcc

SEQ ID NO: 276413 - DNA, 25 bp, Artificial
  probe
  misc_feature (1)..(25): SEQ ID NO: 880; WAN024ESG; Start 561; Stop 585
ggaactcttgctggagattattgag

SEQ ID NO: 276414 - DNA, 25 bp, Artificial
  probe
  misc_feature (1)..(25): SEQ ID NO: 880; WAN024ESG; Start 1140; Stop 1164
ttaccttcctcgtgttgatgagtta

SEQ ID NO: 276415 - DNA, 25 bp, Artificial
  probe
  misc_feature (1)..(25): SEQ ID NO: 880; WAN024ESG; Start 560; Stop 584
aggaactcttgctggagattattga

SEQ ID NO: 276416 - DNA, 25 bp, Artificial
  probe
  misc_feature (1)..(25): SEQ ID NO: 880; WAN024ESG; Start 189; Stop 213
tgatagtgaaggctattctgactcc

SEQ ID NO: 276417 - DNA, 25 bp, Artificial
  probe
  misc_feature (1)..(25): SEQ ID NO: 880; WAN024ESG; Start 556; Stop 580
cctaaggaactcttgctggagatta

SEQ ID NO: 276418 - DNA, 25 bp, Artificial
  probe
  misc_feature (1)..(25): SEQ ID NO: 880; WAN024ESG; Start 1141; Stop 1165
taccttcctcgtgttgatgagttag

SEQ ID NO: 276419 - DNA, 25 bp, Artificial
  probe
  misc_feature (1)..(25): SEQ ID NO: 880; WAN024ESG; Start 187; Stop 211
cgtgatagtgaaggctattctgact

SEQ ID NO: 276420 - DNA, 25 bp, Artificial
  probe
  misc_feature (1)..(25): SEQ ID NO: 880; WAN024ESG; Start 305; Stop 329
atggtgtcagtgagttgattgtcat

SEQ ID NO: 276421 - DNA, 25 bp, Artificial
  probe
  misc_feature (1)..(25): SEQ ID NO: 880; WAN024ESG; Start 944; Stop 968
atgccattcaagatattccaggttt

SEQ ID NO: 276422 - DNA, 25 bp, Artificial
  probe
  misc_feature (1)..(25): SEQ ID NO: 880; WAN024ESG; Start 42; Stop 66
ttatgatatccgtggtcctgtattg

SEQ ID NO: 276423 - DNA, 25 bp, Artificial
  probe
  misc_feature (1)..(25): SEQ ID NO: 880; WAN024ESG; Start 41; Stop 65
cttatgatatccgtggtcctgtatt

SEQ ID NO: 276424 - DNA, 25 bp, Artificial
  probe
  misc_feature (1)..(25): SEQ ID NO: 880; WAN024ESG; Start 14; Stop 38
acaagtctagtaagttagagcatgt

SEQ ID NO: 276425 - DNA, 25 bp, Artificial
  probe
  misc_feature (1)..(25): SEQ ID NO: 880; WAN024ESG; Start 609; Stop 633
tatctttgcggatgaaatctatgac

SEQ ID NO: 276426 - DNA, 25 bp, Artificial
  probe
  misc_feature (1)..(25): SEQ ID NO: 880; WAN024ESG; Start 1043; Stop 1067
atgagcagtttgtccttgatttctt

SEQ ID NO: 276427 - DNA, 25 bp, Artificial
  probe
  misc_feature (1)..(25): SEQ ID NO: 880; WAN024ESG; Start 304; Stop 328
aatggtgtcagtgagttgattgtca

SEQ ID NO: 276428 - DNA, 25 bp, Artificial
  probe
  misc_feature (1)..(25): SEQ ID NO: 880; WAN024ESG; Start 113; Stop 137
tgaatacaggaaatccagcagaatt

SEQ ID NO: 276429 - DNA, 25 bp, Artificial
  probe
  misc_feature (1)..(25): SEQ ID NO: 880; WAN024ESG; Start 1040; Stop 1064
atgatgagcagtttgtccttgattt

SEQ ID NO: 276430 - DNA, 25 bp, Artificial
  probe
  misc_feature (1)..(25): SEQ ID NO: 880; WAN024ESG; Start 1156; Stop 1180
gatgagttagcccaaatccaagaaa

SEQ ID NO: 276431 - DNA, 25 bp, Artificial
  probe
  misc_feature (1)..(25): SEQ ID NO: 880; WAN024ESG; Start 947; Stop 971
ccattcaagatattccaggtttgtc

SEQ ID NO: 276432 - DNA, 25 bp, Artificial
  probe
  misc_feature (1)..(25): SEQ ID NO: 880; WAN024ESG; Start 610; Stop 634
atctttgcggatgaaatctatgacc

SEQ ID NO: 276433 - DNA, 25 bp, Artificial
  probe
  misc_feature (1)..(25): SEQ ID NO: 881; WAN024FZN; Start 514; Stop 538
aatggtgatgtggctattcgttatc

SEQ ID NO: 276434 - DNA, 25 bp, Artificial
  probe
  misc_feature (1)..(25): SEQ ID NO: 881; WAN024FZN; Start 513; Stop 537
caatggtgatgtggctattcgttat

SEQ ID NO: 276435 - DNA, 25 bp, Artificial
  probe
  misc_feature (1)..(25): SEQ ID NO: 881; WAN024FZN; Start 579; Stop 603
tgatgtagaagttcttgttgaaggt

SEQ ID NO: 276436 - DNA, 25 bp, Artificial
  probe
  misc_feature (1)..(25): SEQ ID NO: 881; WAN024FZN; Start 578; Stop 602
ttgatgtagaagttcttgttgaagg

SEQ ID NO: 276437 - DNA, 25 bp, Artificial
  probe
  misc_feature (1)..(25): SEQ ID NO: 881; WAN024FZN; Start 582; Stop 606
tgtagaagttcttgttgaaggtaag

SEQ ID NO: 276438 - DNA, 25 bp, Artificial
  probe
  misc_feature (1)..(25): SEQ ID NO: 881; WAN024FZN; Start 580; Stop 604
gatgtagaagttcttgttgaaggta

SEQ ID NO: 276439 - DNA, 25 bp, Artificial
  probe
  misc_feature (1)..(25): SEQ ID NO: 881; WAN024FZN; Start 581; Stop 605
atgtagaagttcttgttgaaggtaa

SEQ ID NO: 276440 - DNA, 25 bp, Artificial
  probe
  misc_feature (1)..(25): SEQ ID NO: 881; WAN024FZN; Start 512; Stop 536
tcaatggtgatgtggctattcgtta

SEQ ID NO: 276441 - DNA, 25 bp, Artificial
  probe
  misc_feature (1)..(25): SEQ ID NO: 881; WAN024FZN; Start 62; Stop 86
tactggaaactgcctttactcatac

SEQ ID NO: 276442 - DNA, 25 bp, Artificial
  probe
  misc_feature (1)..(25): SEQ ID NO: 881; WAN024FZN; Start 61; Stop 85
ttactggaaactgcctttactcata

SEQ ID NO: 276443 - DNA, 25 bp, Artificial
  probe
  misc_feature (1)..(25): SEQ ID NO: 881; WAN024FZN; Start 587; Stop 611
aagttcttgttgaaggtaagagcat

SEQ ID NO: 276444 - DNA, 25 bp, Artificial
  probe
  misc_feature (1)..(25): SEQ ID NO: 881; WAN024FZN; Start 585; Stop 609
agaagttcttgttgaaggtaagagc

SEQ ID NO: 276445 - DNA, 25 bp, Artificial
  probe
  misc_feature (1)..(25): SEQ ID NO: 881; WAN024FZN; Start 588; Stop 612
agttcttgttgaaggtaagagcatc

SEQ ID NO: 276446 - DNA, 25 bp, Artificial
  probe
  misc_feature (1)..(25): SEQ ID NO: 881; WAN024FZN; Start 276; Stop 300
tgattgccagtttgaccagtttatc

SEQ ID NO: 276447 - DNA, 25 bp, Artificial
  probe
  misc_feature (1)..(25): SEQ ID NO: 881; WAN024FZN; Start 586; Stop 610
gaagttcttgttgaaggtaagagca

SEQ ID NO: 276448 - DNA, 25 bp, Artificial
  probe
  misc_feature (1)..(25): SEQ ID NO: 881; WAN024FZN; Start 275; Stop 299
gtgattgccagtttgaccagtttat

SEQ ID NO: 276449 - DNA, 25 bp, Artificial
  probe
  misc_feature (1)..(25): SEQ ID NO: 881; WAN024FZN; Start 631; Stop 655
tctaagaaattagcagagcaggaag

SEQ ID NO: 276450 - DNA, 25 bp, Artificial
  probe
  misc_feature (1)..(25): SEQ ID NO: 881; WAN024FZN; Start 583; Stop 607
gtagaagttcttgttgaaggtaaga

SEQ ID NO: 276451 - DNA, 25 bp, Artificial
  probe
  misc_feature (1)..(25): SEQ ID NO: 881; WAN024FZN; Start 679; Stop 703
gggctggattcatgtatttaactaa

SEQ ID NO: 276452 - DNA, 25 bp, Artificial
  probe
  misc_feature (1)..(25): SEQ ID NO: 881; WAN024FZN; Start 277; Stop 301
gattgccagtttgaccagtttatca

SEQ ID NO: 276453 - DNA, 25 bp, Artificial
  probe
  misc_feature (1)..(25): SEQ ID NO: 881; WAN024FZN; Start 630; Stop 654
ttctaagaaattagcagagcaggaa

SEQ ID NO: 276454 - DNA, 25 bp, Artificial
  probe
  misc_feature (1)..(25): SEQ ID NO: 881; WAN024FZN; Start 623; Stop 647
aaggtcgttctaagaaattagcaga

SEQ ID NO: 276455 - DNA, 25 bp, Artificial
  probe
  misc_feature (1)..(25): SEQ ID NO: 881; WAN024FZN; Start 622; Stop 646
caaggtcgttctaagaaattagcag

SEQ ID NO: 276456 - DNA, 25 bp, Artificial
  probe
  misc_feature (1)..(25): SEQ ID NO: 881; WAN024FZN; Start 584; Stop 608
tagaagttcttgttgaaggtaagag

SEQ ID NO: 276457 - DNA, 25 bp, Artificial
  probe
  misc_feature (1)..(25): SEQ ID NO: 881; WAN024FZN; Start 624; Stop 648
aggtcgttctaagaaattagcagag

SEQ ID NO: 276458 - DNA, 25 bp, Artificial
  probe
  misc_feature (1)..(25): SEQ ID NO: 881; WAN024FZN; Start 629; Stop 653
gttctaagaaattagcagagcagga

SEQ ID NO: 276459 - DNA, 25 bp, Artificial
  probe
  misc_feature (1)..(25): SEQ ID NO: 881; WAN024FZN; Start 592; Stop 616
cttgttgaaggtaagagcatcggtc

SEQ ID NO: 276460 - DNA, 25 bp, Artificial
  probe
  misc_feature (1)..(25): SEQ ID NO: 881; WAN024FZN; Start 627; Stop 651
tcgttctaagaaattagcagagcag

SEQ ID NO: 276461 - DNA, 25 bp, Artificial
  probe
  misc_feature (1)..(25): SEQ ID NO: 881; WAN024FZN; Start 64; Stop 88
ctggaaactgcctttactcatacga

SEQ ID NO: 276462 - DNA, 25 bp, Artificial
  probe
  misc_feature (1)..(25): SEQ ID NO: 881; WAN024FZN; Start 589; Stop 613
gttcttgttgaaggtaagagcatcg

SEQ ID NO: 276463 - DNA, 25 bp, Artificial
  probe
  misc_feature (1)..(25): SEQ ID NO: 881; WAN024FZN; Start 626; Stop 650
gtcgttctaagaaattagcagagca

SEQ ID NO: 276464 - DNA, 25 bp, Artificial
  probe
  misc_feature (1)..(25): SEQ ID NO: 881; WAN024FZN; Start 632; Stop 656
ctaagaaattagcagagcaggaagc

SEQ ID NO: 276465 - DNA, 25 bp, Artificial
  probe
  misc_feature (1)..(25): SEQ ID NO: 881; WAN024FZN; Start 511; Stop 535
gtcaatggtgatgtggctattcgtt

SEQ ID NO: 276466 - DNA, 25 bp, Artificial
  probe
  misc_feature (1)..(25): SEQ ID NO: 882; WAN024GJQ; Start 649; Stop 673
aatctctatctgcgttcttatctgc

SEQ ID NO: 276467 - DNA, 25 bp, Artificial
  probe
  misc_feature (1)..(25): SEQ ID NO: 882; WAN024GJQ; Start 121; Stop 145
taccagtacagtcaactcttacaac

SEQ ID NO: 276468 - DNA, 25 bp, Artificial
  probe
  misc_feature (1)..(25): SEQ ID NO: 882; WAN024GJQ; Start 120; Stop 144
ctaccagtacagtcaactcttacaa

SEQ ID NO: 276469 - DNA, 25 bp, Artificial
  probe
  misc_feature (1)..(25): SEQ ID NO: 882; WAN024GJQ; Start 123; Stop 147
ccagtacagtcaactcttacaacat

SEQ ID NO: 276470 - DNA, 25 bp, Artificial
  probe
  misc_feature (1)..(25): SEQ ID NO: 882; WAN024GJQ; Start 650; Stop 674
atctctatctgcgttcttatctgcg

SEQ ID NO: 276471 - DNA, 25 bp, Artificial
  probe
  misc_feature (1)..(25): SEQ ID NO: 882; WAN024GJQ; Start 124; Stop 148
cagtacagtcaactcttacaacatt

SEQ ID NO: 276472 - DNA, 25 bp, Artificial
  probe
  misc_feature (1)..(25): SEQ ID NO: 882; WAN024GJQ; Start 119; Stop 143
cctaccagtacagtcaactcttaca

SEQ ID NO: 276473 - DNA, 25 bp, Artificial
  probe
  misc_feature (1)..(25): SEQ ID NO: 882; WAN024GJQ; Start 122; Stop 146
accagtacagtcaactcttacaaca

SEQ ID NO: 276474 - DNA, 25 bp, Artificial
  probe
  misc_feature (1)..(25): SEQ ID NO: 882; WAN024GJQ; Start 652; Stop 676
ctctatctgcgttcttatctgcgaa

SEQ ID NO: 276475 - DNA, 25 bp, Artificial
  probe
  misc_feature (1)..(25): SEQ ID NO: 882; WAN024GJQ; Start 774; Stop 798
tctctttaactacctcttgctcttc

SEQ ID NO: 276476 - DNA, 25 bp, Artificial
  probe
  misc_feature (1)..(25): SEQ ID NO: 882; WAN024GJQ; Start 775; Stop 799
ctctttaactacctcttgctcttcc

SEQ ID NO: 276477 - DNA, 25 bp, Artificial
  probe
  misc_feature (1)..(25): SEQ ID NO: 882; WAN024GJQ; Start 773; Stop 797
ttctctttaactacctcttgctctt

SEQ ID NO: 276478 - DNA, 25 bp, Artificial
  probe
  misc_feature (1)..(25): SEQ ID NO: 882; WAN024GJQ; Start 777; Stop 801
ctttaactacctcttgctcttccag

SEQ ID NO: 276479 - DNA, 25 bp, Artificial
  probe
  misc_feature (1)..(25): SEQ ID NO: 882; WAN024GJQ; Start 772; Stop 796
gttctctttaactacctcttgctct

SEQ ID NO: 276480 - DNA, 25 bp, Artificial
  probe
  misc_feature (1)..(25): SEQ ID NO: 882; WAN024GJQ; Start 776; Stop 800
tctttaactacctcttgctcttcca

SEQ ID NO: 276481 - DNA, 25 bp, Artificial
  probe
  misc_feature (1)..(25): SEQ ID NO: 882; WAN024GJQ; Start 118; Stop 142
gcctaccagtacagtcaactcttac

SEQ ID NO: 276482 - DNA, 25 bp, Artificial
  probe
  misc_feature (1)..(25): SEQ ID NO: 882; WAN024GJQ; Start 648; Stop 672
aaatctctatctgcgttcttatctg

SEQ ID NO: 276483 - DNA, 25 bp, Artificial
  probe
  misc_feature (1)..(25): SEQ ID NO: 882; WAN024GJQ; Start 117; Stop 141
agcctaccagtacagtcaactctta

SEQ ID NO: 276484 - DNA, 25 bp, Artificial
  probe
  misc_feature (1)..(25): SEQ ID NO: 882; WAN024GJQ; Start 116; Stop 140
tagcctaccagtacagtcaactctt

SEQ ID NO: 276485 - DNA, 25 bp, Artificial
  probe
  misc_feature (1)..(25): SEQ ID NO: 882; WAN024GJQ; Start 113; Stop 137
ttctagcctaccagtacagtcaact

SEQ ID NO: 276486 - DNA, 25 bp, Artificial
  probe
  misc_feature (1)..(25): SEQ ID NO: 882; WAN024GJQ; Start 829; Stop 853
taccagtatttgacccaactctttc

SEQ ID NO: 276487 - DNA, 25 bp, Artificial
  probe
  misc_feature (1)..(25): SEQ ID NO: 882; WAN024GJQ; Start 828; Stop 852
ctaccagtatttgacccaactcttt

SEQ ID NO: 276488 - DNA, 25 bp, Artificial
  probe
  misc_feature (1)..(25): SEQ ID NO: 882; WAN024GJQ; Start 651; Stop 675
tctctatctgcgttcttatctgcga

SEQ ID NO: 276489 - DNA, 25 bp, Artificial
  probe
  misc_feature (1)..(25): SEQ ID NO: 882; WAN024GJQ; Start 654; Stop 678
ctatctgcgttcttatctgcgaaat

SEQ ID NO: 276490 - DNA, 25 bp, Artificial
  probe
  misc_feature (1)..(25): SEQ ID NO: 882; WAN024GJQ; Start 822; Stop 846
ctttgactaccagtatttgacccaa

SEQ ID NO: 276491 - DNA, 25 bp, Artificial
  probe
  misc_feature (1)..(25): SEQ ID NO: 882; WAN024GJQ; Start 823; Stop 847
tttgactaccagtatttgacccaac

SEQ ID NO: 276492 - DNA, 25 bp, Artificial
  probe
  misc_feature (1)..(25): SEQ ID NO: 882; WAN024GJQ; Start 759; Stop 783
gacagcagtggtagttctctttaac

SEQ ID NO: 276493 - DNA, 25 bp, Artificial
  probe
  misc_feature (1)..(25): SEQ ID NO: 882; WAN024GJQ; Start 818; Stop 842
atgcctttgactaccagtatttgac

SEQ ID NO: 276494 - DNA, 25 bp, Artificial
  probe
  misc_feature (1)..(25): SEQ ID NO: 882; WAN024GJQ; Start 882; Stop 906
cttacaggaggtagttcgaggattg

SEQ ID NO: 276495 - DNA, 25 bp, Artificial
  probe
  misc_feature (1)..(25): SEQ ID NO: 882; WAN024GJQ; Start 655; Stop 679
tatctgcgttcttatctgcgaaatg

SEQ ID NO: 276496 - DNA, 25 bp, Artificial
  probe
  misc_feature (1)..(25): SEQ ID NO: 882; WAN024GJQ; Start 115; Stop 139
ctagcctaccagtacagtcaactct

SEQ ID NO: 276497 - DNA, 25 bp, Artificial
  probe
  misc_feature (1)..(25): SEQ ID NO: 882; WAN024GJQ; Start 114; Stop 138
tctagcctaccagtacagtcaactc

SEQ ID NO: 276498 - DNA, 25 bp, Artificial
  probe
  misc_feature (1)..(25): SEQ ID NO: 882; WAN024GJQ; Start 827; Stop 851
actaccagtatttgacccaactctt

SEQ ID NO: 276499 - DNA, 25 bp, Artificial
  probe
  misc_feature (1)..(25): SEQ ID NO: 883; WAN024FOG; Start 519; Stop 543
gatgaagttaatcaattcgccagta

SEQ ID NO: 276500 - DNA, 25 bp, Artificial
  probe
  misc_feature (1)..(25): SEQ ID NO: 883; WAN024FOG; Start 515; Stop 539
tacagatgaagttaatcaattcgcc

SEQ ID NO: 276501 - DNA, 25 bp, Artificial
  probe
  misc_feature (1)..(25): SEQ ID NO: 883; WAN024FOG; Start 517; Stop 541
cagatgaagttaatcaattcgccag

SEQ ID NO: 276502 - DNA, 25 bp, Artificial
  probe
  misc_feature (1)..(25): SEQ ID NO: 883; WAN024FOG; Start 518; Stop 542
agatgaagttaatcaattcgccagt

SEQ ID NO: 276503 - DNA, 25 bp, Artificial
  probe
  misc_feature (1)..(25): SEQ ID NO: 883; WAN024FOG; Start 521; Stop 545
tgaagttaatcaattcgccagtatt

SEQ ID NO: 276504 - DNA, 25 bp, Artificial
  probe
  misc_feature (1)..(25): SEQ ID NO: 883; WAN024FOG; Start 516; Stop 540
acagatgaagttaatcaattcgcca

SEQ ID NO: 276505 - DNA, 25 bp, Artificial
  probe
  misc_feature (1)..(25): SEQ ID NO: 883; WAN024FOG; Start 520; Stop 544
atgaagttaatcaattcgccagtat

SEQ ID NO: 276506 - DNA, 25 bp, Artificial
  probe
  misc_feature (1)..(25): SEQ ID NO: 883; WAN024FOG; Start 524; Stop 548
agttaatcaattcgccagtattagt

SEQ ID NO: 276507 - DNA, 25 bp, Artificial
  probe
  misc_feature (1)..(25): SEQ ID NO: 883; WAN024FOG; Start 514; Stop 538
ttacagatgaagttaatcaattcgc

SEQ ID NO: 276508 - DNA, 25 bp, Artificial
  probe
  misc_feature (1)..(25): SEQ ID NO: 883; WAN024FOG; Start 525; Stop 549
gttaatcaattcgccagtattagtt

SEQ ID NO: 276509 - DNA, 25 bp, Artificial
  probe
  misc_feature (1)..(25): SEQ ID NO: 883; WAN024FOG; Start 523; Stop 547
aagttaatcaattcgccagtattag

SEQ ID NO: 276510 - DNA, 25 bp, Artificial
  probe
  misc_feature (1)..(25): SEQ ID NO: 883; WAN024FOG; Start 522; Stop 546
gaagttaatcaattcgccagtatta

SEQ ID NO: 276511 - DNA, 25 bp, Artificial
  probe
  misc_feature (1)..(25): SEQ ID NO: 883; WAN024FOG; Start 138; Stop 162
atatggatttaattctgctgctgag

SEQ ID NO: 276512 - DNA, 25 bp, Artificial
  probe
  misc_feature (1)..(25): SEQ ID NO: 883; WAN024FOG; Start 605; Stop 629
ttgatgcgatacaatggttattgaa

SEQ ID NO: 276513 - DNA, 25 bp, Artificial
  probe
  misc_feature (1)..(25): SEQ ID NO: 883; WAN024FOG; Start 139; Stop 163
tatggatttaattctgctgctgagg

SEQ ID NO: 276514 - DNA, 25 bp, Artificial
  probe
  misc_feature (1)..(25): SEQ ID NO: 883; WAN024FOG; Start 555; Stop 579
aagtgagttatggcatgtgtcagat

SEQ ID NO: 276515 - DNA, 25 bp, Artificial
  probe
  misc_feature (1)..(25): SEQ ID NO: 883; WAN024FOG; Start 137; Stop 161
aatatggatttaattctgctgctga

SEQ ID NO: 276516 - DNA, 25 bp, Artificial
  probe
  misc_feature (1)..(25): SEQ ID NO: 883; WAN024FOG; Start 487; Stop 511
tggcatttatatggaacagactatg

SEQ ID NO: 276517 - DNA, 25 bp, Artificial
  probe
  misc_feature (1)..(25): SEQ ID NO: 883; WAN024FOG; Start 280; Stop 304
atatttggagtagcaggagtagcag

SEQ ID NO: 276518 - DNA, 25 bp, Artificial
  probe
  misc_feature (1)..(25): SEQ ID NO: 883; WAN024FOG; Start 368; Stop 392
caaaggcggctggtaaatctataag

SEQ ID NO: 276519 - DNA, 25 bp, Artificial
  probe
  misc_feature (1)..(25): SEQ ID NO: 883; WAN024FOG; Start 468; Stop 492
tagtataatcggtcctacctggcat

SEQ ID NO: 276520 - DNA, 25 bp, Artificial
  probe
  misc_feature (1)..(25): SEQ ID NO: 883; WAN024FOG; Start 279; Stop 303
catatttggagtagcaggagtagca

SEQ ID NO: 276521 - DNA, 25 bp, Artificial
  probe
  misc_feature (1)..(25): SEQ ID NO: 883; WAN024FOG; Start 369; Stop 393
aaaggcggctggtaaatctataagt

SEQ ID NO: 276522 - DNA, 25 bp, Artificial
  probe
  misc_feature (1)..(25): SEQ ID NO: 883; WAN024FOG; Start 485; Stop 509
cctggcatttatatggaacagacta

SEQ ID NO: 276523 - DNA, 25 bp, Artificial
  probe
  misc_feature (1)..(25): SEQ ID NO: 883; WAN024FOG; Start 482; Stop 506
ctacctggcatttatatggaacaga

SEQ ID NO: 276524 - DNA, 25 bp, Artificial
  probe
  misc_feature (1)..(25): SEQ ID NO: 883; WAN024FOG; Start 467; Stop 491
ttagtataatcggtcctacctggca

SEQ ID NO: 276525 - DNA, 25 bp, Artificial
  probe
  misc_feature (1)..(25): SEQ ID NO: 883; WAN024FOG; Start 483; Stop 507
tacctggcatttatatggaacagac

SEQ ID NO: 276526 - DNA, 25 bp, Artificial
  probe
  misc_feature (1)..(25): SEQ ID NO: 883; WAN024FOG; Start 305; Stop 329
gggtaaagaatattgagggaaaggt

SEQ ID NO: 276527 - DNA, 25 bp, Artificial
  probe
  misc_feature (1)..(25): SEQ ID NO: 883; WAN024FOG; Start 308; Stop 332
taaagaatattgagggaaaggtcgt

SEQ ID NO: 276528 - DNA, 25 bp, Artificial
  probe
  misc_feature (1)..(25): SEQ ID NO: 883; WAN024FOG; Start 307; Stop 331
gtaaagaatattgagggaaaggtcg

SEQ ID NO: 276529 - DNA, 25 bp, Artificial
  probe
  misc_feature (1)..(25): SEQ ID NO: 883; WAN024FOG; Start 143; Stop 167
gatttaattctgctgctgaggcttt

SEQ ID NO: 276530 - DNA, 25 bp, Artificial
  probe
  misc_feature (1)..(25): SEQ ID NO: 883; WAN024FOG; Start 556; Stop 580
agtgagttatggcatgtgtcagatg

SEQ ID NO: 276531 - DNA, 25 bp, Artificial
  probe
  misc_feature (1)..(25): SEQ ID NO: 883; WAN024FOG; Start 481; Stop 505
cctacctggcatttatatggaacag

SEQ ID NO: 276532 - DNA, 25 bp, Artificial
  probe
  misc_feature (1)..(25): SEQ ID NO: 884; WAN024EWA; Start 346; Stop 370
acagaacaatttgaacatgagagtc

SEQ ID NO: 276533 - DNA, 25 bp, Artificial
  probe
  misc_feature (1)..(25): SEQ ID NO: 884; WAN024EWA; Start 345; Stop 369
gacagaacaatttgaacatgagagt

SEQ ID NO: 276534 - DNA, 25 bp, Artificial
  probe
  misc_feature (1)..(25): SEQ ID NO: 884; WAN024EWA; Start 344; Stop 368
tgacagaacaatttgaacatgagag

SEQ ID NO: 276535 - DNA, 25 bp, Artificial
  probe
  misc_feature (1)..(25): SEQ ID NO: 884; WAN024EWA; Start 343; Stop 367
gtgacagaacaatttgaacatgaga

SEQ ID NO: 276536 - DNA, 25 bp, Artificial
  probe
  misc_feature (1)..(25): SEQ ID NO: 884; WAN024EWA; Start 349; Stop 373
gaacaatttgaacatgagagtcagt

SEQ ID NO: 276537 - DNA, 25 bp, Artificial
  probe
  misc_feature (1)..(25): SEQ ID NO: 884; WAN024EWA; Start 347; Stop 371
cagaacaatttgaacatgagagtca

SEQ ID NO: 276538 - DNA, 25 bp, Artificial
  probe
  misc_feature (1)..(25): SEQ ID NO: 884; WAN024EWA; Start 348; Stop 372
agaacaatttgaacatgagagtcag

SEQ ID NO: 276539 - DNA, 25 bp, Artificial
  probe
  misc_feature (1)..(25): SEQ ID NO: 884; WAN024EWA; Start 351; Stop 375
acaatttgaacatgagagtcagttt

SEQ ID NO: 276540 - DNA, 25 bp, Artificial
  probe
  misc_feature (1)..(25): SEQ ID NO: 884; WAN024EWA; Start 350; Stop 374
aacaatttgaacatgagagtcagtt

SEQ ID NO: 276541 - DNA, 25 bp, Artificial
  probe
  misc_feature (1)..(25): SEQ ID NO: 884; WAN024EWA; Start 527; Stop 551
cagaagtggaagaagctatgaaatc

SEQ ID NO: 276542 - DNA, 25 bp, Artificial
  probe
  misc_feature (1)..(25): SEQ ID NO: 884; WAN024EWA; Start 353; Stop 377
aatttgaacatgagagtcagtttga

SEQ ID NO: 276543 - DNA, 25 bp, Artificial
  probe
  misc_feature (1)..(25): SEQ ID NO: 884; WAN024EWA; Start 352; Stop 376
caatttgaacatgagagtcagtttg

SEQ ID NO: 276544 - DNA, 25 bp, Artificial
  probe
  misc_feature (1)..(25): SEQ ID NO: 884; WAN024EWA; Start 66; Stop 90
ttatttcgatgtggagacctatgag

SEQ ID NO: 276545 - DNA, 25 bp, Artificial
  probe
  misc_feature (1)..(25): SEQ ID NO: 884; WAN024EWA; Start 65; Stop 89
gttatttcgatgtggagacctatga

SEQ ID NO: 276546 - DNA, 25 bp, Artificial
  probe
  misc_feature (1)..(25): SEQ ID NO: 884; WAN024EWA; Start 149; Stop 173
gtcatggagtcattgtctttacaga

SEQ ID NO: 276547 - DNA, 25 bp, Artificial
  probe
  misc_feature (1)..(25): SEQ ID NO: 884; WAN024EWA; Start 67; Stop 91
tatttcgatgtggagacctatgaga

SEQ ID NO: 276548 - DNA, 25 bp, Artificial
  probe
  misc_feature (1)..(25): SEQ ID NO: 884; WAN024EWA; Start 528; Stop 552
agaagtggaagaagctatgaaatct

SEQ ID NO: 276549 - DNA, 25 bp, Artificial
  probe
  misc_feature (1)..(25): SEQ ID NO: 884; WAN024EWA; Start 526; Stop 550
gcagaagtggaagaagctatgaaat

SEQ ID NO: 276550 - DNA, 25 bp, Artificial
  probe
  misc_feature (1)..(25): SEQ ID NO: 884; WAN024EWA; Start 64; Stop 88
cgttatttcgatgtggagacctatg

SEQ ID NO: 276551 - DNA, 25 bp, Artificial
  probe
  misc_feature (1)..(25): SEQ ID NO: 884; WAN024EWA; Start 148; Stop 172
cgtcatggagtcattgtctttacag

SEQ ID NO: 276552 - DNA, 25 bp, Artificial
  probe
  misc_feature (1)..(25): SEQ ID NO: 884; WAN024EWA; Start 68; Stop 92
atttcgatgtggagacctatgagac

SEQ ID NO: 276553 - DNA, 25 bp, Artificial
  probe
  misc_feature (1)..(25): SEQ ID NO: 884; WAN024EWA; Start 146; Stop 170
aacgtcatggagtcattgtctttac

SEQ ID NO: 276554 - DNA, 25 bp, Artificial
  probe
  misc_feature (1)..(25): SEQ ID NO: 884; WAN024EWA; Start 145; Stop 169
caacgtcatggagtcattgtcttta

SEQ ID NO: 276555 - DNA, 25 bp, Artificial
  probe
  misc_feature (1)..(25): SEQ ID NO: 884; WAN024EWA; Start 524; Stop 548
tggcagaagtggaagaagctatgaa

SEQ ID NO: 276556 - DNA, 25 bp, Artificial
  probe
  misc_feature (1)..(25): SEQ ID NO: 884; WAN024EWA; Start 523; Stop 547
ttggcagaagtggaagaagctatga

SEQ ID NO: 276557 - DNA, 25 bp, Artificial
  probe
  misc_feature (1)..(25): SEQ ID NO: 884; WAN024EWA; Start 529; Stop 553
gaagtggaagaagctatgaaatctt

SEQ ID NO: 276558 - DNA, 25 bp, Artificial
  probe
  misc_feature (1)..(25): SEQ ID NO: 884; WAN024EWA; Start 525; Stop 549
ggcagaagtggaagaagctatgaaa

SEQ ID NO: 276559 - DNA, 25 bp, Artificial
  probe
  misc_feature (1)..(25): SEQ ID NO: 884; WAN024EWA; Start 147; Stop 171
acgtcatggagtcattgtctttaca

SEQ ID NO: 276560 - DNA, 25 bp, Artificial
  probe
  misc_feature (1)..(25): SEQ ID NO: 884; WAN024EWA; Start 521; Stop 545
ctttggcagaagtggaagaagctat

SEQ ID NO: 276561 - DNA, 25 bp, Artificial
  probe
  misc_feature (1)..(25): SEQ ID NO: 884; WAN024EWA; Start 522; Stop 546
tttggcagaagtggaagaagctatg

SEQ ID NO: 276562 - DNA, 25 bp, Artificial
  probe
  misc_feature (1)..(25): SEQ ID NO: 884; WAN024EWA; Start 502; Stop 526
ctagagttgtttggggttactttgg

SEQ ID NO: 276563 - DNA, 25 bp, Artificial
  probe
  misc_feature (1)..(25): SEQ ID NO: 884; WAN024EWA; Start 501; Stop 525
cctagagttgtttggggttactttg

SEQ ID NO: 276564 - DNA, 25 bp, Artificial
  probe
  misc_feature (1)..(25): SEQ ID NO: 884; WAN024EWA; Start 517; Stop 541
gttactttggcagaagtggaagaag

SEQ ID NO: 276565 - DNA, 25 bp, Artificial
  probe
  misc_feature (1)..(25): SEQ ID NO: 885; WAN024FD8; Start 768; Stop 792
ctatgctatggaagatattcgtggt

SEQ ID NO: 276566 - DNA, 25 bp, Artificial
  probe
  misc_feature (1)..(25): SEQ ID NO: 885; WAN024FD8; Start 769; Stop 793
tatgctatggaagatattcgtggtg

SEQ ID NO: 276567 - DNA, 25 bp, Artificial
  probe
  misc_feature (1)..(25): SEQ ID NO: 885; WAN024FD8; Start 508; Stop 532
attccaacgattatgaacttgactg

SEQ ID NO: 276568 - DNA, 25 bp, Artificial
  probe
  misc_feature (1)..(25): SEQ ID NO: 885; WAN024FD8; Start 507; Stop 531
aattccaacgattatgaacttgact

SEQ ID NO: 276569 - DNA, 25 bp, Artificial
  probe
  misc_feature (1)..(25): SEQ ID NO: 885; WAN024FD8; Start 516; Stop 540
gattatgaacttgactggtccactg

SEQ ID NO: 276570 - DNA, 25 bp, Artificial
  probe
  misc_feature (1)..(25): SEQ ID NO: 885; WAN024FD8; Start 576; Stop 600
aattagtcgtccagaactcctagaa

SEQ ID NO: 276571 - DNA, 25 bp, Artificial
  probe
  misc_feature (1)..(25): SEQ ID NO: 885; WAN024FD8; Start 519; Stop 543
tatgaacttgactggtccactgatt

SEQ ID NO: 276572 - DNA, 25 bp, Artificial
  probe
  misc_feature (1)..(25): SEQ ID NO: 885; WAN024FD8; Start 518; Stop 542
ttatgaacttgactggtccactgat

SEQ ID NO: 276573 - DNA, 25 bp, Artificial
  probe
  misc_feature (1)..(25): SEQ ID NO: 885; WAN024FD8; Start 517; Stop 541
attatgaacttgactggtccactga

SEQ ID NO: 276574 - DNA, 25 bp, Artificial
  probe
  misc_feature (1)..(25): SEQ ID NO: 885; WAN024FD8; Start 61; Stop 85
gatgtcattgagcgtatcgtaactg

SEQ ID NO: 276575 - DNA, 25 bp, Artificial
  probe
  misc_feature (1)..(25): SEQ ID NO: 885; WAN024FD8; Start 575; Stop 599
gaattagtcgtccagaactcctaga

SEQ ID NO: 276576 - DNA, 25 bp, Artificial
  probe
  misc_feature (1)..(25): SEQ ID NO: 885; WAN024FD8; Start 192; Stop 216
ccagcatattccaactgagattcat

SEQ ID NO: 276577 - DNA, 25 bp, Artificial
  probe
  misc_feature (1)..(25): SEQ ID NO: 885; WAN024FD8; Start 512; Stop 536
caacgattatgaacttgactggtcc

SEQ ID NO: 276578 - DNA, 25 bp, Artificial
  probe
  misc_feature (1)..(25): SEQ ID NO: 885; WAN024FD8; Start 513; Stop 537
aacgattatgaacttgactggtcca

SEQ ID NO: 276579 - DNA, 25 bp, Artificial
  probe
  misc_feature (1)..(25): SEQ ID NO: 885; WAN024FD8; Start 193; Stop 217
cagcatattccaactgagattcatg

SEQ ID NO: 276580 - DNA, 25 bp, Artificial
  probe
  misc_feature (1)..(25): SEQ ID NO: 885; WAN024FD8; Start 770; Stop 794
atgctatggaagatattcgtggtgg

SEQ ID NO: 276581 - DNA, 25 bp, Artificial
  probe
  misc_feature (1)..(25): SEQ ID NO: 885; WAN024FD8; Start 515; Stop 539
cgattatgaacttgactggtccact

SEQ ID NO: 276582 - DNA, 25 bp, Artificial
  probe
  misc_feature (1)..(25): SEQ ID NO: 885; WAN024FD8; Start 880; Stop 904
ggtcttggtttctatgctaatggta

SEQ ID NO: 276583 - DNA, 25 bp, Artificial
  probe
  misc_feature (1)..(25): SEQ ID NO: 885; WAN024FD8; Start 60; Stop 84
ggatgtcattgagcgtatcgtaact

SEQ ID NO: 276584 - DNA, 25 bp, Artificial
  probe
  misc_feature (1)..(25): SEQ ID NO: 885; WAN024FD8; Start 509; Stop 533
ttccaacgattatgaacttgactgg

SEQ ID NO: 276585 - DNA, 25 bp, Artificial
  probe
  misc_feature (1)..(25): SEQ ID NO: 885; WAN024FD8; Start 881; Stop 905
gtcttggtttctatgctaatggtaa

SEQ ID NO: 276586 - DNA, 25 bp, Artificial
  probe
  misc_feature (1)..(25): SEQ ID NO: 885; WAN024FD8; Start 514; Stop 538
acgattatgaacttgactggtccac

SEQ ID NO: 276587 - DNA, 25 bp, Artificial
  probe
  misc_feature (1)..(25): SEQ ID NO: 885; WAN024FD8; Start 520; Stop 544
atgaacttgactggtccactgattc

SEQ ID NO: 276588 - DNA, 25 bp, Artificial
  probe
  misc_feature (1)..(25): SEQ ID NO: 885; WAN024FD8; Start 403; Stop 427
gctgaactaggtaaggtctttgata

SEQ ID NO: 276589 - DNA, 25 bp, Artificial
  probe
  misc_feature (1)..(25): SEQ ID NO: 885; WAN024FD8; Start 62; Stop 86
atgtcattgagcgtatcgtaactgg

SEQ ID NO: 276590 - DNA, 25 bp, Artificial
  probe
  misc_feature (1)..(25): SEQ ID NO: 885; WAN024FD8; Start 878; Stop 902
ctggtcttggtttctatgctaatgg

SEQ ID NO: 276591 - DNA, 25 bp, Artificial
  probe
  misc_feature (1)..(25): SEQ ID NO: 885; WAN024FD8; Start 574; Stop 598
ggaattagtcgtccagaactcctag

SEQ ID NO: 276592 - DNA, 25 bp, Artificial
  probe
  misc_feature (1)..(25): SEQ ID NO: 885; WAN024FD8; Start 870; Stop 894
cttgaatgctggtcttggtttctat

SEQ ID NO: 276593 - DNA, 25 bp, Artificial
  probe
  misc_feature (1)..(25): SEQ ID NO: 885; WAN024FD8; Start 523; Stop 547
aacttgactggtccactgattcatc

SEQ ID NO: 276594 - DNA, 25 bp, Artificial
  probe
  misc_feature (1)..(25): SEQ ID NO: 885; WAN024FD8; Start 522; Stop 546
gaacttgactggtccactgattcat

SEQ ID NO: 276595 - DNA, 25 bp, Artificial
  probe
  misc_feature (1)..(25): SEQ ID NO: 885; WAN024FD8; Start 511; Stop 535
ccaacgattatgaacttgactggtc

SEQ ID NO: 276596 - DNA, 25 bp, Artificial
  probe
  misc_feature (1)..(25): SEQ ID NO: 885; WAN024FD8; Start 882; Stop 906
tcttggtttctatgctaatggtaag

SEQ ID NO: 276597 - DNA, 25 bp, Artificial
  probe
  misc_feature (1)..(25): SEQ ID NO: 885; WAN024FD8; Start 871; Stop 895
ttgaatgctggtcttggtttctatg

SEQ ID NO: 276598 - DNA, 25 bp, Artificial
  probe
  misc_feature (1)..(25): SEQ ID NO: 886; WAN024G8E; Start 1570; Stop 1594
gatgtattgtccatgatgcttcttc

SEQ ID NO: 276599 - DNA, 25 bp, Artificial
  probe
  misc_feature (1)..(25): SEQ ID NO: 886; WAN024G8E; Start 1569; Stop 1593
agatgtattgtccatgatgcttctt

SEQ ID NO: 276600 - DNA, 25 bp, Artificial
  probe
  misc_feature (1)..(25): SEQ ID NO: 886; WAN024G8E; Start 1757; Stop 1781
ttgaacaagtgattccagagattgc

SEQ ID NO: 276601 - DNA, 25 bp, Artificial
  probe
  misc_feature (1)..(25): SEQ ID NO: 886; WAN024G8E; Start 1846; Stop 1870
aaggctgagtatatggaagaatacg

SEQ ID NO: 276602 - DNA, 25 bp, Artificial
  probe
  misc_feature (1)..(25): SEQ ID NO: 886; WAN024G8E; Start 1696; Stop 1720
gaccttcttgttcaccgtatgattc

SEQ ID NO: 276603 - DNA, 25 bp, Artificial
  probe
  misc_feature (1)..(25): SEQ ID NO: 886; WAN024G8E; Start 1568; Stop 1592
cagatgtattgtccatgatgcttct

SEQ ID NO: 276604 - DNA, 25 bp, Artificial
  probe
  misc_feature (1)..(25): SEQ ID NO: 886; WAN024G8E; Start 625; Stop 649
gatgtcggaattgatgttcttgagg

SEQ ID NO: 276605 - DNA, 25 bp, Artificial
  probe
  misc_feature (1)..(25): SEQ ID NO: 886; WAN024G8E; Start 624; Stop 648
ggatgtcggaattgatgttcttgag

SEQ ID NO: 276606 - DNA, 25 bp, Artificial
  probe
  misc_feature (1)..(25): SEQ ID NO: 886; WAN024G8E; Start 1695; Stop 1719
agaccttcttgttcaccgtatgatt

SEQ ID NO: 276607 - DNA, 25 bp, Artificial
  probe
  misc_feature (1)..(25): SEQ ID NO: 886; WAN024G8E; Start 1642; Stop 1666
ggactagctgctgactattatactc

SEQ ID NO: 276608 - DNA, 25 bp, Artificial
  probe
  misc_feature (1)..(25): SEQ ID NO: 886; WAN024G8E; Start 1641; Stop 1665
tggactagctgctgactattatact

SEQ ID NO: 276609 - DNA, 25 bp, Artificial
  probe
  misc_feature (1)..(25): SEQ ID NO: 886; WAN024G8E; Start 1637; Stop 1661
actatggactagctgctgactatta

SEQ ID NO: 276610 - DNA, 25 bp, Artificial
  probe
  misc_feature (1)..(25): SEQ ID NO: 886; WAN024G8E; Start 1640; Stop 1664
atggactagctgctgactattatac

SEQ ID NO: 276611 - DNA, 25 bp, Artificial
  probe
  misc_feature (1)..(25): SEQ ID NO: 886; WAN024G8E; Start 1638; Stop 1662
ctatggactagctgctgactattat

SEQ ID NO: 276612 - DNA, 25 bp, Artificial
  probe
  misc_feature (1)..(25): SEQ ID NO: 886; WAN024G8E; Start 1571; Stop 1595
atgtattgtccatgatgcttcttcg

SEQ ID NO: 276613 - DNA, 25 bp, Artificial
  probe
  misc_feature (1)..(25): SEQ ID NO: 886; WAN024G8E; Start 1027; Stop 1051
cagtctgctattatggagattgata

SEQ ID NO: 276614 - DNA, 25 bp, Artificial
  probe
  misc_feature (1)..(25): SEQ ID NO: 886; WAN024G8E; Start 1026; Stop 1050
ccagtctgctattatggagattgat

SEQ ID NO: 276615 - DNA, 25 bp, Artificial
  probe
  misc_feature (1)..(25): SEQ ID NO: 886; WAN024G8E; Start 295; Stop 319
aactatgctattgatggtgataccg

SEQ ID NO: 276616 - DNA, 25 bp, Artificial
  probe
  misc_feature (1)..(25): SEQ ID NO: 886; WAN024G8E; Start 294; Stop 318
caactatgctattgatggtgatacc

SEQ ID NO: 276617 - DNA, 25 bp, Artificial
  probe
  misc_feature (1)..(25): SEQ ID NO: 886; WAN024G8E; Start 1686; Stop 1710
tcgttatccagaccttcttgttcac

SEQ ID NO: 276618 - DNA, 25 bp, Artificial
  probe
  misc_feature (1)..(25): SEQ ID NO: 886; WAN024G8E; Start 1670; Stop 1694
ttaccagtccaattcgtcgttatcc

SEQ ID NO: 276619 - DNA, 25 bp, Artificial
  probe
  misc_feature (1)..(25): SEQ ID NO: 886; WAN024G8E; Start 626; Stop 650
atgtcggaattgatgttcttgaggt

SEQ ID NO: 276620 - DNA, 25 bp, Artificial
  probe
  misc_feature (1)..(25): SEQ ID NO: 886; WAN024G8E; Start 1556; Stop 1580
gagaaccttatgcagatgtattgtc

SEQ ID NO: 276621 - DNA, 25 bp, Artificial
  probe
  misc_feature (1)..(25): SEQ ID NO: 886; WAN024G8E; Start 1644; Stop 1668
actagctgctgactattatactcac

SEQ ID NO: 276622 - DNA, 25 bp, Artificial
  probe
  misc_feature (1)..(25): SEQ ID NO: 886; WAN024G8E; Start 1873; Stop 1897
ggtgaagagtatgatgcagttgtat

SEQ ID NO: 276623 - DNA, 25 bp, Artificial
  probe
  misc_feature (1)..(25): SEQ ID NO: 886; WAN024G8E; Start 1557; Stop 1581
agaaccttatgcagatgtattgtcc

SEQ ID NO: 276624 - DNA, 25 bp, Artificial
  probe
  misc_feature (1)..(25): SEQ ID NO: 886; WAN024G8E; Start 1555; Stop 1579
ggagaaccttatgcagatgtattgt

SEQ ID NO: 276625 - DNA, 25 bp, Artificial
  probe
  misc_feature (1)..(25): SEQ ID NO: 886; WAN024G8E; Start 22; Stop 46
tatttacaagacaagggaaaggtga

SEQ ID NO: 276626 - DNA, 25 bp, Artificial
  probe
  misc_feature (1)..(25): SEQ ID NO: 886; WAN024G8E; Start 1874; Stop 1898
gtgaagagtatgatgcagttgtatc

SEQ ID NO: 276627 - DNA, 25 bp, Artificial
  probe
  misc_feature (1)..(25): SEQ ID NO: 886; WAN024G8E; Start 871; Stop 895
gatgtttcttattatgtgaccgagg

SEQ ID NO: 276628 - DNA, 25 bp, Artificial
  probe
  misc_feature (1)..(25): SEQ ID NO: 886; WAN024G8E; Start 1080; Stop 1104
tacacaaacagttatcaagaccagt

SEQ ID NO: 276629 - DNA, 25 bp, Artificial
  probe
  misc_feature (1)..(25): SEQ ID NO: 886; WAN024G8E; Start 1643; Stop 1667
gactagctgctgactattatactca

SEQ ID NO: 276630 - DNA, 25 bp, Artificial
  probe
  misc_feature (1)..(25): SEQ ID NO: 886; WAN024G8E; Start 872; Stop 896
atgtttcttattatgtgaccgaggg

SEQ ID NO: 276631 - DNA, 25 bp, Artificial
  probe
  misc_feature (1)..(25): SEQ ID NO: 887; WAN024DM3; Start 687; Stop 711
gaatcagagtgaggttgacttagat

SEQ ID NO: 276632 - DNA, 25 bp, Artificial
  probe
  misc_feature (1)..(25): SEQ ID NO: 887; WAN024DM3; Start 686; Stop 710
agaatcagagtgaggttgacttaga

SEQ ID NO: 276633 - DNA, 25 bp, Artificial
  probe
  misc_feature (1)..(25): SEQ ID NO: 887; WAN024DM3; Start 685; Stop 709
cagaatcagagtgaggttgacttag

SEQ ID NO: 276634 - DNA, 25 bp, Artificial
  probe
  misc_feature (1)..(25): SEQ ID NO: 887; WAN024DM3; Start 684; Stop 708
tcagaatcagagtgaggttgactta

SEQ ID NO: 276635 - DNA, 25 bp, Artificial
  probe
  misc_feature (1)..(25): SEQ ID NO: 887; WAN024DM3; Start 675; Stop 699
ctacttgcttcagaatcagagtgag

SEQ ID NO: 276636 - DNA, 25 bp, Artificial
  probe
  misc_feature (1)..(25): SEQ ID NO: 887; WAN024DM3; Start 670; Stop 694
gactcctacttgcttcagaatcaga

SEQ ID NO: 276637 - DNA, 25 bp, Artificial
  probe
  misc_feature (1)..(25): SEQ ID NO: 887; WAN024DM3; Start 667; Stop 691
cttgactcctacttgcttcagaatc

SEQ ID NO: 276638 - DNA, 25 bp, Artificial
  probe
  misc_feature (1)..(25): SEQ ID NO: 887; WAN024DM3; Start 690; Stop 714
tcagagtgaggttgacttagatatt

SEQ ID NO: 276639 - DNA, 25 bp, Artificial
  probe
  misc_feature (1)..(25): SEQ ID NO: 887; WAN024DM3; Start 688; Stop 712
aatcagagtgaggttgacttagata

SEQ ID NO: 276640 - DNA, 25 bp, Artificial
  probe
  misc_feature (1)..(25): SEQ ID NO: 887; WAN024DM3; Start 271; Stop 295
atggtgagagatgtcattccgatta

SEQ ID NO: 276641 - DNA, 25 bp, Artificial
  probe
  misc_feature (1)..(25): SEQ ID NO: 887; WAN024DM3; Start 689; Stop 713
atcagagtgaggttgacttagatat

SEQ ID NO: 276642 - DNA, 25 bp, Artificial
  probe
  misc_feature (1)..(25): SEQ ID NO: 887; WAN024DM3; Start 272; Stop 296
tggtgagagatgtcattccgattaa

SEQ ID NO: 276643 - DNA, 25 bp, Artificial
  probe
  misc_feature (1)..(25): SEQ ID NO: 887; WAN024DM3; Start 683; Stop 707
ttcagaatcagagtgaggttgactt

SEQ ID NO: 276644 - DNA, 25 bp, Artificial
  probe
  misc_feature (1)..(25): SEQ ID NO: 887; WAN024DM3; Start 668; Stop 692
ttgactcctacttgcttcagaatca

SEQ ID NO: 276645 - DNA, 25 bp, Artificial
  probe
  misc_feature (1)..(25): SEQ ID NO: 887; WAN024DM3; Start 672; Stop 696
ctcctacttgcttcagaatcagagt

SEQ ID NO: 276646 - DNA, 25 bp, Artificial
  probe
  misc_feature (1)..(25): SEQ ID NO: 887; WAN024DM3; Start 671; Stop 695
actcctacttgcttcagaatcagag

SEQ ID NO: 276647 - DNA, 25 bp, Artificial
  probe
  misc_feature (1)..(25): SEQ ID NO: 887; WAN024DM3; Start 299; Stop 323
tagttcaagaatattgccaaggaca

SEQ ID NO: 276648 - DNA, 25 bp, Artificial
  probe
  misc_feature (1)..(25): SEQ ID NO: 887; WAN024DM3; Start 682; Stop 706
cttcagaatcagagtgaggttgact

SEQ ID NO: 276649 - DNA, 25 bp, Artificial
  probe
  misc_feature (1)..(25): SEQ ID NO: 887; WAN024DM3; Start 676; Stop 700
tacttgcttcagaatcagagtgagg

SEQ ID NO: 276650 - DNA, 25 bp, Artificial
  probe
  misc_feature (1)..(25): SEQ ID NO: 887; WAN024DM3; Start 674; Stop 698
cctacttgcttcagaatcagagtga

SEQ ID NO: 276651 - DNA, 25 bp, Artificial
  probe
  misc_feature (1)..(25): SEQ ID NO: 887; WAN024DM3; Start 673; Stop 697
tcctacttgcttcagaatcagagtg

SEQ ID NO: 276652 - DNA, 25 bp, Artificial
  probe
  misc_feature (1)..(25): SEQ ID NO: 887; WAN024DM3; Start 669; Stop 693
tgactcctacttgcttcagaatcag

SEQ ID NO: 276653 - DNA, 25 bp, Artificial
  probe
  misc_feature (1)..(25): SEQ ID NO: 887; WAN024DM3; Start 298; Stop 322
ttagttcaagaatattgccaaggac

SEQ ID NO: 276654 - DNA, 25 bp, Artificial
  probe
  misc_feature (1)..(25): SEQ ID NO: 887; WAN024DM3; Start 273; Stop 297
ggtgagagatgtcattccgattaat

SEQ ID NO: 276655 - DNA, 25 bp, Artificial
  probe
  misc_feature (1)..(25): SEQ ID NO: 887; WAN024DM3; Start 301; Stop 325
gttcaagaatattgccaaggacaac

SEQ ID NO: 276656 - DNA, 25 bp, Artificial
  probe
  misc_feature (1)..(25): SEQ ID NO: 887; WAN024DM3; Start 300; Stop 324
agttcaagaatattgccaaggacaa

SEQ ID NO: 276657 - DNA, 25 bp, Artificial
  probe
  misc_feature (1)..(25): SEQ ID NO: 887; WAN024DM3; Start 274; Stop 298
gtgagagatgtcattccgattaatt

SEQ ID NO: 276658 - DNA, 25 bp, Artificial
  probe
  misc_feature (1)..(25): SEQ ID NO: 887; WAN024DM3; Start 142; Stop 166
gcaacagtcattcatattgtgataa

SEQ ID NO: 276659 - DNA, 25 bp, Artificial
  probe
  misc_feature (1)..(25): SEQ ID NO: 887; WAN024DM3; Start 496; Stop 520
aataccgcttggattggaaatagaa

SEQ ID NO: 276660 - DNA, 25 bp, Artificial
  probe
  misc_feature (1)..(25): SEQ ID NO: 887; WAN024DM3; Start 230; Stop 254
gctggagatttcaacctataaactt

SEQ ID NO: 276661 - DNA, 25 bp, Artificial
  probe
  misc_feature (1)..(25): SEQ ID NO: 887; WAN024DM3; Start 91; Stop 115
tttgtaagtatattgatggcggttt

SEQ ID NO: 276662 - DNA, 25 bp, Artificial
  probe
  misc_feature (1)..(25): SEQ ID NO: 887; WAN024DM3; Start 302; Stop 326
ttcaagaatattgccaaggacaacc

SEQ ID NO: 276663 - DNA, 25 bp, Artificial
  probe
  misc_feature (1)..(25): SEQ ID NO: 887; WAN024DM3; Start 385; Stop 409
ctcctggctaccattatcgtctatt

SEQ ID NO: 276664 - DNA, 25 bp, Artificial
  probe
  misc_feature (1)..(25): SEQ ID NO: 888; WAN024DCW; Start 851; Stop 875
ttatcgtcattgtggaagttgtgta

SEQ ID NO: 276665 - DNA, 25 bp, Artificial
  probe
  misc_feature (1)..(25): SEQ ID NO: 888; WAN024DCW; Start 341; Stop 365
agtggcaagatgaagagaagaatta

SEQ ID NO: 276666 - DNA, 25 bp, Artificial
  probe
  misc_feature (1)..(25): SEQ ID NO: 888; WAN024DCW; Start 343; Stop 367
tggcaagatgaagagaagaattatg

SEQ ID NO: 276667 - DNA, 25 bp, Artificial
  probe
  misc_feature (1)..(25): SEQ ID NO: 888; WAN024DCW; Start 342; Stop 366
gtggcaagatgaagagaagaattat

SEQ ID NO: 276668 - DNA, 25 bp, Artificial
  probe
  misc_feature (1)..(25): SEQ ID NO: 888; WAN024DCW; Start 344; Stop 368
ggcaagatgaagagaagaattatga

SEQ ID NO: 276669 - DNA, 25 bp, Artificial
  probe
  misc_feature (1)..(25): SEQ ID NO: 888; WAN024DCW; Start 340; Stop 364
cagtggcaagatgaagagaagaatt

SEQ ID NO: 276670 - DNA, 25 bp, Artificial
  probe
  misc_feature (1)..(25): SEQ ID NO: 888; WAN024DCW; Start 1002; Stop 1026
tacttacttgcgttcagtggagatt

SEQ ID NO: 276671 - DNA, 25 bp, Artificial
  probe
  misc_feature (1)..(25): SEQ ID NO: 888; WAN024DCW; Start 1001; Stop 1025
ttacttacttgcgttcagtggagat

SEQ ID NO: 276672 - DNA, 25 bp, Artificial
  probe
  misc_feature (1)..(25): SEQ ID NO: 888; WAN024DCW; Start 345; Stop 369
gcaagatgaagagaagaattatgaa

SEQ ID NO: 276673 - DNA, 25 bp, Artificial
  probe
  misc_feature (1)..(25): SEQ ID NO: 888; WAN024DCW; Start 916; Stop 940
tttctttcactcattgggattgttg

SEQ ID NO: 276674 - DNA, 25 bp, Artificial
  probe
  misc_feature (1)..(25): SEQ ID NO: 888; WAN024DCW; Start 915; Stop 939
ctttctttcactcattgggattgtt

SEQ ID NO: 276675 - DNA, 25 bp, Artificial
  probe
  misc_feature (1)..(25): SEQ ID NO: 888; WAN024DCW; Start 913; Stop 937
ctctttctttcactcattgggattg

SEQ ID NO: 276676 - DNA, 25 bp, Artificial
  probe
  misc_feature (1)..(25): SEQ ID NO: 888; WAN024DCW; Start 840; Stop 864
tttcttagcctttatcgtcattgtg

SEQ ID NO: 276677 - DNA, 25 bp, Artificial
  probe
  misc_feature (1)..(25): SEQ ID NO: 888; WAN024DCW; Start 988; Stop 1012
catctgattccctttacttacttgc

SEQ ID NO: 276678 - DNA, 25 bp, Artificial
  probe
  misc_feature (1)..(25): SEQ ID NO: 888; WAN024DCW; Start 914; Stop 938
tctttctttcactcattgggattgt

SEQ ID NO: 276679 - DNA, 25 bp, Artificial
  probe
  misc_feature (1)..(25): SEQ ID NO: 888; WAN024DCW; Start 839; Stop 863
ctttcttagcctttatcgtcattgt

SEQ ID NO: 276680 - DNA, 25 bp, Artificial
  probe
  misc_feature (1)..(25): SEQ ID NO: 888; WAN024DCW; Start 985; Stop 1009
gcacatctgattccctttacttact

SEQ ID NO: 276681 - DNA, 25 bp, Artificial
  probe
  misc_feature (1)..(25): SEQ ID NO: 888; WAN024DCW; Start 912; Stop 936
cctctttctttcactcattgggatt

SEQ ID NO: 276682 - DNA, 25 bp, Artificial
  probe
  misc_feature (1)..(25): SEQ ID NO: 888; WAN024DCW; Start 989; Stop 1013
atctgattccctttacttacttgcg

SEQ ID NO: 276683 - DNA, 25 bp, Artificial
  probe
  misc_feature (1)..(25): SEQ ID NO: 888; WAN024DCW; Start 843; Stop 867
cttagcctttatcgtcattgtggaa

SEQ ID NO: 276684 - DNA, 25 bp, Artificial
  probe
  misc_feature (1)..(25): SEQ ID NO: 888; WAN024DCW; Start 841; Stop 865
ttcttagcctttatcgtcattgtgg

SEQ ID NO: 276685 - DNA, 25 bp, Artificial
  probe
  misc_feature (1)..(25): SEQ ID NO: 888; WAN024DCW; Start 716; Stop 740
tagtgggaagtctgataagtggttt

SEQ ID NO: 276686 - DNA, 25 bp, Artificial
  probe
  misc_feature (1)..(25): SEQ ID NO: 888; WAN024DCW; Start 849; Stop 873
ctttatcgtcattgtggaagttgtg

SEQ ID NO: 276687 - DNA, 25 bp, Artificial
  probe
  misc_feature (1)..(25): SEQ ID NO: 888; WAN024DCW; Start 673; Stop 697
tatgtaactgtgctgtttatcggaa

SEQ ID NO: 276688 - DNA, 25 bp, Artificial
  probe
  misc_feature (1)..(25): SEQ ID NO: 888; WAN024DCW; Start 850; Stop 874
tttatcgtcattgtggaagttgtgt

SEQ ID NO: 276689 - DNA, 25 bp, Artificial
  probe
  misc_feature (1)..(25): SEQ ID NO: 888; WAN024DCW; Start 994; Stop 1018
attccctttacttacttgcgttcag

SEQ ID NO: 276690 - DNA, 25 bp, Artificial
  probe
  misc_feature (1)..(25): SEQ ID NO: 888; WAN024DCW; Start 993; Stop 1017
gattccctttacttacttgcgttca

SEQ ID NO: 276691 - DNA, 25 bp, Artificial
  probe
  misc_feature (1)..(25): SEQ ID NO: 888; WAN024DCW; Start 992; Stop 1016
tgattccctttacttacttgcgttc

SEQ ID NO: 276692 - DNA, 25 bp, Artificial
  probe
  misc_feature (1)..(25): SEQ ID NO: 888; WAN024DCW; Start 991; Stop 1015
ctgattccctttacttacttgcgtt

SEQ ID NO: 276693 - DNA, 25 bp, Artificial
  probe
  misc_feature (1)..(25): SEQ ID NO: 888; WAN024DCW; Start 674; Stop 698
atgtaactgtgctgtttatcggaat

SEQ ID NO: 276694 - DNA, 25 bp, Artificial
  probe
  misc_feature (1)..(25): SEQ ID NO: 888; WAN024DCW; Start 844; Stop 868
ttagcctttatcgtcattgtggaag

SEQ ID NO: 276695 - DNA, 25 bp, Artificial
  probe
  misc_feature (1)..(25): SEQ ID NO: 888; WAN024DCW; Start 598; Stop 622
catctggacacagctcacttatatc

SEQ ID NO: 276696 - DNA, 25 bp, Artificial
  probe
  misc_feature (1)..(25): SEQ ID NO: 888; WAN024DCW; Start 908; Stop 932
ctgtcctctttctttcactcattgg

SEQ ID NO: 276697 - DNA, 25 bp, Artificial
  probe
  misc_feature (1)..(25): SEQ ID NO: 889; WAN024D48; Start 61; Stop 85
aagttactgagtcaagatcctgagg

SEQ ID NO: 276698 - DNA, 25 bp, Artificial
  probe
  misc_feature (1)..(25): SEQ ID NO: 889; WAN024D48; Start 232; Stop 256
cttgtaattgttagtccgtgtggaa

SEQ ID NO: 276699 - DNA, 25 bp, Artificial
  probe
  misc_feature (1)..(25): SEQ ID NO: 889; WAN024D48; Start 419; Stop 443
tgaaagagaagggaaatgaggttta

SEQ ID NO: 276700 - DNA, 25 bp, Artificial
  probe
  misc_feature (1)..(25): SEQ ID NO: 889; WAN024D48; Start 320; Stop 344
atcgtgtcagtcagaaattggatac

SEQ ID NO: 276701 - DNA, 25 bp, Artificial
  probe
  misc_feature (1)..(25): SEQ ID NO: 889; WAN024D48; Start 319; Stop 343
catcgtgtcagtcagaaattggata

SEQ ID NO: 276702 - DNA, 25 bp, Artificial
  probe
  misc_feature (1)..(25): SEQ ID NO: 889; WAN024D48; Start 322; Stop 346
cgtgtcagtcagaaattggatacta

SEQ ID NO: 276703 - DNA, 25 bp, Artificial
  probe
  misc_feature (1)..(25): SEQ ID NO: 889; WAN024D48; Start 258; Stop 282
agacaagcgtaagaagtatttagtt

SEQ ID NO: 276704 - DNA, 25 bp, Artificial
  probe
  misc_feature (1)..(25): SEQ ID NO: 889; WAN024D48; Start 257; Stop 281
aagacaagcgtaagaagtatttagt

SEQ ID NO: 276705 - DNA, 25 bp, Artificial
  probe
  misc_feature (1)..(25): SEQ ID NO: 889; WAN024D48; Start 20; Stop 44
tagcccatcatattcgtttgttgaa

SEQ ID NO: 276706 - DNA, 25 bp, Artificial
  probe
  misc_feature (1)..(25): SEQ ID NO: 889; WAN024D48; Start 60; Stop 84
aaagttactgagtcaagatcctgag

SEQ ID NO: 276707 - DNA, 25 bp, Artificial
  probe
  misc_feature (1)..(25): SEQ ID NO: 889; WAN024D48; Start 123; Stop 147
tttatggaatagtgaaactggctgc

SEQ ID NO: 276708 - DNA, 25 bp, Artificial
  probe
  misc_feature (1)..(25): SEQ ID NO: 889; WAN024D48; Start 19; Stop 43
ctagcccatcatattcgtttgttga

SEQ ID NO: 276709 - DNA, 25 bp, Artificial
  probe
  misc_feature (1)..(25): SEQ ID NO: 889; WAN024D48; Start 323; Stop 347
gtgtcagtcagaaattggatactat

SEQ ID NO: 276710 - DNA, 25 bp, Artificial
  probe
  misc_feature (1)..(25): SEQ ID NO: 889; WAN024D48; Start 259; Stop 283
gacaagcgtaagaagtatttagttt

SEQ ID NO: 276711 - DNA, 25 bp, Artificial
  probe
  misc_feature (1)..(25): SEQ ID NO: 889; WAN024D48; Start 321; Stop 345
tcgtgtcagtcagaaattggatact

SEQ ID NO: 276712 - DNA, 25 bp, Artificial
  probe
  misc_feature (1)..(25): SEQ ID NO: 889; WAN024D48; Start 324; Stop 348
tgtcagtcagaaattggatactatc

SEQ ID NO: 276713 - DNA, 25 bp, Artificial
  probe
  misc_feature (1)..(25): SEQ ID NO: 889; WAN024D48; Start 233; Stop 257
ttgtaattgttagtccgtgtggaaa

SEQ ID NO: 276714 - DNA, 25 bp, Artificial
  probe
  misc_feature (1)..(25): SEQ ID NO: 889; WAN024D48; Start 256; Stop 280
aaagacaagcgtaagaagtatttag

SEQ ID NO: 276715 - DNA, 25 bp, Artificial
  probe
  misc_feature (1)..(25): SEQ ID NO: 889; WAN024D48; Start 325; Stop 349
gtcagtcagaaattggatactatct

SEQ ID NO: 276716 - DNA, 25 bp, Artificial
  probe
  misc_feature (1)..(25): SEQ ID NO: 889; WAN024D48; Start 64; Stop 88
ttactgagtcaagatcctgaggctc

SEQ ID NO: 276717 - DNA, 25 bp, Artificial
  probe
  misc_feature (1)..(25): SEQ ID NO: 889; WAN024D48; Start 231; Stop 255
gcttgtaattgttagtccgtgtgga

SEQ ID NO: 276718 - DNA, 25 bp, Artificial
  probe
  misc_feature (1)..(25): SEQ ID NO: 889; WAN024D48; Start 230; Stop 254
agcttgtaattgttagtccgtgtgg

SEQ ID NO: 276719 - DNA, 25 bp, Artificial
  probe
  misc_feature (1)..(25): SEQ ID NO: 889; WAN024D48; Start 25; Stop 49
catcatattcgtttgttgaatgggc

SEQ ID NO: 276720 - DNA, 25 bp, Artificial
  probe
  misc_feature (1)..(25): SEQ ID NO: 889; WAN024D48; Start 22; Stop 46
gcccatcatattcgtttgttgaatg

SEQ ID NO: 276721 - DNA, 25 bp, Artificial
  probe
  misc_feature (1)..(25): SEQ ID NO: 889; WAN024D48; Start 21; Stop 45
agcccatcatattcgtttgttgaat

SEQ ID NO: 276722 - DNA, 25 bp, Artificial
  probe
  misc_feature (1)..(25): SEQ ID NO: 889; WAN024D48; Start 63; Stop 87
gttactgagtcaagatcctgaggct

SEQ ID NO: 276723 - DNA, 25 bp, Artificial
  probe
  misc_feature (1)..(25): SEQ ID NO: 889; WAN024D48; Start 62; Stop 86
agttactgagtcaagatcctgaggc

SEQ ID NO: 276724 - DNA, 25 bp, Artificial
  probe
  misc_feature (1)..(25): SEQ ID NO: 889; WAN024D48; Start 289; Stop 313
gagttaggcaagtcccagaaagaag

SEQ ID NO: 276725 - DNA, 25 bp, Artificial
  probe
  misc_feature (1)..(25): SEQ ID NO: 889; WAN024D48; Start 362; Stop 386
tttcagaggaagaaattcaccaatt

SEQ ID NO: 276726 - DNA, 25 bp, Artificial
  probe
  misc_feature (1)..(25): SEQ ID NO: 889; WAN024D48; Start 326; Stop 350
tcagtcagaaattggatactatctt

SEQ ID NO: 276727 - DNA, 25 bp, Artificial
  probe
  misc_feature (1)..(25): SEQ ID NO: 889; WAN024D48; Start 71; Stop 95
gtcaagatcctgaggctctttatag

SEQ ID NO: 276728 - DNA, 25 bp, Artificial
  probe
  misc_feature (1)..(25): SEQ ID NO: 889; WAN024D48; Start 70; Stop 94
agtcaagatcctgaggctctttata

SEQ ID NO: 276729 - DNA, 25 bp, Artificial
  probe
  misc_feature (1)..(25): SEQ ID NO: 889; WAN024D48; Start 253; Stop 277
ggaaaagacaagcgtaagaagtatt

SEQ ID NO: 276730 - DNA, 25 bp, Artificial
  probe
  misc_feature (1)..(25): SEQ ID NO: 890; WAN024D4J; Start 124; Stop 148
ttacctcctgatgagttgataacaa

SEQ ID NO: 276731 - DNA, 25 bp, Artificial
  probe
  misc_feature (1)..(25): SEQ ID NO: 890; WAN024D4J; Start 279; Stop 303
tgaatttatttgtcgtgaagttgga

SEQ ID NO: 276732 - DNA, 25 bp, Artificial
  probe
  misc_feature (1)..(25): SEQ ID NO: 890; WAN024D4J; Start 290; Stop 314
gtcgtgaagttggaaacattcttaa

SEQ ID NO: 276733 - DNA, 25 bp, Artificial
  probe
  misc_feature (1)..(25): SEQ ID NO: 890; WAN024D4J; Start 291; Stop 315
tcgtgaagttggaaacattcttaaa

SEQ ID NO: 276734 - DNA, 25 bp, Artificial
  probe
  misc_feature (1)..(25): SEQ ID NO: 890; WAN024D4J; Start 280; Stop 304
gaatttatttgtcgtgaagttggaa

SEQ ID NO: 276735 - DNA, 25 bp, Artificial
  probe
  misc_feature (1)..(25): SEQ ID NO: 890; WAN024D4J; Start 278; Stop 302
atgaatttatttgtcgtgaagttgg

SEQ ID NO: 276736 - DNA, 25 bp, Artificial
  probe
  misc_feature (1)..(25): SEQ ID NO: 890; WAN024D4J; Start 282; Stop 306
atttatttgtcgtgaagttggaaac

SEQ ID NO: 276737 - DNA, 25 bp, Artificial
  probe
  misc_feature (1)..(25): SEQ ID NO: 890; WAN024D4J; Start 127; Stop 151
cctcctgatgagttgataacaaatg

SEQ ID NO: 276738 - DNA, 25 bp, Artificial
  probe
  misc_feature (1)..(25): SEQ ID NO: 890; WAN024D4J; Start 126; Stop 150
acctcctgatgagttgataacaaat

SEQ ID NO: 276739 - DNA, 25 bp, Artificial
  probe
  misc_feature (1)..(25): SEQ ID NO: 890; WAN024D4J; Start 125; Stop 149
tacctcctgatgagttgataacaaa

SEQ ID NO: 276740 - DNA, 25 bp, Artificial
  probe
  misc_feature (1)..(25): SEQ ID NO: 890; WAN024D4J; Start 123; Stop 147
tttacctcctgatgagttgataaca

SEQ ID NO: 276741 - DNA, 25 bp, Artificial
  probe
  misc_feature (1)..(25): SEQ ID NO: 890; WAN024D4J; Start 283; Stop 307
tttatttgtcgtgaagttggaaaca

SEQ ID NO: 276742 - DNA, 25 bp, Artificial
  probe
  misc_feature (1)..(25): SEQ ID NO: 890; WAN024D4J; Start 95; Stop 119
atatttgtgaaatggtgtttgcctt

SEQ ID NO: 276743 - DNA, 25 bp, Artificial
  probe
  misc_feature (1)..(25): SEQ ID NO: 890; WAN024D4J; Start 285; Stop 309
tatttgtcgtgaagttggaaacatt

SEQ ID NO: 276744 - DNA, 25 bp, Artificial
  probe
  misc_feature (1)..(25): SEQ ID NO: 890; WAN024D4J; Start 284; Stop 308
ttatttgtcgtgaagttggaaacat

SEQ ID NO: 276745 - DNA, 25 bp, Artificial
  probe
  misc_feature (1)..(25): SEQ ID NO: 890; WAN024D4J; Start 96; Stop 120
tatttgtgaaatggtgtttgccttt

SEQ ID NO: 276746 - DNA, 25 bp, Artificial
  probe
  misc_feature (1)..(25): SEQ ID NO: 890; WAN024D4J; Start 94; Stop 118
gatatttgtgaaatggtgtttgcct

SEQ ID NO: 276747 - DNA, 25 bp, Artificial
  probe
  misc_feature (1)..(25): SEQ ID NO: 890; WAN024D4J; Start 128; Stop 152
ctcctgatgagttgataacaaatgt

SEQ ID NO: 276748 - DNA, 25 bp, Artificial
  probe
  misc_feature (1)..(25): SEQ ID NO: 890; WAN024D4J; Start 281; Stop 305
aatttatttgtcgtgaagttggaaa

SEQ ID NO: 276749 - DNA, 25 bp, Artificial
  probe
  misc_feature (1)..(25): SEQ ID NO: 890; WAN024D4J; Start 286; Stop 310
atttgtcgtgaagttggaaacattc

SEQ ID NO: 276750 - DNA, 25 bp, Artificial
  probe
  misc_feature (1)..(25): SEQ ID NO: 890; WAN024D4J; Start 93; Stop 117
tgatatttgtgaaatggtgtttgcc

SEQ ID NO: 276751 - DNA, 25 bp, Artificial
  probe
  misc_feature (1)..(25): SEQ ID NO: 890; WAN024D4J; Start 289; Stop 313
tgtcgtgaagttggaaacattctta

SEQ ID NO: 276752 - DNA, 25 bp, Artificial
  probe
  misc_feature (1)..(25): SEQ ID NO: 890; WAN024D4J; Start 92; Stop 116
atgatatttgtgaaatggtgtttgc

SEQ ID NO: 276753 - DNA, 25 bp, Artificial
  probe
  misc_feature (1)..(25): SEQ ID NO: 890; WAN024D4J; Start 112; Stop 136
tttgcctttcatttacctcctgatg

SEQ ID NO: 276754 - DNA, 25 bp, Artificial
  probe
  misc_feature (1)..(25): SEQ ID NO: 890; WAN024D4J; Start 111; Stop 135
gtttgcctttcatttacctcctgat

SEQ ID NO: 276755 - DNA, 25 bp, Artificial
  probe
  misc_feature (1)..(25): SEQ ID NO: 890; WAN024D4J; Start 122; Stop 146
atttacctcctgatgagttgataac

SEQ ID NO: 276756 - DNA, 25 bp, Artificial
  probe
  misc_feature (1)..(25): SEQ ID NO: 890; WAN024D4J; Start 121; Stop 145
catttacctcctgatgagttgataa

SEQ ID NO: 276757 - DNA, 25 bp, Artificial
  probe
  misc_feature (1)..(25): SEQ ID NO: 890; WAN024D4J; Start 187; Stop 211
tgttacattgacaggctattatatg

SEQ ID NO: 276758 - DNA, 25 bp, Artificial
  probe
  misc_feature (1)..(25): SEQ ID NO: 890; WAN024D4J; Start 288; Stop 312
ttgtcgtgaagttggaaacattctt

SEQ ID NO: 276759 - DNA, 25 bp, Artificial
  probe
  misc_feature (1)..(25): SEQ ID NO: 890; WAN024D4J; Start 287; Stop 311
tttgtcgtgaagttggaaacattct

SEQ ID NO: 276760 - DNA, 25 bp, Artificial
  probe
  misc_feature (1)..(25): SEQ ID NO: 890; WAN024D4J; Start 129; Stop 153
tcctgatgagttgataacaaatgtt

SEQ ID NO: 276761 - DNA, 25 bp, Artificial
  probe
  misc_feature (1)..(25): SEQ ID NO: 890; WAN024D4J; Start 109; Stop 133
gtgtttgcctttcatttacctcctg

SEQ ID NO: 276762 - DNA, 25 bp, Artificial
  probe
  misc_feature (1)..(25): SEQ ID NO: 890; WAN024D4J; Start 110; Stop 134
tgtttgcctttcatttacctcctga

SEQ ID NO: 276763 - DNA, 25 bp, Artificial
  probe
  misc_feature (1)..(25): SEQ ID NO: 891; WAN024CJX; Start 44; Stop 68
ggattgatcggatagctgttattga

SEQ ID NO: 276764 - DNA, 25 bp, Artificial
  probe
  misc_feature (1)..(25): SEQ ID NO: 891; WAN024CJX; Start 45; Stop 69
gattgatcggatagctgttattgat

SEQ ID NO: 276765 - DNA, 25 bp, Artificial
  probe
  misc_feature (1)..(25): SEQ ID NO: 891; WAN024CJX; Start 43; Stop 67
gggattgatcggatagctgttattg

SEQ ID NO: 276766 - DNA, 25 bp, Artificial
  probe
  misc_feature (1)..(25): SEQ ID NO: 891; WAN024CJX; Start 46; Stop 70
attgatcggatagctgttattgatc

SEQ ID NO: 276767 - DNA, 25 bp, Artificial
  probe
  misc_feature (1)..(25): SEQ ID NO: 891; WAN024CJX; Start 53; Stop 77
ggatagctgttattgatcaggtcat

SEQ ID NO: 276768 - DNA, 25 bp, Artificial
  probe
  misc_feature (1)..(25): SEQ ID NO: 891; WAN024CJX; Start 213; Stop 237
tgccaatgtcaaaataaatgtagga

SEQ ID NO: 276769 - DNA, 25 bp, Artificial
  probe
  misc_feature (1)..(25): SEQ ID NO: 891; WAN024CJX; Start 60; Stop 84
tgttattgatcaggtcattgcttat

SEQ ID NO: 276770 - DNA, 25 bp, Artificial
  probe
  misc_feature (1)..(25): SEQ ID NO: 891; WAN024CJX; Start 59; Stop 83
ctgttattgatcaggtcattgctta

SEQ ID NO: 276771 - DNA, 25 bp, Artificial
  probe
  misc_feature (1)..(25): SEQ ID NO: 891; WAN024CJX; Start 55; Stop 79
atagctgttattgatcaggtcattg

SEQ ID NO: 276772 - DNA, 25 bp, Artificial
  probe
  misc_feature (1)..(25): SEQ ID NO: 891; WAN024CJX; Start 56; Stop 80
tagctgttattgatcaggtcattgc

SEQ ID NO: 276773 - DNA, 25 bp, Artificial
  probe
  misc_feature (1)..(25): SEQ ID NO: 891; WAN024CJX; Start 214; Stop 238
gccaatgtcaaaataaatgtaggag

SEQ ID NO: 276774 - DNA, 25 bp, Artificial
  probe
  misc_feature (1)..(25): SEQ ID NO: 891; WAN024CJX; Start 63; Stop 87
tattgatcaggtcattgcttatctg

SEQ ID NO: 276775 - DNA, 25 bp, Artificial
  probe
  misc_feature (1)..(25): SEQ ID NO: 891; WAN024CJX; Start 54; Stop 78
gatagctgttattgatcaggtcatt

SEQ ID NO: 276776 - DNA, 25 bp, Artificial
  probe
  misc_feature (1)..(25): SEQ ID NO: 891; WAN024CJX; Start 64; Stop 88
attgatcaggtcattgcttatctgc

SEQ ID NO: 276777 - DNA, 25 bp, Artificial
  probe
  misc_feature (1)..(25): SEQ ID NO: 891; WAN024CJX; Start 50; Stop 74
atcggatagctgttattgatcaggt

SEQ ID NO: 276778 - DNA, 25 bp, Artificial
  probe
  misc_feature (1)..(25): SEQ ID NO: 891; WAN024CJX; Start 62; Stop 86
ttattgatcaggtcattgcttatct

SEQ ID NO: 276779 - DNA, 25 bp, Artificial
  probe
  misc_feature (1)..(25): SEQ ID NO: 891; WAN024CJX; Start 61; Stop 85
gttattgatcaggtcattgcttatc

SEQ ID NO: 276780 - DNA, 25 bp, Artificial
  probe
  misc_feature (1)..(25): SEQ ID NO: 891; WAN024CJX; Start 110; Stop 134
tagtgacaccatttgaaacggtctt

SEQ ID NO: 276781 - DNA, 25 bp, Artificial
  probe
  misc_feature (1)..(25): SEQ ID NO: 891; WAN024CJX; Start 58; Stop 82
gctgttattgatcaggtcattgctt

SEQ ID NO: 276782 - DNA, 25 bp, Artificial
  probe
  misc_feature (1)..(25): SEQ ID NO: 891; WAN024CJX; Start 212; Stop 236
ttgccaatgtcaaaataaatgtagg

SEQ ID NO: 276783 - DNA, 25 bp, Artificial
  probe
  misc_feature (1)..(25): SEQ ID NO: 891; WAN024CJX; Start 51; Stop 75
tcggatagctgttattgatcaggtc

SEQ ID NO: 276784 - DNA, 25 bp, Artificial
  probe
  misc_feature (1)..(25): SEQ ID NO: 891; WAN024CJX; Start 52; Stop 76
cggatagctgttattgatcaggtca

SEQ ID NO: 276785 - DNA, 25 bp, Artificial
  probe
  misc_feature (1)..(25): SEQ ID NO: 891; WAN024CJX; Start 109; Stop 133
gtagtgacaccatttgaaacggtct

SEQ ID NO: 276786 - DNA, 25 bp, Artificial
  probe
  misc_feature (1)..(25): SEQ ID NO: 891; WAN024CJX; Start 215; Stop 239
ccaatgtcaaaataaatgtaggaga

SEQ ID NO: 276787 - DNA, 25 bp, Artificial
  probe
  misc_feature (1)..(25): SEQ ID NO: 891; WAN024CJX; Start 49; Stop 73
gatcggatagctgttattgatcagg

SEQ ID NO: 276788 - DNA, 25 bp, Artificial
  probe
  misc_feature (1)..(25): SEQ ID NO: 891; WAN024CJX; Start 42; Stop 66
ggggattgatcggatagctgttatt

SEQ ID NO: 276789 - DNA, 25 bp, Artificial
  probe
  misc_feature (1)..(25): SEQ ID NO: 891; WAN024CJX; Start 57; Stop 81
agctgttattgatcaggtcattgct

SEQ ID NO: 276790 - DNA, 25 bp, Artificial
  probe
  misc_feature (1)..(25): SEQ ID NO: 891; WAN024CJX; Start 115; Stop 139
acaccatttgaaacggtcttggaag

SEQ ID NO: 276791 - DNA, 25 bp, Artificial
  probe
  misc_feature (1)..(25): SEQ ID NO: 891; WAN024CJX; Start 114; Stop 138
gacaccatttgaaacggtcttggaa

SEQ ID NO: 276792 - DNA, 25 bp, Artificial
  probe
  misc_feature (1)..(25): SEQ ID NO: 891; WAN024CJX; Start 111; Stop 135
agtgacaccatttgaaacggtcttg

SEQ ID NO: 276793 - DNA, 25 bp, Artificial
  probe
  misc_feature (1)..(25): SEQ ID NO: 891; WAN024CJX; Start 203; Stop 227
acaatgtctttgccaatgtcaaaat

SEQ ID NO: 276794 - DNA, 25 bp, Artificial
  probe
  misc_feature (1)..(25): SEQ ID NO: 891; WAN024CJX; Start 108; Stop 132
ggtagtgacaccatttgaaacggtc

SEQ ID NO: 276795 - DNA, 25 bp, Artificial
  probe
  misc_feature (1)..(25): SEQ ID NO: 891; WAN024CJX; Start 204; Stop 228
caatgtctttgccaatgtcaaaata

SEQ ID NO: 276796 - DNA, 25 bp, Artificial
  probe
  misc_feature (1)..(25): SEQ ID NO: 892; WAN024FXD; Start 286; Stop 310
ggtgatagtgacttcttaatgatga

SEQ ID NO: 276797 - DNA, 25 bp, Artificial
  probe
  misc_feature (1)..(25): SEQ ID NO: 892; WAN024FXD; Start 148; Stop 172
acgattattgctggatataagtcat

SEQ ID NO: 276798 - DNA, 25 bp, Artificial
  probe
  misc_feature (1)..(25): SEQ ID NO: 892; WAN024FXD; Start 155; Stop 179
ttgctggatataagtcatctgtatt

SEQ ID NO: 276799 - DNA, 25 bp, Artificial
  probe
  misc_feature (1)..(25): SEQ ID NO: 892; WAN024FXD; Start 152; Stop 176
ttattgctggatataagtcatctgt

SEQ ID NO: 276800 - DNA, 25 bp, Artificial
  probe
  misc_feature (1)..(25): SEQ ID NO: 892; WAN024FXD; Start 149; Stop 173
cgattattgctggatataagtcatc

SEQ ID NO: 276801 - DNA, 25 bp, Artificial
  probe
  misc_feature (1)..(25): SEQ ID NO: 892; WAN024FXD; Start 154; Stop 178
attgctggatataagtcatctgtat

SEQ ID NO: 276802 - DNA, 25 bp, Artificial
  probe
  misc_feature (1)..(25): SEQ ID NO: 892; WAN024FXD; Start 576; Stop 600
aatgtggagtgaggttgctcttaat

SEQ ID NO: 276803 - DNA, 25 bp, Artificial
  probe
  misc_feature (1)..(25): SEQ ID NO: 892; WAN024FXD; Start 147; Stop 171
tacgattattgctggatataagtca

SEQ ID NO: 276804 - DNA, 25 bp, Artificial
  probe
  misc_feature (1)..(25): SEQ ID NO: 892; WAN024FXD; Start 241; Stop 265
acgactaataatatgtattcagcct

SEQ ID NO: 276805 - DNA, 25 bp, Artificial
  probe
  misc_feature (1)..(25): SEQ ID NO: 892; WAN024FXD; Start 560; Stop 584
ataaacgagaacttcaaatgtggag

SEQ ID NO: 276806 - DNA, 25 bp, Artificial
  probe
  misc_feature (1)..(25): SEQ ID NO: 892; WAN024FXD; Start 559; Stop 583
gataaacgagaacttcaaatgtgga

SEQ ID NO: 276807 - DNA, 25 bp, Artificial
  probe
  misc_feature (1)..(25): SEQ ID NO: 892; WAN024FXD; Start 558; Stop 582
agataaacgagaacttcaaatgtgg

SEQ ID NO: 276808 - DNA, 25 bp, Artificial
  probe
  misc_feature (1)..(25): SEQ ID NO: 892; WAN024FXD; Start 139; Stop 163
acagatattacgattattgctggat

SEQ ID NO: 276809 - DNA, 25 bp, Artificial
  probe
  misc_feature (1)..(25): SEQ ID NO: 892; WAN024FXD; Start 290; Stop 314
atagtgacttcttaatgatgaatgc

SEQ ID NO: 276810 - DNA, 25 bp, Artificial
  probe
  misc_feature (1)..(25): SEQ ID NO: 892; WAN024FXD; Start 292; Stop 316
agtgacttcttaatgatgaatgcag

SEQ ID NO: 276811 - DNA, 25 bp, Artificial
  probe
  misc_feature (1)..(25): SEQ ID NO: 892; WAN024FXD; Start 293; Stop 317
gtgacttcttaatgatgaatgcaga

SEQ ID NO: 276812 - DNA, 25 bp, Artificial
  probe
  misc_feature (1)..(25): SEQ ID NO: 892; WAN024FXD; Start 284; Stop 308
tgggtgatagtgacttcttaatgat

SEQ ID NO: 276813 - DNA, 25 bp, Artificial
  probe
  misc_feature (1)..(25): SEQ ID NO: 892; WAN024FXD; Start 283; Stop 307
atgggtgatagtgacttcttaatga

SEQ ID NO: 276814 - DNA, 25 bp, Artificial
  probe
  misc_feature (1)..(25): SEQ ID NO: 892; WAN024FXD; Start 280; Stop 304
gcaatgggtgatagtgacttcttaa

SEQ ID NO: 276815 - DNA, 25 bp, Artificial
  probe
  misc_feature (1)..(25): SEQ ID NO: 892; WAN024FXD; Start 285; Stop 309
gggtgatagtgacttcttaatgatg

SEQ ID NO: 276816 - DNA, 25 bp, Artificial
  probe
  misc_feature (1)..(25): SEQ ID NO: 892; WAN024FXD; Start 156; Stop 180
tgctggatataagtcatctgtatta

SEQ ID NO: 276817 - DNA, 25 bp, Artificial
  probe
  misc_feature (1)..(25): SEQ ID NO: 892; WAN024FXD; Start 153; Stop 177
tattgctggatataagtcatctgta

SEQ ID NO: 276818 - DNA, 25 bp, Artificial
  probe
  misc_feature (1)..(25): SEQ ID NO: 892; WAN024FXD; Start 296; Stop 320
acttcttaatgatgaatgcagatgt

SEQ ID NO: 276819 - DNA, 25 bp, Artificial
  probe
  misc_feature (1)..(25): SEQ ID NO: 892; WAN024FXD; Start 282; Stop 306
aatgggtgatagtgacttcttaatg

SEQ ID NO: 276820 - DNA, 25 bp, Artificial
  probe
  misc_feature (1)..(25): SEQ ID NO: 892; WAN024FXD; Start 281; Stop 305
caatgggtgatagtgacttcttaat

SEQ ID NO: 276821 - DNA, 25 bp, Artificial
  probe
  misc_feature (1)..(25): SEQ ID NO: 892; WAN024FXD; Start 561; Stop 585
taaacgagaacttcaaatgtggagt

SEQ ID NO: 276822 - DNA, 25 bp, Artificial
  probe
  misc_feature (1)..(25): SEQ ID NO: 892; WAN024FXD; Start 138; Stop 162
tacagatattacgattattgctgga

SEQ ID NO: 276823 - DNA, 25 bp, Artificial
  probe
  misc_feature (1)..(25): SEQ ID NO: 892; WAN024FXD; Start 294; Stop 318
tgacttcttaatgatgaatgcagat

SEQ ID NO: 276824 - DNA, 25 bp, Artificial
  probe
  misc_feature (1)..(25): SEQ ID NO: 892; WAN024FXD; Start 577; Stop 601
atgtggagtgaggttgctcttaatg

SEQ ID NO: 276825 - DNA, 25 bp, Artificial
  probe
  misc_feature (1)..(25): SEQ ID NO: 892; WAN024FXD; Start 240; Stop 264
aacgactaataatatgtattcagcc

SEQ ID NO: 276826 - DNA, 25 bp, Artificial
  probe
  misc_feature (1)..(25): SEQ ID NO: 892; WAN024FXD; Start 295; Stop 319
gacttcttaatgatgaatgcagatg

SEQ ID NO: 276827 - DNA, 25 bp, Artificial
  probe
  misc_feature (1)..(25): SEQ ID NO: 892; WAN024FXD; Start 291; Stop 315
tagtgacttcttaatgatgaatgca

SEQ ID NO: 276828 - DNA, 25 bp, Artificial
  probe
  misc_feature (1)..(25): SEQ ID NO: 892; WAN024FXD; Start 400; Stop 424
attgaagagtctatgaaagtcgtag

SEQ ID NO: 276829 - DNA, 25 bp, Artificial
  probe
  misc_feature (1)..(25): SEQ ID NO: 893; WAN024D35; Start 417; Stop 441
attagaagtagacggagtgacctat

SEQ ID NO: 276830 - DNA, 25 bp, Artificial
  probe
  misc_feature (1)..(25): SEQ ID NO: 893; WAN024D35; Start 416; Stop 440
aattagaagtagacggagtgaccta

SEQ ID NO: 276831 - DNA, 25 bp, Artificial
  probe
  misc_feature (1)..(25): SEQ ID NO: 893; WAN024D35; Start 418; Stop 442
ttagaagtagacggagtgacctatg

SEQ ID NO: 276832 - DNA, 25 bp, Artificial
  probe
  misc_feature (1)..(25): SEQ ID NO: 893; WAN024D35; Start 419; Stop 443
tagaagtagacggagtgacctatgt

SEQ ID NO: 276833 - DNA, 25 bp, Artificial
  probe
  misc_feature (1)..(25): SEQ ID NO: 893; WAN024D35; Start 1229; Stop 1253
tagttcgcaaggctttattaagtga

SEQ ID NO: 276834 - DNA, 25 bp, Artificial
  probe
  misc_feature (1)..(25): SEQ ID NO: 893; WAN024D35; Start 1234; Stop 1258
cgcaaggctttattaagtgactaac

SEQ ID NO: 276835 - DNA, 25 bp, Artificial
  probe
  misc_feature (1)..(25): SEQ ID NO: 893; WAN024D35; Start 1233; Stop 1257
tcgcaaggctttattaagtgactaa

SEQ ID NO: 276836 - DNA, 25 bp, Artificial
  probe
  misc_feature (1)..(25): SEQ ID NO: 893; WAN024D35; Start 1232; Stop 1256
ttcgcaaggctttattaagtgacta

SEQ ID NO: 276837 - DNA, 25 bp, Artificial
  probe
  misc_feature (1)..(25): SEQ ID NO: 893; WAN024D35; Start 415; Stop 439
aaattagaagtagacggagtgacct

SEQ ID NO: 276838 - DNA, 25 bp, Artificial
  probe
  misc_feature (1)..(25): SEQ ID NO: 893; WAN024D35; Start 738; Stop 762
cgaaggaatttctttacgagacttt

SEQ ID NO: 276839 - DNA, 25 bp, Artificial
  probe
  misc_feature (1)..(25): SEQ ID NO: 893; WAN024D35; Start 132; Stop 156
caatgaagttcgtctcttgtctttg

SEQ ID NO: 276840 - DNA, 25 bp, Artificial
  probe
  misc_feature (1)..(25): SEQ ID NO: 893; WAN024D35; Start 1228; Stop 1252
ctagttcgcaaggctttattaagtg

SEQ ID NO: 276841 - DNA, 25 bp, Artificial
  probe
  misc_feature (1)..(25): SEQ ID NO: 893; WAN024D35; Start 1235; Stop 1259
gcaaggctttattaagtgactaact

SEQ ID NO: 276842 - DNA, 25 bp, Artificial
  probe
  misc_feature (1)..(25): SEQ ID NO: 893; WAN024D35; Start 420; Stop 444
agaagtagacggagtgacctatgtc

SEQ ID NO: 276843 - DNA, 25 bp, Artificial
  probe
  misc_feature (1)..(25): SEQ ID NO: 893; WAN024D35; Start 1230; Stop 1254
agttcgcaaggctttattaagtgac

SEQ ID NO: 276844 - DNA, 25 bp, Artificial
  probe
  misc_feature (1)..(25): SEQ ID NO: 893; WAN024D35; Start 1231; Stop 1255
gttcgcaaggctttattaagtgact

SEQ ID NO: 276845 - DNA, 25 bp, Artificial
  probe
  misc_feature (1)..(25): SEQ ID NO: 893; WAN024D35; Start 133; Stop 157
aatgaagttcgtctcttgtctttgc

SEQ ID NO: 276846 - DNA, 25 bp, Artificial
  probe
  misc_feature (1)..(25): SEQ ID NO: 893; WAN024D35; Start 533; Stop 557
gagttcttcgtttctttgggattgg

SEQ ID NO: 276847 - DNA, 25 bp, Artificial
  probe
  misc_feature (1)..(25): SEQ ID NO: 893; WAN024D35; Start 1224; Stop 1248
taacctagttcgcaaggctttatta

SEQ ID NO: 276848 - DNA, 25 bp, Artificial
  probe
  misc_feature (1)..(25): SEQ ID NO: 893; WAN024D35; Start 360; Stop 384
aattgtagaaggagcgattccactg

SEQ ID NO: 276849 - DNA, 25 bp, Artificial
  probe
  misc_feature (1)..(25): SEQ ID NO: 893; WAN024D35; Start 278; Stop 302
ctcaggctcaggagaagttggatat

SEQ ID NO: 276850 - DNA, 25 bp, Artificial
  probe
  misc_feature (1)..(25): SEQ ID NO: 893; WAN024D35; Start 640; Stop 664
gaagtcactctacgtctgtcaacaa

SEQ ID NO: 276851 - DNA, 25 bp, Artificial
  probe
  misc_feature (1)..(25): SEQ ID NO: 893; WAN024D35; Start 623; Stop 647
cttatgccaagacaggagaagtcac

SEQ ID NO: 276852 - DNA, 25 bp, Artificial
  probe
  misc_feature (1)..(25): SEQ ID NO: 893; WAN024D35; Start 1225; Stop 1249
aacctagttcgcaaggctttattaa

SEQ ID NO: 276853 - DNA, 25 bp, Artificial
  probe
  misc_feature (1)..(25): SEQ ID NO: 893; WAN024D35; Start 1223; Stop 1247
ttaacctagttcgcaaggctttatt

SEQ ID NO: 276854 - DNA, 25 bp, Artificial
  probe
  misc_feature (1)..(25): SEQ ID NO: 893; WAN024D35; Start 1222; Stop 1246
tttaacctagttcgcaaggctttat

SEQ ID NO: 276855 - DNA, 25 bp, Artificial
  probe
  misc_feature (1)..(25): SEQ ID NO: 893; WAN024D35; Start 338; Stop 362
cgaataacgaaagacaagctcaaat

SEQ ID NO: 276856 - DNA, 25 bp, Artificial
  probe
  misc_feature (1)..(25): SEQ ID NO: 893; WAN024D35; Start 983; Stop 1007
aagaacatggtgtggtgtctgaatt

SEQ ID NO: 276857 - DNA, 25 bp, Artificial
  probe
  misc_feature (1)..(25): SEQ ID NO: 893; WAN024D35; Start 795; Stop 819
cagcattgtggtagaagaactgaaa

SEQ ID NO: 276858 - DNA, 25 bp, Artificial
  probe
  misc_feature (1)..(25): SEQ ID NO: 893; WAN024D35; Start 1227; Stop 1251
cctagttcgcaaggctttattaagt

SEQ ID NO: 276859 - DNA, 25 bp, Artificial
  probe
  misc_feature (1)..(25): SEQ ID NO: 893; WAN024D35; Start 1226; Stop 1250
acctagttcgcaaggctttattaag

SEQ ID NO: 276860 - DNA, 25 bp, Artificial
  probe
  misc_feature (1)..(25): SEQ ID NO: 893; WAN024D35; Start 972; Stop 996
caagaatttggaagaacatggtgtg

SEQ ID NO: 276861 - DNA, 25 bp, Artificial
  probe
  misc_feature (1)..(25): SEQ ID NO: 893; WAN024D35; Start 1221; Stop 1245
ctttaacctagttcgcaaggcttta

SEQ ID NO: 276862 - DNA, 25 bp, Artificial
  probe
  misc_feature (1)..(25): SEQ ID NO: 894; WAN024CE6; Start 85; Stop 109
caacttgaggttatgacttatggtg

SEQ ID NO: 276863 - DNA, 25 bp, Artificial
  probe
  misc_feature (1)..(25): SEQ ID NO: 894; WAN024CE6; Start 86; Stop 110
aacttgaggttatgacttatggtgc

SEQ ID NO: 276864 - DNA, 25 bp, Artificial
  probe
  misc_feature (1)..(25): SEQ ID NO: 894; WAN024CE6; Start 438; Stop 462
ttggatcagttatcacttggaagaa

SEQ ID NO: 276865 - DNA, 25 bp, Artificial
  probe
  misc_feature (1)..(25): SEQ ID NO: 894; WAN024CE6; Start 351; Stop 375
tgaagttgaagaagtaagcgatcat

SEQ ID NO: 276866 - DNA, 25 bp, Artificial
  probe
  misc_feature (1)..(25): SEQ ID NO: 894; WAN024CE6; Start 350; Stop 374
ttgaagttgaagaagtaagcgatca

SEQ ID NO: 276867 - DNA, 25 bp, Artificial
  probe
  misc_feature (1)..(25): SEQ ID NO: 894; WAN024CE6; Start 352; Stop 376
gaagttgaagaagtaagcgatcatg

SEQ ID NO: 276868 - DNA, 25 bp, Artificial
  probe
  misc_feature (1)..(25): SEQ ID NO: 894; WAN024CE6; Start 182; Stop 206
ttgatagttatgtaggcaatagtcc

SEQ ID NO: 276869 - DNA, 25 bp, Artificial
  probe
  misc_feature (1)..(25): SEQ ID NO: 894; WAN024CE6; Start 88; Stop 112
cttgaggttatgacttatggtgcga

SEQ ID NO: 276870 - DNA, 25 bp, Artificial
  probe
  misc_feature (1)..(25): SEQ ID NO: 894; WAN024CE6; Start 80; Stop 104
gctaccaacttgaggttatgactta

SEQ ID NO: 276871 - DNA, 25 bp, Artificial
  probe
  misc_feature (1)..(25): SEQ ID NO: 894; WAN024CE6; Start 84; Stop 108
ccaacttgaggttatgacttatggt

SEQ ID NO: 276872 - DNA, 25 bp, Artificial
  probe
  misc_feature (1)..(25): SEQ ID NO: 894; WAN024CE6; Start 83; Stop 107
accaacttgaggttatgacttatgg

SEQ ID NO: 276873 - DNA, 25 bp, Artificial
  probe
  misc_feature (1)..(25): SEQ ID NO: 894; WAN024CE6; Start 353; Stop 377
aagttgaagaagtaagcgatcatgg

SEQ ID NO: 276874 - DNA, 25 bp, Artificial
  probe
  misc_feature (1)..(25): SEQ ID NO: 894; WAN024CE6; Start 267; Stop 291
caatggtaagacctatgaccttgag

SEQ ID NO: 276875 - DNA, 25 bp, Artificial
  probe
  misc_feature (1)..(25): SEQ ID NO: 894; WAN024CE6; Start 265; Stop 289
ctcaatggtaagacctatgaccttg

SEQ ID NO: 276876 - DNA, 25 bp, Artificial
  probe
  misc_feature (1)..(25): SEQ ID NO: 894; WAN024CE6; Start 348; Stop 372
gtttgaagttgaagaagtaagcgat

SEQ ID NO: 276877 - DNA, 25 bp, Artificial
  probe
  misc_feature (1)..(25): SEQ ID NO: 894; WAN024CE6; Start 89; Stop 113
ttgaggttatgacttatggtgcgac

SEQ ID NO: 276878 - DNA, 25 bp, Artificial
  probe
  misc_feature (1)..(25): SEQ ID NO: 894; WAN024CE6; Start 87; Stop 111
acttgaggttatgacttatggtgcg

SEQ ID NO: 276879 - DNA, 25 bp, Artificial
  probe
  misc_feature (1)..(25): SEQ ID NO: 894; WAN024CE6; Start 186; Stop 210
tagttatgtaggcaatagtcccaag

SEQ ID NO: 276880 - DNA, 25 bp, Artificial
  probe
  misc_feature (1)..(25): SEQ ID NO: 894; WAN024CE6; Start 346; Stop 370
ttgtttgaagttgaagaagtaagcg

SEQ ID NO: 276881 - DNA, 25 bp, Artificial
  probe
  misc_feature (1)..(25): SEQ ID NO: 894; WAN024CE6; Start 184; Stop 208
gatagttatgtaggcaatagtccca

SEQ ID NO: 276882 - DNA, 25 bp, Artificial
  probe
  misc_feature (1)..(25): SEQ ID NO: 894; WAN024CE6; Start 183; Stop 207
tgatagttatgtaggcaatagtccc

SEQ ID NO: 276883 - DNA, 25 bp, Artificial
  probe
  misc_feature (1)..(25): SEQ ID NO: 894; WAN024CE6; Start 185; Stop 209
atagttatgtaggcaatagtcccaa

SEQ ID NO: 276884 - DNA, 25 bp, Artificial
  probe
  misc_feature (1)..(25): SEQ ID NO: 894; WAN024CE6; Start 347; Stop 371
tgtttgaagttgaagaagtaagcga

SEQ ID NO: 276885 - DNA, 25 bp, Artificial
  probe
  misc_feature (1)..(25): SEQ ID NO: 894; WAN024CE6; Start 268; Stop 292
aatggtaagacctatgaccttgagg

SEQ ID NO: 276886 - DNA, 25 bp, Artificial
  probe
  misc_feature (1)..(25): SEQ ID NO: 894; WAN024CE6; Start 773; Stop 797
atgacaatgctggattcctttatga

SEQ ID NO: 276887 - DNA, 25 bp, Artificial
  probe
  misc_feature (1)..(25): SEQ ID NO: 894; WAN024CE6; Start 164; Stop 188
tcttgggatttgatgactttgatag

SEQ ID NO: 276888 - DNA, 25 bp, Artificial
  probe
  misc_feature (1)..(25): SEQ ID NO: 894; WAN024CE6; Start 345; Stop 369
cttgtttgaagttgaagaagtaagc

SEQ ID NO: 276889 - DNA, 25 bp, Artificial
  probe
  misc_feature (1)..(25): SEQ ID NO: 894; WAN024CE6; Start 344; Stop 368
gcttgtttgaagttgaagaagtaag

SEQ ID NO: 276890 - DNA, 25 bp, Artificial
  probe
  misc_feature (1)..(25): SEQ ID NO: 894; WAN024CE6; Start 82; Stop 106
taccaacttgaggttatgacttatg

SEQ ID NO: 276891 - DNA, 25 bp, Artificial
  probe
  misc_feature (1)..(25): SEQ ID NO: 894; WAN024CE6; Start 457; Stop 481
gaagaaactggtgcctatgaaatca

SEQ ID NO: 276892 - DNA, 25 bp, Artificial
  probe
  misc_feature (1)..(25): SEQ ID NO: 894; WAN024CE6; Start 159; Stop 183
tgttatcttgggatttgatgacttt

SEQ ID NO: 276893 - DNA, 25 bp, Artificial
  probe
  misc_feature (1)..(25): SEQ ID NO: 894; WAN024CE6; Start 1007; Stop 1031
gtaagacacgttatgaacttgttgt

SEQ ID NO: 276894 - DNA, 25 bp, Artificial
  probe
  misc_feature (1)..(25): SEQ ID NO: 894; WAN024CE6; Start 1003; Stop 1027
accagtaagacacgttatgaacttg

SEQ ID NO: 276895 - DNA, 25 bp, Artificial
  probe
  misc_feature (1)..(25): SEQ ID NO: 895; WAN024AV4; Start 345; Stop 369
ttatgatgaagacaagaaaccgatt

SEQ ID NO: 276896 - DNA, 25 bp, Artificial
  probe
  misc_feature (1)..(25): SEQ ID NO: 895; WAN024AV4; Start 344; Stop 368
cttatgatgaagacaagaaaccgat

SEQ ID NO: 276897 - DNA, 25 bp, Artificial
  probe
  misc_feature (1)..(25): SEQ ID NO: 895; WAN024AV4; Start 347; Stop 371
atgatgaagacaagaaaccgattaa

SEQ ID NO: 276898 - DNA, 25 bp, Artificial
  probe
  misc_feature (1)..(25): SEQ ID NO: 895; WAN024AV4; Start 343; Stop 367
gcttatgatgaagacaagaaaccga

SEQ ID NO: 276899 - DNA, 25 bp, Artificial
  probe
  misc_feature (1)..(25): SEQ ID NO: 895; WAN024AV4; Start 210; Stop 234
tgaaagtcaagacataaagaatggg

SEQ ID NO: 276900 - DNA, 25 bp, Artificial
  probe
  misc_feature (1)..(25): SEQ ID NO: 895; WAN024AV4; Start 346; Stop 370
tatgatgaagacaagaaaccgatta

SEQ ID NO: 276901 - DNA, 25 bp, Artificial
  probe
  misc_feature (1)..(25): SEQ ID NO: 895; WAN024AV4; Start 104; Stop 128
ccaattatccatgtgagtttgaagt

SEQ ID NO: 276902 - DNA, 25 bp, Artificial
  probe
  misc_feature (1)..(25): SEQ ID NO: 895; WAN024AV4; Start 342; Stop 366
agcttatgatgaagacaagaaaccg

SEQ ID NO: 276903 - DNA, 25 bp, Artificial
  probe
  misc_feature (1)..(25): SEQ ID NO: 895; WAN024AV4; Start 213; Stop 237
aagtcaagacataaagaatggggtt

SEQ ID NO: 276904 - DNA, 25 bp, Artificial
  probe
  misc_feature (1)..(25): SEQ ID NO: 895; WAN024AV4; Start 212; Stop 236
aaagtcaagacataaagaatggggt

SEQ ID NO: 276905 - DNA, 25 bp, Artificial
  probe
  misc_feature (1)..(25): SEQ ID NO: 895; WAN024AV4; Start 211; Stop 235
gaaagtcaagacataaagaatgggg

SEQ ID NO: 276906 - DNA, 25 bp, Artificial
  probe
  misc_feature (1)..(25): SEQ ID NO: 895; WAN024AV4; Start 217; Stop 241
caagacataaagaatggggttgatg

SEQ ID NO: 276907 - DNA, 25 bp, Artificial
  probe
  misc_feature (1)..(25): SEQ ID NO: 895; WAN024AV4; Start 214; Stop 238
agtcaagacataaagaatggggttg

SEQ ID NO: 276908 - DNA, 25 bp, Artificial
  probe
  misc_feature (1)..(25): SEQ ID NO: 895; WAN024AV4; Start 218; Stop 242
aagacataaagaatggggttgatgc

SEQ ID NO: 276909 - DNA, 25 bp, Artificial
  probe
  misc_feature (1)..(25): SEQ ID NO: 895; WAN024AV4; Start 209; Stop 233
ttgaaagtcaagacataaagaatgg

SEQ ID NO: 276910 - DNA, 25 bp, Artificial
  probe
  misc_feature (1)..(25): SEQ ID NO: 895; WAN024AV4; Start 221; Stop 245
acataaagaatggggttgatgcctt

SEQ ID NO: 276911 - DNA, 25 bp, Artificial
  probe
  misc_feature (1)..(25): SEQ ID NO: 895; WAN024AV4; Start 341; Stop 365
aagcttatgatgaagacaagaaacc

SEQ ID NO: 276912 - DNA, 25 bp, Artificial
  probe
  misc_feature (1)..(25): SEQ ID NO: 895; WAN024AV4; Start 228; Stop 252
gaatggggttgatgcctttgtagat

SEQ ID NO: 276913 - DNA, 25 bp, Artificial
  probe
  misc_feature (1)..(25): SEQ ID NO: 895; WAN024AV4; Start 220; Stop 244
gacataaagaatggggttgatgcct

SEQ ID NO: 276914 - DNA, 25 bp, Artificial
  probe
  misc_feature (1)..(25): SEQ ID NO: 895; WAN024AV4; Start 219; Stop 243
agacataaagaatggggttgatgcc

SEQ ID NO: 276915 - DNA, 25 bp, Artificial
  probe
  misc_feature (1)..(25): SEQ ID NO: 895; WAN024AV4; Start 229; Stop 253
aatggggttgatgcctttgtagatg

SEQ ID NO: 276916 - DNA, 25 bp, Artificial
  probe
  misc_feature (1)..(25): SEQ ID NO: 895; WAN024AV4; Start 226; Stop 250
aagaatggggttgatgcctttgtag

SEQ ID NO: 276917 - DNA, 25 bp, Artificial
  probe
  misc_feature (1)..(25): SEQ ID NO: 895; WAN024AV4; Start 340; Stop 364
aaagcttatgatgaagacaagaaac

SEQ ID NO: 276918 - DNA, 25 bp, Artificial
  probe
  misc_feature (1)..(25): SEQ ID NO: 895; WAN024AV4; Start 223; Stop 247
ataaagaatggggttgatgcctttg

SEQ ID NO: 276919 - DNA, 25 bp, Artificial
  probe
  misc_feature (1)..(25): SEQ ID NO: 895; WAN024AV4; Start 222; Stop 246
cataaagaatggggttgatgccttt

SEQ ID NO: 276920 - DNA, 25 bp, Artificial
  probe
  misc_feature (1)..(25): SEQ ID NO: 895; WAN024AV4; Start 216; Stop 240
tcaagacataaagaatggggttgat

SEQ ID NO: 276921 - DNA, 25 bp, Artificial
  probe
  misc_feature (1)..(25): SEQ ID NO: 895; WAN024AV4; Start 215; Stop 239
gtcaagacataaagaatggggttga

SEQ ID NO: 276922 - DNA, 25 bp, Artificial
  probe
  misc_feature (1)..(25): SEQ ID NO: 895; WAN024AV4; Start 232; Stop 256
ggggttgatgcctttgtagatgatc

SEQ ID NO: 276923 - DNA, 25 bp, Artificial
  probe
  misc_feature (1)..(25): SEQ ID NO: 895; WAN024AV4; Start 231; Stop 255
tggggttgatgcctttgtagatgat

SEQ ID NO: 276924 - DNA, 25 bp, Artificial
  probe
  misc_feature (1)..(25): SEQ ID NO: 895; WAN024AV4; Start 230; Stop 254
atggggttgatgcctttgtagatga

SEQ ID NO: 276925 - DNA, 25 bp, Artificial
  probe
  misc_feature (1)..(25): SEQ ID NO: 895; WAN024AV4; Start 227; Stop 251
agaatggggttgatgcctttgtaga

SEQ ID NO: 276926 - DNA, 25 bp, Artificial
  probe
  misc_feature (1)..(25): SEQ ID NO: 895; WAN024AV4; Start 225; Stop 249
aaagaatggggttgatgcctttgta

SEQ ID NO: 276927 - DNA, 25 bp, Artificial
  probe
  misc_feature (1)..(25): SEQ ID NO: 895; WAN024AV4; Start 224; Stop 248
taaagaatggggttgatgcctttgt

SEQ ID NO: 276928 - DNA, 25 bp, Artificial
  probe
  misc_feature (1)..(25): SEQ ID NO: 896; WAN024AUZ; Start 212; Stop 236
aaagtcaggatataaagaacggagc

SEQ ID NO: 276929 - DNA, 25 bp, Artificial
  probe
  misc_feature (1)..(25): SEQ ID NO: 896; WAN024AUZ; Start 96; Stop 120
tttgatgcccaattatccatgtgag

SEQ ID NO: 276930 - DNA, 25 bp, Artificial
  probe
  misc_feature (1)..(25): SEQ ID NO: 896; WAN024AUZ; Start 213; Stop 237
aagtcaggatataaagaacggagct

SEQ ID NO: 276931 - DNA, 25 bp, Artificial
  probe
  misc_feature (1)..(25): SEQ ID NO: 896; WAN024AUZ; Start 217; Stop 241
caggatataaagaacggagctgatg

SEQ ID NO: 276932 - DNA, 25 bp, Artificial
  probe
  misc_feature (1)..(25): SEQ ID NO: 896; WAN024AUZ; Start 218; Stop 242
aggatataaagaacggagctgatgc

SEQ ID NO: 276933 - DNA, 25 bp, Artificial
  probe
  misc_feature (1)..(25): SEQ ID NO: 896; WAN024AUZ; Start 214; Stop 238
agtcaggatataaagaacggagctg

SEQ ID NO: 276934 - DNA, 25 bp, Artificial
  probe
  misc_feature (1)..(25): SEQ ID NO: 896; WAN024AUZ; Start 30; Stop 54
agattgtgatgaattagaaacagaa

SEQ ID NO: 276935 - DNA, 25 bp, Artificial
  probe
  misc_feature (1)..(25): SEQ ID NO: 896; WAN024AUZ; Start 382; Stop 406
ttattagattccttaatcgtctcag

SEQ ID NO: 276936 - DNA, 25 bp, Artificial
  probe
  misc_feature (1)..(25): SEQ ID NO: 896; WAN024AUZ; Start 95; Stop 119
ttttgatgcccaattatccatgtga

SEQ ID NO: 276937 - DNA, 25 bp, Artificial
  probe
  misc_feature (1)..(25): SEQ ID NO: 896; WAN024AUZ; Start 27; Stop 51
actagattgtgatgaattagaaaca

SEQ ID NO: 276938 - DNA, 25 bp, Artificial
  probe
  misc_feature (1)..(25): SEQ ID NO: 896; WAN024AUZ; Start 29; Stop 53
tagattgtgatgaattagaaacaga

SEQ ID NO: 276939 - DNA, 25 bp, Artificial
  probe
  misc_feature (1)..(25): SEQ ID NO: 896; WAN024AUZ; Start 31; Stop 55
gattgtgatgaattagaaacagaat

SEQ ID NO: 276940 - DNA, 25 bp, Artificial
  probe
  misc_feature (1)..(25): SEQ ID NO: 896; WAN024AUZ; Start 18; Stop 42
agaatcaatactagattgtgatgaa

SEQ ID NO: 276941 - DNA, 25 bp, Artificial
  probe
  misc_feature (1)..(25): SEQ ID NO: 896; WAN024AUZ; Start 17; Stop 41
aagaatcaatactagattgtgatga

SEQ ID NO: 276942 - DNA, 25 bp, Artificial
  probe
  misc_feature (1)..(25): SEQ ID NO: 896; WAN024AUZ; Start 216; Stop 240
tcaggatataaagaacggagctgat

SEQ ID NO: 276943 - DNA, 25 bp, Artificial
  probe
  misc_feature (1)..(25): SEQ ID NO: 896; WAN024AUZ; Start 35; Stop 59
gtgatgaattagaaacagaattaca

SEQ ID NO: 276944 - DNA, 25 bp, Artificial
  probe
  misc_feature (1)..(25): SEQ ID NO: 896; WAN024AUZ; Start 34; Stop 58
tgtgatgaattagaaacagaattac

SEQ ID NO: 276945 - DNA, 25 bp, Artificial
  probe
  misc_feature (1)..(25): SEQ ID NO: 896; WAN024AUZ; Start 28; Stop 52
ctagattgtgatgaattagaaacag

SEQ ID NO: 276946 - DNA, 25 bp, Artificial
  probe
  misc_feature (1)..(25): SEQ ID NO: 896; WAN024AUZ; Start 32; Stop 56
attgtgatgaattagaaacagaatt

SEQ ID NO: 276947 - DNA, 25 bp, Artificial
  probe
  misc_feature (1)..(25): SEQ ID NO: 896; WAN024AUZ; Start 215; Stop 239
gtcaggatataaagaacggagctga

SEQ ID NO: 276948 - DNA, 25 bp, Artificial
  probe
  misc_feature (1)..(25): SEQ ID NO: 896; WAN024AUZ; Start 381; Stop 405
tttattagattccttaatcgtctca

SEQ ID NO: 276949 - DNA, 25 bp, Artificial
  probe
  misc_feature (1)..(25): SEQ ID NO: 896; WAN024AUZ; Start 178; Stop 202
gaatcctatcttcaaaacattatgg

SEQ ID NO: 276950 - DNA, 25 bp, Artificial
  probe
  misc_feature (1)..(25): SEQ ID NO: 896; WAN024AUZ; Start 19; Stop 43
gaatcaatactagattgtgatgaat

SEQ ID NO: 276951 - DNA, 25 bp, Artificial
  probe
  misc_feature (1)..(25): SEQ ID NO: 896; WAN024AUZ; Start 33; Stop 57
ttgtgatgaattagaaacagaatta

SEQ ID NO: 276952 - DNA, 25 bp, Artificial
  probe
  misc_feature (1)..(25): SEQ ID NO: 896; WAN024AUZ; Start 181; Stop 205
tcctatcttcaaaacattatggaat

SEQ ID NO: 276953 - DNA, 25 bp, Artificial
  probe
  misc_feature (1)..(25): SEQ ID NO: 896; WAN024AUZ; Start 180; Stop 204
atcctatcttcaaaacattatggaa

SEQ ID NO: 276954 - DNA, 25 bp, Artificial
  probe
  misc_feature (1)..(25): SEQ ID NO: 896; WAN024AUZ; Start 179; Stop 203
aatcctatcttcaaaacattatgga

SEQ ID NO: 276955 - DNA, 25 bp, Artificial
  probe
  misc_feature (1)..(25): SEQ ID NO: 896; WAN024AUZ; Start 182; Stop 206
cctatcttcaaaacattatggaatt

SEQ ID NO: 276956 - DNA, 25 bp, Artificial
  probe
  misc_feature (1)..(25): SEQ ID NO: 896; WAN024AUZ; Start 16; Stop 40
aaagaatcaatactagattgtgatg

SEQ ID NO: 276957 - DNA, 25 bp, Artificial
  probe
  misc_feature (1)..(25): SEQ ID NO: 897; WAN024E22; Start 404; Stop 428
atactccagaagacttgtcagatga

SEQ ID NO: 276958 - DNA, 25 bp, Artificial
  probe
  misc_feature (1)..(25): SEQ ID NO: 897; WAN024E22; Start 635; Stop 659
gtgcgactcataaggttaattcttc

SEQ ID NO: 276959 - DNA, 25 bp, Artificial
  probe
  misc_feature (1)..(25): SEQ ID NO: 897; WAN024E22; Start 637; Stop 661
gcgactcataaggttaattcttcag

SEQ ID NO: 276960 - DNA, 25 bp, Artificial
  probe
  misc_feature (1)..(25): SEQ ID NO: 897; WAN024E22; Start 636; Stop 660
tgcgactcataaggttaattcttca

SEQ ID NO: 276961 - DNA, 25 bp, Artificial
  probe
  misc_feature (1)..(25): SEQ ID NO: 897; WAN024E22; Start 405; Stop 429
tactccagaagacttgtcagatgaa

SEQ ID NO: 276962 - DNA, 25 bp, Artificial
  probe
  misc_feature (1)..(25): SEQ ID NO: 897; WAN024E22; Start 399; Stop 423
ttaccatactccagaagacttgtca

SEQ ID NO: 276963 - DNA, 25 bp, Artificial
  probe
  misc_feature (1)..(25): SEQ ID NO: 897; WAN024E22; Start 403; Stop 427
catactccagaagacttgtcagatg

SEQ ID NO: 276964 - DNA, 25 bp, Artificial
  probe
  misc_feature (1)..(25): SEQ ID NO: 897; WAN024E22; Start 447; Stop 471
agacattctgcctactggatatgaa

SEQ ID NO: 276965 - DNA, 25 bp, Artificial
  probe
  misc_feature (1)..(25): SEQ ID NO: 897; WAN024E22; Start 400; Stop 424
taccatactccagaagacttgtcag

SEQ ID NO: 276966 - DNA, 25 bp, Artificial
  probe
  misc_feature (1)..(25): SEQ ID NO: 897; WAN024E22; Start 634; Stop 658
ggtgcgactcataaggttaattctt

SEQ ID NO: 276967 - DNA, 25 bp, Artificial
  probe
  misc_feature (1)..(25): SEQ ID NO: 897; WAN024E22; Start 581; Stop 605
aattgattatggtagacctagacga

SEQ ID NO: 276968 - DNA, 25 bp, Artificial
  probe
  misc_feature (1)..(25): SEQ ID NO: 897; WAN024E22; Start 402; Stop 426
ccatactccagaagacttgtcagat

SEQ ID NO: 276969 - DNA, 25 bp, Artificial
  probe
  misc_feature (1)..(25): SEQ ID NO: 897; WAN024E22; Start 582; Stop 606
attgattatggtagacctagacgat

SEQ ID NO: 276970 - DNA, 25 bp, Artificial
  probe
  misc_feature (1)..(25): SEQ ID NO: 897; WAN024E22; Start 638; Stop 662
cgactcataaggttaattcttcaga

SEQ ID NO: 276971 - DNA, 25 bp, Artificial
  probe
  misc_feature (1)..(25): SEQ ID NO: 897; WAN024E22; Start 583; Stop 607
ttgattatggtagacctagacgata

SEQ ID NO: 276972 - DNA, 25 bp, Artificial
  probe
  misc_feature (1)..(25): SEQ ID NO: 897; WAN024E22; Start 406; Stop 430
actccagaagacttgtcagatgaag

SEQ ID NO: 276973 - DNA, 25 bp, Artificial
  probe
  misc_feature (1)..(25): SEQ ID NO: 897; WAN024E22; Start 846; Stop 870
gattcgcaacatcaatgtaacaact

SEQ ID NO: 276974 - DNA, 25 bp, Artificial
  probe
  misc_feature (1)..(25): SEQ ID NO: 897; WAN024E22; Start 847; Stop 871
attcgcaacatcaatgtaacaactg

SEQ ID NO: 276975 - DNA, 25 bp, Artificial
  probe
  misc_feature (1)..(25): SEQ ID NO: 897; WAN024E22; Start 584; Stop 608
tgattatggtagacctagacgataa

SEQ ID NO: 276976 - DNA, 25 bp, Artificial
  probe
  misc_feature (1)..(25): SEQ ID NO: 897; WAN024E22; Start 585; Stop 609
gattatggtagacctagacgataac

SEQ ID NO: 276977 - DNA, 25 bp, Artificial
  probe
  misc_feature (1)..(25): SEQ ID NO: 897; WAN024E22; Start 845; Stop 869
ggattcgcaacatcaatgtaacaac

SEQ ID NO: 276978 - DNA, 25 bp, Artificial
  probe
  misc_feature (1)..(25): SEQ ID NO: 897; WAN024E22; Start 401; Stop 425
accatactccagaagacttgtcaga

SEQ ID NO: 276979 - DNA, 25 bp, Artificial
  probe
  misc_feature (1)..(25): SEQ ID NO: 897; WAN024E22; Start 266; Stop 290
cctgtggtaaatgctactactgtaa

SEQ ID NO: 276980 - DNA, 25 bp, Artificial
  probe
  misc_feature (1)..(25): SEQ ID NO: 897; WAN024E22; Start 587; Stop 611
ttatggtagacctagacgataaccg

SEQ ID NO: 276981 - DNA, 25 bp, Artificial
  probe
  misc_feature (1)..(25): SEQ ID NO: 897; WAN024E22; Start 586; Stop 610
attatggtagacctagacgataacc

SEQ ID NO: 276982 - DNA, 25 bp, Artificial
  probe
  misc_feature (1)..(25): SEQ ID NO: 897; WAN024E22; Start 844; Stop 868
tggattcgcaacatcaatgtaacaa

SEQ ID NO: 276983 - DNA, 25 bp, Artificial
  probe
  misc_feature (1)..(25): SEQ ID NO: 897; WAN024E22; Start 843; Stop 867
ttggattcgcaacatcaatgtaaca

SEQ ID NO: 276984 - DNA, 25 bp, Artificial
  probe
  misc_feature (1)..(25): SEQ ID NO: 897; WAN024E22; Start 14; Stop 38
cttatgttaaaccaggacttgcttc

SEQ ID NO: 276985 - DNA, 25 bp, Artificial
  probe
  misc_feature (1)..(25): SEQ ID NO: 897; WAN024E22; Start 12; Stop 36
tacttatgttaaaccaggacttgct

SEQ ID NO: 276986 - DNA, 25 bp, Artificial
  probe
  misc_feature (1)..(25): SEQ ID NO: 897; WAN024E22; Start 16; Stop 40
tatgttaaaccaggacttgcttctt

SEQ ID NO: 276987 - DNA, 25 bp, Artificial
  probe
  misc_feature (1)..(25): SEQ ID NO: 897; WAN024E22; Start 15; Stop 39
ttatgttaaaccaggacttgcttct

SEQ ID NO: 276988 - DNA, 25 bp, Artificial
  probe
  misc_feature (1)..(25): SEQ ID NO: 897; WAN024E22; Start 1014; Stop 1038
ccatgccattaaggtcattatcgaa

SEQ ID NO: 276989 - DNA, 25 bp, Artificial
  probe
  misc_feature (1)..(25): SEQ ID NO: 897; WAN024E22; Start 457; Stop 481
cctactggatatgaaattggtgtct

SEQ ID NO: 276990 - DNA, 25 bp, Artificial
  probe
  misc_feature (1)..(25): SEQ ID NO: 898; WAN024DGI; Start 139; Stop 163
ttatattctcaatcagccagcctcc

SEQ ID NO: 276991 - DNA, 25 bp, Artificial
  probe
  misc_feature (1)..(25): SEQ ID NO: 898; WAN024DGI; Start 140; Stop 164
tatattctcaatcagccagcctcct

SEQ ID NO: 276992 - DNA, 25 bp, Artificial
  probe
  misc_feature (1)..(25): SEQ ID NO: 898; WAN024DGI; Start 133; Stop 157
cctcctttatattctcaatcagcca

SEQ ID NO: 276993 - DNA, 25 bp, Artificial
  probe
  misc_feature (1)..(25): SEQ ID NO: 898; WAN024DGI; Start 132; Stop 156
tcctcctttatattctcaatcagcc

SEQ ID NO: 276994 - DNA, 25 bp, Artificial
  probe
  misc_feature (1)..(25): SEQ ID NO: 898; WAN024DGI; Start 138; Stop 162
tttatattctcaatcagccagcctc

SEQ ID NO: 276995 - DNA, 25 bp, Artificial
  probe
  misc_feature (1)..(25): SEQ ID NO: 898; WAN024DGI; Start 137; Stop 161
ctttatattctcaatcagccagcct

SEQ ID NO: 276996 - DNA, 25 bp, Artificial
  probe
  misc_feature (1)..(25): SEQ ID NO: 898; WAN024DGI; Start 135; Stop 159
tcctttatattctcaatcagccagc

SEQ ID NO: 276997 - DNA, 25 bp, Artificial
  probe
  misc_feature (1)..(25): SEQ ID NO: 898; WAN024DGI; Start 96; Stop 120
tacaagacctttagcgaatccttta

SEQ ID NO: 276998 - DNA, 25 bp, Artificial
  probe
  misc_feature (1)..(25): SEQ ID NO: 898; WAN024DGI; Start 95; Stop 119
ttacaagacctttagcgaatccttt

SEQ ID NO: 276999 - DNA, 25 bp, Artificial
  probe
  misc_feature (1)..(25): SEQ ID NO: 898; WAN024DGI; Start 134; Stop 158
ctcctttatattctcaatcagccag

SEQ ID NO: 277000 - DNA, 25 bp, Artificial
  probe
  misc_feature (1)..(25): SEQ ID NO: 898; WAN024DGI; Start 97; Stop 121
acaagacctttagcgaatcctttag

SEQ ID NO: 277001 - DNA, 25 bp, Artificial
  probe
  misc_feature (1)..(25): SEQ ID NO: 898; WAN024DGI; Start 94; Stop 118
gttacaagacctttagcgaatcctt

SEQ ID NO: 277002 - DNA, 25 bp, Artificial
  probe
  misc_feature (1)..(25): SEQ ID NO: 898; WAN024DGI; Start 136; Stop 160
cctttatattctcaatcagccagcc

SEQ ID NO: 277003 - DNA, 25 bp, Artificial
  probe
  misc_feature (1)..(25): SEQ ID NO: 898; WAN024DGI; Start 131; Stop 155
ttcctcctttatattctcaatcagc

SEQ ID NO: 277004 - DNA, 25 bp, Artificial
  probe
  misc_feature (1)..(25): SEQ ID NO: 898; WAN024DGI; Start 92; Stop 116
ctgttacaagacctttagcgaatcc

SEQ ID NO: 277005 - DNA, 25 bp, Artificial
  probe
  misc_feature (1)..(25): SEQ ID NO: 898; WAN024DGI; Start 91; Stop 115
cctgttacaagacctttagcgaatc

SEQ ID NO: 277006 - DNA, 25 bp, Artificial
  probe
  misc_feature (1)..(25): SEQ ID NO: 898; WAN024DGI; Start 93; Stop 117
tgttacaagacctttagcgaatcct

SEQ ID NO: 277007 - DNA, 25 bp, Artificial
  probe
  misc_feature (1)..(25): SEQ ID NO: 898; WAN024DGI; Start 98; Stop 122
caagacctttagcgaatcctttagc

SEQ ID NO: 277008 - DNA, 25 bp, Artificial
  probe
  misc_feature (1)..(25): SEQ ID NO: 898; WAN024DGI; Start 90; Stop 114
acctgttacaagacctttagcgaat

SEQ ID NO: 277009 - DNA, 25 bp, Artificial
  probe
  misc_feature (1)..(25): SEQ ID NO: 898; WAN024DGI; Start 121; Stop 145
gccatgagtcttcctcctttatatt

SEQ ID NO: 277010 - DNA, 25 bp, Artificial
  probe
  misc_feature (1)..(25): SEQ ID NO: 898; WAN024DGI; Start 119; Stop 143
tagccatgagtcttcctcctttata

SEQ ID NO: 277011 - DNA, 25 bp, Artificial
  probe
  misc_feature (1)..(25): SEQ ID NO: 898; WAN024DGI; Start 120; Stop 144
agccatgagtcttcctcctttatat

SEQ ID NO: 277012 - DNA, 25 bp, Artificial
  probe
  misc_feature (1)..(25): SEQ ID NO: 898; WAN024DGI; Start 118; Stop 142
ttagccatgagtcttcctcctttat

SEQ ID NO: 277013 - DNA, 25 bp, Artificial
  probe
  misc_feature (1)..(25): SEQ ID NO: 898; WAN024DGI; Start 104; Stop 128
ctttagcgaatcctttagccatgag

SEQ ID NO: 277014 - DNA, 25 bp, Artificial
  probe
  misc_feature (1)..(25): SEQ ID NO: 898; WAN024DGI; Start 117; Stop 141
tttagccatgagtcttcctccttta

SEQ ID NO: 277015 - DNA, 25 bp, Artificial
  probe
  misc_feature (1)..(25): SEQ ID NO: 898; WAN024DGI; Start 18; Stop 42
ctcttctggttcgattactttcttt

SEQ ID NO: 277016 - DNA, 25 bp, Artificial
  probe
  misc_feature (1)..(25): SEQ ID NO: 898; WAN024DGI; Start 14; Stop 38
tttgctcttctggttcgattacttt

SEQ ID NO: 277017 - DNA, 25 bp, Artificial
  probe
  misc_feature (1)..(25): SEQ ID NO: 898; WAN024DGI; Start 17; Stop 41
gctcttctggttcgattactttctt

SEQ ID NO: 277018 - DNA, 25 bp, Artificial
  probe
  misc_feature (1)..(25): SEQ ID NO: 898; WAN024DGI; Start 141; Stop 165
atattctcaatcagccagcctcctc

SEQ ID NO: 277019 - DNA, 25 bp, Artificial
  probe
  misc_feature (1)..(25): SEQ ID NO: 898; WAN024DGI; Start 122; Stop 146
ccatgagtcttcctcctttatattc

SEQ ID NO: 277020 - DNA, 25 bp, Artificial
  probe
  misc_feature (1)..(25): SEQ ID NO: 898; WAN024DGI; Start 15; Stop 39
ttgctcttctggttcgattactttc

SEQ ID NO: 277021 - DNA, 25 bp, Artificial
  probe
  misc_feature (1)..(25): SEQ ID NO: 898; WAN024DGI; Start 111; Stop 135
gaatcctttagccatgagtcttcct

SEQ ID NO: 277022 - DNA, 25 bp, Artificial
  probe
  misc_feature (1)..(25): SEQ ID NO: 898; WAN024DGI; Start 101; Stop 125
gacctttagcgaatcctttagccat

SEQ ID NO: 277023 - DNA, 25 bp, Artificial
  probe
  misc_feature (1)..(25): SEQ ID NO: 899; WAN024BFL; Start 361; Stop 385
caatgtatcgtaactgctgactatg

SEQ ID NO: 277024 - DNA, 25 bp, Artificial
  probe
  misc_feature (1)..(25): SEQ ID NO: 899; WAN024BFL; Start 360; Stop 384
acaatgtatcgtaactgctgactat

SEQ ID NO: 277025 - DNA, 25 bp, Artificial
  probe
  misc_feature (1)..(25): SEQ ID NO: 899; WAN024BFL; Start 359; Stop 383
aacaatgtatcgtaactgctgacta

SEQ ID NO: 277026 - DNA, 25 bp, Artificial
  probe
  misc_feature (1)..(25): SEQ ID NO: 899; WAN024BFL; Start 351; Stop 375
tatggctgaacaatgtatcgtaact

SEQ ID NO: 277027 - DNA, 25 bp, Artificial
  probe
  misc_feature (1)..(25): SEQ ID NO: 899; WAN024BFL; Start 350; Stop 374
gtatggctgaacaatgtatcgtaac

SEQ ID NO: 277028 - DNA, 25 bp, Artificial
  probe
  misc_feature (1)..(25): SEQ ID NO: 899; WAN024BFL; Start 362; Stop 386
aatgtatcgtaactgctgactatgc

SEQ ID NO: 277029 - DNA, 25 bp, Artificial
  probe
  misc_feature (1)..(25): SEQ ID NO: 899; WAN024BFL; Start 349; Stop 373
ggtatggctgaacaatgtatcgtaa

SEQ ID NO: 277030 - DNA, 25 bp, Artificial
  probe
  misc_feature (1)..(25): SEQ ID NO: 899; WAN024BFL; Start 358; Stop 382
gaacaatgtatcgtaactgctgact

SEQ ID NO: 277031 - DNA, 25 bp, Artificial
  probe
  misc_feature (1)..(25): SEQ ID NO: 899; WAN024BFL; Start 356; Stop 380
ctgaacaatgtatcgtaactgctga

SEQ ID NO: 277032 - DNA, 25 bp, Artificial
  probe
  misc_feature (1)..(25): SEQ ID NO: 899; WAN024BFL; Start 357; Stop 381
tgaacaatgtatcgtaactgctgac

SEQ ID NO: 277033 - DNA, 25 bp, Artificial
  probe
  misc_feature (1)..(25): SEQ ID NO: 899; WAN024BFL; Start 352; Stop 376
atggctgaacaatgtatcgtaactg

SEQ ID NO: 277034 - DNA, 25 bp, Artificial
  probe
  misc_feature (1)..(25): SEQ ID NO: 899; WAN024BFL; Start 363; Stop 387
atgtatcgtaactgctgactatgct

SEQ ID NO: 277035 - DNA, 25 bp, Artificial
  probe
  misc_feature (1)..(25): SEQ ID NO: 899; WAN024BFL; Start 551; Stop 575
aagtattcaatgctcatgttatcgc

SEQ ID NO: 277036 - DNA, 25 bp, Artificial
  probe
  misc_feature (1)..(25): SEQ ID NO: 899; WAN024BFL; Start 348; Stop 372
tggtatggctgaacaatgtatcgta

SEQ ID NO: 277037 - DNA, 25 bp, Artificial
  probe
  misc_feature (1)..(25): SEQ ID NO: 899; WAN024BFL; Start 365; Stop 389
gtatcgtaactgctgactatgctgt

SEQ ID NO: 277038 - DNA, 25 bp, Artificial
  probe
  misc_feature (1)..(25): SEQ ID NO: 899; WAN024BFL; Start 364; Stop 388
tgtatcgtaactgctgactatgctg

SEQ ID NO: 277039 - DNA, 25 bp, Artificial
  probe
  misc_feature (1)..(25): SEQ ID NO: 899; WAN024BFL; Start 434; Stop 458
catgtgctggagtaacaacctataa

SEQ ID NO: 277040 - DNA, 25 bp, Artificial
  probe
  misc_feature (1)..(25): SEQ ID NO: 899; WAN024BFL; Start 355; Stop 379
gctgaacaatgtatcgtaactgctg

SEQ ID NO: 277041 - DNA, 25 bp, Artificial
  probe
  misc_feature (1)..(25): SEQ ID NO: 899; WAN024BFL; Start 861; Stop 885
cggaactcgtaaagacttagaagaa

SEQ ID NO: 277042 - DNA, 25 bp, Artificial
  probe
  misc_feature (1)..(25): SEQ ID NO: 899; WAN024BFL; Start 178; Stop 202
gaaggtatcggtatcgttaaagaga

SEQ ID NO: 277043 - DNA, 25 bp, Artificial
  probe
  misc_feature (1)..(25): SEQ ID NO: 899; WAN024BFL; Start 183; Stop 207
tatcggtatcgttaaagagattgct

SEQ ID NO: 277044 - DNA, 25 bp, Artificial
  probe
  misc_feature (1)..(25): SEQ ID NO: 899; WAN024BFL; Start 182; Stop 206
gtatcggtatcgttaaagagattgc

SEQ ID NO: 277045 - DNA, 25 bp, Artificial
  probe
  misc_feature (1)..(25): SEQ ID NO: 899; WAN024BFL; Start 866; Stop 890
ctcgtaaagacttagaagaagcctt

SEQ ID NO: 277046 - DNA, 25 bp, Artificial
  probe
  misc_feature (1)..(25): SEQ ID NO: 899; WAN024BFL; Start 863; Stop 887
gaactcgtaaagacttagaagaagc

SEQ ID NO: 277047 - DNA, 25 bp, Artificial
  probe
  misc_feature (1)..(25): SEQ ID NO: 899; WAN024BFL; Start 860; Stop 884
tcggaactcgtaaagacttagaaga

SEQ ID NO: 277048 - DNA, 25 bp, Artificial
  probe
  misc_feature (1)..(25): SEQ ID NO: 899; WAN024BFL; Start 864; Stop 888
aactcgtaaagacttagaagaagcc

SEQ ID NO: 277049 - DNA, 25 bp, Artificial
  probe
  misc_feature (1)..(25): SEQ ID NO: 899; WAN024BFL; Start 366; Stop 390
tatcgtaactgctgactatgctgtc

SEQ ID NO: 277050 - DNA, 25 bp, Artificial
  probe
  misc_feature (1)..(25): SEQ ID NO: 899; WAN024BFL; Start 181; Stop 205
ggtatcggtatcgttaaagagattg

SEQ ID NO: 277051 - DNA, 25 bp, Artificial
  probe
  misc_feature (1)..(25): SEQ ID NO: 899; WAN024BFL; Start 180; Stop 204
aggtatcggtatcgttaaagagatt

SEQ ID NO: 277052 - DNA, 25 bp, Artificial
  probe
  misc_feature (1)..(25): SEQ ID NO: 899; WAN024BFL; Start 179; Stop 203
aaggtatcggtatcgttaaagagat

SEQ ID NO: 277053 - DNA, 25 bp, Artificial
  probe
  misc_feature (1)..(25): SEQ ID NO: 899; WAN024BFL; Start 9; Stop 33
tgttgttgtaaatccagaaagcact

SEQ ID NO: 277054 - DNA, 25 bp, Artificial
  probe
  misc_feature (1)..(25): SEQ ID NO: 899; WAN024BFL; Start 862; Stop 886
ggaactcgtaaagacttagaagaag

SEQ ID NO: 277055 - DNA, 25 bp, Artificial
  probe
  misc_feature (1)..(25): SEQ ID NO: 899; WAN024BFL; Start 779; Stop 803
ctgttggtcttccttctgaaatgat

SEQ ID NO: 277056 - DNA, 25 bp, Artificial
  probe
  misc_feature (1)..(25): SEQ ID NO: 900; WAN024AV3; Start 341; Stop 365
aagcctatgatgaagacaagaaatc

SEQ ID NO: 277057 - DNA, 25 bp, Artificial
  probe
  misc_feature (1)..(25): SEQ ID NO: 900; WAN024AV3; Start 340; Stop 364
aaagcctatgatgaagacaagaaat

SEQ ID NO: 277058 - DNA, 25 bp, Artificial
  probe
  misc_feature (1)..(25): SEQ ID NO: 900; WAN024AV3; Start 30; Stop 54
agattgtgacgaattagaaacagaa

SEQ ID NO: 277059 - DNA, 25 bp, Artificial
  probe
  misc_feature (1)..(25): SEQ ID NO: 900; WAN024AV3; Start 27; Stop 51
actagattgtgacgaattagaaaca

SEQ ID NO: 277060 - DNA, 25 bp, Artificial
  probe
  misc_feature (1)..(25): SEQ ID NO: 900; WAN024AV3; Start 31; Stop 55
gattgtgacgaattagaaacagaat

SEQ ID NO: 277061 - DNA, 25 bp, Artificial
  probe
  misc_feature (1)..(25): SEQ ID NO: 900; WAN024AV3; Start 29; Stop 53
tagattgtgacgaattagaaacaga

SEQ ID NO: 277062 - DNA, 25 bp, Artificial
  probe
  misc_feature (1)..(25): SEQ ID NO: 900; WAN024AV3; Start 35; Stop 59
gtgacgaattagaaacagaattaca

SEQ ID NO: 277063 - DNA, 25 bp, Artificial
  probe
  misc_feature (1)..(25): SEQ ID NO: 900; WAN024AV3; Start 34; Stop 58
tgtgacgaattagaaacagaattac

SEQ ID NO: 277064 - DNA, 25 bp, Artificial
  probe
  misc_feature (1)..(25): SEQ ID NO: 900; WAN024AV3; Start 28; Stop 52
ctagattgtgacgaattagaaacag

SEQ ID NO: 277065 - DNA, 25 bp, Artificial
  probe
  misc_feature (1)..(25): SEQ ID NO: 900; WAN024AV3; Start 32; Stop 56
attgtgacgaattagaaacagaatt

SEQ ID NO: 277066 - DNA, 25 bp, Artificial
  probe
  misc_feature (1)..(25): SEQ ID NO: 900; WAN024AV3; Start 46; Stop 70
gaaacagaattacatgatgcagaaa

SEQ ID NO: 277067 - DNA, 25 bp, Artificial
  probe
  misc_feature (1)..(25): SEQ ID NO: 900; WAN024AV3; Start 381; Stop 405
tctattagattccttaatcgtctca

SEQ ID NO: 277068 - DNA, 25 bp, Artificial
  probe
  misc_feature (1)..(25): SEQ ID NO: 900; WAN024AV3; Start 24; Stop 48
aatactagattgtgacgaattagaa

SEQ ID NO: 277069 - DNA, 25 bp, Artificial
  probe
  misc_feature (1)..(25): SEQ ID NO: 900; WAN024AV3; Start 48; Stop 72
aacagaattacatgatgcagaaatc

SEQ ID NO: 277070 - DNA, 25 bp, Artificial
  probe
  misc_feature (1)..(25): SEQ ID NO: 900; WAN024AV3; Start 382; Stop 406
ctattagattccttaatcgtctcag

SEQ ID NO: 277071 - DNA, 25 bp, Artificial
  probe
  misc_feature (1)..(25): SEQ ID NO: 900; WAN024AV3; Start 342; Stop 366
agcctatgatgaagacaagaaatca

SEQ ID NO: 277072 - DNA, 25 bp, Artificial
  probe
  misc_feature (1)..(25): SEQ ID NO: 900; WAN024AV3; Start 324; Stop 348
aacccaagtaactgtaaaagcctat

SEQ ID NO: 277073 - DNA, 25 bp, Artificial
  probe
  misc_feature (1)..(25): SEQ ID NO: 900; WAN024AV3; Start 343; Stop 367
gcctatgatgaagacaagaaatcaa

SEQ ID NO: 277074 - DNA, 25 bp, Artificial
  probe
  misc_feature (1)..(25): SEQ ID NO: 900; WAN024AV3; Start 326; Stop 350
cccaagtaactgtaaaagcctatga

SEQ ID NO: 277075 - DNA, 25 bp, Artificial
  probe
  misc_feature (1)..(25): SEQ ID NO: 900; WAN024AV3; Start 333; Stop 357
aactgtaaaagcctatgatgaagac

SEQ ID NO: 277076 - DNA, 25 bp, Artificial
  probe
  misc_feature (1)..(25): SEQ ID NO: 900; WAN024AV3; Start 26; Stop 50
tactagattgtgacgaattagaaac

SEQ ID NO: 277077 - DNA, 25 bp, Artificial
  probe
  misc_feature (1)..(25): SEQ ID NO: 900; WAN024AV3; Start 325; Stop 349
acccaagtaactgtaaaagcctatg

SEQ ID NO: 277078 - DNA, 25 bp, Artificial
  probe
  misc_feature (1)..(25): SEQ ID NO: 900; WAN024AV3; Start 339; Stop 363
aaaagcctatgatgaagacaagaaa

SEQ ID NO: 277079 - DNA, 25 bp, Artificial
  probe
  misc_feature (1)..(25): SEQ ID NO: 900; WAN024AV3; Start 337; Stop 361
gtaaaagcctatgatgaagacaaga

SEQ ID NO: 277080 - DNA, 25 bp, Artificial
  probe
  misc_feature (1)..(25): SEQ ID NO: 900; WAN024AV3; Start 323; Stop 347
caacccaagtaactgtaaaagccta

SEQ ID NO: 277081 - DNA, 25 bp, Artificial
  probe
  misc_feature (1)..(25): SEQ ID NO: 900; WAN024AV3; Start 47; Stop 71
aaacagaattacatgatgcagaaat

SEQ ID NO: 277082 - DNA, 25 bp, Artificial
  probe
  misc_feature (1)..(25): SEQ ID NO: 900; WAN024AV3; Start 33; Stop 57
ttgtgacgaattagaaacagaatta

SEQ ID NO: 277083 - DNA, 25 bp, Artificial
  probe
  misc_feature (1)..(25): SEQ ID NO: 900; WAN024AV3; Start 23; Stop 47
caatactagattgtgacgaattaga

SEQ ID NO: 277084 - DNA, 25 bp, Artificial
  probe
  misc_feature (1)..(25): SEQ ID NO: 900; WAN024AV3; Start 22; Stop 46
tcaatactagattgtgacgaattag

SEQ ID NO: 277085 - DNA, 25 bp, Artificial
  probe
  misc_feature (1)..(25): SEQ ID NO: 900; WAN024AV3; Start 327; Stop 351
ccaagtaactgtaaaagcctatgat

SEQ ID NO: 277086 - DNA, 25 bp, Artificial
  probe
  misc_feature (1)..(25): SEQ ID NO: 900; WAN024AV3; Start 36; Stop 60
tgacgaattagaaacagaattacat

SEQ ID NO: 277087 - DNA, 25 bp, Artificial
  probe
  misc_feature (1)..(25): SEQ ID NO: 900; WAN024AV3; Start 338; Stop 362
taaaagcctatgatgaagacaagaa

SEQ ID NO: 277088 - DNA, 25 bp, Artificial
  probe
  misc_feature (1)..(25): SEQ ID NO: 900; WAN024AV3; Start 334; Stop 358
actgtaaaagcctatgatgaagaca

SEQ ID NO: 277089 - DNA, 25 bp, Artificial
  probe
  misc_feature (1)..(25): SEQ ID NO: 901; WAN024ERY; Start 437; Stop 461
cagactacactggtaagattacaga

SEQ ID NO: 277090 - DNA, 25 bp, Artificial
  probe
  misc_feature (1)..(25): SEQ ID NO: 901; WAN024ERY; Start 436; Stop 460
gcagactacactggtaagattacag

SEQ ID NO: 277091 - DNA, 25 bp, Artificial
  probe
  misc_feature (1)..(25): SEQ ID NO: 901; WAN024ERY; Start 438; Stop 462
agactacactggtaagattacagaa

SEQ ID NO: 277092 - DNA, 25 bp, Artificial
  probe
  misc_feature (1)..(25): SEQ ID NO: 901; WAN024ERY; Start 502; Stop 526
ggtaatgacacagttgcagaagtaa

SEQ ID NO: 277093 - DNA, 25 bp, Artificial
  probe
  misc_feature (1)..(25): SEQ ID NO: 901; WAN024ERY; Start 198; Stop 222
aaatcgctttccaggttatgttctt

SEQ ID NO: 277094 - DNA, 25 bp, Artificial
  probe
  misc_feature (1)..(25): SEQ ID NO: 901; WAN024ERY; Start 203; Stop 227
gctttccaggttatgttcttgtaga

SEQ ID NO: 277095 - DNA, 25 bp, Artificial
  probe
  misc_feature (1)..(25): SEQ ID NO: 901; WAN024ERY; Start 434; Stop 458
ttgcagactacactggtaagattac

SEQ ID NO: 277096 - DNA, 25 bp, Artificial
  probe
  misc_feature (1)..(25): SEQ ID NO: 901; WAN024ERY; Start 199; Stop 223
aatcgctttccaggttatgttcttg

SEQ ID NO: 277097 - DNA, 25 bp, Artificial
  probe
  misc_feature (1)..(25): SEQ ID NO: 901; WAN024ERY; Start 358; Stop 382
tctatgggacaaactgttcaagaat

SEQ ID NO: 277098 - DNA, 25 bp, Artificial
  probe
  misc_feature (1)..(25): SEQ ID NO: 901; WAN024ERY; Start 357; Stop 381
atctatgggacaaactgttcaagaa

SEQ ID NO: 277099 - DNA, 25 bp, Artificial
  probe
  misc_feature (1)..(25): SEQ ID NO: 901; WAN024ERY; Start 491; Stop 515
tctctatgtttggtaatgacacagt

SEQ ID NO: 277100 - DNA, 25 bp, Artificial
  probe
  misc_feature (1)..(25): SEQ ID NO: 901; WAN024ERY; Start 202; Stop 226
cgctttccaggttatgttcttgtag

SEQ ID NO: 277101 - DNA, 25 bp, Artificial
  probe
  misc_feature (1)..(25): SEQ ID NO: 901; WAN024ERY; Start 359; Stop 383
ctatgggacaaactgttcaagaatt

SEQ ID NO: 277102 - DNA, 25 bp, Artificial
  probe
  misc_feature (1)..(25): SEQ ID NO: 901; WAN024ERY; Start 354; Stop 378
ggtatctatgggacaaactgttcaa

SEQ ID NO: 277103 - DNA, 25 bp, Artificial
  probe
  misc_feature (1)..(25): SEQ ID NO: 901; WAN024ERY; Start 352; Stop 376
ttggtatctatgggacaaactgttc

SEQ ID NO: 277104 - DNA, 25 bp, Artificial
  probe
  misc_feature (1)..(25): SEQ ID NO: 901; WAN024ERY; Start 356; Stop 380
tatctatgggacaaactgttcaaga

SEQ ID NO: 277105 - DNA, 25 bp, Artificial
  probe
  misc_feature (1)..(25): SEQ ID NO: 901; WAN024ERY; Start 355; Stop 379
gtatctatgggacaaactgttcaag

SEQ ID NO: 277106 - DNA, 25 bp, Artificial
  probe
  misc_feature (1)..(25): SEQ ID NO: 901; WAN024ERY; Start 100; Stop 124
gcacaaacctacaatatgttggata

SEQ ID NO: 277107 - DNA, 25 bp, Artificial
  probe
  misc_feature (1)..(25): SEQ ID NO: 901; WAN024ERY; Start 494; Stop 518
ctatgtttggtaatgacacagttgc

SEQ ID NO: 277108 - DNA, 25 bp, Artificial
  probe
  misc_feature (1)..(25): SEQ ID NO: 901; WAN024ERY; Start 493; Stop 517
tctatgtttggtaatgacacagttg

SEQ ID NO: 277109 - DNA, 25 bp, Artificial
  probe
  misc_feature (1)..(25): SEQ ID NO: 901; WAN024ERY; Start 501; Stop 525
tggtaatgacacagttgcagaagta

SEQ ID NO: 277110 - DNA, 25 bp, Artificial
  probe
  misc_feature (1)..(25): SEQ ID NO: 901; WAN024ERY; Start 360; Stop 384
tatgggacaaactgttcaagaattt

SEQ ID NO: 277111 - DNA, 25 bp, Artificial
  probe
  misc_feature (1)..(25): SEQ ID NO: 901; WAN024ERY; Start 492; Stop 516
ctctatgtttggtaatgacacagtt

SEQ ID NO: 277112 - DNA, 25 bp, Artificial
  probe
  misc_feature (1)..(25): SEQ ID NO: 901; WAN024ERY; Start 435; Stop 459
tgcagactacactggtaagattaca

SEQ ID NO: 277113 - DNA, 25 bp, Artificial
  probe
  misc_feature (1)..(25): SEQ ID NO: 901; WAN024ERY; Start 201; Stop 225
tcgctttccaggttatgttcttgta

SEQ ID NO: 277114 - DNA, 25 bp, Artificial
  probe
  misc_feature (1)..(25): SEQ ID NO: 901; WAN024ERY; Start 490; Stop 514
atctctatgtttggtaatgacacag

SEQ ID NO: 277115 - DNA, 25 bp, Artificial
  probe
  misc_feature (1)..(25): SEQ ID NO: 901; WAN024ERY; Start 353; Stop 377
tggtatctatgggacaaactgttca

SEQ ID NO: 277116 - DNA, 25 bp, Artificial
  probe
  misc_feature (1)..(25): SEQ ID NO: 901; WAN024ERY; Start 273; Stop 297
aaatgttacaggatttgtcggatca

SEQ ID NO: 277117 - DNA, 25 bp, Artificial
  probe
  misc_feature (1)..(25): SEQ ID NO: 901; WAN024ERY; Start 382; Stop 406
tttgatttcgatgttgagattggtc

SEQ ID NO: 277118 - DNA, 25 bp, Artificial
  probe
  misc_feature (1)..(25): SEQ ID NO: 901; WAN024ERY; Start 381; Stop 405
atttgatttcgatgttgagattggt

SEQ ID NO: 277119 - DNA, 25 bp, Artificial
  probe
  misc_feature (1)..(25): SEQ ID NO: 901; WAN024ERY; Start 409; Stop 433
actgtacgtattattgatggtgctt

SEQ ID NO: 277120 - DNA, 25 bp, Artificial
  probe
  misc_feature (1)..(25): SEQ ID NO: 901; WAN024ERY; Start 408; Stop 432
aactgtacgtattattgatggtgct

SEQ ID NO: 277121 - DNA, 25 bp, Artificial
  probe
  misc_feature (1)..(25): SEQ ID NO: 901; WAN024ERY; Start 274; Stop 298
aatgttacaggatttgtcggatcac

SEQ ID NO: 277122 - DNA, 25 bp, Artificial
  probe
  misc_feature (1)..(25): SEQ ID NO: 902; WAN024FBR; Start 452; Stop 476
ttatcggctcagtcacagaagttat

SEQ ID NO: 277123 - DNA, 25 bp, Artificial
  probe
  misc_feature (1)..(25): SEQ ID NO: 902; WAN024FBR; Start 451; Stop 475
attatcggctcagtcacagaagtta

SEQ ID NO: 277124 - DNA, 25 bp, Artificial
  probe
  misc_feature (1)..(25): SEQ ID NO: 902; WAN024FBR; Start 547; Stop 571
catcagtatgagtggctcttcttag

SEQ ID NO: 277125 - DNA, 25 bp, Artificial
  probe
  misc_feature (1)..(25): SEQ ID NO: 902; WAN024FBR; Start 37; Stop 61
attggcttacttctactcctagtct

SEQ ID NO: 277126 - DNA, 25 bp, Artificial
  probe
  misc_feature (1)..(25): SEQ ID NO: 902; WAN024FBR; Start 882; Stop 906
ctatgagttgtctgtcagtctcttg

SEQ ID NO: 277127 - DNA, 25 bp, Artificial
  probe
  misc_feature (1)..(25): SEQ ID NO: 902; WAN024FBR; Start 38; Stop 62
ttggcttacttctactcctagtctt

SEQ ID NO: 277128 - DNA, 25 bp, Artificial
  probe
  misc_feature (1)..(25): SEQ ID NO: 902; WAN024FBR; Start 36; Stop 60
aattggcttacttctactcctagtc

SEQ ID NO: 277129 - DNA, 25 bp, Artificial
  probe
  misc_feature (1)..(25): SEQ ID NO: 902; WAN024FBR; Start 460; Stop 484
tcagtcacagaagttatcgcctatc

SEQ ID NO: 277130 - DNA, 25 bp, Artificial
  probe
  misc_feature (1)..(25): SEQ ID NO: 902; WAN024FBR; Start 459; Stop 483
ctcagtcacagaagttatcgcctat

SEQ ID NO: 277131 - DNA, 25 bp, Artificial
  probe
  misc_feature (1)..(25): SEQ ID NO: 902; WAN024FBR; Start 453; Stop 477
tatcggctcagtcacagaagttatc

SEQ ID NO: 277132 - DNA, 25 bp, Artificial
  probe
  misc_feature (1)..(25): SEQ ID NO: 902; WAN024FBR; Start 171; Stop 195
tattctcctgactgcctctagtatg

SEQ ID NO: 277133 - DNA, 25 bp, Artificial
  probe
  misc_feature (1)..(25): SEQ ID NO: 902; WAN024FBR; Start 170; Stop 194
gtattctcctgactgcctctagtat

SEQ ID NO: 277134 - DNA, 25 bp, Artificial
  probe
  misc_feature (1)..(25): SEQ ID NO: 902; WAN024FBR; Start 548; Stop 572
atcagtatgagtggctcttcttagg

SEQ ID NO: 277135 - DNA, 25 bp, Artificial
  probe
  misc_feature (1)..(25): SEQ ID NO: 902; WAN024FBR; Start 908; Stop 932
taggaatcatcggtagtctcgtctt

SEQ ID NO: 277136 - DNA, 25 bp, Artificial
  probe
  misc_feature (1)..(25): SEQ ID NO: 902; WAN024FBR; Start 881; Stop 905
cctatgagttgtctgtcagtctctt

SEQ ID NO: 277137 - DNA, 25 bp, Artificial
  probe
  misc_feature (1)..(25): SEQ ID NO: 902; WAN024FBR; Start 169; Stop 193
agtattctcctgactgcctctagta

SEQ ID NO: 277138 - DNA, 25 bp, Artificial
  probe
  misc_feature (1)..(25): SEQ ID NO: 902; WAN024FBR; Start 35; Stop 59
taattggcttacttctactcctagt

SEQ ID NO: 277139 - DNA, 25 bp, Artificial
  probe
  misc_feature (1)..(25): SEQ ID NO: 902; WAN024FBR; Start 178; Stop 202
ctgactgcctctagtatgagtatgg

SEQ ID NO: 277140 - DNA, 25 bp, Artificial
  probe
  misc_feature (1)..(25): SEQ ID NO: 902; WAN024FBR; Start 177; Stop 201
cctgactgcctctagtatgagtatg

SEQ ID NO: 277141 - DNA, 25 bp, Artificial
  probe
  misc_feature (1)..(25): SEQ ID NO: 902; WAN024FBR; Start 176; Stop 200
tcctgactgcctctagtatgagtat

SEQ ID NO: 277142 - DNA, 25 bp, Artificial
  probe
  misc_feature (1)..(25): SEQ ID NO: 902; WAN024FBR; Start 463; Stop 487
gtcacagaagttatcgcctatcgtt

SEQ ID NO: 277143 - DNA, 25 bp, Artificial
  probe
  misc_feature (1)..(25): SEQ ID NO: 902; WAN024FBR; Start 172; Stop 196
attctcctgactgcctctagtatga

SEQ ID NO: 277144 - DNA, 25 bp, Artificial
  probe
  misc_feature (1)..(25): SEQ ID NO: 902; WAN024FBR; Start 34; Stop 58
ttaattggcttacttctactcctag

SEQ ID NO: 277145 - DNA, 25 bp, Artificial
  probe
  misc_feature (1)..(25): SEQ ID NO: 902; WAN024FBR; Start 923; Stop 947
gtctcgtctttatcctacttctctg

SEQ ID NO: 277146 - DNA, 25 bp, Artificial
  probe
  misc_feature (1)..(25): SEQ ID NO: 902; WAN024FBR; Start 912; Stop 936
aatcatcggtagtctcgtctttatc

SEQ ID NO: 277147 - DNA, 25 bp, Artificial
  probe
  misc_feature (1)..(25): SEQ ID NO: 902; WAN024FBR; Start 911; Stop 935
gaatcatcggtagtctcgtctttat

SEQ ID NO: 277148 - DNA, 25 bp, Artificial
  probe
  misc_feature (1)..(25): SEQ ID NO: 902; WAN024FBR; Start 59; Stop 83
tctttctctctattagcattgggac

SEQ ID NO: 277149 - DNA, 25 bp, Artificial
  probe
  misc_feature (1)..(25): SEQ ID NO: 902; WAN024FBR; Start 58; Stop 82
gtctttctctctattagcattggga

SEQ ID NO: 277150 - DNA, 25 bp, Artificial
  probe
  misc_feature (1)..(25): SEQ ID NO: 902; WAN024FBR; Start 57; Stop 81
agtctttctctctattagcattggg

SEQ ID NO: 277151 - DNA, 25 bp, Artificial
  probe
  misc_feature (1)..(25): SEQ ID NO: 902; WAN024FBR; Start 470; Stop 494
aagttatcgcctatcgtttcaatct

SEQ ID NO: 277152 - DNA, 25 bp, Artificial
  probe
  misc_feature (1)..(25): SEQ ID NO: 902; WAN024FBR; Start 175; Stop 199
ctcctgactgcctctagtatgagta

SEQ ID NO: 277153 - DNA, 25 bp, Artificial
  probe
  misc_feature (1)..(25): SEQ ID NO: 902; WAN024FBR; Start 60; Stop 84
ctttctctctattagcattgggacc

SEQ ID NO: 277154 - DNA, 25 bp, Artificial
  probe
  misc_feature (1)..(25): SEQ ID NO: 902; WAN024FBR; Start 924; Stop 948
tctcgtctttatcctacttctctgg

SEQ ID NO: 277155 - DNA, 25 bp, Artificial
  probe
  misc_feature (1)..(25): SEQ ID NO: 903; WAN024CEL-5; Start 837; Stop 861
tccaatcggttcacaagtaagttat

SEQ ID NO: 277156 - DNA, 25 bp, Artificial
  probe
  misc_feature (1)..(25): SEQ ID NO: 903; WAN024CEL-5; Start 836; Stop 860
atccaatcggttcacaagtaagtta

SEQ ID NO: 277157 - DNA, 25 bp, Artificial
  probe
  misc_feature (1)..(25): SEQ ID NO: 903; WAN024CEL-5; Start 835; Stop 859
tatccaatcggttcacaagtaagtt

SEQ ID NO: 277158 - DNA, 25 bp, Artificial
  probe
  misc_feature (1)..(25): SEQ ID NO: 903; WAN024CEL-5; Start 834; Stop 858
atatccaatcggttcacaagtaagt

SEQ ID NO: 277159 - DNA, 25 bp, Artificial
  probe
  misc_feature (1)..(25): SEQ ID NO: 903; WAN024CEL-5; Start 1453; Stop 1477
agttctctcacagcctattatacag

SEQ ID NO: 277160 - DNA, 25 bp, Artificial
  probe
  misc_feature (1)..(25): SEQ ID NO: 903; WAN024CEL-5; Start 833; Stop 857
aatatccaatcggttcacaagtaag

SEQ ID NO: 277161 - DNA, 25 bp, Artificial
  probe
  misc_feature (1)..(25): SEQ ID NO: 903; WAN024CEL-5; Start 1452; Stop 1476
aagttctctcacagcctattataca

SEQ ID NO: 277162 - DNA, 25 bp, Artificial
  probe
  misc_feature (1)..(25): SEQ ID NO: 903; WAN024CEL-5; Start 838; Stop 862
ccaatcggttcacaagtaagttata

SEQ ID NO: 277163 - DNA, 25 bp, Artificial
  probe
  misc_feature (1)..(25): SEQ ID NO: 903; WAN024CEL-5; Start 832; Stop 856
gaatatccaatcggttcacaagtaa

SEQ ID NO: 277164 - DNA, 25 bp, Artificial
  probe
  misc_feature (1)..(25): SEQ ID NO: 903; WAN024CEL-5; Start 1455; Stop 1479
ttctctcacagcctattatacagac

SEQ ID NO: 277165 - DNA, 25 bp, Artificial
  probe
  misc_feature (1)..(25): SEQ ID NO: 903; WAN024CEL-5; Start 1454; Stop 1478
gttctctcacagcctattatacaga

SEQ ID NO: 277166 - DNA, 25 bp, Artificial
  probe
  misc_feature (1)..(25): SEQ ID NO: 903; WAN024CEL-5; Start 1456; Stop 1480
tctctcacagcctattatacagacc

SEQ ID NO: 277167 - DNA, 25 bp, Artificial
  probe
  misc_feature (1)..(25): SEQ ID NO: 903; WAN024CEL-5; Start 831; Stop 855
ggaatatccaatcggttcacaagta

SEQ ID NO: 277168 - DNA, 25 bp, Artificial
  probe
  misc_feature (1)..(25): SEQ ID NO: 903; WAN024CEL-5; Start 1032; Stop 1056
agattcagagattgagattgattca

SEQ ID NO: 277169 - DNA, 25 bp, Artificial
  probe
  misc_feature (1)..(25): SEQ ID NO: 903; WAN024CEL-5; Start 1028; Stop 1052
aagaagattcagagattgagattga

SEQ ID NO: 277170 - DNA, 25 bp, Artificial
  probe
  misc_feature (1)..(25): SEQ ID NO: 903; WAN024CEL-5; Start 1449; Stop 1473
acaaagttctctcacagcctattat

SEQ ID NO: 277171 - DNA, 25 bp, Artificial
  probe
  misc_feature (1)..(25): SEQ ID NO: 903; WAN024CEL-5; Start 1035; Stop 1059
ttcagagattgagattgattcatca

SEQ ID NO: 277172 - DNA, 25 bp, Artificial
  probe
  misc_feature (1)..(25): SEQ ID NO: 903; WAN024CEL-5; Start 1828; Stop 1852
gatttagtaagagacggaggacaag

SEQ ID NO: 277173 - DNA, 25 bp, Artificial
  probe
  misc_feature (1)..(25): SEQ ID NO: 903; WAN024CEL-5; Start 1677; Stop 1701
tattgaagtgcgaggatttgaagaa

SEQ ID NO: 277174 - DNA, 25 bp, Artificial
  probe
  misc_feature (1)..(25): SEQ ID NO: 903; WAN024CEL-5; Start 1676; Stop 1700
atattgaagtgcgaggatttgaaga

SEQ ID NO: 277175 - DNA, 25 bp, Artificial
  probe
  misc_feature (1)..(25): SEQ ID NO: 903; WAN024CEL-5; Start 1675; Stop 1699
catattgaagtgcgaggatttgaag

SEQ ID NO: 277176 - DNA, 25 bp, Artificial
  probe
  misc_feature (1)..(25): SEQ ID NO: 903; WAN024CEL-5; Start 1029; Stop 1053
agaagattcagagattgagattgat

SEQ ID NO: 277177 - DNA, 25 bp, Artificial
  probe
  misc_feature (1)..(25): SEQ ID NO: 903; WAN024CEL-5; Start 1829; Stop 1853
atttagtaagagacggaggacaagt

SEQ ID NO: 277178 - DNA, 25 bp, Artificial
  probe
  misc_feature (1)..(25): SEQ ID NO: 903; WAN024CEL-5; Start 1827; Stop 1851
tgatttagtaagagacggaggacaa

SEQ ID NO: 277179 - DNA, 25 bp, Artificial
  probe
  misc_feature (1)..(25): SEQ ID NO: 903; WAN024CEL-5; Start 1826; Stop 1850
ttgatttagtaagagacggaggaca

SEQ ID NO: 277180 - DNA, 25 bp, Artificial
  probe
  misc_feature (1)..(25): SEQ ID NO: 903; WAN024CEL-5; Start 1825; Stop 1849
cttgatttagtaagagacggaggac

SEQ ID NO: 277181 - DNA, 25 bp, Artificial
  probe
  misc_feature (1)..(25): SEQ ID NO: 903; WAN024CEL-5; Start 1448; Stop 1472
aacaaagttctctcacagcctatta

SEQ ID NO: 277182 - DNA, 25 bp, Artificial
  probe
  misc_feature (1)..(25): SEQ ID NO: 903; WAN024CEL-5; Start 1447; Stop 1471
aaacaaagttctctcacagcctatt

SEQ ID NO: 277183 - DNA, 25 bp, Artificial
  probe
  misc_feature (1)..(25): SEQ ID NO: 903; WAN024CEL-5; Start 29; Stop 53
aattattggctatgtttcgtggaac

SEQ ID NO: 277184 - DNA, 25 bp, Artificial
  probe
  misc_feature (1)..(25): SEQ ID NO: 903; WAN024CEL-5; Start 1822; Stop 1846
tcacttgatttagtaagagacggag

SEQ ID NO: 277185 - DNA, 25 bp, Artificial
  probe
  misc_feature (1)..(25): SEQ ID NO: 903; WAN024CEL-5; Start 2; Stop 26
tgaaaggagcgagtatggaagtaat

SEQ ID NO: 277186 - DNA, 25 bp, Artificial
  probe
  misc_feature (1)..(25): SEQ ID NO: 903; WAN024CEL-5; Start 1; Stop 25
atgaaaggagcgagtatggaagtaa

SEQ ID NO: 277187 - DNA, 25 bp, Artificial
  probe
  misc_feature (1)..(25): SEQ ID NO: 903; WAN024CEL-5; Start 1824; Stop 1848
acttgatttagtaagagacggagga

SEQ ID NO: 277188 - DNA, 25 bp, Artificial
  probe
  misc_feature (1)..(25): SEQ ID NO: 904; WAN024DXI; Start 862; Stop 886
acttggactaagattgccttgatta

SEQ ID NO: 277189 - DNA, 25 bp, Artificial
  probe
  misc_feature (1)..(25): SEQ ID NO: 904; WAN024DXI; Start 865; Stop 889
tggactaagattgccttgattatga

SEQ ID NO: 277190 - DNA, 25 bp, Artificial
  probe
  misc_feature (1)..(25): SEQ ID NO: 904; WAN024DXI; Start 868; Stop 892
actaagattgccttgattatgatgc

SEQ ID NO: 277191 - DNA, 25 bp, Artificial
  probe
  misc_feature (1)..(25): SEQ ID NO: 904; WAN024DXI; Start 861; Stop 885
aacttggactaagattgccttgatt

SEQ ID NO: 277192 - DNA, 25 bp, Artificial
  probe
  misc_feature (1)..(25): SEQ ID NO: 904; WAN024DXI; Start 864; Stop 888
ttggactaagattgccttgattatg

SEQ ID NO: 277193 - DNA, 25 bp, Artificial
  probe
  misc_feature (1)..(25): SEQ ID NO: 904; WAN024DXI; Start 863; Stop 887
cttggactaagattgccttgattat

SEQ ID NO: 277194 - DNA, 25 bp, Artificial
  probe
  misc_feature (1)..(25): SEQ ID NO: 904; WAN024DXI; Start 1055; Stop 1079
tgattagccaatacaccttcaactt

SEQ ID NO: 277195 - DNA, 25 bp, Artificial
  probe
  misc_feature (1)..(25): SEQ ID NO: 904; WAN024DXI; Start 866; Stop 890
ggactaagattgccttgattatgat

SEQ ID NO: 277196 - DNA, 25 bp, Artificial
  probe
  misc_feature (1)..(25): SEQ ID NO: 904; WAN024DXI; Start 727; Stop 751
gccttcatcactatcttgacattct

SEQ ID NO: 277197 - DNA, 25 bp, Artificial
  probe
  misc_feature (1)..(25): SEQ ID NO: 904; WAN024DXI; Start 726; Stop 750
agccttcatcactatcttgacattc

SEQ ID NO: 277198 - DNA, 25 bp, Artificial
  probe
  misc_feature (1)..(25): SEQ ID NO: 904; WAN024DXI; Start 725; Stop 749
cagccttcatcactatcttgacatt

SEQ ID NO: 277199 - DNA, 25 bp, Artificial
  probe
  misc_feature (1)..(25): SEQ ID NO: 904; WAN024DXI; Start 728; Stop 752
ccttcatcactatcttgacattctc

SEQ ID NO: 277200 - DNA, 25 bp, Artificial
  probe
  misc_feature (1)..(25): SEQ ID NO: 904; WAN024DXI; Start 860; Stop 884
caacttggactaagattgccttgat

SEQ ID NO: 277201 - DNA, 25 bp, Artificial
  probe
  misc_feature (1)..(25): SEQ ID NO: 904; WAN024DXI; Start 1189; Stop 1213
ggtacatctcctcaatactcaatgg

SEQ ID NO: 277202 - DNA, 25 bp, Artificial
  probe
  misc_feature (1)..(25): SEQ ID NO: 904; WAN024DXI; Start 780; Stop 804
tatcaacactcaagtattgccaatc

SEQ ID NO: 277203 - DNA, 25 bp, Artificial
  probe
  misc_feature (1)..(25): SEQ ID NO: 904; WAN024DXI; Start 779; Stop 803
ctatcaacactcaagtattgccaat

SEQ ID NO: 277204 - DNA, 25 bp, Artificial
  probe
  misc_feature (1)..(25): SEQ ID NO: 904; WAN024DXI; Start 781; Stop 805
atcaacactcaagtattgccaatct

SEQ ID NO: 277205 - DNA, 25 bp, Artificial
  probe
  misc_feature (1)..(25): SEQ ID NO: 904; WAN024DXI; Start 782; Stop 806
tcaacactcaagtattgccaatctt

SEQ ID NO: 277206 - DNA, 25 bp, Artificial
  probe
  misc_feature (1)..(25): SEQ ID NO: 904; WAN024DXI; Start 396; Stop 420
gatcattccatcttatgttgccatg

SEQ ID NO: 277207 - DNA, 25 bp, Artificial
  probe
  misc_feature (1)..(25): SEQ ID NO: 904; WAN024DXI; Start 1190; Stop 1214
gtacatctcctcaatactcaatggc

SEQ ID NO: 277208 - DNA, 25 bp, Artificial
  probe
  misc_feature (1)..(25): SEQ ID NO: 904; WAN024DXI; Start 778; Stop 802
gctatcaacactcaagtattgccaa

SEQ ID NO: 277209 - DNA, 25 bp, Artificial
  probe
  misc_feature (1)..(25): SEQ ID NO: 904; WAN024DXI; Start 1088; Stop 1112
tctctatcatgtacctcttcaatgg

SEQ ID NO: 277210 - DNA, 25 bp, Artificial
  probe
  misc_feature (1)..(25): SEQ ID NO: 904; WAN024DXI; Start 467; Stop 491
ttaccaactacgacttccaacactt

SEQ ID NO: 277211 - DNA, 25 bp, Artificial
  probe
  misc_feature (1)..(25): SEQ ID NO: 904; WAN024DXI; Start 729; Stop 753
cttcatcactatcttgacattctca

SEQ ID NO: 277212 - DNA, 25 bp, Artificial
  probe
  misc_feature (1)..(25): SEQ ID NO: 904; WAN024DXI; Start 1085; Stop 1109
acttctctatcatgtacctcttcaa

SEQ ID NO: 277213 - DNA, 25 bp, Artificial
  probe
  misc_feature (1)..(25): SEQ ID NO: 904; WAN024DXI; Start 1084; Stop 1108
aacttctctatcatgtacctcttca

SEQ ID NO: 277214 - DNA, 25 bp, Artificial
  probe
  misc_feature (1)..(25): SEQ ID NO: 904; WAN024DXI; Start 867; Stop 891
gactaagattgccttgattatgatg

SEQ ID NO: 277215 - DNA, 25 bp, Artificial
  probe
  misc_feature (1)..(25): SEQ ID NO: 904; WAN024DXI; Start 1083; Stop 1107
caacttctctatcatgtacctcttc

SEQ ID NO: 277216 - DNA, 25 bp, Artificial
  probe
  misc_feature (1)..(25): SEQ ID NO: 904; WAN024DXI; Start 1191; Stop 1215
tacatctcctcaatactcaatggcg

SEQ ID NO: 277217 - DNA, 25 bp, Artificial
  probe
  misc_feature (1)..(25): SEQ ID NO: 904; WAN024DXI; Start 627; Stop 651
aatcgtaattggtatcttcacagct

SEQ ID NO: 277218 - DNA, 25 bp, Artificial
  probe
  misc_feature (1)..(25): SEQ ID NO: 904; WAN024DXI; Start 629; Stop 653
tcgtaattggtatcttcacagctat

SEQ ID NO: 277219 - DNA, 25 bp, Artificial
  probe
  misc_feature (1)..(25): SEQ ID NO: 904; WAN024DXI; Start 628; Stop 652
atcgtaattggtatcttcacagcta

SEQ ID NO: 277220 - DNA, 25 bp, Artificial
  probe
  misc_feature (1)..(25): SEQ ID NO: 904; WAN024DXI; Start 630; Stop 654
cgtaattggtatcttcacagctatc

SEQ ID NO: 277221 - DNA, 25 bp, Artificial
  probe
  misc_feature (1)..(25): SEQ ID NO: 905; WAN024D39; Start 9; Stop 33
agttacgaatatgacgccagaagaa

SEQ ID NO: 277222 - DNA, 25 bp, Artificial
  probe
  misc_feature (1)..(25): SEQ ID NO: 905; WAN024D39; Start 8; Stop 32
gagttacgaatatgacgccagaaga

SEQ ID NO: 277223 - DNA, 25 bp, Artificial
  probe
  misc_feature (1)..(25): SEQ ID NO: 905; WAN024D39; Start 49; Stop 73
cgattagacgtacagatagctcatt

SEQ ID NO: 277224 - DNA, 25 bp, Artificial
  probe
  misc_feature (1)..(25): SEQ ID NO: 905; WAN024D39; Start 319; Stop 343
tatcaatgccaaacggagaaatatg

SEQ ID NO: 277225 - DNA, 25 bp, Artificial
  probe
  misc_feature (1)..(25): SEQ ID NO: 905; WAN024D39; Start 318; Stop 342
ctatcaatgccaaacggagaaatat

SEQ ID NO: 277226 - DNA, 25 bp, Artificial
  probe
  misc_feature (1)..(25): SEQ ID NO: 905; WAN024D39; Start 11; Stop 35
ttacgaatatgacgccagaagaaat

SEQ ID NO: 277227 - DNA, 25 bp, Artificial
  probe
  misc_feature (1)..(25): SEQ ID NO: 905; WAN024D39; Start 317; Stop 341
tctatcaatgccaaacggagaaata

SEQ ID NO: 277228 - DNA, 25 bp, Artificial
  probe
  misc_feature (1)..(25): SEQ ID NO: 905; WAN024D39; Start 14; Stop 38
cgaatatgacgccagaagaaatgta

SEQ ID NO: 277229 - DNA, 25 bp, Artificial
  probe
  misc_feature (1)..(25): SEQ ID NO: 905; WAN024D39; Start 12; Stop 36
tacgaatatgacgccagaagaaatg

SEQ ID NO: 277230 - DNA, 25 bp, Artificial
  probe
  misc_feature (1)..(25): SEQ ID NO: 905; WAN024D39; Start 1; Stop 25
atgaaaggagttacgaatatgacgc

SEQ ID NO: 277231 - DNA, 25 bp, Artificial
  probe
  misc_feature (1)..(25): SEQ ID NO: 905; WAN024D39; Start 402; Stop 426
ggagattaaccagtgggaaagtatc

SEQ ID NO: 277232 - DNA, 25 bp, Artificial
  probe
  misc_feature (1)..(25): SEQ ID NO: 905; WAN024D39; Start 401; Stop 425
aggagattaaccagtgggaaagtat

SEQ ID NO: 277233 - DNA, 25 bp, Artificial
  probe
  misc_feature (1)..(25): SEQ ID NO: 905; WAN024D39; Start 43; Stop 67
acagagcgattagacgtacagatag

SEQ ID NO: 277234 - DNA, 25 bp, Artificial
  probe
  misc_feature (1)..(25): SEQ ID NO: 905; WAN024D39; Start 42; Stop 66
gacagagcgattagacgtacagata

SEQ ID NO: 277235 - DNA, 25 bp, Artificial
  probe
  misc_feature (1)..(25): SEQ ID NO: 905; WAN024D39; Start 33; Stop 57
aatgtacctgacagagcgattagac

SEQ ID NO: 277236 - DNA, 25 bp, Artificial
  probe
  misc_feature (1)..(25): SEQ ID NO: 905; WAN024D39; Start 10; Stop 34
gttacgaatatgacgccagaagaaa

SEQ ID NO: 277237 - DNA, 25 bp, Artificial
  probe
  misc_feature (1)..(25): SEQ ID NO: 905; WAN024D39; Start 15; Stop 39
gaatatgacgccagaagaaatgtac

SEQ ID NO: 277238 - DNA, 25 bp, Artificial
  probe
  misc_feature (1)..(25): SEQ ID NO: 905; WAN024D39; Start 7; Stop 31
ggagttacgaatatgacgccagaag

SEQ ID NO: 277239 - DNA, 25 bp, Artificial
  probe
  misc_feature (1)..(25): SEQ ID NO: 905; WAN024D39; Start 400; Stop 424
gaggagattaaccagtgggaaagta

SEQ ID NO: 277240 - DNA, 25 bp, Artificial
  probe
  misc_feature (1)..(25): SEQ ID NO: 905; WAN024D39; Start 310; Stop 334
aaattcctctatcaatgccaaacgg

SEQ ID NO: 277241 - DNA, 25 bp, Artificial
  probe
  misc_feature (1)..(25): SEQ ID NO: 905; WAN024D39; Start 16; Stop 40
aatatgacgccagaagaaatgtacc

SEQ ID NO: 277242 - DNA, 25 bp, Artificial
  probe
  misc_feature (1)..(25): SEQ ID NO: 905; WAN024D39; Start 119; Stop 143
aaataacagaaatcgtggcaggttt

SEQ ID NO: 277243 - DNA, 25 bp, Artificial
  probe
  misc_feature (1)..(25): SEQ ID NO: 905; WAN024D39; Start 48; Stop 72
gcgattagacgtacagatagctcat

SEQ ID NO: 277244 - DNA, 25 bp, Artificial
  probe
  misc_feature (1)..(25): SEQ ID NO: 905; WAN024D39; Start 316; Stop 340
ctctatcaatgccaaacggagaaat

SEQ ID NO: 277245 - DNA, 25 bp, Artificial
  probe
  misc_feature (1)..(25): SEQ ID NO: 905; WAN024D39; Start 6; Stop 30
aggagttacgaatatgacgccagaa

SEQ ID NO: 277246 - DNA, 25 bp, Artificial
  probe
  misc_feature (1)..(25): SEQ ID NO: 905; WAN024D39; Start 5; Stop 29
aaggagttacgaatatgacgccaga

SEQ ID NO: 277247 - DNA, 25 bp, Artificial
  probe
  misc_feature (1)..(25): SEQ ID NO: 905; WAN024D39; Start 17; Stop 41
atatgacgccagaagaaatgtacct

SEQ ID NO: 277248 - DNA, 25 bp, Artificial
  probe
  misc_feature (1)..(25): SEQ ID NO: 905; WAN024D39; Start 320; Stop 344
atcaatgccaaacggagaaatatgc

SEQ ID NO: 277249 - DNA, 25 bp, Artificial
  probe
  misc_feature (1)..(25): SEQ ID NO: 905; WAN024D39; Start 378; Stop 402
gacatgcgaaggtcttatctcagag

SEQ ID NO: 277250 - DNA, 25 bp, Artificial
  probe
  misc_feature (1)..(25): SEQ ID NO: 905; WAN024D39; Start 403; Stop 427
gagattaaccagtgggaaagtatcc

SEQ ID NO: 277251 - DNA, 25 bp, Artificial
  probe
  misc_feature (1)..(25): SEQ ID NO: 905; WAN024D39; Start 381; Stop 405
atgcgaaggtcttatctcagaggag

SEQ ID NO: 277252 - DNA, 25 bp, Artificial
  probe
  misc_feature (1)..(25): SEQ ID NO: 905; WAN024D39; Start 31; Stop 55
gaaatgtacctgacagagcgattag

SEQ ID NO: 277253 - DNA, 25 bp, Artificial
  probe
  misc_feature (1)..(25): SEQ ID NO: 905; WAN024D39; Start 191; Stop 215
gtttgatttcggttgccttatccag

SEQ ID NO: 277254 - DNA, 25 bp, Artificial
  probe
  misc_feature (1)..(25): SEQ ID NO: 906; WAN024FPR; Start 381; Stop 405
acattatgctaatcaagaagaggct

SEQ ID NO: 277255 - DNA, 25 bp, Artificial
  probe
  misc_feature (1)..(25): SEQ ID NO: 906; WAN024FPR; Start 382; Stop 406
cattatgctaatcaagaagaggctt

SEQ ID NO: 277256 - DNA, 25 bp, Artificial
  probe
  misc_feature (1)..(25): SEQ ID NO: 906; WAN024FPR; Start 388; Stop 412
gctaatcaagaagaggcttatgaga

SEQ ID NO: 277257 - DNA, 25 bp, Artificial
  probe
  misc_feature (1)..(25): SEQ ID NO: 906; WAN024FPR; Start 386; Stop 410
atgctaatcaagaagaggcttatga

SEQ ID NO: 277258 - DNA, 25 bp, Artificial
  probe
  misc_feature (1)..(25): SEQ ID NO: 906; WAN024FPR; Start 387; Stop 411
tgctaatcaagaagaggcttatgag

SEQ ID NO: 277259 - DNA, 25 bp, Artificial
  probe
  misc_feature (1)..(25): SEQ ID NO: 906; WAN024FPR; Start 380; Stop 404
tacattatgctaatcaagaagaggc

SEQ ID NO: 277260 - DNA, 25 bp, Artificial
  probe
  misc_feature (1)..(25): SEQ ID NO: 906; WAN024FPR; Start 385; Stop 409
tatgctaatcaagaagaggcttatg

SEQ ID NO: 277261 - DNA, 25 bp, Artificial
  probe
  misc_feature (1)..(25): SEQ ID NO: 906; WAN024FPR; Start 596; Stop 620
ggaatggtaatgtaggtacagactt

SEQ ID NO: 277262 - DNA, 25 bp, Artificial
  probe
  misc_feature (1)..(25): SEQ ID NO: 906; WAN024FPR; Start 384; Stop 408
ttatgctaatcaagaagaggcttat

SEQ ID NO: 277263 - DNA, 25 bp, Artificial
  probe
  misc_feature (1)..(25): SEQ ID NO: 906; WAN024FPR; Start 389; Stop 413
ctaatcaagaagaggcttatgagaa

SEQ ID NO: 277264 - DNA, 25 bp, Artificial
  probe
  misc_feature (1)..(25): SEQ ID NO: 906; WAN024FPR; Start 383; Stop 407
attatgctaatcaagaagaggctta

SEQ ID NO: 277265 - DNA, 25 bp, Artificial
  probe
  misc_feature (1)..(25): SEQ ID NO: 906; WAN024FPR; Start 200; Stop 224
tgccgtatagaacaccatttatagg

SEQ ID NO: 277266 - DNA, 25 bp, Artificial
  probe
  misc_feature (1)..(25): SEQ ID NO: 906; WAN024FPR; Start 240; Stop 264
cgaggattatgtgaaactgttgaaa

SEQ ID NO: 277267 - DNA, 25 bp, Artificial
  probe
  misc_feature (1)..(25): SEQ ID NO: 906; WAN024FPR; Start 199; Stop 223
ctgccgtatagaacaccatttatag

SEQ ID NO: 277268 - DNA, 25 bp, Artificial
  probe
  misc_feature (1)..(25): SEQ ID NO: 906; WAN024FPR; Start 395; Stop 419
aagaagaggcttatgagaaatggaa

SEQ ID NO: 277269 - DNA, 25 bp, Artificial
  probe
  misc_feature (1)..(25): SEQ ID NO: 906; WAN024FPR; Start 641; Stop 665
ttgatgttgtaaattggctgaatgg

SEQ ID NO: 277270 - DNA, 25 bp, Artificial
  probe
  misc_feature (1)..(25): SEQ ID NO: 906; WAN024FPR; Start 396; Stop 420
agaagaggcttatgagaaatggaat

SEQ ID NO: 277271 - DNA, 25 bp, Artificial
  probe
  misc_feature (1)..(25): SEQ ID NO: 906; WAN024FPR; Start 643; Stop 667
gatgttgtaaattggctgaatggag

SEQ ID NO: 277272 - DNA, 25 bp, Artificial
  probe
  misc_feature (1)..(25): SEQ ID NO: 906; WAN024FPR; Start 394; Stop 418
caagaagaggcttatgagaaatgga

SEQ ID NO: 277273 - DNA, 25 bp, Artificial
  probe
  misc_feature (1)..(25): SEQ ID NO: 906; WAN024FPR; Start 644; Stop 668
atgttgtaaattggctgaatggaga

SEQ ID NO: 277274 - DNA, 25 bp, Artificial
  probe
  misc_feature (1)..(25): SEQ ID NO: 906; WAN024FPR; Start 640; Stop 664
tttgatgttgtaaattggctgaatg

SEQ ID NO: 277275 - DNA, 25 bp, Artificial
  probe
  misc_feature (1)..(25): SEQ ID NO: 906; WAN024FPR; Start 198; Stop 222
tctgccgtatagaacaccatttata

SEQ ID NO: 277276 - DNA, 25 bp, Artificial
  probe
  misc_feature (1)..(25): SEQ ID NO: 906; WAN024FPR; Start 197; Stop 221
gtctgccgtatagaacaccatttat

SEQ ID NO: 277277 - DNA, 25 bp, Artificial
  probe
  misc_feature (1)..(25): SEQ ID NO: 906; WAN024FPR; Start 239; Stop 263
ccgaggattatgtgaaactgttgaa

SEQ ID NO: 277278 - DNA, 25 bp, Artificial
  probe
  misc_feature (1)..(25): SEQ ID NO: 906; WAN024FPR; Start 642; Stop 666
tgatgttgtaaattggctgaatgga

SEQ ID NO: 277279 - DNA, 25 bp, Artificial
  probe
  misc_feature (1)..(25): SEQ ID NO: 906; WAN024FPR; Start 106; Stop 130
actaagtcaaatatgaggaagaggc

SEQ ID NO: 277280 - DNA, 25 bp, Artificial
  probe
  misc_feature (1)..(25): SEQ ID NO: 906; WAN024FPR; Start 107; Stop 131
ctaagtcaaatatgaggaagaggct

SEQ ID NO: 277281 - DNA, 25 bp, Artificial
  probe
  misc_feature (1)..(25): SEQ ID NO: 906; WAN024FPR; Start 647; Stop 671
ttgtaaattggctgaatggagagac

SEQ ID NO: 277282 - DNA, 25 bp, Artificial
  probe
  misc_feature (1)..(25): SEQ ID NO: 906; WAN024FPR; Start 646; Stop 670
gttgtaaattggctgaatggagaga

SEQ ID NO: 277283 - DNA, 25 bp, Artificial
  probe
  misc_feature (1)..(25): SEQ ID NO: 906; WAN024FPR; Start 393; Stop 417
tcaagaagaggcttatgagaaatgg

SEQ ID NO: 277284 - DNA, 25 bp, Artificial
  probe
  misc_feature (1)..(25): SEQ ID NO: 906; WAN024FPR; Start 108; Stop 132
taagtcaaatatgaggaagaggctc

SEQ ID NO: 277285 - DNA, 25 bp, Artificial
  probe
  misc_feature (1)..(25): SEQ ID NO: 906; WAN024FPR; Start 645; Stop 669
tgttgtaaattggctgaatggagag

SEQ ID NO: 277286 - DNA, 25 bp, Artificial
  probe
  misc_feature (1)..(25): SEQ ID NO: 906; WAN024FPR; Start 590; Stop 614
ctagagggaatggtaatgtaggtac

SEQ ID NO: 277287 - DNA, 25 bp, Artificial
  probe
  misc_feature (1)..(25): SEQ ID NO: 907; WAN024AXZ; Start 312; Stop 336
aatcttaggcgacaatatctaccat

SEQ ID NO: 277288 - DNA, 25 bp, Artificial
  probe
  misc_feature (1)..(25): SEQ ID NO: 907; WAN024AXZ; Start 311; Stop 335
taatcttaggcgacaatatctacca

SEQ ID NO: 277289 - DNA, 25 bp, Artificial
  probe
  misc_feature (1)..(25): SEQ ID NO: 907; WAN024AXZ; Start 309; Stop 333
gctaatcttaggcgacaatatctac

SEQ ID NO: 277290 - DNA, 25 bp, Artificial
  probe
  misc_feature (1)..(25): SEQ ID NO: 907; WAN024AXZ; Start 688; Stop 712
ttattagaggcttcacagtacatcg

SEQ ID NO: 277291 - DNA, 25 bp, Artificial
  probe
  misc_feature (1)..(25): SEQ ID NO: 907; WAN024AXZ; Start 310; Stop 334
ctaatcttaggcgacaatatctacc

SEQ ID NO: 277292 - DNA, 25 bp, Artificial
  probe
  misc_feature (1)..(25): SEQ ID NO: 907; WAN024AXZ; Start 313; Stop 337
atcttaggcgacaatatctaccatg

SEQ ID NO: 277293 - DNA, 25 bp, Artificial
  probe
  misc_feature (1)..(25): SEQ ID NO: 907; WAN024AXZ; Start 689; Stop 713
tattagaggcttcacagtacatcga

SEQ ID NO: 277294 - DNA, 25 bp, Artificial
  probe
  misc_feature (1)..(25): SEQ ID NO: 907; WAN024AXZ; Start 188; Stop 212
agcttcttcaagatggttatgagtt

SEQ ID NO: 277295 - DNA, 25 bp, Artificial
  probe
  misc_feature (1)..(25): SEQ ID NO: 907; WAN024AXZ; Start 186; Stop 210
agagcttcttcaagatggttatgag

SEQ ID NO: 277296 - DNA, 25 bp, Artificial
  probe
  misc_feature (1)..(25): SEQ ID NO: 907; WAN024AXZ; Start 788; Stop 812
gtgaagatgtattgaccttagctca

SEQ ID NO: 277297 - DNA, 25 bp, Artificial
  probe
  misc_feature (1)..(25): SEQ ID NO: 907; WAN024AXZ; Start 187; Stop 211
gagcttcttcaagatggttatgagt

SEQ ID NO: 277298 - DNA, 25 bp, Artificial
  probe
  misc_feature (1)..(25): SEQ ID NO: 907; WAN024AXZ; Start 91; Stop 115
aaaccgatgatttactacccacttt

SEQ ID NO: 277299 - DNA, 25 bp, Artificial
  probe
  misc_feature (1)..(25): SEQ ID NO: 907; WAN024AXZ; Start 787; Stop 811
cgtgaagatgtattgaccttagctc

SEQ ID NO: 277300 - DNA, 25 bp, Artificial
  probe
  misc_feature (1)..(25): SEQ ID NO: 907; WAN024AXZ; Start 285; Stop 309
gtttattggtgatgatagtgttgcg

SEQ ID NO: 277301 - DNA, 25 bp, Artificial
  probe
  misc_feature (1)..(25): SEQ ID NO: 907; WAN024AXZ; Start 92; Stop 116
aaccgatgatttactacccactttc

SEQ ID NO: 277302 - DNA, 25 bp, Artificial
  probe
  misc_feature (1)..(25): SEQ ID NO: 907; WAN024AXZ; Start 747; Stop 771
aaacttagaagaaattgcctatcgc

SEQ ID NO: 277303 - DNA, 25 bp, Artificial
  probe
  misc_feature (1)..(25): SEQ ID NO: 907; WAN024AXZ; Start 444; Stop 468
tgacaaggatatgaacgctatttct

SEQ ID NO: 277304 - DNA, 25 bp, Artificial
  probe
  misc_feature (1)..(25): SEQ ID NO: 907; WAN024AXZ; Start 786; Stop 810
tcgtgaagatgtattgaccttagct

SEQ ID NO: 277305 - DNA, 25 bp, Artificial
  probe
  misc_feature (1)..(25): SEQ ID NO: 907; WAN024AXZ; Start 623; Stop 647
gagatttatccgttgaggttatggg

SEQ ID NO: 277306 - DNA, 25 bp, Artificial
  probe
  misc_feature (1)..(25): SEQ ID NO: 907; WAN024AXZ; Start 442; Stop 466
tttgacaaggatatgaacgctattt

SEQ ID NO: 277307 - DNA, 25 bp, Artificial
  probe
  misc_feature (1)..(25): SEQ ID NO: 907; WAN024AXZ; Start 443; Stop 467
ttgacaaggatatgaacgctatttc

SEQ ID NO: 277308 - DNA, 25 bp, Artificial
  probe
  misc_feature (1)..(25): SEQ ID NO: 907; WAN024AXZ; Start 738; Stop 762
tcaggtggcaaacttagaagaaatt

SEQ ID NO: 277309 - DNA, 25 bp, Artificial
  probe
  misc_feature (1)..(25): SEQ ID NO: 907; WAN024AXZ; Start 441; Stop 465
gtttgacaaggatatgaacgctatt

SEQ ID NO: 277310 - DNA, 25 bp, Artificial
  probe
  misc_feature (1)..(25): SEQ ID NO: 907; WAN024AXZ; Start 440; Stop 464
agtttgacaaggatatgaacgctat

SEQ ID NO: 277311 - DNA, 25 bp, Artificial
  probe
  misc_feature (1)..(25): SEQ ID NO: 907; WAN024AXZ; Start 737; Stop 761
ttcaggtggcaaacttagaagaaat

SEQ ID NO: 277312 - DNA, 25 bp, Artificial
  probe
  misc_feature (1)..(25): SEQ ID NO: 907; WAN024AXZ; Start 90; Stop 114
taaaccgatgatttactacccactt

SEQ ID NO: 277313 - DNA, 25 bp, Artificial
  probe
  misc_feature (1)..(25): SEQ ID NO: 907; WAN024AXZ; Start 682; Stop 706
gaaagtttattagaggcttcacagt

SEQ ID NO: 277314 - DNA, 25 bp, Artificial
  probe
  misc_feature (1)..(25): SEQ ID NO: 907; WAN024AXZ; Start 436; Stop 460
gttgagtttgacaaggatatgaacg

SEQ ID NO: 277315 - DNA, 25 bp, Artificial
  probe
  misc_feature (1)..(25): SEQ ID NO: 907; WAN024AXZ; Start 89; Stop 113
ataaaccgatgatttactacccact

SEQ ID NO: 277316 - DNA, 25 bp, Artificial
  probe
  misc_feature (1)..(25): SEQ ID NO: 907; WAN024AXZ; Start 87; Stop 111
tgataaaccgatgatttactaccca

SEQ ID NO: 277317 - DNA, 25 bp, Artificial
  probe
  misc_feature (1)..(25): SEQ ID NO: 907; WAN024AXZ; Start 690; Stop 714
attagaggcttcacagtacatcgag

SEQ ID NO: 277318 - DNA, 25 bp, Artificial
  probe
  misc_feature (1)..(25): SEQ ID NO: 907; WAN024AXZ; Start 439; Stop 463
gagtttgacaaggatatgaacgcta

SEQ ID NO: 277319 - DNA, 25 bp, Artificial
  probe
  misc_feature (1)..(25): SEQ ID NO: 907; WAN024AXZ; Start 435; Stop 459
agttgagtttgacaaggatatgaac

SEQ ID NO: 277320 - DNA, 25 bp, Artificial
  probe
  misc_feature (1)..(25): SEQ ID NO: 908; WAN024AY2; Start 786; Stop 810
tcgtgaagatgtattgaccttagcc

SEQ ID NO: 277321 - DNA, 25 bp, Artificial
  probe
  misc_feature (1)..(25): SEQ ID NO: 908; WAN024AY2; Start 738; Stop 762
tcaggtagcaaacttggaagaaatt

SEQ ID NO: 277322 - DNA, 25 bp, Artificial
  probe
  misc_feature (1)..(25): SEQ ID NO: 908; WAN024AY2; Start 92; Stop 116
aaccgatgatttactatccactttc

SEQ ID NO: 277323 - DNA, 25 bp, Artificial
  probe
  misc_feature (1)..(25): SEQ ID NO: 908; WAN024AY2; Start 737; Stop 761
ttcaggtagcaaacttggaagaaat

SEQ ID NO: 277324 - DNA, 25 bp, Artificial
  probe
  misc_feature (1)..(25): SEQ ID NO: 908; WAN024AY2; Start 660; Stop 684
ttggttggatactggaacacatgaa

SEQ ID NO: 277325 - DNA, 25 bp, Artificial
  probe
  misc_feature (1)..(25): SEQ ID NO: 908; WAN024AY2; Start 93; Stop 117
accgatgatttactatccactttca

SEQ ID NO: 277326 - DNA, 25 bp, Artificial
  probe
  misc_feature (1)..(25): SEQ ID NO: 908; WAN024AY2; Start 91; Stop 115
aaaccgatgatttactatccacttt

SEQ ID NO: 277327 - DNA, 25 bp, Artificial
  probe
  misc_feature (1)..(25): SEQ ID NO: 908; WAN024AY2; Start 739; Stop 763
caggtagcaaacttggaagaaattg

SEQ ID NO: 277328 - DNA, 25 bp, Artificial
  probe
  misc_feature (1)..(25): SEQ ID NO: 908; WAN024AY2; Start 295; Stop 319
gatgatagtgttgctttgatcttgg

SEQ ID NO: 277329 - DNA, 25 bp, Artificial
  probe
  misc_feature (1)..(25): SEQ ID NO: 908; WAN024AY2; Start 746; Stop 770
caaacttggaagaaattgcctatcg

SEQ ID NO: 277330 - DNA, 25 bp, Artificial
  probe
  misc_feature (1)..(25): SEQ ID NO: 908; WAN024AY2; Start 294; Stop 318
tgatgatagtgttgctttgatcttg

SEQ ID NO: 277331 - DNA, 25 bp, Artificial
  probe
  misc_feature (1)..(25): SEQ ID NO: 908; WAN024AY2; Start 293; Stop 317
gtgatgatagtgttgctttgatctt

SEQ ID NO: 277332 - DNA, 25 bp, Artificial
  probe
  misc_feature (1)..(25): SEQ ID NO: 908; WAN024AY2; Start 732; Stop 756
aaatgttcaggtagcaaacttggaa

SEQ ID NO: 277333 - DNA, 25 bp, Artificial
  probe
  misc_feature (1)..(25): SEQ ID NO: 908; WAN024AY2; Start 94; Stop 118
ccgatgatttactatccactttcaa

SEQ ID NO: 277334 - DNA, 25 bp, Artificial
  probe
  misc_feature (1)..(25): SEQ ID NO: 908; WAN024AY2; Start 790; Stop 814
gaagatgtattgaccttagcccaac

SEQ ID NO: 277335 - DNA, 25 bp, Artificial
  probe
  misc_feature (1)..(25): SEQ ID NO: 908; WAN024AY2; Start 736; Stop 760
gttcaggtagcaaacttggaagaaa

SEQ ID NO: 277336 - DNA, 25 bp, Artificial
  probe
  misc_feature (1)..(25): SEQ ID NO: 908; WAN024AY2; Start 659; Stop 683
cttggttggatactggaacacatga

SEQ ID NO: 277337 - DNA, 25 bp, Artificial
  probe
  misc_feature (1)..(25): SEQ ID NO: 908; WAN024AY2; Start 292; Stop 316
ggtgatgatagtgttgctttgatct

SEQ ID NO: 277338 - DNA, 25 bp, Artificial
  probe
  misc_feature (1)..(25): SEQ ID NO: 908; WAN024AY2; Start 733; Stop 757
aatgttcaggtagcaaacttggaag

SEQ ID NO: 277339 - DNA, 25 bp, Artificial
  probe
  misc_feature (1)..(25): SEQ ID NO: 908; WAN024AY2; Start 797; Stop 821
tattgaccttagcccaaccacttaa

SEQ ID NO: 277340 - DNA, 25 bp, Artificial
  probe
  misc_feature (1)..(25): SEQ ID NO: 908; WAN024AY2; Start 296; Stop 320
atgatagtgttgctttgatcttggg

SEQ ID NO: 277341 - DNA, 25 bp, Artificial
  probe
  misc_feature (1)..(25): SEQ ID NO: 908; WAN024AY2; Start 291; Stop 315
tggtgatgatagtgttgctttgatc

SEQ ID NO: 277342 - DNA, 25 bp, Artificial
  probe
  misc_feature (1)..(25): SEQ ID NO: 908; WAN024AY2; Start 789; Stop 813
tgaagatgtattgaccttagcccaa

SEQ ID NO: 277343 - DNA, 25 bp, Artificial
  probe
  misc_feature (1)..(25): SEQ ID NO: 908; WAN024AY2; Start 123; Stop 147
gatgttggctgggattagggatatt

SEQ ID NO: 277344 - DNA, 25 bp, Artificial
  probe
  misc_feature (1)..(25): SEQ ID NO: 908; WAN024AY2; Start 665; Stop 689
tggatactggaacacatgaaagttt

SEQ ID NO: 277345 - DNA, 25 bp, Artificial
  probe
  misc_feature (1)..(25): SEQ ID NO: 908; WAN024AY2; Start 664; Stop 688
ttggatactggaacacatgaaagtt

SEQ ID NO: 277346 - DNA, 25 bp, Artificial
  probe
  misc_feature (1)..(25): SEQ ID NO: 908; WAN024AY2; Start 672; Stop 696
tggaacacatgaaagtttactggag

SEQ ID NO: 277347 - DNA, 25 bp, Artificial
  probe
  misc_feature (1)..(25): SEQ ID NO: 908; WAN024AY2; Start 671; Stop 695
ctggaacacatgaaagtttactgga

SEQ ID NO: 277348 - DNA, 25 bp, Artificial
  probe
  misc_feature (1)..(25): SEQ ID NO: 908; WAN024AY2; Start 669; Stop 693
tactggaacacatgaaagtttactg

SEQ ID NO: 277349 - DNA, 25 bp, Artificial
  probe
  misc_feature (1)..(25): SEQ ID NO: 908; WAN024AY2; Start 95; Stop 119
cgatgatttactatccactttcaac

SEQ ID NO: 277350 - DNA, 25 bp, Artificial
  probe
  misc_feature (1)..(25): SEQ ID NO: 908; WAN024AY2; Start 747; Stop 771
aaacttggaagaaattgcctatcgc

SEQ ID NO: 277351 - DNA, 25 bp, Artificial
  probe
  misc_feature (1)..(25): SEQ ID NO: 908; WAN024AY2; Start 788; Stop 812
gtgaagatgtattgaccttagccca

SEQ ID NO: 277352 - DNA, 25 bp, Artificial
  probe
  misc_feature (1)..(25): SEQ ID NO: 908; WAN024AY2; Start 796; Stop 820
gtattgaccttagcccaaccactta

SEQ ID NO: 277353 - DNA, 25 bp, Artificial
  probe
  misc_feature (1)..(25): SEQ ID NO: 909; WAN024AXY; Start 531; Stop 555
cgaaattgccaagagtattaaacca

SEQ ID NO: 277354 - DNA, 25 bp, Artificial
  probe
  misc_feature (1)..(25): SEQ ID NO: 909; WAN024AXY; Start 268; Stop 292
gaagagtttatttctgacgatagcg

SEQ ID NO: 277355 - DNA, 25 bp, Artificial
  probe
  misc_feature (1)..(25): SEQ ID NO: 909; WAN024AXY; Start 267; Stop 291
ggaagagtttatttctgacgatagc

SEQ ID NO: 277356 - DNA, 25 bp, Artificial
  probe
  misc_feature (1)..(25): SEQ ID NO: 909; WAN024AXY; Start 534; Stop 558
aattgccaagagtattaaaccaagc

SEQ ID NO: 277357 - DNA, 25 bp, Artificial
  probe
  misc_feature (1)..(25): SEQ ID NO: 909; WAN024AXY; Start 266; Stop 290
gggaagagtttatttctgacgatag

SEQ ID NO: 277358 - DNA, 25 bp, Artificial
  probe
  misc_feature (1)..(25): SEQ ID NO: 909; WAN024AXY; Start 99; Stop 123
gatttactacccactttcaacattg

SEQ ID NO: 277359 - DNA, 25 bp, Artificial
  probe
  misc_feature (1)..(25): SEQ ID NO: 909; WAN024AXY; Start 535; Stop 559
attgccaagagtattaaaccaagcc

SEQ ID NO: 277360 - DNA, 25 bp, Artificial
  probe
  misc_feature (1)..(25): SEQ ID NO: 909; WAN024AXY; Start 102; Stop 126
ttactacccactttcaacattgatg

SEQ ID NO: 277361 - DNA, 25 bp, Artificial
  probe
  misc_feature (1)..(25): SEQ ID NO: 909; WAN024AXY; Start 533; Stop 557
aaattgccaagagtattaaaccaag

SEQ ID NO: 277362 - DNA, 25 bp, Artificial
  probe
  misc_feature (1)..(25): SEQ ID NO: 909; WAN024AXY; Start 532; Stop 556
gaaattgccaagagtattaaaccaa

SEQ ID NO: 277363 - DNA, 25 bp, Artificial
  probe
  misc_feature (1)..(25): SEQ ID NO: 909; WAN024AXY; Start 433; Stop 457
gatacagacatgaatgctatttcca

SEQ ID NO: 277364 - DNA, 25 bp, Artificial
  probe
  misc_feature (1)..(25): SEQ ID NO: 909; WAN024AXY; Start 432; Stop 456
tgatacagacatgaatgctatttcc

SEQ ID NO: 277365 - DNA, 25 bp, Artificial
  probe
  misc_feature (1)..(25): SEQ ID NO: 909; WAN024AXY; Start 103; Stop 127
tactacccactttcaacattgatgt

SEQ ID NO: 277366 - DNA, 25 bp, Artificial
  probe
  misc_feature (1)..(25): SEQ ID NO: 909; WAN024AXY; Start 530; Stop 554
tcgaaattgccaagagtattaaacc

SEQ ID NO: 277367 - DNA, 25 bp, Artificial
  probe
  misc_feature (1)..(25): SEQ ID NO: 909; WAN024AXY; Start 101; Stop 125
tttactacccactttcaacattgat

SEQ ID NO: 277368 - DNA, 25 bp, Artificial
  probe
  misc_feature (1)..(25): SEQ ID NO: 909; WAN024AXY; Start 100; Stop 124
atttactacccactttcaacattga

SEQ ID NO: 277369 - DNA, 25 bp, Artificial
  probe
  misc_feature (1)..(25): SEQ ID NO: 909; WAN024AXY; Start 528; Stop 552
tgtcgaaattgccaagagtattaaa

SEQ ID NO: 277370 - DNA, 25 bp, Artificial
  probe
  misc_feature (1)..(25): SEQ ID NO: 909; WAN024AXY; Start 434; Stop 458
atacagacatgaatgctatttccat

SEQ ID NO: 277371 - DNA, 25 bp, Artificial
  probe
  misc_feature (1)..(25): SEQ ID NO: 909; WAN024AXY; Start 529; Stop 553
gtcgaaattgccaagagtattaaac

SEQ ID NO: 277372 - DNA, 25 bp, Artificial
  probe
  misc_feature (1)..(25): SEQ ID NO: 909; WAN024AXY; Start 436; Stop 460
acagacatgaatgctatttccatag

SEQ ID NO: 277373 - DNA, 25 bp, Artificial
  probe
  misc_feature (1)..(25): SEQ ID NO: 909; WAN024AXY; Start 526; Stop 550
gttgtcgaaattgccaagagtatta

SEQ ID NO: 277374 - DNA, 25 bp, Artificial
  probe
  misc_feature (1)..(25): SEQ ID NO: 909; WAN024AXY; Start 437; Stop 461
cagacatgaatgctatttccataga

SEQ ID NO: 277375 - DNA, 25 bp, Artificial
  probe
  misc_feature (1)..(25): SEQ ID NO: 909; WAN024AXY; Start 527; Stop 551
ttgtcgaaattgccaagagtattaa

SEQ ID NO: 277376 - DNA, 25 bp, Artificial
  probe
  misc_feature (1)..(25): SEQ ID NO: 909; WAN024AXY; Start 429; Stop 453
gtttgatacagacatgaatgctatt

SEQ ID NO: 277377 - DNA, 25 bp, Artificial
  probe
  misc_feature (1)..(25): SEQ ID NO: 909; WAN024AXY; Start 435; Stop 459
tacagacatgaatgctatttccata

SEQ ID NO: 277378 - DNA, 25 bp, Artificial
  probe
  misc_feature (1)..(25): SEQ ID NO: 909; WAN024AXY; Start 772; Stop 796
agtcgagaagatgtattggccttag

SEQ ID NO: 277379 - DNA, 25 bp, Artificial
  probe
  misc_feature (1)..(25): SEQ ID NO: 909; WAN024AXY; Start 768; Stop 792
tatcagtcgagaagatgtattggcc

SEQ ID NO: 277380 - DNA, 25 bp, Artificial
  probe
  misc_feature (1)..(25): SEQ ID NO: 909; WAN024AXY; Start 212; Stop 236
ttgggatcaaactttcttatgcaga

SEQ ID NO: 277381 - DNA, 25 bp, Artificial
  probe
  misc_feature (1)..(25): SEQ ID NO: 909; WAN024AXY; Start 525; Stop 549
tgttgtcgaaattgccaagagtatt

SEQ ID NO: 277382 - DNA, 25 bp, Artificial
  probe
  misc_feature (1)..(25): SEQ ID NO: 909; WAN024AXY; Start 213; Stop 237
tgggatcaaactttcttatgcagag

SEQ ID NO: 277383 - DNA, 25 bp, Artificial
  probe
  misc_feature (1)..(25): SEQ ID NO: 909; WAN024AXY; Start 440; Stop 464
acatgaatgctatttccatagaaga

SEQ ID NO: 277384 - DNA, 25 bp, Artificial
  probe
  misc_feature (1)..(25): SEQ ID NO: 909; WAN024AXY; Start 438; Stop 462
agacatgaatgctatttccatagaa

SEQ ID NO: 277385 - DNA, 25 bp, Artificial
  probe
  misc_feature (1)..(25): SEQ ID NO: 909; WAN024AXY; Start 771; Stop 795
cagtcgagaagatgtattggcctta

SEQ ID NO: 277386 - DNA, 25 bp, Artificial
  probe
  misc_feature (1)..(25): SEQ ID NO: 910; WAN024C4Z; Start 272; Stop 296
ttatcggtgaagaatttatcggtga

SEQ ID NO: 277387 - DNA, 25 bp, Artificial
  probe
  misc_feature (1)..(25): SEQ ID NO: 910; WAN024C4Z; Start 273; Stop 297
tatcggtgaagaatttatcggtgac

SEQ ID NO: 277388 - DNA, 25 bp, Artificial
  probe
  misc_feature (1)..(25): SEQ ID NO: 910; WAN024C4Z; Start 271; Stop 295
cttatcggtgaagaatttatcggtg

SEQ ID NO: 277389 - DNA, 25 bp, Artificial
  probe
  misc_feature (1)..(25): SEQ ID NO: 910; WAN024C4Z; Start 93; Stop 117
acctatgatttattatccgttgtcg

SEQ ID NO: 277390 - DNA, 25 bp, Artificial
  probe
  misc_feature (1)..(25): SEQ ID NO: 910; WAN024C4Z; Start 613; Stop 637
ctaaatcgtggtgacctttctgttg

SEQ ID NO: 277391 - DNA, 25 bp, Artificial
  probe
  misc_feature (1)..(25): SEQ ID NO: 910; WAN024C4Z; Start 614; Stop 638
taaatcgtggtgacctttctgttga

SEQ ID NO: 277392 - DNA, 25 bp, Artificial
  probe
  misc_feature (1)..(25): SEQ ID NO: 910; WAN024C4Z; Start 94; Stop 118
cctatgatttattatccgttgtcga

SEQ ID NO: 277393 - DNA, 25 bp, Artificial
  probe
  misc_feature (1)..(25): SEQ ID NO: 910; WAN024C4Z; Start 124; Stop 148
atgttggctggaattaaagatattt

SEQ ID NO: 277394 - DNA, 25 bp, Artificial
  probe
  misc_feature (1)..(25): SEQ ID NO: 910; WAN024C4Z; Start 123; Stop 147
aatgttggctggaattaaagatatt

SEQ ID NO: 277395 - DNA, 25 bp, Artificial
  probe
  misc_feature (1)..(25): SEQ ID NO: 910; WAN024C4Z; Start 608; Stop 632
cttacctaaatcgtggtgacctttc

SEQ ID NO: 277396 - DNA, 25 bp, Artificial
  probe
  misc_feature (1)..(25): SEQ ID NO: 910; WAN024C4Z; Start 609; Stop 633
ttacctaaatcgtggtgacctttct

SEQ ID NO: 277397 - DNA, 25 bp, Artificial
  probe
  misc_feature (1)..(25): SEQ ID NO: 910; WAN024C4Z; Start 612; Stop 636
cctaaatcgtggtgacctttctgtt

SEQ ID NO: 277398 - DNA, 25 bp, Artificial
  probe
  misc_feature (1)..(25): SEQ ID NO: 910; WAN024C4Z; Start 270; Stop 294
tcttatcggtgaagaatttatcggt

SEQ ID NO: 277399 - DNA, 25 bp, Artificial
  probe
  misc_feature (1)..(25): SEQ ID NO: 910; WAN024C4Z; Start 92; Stop 116
aacctatgatttattatccgttgtc

SEQ ID NO: 277400 - DNA, 25 bp, Artificial
  probe
  misc_feature (1)..(25): SEQ ID NO: 910; WAN024C4Z; Start 274; Stop 298
atcggtgaagaatttatcggtgacg

SEQ ID NO: 277401 - DNA, 25 bp, Artificial
  probe
  misc_feature (1)..(25): SEQ ID NO: 910; WAN024C4Z; Start 1; Stop 25
atgaaaggtattattcttgcaggcg

SEQ ID NO: 277402 - DNA, 25 bp, Artificial
  probe
  misc_feature (1)..(25): SEQ ID NO: 910; WAN024C4Z; Start 610; Stop 634
tacctaaatcgtggtgacctttctg

SEQ ID NO: 277403 - DNA, 25 bp, Artificial
  probe
  misc_feature (1)..(25): SEQ ID NO: 910; WAN024C4Z; Start 91; Stop 115
aaacctatgatttattatccgttgt

SEQ ID NO: 277404 - DNA, 25 bp, Artificial
  probe
  misc_feature (1)..(25): SEQ ID NO: 910; WAN024C4Z; Start 615; Stop 639
aaatcgtggtgacctttctgttgag

SEQ ID NO: 277405 - DNA, 25 bp, Artificial
  probe
  misc_feature (1)..(25): SEQ ID NO: 910; WAN024C4Z; Start 122; Stop 146
taatgttggctggaattaaagatat

SEQ ID NO: 277406 - DNA, 25 bp, Artificial
  probe
  misc_feature (1)..(25): SEQ ID NO: 910; WAN024C4Z; Start 153; Stop 177
tatctcaactcctcaagatttgccc

SEQ ID NO: 277407 - DNA, 25 bp, Artificial
  probe
  misc_feature (1)..(25): SEQ ID NO: 910; WAN024C4Z; Start 607; Stop 631
gcttacctaaatcgtggtgaccttt

SEQ ID NO: 277408 - DNA, 25 bp, Artificial
  probe
  misc_feature (1)..(25): SEQ ID NO: 910; WAN024C4Z; Start 251; Stop 275
atggacttgctcaggcttttcttat

SEQ ID NO: 277409 - DNA, 25 bp, Artificial
  probe
  misc_feature (1)..(25): SEQ ID NO: 910; WAN024C4Z; Start 601; Stop 625
aacaaggcttacctaaatcgtggtg

SEQ ID NO: 277410 - DNA, 25 bp, Artificial
  probe
  misc_feature (1)..(25): SEQ ID NO: 910; WAN024C4Z; Start 125; Stop 149
tgttggctggaattaaagatatttt

SEQ ID NO: 277411 - DNA, 25 bp, Artificial
  probe
  misc_feature (1)..(25): SEQ ID NO: 910; WAN024C4Z; Start 126; Stop 150
gttggctggaattaaagatattttg

SEQ ID NO: 277412 - DNA, 25 bp, Artificial
  probe
  misc_feature (1)..(25): SEQ ID NO: 910; WAN024C4Z; Start 2; Stop 26
tgaaaggtattattcttgcaggcgg

SEQ ID NO: 277413 - DNA, 25 bp, Artificial
  probe
  misc_feature (1)..(25): SEQ ID NO: 910; WAN024C4Z; Start 127; Stop 151
ttggctggaattaaagatattttga

SEQ ID NO: 277414 - DNA, 25 bp, Artificial
  probe
  misc_feature (1)..(25): SEQ ID NO: 910; WAN024C4Z; Start 603; Stop 627
caaggcttacctaaatcgtggtgac

SEQ ID NO: 277415 - DNA, 25 bp, Artificial
  probe
  misc_feature (1)..(25): SEQ ID NO: 910; WAN024C4Z; Start 252; Stop 276
tggacttgctcaggcttttcttatc

SEQ ID NO: 277416 - DNA, 25 bp, Artificial
  probe
  misc_feature (1)..(25): SEQ ID NO: 910; WAN024C4Z; Start 250; Stop 274
gatggacttgctcaggcttttctta

SEQ ID NO: 277417 - DNA, 25 bp, Artificial
  probe
  misc_feature (1)..(25): SEQ ID NO: 910; WAN024C4Z; Start 120; Stop 144
attaatgttggctggaattaaagat

SEQ ID NO: 277418 - DNA, 25 bp, Artificial
  probe
  misc_feature (1)..(25): SEQ ID NO: 910; WAN024C4Z; Start 128; Stop 152
tggctggaattaaagatattttgat

SEQ ID NO: 277419 - DNA, 25 bp, Artificial
  probe
  misc_feature (1)..(25): SEQ ID NO: 911; WAN024C52; Start 5; Stop 29
aaggtattattcttgcaggtggttc

SEQ ID NO: 277420 - DNA, 25 bp, Artificial
  probe
  misc_feature (1)..(25): SEQ ID NO: 911; WAN024C52; Start 150; Stop 174
gattatctcaacaccacaggatttg

SEQ ID NO: 277421 - DNA, 25 bp, Artificial
  probe
  misc_feature (1)..(25): SEQ ID NO: 911; WAN024C52; Start 149; Stop 173
tgattatctcaacaccacaggattt

SEQ ID NO: 277422 - DNA, 25 bp, Artificial
  probe
  misc_feature (1)..(25): SEQ ID NO: 911; WAN024C52; Start 151; Stop 175
attatctcaacaccacaggatttgc

SEQ ID NO: 277423 - DNA, 25 bp, Artificial
  probe
  misc_feature (1)..(25): SEQ ID NO: 911; WAN024C52; Start 148; Stop 172
ttgattatctcaacaccacaggatt

SEQ ID NO: 277424 - DNA, 25 bp, Artificial
  probe
  misc_feature (1)..(25): SEQ ID NO: 911; WAN024C52; Start 4; Stop 28
aaaggtattattcttgcaggtggtt

SEQ ID NO: 277425 - DNA, 25 bp, Artificial
  probe
  misc_feature (1)..(25): SEQ ID NO: 911; WAN024C52; Start 1; Stop 25
atgaaaggtattattcttgcaggtg

SEQ ID NO: 277426 - DNA, 25 bp, Artificial
  probe
  misc_feature (1)..(25): SEQ ID NO: 911; WAN024C52; Start 3; Stop 27
gaaaggtattattcttgcaggtggt

SEQ ID NO: 277427 - DNA, 25 bp, Artificial
  probe
  misc_feature (1)..(25): SEQ ID NO: 911; WAN024C52; Start 2; Stop 26
tgaaaggtattattcttgcaggtgg

SEQ ID NO: 277428 - DNA, 25 bp, Artificial
  probe
  misc_feature (1)..(25): SEQ ID NO: 911; WAN024C52; Start 152; Stop 176
ttatctcaacaccacaggatttgcc

SEQ ID NO: 277429 - DNA, 25 bp, Artificial
  probe
  misc_feature (1)..(25): SEQ ID NO: 911; WAN024C52; Start 147; Stop 171
tttgattatctcaacaccacaggat

SEQ ID NO: 277430 - DNA, 25 bp, Artificial
  probe
  misc_feature (1)..(25): SEQ ID NO: 911; WAN024C52; Start 7; Stop 31
ggtattattcttgcaggtggttcgg

SEQ ID NO: 277431 - DNA, 25 bp, Artificial
  probe
  misc_feature (1)..(25): SEQ ID NO: 911; WAN024C52; Start 8; Stop 32
gtattattcttgcaggtggttcggg

SEQ ID NO: 277432 - DNA, 25 bp, Artificial
  probe
  misc_feature (1)..(25): SEQ ID NO: 911; WAN024C52; Start 146; Stop 170
ttttgattatctcaacaccacagga

SEQ ID NO: 277433 - DNA, 25 bp, Artificial
  probe
  misc_feature (1)..(25): SEQ ID NO: 911; WAN024C52; Start 145; Stop 169
attttgattatctcaacaccacagg

SEQ ID NO: 277434 - DNA, 25 bp, Artificial
  probe
  misc_feature (1)..(25): SEQ ID NO: 911; WAN024C52; Start 153; Stop 177
tatctcaacaccacaggatttgccc

SEQ ID NO: 277435 - DNA, 25 bp, Artificial
  probe
  misc_feature (1)..(25): SEQ ID NO: 912; WAN024C4Y; Start 778; Stop 802
tatattagtcgtgaagatgtgctgg

SEQ ID NO: 277436 - DNA, 25 bp, Artificial
  probe
  misc_feature (1)..(25): SEQ ID NO: 912; WAN024C4Y; Start 775; Stop 799
ggttatattagtcgtgaagatgtgc

SEQ ID NO: 277437 - DNA, 25 bp, Artificial
  probe
  misc_feature (1)..(25): SEQ ID NO: 912; WAN024C4Y; Start 777; Stop 801
ttatattagtcgtgaagatgtgctg

SEQ ID NO: 277438 - DNA, 25 bp, Artificial
  probe
  misc_feature (1)..(25): SEQ ID NO: 912; WAN024C4Y; Start 776; Stop 800
gttatattagtcgtgaagatgtgct

SEQ ID NO: 277439 - DNA, 25 bp, Artificial
  probe
  misc_feature (1)..(25): SEQ ID NO: 912; WAN024C4Y; Start 779; Stop 803
atattagtcgtgaagatgtgctgga

SEQ ID NO: 277440 - DNA, 25 bp, Artificial
  probe
  misc_feature (1)..(25): SEQ ID NO: 912; WAN024C4Y; Start 780; Stop 804
tattagtcgtgaagatgtgctggag

SEQ ID NO: 277441 - DNA, 25 bp, Artificial
  probe
  misc_feature (1)..(25): SEQ ID NO: 912; WAN024C4Y; Start 823; Stop 847
aagaatgaatacggacagtatctgc

SEQ ID NO: 277442 - DNA, 25 bp, Artificial
  probe
  misc_feature (1)..(25): SEQ ID NO: 912; WAN024C4Y; Start 822; Stop 846
gaagaatgaatacggacagtatctg

SEQ ID NO: 277443 - DNA, 25 bp, Artificial
  probe
  misc_feature (1)..(25): SEQ ID NO: 912; WAN024C4Y; Start 821; Stop 845
agaagaatgaatacggacagtatct

SEQ ID NO: 277444 - DNA, 25 bp, Artificial
  probe
  misc_feature (1)..(25): SEQ ID NO: 912; WAN024C4Y; Start 825; Stop 849
gaatgaatacggacagtatctgctc

SEQ ID NO: 277445 - DNA, 25 bp, Artificial
  probe
  misc_feature (1)..(25): SEQ ID NO: 912; WAN024C4Y; Start 818; Stop 842
ttaagaagaatgaatacggacagta

SEQ ID NO: 277446 - DNA, 25 bp, Artificial
  probe
  misc_feature (1)..(25): SEQ ID NO: 912; WAN024C4Y; Start 824; Stop 848
agaatgaatacggacagtatctgct

SEQ ID NO: 277447 - DNA, 25 bp, Artificial
  probe
  misc_feature (1)..(25): SEQ ID NO: 912; WAN024C4Y; Start 820; Stop 844
aagaagaatgaatacggacagtatc

SEQ ID NO: 277448 - DNA, 25 bp, Artificial
  probe
  misc_feature (1)..(25): SEQ ID NO: 912; WAN024C4Y; Start 124; Stop 148
atgttggcgggtattaaggatattt

SEQ ID NO: 277449 - DNA, 25 bp, Artificial
  probe
  misc_feature (1)..(25): SEQ ID NO: 912; WAN024C4Y; Start 773; Stop 797
tgggttatattagtcgtgaagatgt

SEQ ID NO: 277450 - DNA, 25 bp, Artificial
  probe
  misc_feature (1)..(25): SEQ ID NO: 912; WAN024C4Y; Start 123; Stop 147
gatgttggcgggtattaaggatatt

SEQ ID NO: 277451 - DNA, 25 bp, Artificial
  probe
  misc_feature (1)..(25): SEQ ID NO: 912; WAN024C4Y; Start 774; Stop 798
gggttatattagtcgtgaagatgtg

SEQ ID NO: 277452 - DNA, 25 bp, Artificial
  probe
  misc_feature (1)..(25): SEQ ID NO: 912; WAN024C4Y; Start 304; Stop 328
gttgctttaatcttgggtgacaata

SEQ ID NO: 277453 - DNA, 25 bp, Artificial
  probe
  misc_feature (1)..(25): SEQ ID NO: 912; WAN024C4Y; Start 545; Stop 569
aaattgccaagagtatcaaaccaag

SEQ ID NO: 277454 - DNA, 25 bp, Artificial
  probe
  misc_feature (1)..(25): SEQ ID NO: 912; WAN024C4Y; Start 544; Stop 568
gaaattgccaagagtatcaaaccaa

SEQ ID NO: 277455 - DNA, 25 bp, Artificial
  probe
  misc_feature (1)..(25): SEQ ID NO: 912; WAN024C4Y; Start 580; Stop 604
gagttagaaatcacagatgtcaaca

SEQ ID NO: 277456 - DNA, 25 bp, Artificial
  probe
  misc_feature (1)..(25): SEQ ID NO: 912; WAN024C4Y; Start 326; Stop 350
atatttatcacggtccaggtttgag

SEQ ID NO: 277457 - DNA, 25 bp, Artificial
  probe
  misc_feature (1)..(25): SEQ ID NO: 912; WAN024C4Y; Start 611; Stop 635
acttggatcgtggtaatttatctgt

SEQ ID NO: 277458 - DNA, 25 bp, Artificial
  probe
  misc_feature (1)..(25): SEQ ID NO: 912; WAN024C4Y; Start 122; Stop 146
tgatgttggcgggtattaaggatat

SEQ ID NO: 277459 - DNA, 25 bp, Artificial
  probe
  misc_feature (1)..(25): SEQ ID NO: 912; WAN024C4Y; Start 1; Stop 25
atgaaaggtattattcttgcgggtg

SEQ ID NO: 277460 - DNA, 25 bp, Artificial
  probe
  misc_feature (1)..(25): SEQ ID NO: 912; WAN024C4Y; Start 612; Stop 636
cttggatcgtggtaatttatctgtc

SEQ ID NO: 277461 - DNA, 25 bp, Artificial
  probe
  misc_feature (1)..(25): SEQ ID NO: 912; WAN024C4Y; Start 305; Stop 329
ttgctttaatcttgggtgacaatat

SEQ ID NO: 277462 - DNA, 25 bp, Artificial
  probe
  misc_feature (1)..(25): SEQ ID NO: 912; WAN024C4Y; Start 772; Stop 796
atgggttatattagtcgtgaagatg

SEQ ID NO: 277463 - DNA, 25 bp, Artificial
  probe
  misc_feature (1)..(25): SEQ ID NO: 912; WAN024C4Y; Start 150; Stop 174
gattatttcaacgccacaggatttg

SEQ ID NO: 277464 - DNA, 25 bp, Artificial
  probe
  misc_feature (1)..(25): SEQ ID NO: 912; WAN024C4Y; Start 579; Stop 603
tgagttagaaatcacagatgtcaac

SEQ ID NO: 277465 - DNA, 25 bp, Artificial
  probe
  misc_feature (1)..(25): SEQ ID NO: 912; WAN024C4Y; Start 546; Stop 570
aattgccaagagtatcaaaccaagt

SEQ ID NO: 277466 - DNA, 25 bp, Artificial
  probe
  misc_feature (1)..(25): SEQ ID NO: 912; WAN024C4Y; Start 765; Stop 789
ctatcgcatgggttatattagtcgt

SEQ ID NO: 277467 - DNA, 25 bp, Artificial
  probe
  misc_feature (1)..(25): SEQ ID NO: 912; WAN024C4Y; Start 766; Stop 790
tatcgcatgggttatattagtcgtg

SEQ ID NO: 277468 - DNA, 25 bp, Artificial
  probe
  misc_feature (1)..(25): SEQ ID NO: 913; WAN024AY3; Start 608; Stop 632
cttacttggatcgtggagacttatc

SEQ ID NO: 277469 - DNA, 25 bp, Artificial
  probe
  misc_feature (1)..(25): SEQ ID NO: 913; WAN024AY3; Start 447; Stop 471
tacagacatgaatgctatctccatc

SEQ ID NO: 277470 - DNA, 25 bp, Artificial
  probe
  misc_feature (1)..(25): SEQ ID NO: 913; WAN024AY3; Start 446; Stop 470
atacagacatgaatgctatctccat

SEQ ID NO: 277471 - DNA, 25 bp, Artificial
  probe
  misc_feature (1)..(25): SEQ ID NO: 913; WAN024AY3; Start 445; Stop 469
gatacagacatgaatgctatctcca

SEQ ID NO: 277472 - DNA, 25 bp, Artificial
  probe
  misc_feature (1)..(25): SEQ ID NO: 913; WAN024AY3; Start 444; Stop 468
tgatacagacatgaatgctatctcc

SEQ ID NO: 277473 - DNA, 25 bp, Artificial
  probe
  misc_feature (1)..(25): SEQ ID NO: 913; WAN024AY3; Start 607; Stop 631
gcttacttggatcgtggagacttat

SEQ ID NO: 277474 - DNA, 25 bp, Artificial
  probe
  misc_feature (1)..(25): SEQ ID NO: 913; WAN024AY3; Start 453; Stop 477
catgaatgctatctccatcgaagaa

SEQ ID NO: 277475 - DNA, 25 bp, Artificial
  probe
  misc_feature (1)..(25): SEQ ID NO: 913; WAN024AY3; Start 443; Stop 467
ttgatacagacatgaatgctatctc

SEQ ID NO: 277476 - DNA, 25 bp, Artificial
  probe
  misc_feature (1)..(25): SEQ ID NO: 913; WAN024AY3; Start 576; Stop 600
cggagaattagaaatcacagatgtc

SEQ ID NO: 277477 - DNA, 25 bp, Artificial
  probe
  misc_feature (1)..(25): SEQ ID NO: 913; WAN024AY3; Start 451; Stop 475
gacatgaatgctatctccatcgaag

SEQ ID NO: 277478 - DNA, 25 bp, Artificial
  probe
  misc_feature (1)..(25): SEQ ID NO: 913; WAN024AY3; Start 452; Stop 476
acatgaatgctatctccatcgaaga

SEQ ID NO: 277479 - DNA, 25 bp, Artificial
  probe
  misc_feature (1)..(25): SEQ ID NO: 913; WAN024AY3; Start 450; Stop 474
agacatgaatgctatctccatcgaa

SEQ ID NO: 277480 - DNA, 25 bp, Artificial
  probe
  misc_feature (1)..(25): SEQ ID NO: 913; WAN024AY3; Start 575; Stop 599
gcggagaattagaaatcacagatgt

SEQ ID NO: 277481 - DNA, 25 bp, Artificial
  probe
  misc_feature (1)..(25): SEQ ID NO: 913; WAN024AY3; Start 481; Stop 505
ccagaataccctcgttcaaactatg

SEQ ID NO: 277482 - DNA, 25 bp, Artificial
  probe
  misc_feature (1)..(25): SEQ ID NO: 913; WAN024AY3; Start 448; Stop 472
acagacatgaatgctatctccatcg

SEQ ID NO: 277483 - DNA, 25 bp, Artificial
  probe
  misc_feature (1)..(25): SEQ ID NO: 913; WAN024AY3; Start 577; Stop 601
ggagaattagaaatcacagatgtca

SEQ ID NO: 277484 - DNA, 25 bp, Artificial
  probe
  misc_feature (1)..(25): SEQ ID NO: 913; WAN024AY3; Start 499; Stop 523
aactatgcagtgacaggactctatt

SEQ ID NO: 277485 - DNA, 25 bp, Artificial
  probe
  misc_feature (1)..(25): SEQ ID NO: 913; WAN024AY3; Start 482; Stop 506
cagaataccctcgttcaaactatgc

SEQ ID NO: 277486 - DNA, 25 bp, Artificial
  probe
  misc_feature (1)..(25): SEQ ID NO: 913; WAN024AY3; Start 547; Stop 571
attgccaagagtatcaaaccaagtc

SEQ ID NO: 277487 - DNA, 25 bp, Artificial
  probe
  misc_feature (1)..(25): SEQ ID NO: 913; WAN024AY3; Start 449; Stop 473
cagacatgaatgctatctccatcga

SEQ ID NO: 277488 - DNA, 25 bp, Artificial
  probe
  misc_feature (1)..(25): SEQ ID NO: 913; WAN024AY3; Start 582; Stop 606
attagaaatcacagatgtcaacaag

SEQ ID NO: 277489 - DNA, 25 bp, Artificial
  probe
  misc_feature (1)..(25): SEQ ID NO: 913; WAN024AY3; Start 580; Stop 604
gaattagaaatcacagatgtcaaca

SEQ ID NO: 277490 - DNA, 25 bp, Artificial
  probe
  misc_feature (1)..(25): SEQ ID NO: 913; WAN024AY3; Start 621; Stop 645
tggagacttatccgttgagcttatg

SEQ ID NO: 277491 - DNA, 25 bp, Artificial
  probe
  misc_feature (1)..(25): SEQ ID NO: 913; WAN024AY3; Start 620; Stop 644
gtggagacttatccgttgagcttat

SEQ ID NO: 277492 - DNA, 25 bp, Artificial
  probe
  misc_feature (1)..(25): SEQ ID NO: 913; WAN024AY3; Start 579; Stop 603
agaattagaaatcacagatgtcaac

SEQ ID NO: 277493 - DNA, 25 bp, Artificial
  probe
  misc_feature (1)..(25): SEQ ID NO: 913; WAN024AY3; Start 480; Stop 504
gccagaataccctcgttcaaactat

SEQ ID NO: 277494 - DNA, 25 bp, Artificial
  probe
  misc_feature (1)..(25): SEQ ID NO: 913; WAN024AY3; Start 581; Stop 605
aattagaaatcacagatgtcaacaa

SEQ ID NO: 277495 - DNA, 25 bp, Artificial
  probe
  misc_feature (1)..(25): SEQ ID NO: 913; WAN024AY3; Start 606; Stop 630
ggcttacttggatcgtggagactta

SEQ ID NO: 277496 - DNA, 25 bp, Artificial
  probe
  misc_feature (1)..(25): SEQ ID NO: 913; WAN024AY3; Start 578; Stop 602
gagaattagaaatcacagatgtcaa

SEQ ID NO: 277497 - DNA, 25 bp, Artificial
  probe
  misc_feature (1)..(25): SEQ ID NO: 913; WAN024AY3; Start 441; Stop 465
gtttgatacagacatgaatgctatc

SEQ ID NO: 277498 - DNA, 25 bp, Artificial
  probe
  misc_feature (1)..(25): SEQ ID NO: 913; WAN024AY3; Start 442; Stop 466
tttgatacagacatgaatgctatct

SEQ ID NO: 277499 - DNA, 25 bp, Artificial
  probe
  misc_feature (1)..(25): SEQ ID NO: 913; WAN024AY3; Start 501; Stop 525
ctatgcagtgacaggactctatttc

SEQ ID NO: 277500 - DNA, 25 bp, Artificial
  probe
  misc_feature (1)..(25): SEQ ID NO: 913; WAN024AY3; Start 622; Stop 646
ggagacttatccgttgagcttatgg

SEQ ID NO: 277501 - DNA, 25 bp, Artificial
  probe
  misc_feature (1)..(25): SEQ ID NO: 914; WAN024G49; Start 749; Stop 773
attcgcctctaatgattcctattgg

SEQ ID NO: 277502 - DNA, 25 bp, Artificial
  probe
  misc_feature (1)..(25): SEQ ID NO: 914; WAN024G49; Start 746; Stop 770
ccaattcgcctctaatgattcctat

SEQ ID NO: 277503 - DNA, 25 bp, Artificial
  probe
  misc_feature (1)..(25): SEQ ID NO: 914; WAN024G49; Start 755; Stop 779
ctctaatgattcctattggcaagca

SEQ ID NO: 277504 - DNA, 25 bp, Artificial
  probe
  misc_feature (1)..(25): SEQ ID NO: 914; WAN024G49; Start 756; Stop 780
tctaatgattcctattggcaagcac

SEQ ID NO: 277505 - DNA, 25 bp, Artificial
  probe
  misc_feature (1)..(25): SEQ ID NO: 914; WAN024G49; Start 748; Stop 772
aattcgcctctaatgattcctattg

SEQ ID NO: 277506 - DNA, 25 bp, Artificial
  probe
  misc_feature (1)..(25): SEQ ID NO: 914; WAN024G49; Start 747; Stop 771
caattcgcctctaatgattcctatt

SEQ ID NO: 277507 - DNA, 25 bp, Artificial
  probe
  misc_feature (1)..(25): SEQ ID NO: 914; WAN024G49; Start 745; Stop 769
tccaattcgcctctaatgattccta

SEQ ID NO: 277508 - DNA, 25 bp, Artificial
  probe
  misc_feature (1)..(25): SEQ ID NO: 914; WAN024G49; Start 754; Stop 778
cctctaatgattcctattggcaagc

SEQ ID NO: 277509 - DNA, 25 bp, Artificial
  probe
  misc_feature (1)..(25): SEQ ID NO: 914; WAN024G49; Start 528; Stop 552
agaactattagacctcttgactgat

SEQ ID NO: 277510 - DNA, 25 bp, Artificial
  probe
  misc_feature (1)..(25): SEQ ID NO: 914; WAN024G49; Start 757; Stop 781
ctaatgattcctattggcaagcacc

SEQ ID NO: 277511 - DNA, 25 bp, Artificial
  probe
  misc_feature (1)..(25): SEQ ID NO: 914; WAN024G49; Start 744; Stop 768
ttccaattcgcctctaatgattcct

SEQ ID NO: 277512 - DNA, 25 bp, Artificial
  probe
  misc_feature (1)..(25): SEQ ID NO: 914; WAN024G49; Start 529; Stop 553
gaactattagacctcttgactgatc

SEQ ID NO: 277513 - DNA, 25 bp, Artificial
  probe
  misc_feature (1)..(25): SEQ ID NO: 914; WAN024G49; Start 527; Stop 551
tagaactattagacctcttgactga

SEQ ID NO: 277514 - DNA, 25 bp, Artificial
  probe
  misc_feature (1)..(25): SEQ ID NO: 914; WAN024G49; Start 530; Stop 554
aactattagacctcttgactgatct

SEQ ID NO: 277515 - DNA, 25 bp, Artificial
  probe
  misc_feature (1)..(25): SEQ ID NO: 914; WAN024G49; Start 244; Stop 268
ttacctcaatctccaataatccctg

SEQ ID NO: 277516 - DNA, 25 bp, Artificial
  probe
  misc_feature (1)..(25): SEQ ID NO: 914; WAN024G49; Start 742; Stop 766
atttccaattcgcctctaatgattc

SEQ ID NO: 277517 - DNA, 25 bp, Artificial
  probe
  misc_feature (1)..(25): SEQ ID NO: 914; WAN024G49; Start 739; Stop 763
cctatttccaattcgcctctaatga

SEQ ID NO: 277518 - DNA, 25 bp, Artificial
  probe
  misc_feature (1)..(25): SEQ ID NO: 914; WAN024G49; Start 427; Stop 451
ggtcaaaggcaaagagtatggatag

SEQ ID NO: 277519 - DNA, 25 bp, Artificial
  probe
  misc_feature (1)..(25): SEQ ID NO: 914; WAN024G49; Start 740; Stop 764
ctatttccaattcgcctctaatgat

SEQ ID NO: 277520 - DNA, 25 bp, Artificial
  probe
  misc_feature (1)..(25): SEQ ID NO: 914; WAN024G49; Start 611; Stop 635
caagatacgctgattacctatttgc

SEQ ID NO: 277521 - DNA, 25 bp, Artificial
  probe
  misc_feature (1)..(25): SEQ ID NO: 914; WAN024G49; Start 610; Stop 634
gcaagatacgctgattacctatttg

SEQ ID NO: 277522 - DNA, 25 bp, Artificial
  probe
  misc_feature (1)..(25): SEQ ID NO: 914; WAN024G49; Start 591; Stop 615
gcacgatataaatctaacagcaaga

SEQ ID NO: 277523 - DNA, 25 bp, Artificial
  probe
  misc_feature (1)..(25): SEQ ID NO: 914; WAN024G49; Start 98; Stop 122
ttattattgggtcaaatggttgtgg

SEQ ID NO: 277524 - DNA, 25 bp, Artificial
  probe
  misc_feature (1)..(25): SEQ ID NO: 914; WAN024G49; Start 250; Stop 274
caatctccaataatccctgaatcaa

SEQ ID NO: 277525 - DNA, 25 bp, Artificial
  probe
  misc_feature (1)..(25): SEQ ID NO: 914; WAN024G49; Start 247; Stop 271
cctcaatctccaataatccctgaat

SEQ ID NO: 277526 - DNA, 25 bp, Artificial
  probe
  misc_feature (1)..(25): SEQ ID NO: 914; WAN024G49; Start 526; Stop 550
atagaactattagacctcttgactg

SEQ ID NO: 277527 - DNA, 25 bp, Artificial
  probe
  misc_feature (1)..(25): SEQ ID NO: 914; WAN024G49; Start 245; Stop 269
tacctcaatctccaataatccctga

SEQ ID NO: 277528 - DNA, 25 bp, Artificial
  probe
  misc_feature (1)..(25): SEQ ID NO: 914; WAN024G49; Start 249; Stop 273
tcaatctccaataatccctgaatca

SEQ ID NO: 277529 - DNA, 25 bp, Artificial
  probe
  misc_feature (1)..(25): SEQ ID NO: 914; WAN024G49; Start 243; Stop 267
attacctcaatctccaataatccct

SEQ ID NO: 277530 - DNA, 25 bp, Artificial
  probe
  misc_feature (1)..(25): SEQ ID NO: 914; WAN024G49; Start 743; Stop 767
tttccaattcgcctctaatgattcc

SEQ ID NO: 277531 - DNA, 25 bp, Artificial
  probe
  misc_feature (1)..(25): SEQ ID NO: 914; WAN024G49; Start 741; Stop 765
tatttccaattcgcctctaatgatt

SEQ ID NO: 277532 - DNA, 25 bp, Artificial
  probe
  misc_feature (1)..(25): SEQ ID NO: 914; WAN024G49; Start 428; Stop 452
gtcaaaggcaaagagtatggatagc

SEQ ID NO: 277533 - DNA, 25 bp, Artificial
  probe
  misc_feature (1)..(25): SEQ ID NO: 914; WAN024G49; Start 738; Stop 762
ccctatttccaattcgcctctaatg

SEQ ID NO: 277534 - DNA, 25 bp, Artificial
  probe
  misc_feature (1)..(25): SEQ ID NO: 915; WAN024DUD; Start 1042; Stop 1066
cgagatggagaactgacaatactta

SEQ ID NO: 277535 - DNA, 25 bp, Artificial
  probe
  misc_feature (1)..(25): SEQ ID NO: 915; WAN024DUD; Start 601; Stop 625
ttgctgatagtggatgaagtagatg

SEQ ID NO: 277536 - DNA, 25 bp, Artificial
  probe
  misc_feature (1)..(25): SEQ ID NO: 915; WAN024DUD; Start 604; Stop 628
ctgatagtggatgaagtagatgctt

SEQ ID NO: 277537 - DNA, 25 bp, Artificial
  probe
  misc_feature (1)..(25): SEQ ID NO: 915; WAN024DUD; Start 831; Stop 855
taatcgctacttagacaagaatcgt

SEQ ID NO: 277538 - DNA, 25 bp, Artificial
  probe
  misc_feature (1)..(25): SEQ ID NO: 915; WAN024DUD; Start 832; Stop 856
aatcgctacttagacaagaatcgtt

SEQ ID NO: 277539 - DNA, 25 bp, Artificial
  probe
  misc_feature (1)..(25): SEQ ID NO: 915; WAN024DUD; Start 871; Stop 895
aagtcctatattgagaagcagagaa

SEQ ID NO: 277540 - DNA, 25 bp, Artificial
  probe
  misc_feature (1)..(25): SEQ ID NO: 915; WAN024DUD; Start 1272; Stop 1296
gatgatgaataaggaggctggtcta

SEQ ID NO: 277541 - DNA, 25 bp, Artificial
  probe
  misc_feature (1)..(25): SEQ ID NO: 915; WAN024DUD; Start 830; Stop 854
ttaatcgctacttagacaagaatcg

SEQ ID NO: 277542 - DNA, 25 bp, Artificial
  probe
  misc_feature (1)..(25): SEQ ID NO: 915; WAN024DUD; Start 514; Stop 538
ctacatggagaatcggaaccttatt

SEQ ID NO: 277543 - DNA, 25 bp, Artificial
  probe
  misc_feature (1)..(25): SEQ ID NO: 915; WAN024DUD; Start 603; Stop 627
gctgatagtggatgaagtagatgct

SEQ ID NO: 277544 - DNA, 25 bp, Artificial
  probe
  misc_feature (1)..(25): SEQ ID NO: 915; WAN024DUD; Start 1063; Stop 1087
cttatcagtacgacaatcttggagc

SEQ ID NO: 277545 - DNA, 25 bp, Artificial
  probe
  misc_feature (1)..(25): SEQ ID NO: 915; WAN024DUD; Start 1062; Stop 1086
acttatcagtacgacaatcttggag

SEQ ID NO: 277546 - DNA, 25 bp, Artificial
  probe
  misc_feature (1)..(25): SEQ ID NO: 915; WAN024DUD; Start 1043; Stop 1067
gagatggagaactgacaatacttat

SEQ ID NO: 277547 - DNA, 25 bp, Artificial
  probe
  misc_feature (1)..(25): SEQ ID NO: 915; WAN024DUD; Start 1044; Stop 1068
agatggagaactgacaatacttatc

SEQ ID NO: 277548 - DNA, 25 bp, Artificial
  probe
  misc_feature (1)..(25): SEQ ID NO: 915; WAN024DUD; Start 602; Stop 626
tgctgatagtggatgaagtagatgc

SEQ ID NO: 277549 - DNA, 25 bp, Artificial
  probe
  misc_feature (1)..(25): SEQ ID NO: 915; WAN024DUD; Start 1045; Stop 1069
gatggagaactgacaatacttatca

SEQ ID NO: 277550 - DNA, 25 bp, Artificial
  probe
  misc_feature (1)..(25): SEQ ID NO: 915; WAN024DUD; Start 41; Stop 65
agaatgaattaacagaagaagaacg

SEQ ID NO: 277551 - DNA, 25 bp, Artificial
  probe
  misc_feature (1)..(25): SEQ ID NO: 915; WAN024DUD; Start 1242; Stop 1266
ttcaatcaagaaggcgattaaggaa

SEQ ID NO: 277552 - DNA, 25 bp, Artificial
  probe
  misc_feature (1)..(25): SEQ ID NO: 915; WAN024DUD; Start 1041; Stop 1065
tcgagatggagaactgacaatactt

SEQ ID NO: 277553 - DNA, 25 bp, Artificial
  probe
  misc_feature (1)..(25): SEQ ID NO: 915; WAN024DUD; Start 597; Stop 621
tgatttgctgatagtggatgaagta

SEQ ID NO: 277554 - DNA, 25 bp, Artificial
  probe
  misc_feature (1)..(25): SEQ ID NO: 915; WAN024DUD; Start 23; Stop 47
tcggtcgtttatttactgagaatga

SEQ ID NO: 277555 - DNA, 25 bp, Artificial
  probe
  misc_feature (1)..(25): SEQ ID NO: 915; WAN024DUD; Start 661; Stop 685
gctgtcaagaatagtgtaaaggaga

SEQ ID NO: 277556 - DNA, 25 bp, Artificial
  probe
  misc_feature (1)..(25): SEQ ID NO: 915; WAN024DUD; Start 673; Stop 697
agtgtaaaggagaatggattgagaa

SEQ ID NO: 277557 - DNA, 25 bp, Artificial
  probe
  misc_feature (1)..(25): SEQ ID NO: 915; WAN024DUD; Start 595; Stop 619
tttgatttgctgatagtggatgaag

SEQ ID NO: 277558 - DNA, 25 bp, Artificial
  probe
  misc_feature (1)..(25): SEQ ID NO: 915; WAN024DUD; Start 600; Stop 624
tttgctgatagtggatgaagtagat

SEQ ID NO: 277559 - DNA, 25 bp, Artificial
  probe
  misc_feature (1)..(25): SEQ ID NO: 915; WAN024DUD; Start 599; Stop 623
atttgctgatagtggatgaagtaga

SEQ ID NO: 277560 - DNA, 25 bp, Artificial
  probe
  misc_feature (1)..(25): SEQ ID NO: 915; WAN024DUD; Start 596; Stop 620
ttgatttgctgatagtggatgaagt

SEQ ID NO: 277561 - DNA, 25 bp, Artificial
  probe
  misc_feature (1)..(25): SEQ ID NO: 915; WAN024DUD; Start 46; Stop 70
gaattaacagaagaagaacgtcagt

SEQ ID NO: 277562 - DNA, 25 bp, Artificial
  probe
  misc_feature (1)..(25): SEQ ID NO: 915; WAN024DUD; Start 24; Stop 48
cggtcgtttatttactgagaatgaa

SEQ ID NO: 277563 - DNA, 25 bp, Artificial
  probe
  misc_feature (1)..(25): SEQ ID NO: 915; WAN024DUD; Start 513; Stop 537
gctacatggagaatcggaaccttat

SEQ ID NO: 277564 - DNA, 25 bp, Artificial
  probe
  misc_feature (1)..(25): SEQ ID NO: 915; WAN024DUD; Start 710; Stop 734
cgacttcgaccaatgagttagataa

SEQ ID NO: 277565 - DNA, 25 bp, Artificial
  probe
  misc_feature (1)..(25): SEQ ID NO: 915; WAN024DUD; Start 598; Stop 622
gatttgctgatagtggatgaagtag

SEQ ID NO: 277566 - DNA, 25 bp, Artificial
  probe
  misc_feature (1)..(25): SEQ ID NO: 915; WAN024DUD; Start 1040; Stop 1064
ttcgagatggagaactgacaatact

SEQ ID NO: 277567 - DNA, 25 bp, Artificial
  probe
  misc_feature (1)..(25): SEQ ID NO: 916; WAN024DZJ; Start 777; Stop 801
tatcagtatgttagaagcaatggca

SEQ ID NO: 277568 - DNA, 25 bp, Artificial
  probe
  misc_feature (1)..(25): SEQ ID NO: 916; WAN024DZJ; Start 776; Stop 800
ctatcagtatgttagaagcaatggc

SEQ ID NO: 277569 - DNA, 25 bp, Artificial
  probe
  misc_feature (1)..(25): SEQ ID NO: 916; WAN024DZJ; Start 433; Stop 457
attaggaatggtgtggatggatatt

SEQ ID NO: 277570 - DNA, 25 bp, Artificial
  probe
  misc_feature (1)..(25): SEQ ID NO: 916; WAN024DZJ; Start 778; Stop 802
atcagtatgttagaagcaatggcaa

SEQ ID NO: 277571 - DNA, 25 bp, Artificial
  probe
  misc_feature (1)..(25): SEQ ID NO: 916; WAN024DZJ; Start 775; Stop 799
cctatcagtatgttagaagcaatgg

SEQ ID NO: 277572 - DNA, 25 bp, Artificial
  probe
  misc_feature (1)..(25): SEQ ID NO: 916; WAN024DZJ; Start 432; Stop 456
aattaggaatggtgtggatggatat

SEQ ID NO: 277573 - DNA, 25 bp, Artificial
  probe
  misc_feature (1)..(25): SEQ ID NO: 916; WAN024DZJ; Start 304; Stop 328
agacaacatccgactctaatgataa

SEQ ID NO: 277574 - DNA, 25 bp, Artificial
  probe
  misc_feature (1)..(25): SEQ ID NO: 916; WAN024DZJ; Start 774; Stop 798
acctatcagtatgttagaagcaatg

SEQ ID NO: 277575 - DNA, 25 bp, Artificial
  probe
  misc_feature (1)..(25): SEQ ID NO: 916; WAN024DZJ; Start 303; Stop 327
gagacaacatccgactctaatgata

SEQ ID NO: 277576 - DNA, 25 bp, Artificial
  probe
  misc_feature (1)..(25): SEQ ID NO: 916; WAN024DZJ; Start 305; Stop 329
gacaacatccgactctaatgataat

SEQ ID NO: 277577 - DNA, 25 bp, Artificial
  probe
  misc_feature (1)..(25): SEQ ID NO: 916; WAN024DZJ; Start 429; Stop 453
aataattaggaatggtgtggatgga

SEQ ID NO: 277578 - DNA, 25 bp, Artificial
  probe
  misc_feature (1)..(25): SEQ ID NO: 916; WAN024DZJ; Start 1012; Stop 1036
tatcagcaattagagaggatagcaa

SEQ ID NO: 277579 - DNA, 25 bp, Artificial
  probe
  misc_feature (1)..(25): SEQ ID NO: 916; WAN024DZJ; Start 1011; Stop 1035
ttatcagcaattagagaggatagca

SEQ ID NO: 277580 - DNA, 25 bp, Artificial
  probe
  misc_feature (1)..(25): SEQ ID NO: 916; WAN024DZJ; Start 430; Stop 454
ataattaggaatggtgtggatggat

SEQ ID NO: 277581 - DNA, 25 bp, Artificial
  probe
  misc_feature (1)..(25): SEQ ID NO: 916; WAN024DZJ; Start 559; Stop 583
ttagaagttgctaagaagatggtgg

SEQ ID NO: 277582 - DNA, 25 bp, Artificial
  probe
  misc_feature (1)..(25): SEQ ID NO: 916; WAN024DZJ; Start 302; Stop 326
tgagacaacatccgactctaatgat

SEQ ID NO: 277583 - DNA, 25 bp, Artificial
  probe
  misc_feature (1)..(25): SEQ ID NO: 916; WAN024DZJ; Start 301; Stop 325
atgagacaacatccgactctaatga

SEQ ID NO: 277584 - DNA, 25 bp, Artificial
  probe
  misc_feature (1)..(25): SEQ ID NO: 916; WAN024DZJ; Start 431; Stop 455
taattaggaatggtgtggatggata

SEQ ID NO: 277585 - DNA, 25 bp, Artificial
  probe
  misc_feature (1)..(25): SEQ ID NO: 916; WAN024DZJ; Start 558; Stop 582
attagaagttgctaagaagatggtg

SEQ ID NO: 277586 - DNA, 25 bp, Artificial
  probe
  misc_feature (1)..(25): SEQ ID NO: 916; WAN024DZJ; Start 832; Stop 856
ggagttgtgtcagaggtgattaata

SEQ ID NO: 277587 - DNA, 25 bp, Artificial
  probe
  misc_feature (1)..(25): SEQ ID NO: 916; WAN024DZJ; Start 808; Stop 832
ctctatattattgtaagcgatgtgg

SEQ ID NO: 277588 - DNA, 25 bp, Artificial
  probe
  misc_feature (1)..(25): SEQ ID NO: 916; WAN024DZJ; Start 306; Stop 330
acaacatccgactctaatgataata

SEQ ID NO: 277589 - DNA, 25 bp, Artificial
  probe
  misc_feature (1)..(25): SEQ ID NO: 916; WAN024DZJ; Start 879; Stop 903
aatgataaacgaagaaacagcagac

SEQ ID NO: 277590 - DNA, 25 bp, Artificial
  probe
  misc_feature (1)..(25): SEQ ID NO: 916; WAN024DZJ; Start 876; Stop 900
tgaaatgataaacgaagaaacagca

SEQ ID NO: 277591 - DNA, 25 bp, Artificial
  probe
  misc_feature (1)..(25): SEQ ID NO: 916; WAN024DZJ; Start 813; Stop 837
tattattgtaagcgatgtgggagtt

SEQ ID NO: 277592 - DNA, 25 bp, Artificial
  probe
  misc_feature (1)..(25): SEQ ID NO: 916; WAN024DZJ; Start 781; Stop 805
agtatgttagaagcaatggcaaatg

SEQ ID NO: 277593 - DNA, 25 bp, Artificial
  probe
  misc_feature (1)..(25): SEQ ID NO: 916; WAN024DZJ; Start 780; Stop 804
cagtatgttagaagcaatggcaaat

SEQ ID NO: 277594 - DNA, 25 bp, Artificial
  probe
  misc_feature (1)..(25): SEQ ID NO: 916; WAN024DZJ; Start 812; Stop 836
atattattgtaagcgatgtgggagt

SEQ ID NO: 277595 - DNA, 25 bp, Artificial
  probe
  misc_feature (1)..(25): SEQ ID NO: 916; WAN024DZJ; Start 804; Stop 828
tggtctctatattattgtaagcgat

SEQ ID NO: 277596 - DNA, 25 bp, Artificial
  probe
  misc_feature (1)..(25): SEQ ID NO: 916; WAN024DZJ; Start 803; Stop 827
atggtctctatattattgtaagcga

SEQ ID NO: 277597 - DNA, 25 bp, Artificial
  probe
  misc_feature (1)..(25): SEQ ID NO: 916; WAN024DZJ; Start 688; Stop 712
gatggtgtatatggtagtgataaga

SEQ ID NO: 277598 - DNA, 25 bp, Artificial
  probe
  misc_feature (1)..(25): SEQ ID NO: 916; WAN024DZJ; Start 687; Stop 711
agatggtgtatatggtagtgataag

SEQ ID NO: 277599 - DNA, 25 bp, Artificial
  probe
  misc_feature (1)..(25): SEQ ID NO: 916; WAN024DZJ; Start 772; Stop 796
ttacctatcagtatgttagaagcaa

SEQ ID NO: 277600 - DNA, 25 bp, Artificial
  probe
  misc_feature (1)..(25): SEQ ID NO: 917; WAN024C8H; Start 47; Stop 71
ttattcgtcgtaatggtcgtgttat

SEQ ID NO: 277601 - DNA, 25 bp, Artificial
  probe
  misc_feature (1)..(25): SEQ ID NO: 917; WAN024C8H; Start 54; Stop 78
tcgtaatggtcgtgttatggtaatt

SEQ ID NO: 277602 - DNA, 25 bp, Artificial
  probe
  misc_feature (1)..(25): SEQ ID NO: 917; WAN024C8H; Start 53; Stop 77
gtcgtaatggtcgtgttatggtaat

SEQ ID NO: 277603 - DNA, 25 bp, Artificial
  probe
  misc_feature (1)..(25): SEQ ID NO: 917; WAN024C8H; Start 48; Stop 72
tattcgtcgtaatggtcgtgttatg

SEQ ID NO: 277604 - DNA, 25 bp, Artificial
  probe
  misc_feature (1)..(25): SEQ ID NO: 917; WAN024C8H; Start 46; Stop 70
gttattcgtcgtaatggtcgtgtta

SEQ ID NO: 277605 - DNA, 25 bp, Artificial
  probe
  misc_feature (1)..(25): SEQ ID NO: 917; WAN024C8H; Start 45; Stop 69
agttattcgtcgtaatggtcgtgtt

SEQ ID NO: 277606 - DNA, 25 bp, Artificial
  probe
  misc_feature (1)..(25): SEQ ID NO: 917; WAN024C8H; Start 44; Stop 68
aagttattcgtcgtaatggtcgtgt

SEQ ID NO: 277607 - DNA, 25 bp, Artificial
  probe
  misc_feature (1)..(25): SEQ ID NO: 917; WAN024C8H; Start 41; Stop 65
gtaaagttattcgtcgtaatggtcg

SEQ ID NO: 277608 - DNA, 25 bp, Artificial
  probe
  misc_feature (1)..(25): SEQ ID NO: 917; WAN024C8H; Start 42; Stop 66
taaagttattcgtcgtaatggtcgt

SEQ ID NO: 277609 - DNA, 25 bp, Artificial
  probe
  misc_feature (1)..(25): SEQ ID NO: 917; WAN024C8H; Start 52; Stop 76
cgtcgtaatggtcgtgttatggtaa

SEQ ID NO: 277610 - DNA, 25 bp, Artificial
  probe
  misc_feature (1)..(25): SEQ ID NO: 917; WAN024C8H; Start 40; Stop 64
tgtaaagttattcgtcgtaatggtc

SEQ ID NO: 277611 - DNA, 25 bp, Artificial
  probe
  misc_feature (1)..(25): SEQ ID NO: 917; WAN024C8H; Start 39; Stop 63
ctgtaaagttattcgtcgtaatggt

SEQ ID NO: 277612 - DNA, 25 bp, Artificial
  probe
  misc_feature (1)..(25): SEQ ID NO: 917; WAN024C8H; Start 57; Stop 81
taatggtcgtgttatggtaatttgc

SEQ ID NO: 277613 - DNA, 25 bp, Artificial
  probe
  misc_feature (1)..(25): SEQ ID NO: 917; WAN024C8H; Start 55; Stop 79
cgtaatggtcgtgttatggtaattt

SEQ ID NO: 277614 - DNA, 25 bp, Artificial
  probe
  misc_feature (1)..(25): SEQ ID NO: 917; WAN024C8H; Start 22; Stop 46
aaaccaatttgcgaatactgtaaag

SEQ ID NO: 277615 - DNA, 25 bp, Artificial
  probe
  misc_feature (1)..(25): SEQ ID NO: 917; WAN024C8H; Start 49; Stop 73
attcgtcgtaatggtcgtgttatgg

SEQ ID NO: 277616 - DNA, 25 bp, Artificial
  probe
  misc_feature (1)..(25): SEQ ID NO: 917; WAN024C8H; Start 24; Stop 48
accaatttgcgaatactgtaaagtt

SEQ ID NO: 277617 - DNA, 25 bp, Artificial
  probe
  misc_feature (1)..(25): SEQ ID NO: 917; WAN024C8H; Start 23; Stop 47
aaccaatttgcgaatactgtaaagt

SEQ ID NO: 277618 - DNA, 25 bp, Artificial
  probe
  misc_feature (1)..(25): SEQ ID NO: 917; WAN024C8H; Start 56; Stop 80
gtaatggtcgtgttatggtaatttg

SEQ ID NO: 277619 - DNA, 25 bp, Artificial
  probe
  misc_feature (1)..(25): SEQ ID NO: 917; WAN024C8H; Start 43; Stop 67
aaagttattcgtcgtaatggtcgtg

SEQ ID NO: 277620 - DNA, 25 bp, Artificial
  probe
  misc_feature (1)..(25): SEQ ID NO: 917; WAN024C8H; Start 38; Stop 62
actgtaaagttattcgtcgtaatgg

SEQ ID NO: 277621 - DNA, 25 bp, Artificial
  probe
  misc_feature (1)..(25): SEQ ID NO: 917; WAN024C8H; Start 58; Stop 82
aatggtcgtgttatggtaatttgcc

SEQ ID NO: 277622 - DNA, 25 bp, Artificial
  probe
  misc_feature (1)..(25): SEQ ID NO: 917; WAN024C8H; Start 51; Stop 75
tcgtcgtaatggtcgtgttatggta

SEQ ID NO: 277623 - DNA, 25 bp, Artificial
  probe
  misc_feature (1)..(25): SEQ ID NO: 917; WAN024C8H; Start 25; Stop 49
ccaatttgcgaatactgtaaagtta

SEQ ID NO: 277624 - DNA, 25 bp, Artificial
  probe
  misc_feature (1)..(25): SEQ ID NO: 917; WAN024C8H; Start 97; Stop 121
cacaaacaacgtcaaggataactaa

SEQ ID NO: 277625 - DNA, 25 bp, Artificial
  probe
  misc_feature (1)..(25): SEQ ID NO: 917; WAN024C8H; Start 96; Stop 120
acacaaacaacgtcaaggataacta

SEQ ID NO: 277626 - DNA, 25 bp, Artificial
  probe
  misc_feature (1)..(25): SEQ ID NO: 917; WAN024C8H; Start 94; Stop 118
aaacacaaacaacgtcaaggataac

SEQ ID NO: 277627 - DNA, 25 bp, Artificial
  probe
  misc_feature (1)..(25): SEQ ID NO: 917; WAN024C8H; Start 98; Stop 122
acaaacaacgtcaaggataactaat

SEQ ID NO: 277628 - DNA, 25 bp, Artificial
  probe
  misc_feature (1)..(25): SEQ ID NO: 917; WAN024C8H; Start 95; Stop 119
aacacaaacaacgtcaaggataact

SEQ ID NO: 277629 - DNA, 25 bp, Artificial
  probe
  misc_feature (1)..(25): SEQ ID NO: 917; WAN024C8H; Start 37; Stop 61
tactgtaaagttattcgtcgtaatg

SEQ ID NO: 277630 - DNA, 25 bp, Artificial
  probe
  misc_feature (1)..(25): SEQ ID NO: 917; WAN024C8H; Start 50; Stop 74
ttcgtcgtaatggtcgtgttatggt

SEQ ID NO: 277631 - DNA, 25 bp, Artificial
  probe
  misc_feature (1)..(25): SEQ ID NO: 917; WAN024C8H; Start 20; Stop 44
tcaaaccaatttgcgaatactgtaa

SEQ ID NO: 277632 - DNA, 25 bp, Artificial
  probe
  misc_feature (1)..(25): SEQ ID NO: 917; WAN024C8H; Start 19; Stop 43
gtcaaaccaatttgcgaatactgta

SEQ ID NO: 277633 - DNA, 25 bp, Artificial
  probe
  misc_feature (1)..(25): SEQ ID NO: 918; WAN024GEL; Start 366; Stop 390
taagacaaccacaacgactatgatt

SEQ ID NO: 277634 - DNA, 25 bp, Artificial
  probe
  misc_feature (1)..(25): SEQ ID NO: 918; WAN024GEL; Start 365; Stop 389
gtaagacaaccacaacgactatgat

SEQ ID NO: 277635 - DNA, 25 bp, Artificial
  probe
  misc_feature (1)..(25): SEQ ID NO: 918; WAN024GEL; Start 625; Stop 649
aatatccagaacaagatgacagcag

SEQ ID NO: 277636 - DNA, 25 bp, Artificial
  probe
  misc_feature (1)..(25): SEQ ID NO: 918; WAN024GEL; Start 624; Stop 648
gaatatccagaacaagatgacagca

SEQ ID NO: 277637 - DNA, 25 bp, Artificial
  probe
  misc_feature (1)..(25): SEQ ID NO: 918; WAN024GEL; Start 605; Stop 629
aatatgtagcagccaagtggaatat

SEQ ID NO: 277638 - DNA, 25 bp, Artificial
  probe
  misc_feature (1)..(25): SEQ ID NO: 918; WAN024GEL; Start 604; Stop 628
gaatatgtagcagccaagtggaata

SEQ ID NO: 277639 - DNA, 25 bp, Artificial
  probe
  misc_feature (1)..(25): SEQ ID NO: 918; WAN024GEL; Start 1243; Stop 1267
caaggagatgtggttcttcttagtc

SEQ ID NO: 277640 - DNA, 25 bp, Artificial
  probe
  misc_feature (1)..(25): SEQ ID NO: 918; WAN024GEL; Start 606; Stop 630
atatgtagcagccaagtggaatatc

SEQ ID NO: 277641 - DNA, 25 bp, Artificial
  probe
  misc_feature (1)..(25): SEQ ID NO: 918; WAN024GEL; Start 1242; Stop 1266
tcaaggagatgtggttcttcttagt

SEQ ID NO: 277642 - DNA, 25 bp, Artificial
  probe
  misc_feature (1)..(25): SEQ ID NO: 918; WAN024GEL; Start 1241; Stop 1265
ctcaaggagatgtggttcttcttag

SEQ ID NO: 277643 - DNA, 25 bp, Artificial
  probe
  misc_feature (1)..(25): SEQ ID NO: 918; WAN024GEL; Start 367; Stop 391
aagacaaccacaacgactatgattg

SEQ ID NO: 277644 - DNA, 25 bp, Artificial
  probe
  misc_feature (1)..(25): SEQ ID NO: 918; WAN024GEL; Start 1240; Stop 1264
actcaaggagatgtggttcttctta

SEQ ID NO: 277645 - DNA, 25 bp, Artificial
  probe
  misc_feature (1)..(25): SEQ ID NO: 918; WAN024GEL; Start 298; Stop 322
ttgactgaggtggaattggcttatt

SEQ ID NO: 277646 - DNA, 25 bp, Artificial
  probe
  misc_feature (1)..(25): SEQ ID NO: 918; WAN024GEL; Start 339; Stop 363
gattattggtatcacaggatcgaac

SEQ ID NO: 277647 - DNA, 25 bp, Artificial
  probe
  misc_feature (1)..(25): SEQ ID NO: 918; WAN024GEL; Start 340; Stop 364
attattggtatcacaggatcgaacg

SEQ ID NO: 277648 - DNA, 25 bp, Artificial
  probe
  misc_feature (1)..(25): SEQ ID NO: 918; WAN024GEL; Start 1239; Stop 1263
gactcaaggagatgtggttcttctt

SEQ ID NO: 277649 - DNA, 25 bp, Artificial
  probe
  misc_feature (1)..(25): SEQ ID NO: 918; WAN024GEL; Start 327; Stop 351
ttcagaagcaccgattattggtatc

SEQ ID NO: 277650 - DNA, 25 bp, Artificial
  probe
  misc_feature (1)..(25): SEQ ID NO: 918; WAN024GEL; Start 990; Stop 1014
atcaactaatatcttggctactcaa

SEQ ID NO: 277651 - DNA, 25 bp, Artificial
  probe
  misc_feature (1)..(25): SEQ ID NO: 918; WAN024GEL; Start 989; Stop 1013
aatcaactaatatcttggctactca

SEQ ID NO: 277652 - DNA, 25 bp, Artificial
  probe
  misc_feature (1)..(25): SEQ ID NO: 918; WAN024GEL; Start 297; Stop 321
cttgactgaggtggaattggcttat

SEQ ID NO: 277653 - DNA, 25 bp, Artificial
  probe
  misc_feature (1)..(25): SEQ ID NO: 918; WAN024GEL; Start 886; Stop 910
gacaatcaaaccatcaaggaaactc

SEQ ID NO: 277654 - DNA, 25 bp, Artificial
  probe
  misc_feature (1)..(25): SEQ ID NO: 918; WAN024GEL; Start 623; Stop 647
ggaatatccagaacaagatgacagc

SEQ ID NO: 277655 - DNA, 25 bp, Artificial
  probe
  misc_feature (1)..(25): SEQ ID NO: 918; WAN024GEL; Start 322; Stop 346
ttgatttcagaagcaccgattattg

SEQ ID NO: 277656 - DNA, 25 bp, Artificial
  probe
  misc_feature (1)..(25): SEQ ID NO: 918; WAN024GEL; Start 1280; Stop 1304
gctgggatatgtatgctaactttga

SEQ ID NO: 277657 - DNA, 25 bp, Artificial
  probe
  misc_feature (1)..(25): SEQ ID NO: 918; WAN024GEL; Start 887; Stop 911
acaatcaaaccatcaaggaaactct

SEQ ID NO: 277658 - DNA, 25 bp, Artificial
  probe
  misc_feature (1)..(25): SEQ ID NO: 918; WAN024GEL; Start 321; Stop 345
tttgatttcagaagcaccgattatt

SEQ ID NO: 277659 - DNA, 25 bp, Artificial
  probe
  misc_feature (1)..(25): SEQ ID NO: 918; WAN024GEL; Start 318; Stop 342
ttatttgatttcagaagcaccgatt

SEQ ID NO: 277660 - DNA, 25 bp, Artificial
  probe
  misc_feature (1)..(25): SEQ ID NO: 918; WAN024GEL; Start 304; Stop 328
gaggtggaattggcttatttgattt

SEQ ID NO: 277661 - DNA, 25 bp, Artificial
  probe
  misc_feature (1)..(25): SEQ ID NO: 918; WAN024GEL; Start 888; Stop 912
caatcaaaccatcaaggaaactctt

SEQ ID NO: 277662 - DNA, 25 bp, Artificial
  probe
  misc_feature (1)..(25): SEQ ID NO: 918; WAN024GEL; Start 1244; Stop 1268
aaggagatgtggttcttcttagtcc

SEQ ID NO: 277663 - DNA, 25 bp, Artificial
  probe
  misc_feature (1)..(25): SEQ ID NO: 918; WAN024GEL; Start 649; Stop 673
gctgatttccttgtcttgaacttta

SEQ ID NO: 277664 - DNA, 25 bp, Artificial
  probe
  misc_feature (1)..(25): SEQ ID NO: 918; WAN024GEL; Start 626; Stop 650
atatccagaacaagatgacagcagc

SEQ ID NO: 277665 - DNA, 25 bp, Artificial
  probe
  misc_feature (1)..(25): SEQ ID NO: 918; WAN024GEL; Start 320; Stop 344
atttgatttcagaagcaccgattat

SEQ ID NO: 277666 - DNA, 25 bp, Artificial
  probe
  misc_feature (1)..(25): SEQ ID NO: 919; WAN024DUF; Start 419; Stop 443
caagtgtaatcaatcttcgtgtgaa

SEQ ID NO: 277667 - DNA, 25 bp, Artificial
  probe
  misc_feature (1)..(25): SEQ ID NO: 919; WAN024DUF; Start 418; Stop 442
acaagtgtaatcaatcttcgtgtga

SEQ ID NO: 277668 - DNA, 25 bp, Artificial
  probe
  misc_feature (1)..(25): SEQ ID NO: 919; WAN024DUF; Start 414; Stop 438
tatcacaagtgtaatcaatcttcgt

SEQ ID NO: 277669 - DNA, 25 bp, Artificial
  probe
  misc_feature (1)..(25): SEQ ID NO: 919; WAN024DUF; Start 415; Stop 439
atcacaagtgtaatcaatcttcgtg

SEQ ID NO: 277670 - DNA, 25 bp, Artificial
  probe
  misc_feature (1)..(25): SEQ ID NO: 919; WAN024DUF; Start 416; Stop 440
tcacaagtgtaatcaatcttcgtgt

SEQ ID NO: 277671 - DNA, 25 bp, Artificial
  probe
  misc_feature (1)..(25): SEQ ID NO: 919; WAN024DUF; Start 346; Stop 370
catattcaagtacaagctccgattc

SEQ ID NO: 277672 - DNA, 25 bp, Artificial
  probe
  misc_feature (1)..(25): SEQ ID NO: 919; WAN024DUF; Start 345; Stop 369
tcatattcaagtacaagctccgatt

SEQ ID NO: 277673 - DNA, 25 bp, Artificial
  probe
  misc_feature (1)..(25): SEQ ID NO: 919; WAN024DUF; Start 344; Stop 368
gtcatattcaagtacaagctccgat

SEQ ID NO: 277674 - DNA, 25 bp, Artificial
  probe
  misc_feature (1)..(25): SEQ ID NO: 919; WAN024DUF; Start 347; Stop 371
atattcaagtacaagctccgattcg

SEQ ID NO: 277675 - DNA, 25 bp, Artificial
  probe
  misc_feature (1)..(25): SEQ ID NO: 919; WAN024DUF; Start 341; Stop 365
aacgtcatattcaagtacaagctcc

SEQ ID NO: 277676 - DNA, 25 bp, Artificial
  probe
  misc_feature (1)..(25): SEQ ID NO: 919; WAN024DUF; Start 413; Stop 437
atatcacaagtgtaatcaatcttcg

SEQ ID NO: 277677 - DNA, 25 bp, Artificial
  probe
  misc_feature (1)..(25): SEQ ID NO: 919; WAN024DUF; Start 202; Stop 226
attaaagcacaacttgaagcagaag

SEQ ID NO: 277678 - DNA, 25 bp, Artificial
  probe
  misc_feature (1)..(25): SEQ ID NO: 919; WAN024DUF; Start 201; Stop 225
aattaaagcacaacttgaagcagaa

SEQ ID NO: 277679 - DNA, 25 bp, Artificial
  probe
  misc_feature (1)..(25): SEQ ID NO: 919; WAN024DUF; Start 348; Stop 372
tattcaagtacaagctccgattcga

SEQ ID NO: 277680 - DNA, 25 bp, Artificial
  probe
  misc_feature (1)..(25): SEQ ID NO: 919; WAN024DUF; Start 130; Stop 154
gtaggtgaacttcgtggtaaacaaa

SEQ ID NO: 277681 - DNA, 25 bp, Artificial
  probe
  misc_feature (1)..(25): SEQ ID NO: 919; WAN024DUF; Start 196; Stop 220
aaagcaattaaagcacaacttgaag

SEQ ID NO: 277682 - DNA, 25 bp, Artificial
  probe
  misc_feature (1)..(25): SEQ ID NO: 919; WAN024DUF; Start 421; Stop 445
agtgtaatcaatcttcgtgtgaaag

SEQ ID NO: 277683 - DNA, 25 bp, Artificial
  probe
  misc_feature (1)..(25): SEQ ID NO: 919; WAN024DUF; Start 204; Stop 228
taaagcacaacttgaagcagaagaa

SEQ ID NO: 277684 - DNA, 25 bp, Artificial
  probe
  misc_feature (1)..(25): SEQ ID NO: 919; WAN024DUF; Start 203; Stop 227
ttaaagcacaacttgaagcagaaga

SEQ ID NO: 277685 - DNA, 25 bp, Artificial
  probe
  misc_feature (1)..(25): SEQ ID NO: 919; WAN024DUF; Start 200; Stop 224
caattaaagcacaacttgaagcaga

SEQ ID NO: 277686 - DNA, 25 bp, Artificial
  probe
  misc_feature (1)..(25): SEQ ID NO: 919; WAN024DUF; Start 420; Stop 444
aagtgtaatcaatcttcgtgtgaaa

SEQ ID NO: 277687 - DNA, 25 bp, Artificial
  probe
  misc_feature (1)..(25): SEQ ID NO: 919; WAN024DUF; Start 43; Stop 67
aaaggcgaaattaaggaagtaccaa

SEQ ID NO: 277688 - DNA, 25 bp, Artificial
  probe
  misc_feature (1)..(25): SEQ ID NO: 919; WAN024DUF; Start 434; Stop 458
ttcgtgtgaaagaaggataactaat

SEQ ID NO: 277689 - DNA, 25 bp, Artificial
  probe
  misc_feature (1)..(25): SEQ ID NO: 919; WAN024DUF; Start 214; Stop 238
cttgaagcagaagaaactgttgtag

SEQ ID NO: 277690 - DNA, 25 bp, Artificial
  probe
  misc_feature (1)..(25): SEQ ID NO: 919; WAN024DUF; Start 197; Stop 221
aagcaattaaagcacaacttgaagc

SEQ ID NO: 277691 - DNA, 25 bp, Artificial
  probe
  misc_feature (1)..(25): SEQ ID NO: 919; WAN024DUF; Start 217; Stop 241
gaagcagaagaaactgttgtagaat

SEQ ID NO: 277692 - DNA, 25 bp, Artificial
  probe
  misc_feature (1)..(25): SEQ ID NO: 919; WAN024DUF; Start 216; Stop 240
tgaagcagaagaaactgttgtagaa

SEQ ID NO: 277693 - DNA, 25 bp, Artificial
  probe
  misc_feature (1)..(25): SEQ ID NO: 919; WAN024DUF; Start 215; Stop 239
ttgaagcagaagaaactgttgtaga

SEQ ID NO: 277694 - DNA, 25 bp, Artificial
  probe
  misc_feature (1)..(25): SEQ ID NO: 919; WAN024DUF; Start 44; Stop 68
aaggcgaaattaaggaagtaccaac

SEQ ID NO: 277695 - DNA, 25 bp, Artificial
  probe
  misc_feature (1)..(25): SEQ ID NO: 919; WAN024DUF; Start 220; Stop 244
gcagaagaaactgttgtagaatttg

SEQ ID NO: 277696 - DNA, 25 bp, Artificial
  probe
  misc_feature (1)..(25): SEQ ID NO: 919; WAN024DUF; Start 213; Stop 237
acttgaagcagaagaaactgttgta

SEQ ID NO: 277697 - DNA, 25 bp, Artificial
  probe
  misc_feature (1)..(25): SEQ ID NO: 919; WAN024DUF; Start 219; Stop 243
agcagaagaaactgttgtagaattt

SEQ ID NO: 277698 - DNA, 25 bp, Artificial
  probe
  misc_feature (1)..(25): SEQ ID NO: 919; WAN024DUF; Start 218; Stop 242
aagcagaagaaactgttgtagaatt

SEQ ID NO: 277699 - DNA, 25 bp, Artificial
  probe
  misc_feature (1)..(25): SEQ ID NO: 920; WAN024FYF; Start 17; Stop 41
attacgcctataacctctcctatca

SEQ ID NO: 277700 - DNA, 25 bp, Artificial
  probe
  misc_feature (1)..(25): SEQ ID NO: 920; WAN024FYF; Start 18; Stop 42
ttacgcctataacctctcctatcaa

SEQ ID NO: 277701 - DNA, 25 bp, Artificial
  probe
  misc_feature (1)..(25): SEQ ID NO: 920; WAN024FYF; Start 21; Stop 45
cgcctataacctctcctatcaacta

SEQ ID NO: 277702 - DNA, 25 bp, Artificial
  probe
  misc_feature (1)..(25): SEQ ID NO: 920; WAN024FYF; Start 19; Stop 43
tacgcctataacctctcctatcaac

SEQ ID NO: 277703 - DNA, 25 bp, Artificial
  probe
  misc_feature (1)..(25): SEQ ID NO: 920; WAN024FYF; Start 16; Stop 40
aattacgcctataacctctcctatc

SEQ ID NO: 277704 - DNA, 25 bp, Artificial
  probe
  misc_feature (1)..(25): SEQ ID NO: 920; WAN024FYF; Start 22; Stop 46
gcctataacctctcctatcaactat

SEQ ID NO: 277705 - DNA, 25 bp, Artificial
  probe
  misc_feature (1)..(25): SEQ ID NO: 920; WAN024FYF; Start 636; Stop 660
ggtagcgatctccttatatgttact

SEQ ID NO: 277706 - DNA, 25 bp, Artificial
  probe
  misc_feature (1)..(25): SEQ ID NO: 920; WAN024FYF; Start 28; Stop 52
aacctctcctatcaactattactca

SEQ ID NO: 277707 - DNA, 25 bp, Artificial
  probe
  misc_feature (1)..(25): SEQ ID NO: 920; WAN024FYF; Start 961; Stop 985
gccattatgatcttccgtatgttct

SEQ ID NO: 277708 - DNA, 25 bp, Artificial
  probe
  misc_feature (1)..(25): SEQ ID NO: 920; WAN024FYF; Start 956; Stop 980
caatcgccattatgatcttccgtat

SEQ ID NO: 277709 - DNA, 25 bp, Artificial
  probe
  misc_feature (1)..(25): SEQ ID NO: 920; WAN024FYF; Start 29; Stop 53
acctctcctatcaactattactcat

SEQ ID NO: 277710 - DNA, 25 bp, Artificial
  probe
  misc_feature (1)..(25): SEQ ID NO: 920; WAN024FYF; Start 1241; Stop 1265
tagcatcagttatcatgtatggcat

SEQ ID NO: 277711 - DNA, 25 bp, Artificial
  probe
  misc_feature (1)..(25): SEQ ID NO: 920; WAN024FYF; Start 1239; Stop 1263
tctagcatcagttatcatgtatggc

SEQ ID NO: 277712 - DNA, 25 bp, Artificial
  probe
  misc_feature (1)..(25): SEQ ID NO: 920; WAN024FYF; Start 1143; Stop 1167
tgtattaacagaagcacttgtatgg

SEQ ID NO: 277713 - DNA, 25 bp, Artificial
  probe
  misc_feature (1)..(25): SEQ ID NO: 920; WAN024FYF; Start 1240; Stop 1264
ctagcatcagttatcatgtatggca

SEQ ID NO: 277714 - DNA, 25 bp, Artificial
  probe
  misc_feature (1)..(25): SEQ ID NO: 920; WAN024FYF; Start 1242; Stop 1266
agcatcagttatcatgtatggcatt

SEQ ID NO: 277715 - DNA, 25 bp, Artificial
  probe
  misc_feature (1)..(25): SEQ ID NO: 920; WAN024FYF; Start 957; Stop 981
aatcgccattatgatcttccgtatg

SEQ ID NO: 277716 - DNA, 25 bp, Artificial
  probe
  misc_feature (1)..(25): SEQ ID NO: 920; WAN024FYF; Start 20; Stop 44
acgcctataacctctcctatcaact

SEQ ID NO: 277717 - DNA, 25 bp, Artificial
  probe
  misc_feature (1)..(25): SEQ ID NO: 920; WAN024FYF; Start 620; Stop 644
tattattccttcctcaggtagcgat

SEQ ID NO: 277718 - DNA, 25 bp, Artificial
  probe
  misc_feature (1)..(25): SEQ ID NO: 920; WAN024FYF; Start 637; Stop 661
gtagcgatctccttatatgttactc

SEQ ID NO: 277719 - DNA, 25 bp, Artificial
  probe
  misc_feature (1)..(25): SEQ ID NO: 920; WAN024FYF; Start 619; Stop 643
ttattattccttcctcaggtagcga

SEQ ID NO: 277720 - DNA, 25 bp, Artificial
  probe
  misc_feature (1)..(25): SEQ ID NO: 920; WAN024FYF; Start 639; Stop 663
agcgatctccttatatgttactcta

SEQ ID NO: 277721 - DNA, 25 bp, Artificial
  probe
  misc_feature (1)..(25): SEQ ID NO: 920; WAN024FYF; Start 638; Stop 662
tagcgatctccttatatgttactct

SEQ ID NO: 277722 - DNA, 25 bp, Artificial
  probe
  misc_feature (1)..(25): SEQ ID NO: 920; WAN024FYF; Start 960; Stop 984
cgccattatgatcttccgtatgttc

SEQ ID NO: 277723 - DNA, 25 bp, Artificial
  probe
  misc_feature (1)..(25): SEQ ID NO: 920; WAN024FYF; Start 633; Stop 657
tcaggtagcgatctccttatatgtt

SEQ ID NO: 277724 - DNA, 25 bp, Artificial
  probe
  misc_feature (1)..(25): SEQ ID NO: 920; WAN024FYF; Start 1238; Stop 1262
ttctagcatcagttatcatgtatgg

SEQ ID NO: 277725 - DNA, 25 bp, Artificial
  probe
  misc_feature (1)..(25): SEQ ID NO: 920; WAN024FYF; Start 1234; Stop 1258
attgttctagcatcagttatcatgt

SEQ ID NO: 277726 - DNA, 25 bp, Artificial
  probe
  misc_feature (1)..(25): SEQ ID NO: 920; WAN024FYF; Start 635; Stop 659
aggtagcgatctccttatatgttac

SEQ ID NO: 277727 - DNA, 25 bp, Artificial
  probe
  misc_feature (1)..(25): SEQ ID NO: 920; WAN024FYF; Start 634; Stop 658
caggtagcgatctccttatatgtta

SEQ ID NO: 277728 - DNA, 25 bp, Artificial
  probe
  misc_feature (1)..(25): SEQ ID NO: 920; WAN024FYF; Start 958; Stop 982
atcgccattatgatcttccgtatgt

SEQ ID NO: 277729 - DNA, 25 bp, Artificial
  probe
  misc_feature (1)..(25): SEQ ID NO: 920; WAN024FYF; Start 632; Stop 656
ctcaggtagcgatctccttatatgt

SEQ ID NO: 277730 - DNA, 25 bp, Artificial
  probe
  misc_feature (1)..(25): SEQ ID NO: 920; WAN024FYF; Start 797; Stop 821
tattagcaacaggtgattacaaagc

SEQ ID NO: 277731 - DNA, 25 bp, Artificial
  probe
  misc_feature (1)..(25): SEQ ID NO: 920; WAN024FYF; Start 959; Stop 983
tcgccattatgatcttccgtatgtt

SEQ ID NO: 277732 - DNA, 25 bp, Artificial
  probe
  misc_feature (1)..(25): SEQ ID NO: 921; WAN024CAL; Start 14; Stop 38
tacagattagtgagacttacgagga

SEQ ID NO: 277733 - DNA, 25 bp, Artificial
  probe
  misc_feature (1)..(25): SEQ ID NO: 921; WAN024CAL; Start 13; Stop 37
ctacagattagtgagacttacgagg

SEQ ID NO: 277734 - DNA, 25 bp, Artificial
  probe
  misc_feature (1)..(25): SEQ ID NO: 921; WAN024CAL; Start 18; Stop 42
gattagtgagacttacgaggaggaa

SEQ ID NO: 277735 - DNA, 25 bp, Artificial
  probe
  misc_feature (1)..(25): SEQ ID NO: 921; WAN024CAL; Start 15; Stop 39
acagattagtgagacttacgaggag

SEQ ID NO: 277736 - DNA, 25 bp, Artificial
  probe
  misc_feature (1)..(25): SEQ ID NO: 921; WAN024CAL; Start 156; Stop 180
tctagttgagattggcaagattcag

SEQ ID NO: 277737 - DNA, 25 bp, Artificial
  probe
  misc_feature (1)..(25): SEQ ID NO: 921; WAN024CAL; Start 17; Stop 41
agattagtgagacttacgaggagga

SEQ ID NO: 277738 - DNA, 25 bp, Artificial
  probe
  misc_feature (1)..(25): SEQ ID NO: 921; WAN024CAL; Start 16; Stop 40
cagattagtgagacttacgaggagg

SEQ ID NO: 277739 - DNA, 25 bp, Artificial
  probe
  misc_feature (1)..(25): SEQ ID NO: 921; WAN024CAL; Start 157; Stop 181
ctagttgagattggcaagattcagc

SEQ ID NO: 277740 - DNA, 25 bp, Artificial
  probe
  misc_feature (1)..(25): SEQ ID NO: 921; WAN024CAL; Start 12; Stop 36
actacagattagtgagacttacgag

SEQ ID NO: 277741 - DNA, 25 bp, Artificial
  probe
  misc_feature (1)..(25): SEQ ID NO: 921; WAN024CAL; Start 242; Stop 266
atttgcgactctatcaggttcttaa

SEQ ID NO: 277742 - DNA, 25 bp, Artificial
  probe
  misc_feature (1)..(25): SEQ ID NO: 921; WAN024CAL; Start 243; Stop 267
tttgcgactctatcaggttcttaaa

SEQ ID NO: 277743 - DNA, 25 bp, Artificial
  probe
  misc_feature (1)..(25): SEQ ID NO: 921; WAN024CAL; Start 11; Stop 35
aactacagattagtgagacttacga

SEQ ID NO: 277744 - DNA, 25 bp, Artificial
  probe
  misc_feature (1)..(25): SEQ ID NO: 921; WAN024CAL; Start 241; Stop 265
gatttgcgactctatcaggttctta

SEQ ID NO: 277745 - DNA, 25 bp, Artificial
  probe
  misc_feature (1)..(25): SEQ ID NO: 921; WAN024CAL; Start 10; Stop 34
gaactacagattagtgagacttacg

SEQ ID NO: 277746 - DNA, 25 bp, Artificial
  probe
  misc_feature (1)..(25): SEQ ID NO: 921; WAN024CAL; Start 295; Stop 319
tcccaatcagaaatcatcaatatcg

SEQ ID NO: 277747 - DNA, 25 bp, Artificial
  probe
  misc_feature (1)..(25): SEQ ID NO: 921; WAN024CAL; Start 155; Stop 179
atctagttgagattggcaagattca

SEQ ID NO: 277748 - DNA, 25 bp, Artificial
  probe
  misc_feature (1)..(25): SEQ ID NO: 921; WAN024CAL; Start 151; Stop 175
gtctatctagttgagattggcaaga

SEQ ID NO: 277749 - DNA, 25 bp, Artificial
  probe
  misc_feature (1)..(25): SEQ ID NO: 921; WAN024CAL; Start 253; Stop 277
tatcaggttcttaaactcttgccaa

SEQ ID NO: 277750 - DNA, 25 bp, Artificial
  probe
  misc_feature (1)..(25): SEQ ID NO: 921; WAN024CAL; Start 251; Stop 275
tctatcaggttcttaaactcttgcc

SEQ ID NO: 277751 - DNA, 25 bp, Artificial
  probe
  misc_feature (1)..(25): SEQ ID NO: 921; WAN024CAL; Start 247; Stop 271
cgactctatcaggttcttaaactct

SEQ ID NO: 277752 - DNA, 25 bp, Artificial
  probe
  misc_feature (1)..(25): SEQ ID NO: 921; WAN024CAL; Start 252; Stop 276
ctatcaggttcttaaactcttgcca

SEQ ID NO: 277753 - DNA, 25 bp, Artificial
  probe
  misc_feature (1)..(25): SEQ ID NO: 921; WAN024CAL; Start 150; Stop 174
ggtctatctagttgagattggcaag

SEQ ID NO: 277754 - DNA, 25 bp, Artificial
  probe
  misc_feature (1)..(25): SEQ ID NO: 921; WAN024CAL; Start 146; Stop 170
atcaggtctatctagttgagattgg

SEQ ID NO: 277755 - DNA, 25 bp, Artificial
  probe
  misc_feature (1)..(25): SEQ ID NO: 921; WAN024CAL; Start 250; Stop 274
ctctatcaggttcttaaactcttgc

SEQ ID NO: 277756 - DNA, 25 bp, Artificial
  probe
  misc_feature (1)..(25): SEQ ID NO: 921; WAN024CAL; Start 152; Stop 176
tctatctagttgagattggcaagat

SEQ ID NO: 277757 - DNA, 25 bp, Artificial
  probe
  misc_feature (1)..(25): SEQ ID NO: 921; WAN024CAL; Start 149; Stop 173
aggtctatctagttgagattggcaa

SEQ ID NO: 277758 - DNA, 25 bp, Artificial
  probe
  misc_feature (1)..(25): SEQ ID NO: 921; WAN024CAL; Start 244; Stop 268
ttgcgactctatcaggttcttaaac

SEQ ID NO: 277759 - DNA, 25 bp, Artificial
  probe
  misc_feature (1)..(25): SEQ ID NO: 921; WAN024CAL; Start 246; Stop 270
gcgactctatcaggttcttaaactc

SEQ ID NO: 277760 - DNA, 25 bp, Artificial
  probe
  misc_feature (1)..(25): SEQ ID NO: 921; WAN024CAL; Start 19; Stop 43
attagtgagacttacgaggaggaaa

SEQ ID NO: 277761 - DNA, 25 bp, Artificial
  probe
  misc_feature (1)..(25): SEQ ID NO: 921; WAN024CAL; Start 147; Stop 171
tcaggtctatctagttgagattggc

SEQ ID NO: 277762 - DNA, 25 bp, Artificial
  probe
  misc_feature (1)..(25): SEQ ID NO: 921; WAN024CAL; Start 413; Stop 437
aaaccatcaaggagaaattagaact

SEQ ID NO: 277763 - DNA, 25 bp, Artificial
  probe
  misc_feature (1)..(25): SEQ ID NO: 921; WAN024CAL; Start 245; Stop 269
tgcgactctatcaggttcttaaact

SEQ ID NO: 277764 - DNA, 25 bp, Artificial
  probe
  misc_feature (1)..(25): SEQ ID NO: 921; WAN024CAL; Start 154; Stop 178
tatctagttgagattggcaagattc

SEQ ID NO: 277765 - DNA, 25 bp, Artificial
  probe
  misc_feature (1)..(25): SEQ ID NO: 922; WAN024FPC; Start 464; Stop 488
aagcattgaatcgtgacttgttgag

SEQ ID NO: 277766 - DNA, 25 bp, Artificial
  probe
  misc_feature (1)..(25): SEQ ID NO: 922; WAN024FPC; Start 463; Stop 487
gaagcattgaatcgtgacttgttga

SEQ ID NO: 277767 - DNA, 25 bp, Artificial
  probe
  misc_feature (1)..(25): SEQ ID NO: 922; WAN024FPC; Start 462; Stop 486
agaagcattgaatcgtgacttgttg

SEQ ID NO: 277768 - DNA, 25 bp, Artificial
  probe
  misc_feature (1)..(25): SEQ ID NO: 922; WAN024FPC; Start 461; Stop 485
cagaagcattgaatcgtgacttgtt

SEQ ID NO: 277769 - DNA, 25 bp, Artificial
  probe
  misc_feature (1)..(25): SEQ ID NO: 922; WAN024FPC; Start 293; Stop 317
ccaatgaggatgtgactgtattaat

SEQ ID NO: 277770 - DNA, 25 bp, Artificial
  probe
  misc_feature (1)..(25): SEQ ID NO: 922; WAN024FPC; Start 292; Stop 316
cccaatgaggatgtgactgtattaa

SEQ ID NO: 277771 - DNA, 25 bp, Artificial
  probe
  misc_feature (1)..(25): SEQ ID NO: 922; WAN024FPC; Start 466; Stop 490
gcattgaatcgtgacttgttgagac

SEQ ID NO: 277772 - DNA, 25 bp, Artificial
  probe
  misc_feature (1)..(25): SEQ ID NO: 922; WAN024FPC; Start 465; Stop 489
agcattgaatcgtgacttgttgaga

SEQ ID NO: 277773 - DNA, 25 bp, Artificial
  probe
  misc_feature (1)..(25): SEQ ID NO: 922; WAN024FPC; Start 236; Stop 260
ggaagtctggtcaagaatcaattta

SEQ ID NO: 277774 - DNA, 25 bp, Artificial
  probe
  misc_feature (1)..(25): SEQ ID NO: 922; WAN024FPC; Start 235; Stop 259
gggaagtctggtcaagaatcaattt

SEQ ID NO: 277775 - DNA, 25 bp, Artificial
  probe
  misc_feature (1)..(25): SEQ ID NO: 922; WAN024FPC; Start 409; Stop 433
ccaacgactgaggtagtatttgttt

SEQ ID NO: 277776 - DNA, 25 bp, Artificial
  probe
  misc_feature (1)..(25): SEQ ID NO: 922; WAN024FPC; Start 297; Stop 321
tgaggatgtgactgtattaattcat

SEQ ID NO: 277777 - DNA, 25 bp, Artificial
  probe
  misc_feature (1)..(25): SEQ ID NO: 922; WAN024FPC; Start 296; Stop 320
atgaggatgtgactgtattaattca

SEQ ID NO: 277778 - DNA, 25 bp, Artificial
  probe
  misc_feature (1)..(25): SEQ ID NO: 922; WAN024FPC; Start 187; Stop 211
tatgcggaacaatttggaattacaa

SEQ ID NO: 277779 - DNA, 25 bp, Artificial
  probe
  misc_feature (1)..(25): SEQ ID NO: 922; WAN024FPC; Start 186; Stop 210
ttatgcggaacaatttggaattaca

SEQ ID NO: 277780 - DNA, 25 bp, Artificial
  probe
  misc_feature (1)..(25): SEQ ID NO: 922; WAN024FPC; Start 185; Stop 209
cttatgcggaacaatttggaattac

SEQ ID NO: 277781 - DNA, 25 bp, Artificial
  probe
  misc_feature (1)..(25): SEQ ID NO: 922; WAN024FPC; Start 184; Stop 208
gcttatgcggaacaatttggaatta

SEQ ID NO: 277782 - DNA, 25 bp, Artificial
  probe
  misc_feature (1)..(25): SEQ ID NO: 922; WAN024FPC; Start 298; Stop 322
gaggatgtgactgtattaattcatg

SEQ ID NO: 277783 - DNA, 25 bp, Artificial
  probe
  misc_feature (1)..(25): SEQ ID NO: 922; WAN024FPC; Start 294; Stop 318
caatgaggatgtgactgtattaatt

SEQ ID NO: 277784 - DNA, 25 bp, Artificial
  probe
  misc_feature (1)..(25): SEQ ID NO: 922; WAN024FPC; Start 234; Stop 258
agggaagtctggtcaagaatcaatt

SEQ ID NO: 277785 - DNA, 25 bp, Artificial
  probe
  misc_feature (1)..(25): SEQ ID NO: 922; WAN024FPC; Start 498; Stop 522
aactcctcatgtttaccatcttgat

SEQ ID NO: 277786 - DNA, 25 bp, Artificial
  probe
  misc_feature (1)..(25): SEQ ID NO: 922; WAN024FPC; Start 459; Stop 483
cacagaagcattgaatcgtgacttg

SEQ ID NO: 277787 - DNA, 25 bp, Artificial
  probe
  misc_feature (1)..(25): SEQ ID NO: 922; WAN024FPC; Start 243; Stop 267
tggtcaagaatcaatttataacggt

SEQ ID NO: 277788 - DNA, 25 bp, Artificial
  probe
  misc_feature (1)..(25): SEQ ID NO: 922; WAN024FPC; Start 499; Stop 523
actcctcatgtttaccatcttgata

SEQ ID NO: 277789 - DNA, 25 bp, Artificial
  probe
  misc_feature (1)..(25): SEQ ID NO: 922; WAN024FPC; Start 512; Stop 536
accatcttgataatattctatcgct

SEQ ID NO: 277790 - DNA, 25 bp, Artificial
  probe
  misc_feature (1)..(25): SEQ ID NO: 922; WAN024FPC; Start 460; Stop 484
acagaagcattgaatcgtgacttgt

SEQ ID NO: 277791 - DNA, 25 bp, Artificial
  probe
  misc_feature (1)..(25): SEQ ID NO: 922; WAN024FPC; Start 233; Stop 257
gagggaagtctggtcaagaatcaat

SEQ ID NO: 277792 - DNA, 25 bp, Artificial
  probe
  misc_feature (1)..(25): SEQ ID NO: 922; WAN024FPC; Start 295; Stop 319
aatgaggatgtgactgtattaattc

SEQ ID NO: 277793 - DNA, 25 bp, Artificial
  probe
  misc_feature (1)..(25): SEQ ID NO: 922; WAN024FPC; Start 291; Stop 315
tcccaatgaggatgtgactgtatta

SEQ ID NO: 277794 - DNA, 25 bp, Artificial
  probe
  misc_feature (1)..(25): SEQ ID NO: 922; WAN024FPC; Start 244; Stop 268
ggtcaagaatcaatttataacggtc

SEQ ID NO: 277795 - DNA, 25 bp, Artificial
  probe
  misc_feature (1)..(25): SEQ ID NO: 922; WAN024FPC; Start 242; Stop 266
ctggtcaagaatcaatttataacgg

SEQ ID NO: 277796 - DNA, 25 bp, Artificial
  probe
  misc_feature (1)..(25): SEQ ID NO: 922; WAN024FPC; Start 500; Stop 524
ctcctcatgtttaccatcttgataa

SEQ ID NO: 277797 - DNA, 25 bp, Artificial
  probe
  misc_feature (1)..(25): SEQ ID NO: 922; WAN024FPC; Start 237; Stop 261
gaagtctggtcaagaatcaatttat

SEQ ID NO: 277798 - DNA, 25 bp, Artificial
  probe
  misc_feature (1)..(25): SEQ ID NO: 923; WAN024FUO; Start 321; Stop 345
atttgatagaattgatgctccgaca

SEQ ID NO: 277799 - DNA, 25 bp, Artificial
  probe
  misc_feature (1)..(25): SEQ ID NO: 923; WAN024FUO; Start 8; Stop 32
tatgtctagttggatctagtggagg

SEQ ID NO: 277800 - DNA, 25 bp, Artificial
  probe
  misc_feature (1)..(25): SEQ ID NO: 923; WAN024FUO; Start 6; Stop 30
agtatgtctagttggatctagtgga

SEQ ID NO: 277801 - DNA, 25 bp, Artificial
  probe
  misc_feature (1)..(25): SEQ ID NO: 923; WAN024FUO; Start 7; Stop 31
gtatgtctagttggatctagtggag

SEQ ID NO: 277802 - DNA, 25 bp, Artificial
  probe
  misc_feature (1)..(25): SEQ ID NO: 923; WAN024FUO; Start 323; Stop 347
ttgatagaattgatgctccgacaat

SEQ ID NO: 277803 - DNA, 25 bp, Artificial
  probe
  misc_feature (1)..(25): SEQ ID NO: 923; WAN024FUO; Start 320; Stop 344
tatttgatagaattgatgctccgac

SEQ ID NO: 277804 - DNA, 25 bp, Artificial
  probe
  misc_feature (1)..(25): SEQ ID NO: 923; WAN024FUO; Start 319; Stop 343
gtatttgatagaattgatgctccga

SEQ ID NO: 277805 - DNA, 25 bp, Artificial
  probe
  misc_feature (1)..(25): SEQ ID NO: 923; WAN024FUO; Start 318; Stop 342
agtatttgatagaattgatgctccg

SEQ ID NO: 277806 - DNA, 25 bp, Artificial
  probe
  misc_feature (1)..(25): SEQ ID NO: 923; WAN024FUO; Start 5; Stop 29
aagtatgtctagttggatctagtgg

SEQ ID NO: 277807 - DNA, 25 bp, Artificial
  probe
  misc_feature (1)..(25): SEQ ID NO: 923; WAN024FUO; Start 325; Stop 349
gatagaattgatgctccgacaatga

SEQ ID NO: 277808 - DNA, 25 bp, Artificial
  probe
  misc_feature (1)..(25): SEQ ID NO: 923; WAN024FUO; Start 326; Stop 350
atagaattgatgctccgacaatgac

SEQ ID NO: 277809 - DNA, 25 bp, Artificial
  probe
  misc_feature (1)..(25): SEQ ID NO: 923; WAN024FUO; Start 324; Stop 348
tgatagaattgatgctccgacaatg

SEQ ID NO: 277810 - DNA, 25 bp, Artificial
  probe
  misc_feature (1)..(25): SEQ ID NO: 923; WAN024FUO; Start 322; Stop 346
tttgatagaattgatgctccgacaa

SEQ ID NO: 277811 - DNA, 25 bp, Artificial
  probe
  misc_feature (1)..(25): SEQ ID NO: 923; WAN024FUO; Start 365; Stop 389
atccagtaactgacaggtttattgt

SEQ ID NO: 277812 - DNA, 25 bp, Artificial
  probe
  misc_feature (1)..(25): SEQ ID NO: 923; WAN024FUO; Start 360; Stop 384
tgtttatccagtaactgacaggttt

SEQ ID NO: 277813 - DNA, 25 bp, Artificial
  probe
  misc_feature (1)..(25): SEQ ID NO: 923; WAN024FUO; Start 359; Stop 383
ttgtttatccagtaactgacaggtt

SEQ ID NO: 277814 - DNA, 25 bp, Artificial
  probe
  misc_feature (1)..(25): SEQ ID NO: 923; WAN024FUO; Start 358; Stop 382
cttgtttatccagtaactgacaggt

SEQ ID NO: 277815 - DNA, 25 bp, Artificial
  probe
  misc_feature (1)..(25): SEQ ID NO: 923; WAN024FUO; Start 357; Stop 381
acttgtttatccagtaactgacagg

SEQ ID NO: 277816 - DNA, 25 bp, Artificial
  probe
  misc_feature (1)..(25): SEQ ID NO: 923; WAN024FUO; Start 317; Stop 341
aagtatttgatagaattgatgctcc

SEQ ID NO: 277817 - DNA, 25 bp, Artificial
  probe
  misc_feature (1)..(25): SEQ ID NO: 923; WAN024FUO; Start 356; Stop 380
aacttgtttatccagtaactgacag

SEQ ID NO: 277818 - DNA, 25 bp, Artificial
  probe
  misc_feature (1)..(25): SEQ ID NO: 923; WAN024FUO; Start 352; Stop 376
gggaaacttgtttatccagtaactg

SEQ ID NO: 277819 - DNA, 25 bp, Artificial
  probe
  misc_feature (1)..(25): SEQ ID NO: 923; WAN024FUO; Start 355; Stop 379
aaacttgtttatccagtaactgaca

SEQ ID NO: 277820 - DNA, 25 bp, Artificial
  probe
  misc_feature (1)..(25): SEQ ID NO: 923; WAN024FUO; Start 361; Stop 385
gtttatccagtaactgacaggttta

SEQ ID NO: 277821 - DNA, 25 bp, Artificial
  probe
  misc_feature (1)..(25): SEQ ID NO: 923; WAN024FUO; Start 353; Stop 377
ggaaacttgtttatccagtaactga

SEQ ID NO: 277822 - DNA, 25 bp, Artificial
  probe
  misc_feature (1)..(25): SEQ ID NO: 923; WAN024FUO; Start 288; Stop 312
aatatttggtgctaagacagtctat

SEQ ID NO: 277823 - DNA, 25 bp, Artificial
  probe
  misc_feature (1)..(25): SEQ ID NO: 923; WAN024FUO; Start 364; Stop 388
tatccagtaactgacaggtttattg

SEQ ID NO: 277824 - DNA, 25 bp, Artificial
  probe
  misc_feature (1)..(25): SEQ ID NO: 923; WAN024FUO; Start 354; Stop 378
gaaacttgtttatccagtaactgac

SEQ ID NO: 277825 - DNA, 25 bp, Artificial
  probe
  misc_feature (1)..(25): SEQ ID NO: 923; WAN024FUO; Start 1; Stop 25
atgaaagtatgtctagttggatcta

SEQ ID NO: 277826 - DNA, 25 bp, Artificial
  probe
  misc_feature (1)..(25): SEQ ID NO: 923; WAN024FUO; Start 363; Stop 387
ttatccagtaactgacaggtttatt

SEQ ID NO: 277827 - DNA, 25 bp, Artificial
  probe
  misc_feature (1)..(25): SEQ ID NO: 923; WAN024FUO; Start 362; Stop 386
tttatccagtaactgacaggtttat

SEQ ID NO: 277828 - DNA, 25 bp, Artificial
  probe
  misc_feature (1)..(25): SEQ ID NO: 923; WAN024FUO; Start 291; Stop 315
atttggtgctaagacagtctatata

SEQ ID NO: 277829 - DNA, 25 bp, Artificial
  probe
  misc_feature (1)..(25): SEQ ID NO: 923; WAN024FUO; Start 290; Stop 314
tatttggtgctaagacagtctatat

SEQ ID NO: 277830 - DNA, 25 bp, Artificial
  probe
  misc_feature (1)..(25): SEQ ID NO: 923; WAN024FUO; Start 289; Stop 313
atatttggtgctaagacagtctata

SEQ ID NO: 277831 - DNA, 25 bp, Artificial
  probe
  misc_feature (1)..(25): SEQ ID NO: 924; WAN024FYE; Start 325; Stop 349
acagcctatattcttggattgagtt

SEQ ID NO: 277832 - DNA, 25 bp, Artificial
  probe
  misc_feature (1)..(25): SEQ ID NO: 924; WAN024FYE; Start 324; Stop 348
aacagcctatattcttggattgagt

SEQ ID NO: 277833 - DNA, 25 bp, Artificial
  probe
  misc_feature (1)..(25): SEQ ID NO: 924; WAN024FYE; Start 235; Stop 259
ggcatctattcgttacaattaggtg

SEQ ID NO: 277834 - DNA, 25 bp, Artificial
  probe
  misc_feature (1)..(25): SEQ ID NO: 924; WAN024FYE; Start 237; Stop 261
catctattcgttacaattaggtgcg

SEQ ID NO: 277835 - DNA, 25 bp, Artificial
  probe
  misc_feature (1)..(25): SEQ ID NO: 924; WAN024FYE; Start 669; Stop 693
tactatgcttggttctctatcttca

SEQ ID NO: 277836 - DNA, 25 bp, Artificial
  probe
  misc_feature (1)..(25): SEQ ID NO: 924; WAN024FYE; Start 1246; Stop 1270
tctggagttatgtatggtatcttgt

SEQ ID NO: 277837 - DNA, 25 bp, Artificial
  probe
  misc_feature (1)..(25): SEQ ID NO: 924; WAN024FYE; Start 670; Stop 694
actatgcttggttctctatcttcaa

SEQ ID NO: 277838 - DNA, 25 bp, Artificial
  probe
  misc_feature (1)..(25): SEQ ID NO: 924; WAN024FYE; Start 323; Stop 347
caacagcctatattcttggattgag

SEQ ID NO: 277839 - DNA, 25 bp, Artificial
  probe
  misc_feature (1)..(25): SEQ ID NO: 924; WAN024FYE; Start 246; Stop 270
gttacaattaggtgcgacagttctt

SEQ ID NO: 277840 - DNA, 25 bp, Artificial
  probe
  misc_feature (1)..(25): SEQ ID NO: 924; WAN024FYE; Start 1247; Stop 1271
ctggagttatgtatggtatcttgtt

SEQ ID NO: 277841 - DNA, 25 bp, Artificial
  probe
  misc_feature (1)..(25): SEQ ID NO: 924; WAN024FYE; Start 1243; Stop 1267
tcatctggagttatgtatggtatct

SEQ ID NO: 277842 - DNA, 25 bp, Artificial
  probe
  misc_feature (1)..(25): SEQ ID NO: 924; WAN024FYE; Start 1239; Stop 1263
aatctcatctggagttatgtatggt

SEQ ID NO: 277843 - DNA, 25 bp, Artificial
  probe
  misc_feature (1)..(25): SEQ ID NO: 924; WAN024FYE; Start 674; Stop 698
tgcttggttctctatcttcaattag

SEQ ID NO: 277844 - DNA, 25 bp, Artificial
  probe
  misc_feature (1)..(25): SEQ ID NO: 924; WAN024FYE; Start 671; Stop 695
ctatgcttggttctctatcttcaat

SEQ ID NO: 277845 - DNA, 25 bp, Artificial
  probe
  misc_feature (1)..(25): SEQ ID NO: 924; WAN024FYE; Start 668; Stop 692
gtactatgcttggttctctatcttc

SEQ ID NO: 277846 - DNA, 25 bp, Artificial
  probe
  misc_feature (1)..(25): SEQ ID NO: 924; WAN024FYE; Start 1245; Stop 1269
atctggagttatgtatggtatcttg

SEQ ID NO: 277847 - DNA, 25 bp, Artificial
  probe
  misc_feature (1)..(25): SEQ ID NO: 924; WAN024FYE; Start 1291; Stop 1315
aatgtatcaccgataatcaatgtgg

SEQ ID NO: 277848 - DNA, 25 bp, Artificial
  probe
  misc_feature (1)..(25): SEQ ID NO: 924; WAN024FYE; Start 1241; Stop 1265
tctcatctggagttatgtatggtat

SEQ ID NO: 277849 - DNA, 25 bp, Artificial
  probe
  misc_feature (1)..(25): SEQ ID NO: 924; WAN024FYE; Start 1240; Stop 1264
atctcatctggagttatgtatggta

SEQ ID NO: 277850 - DNA, 25 bp, Artificial
  probe
  misc_feature (1)..(25): SEQ ID NO: 924; WAN024FYE; Start 673; Stop 697
atgcttggttctctatcttcaatta

SEQ ID NO: 277851 - DNA, 25 bp, Artificial
  probe
  misc_feature (1)..(25): SEQ ID NO: 924; WAN024FYE; Start 672; Stop 696
tatgcttggttctctatcttcaatt

SEQ ID NO: 277852 - DNA, 25 bp, Artificial
  probe
  misc_feature (1)..(25): SEQ ID NO: 924; WAN024FYE; Start 1244; Stop 1268
catctggagttatgtatggtatctt

SEQ ID NO: 277853 - DNA, 25 bp, Artificial
  probe
  misc_feature (1)..(25): SEQ ID NO: 924; WAN024FYE; Start 1242; Stop 1266
ctcatctggagttatgtatggtatc

SEQ ID NO: 277854 - DNA, 25 bp, Artificial
  probe
  misc_feature (1)..(25): SEQ ID NO: 924; WAN024FYE; Start 1166; Stop 1190
ggctgatacagttattctatactcg

SEQ ID NO: 277855 - DNA, 25 bp, Artificial
  probe
  misc_feature (1)..(25): SEQ ID NO: 924; WAN024FYE; Start 1309; Stop 1333
aatgtgggactatatgctattctgg

SEQ ID NO: 277856 - DNA, 25 bp, Artificial
  probe
  misc_feature (1)..(25): SEQ ID NO: 924; WAN024FYE; Start 1301; Stop 1325
cgataatcaatgtgggactatatgc

SEQ ID NO: 277857 - DNA, 25 bp, Artificial
  probe
  misc_feature (1)..(25): SEQ ID NO: 924; WAN024FYE; Start 19; Stop 43
tatgcctacaacctttcttatcagt

SEQ ID NO: 277858 - DNA, 25 bp, Artificial
  probe
  misc_feature (1)..(25): SEQ ID NO: 924; WAN024FYE; Start 17; Stop 41
actatgcctacaacctttcttatca

SEQ ID NO: 277859 - DNA, 25 bp, Artificial
  probe
  misc_feature (1)..(25): SEQ ID NO: 924; WAN024FYE; Start 1333; Stop 1357
ggagcaatgatctatctcgtattaa

SEQ ID NO: 277860 - DNA, 25 bp, Artificial
  probe
  misc_feature (1)..(25): SEQ ID NO: 924; WAN024FYE; Start 675; Stop 699
gcttggttctctatcttcaattaga

SEQ ID NO: 277861 - DNA, 25 bp, Artificial
  probe
  misc_feature (1)..(25): SEQ ID NO: 924; WAN024FYE; Start 1167; Stop 1191
gctgatacagttattctatactcgt

SEQ ID NO: 277862 - DNA, 25 bp, Artificial
  probe
  misc_feature (1)..(25): SEQ ID NO: 924; WAN024FYE; Start 187; Stop 211
acaaaggtaatttcaggacatcgta

SEQ ID NO: 277863 - DNA, 25 bp, Artificial
  probe
  misc_feature (1)..(25): SEQ ID NO: 924; WAN024FYE; Start 186; Stop 210
tacaaaggtaatttcaggacatcgt

SEQ ID NO: 277864 - DNA, 25 bp, Artificial
  probe
  misc_feature (1)..(25): SEQ ID NO: 925; WAN024CNC; Start 69; Stop 93
tcttgccgagacgacgattaatatt

SEQ ID NO: 277865 - DNA, 25 bp, Artificial
  probe
  misc_feature (1)..(25): SEQ ID NO: 925; WAN024CNC; Start 68; Stop 92
ttcttgccgagacgacgattaatat

SEQ ID NO: 277866 - DNA, 25 bp, Artificial
  probe
  misc_feature (1)..(25): SEQ ID NO: 925; WAN024CNC; Start 70; Stop 94
cttgccgagacgacgattaatatta

SEQ ID NO: 277867 - DNA, 25 bp, Artificial
  probe
  misc_feature (1)..(25): SEQ ID NO: 925; WAN024CNC; Start 67; Stop 91
gttcttgccgagacgacgattaata

SEQ ID NO: 277868 - DNA, 25 bp, Artificial
  probe
  misc_feature (1)..(25): SEQ ID NO: 925; WAN024CNC; Start 49; Stop 73
attttagaggataagcaggttcttg

SEQ ID NO: 277869 - DNA, 25 bp, Artificial
  probe
  misc_feature (1)..(25): SEQ ID NO: 925; WAN024CNC; Start 135; Stop 159
tttgatggcaagtttggattggaca

SEQ ID NO: 277870 - DNA, 25 bp, Artificial
  probe
  misc_feature (1)..(25): SEQ ID NO: 925; WAN024CNC; Start 367; Stop 391
ttttatgaaaatgccaaacctgtca

SEQ ID NO: 277871 - DNA, 25 bp, Artificial
  probe
  misc_feature (1)..(25): SEQ ID NO: 925; WAN024CNC; Start 444; Stop 468
tagtcaggtaacctttgtcggagaa

SEQ ID NO: 277872 - DNA, 25 bp, Artificial
  probe
  misc_feature (1)..(25): SEQ ID NO: 925; WAN024CNC; Start 136; Stop 160
ttgatggcaagtttggattggacac

SEQ ID NO: 277873 - DNA, 25 bp, Artificial
  probe
  misc_feature (1)..(25): SEQ ID NO: 925; WAN024CNC; Start 51; Stop 75
tttagaggataagcaggttcttgcc

SEQ ID NO: 277874 - DNA, 25 bp, Artificial
  probe
  misc_feature (1)..(25): SEQ ID NO: 925; WAN024CNC; Start 48; Stop 72
tattttagaggataagcaggttctt

SEQ ID NO: 277875 - DNA, 25 bp, Artificial
  probe
  misc_feature (1)..(25): SEQ ID NO: 925; WAN024CNC; Start 443; Stop 467
ctagtcaggtaacctttgtcggaga

SEQ ID NO: 277876 - DNA, 25 bp, Artificial
  probe
  misc_feature (1)..(25): SEQ ID NO: 925; WAN024CNC; Start 134; Stop 158
ttttgatggcaagtttggattggac

SEQ ID NO: 277877 - DNA, 25 bp, Artificial
  probe
  misc_feature (1)..(25): SEQ ID NO: 925; WAN024CNC; Start 448; Stop 472
caggtaacctttgtcggagaagttg

SEQ ID NO: 277878 - DNA, 25 bp, Artificial
  probe
  misc_feature (1)..(25): SEQ ID NO: 925; WAN024CNC; Start 447; Stop 471
tcaggtaacctttgtcggagaagtt

SEQ ID NO: 277879 - DNA, 25 bp, Artificial
  probe
  misc_feature (1)..(25): SEQ ID NO: 925; WAN024CNC; Start 368; Stop 392
tttatgaaaatgccaaacctgtcat

SEQ ID NO: 277880 - DNA, 25 bp, Artificial
  probe
  misc_feature (1)..(25): SEQ ID NO: 925; WAN024CNC; Start 52; Stop 76
ttagaggataagcaggttcttgccg

SEQ ID NO: 277881 - DNA, 25 bp, Artificial
  probe
  misc_feature (1)..(25): SEQ ID NO: 925; WAN024CNC; Start 5; Stop 29
aagtattagcttttgatacgtccag

SEQ ID NO: 277882 - DNA, 25 bp, Artificial
  probe
  misc_feature (1)..(25): SEQ ID NO: 925; WAN024CNC; Start 369; Stop 393
ttatgaaaatgccaaacctgtcatg

SEQ ID NO: 277883 - DNA, 25 bp, Artificial
  probe
  misc_feature (1)..(25): SEQ ID NO: 925; WAN024CNC; Start 445; Stop 469
agtcaggtaacctttgtcggagaag

SEQ ID NO: 277884 - DNA, 25 bp, Artificial
  probe
  misc_feature (1)..(25): SEQ ID NO: 925; WAN024CNC; Start 50; Stop 74
ttttagaggataagcaggttcttgc

SEQ ID NO: 277885 - DNA, 25 bp, Artificial
  probe
  misc_feature (1)..(25): SEQ ID NO: 925; WAN024CNC; Start 446; Stop 470
gtcaggtaacctttgtcggagaagt

SEQ ID NO: 277886 - DNA, 25 bp, Artificial
  probe
  misc_feature (1)..(25): SEQ ID NO: 925; WAN024CNC; Start 8; Stop 32
tattagcttttgatacgtccagcaa

SEQ ID NO: 277887 - DNA, 25 bp, Artificial
  probe
  misc_feature (1)..(25): SEQ ID NO: 925; WAN024CNC; Start 370; Stop 394
tatgaaaatgccaaacctgtcatgg

SEQ ID NO: 277888 - DNA, 25 bp, Artificial
  probe
  misc_feature (1)..(25): SEQ ID NO: 925; WAN024CNC; Start 6; Stop 30
agtattagcttttgatacgtccagc

SEQ ID NO: 277889 - DNA, 25 bp, Artificial
  probe
  misc_feature (1)..(25): SEQ ID NO: 925; WAN024CNC; Start 4; Stop 28
aaagtattagcttttgatacgtcca

SEQ ID NO: 277890 - DNA, 25 bp, Artificial
  probe
  misc_feature (1)..(25): SEQ ID NO: 925; WAN024CNC; Start 7; Stop 31
gtattagcttttgatacgtccagca

SEQ ID NO: 277891 - DNA, 25 bp, Artificial
  probe
  misc_feature (1)..(25): SEQ ID NO: 925; WAN024CNC; Start 3; Stop 27
gaaagtattagcttttgatacgtcc

SEQ ID NO: 277892 - DNA, 25 bp, Artificial
  probe
  misc_feature (1)..(25): SEQ ID NO: 925; WAN024CNC; Start 9; Stop 33
attagcttttgatacgtccagcaag

SEQ ID NO: 277893 - DNA, 25 bp, Artificial
  probe
  misc_feature (1)..(25): SEQ ID NO: 925; WAN024CNC; Start 53; Stop 77
tagaggataagcaggttcttgccga

SEQ ID NO: 277894 - DNA, 25 bp, Artificial
  probe
  misc_feature (1)..(25): SEQ ID NO: 925; WAN024CNC; Start 2; Stop 26
tgaaagtattagcttttgatacgtc

SEQ ID NO: 277895 - DNA, 25 bp, Artificial
  probe
  misc_feature (1)..(25): SEQ ID NO: 925; WAN024CNC; Start 1; Stop 25
atgaaagtattagcttttgatacgt

SEQ ID NO: 277896 - DNA, 25 bp, Artificial
  probe
  misc_feature (1)..(25): SEQ ID NO: 925; WAN024CNC; Start 16; Stop 40
tttgatacgtccagcaaggctcttt

SEQ ID NO: 277897 - DNA, 25 bp, Artificial
  probe
  misc_feature (1)..(25): SEQ ID NO: 926; WAN024CXI; Start 500; Stop 524
cttatatgatggaacaggtggtgaa

SEQ ID NO: 277898 - DNA, 25 bp, Artificial
  probe
  misc_feature (1)..(25): SEQ ID NO: 926; WAN024CXI; Start 147; Stop 171
agtattggaagaagagatgaatcgt

SEQ ID NO: 277899 - DNA, 25 bp, Artificial
  probe
  misc_feature (1)..(25): SEQ ID NO: 926; WAN024CXI; Start 501; Stop 525
ttatatgatggaacaggtggtgaac

SEQ ID NO: 277900 - DNA, 25 bp, Artificial
  probe
  misc_feature (1)..(25): SEQ ID NO: 926; WAN024CXI; Start 148; Stop 172
gtattggaagaagagatgaatcgtt

SEQ ID NO: 277901 - DNA, 25 bp, Artificial
  probe
  misc_feature (1)..(25): SEQ ID NO: 926; WAN024CXI; Start 137; Stop 161
aatctgctcaagtattggaagaaga

SEQ ID NO: 277902 - DNA, 25 bp, Artificial
  probe
  misc_feature (1)..(25): SEQ ID NO: 926; WAN024CXI; Start 146; Stop 170
aagtattggaagaagagatgaatcg

SEQ ID NO: 277903 - DNA, 25 bp, Artificial
  probe
  misc_feature (1)..(25): SEQ ID NO: 926; WAN024CXI; Start 151; Stop 175
ttggaagaagagatgaatcgttatc

SEQ ID NO: 277904 - DNA, 25 bp, Artificial
  probe
  misc_feature (1)..(25): SEQ ID NO: 926; WAN024CXI; Start 502; Stop 526
tatatgatggaacaggtggtgaaca

SEQ ID NO: 277905 - DNA, 25 bp, Artificial
  probe
  misc_feature (1)..(25): SEQ ID NO: 926; WAN024CXI; Start 161; Stop 185
agatgaatcgttatcaacctgactt

SEQ ID NO: 277906 - DNA, 25 bp, Artificial
  probe
  misc_feature (1)..(25): SEQ ID NO: 926; WAN024CXI; Start 158; Stop 182
aagagatgaatcgttatcaacctga

SEQ ID NO: 277907 - DNA, 25 bp, Artificial
  probe
  misc_feature (1)..(25): SEQ ID NO: 926; WAN024CXI; Start 160; Stop 184
gagatgaatcgttatcaacctgact

SEQ ID NO: 277908 - DNA, 25 bp, Artificial
  probe
  misc_feature (1)..(25): SEQ ID NO: 926; WAN024CXI; Start 159; Stop 183
agagatgaatcgttatcaacctgac

SEQ ID NO: 277909 - DNA, 25 bp, Artificial
  probe
  misc_feature (1)..(25): SEQ ID NO: 926; WAN024CXI; Start 157; Stop 181
gaagagatgaatcgttatcaacctg

SEQ ID NO: 277910 - DNA, 25 bp, Artificial
  probe
  misc_feature (1)..(25): SEQ ID NO: 926; WAN024CXI; Start 152; Stop 176
tggaagaagagatgaatcgttatca

SEQ ID NO: 277911 - DNA, 25 bp, Artificial
  probe
  misc_feature (1)..(25): SEQ ID NO: 926; WAN024CXI; Start 156; Stop 180
agaagagatgaatcgttatcaacct

SEQ ID NO: 277912 - DNA, 25 bp, Artificial
  probe
  misc_feature (1)..(25): SEQ ID NO: 926; WAN024CXI; Start 142; Stop 166
gctcaagtattggaagaagagatga

SEQ ID NO: 277913 - DNA, 25 bp, Artificial
  probe
  misc_feature (1)..(25): SEQ ID NO: 926; WAN024CXI; Start 140; Stop 164
ctgctcaagtattggaagaagagat

SEQ ID NO: 277914 - DNA, 25 bp, Artificial
  probe
  misc_feature (1)..(25): SEQ ID NO: 926; WAN024CXI; Start 138; Stop 162
atctgctcaagtattggaagaagag

SEQ ID NO: 277915 - DNA, 25 bp, Artificial
  probe
  misc_feature (1)..(25): SEQ ID NO: 926; WAN024CXI; Start 141; Stop 165
tgctcaagtattggaagaagagatg

SEQ ID NO: 277916 - DNA, 25 bp, Artificial
  probe
  misc_feature (1)..(25): SEQ ID NO: 926; WAN024CXI; Start 155; Stop 179
aagaagagatgaatcgttatcaacc

SEQ ID NO: 277917 - DNA, 25 bp, Artificial
  probe
  misc_feature (1)..(25): SEQ ID NO: 926; WAN024CXI; Start 150; Stop 174
attggaagaagagatgaatcgttat

SEQ ID NO: 277918 - DNA, 25 bp, Artificial
  probe
  misc_feature (1)..(25): SEQ ID NO: 926; WAN024CXI; Start 153; Stop 177
ggaagaagagatgaatcgttatcaa

SEQ ID NO: 277919 - DNA, 25 bp, Artificial
  probe
  misc_feature (1)..(25): SEQ ID NO: 926; WAN024CXI; Start 139; Stop 163
tctgctcaagtattggaagaagaga

SEQ ID NO: 277920 - DNA, 25 bp, Artificial
  probe
  misc_feature (1)..(25): SEQ ID NO: 926; WAN024CXI; Start 143; Stop 167
ctcaagtattggaagaagagatgaa

SEQ ID NO: 277921 - DNA, 25 bp, Artificial
  probe
  misc_feature (1)..(25): SEQ ID NO: 926; WAN024CXI; Start 149; Stop 173
tattggaagaagagatgaatcgtta

SEQ ID NO: 277922 - DNA, 25 bp, Artificial
  probe
  misc_feature (1)..(25): SEQ ID NO: 926; WAN024CXI; Start 595; Stop 619
atagaacatggagatcaggaactca

SEQ ID NO: 277923 - DNA, 25 bp, Artificial
  probe
  misc_feature (1)..(25): SEQ ID NO: 926; WAN024CXI; Start 503; Stop 527
atatgatggaacaggtggtgaacag

SEQ ID NO: 277924 - DNA, 25 bp, Artificial
  probe
  misc_feature (1)..(25): SEQ ID NO: 926; WAN024CXI; Start 596; Stop 620
tagaacatggagatcaggaactcaa

SEQ ID NO: 277925 - DNA, 25 bp, Artificial
  probe
  misc_feature (1)..(25): SEQ ID NO: 926; WAN024CXI; Start 154; Stop 178
gaagaagagatgaatcgttatcaac

SEQ ID NO: 277926 - DNA, 25 bp, Artificial
  probe
  misc_feature (1)..(25): SEQ ID NO: 926; WAN024CXI; Start 144; Stop 168
tcaagtattggaagaagagatgaat

SEQ ID NO: 277927 - DNA, 25 bp, Artificial
  probe
  misc_feature (1)..(25): SEQ ID NO: 926; WAN024CXI; Start 145; Stop 169
caagtattggaagaagagatgaatc

SEQ ID NO: 277928 - DNA, 25 bp, Artificial
  probe
  misc_feature (1)..(25): SEQ ID NO: 926; WAN024CXI; Start 433; Stop 457
atgtatcaggctctctatttggtag

SEQ ID NO: 277929 - DNA, 25 bp, Artificial
  probe
  misc_feature (1)..(25): SEQ ID NO: 926; WAN024CXI; Start 499; Stop 523
ccttatatgatggaacaggtggtga

SEQ ID NO: 277930 - DNA, 25 bp, Artificial
  probe
  misc_feature (1)..(25): SEQ ID NO: 927; WAN024FYJ; Start 1327; Stop 1351
gtgcttggtggaatcatttatcttt

SEQ ID NO: 277931 - DNA, 25 bp, Artificial
  probe
  misc_feature (1)..(25): SEQ ID NO: 927; WAN024FYJ; Start 1326; Stop 1350
agtgcttggtggaatcatttatctt

SEQ ID NO: 277932 - DNA, 25 bp, Artificial
  probe
  misc_feature (1)..(25): SEQ ID NO: 927; WAN024FYJ; Start 1167; Stop 1191
ggcgatacaattatactttacccgt

SEQ ID NO: 277933 - DNA, 25 bp, Artificial
  probe
  misc_feature (1)..(25): SEQ ID NO: 927; WAN024FYJ; Start 1325; Stop 1349
cagtgcttggtggaatcatttatct

SEQ ID NO: 277934 - DNA, 25 bp, Artificial
  probe
  misc_feature (1)..(25): SEQ ID NO: 927; WAN024FYJ; Start 1164; Stop 1188
atgggcgatacaattatactttacc

SEQ ID NO: 277935 - DNA, 25 bp, Artificial
  probe
  misc_feature (1)..(25): SEQ ID NO: 927; WAN024FYJ; Start 1168; Stop 1192
gcgatacaattatactttacccgta

SEQ ID NO: 277936 - DNA, 25 bp, Artificial
  probe
  misc_feature (1)..(25): SEQ ID NO: 927; WAN024FYJ; Start 1310; Stop 1334
atgttatagtatttgcagtgcttgg

SEQ ID NO: 277937 - DNA, 25 bp, Artificial
  probe
  misc_feature (1)..(25): SEQ ID NO: 927; WAN024FYJ; Start 1312; Stop 1336
gttatagtatttgcagtgcttggtg

SEQ ID NO: 277938 - DNA, 25 bp, Artificial
  probe
  misc_feature (1)..(25): SEQ ID NO: 927; WAN024FYJ; Start 1311; Stop 1335
tgttatagtatttgcagtgcttggt

SEQ ID NO: 277939 - DNA, 25 bp, Artificial
  probe
  misc_feature (1)..(25): SEQ ID NO: 927; WAN024FYJ; Start 1313; Stop 1337
ttatagtatttgcagtgcttggtgg

SEQ ID NO: 277940 - DNA, 25 bp, Artificial
  probe
  misc_feature (1)..(25): SEQ ID NO: 927; WAN024FYJ; Start 1324; Stop 1348
gcagtgcttggtggaatcatttatc

SEQ ID NO: 277941 - DNA, 25 bp, Artificial
  probe
  misc_feature (1)..(25): SEQ ID NO: 927; WAN024FYJ; Start 1169; Stop 1193
cgatacaattatactttacccgtag

SEQ ID NO: 277942 - DNA, 25 bp, Artificial
  probe
  misc_feature (1)..(25): SEQ ID NO: 927; WAN024FYJ; Start 1309; Stop 1333
aatgttatagtatttgcagtgcttg

SEQ ID NO: 277943 - DNA, 25 bp, Artificial
  probe
  misc_feature (1)..(25): SEQ ID NO: 927; WAN024FYJ; Start 1186; Stop 1210
acccgtagatacctaaaagaagttc

SEQ ID NO: 277944 - DNA, 25 bp, Artificial
  probe
  misc_feature (1)..(25): SEQ ID NO: 927; WAN024FYJ; Start 1328; Stop 1352
tgcttggtggaatcatttatctttt

SEQ ID NO: 277945 - DNA, 25 bp, Artificial
  probe
  misc_feature (1)..(25): SEQ ID NO: 927; WAN024FYJ; Start 1187; Stop 1211
cccgtagatacctaaaagaagttcc

SEQ ID NO: 277946 - DNA, 25 bp, Artificial
  probe
  misc_feature (1)..(25): SEQ ID NO: 927; WAN024FYJ; Start 1314; Stop 1338
tatagtatttgcagtgcttggtgga

SEQ ID NO: 277947 - DNA, 25 bp, Artificial
  probe
  misc_feature (1)..(25): SEQ ID NO: 927; WAN024FYJ; Start 1174; Stop 1198
caattatactttacccgtagatacc

SEQ ID NO: 277948 - DNA, 25 bp, Artificial
  probe
  misc_feature (1)..(25): SEQ ID NO: 927; WAN024FYJ; Start 1163; Stop 1187
tatgggcgatacaattatactttac

SEQ ID NO: 277949 - DNA, 25 bp, Artificial
  probe
  misc_feature (1)..(25): SEQ ID NO: 927; WAN024FYJ; Start 1185; Stop 1209
tacccgtagatacctaaaagaagtt

SEQ ID NO: 277950 - DNA, 25 bp, Artificial
  probe
  misc_feature (1)..(25): SEQ ID NO: 927; WAN024FYJ; Start 1184; Stop 1208
ttacccgtagatacctaaaagaagt

SEQ ID NO: 277951 - DNA, 25 bp, Artificial
  probe
  misc_feature (1)..(25): SEQ ID NO: 927; WAN024FYJ; Start 1165; Stop 1189
tgggcgatacaattatactttaccc

SEQ ID NO: 277952 - DNA, 25 bp, Artificial
  probe
  misc_feature (1)..(25): SEQ ID NO: 927; WAN024FYJ; Start 1175; Stop 1199
aattatactttacccgtagatacct

SEQ ID NO: 277953 - DNA, 25 bp, Artificial
  probe
  misc_feature (1)..(25): SEQ ID NO: 927; WAN024FYJ; Start 1166; Stop 1190
gggcgatacaattatactttacccg

SEQ ID NO: 277954 - DNA, 25 bp, Artificial
  probe
  misc_feature (1)..(25): SEQ ID NO: 927; WAN024FYJ; Start 1316; Stop 1340
tagtatttgcagtgcttggtggaat

SEQ ID NO: 277955 - DNA, 25 bp, Artificial
  probe
  misc_feature (1)..(25): SEQ ID NO: 927; WAN024FYJ; Start 1315; Stop 1339
atagtatttgcagtgcttggtggaa

SEQ ID NO: 277956 - DNA, 25 bp, Artificial
  probe
  misc_feature (1)..(25): SEQ ID NO: 927; WAN024FYJ; Start 1308; Stop 1332
aaatgttatagtatttgcagtgctt

SEQ ID NO: 277957 - DNA, 25 bp, Artificial
  probe
  misc_feature (1)..(25): SEQ ID NO: 927; WAN024FYJ; Start 1177; Stop 1201
ttatactttacccgtagatacctaa

SEQ ID NO: 277958 - DNA, 25 bp, Artificial
  probe
  misc_feature (1)..(25): SEQ ID NO: 927; WAN024FYJ; Start 1162; Stop 1186
gtatgggcgatacaattatacttta

SEQ ID NO: 277959 - DNA, 25 bp, Artificial
  probe
  misc_feature (1)..(25): SEQ ID NO: 927; WAN024FYJ; Start 1173; Stop 1197
acaattatactttacccgtagatac

SEQ ID NO: 277960 - DNA, 25 bp, Artificial
  probe
  misc_feature (1)..(25): SEQ ID NO: 927; WAN024FYJ; Start 1183; Stop 1207
tttacccgtagatacctaaaagaag

SEQ ID NO: 277961 - DNA, 25 bp, Artificial
  probe
  misc_feature (1)..(25): SEQ ID NO: 927; WAN024FYJ; Start 1178; Stop 1202
tatactttacccgtagatacctaaa

SEQ ID NO: 277962 - DNA, 25 bp, Artificial
  probe
  misc_feature (1)..(25): SEQ ID NO: 927; WAN024FYJ; Start 1323; Stop 1347
tgcagtgcttggtggaatcatttat

SEQ ID NO: 277963 - DNA, 25 bp, Artificial
  probe
  misc_feature (1)..(25): SEQ ID NO: 928; WAN024DI4; Start 217; Stop 241
agagatggtggtgatgaactatatc

SEQ ID NO: 277964 - DNA, 25 bp, Artificial
  probe
  misc_feature (1)..(25): SEQ ID NO: 928; WAN024DI4; Start 213; Stop 237
ggatagagatggtggtgatgaacta

SEQ ID NO: 277965 - DNA, 25 bp, Artificial
  probe
  misc_feature (1)..(25): SEQ ID NO: 928; WAN024DI4; Start 216; Stop 240
tagagatggtggtgatgaactatat

SEQ ID NO: 277966 - DNA, 25 bp, Artificial
  probe
  misc_feature (1)..(25): SEQ ID NO: 928; WAN024DI4; Start 214; Stop 238
gatagagatggtggtgatgaactat

SEQ ID NO: 277967 - DNA, 25 bp, Artificial
  probe
  misc_feature (1)..(25): SEQ ID NO: 928; WAN024DI4; Start 293; Stop 317
tagaagatcgtatcctagctcaaga

SEQ ID NO: 277968 - DNA, 25 bp, Artificial
  probe
  misc_feature (1)..(25): SEQ ID NO: 928; WAN024DI4; Start 295; Stop 319
gaagatcgtatcctagctcaagatg

SEQ ID NO: 277969 - DNA, 25 bp, Artificial
  probe
  misc_feature (1)..(25): SEQ ID NO: 928; WAN024DI4; Start 294; Stop 318
agaagatcgtatcctagctcaagat

SEQ ID NO: 277970 - DNA, 25 bp, Artificial
  probe
  misc_feature (1)..(25): SEQ ID NO: 928; WAN024DI4; Start 215; Stop 239
atagagatggtggtgatgaactata

SEQ ID NO: 277971 - DNA, 25 bp, Artificial
  probe
  misc_feature (1)..(25): SEQ ID NO: 928; WAN024DI4; Start 292; Stop 316
ttagaagatcgtatcctagctcaag

SEQ ID NO: 277972 - DNA, 25 bp, Artificial
  probe
  misc_feature (1)..(25): SEQ ID NO: 928; WAN024DI4; Start 99; Stop 123
ccaagtcgatccaatcagtattctt

SEQ ID NO: 277973 - DNA, 25 bp, Artificial
  probe
  misc_feature (1)..(25): SEQ ID NO: 928; WAN024DI4; Start 125; Stop 149
cctttggagattgtttgctgattac

SEQ ID NO: 277974 - DNA, 25 bp, Artificial
  probe
  misc_feature (1)..(25): SEQ ID NO: 928; WAN024DI4; Start 63; Stop 87
agatattcagatgctttaccagtcg

SEQ ID NO: 277975 - DNA, 25 bp, Artificial
  probe
  misc_feature (1)..(25): SEQ ID NO: 928; WAN024DI4; Start 296; Stop 320
aagatcgtatcctagctcaagatgg

SEQ ID NO: 277976 - DNA, 25 bp, Artificial
  probe
  misc_feature (1)..(25): SEQ ID NO: 928; WAN024DI4; Start 117; Stop 141
tattcttgcctttggagattgtttg

SEQ ID NO: 277977 - DNA, 25 bp, Artificial
  probe
  misc_feature (1)..(25): SEQ ID NO: 928; WAN024DI4; Start 116; Stop 140
gtattcttgcctttggagattgttt

SEQ ID NO: 277978 - DNA, 25 bp, Artificial
  probe
  misc_feature (1)..(25): SEQ ID NO: 928; WAN024DI4; Start 112; Stop 136
atcagtattcttgcctttggagatt

SEQ ID NO: 277979 - DNA, 25 bp, Artificial
  probe
  misc_feature (1)..(25): SEQ ID NO: 928; WAN024DI4; Start 111; Stop 135
aatcagtattcttgcctttggagat

SEQ ID NO: 277980 - DNA, 25 bp, Artificial
  probe
  misc_feature (1)..(25): SEQ ID NO: 928; WAN024DI4; Start 101; Stop 125
aagtcgatccaatcagtattcttgc

SEQ ID NO: 277981 - DNA, 25 bp, Artificial
  probe
  misc_feature (1)..(25): SEQ ID NO: 928; WAN024DI4; Start 332; Stop 356
aatggtataactggtgtgatggttt

SEQ ID NO: 277982 - DNA, 25 bp, Artificial
  probe
  misc_feature (1)..(25): SEQ ID NO: 928; WAN024DI4; Start 331; Stop 355
aaatggtataactggtgtgatggtt

SEQ ID NO: 277983 - DNA, 25 bp, Artificial
  probe
  misc_feature (1)..(25): SEQ ID NO: 928; WAN024DI4; Start 115; Stop 139
agtattcttgcctttggagattgtt

SEQ ID NO: 277984 - DNA, 25 bp, Artificial
  probe
  misc_feature (1)..(25): SEQ ID NO: 928; WAN024DI4; Start 64; Stop 88
gatattcagatgctttaccagtcgg

SEQ ID NO: 277985 - DNA, 25 bp, Artificial
  probe
  misc_feature (1)..(25): SEQ ID NO: 928; WAN024DI4; Start 61; Stop 85
caagatattcagatgctttaccagt

SEQ ID NO: 277986 - DNA, 25 bp, Artificial
  probe
  misc_feature (1)..(25): SEQ ID NO: 928; WAN024DI4; Start 113; Stop 137
tcagtattcttgcctttggagattg

SEQ ID NO: 277987 - DNA, 25 bp, Artificial
  probe
  misc_feature (1)..(25): SEQ ID NO: 928; WAN024DI4; Start 62; Stop 86
aagatattcagatgctttaccagtc

SEQ ID NO: 277988 - DNA, 25 bp, Artificial
  probe
  misc_feature (1)..(25): SEQ ID NO: 928; WAN024DI4; Start 110; Stop 134
caatcagtattcttgcctttggaga

SEQ ID NO: 277989 - DNA, 25 bp, Artificial
  probe
  misc_feature (1)..(25): SEQ ID NO: 928; WAN024DI4; Start 257; Stop 281
cttgcgaggaaagaaagatttactc

SEQ ID NO: 277990 - DNA, 25 bp, Artificial
  probe
  misc_feature (1)..(25): SEQ ID NO: 928; WAN024DI4; Start 258; Stop 282
ttgcgaggaaagaaagatttactct

SEQ ID NO: 277991 - DNA, 25 bp, Artificial
  probe
  misc_feature (1)..(25): SEQ ID NO: 928; WAN024DI4; Start 114; Stop 138
cagtattcttgcctttggagattgt

SEQ ID NO: 277992 - DNA, 25 bp, Artificial
  probe
  misc_feature (1)..(25): SEQ ID NO: 928; WAN024DI4; Start 126; Stop 150
ctttggagattgtttgctgattaca

SEQ ID NO: 277993 - DNA, 25 bp, Artificial
  probe
  misc_feature (1)..(25): SEQ ID NO: 928; WAN024DI4; Start 218; Stop 242
gagatggtggtgatgaactatatca

SEQ ID NO: 277994 - DNA, 25 bp, Artificial
  probe
  misc_feature (1)..(25): SEQ ID NO: 928; WAN024DI4; Start 261; Stop 285
cgaggaaagaaagatttactctgtt

SEQ ID NO: 277995 - DNA, 25 bp, Artificial
  probe
  misc_feature (1)..(25): SEQ ID NO: 928; WAN024DI4; Start 198; Stop 222
gatttctgctgagtgggatagagat

SEQ ID NO: 277996 - DNA, 25 bp, Artificial
  probe
  misc_feature (1)..(25): SEQ ID NO: 929; WAN024EZG; Start 176; Stop 200
agaacctcatccacatagatattgc

SEQ ID NO: 277997 - DNA, 25 bp, Artificial
  probe
  misc_feature (1)..(25): SEQ ID NO: 929; WAN024EZG; Start 182; Stop 206
tcatccacatagatattgccaagtc

SEQ ID NO: 277998 - DNA, 25 bp, Artificial
  probe
  misc_feature (1)..(25): SEQ ID NO: 929; WAN024EZG; Start 181; Stop 205
ctcatccacatagatattgccaagt

SEQ ID NO: 277999 - DNA, 25 bp, Artificial
  probe
  misc_feature (1)..(25): SEQ ID NO: 929; WAN024EZG; Start 177; Stop 201
gaacctcatccacatagatattgcc

SEQ ID NO: 278000 - DNA, 25 bp, Artificial
  probe
  misc_feature (1)..(25): SEQ ID NO: 929; WAN024EZG; Start 180; Stop 204
cctcatccacatagatattgccaag

SEQ ID NO: 278001 - DNA, 25 bp, Artificial
  probe
  misc_feature (1)..(25): SEQ ID NO: 929; WAN024EZG; Start 183; Stop 207
catccacatagatattgccaagtcc

SEQ ID NO: 278002 - DNA, 25 bp, Artificial
  probe
  misc_feature (1)..(25): SEQ ID NO: 929; WAN024EZG; Start 178; Stop 202
aacctcatccacatagatattgcca

SEQ ID NO: 278003 - DNA, 25 bp, Artificial
  probe
  misc_feature (1)..(25): SEQ ID NO: 929; WAN024EZG; Start 184; Stop 208
atccacatagatattgccaagtcca

SEQ ID NO: 278004 - DNA, 25 bp, Artificial
  probe
  misc_feature (1)..(25): SEQ ID NO: 929; WAN024EZG; Start 179; Stop 203
acctcatccacatagatattgccaa

SEQ ID NO: 278005 - DNA, 25 bp, Artificial
  probe
  misc_feature (1)..(25): SEQ ID NO: 929; WAN024EZG; Start 173; Stop 197
cagagaacctcatccacatagatat

SEQ ID NO: 278006 - DNA, 25 bp, Artificial
  probe
  misc_feature (1)..(25): SEQ ID NO: 929; WAN024EZG; Start 172; Stop 196
ccagagaacctcatccacatagata

SEQ ID NO: 278007 - DNA, 25 bp, Artificial
  probe
  misc_feature (1)..(25): SEQ ID NO: 929; WAN024EZG; Start 185; Stop 209
tccacatagatattgccaagtccag

SEQ ID NO: 278008 - DNA, 25 bp, Artificial
  probe
  misc_feature (1)..(25): SEQ ID NO: 929; WAN024EZG; Start 175; Stop 199
gagaacctcatccacatagatattg

SEQ ID NO: 278009 - DNA, 25 bp, Artificial
  probe
  misc_feature (1)..(25): SEQ ID NO: 929; WAN024EZG; Start 174; Stop 198
agagaacctcatccacatagatatt

SEQ ID NO: 278010 - DNA, 25 bp, Artificial
  probe
  misc_feature (1)..(25): SEQ ID NO: 929; WAN024EZG; Start 189; Stop 213
catagatattgccaagtccagctac

SEQ ID NO: 278011 - DNA, 25 bp, Artificial
  probe
  misc_feature (1)..(25): SEQ ID NO: 929; WAN024EZG; Start 188; Stop 212
acatagatattgccaagtccagcta

SEQ ID NO: 278012 - DNA, 25 bp, Artificial
  probe
  misc_feature (1)..(25): SEQ ID NO: 929; WAN024EZG; Start 190; Stop 214
atagatattgccaagtccagctacc

SEQ ID NO: 278013 - DNA, 25 bp, Artificial
  probe
  misc_feature (1)..(25): SEQ ID NO: 929; WAN024EZG; Start 30; Stop 54
caaaggcattggtataagtccgaat

SEQ ID NO: 278014 - DNA, 25 bp, Artificial
  probe
  misc_feature (1)..(25): SEQ ID NO: 929; WAN024EZG; Start 187; Stop 211
cacatagatattgccaagtccagct

SEQ ID NO: 278015 - DNA, 25 bp, Artificial
  probe
  misc_feature (1)..(25): SEQ ID NO: 929; WAN024EZG; Start 186; Stop 210
ccacatagatattgccaagtccagc

SEQ ID NO: 278016 - DNA, 25 bp, Artificial
  probe
  misc_feature (1)..(25): SEQ ID NO: 929; WAN024EZG; Start 36; Stop 60
cattggtataagtccgaatggtgga

SEQ ID NO: 278017 - DNA, 25 bp, Artificial
  probe
  misc_feature (1)..(25): SEQ ID NO: 929; WAN024EZG; Start 191; Stop 215
tagatattgccaagtccagctacca

SEQ ID NO: 278018 - DNA, 25 bp, Artificial
  probe
  misc_feature (1)..(25): SEQ ID NO: 929; WAN024EZG; Start 171; Stop 195
gccagagaacctcatccacatagat

SEQ ID NO: 278019 - DNA, 25 bp, Artificial
  probe
  misc_feature (1)..(25): SEQ ID NO: 929; WAN024EZG; Start 32; Stop 56
aaggcattggtataagtccgaatgg

SEQ ID NO: 278020 - DNA, 25 bp, Artificial
  probe
  misc_feature (1)..(25): SEQ ID NO: 929; WAN024EZG; Start 31; Stop 55
aaaggcattggtataagtccgaatg

SEQ ID NO: 278021 - DNA, 25 bp, Artificial
  probe
  misc_feature (1)..(25): SEQ ID NO: 929; WAN024EZG; Start 193; Stop 217
gatattgccaagtccagctaccaag

SEQ ID NO: 278022 - DNA, 25 bp, Artificial
  probe
  misc_feature (1)..(25): SEQ ID NO: 929; WAN024EZG; Start 192; Stop 216
agatattgccaagtccagctaccaa

SEQ ID NO: 278023 - DNA, 25 bp, Artificial
  probe
  misc_feature (1)..(25): SEQ ID NO: 929; WAN024EZG; Start 35; Stop 59
gcattggtataagtccgaatggtgg

SEQ ID NO: 278024 - DNA, 25 bp, Artificial
  probe
  misc_feature (1)..(25): SEQ ID NO: 929; WAN024EZG; Start 34; Stop 58
ggcattggtataagtccgaatggtg

SEQ ID NO: 278025 - DNA, 25 bp, Artificial
  probe
  misc_feature (1)..(25): SEQ ID NO: 929; WAN024EZG; Start 33; Stop 57
aggcattggtataagtccgaatggt

SEQ ID NO: 278026 - DNA, 25 bp, Artificial
  probe
  misc_feature (1)..(25): SEQ ID NO: 929; WAN024EZG; Start 121; Stop 145
ttcttctgctgtcaaagtctgggaa

SEQ ID NO: 278027 - DNA, 25 bp, Artificial
  probe
  misc_feature (1)..(25): SEQ ID NO: 929; WAN024EZG; Start 194; Stop 218
atattgccaagtccagctaccaagg

SEQ ID NO: 278028 - DNA, 25 bp, Artificial
  probe
  misc_feature (1)..(25): SEQ ID NO: 929; WAN024EZG; Start 120; Stop 144
cttcttctgctgtcaaagtctggga

SEQ ID NO: 278029 - DNA, 25 bp, Artificial
  probe
  misc_feature (1)..(25): SEQ ID NO: 930; WAN024F89; Start 90; Stop 114
aatcgtctatgtcggtcaagataag

SEQ ID NO: 278030 - DNA, 25 bp, Artificial
  probe
  misc_feature (1)..(25): SEQ ID NO: 930; WAN024F89; Start 55; Stop 79
tatcttgatggaatcttagcagtca

SEQ ID NO: 278031 - DNA, 25 bp, Artificial
  probe
  misc_feature (1)..(25): SEQ ID NO: 930; WAN024F89; Start 909; Stop 933
ctcggttgcttccaataacaatcta

SEQ ID NO: 278032 - DNA, 25 bp, Artificial
  probe
  misc_feature (1)..(25): SEQ ID NO: 930; WAN024F89; Start 54; Stop 78
ttatcttgatggaatcttagcagtc

SEQ ID NO: 278033 - DNA, 25 bp, Artificial
  probe
  misc_feature (1)..(25): SEQ ID NO: 930; WAN024F89; Start 910; Stop 934
tcggttgcttccaataacaatctag

SEQ ID NO: 278034 - DNA, 25 bp, Artificial
  probe
  misc_feature (1)..(25): SEQ ID NO: 930; WAN024F89; Start 60; Stop 84
tgatggaatcttagcagtcaaggat

SEQ ID NO: 278035 - DNA, 25 bp, Artificial
  probe
  misc_feature (1)..(25): SEQ ID NO: 930; WAN024F89; Start 91; Stop 115
atcgtctatgtcggtcaagataagc

SEQ ID NO: 278036 - DNA, 25 bp, Artificial
  probe
  misc_feature (1)..(25): SEQ ID NO: 930; WAN024F89; Start 66; Stop 90
aatcttagcagtcaaggattctcaa

SEQ ID NO: 278037 - DNA, 25 bp, Artificial
  probe
  misc_feature (1)..(25): SEQ ID NO: 930; WAN024F89; Start 61; Stop 85
gatggaatcttagcagtcaaggatt

SEQ ID NO: 278038 - DNA, 25 bp, Artificial
  probe
  misc_feature (1)..(25): SEQ ID NO: 930; WAN024F89; Start 907; Stop 931
gactcggttgcttccaataacaatc

SEQ ID NO: 278039 - DNA, 25 bp, Artificial
  probe
  misc_feature (1)..(25): SEQ ID NO: 930; WAN024F89; Start 130; Stop 154
caagctgagcagattatagactatc

SEQ ID NO: 278040 - DNA, 25 bp, Artificial
  probe
  misc_feature (1)..(25): SEQ ID NO: 930; WAN024F89; Start 816; Stop 840
ccacaatcctatcagtaacctcaaa

SEQ ID NO: 278041 - DNA, 25 bp, Artificial
  probe
  misc_feature (1)..(25): SEQ ID NO: 930; WAN024F89; Start 932; Stop 956
tagatatgtttgaggaaggaaggac

SEQ ID NO: 278042 - DNA, 25 bp, Artificial
  probe
  misc_feature (1)..(25): SEQ ID NO: 930; WAN024F89; Start 817; Stop 841
cacaatcctatcagtaacctcaaac

SEQ ID NO: 278043 - DNA, 25 bp, Artificial
  probe
  misc_feature (1)..(25): SEQ ID NO: 930; WAN024F89; Start 1189; Stop 1213
gatgtagatgatgtttatatcgccg

SEQ ID NO: 278044 - DNA, 25 bp, Artificial
  probe
  misc_feature (1)..(25): SEQ ID NO: 930; WAN024F89; Start 765; Stop 789
attaaacgagagagaaattgaacgc

SEQ ID NO: 278045 - DNA, 25 bp, Artificial
  probe
  misc_feature (1)..(25): SEQ ID NO: 930; WAN024F89; Start 94; Stop 118
gtctatgtcggtcaagataagccag

SEQ ID NO: 278046 - DNA, 25 bp, Artificial
  probe
  misc_feature (1)..(25): SEQ ID NO: 930; WAN024F89; Start 68; Stop 92
tcttagcagtcaaggattctcaaat

SEQ ID NO: 278047 - DNA, 25 bp, Artificial
  probe
  misc_feature (1)..(25): SEQ ID NO: 930; WAN024F89; Start 67; Stop 91
atcttagcagtcaaggattctcaaa

SEQ ID NO: 278048 - DNA, 25 bp, Artificial
  probe
  misc_feature (1)..(25): SEQ ID NO: 930; WAN024F89; Start 934; Stop 958
gatatgtttgaggaaggaaggactg

SEQ ID NO: 278049 - DNA, 25 bp, Artificial
  probe
  misc_feature (1)..(25): SEQ ID NO: 930; WAN024F89; Start 933; Stop 957
agatatgtttgaggaaggaaggact

SEQ ID NO: 278050 - DNA, 25 bp, Artificial
  probe
  misc_feature (1)..(25): SEQ ID NO: 930; WAN024F89; Start 131; Stop 155
aagctgagcagattatagactatca

SEQ ID NO: 278051 - DNA, 25 bp, Artificial
  probe
  misc_feature (1)..(25): SEQ ID NO: 930; WAN024F89; Start 908; Stop 932
actcggttgcttccaataacaatct

SEQ ID NO: 278052 - DNA, 25 bp, Artificial
  probe
  misc_feature (1)..(25): SEQ ID NO: 930; WAN024F89; Start 89; Stop 113
aaatcgtctatgtcggtcaagataa

SEQ ID NO: 278053 - DNA, 25 bp, Artificial
  probe
  misc_feature (1)..(25): SEQ ID NO: 930; WAN024F89; Start 136; Stop 160
gagcagattatagactatcagggag

SEQ ID NO: 278054 - DNA, 25 bp, Artificial
  probe
  misc_feature (1)..(25): SEQ ID NO: 930; WAN024F89; Start 1149; Stop 1173
aaatatgctgtctcacctggtttat

SEQ ID NO: 278055 - DNA, 25 bp, Artificial
  probe
  misc_feature (1)..(25): SEQ ID NO: 930; WAN024F89; Start 88; Stop 112
caaatcgtctatgtcggtcaagata

SEQ ID NO: 278056 - DNA, 25 bp, Artificial
  probe
  misc_feature (1)..(25): SEQ ID NO: 930; WAN024F89; Start 241; Stop 265
ctccatgaatggctcaatgactata

SEQ ID NO: 278057 - DNA, 25 bp, Artificial
  probe
  misc_feature (1)..(25): SEQ ID NO: 930; WAN024F89; Start 767; Stop 791
taaacgagagagaaattgaacgctt

SEQ ID NO: 278058 - DNA, 25 bp, Artificial
  probe
  misc_feature (1)..(25): SEQ ID NO: 930; WAN024F89; Start 766; Stop 790
ttaaacgagagagaaattgaacgct

SEQ ID NO: 278059 - DNA, 25 bp, Artificial
  probe
  misc_feature (1)..(25): SEQ ID NO: 930; WAN024F89; Start 416; Stop 440
aaacttccaagatgcgttgttattt

SEQ ID NO: 278060 - DNA, 25 bp, Artificial
  probe
  misc_feature (1)..(25): SEQ ID NO: 930; WAN024F89; Start 242; Stop 266
tccatgaatggctcaatgactatat

SEQ ID NO: 278061 - DNA, 25 bp, Artificial
  probe
  misc_feature (1)..(25): SEQ ID NO: 930; WAN024F89; Start 1150; Stop 1174
aatatgctgtctcacctggtttatg

SEQ ID NO: 278062 - DNA, 25 bp, Artificial
  probe
  misc_feature (1)..(25): SEQ ID NO: 931; WAN024DET; Start 88; Stop 112
ctgcttggtggtacttatccttatg

SEQ ID NO: 278063 - DNA, 25 bp, Artificial
  probe
  misc_feature (1)..(25): SEQ ID NO: 931; WAN024DET; Start 593; Stop 617
gccagtctgattattaccagttaca

SEQ ID NO: 278064 - DNA, 25 bp, Artificial
  probe
  misc_feature (1)..(25): SEQ ID NO: 931; WAN024DET; Start 595; Stop 619
cagtctgattattaccagttacagg

SEQ ID NO: 278065 - DNA, 25 bp, Artificial
  probe
  misc_feature (1)..(25): SEQ ID NO: 931; WAN024DET; Start 594; Stop 618
ccagtctgattattaccagttacag

SEQ ID NO: 278066 - DNA, 25 bp, Artificial
  probe
  misc_feature (1)..(25): SEQ ID NO: 931; WAN024DET; Start 89; Stop 113
tgcttggtggtacttatccttatgg

SEQ ID NO: 278067 - DNA, 25 bp, Artificial
  probe
  misc_feature (1)..(25): SEQ ID NO: 931; WAN024DET; Start 600; Stop 624
tgattattaccagttacaggttggc

SEQ ID NO: 278068 - DNA, 25 bp, Artificial
  probe
  misc_feature (1)..(25): SEQ ID NO: 931; WAN024DET; Start 599; Stop 623
ctgattattaccagttacaggttgg

SEQ ID NO: 278069 - DNA, 25 bp, Artificial
  probe
  misc_feature (1)..(25): SEQ ID NO: 931; WAN024DET; Start 87; Stop 111
gctgcttggtggtacttatccttat

SEQ ID NO: 278070 - DNA, 25 bp, Artificial
  probe
  misc_feature (1)..(25): SEQ ID NO: 931; WAN024DET; Start 596; Stop 620
agtctgattattaccagttacaggt

SEQ ID NO: 278071 - DNA, 25 bp, Artificial
  probe
  misc_feature (1)..(25): SEQ ID NO: 931; WAN024DET; Start 472; Stop 496
aaactgtctggaattacgattgaaa

SEQ ID NO: 278072 - DNA, 25 bp, Artificial
  probe
  misc_feature (1)..(25): SEQ ID NO: 931; WAN024DET; Start 601; Stop 625
gattattaccagttacaggttggcg

SEQ ID NO: 278073 - DNA, 25 bp, Artificial
  probe
  misc_feature (1)..(25): SEQ ID NO: 931; WAN024DET; Start 598; Stop 622
tctgattattaccagttacaggttg

SEQ ID NO: 278074 - DNA, 25 bp, Artificial
  probe
  misc_feature (1)..(25): SEQ ID NO: 931; WAN024DET; Start 597; Stop 621
gtctgattattaccagttacaggtt

SEQ ID NO: 278075 - DNA, 25 bp, Artificial
  probe
  misc_feature (1)..(25): SEQ ID NO: 931; WAN024DET; Start 321; Stop 345
tggagaagatttagttaaacaggtc

SEQ ID NO: 278076 - DNA, 25 bp, Artificial
  probe
  misc_feature (1)..(25): SEQ ID NO: 931; WAN024DET; Start 62; Stop 86
ataaaggagattatggtcgtctgct

SEQ ID NO: 278077 - DNA, 25 bp, Artificial
  probe
  misc_feature (1)..(25): SEQ ID NO: 931; WAN024DET; Start 327; Stop 351
agatttagttaaacaggtctttgct

SEQ ID NO: 278078 - DNA, 25 bp, Artificial
  probe
  misc_feature (1)..(25): SEQ ID NO: 931; WAN024DET; Start 847; Stop 871
agggtaagcaaagataaacttgttt

SEQ ID NO: 278079 - DNA, 25 bp, Artificial
  probe
  misc_feature (1)..(25): SEQ ID NO: 931; WAN024DET; Start 329; Stop 353
atttagttaaacaggtctttgctgg

SEQ ID NO: 278080 - DNA, 25 bp, Artificial
  probe
  misc_feature (1)..(25): SEQ ID NO: 931; WAN024DET; Start 322; Stop 346
ggagaagatttagttaaacaggtct

SEQ ID NO: 278081 - DNA, 25 bp, Artificial
  probe
  misc_feature (1)..(25): SEQ ID NO: 931; WAN024DET; Start 831; Stop 855
tatttgtcaacaagagagggtaagc

SEQ ID NO: 278082 - DNA, 25 bp, Artificial
  probe
  misc_feature (1)..(25): SEQ ID NO: 931; WAN024DET; Start 50; Stop 74
ctcgttcaagtcataaaggagatta

SEQ ID NO: 278083 - DNA, 25 bp, Artificial
  probe
  misc_feature (1)..(25): SEQ ID NO: 931; WAN024DET; Start 63; Stop 87
taaaggagattatggtcgtctgctg

SEQ ID NO: 278084 - DNA, 25 bp, Artificial
  probe
  misc_feature (1)..(25): SEQ ID NO: 931; WAN024DET; Start 46; Stop 70
cgttctcgttcaagtcataaaggag

SEQ ID NO: 278085 - DNA, 25 bp, Artificial
  probe
  misc_feature (1)..(25): SEQ ID NO: 931; WAN024DET; Start 827; Stop 851
aaattatttgtcaacaagagagggt

SEQ ID NO: 278086 - DNA, 25 bp, Artificial
  probe
  misc_feature (1)..(25): SEQ ID NO: 931; WAN024DET; Start 335; Stop 359
ttaaacaggtctttgctggcttaaa

SEQ ID NO: 278087 - DNA, 25 bp, Artificial
  probe
  misc_feature (1)..(25): SEQ ID NO: 931; WAN024DET; Start 328; Stop 352
gatttagttaaacaggtctttgctg

SEQ ID NO: 278088 - DNA, 25 bp, Artificial
  probe
  misc_feature (1)..(25): SEQ ID NO: 931; WAN024DET; Start 51; Stop 75
tcgttcaagtcataaaggagattat

SEQ ID NO: 278089 - DNA, 25 bp, Artificial
  probe
  misc_feature (1)..(25): SEQ ID NO: 931; WAN024DET; Start 830; Stop 854
ttatttgtcaacaagagagggtaag

SEQ ID NO: 278090 - DNA, 25 bp, Artificial
  probe
  misc_feature (1)..(25): SEQ ID NO: 931; WAN024DET; Start 86; Stop 110
tgctgcttggtggtacttatcctta

SEQ ID NO: 278091 - DNA, 25 bp, Artificial
  probe
  misc_feature (1)..(25): SEQ ID NO: 931; WAN024DET; Start 602; Stop 626
attattaccagttacaggttggcgg

SEQ ID NO: 278092 - DNA, 25 bp, Artificial
  probe
  misc_feature (1)..(25): SEQ ID NO: 931; WAN024DET; Start 334; Stop 358
gttaaacaggtctttgctggcttaa

SEQ ID NO: 278093 - DNA, 25 bp, Artificial
  probe
  misc_feature (1)..(25): SEQ ID NO: 931; WAN024DET; Start 330; Stop 354
tttagttaaacaggtctttgctggc

SEQ ID NO: 278094 - DNA, 25 bp, Artificial
  probe
  misc_feature (1)..(25): SEQ ID NO: 931; WAN024DET; Start 829; Stop 853
attatttgtcaacaagagagggtaa

SEQ ID NO: 278095 - DNA, 25 bp, Artificial
  probe
  misc_feature (1)..(25): SEQ ID NO: 932; WAN024DEV; Start 88; Stop 112
ttgcttggtgggacttatccttatg

SEQ ID NO: 278096 - DNA, 25 bp, Artificial
  probe
  misc_feature (1)..(25): SEQ ID NO: 932; WAN024DEV; Start 87; Stop 111
gttgcttggtgggacttatccttat

SEQ ID NO: 278097 - DNA, 25 bp, Artificial
  probe
  misc_feature (1)..(25): SEQ ID NO: 932; WAN024DEV; Start 91; Stop 115
cttggtgggacttatccttatggtg

SEQ ID NO: 278098 - DNA, 25 bp, Artificial
  probe
  misc_feature (1)..(25): SEQ ID NO: 932; WAN024DEV; Start 102; Stop 126
ttatccttatggtggtgccatcatc

SEQ ID NO: 278099 - DNA, 25 bp, Artificial
  probe
  misc_feature (1)..(25): SEQ ID NO: 932; WAN024DEV; Start 101; Stop 125
cttatccttatggtggtgccatcat

SEQ ID NO: 278100 - DNA, 25 bp, Artificial
  probe
  misc_feature (1)..(25): SEQ ID NO: 932; WAN024DEV; Start 53; Stop 77
gtacaagtcataaaggagactacgg

SEQ ID NO: 278101 - DNA, 25 bp, Artificial
  probe
  misc_feature (1)..(25): SEQ ID NO: 932; WAN024DEV; Start 86; Stop 110
tgttgcttggtgggacttatcctta

SEQ ID NO: 278102 - DNA, 25 bp, Artificial
  probe
  misc_feature (1)..(25): SEQ ID NO: 932; WAN024DEV; Start 54; Stop 78
tacaagtcataaaggagactacggt

SEQ ID NO: 278103 - DNA, 25 bp, Artificial
  probe
  misc_feature (1)..(25): SEQ ID NO: 932; WAN024DEV; Start 92; Stop 116
ttggtgggacttatccttatggtgg

SEQ ID NO: 278104 - DNA, 25 bp, Artificial
  probe
  misc_feature (1)..(25): SEQ ID NO: 932; WAN024DEV; Start 99; Stop 123
gacttatccttatggtggtgccatc

SEQ ID NO: 278105 - DNA, 25 bp, Artificial
  probe
  misc_feature (1)..(25): SEQ ID NO: 932; WAN024DEV; Start 55; Stop 79
acaagtcataaaggagactacggtc

SEQ ID NO: 278106 - DNA, 25 bp, Artificial
  probe
  misc_feature (1)..(25): SEQ ID NO: 932; WAN024DEV; Start 90; Stop 114
gcttggtgggacttatccttatggt

SEQ ID NO: 278107 - DNA, 25 bp, Artificial
  probe
  misc_feature (1)..(25): SEQ ID NO: 932; WAN024DEV; Start 89; Stop 113
tgcttggtgggacttatccttatgg

SEQ ID NO: 278108 - DNA, 25 bp, Artificial
  probe
  misc_feature (1)..(25): SEQ ID NO: 932; WAN024DEV; Start 191; Stop 215
atatccctgctctacacagccattt

SEQ ID NO: 278109 - DNA, 25 bp, Artificial
  probe
  misc_feature (1)..(25): SEQ ID NO: 932; WAN024DEV; Start 190; Stop 214
aatatccctgctctacacagccatt

SEQ ID NO: 278110 - DNA, 25 bp, Artificial
  probe
  misc_feature (1)..(25): SEQ ID NO: 932; WAN024DEV; Start 189; Stop 213
aaatatccctgctctacacagccat

SEQ ID NO: 278111 - DNA, 25 bp, Artificial
  probe
  misc_feature (1)..(25): SEQ ID NO: 932; WAN024DEV; Start 103; Stop 127
tatccttatggtggtgccatcatca

SEQ ID NO: 278112 - DNA, 25 bp, Artificial
  probe
  misc_feature (1)..(25): SEQ ID NO: 932; WAN024DEV; Start 94; Stop 118
ggtgggacttatccttatggtggtg

SEQ ID NO: 278113 - DNA, 25 bp, Artificial
  probe
  misc_feature (1)..(25): SEQ ID NO: 932; WAN024DEV; Start 100; Stop 124
acttatccttatggtggtgccatca

SEQ ID NO: 278114 - DNA, 25 bp, Artificial
  probe
  misc_feature (1)..(25): SEQ ID NO: 932; WAN024DEV; Start 56; Stop 80
caagtcataaaggagactacggtcg

SEQ ID NO: 278115 - DNA, 25 bp, Artificial
  probe
  misc_feature (1)..(25): SEQ ID NO: 932; WAN024DEV; Start 104; Stop 128
atccttatggtggtgccatcatcat

SEQ ID NO: 278116 - DNA, 25 bp, Artificial
  probe
  misc_feature (1)..(25): SEQ ID NO: 932; WAN024DEV; Start 93; Stop 117
tggtgggacttatccttatggtggt

SEQ ID NO: 278117 - DNA, 25 bp, Artificial
  probe
  misc_feature (1)..(25): SEQ ID NO: 932; WAN024DEV; Start 85; Stop 109
ctgttgcttggtgggacttatcctt

SEQ ID NO: 278118 - DNA, 25 bp, Artificial
  probe
  misc_feature (1)..(25): SEQ ID NO: 932; WAN024DEV; Start 57; Stop 81
aagtcataaaggagactacggtcgt

SEQ ID NO: 278119 - DNA, 25 bp, Artificial
  probe
  misc_feature (1)..(25): SEQ ID NO: 932; WAN024DEV; Start 192; Stop 216
tatccctgctctacacagccatttg

SEQ ID NO: 278120 - DNA, 25 bp, Artificial
  probe
  misc_feature (1)..(25): SEQ ID NO: 932; WAN024DEV; Start 95; Stop 119
gtgggacttatccttatggtggtgc

SEQ ID NO: 278121 - DNA, 25 bp, Artificial
  probe
  misc_feature (1)..(25): SEQ ID NO: 932; WAN024DEV; Start 98; Stop 122
ggacttatccttatggtggtgccat

SEQ ID NO: 278122 - DNA, 25 bp, Artificial
  probe
  misc_feature (1)..(25): SEQ ID NO: 932; WAN024DEV; Start 172; Stop 196
gttggaacggacagggaaaatatcc

SEQ ID NO: 278123 - DNA, 25 bp, Artificial
  probe
  misc_feature (1)..(25): SEQ ID NO: 932; WAN024DEV; Start 60; Stop 84
tcataaaggagactacggtcgtctg

SEQ ID NO: 278124 - DNA, 25 bp, Artificial
  probe
  misc_feature (1)..(25): SEQ ID NO: 932; WAN024DEV; Start 59; Stop 83
gtcataaaggagactacggtcgtct

SEQ ID NO: 278125 - DNA, 25 bp, Artificial
  probe
  misc_feature (1)..(25): SEQ ID NO: 932; WAN024DEV; Start 58; Stop 82
agtcataaaggagactacggtcgtc

SEQ ID NO: 278126 - DNA, 25 bp, Artificial
  probe
  misc_feature (1)..(25): SEQ ID NO: 932; WAN024DEV; Start 52; Stop 76
tgtacaagtcataaaggagactacg

SEQ ID NO: 278127 - DNA, 25 bp, Artificial
  probe
  misc_feature (1)..(25): SEQ ID NO: 932; WAN024DEV; Start 187; Stop 211
gaaaatatccctgctctacacagcc

SEQ ID NO: 278128 - DNA, 25 bp, Artificial
  probe
  misc_feature (1)..(25): SEQ ID NO: 933; WAN024DER; Start 436; Stop 460
cagcttatcctaactcctcaccaaa

SEQ ID NO: 278129 - DNA, 25 bp, Artificial
  probe
  misc_feature (1)..(25): SEQ ID NO: 933; WAN024DER; Start 435; Stop 459
ccagcttatcctaactcctcaccaa

SEQ ID NO: 278130 - DNA, 25 bp, Artificial
  probe
  misc_feature (1)..(25): SEQ ID NO: 933; WAN024DER; Start 430; Stop 454
tcaagccagcttatcctaactcctc

SEQ ID NO: 278131 - DNA, 25 bp, Artificial
  probe
  misc_feature (1)..(25): SEQ ID NO: 933; WAN024DER; Start 429; Stop 453
ctcaagccagcttatcctaactcct

SEQ ID NO: 278132 - DNA, 25 bp, Artificial
  probe
  misc_feature (1)..(25): SEQ ID NO: 933; WAN024DER; Start 485; Stop 509
ttacgattgaaaagcaaaaggaaga

SEQ ID NO: 278133 - DNA, 25 bp, Artificial
  probe
  misc_feature (1)..(25): SEQ ID NO: 933; WAN024DER; Start 486; Stop 510
tacgattgaaaagcaaaaggaagat

SEQ ID NO: 278134 - DNA, 25 bp, Artificial
  probe
  misc_feature (1)..(25): SEQ ID NO: 933; WAN024DER; Start 481; Stop 505
ggaattacgattgaaaagcaaaagg

SEQ ID NO: 278135 - DNA, 25 bp, Artificial
  probe
  misc_feature (1)..(25): SEQ ID NO: 933; WAN024DER; Start 432; Stop 456
aagccagcttatcctaactcctcac

SEQ ID NO: 278136 - DNA, 25 bp, Artificial
  probe
  misc_feature (1)..(25): SEQ ID NO: 933; WAN024DER; Start 431; Stop 455
caagccagcttatcctaactcctca

SEQ ID NO: 278137 - DNA, 25 bp, Artificial
  probe
  misc_feature (1)..(25): SEQ ID NO: 933; WAN024DER; Start 487; Stop 511
acgattgaaaagcaaaaggaagatg

SEQ ID NO: 278138 - DNA, 25 bp, Artificial
  probe
  misc_feature (1)..(25): SEQ ID NO: 933; WAN024DER; Start 477; Stop 501
atctggaattacgattgaaaagcaa

SEQ ID NO: 278139 - DNA, 25 bp, Artificial
  probe
  misc_feature (1)..(25): SEQ ID NO: 933; WAN024DER; Start 476; Stop 500
tatctggaattacgattgaaaagca

SEQ ID NO: 278140 - DNA, 25 bp, Artificial
  probe
  misc_feature (1)..(25): SEQ ID NO: 933; WAN024DER; Start 480; Stop 504
tggaattacgattgaaaagcaaaag

SEQ ID NO: 278141 - DNA, 25 bp, Artificial
  probe
  misc_feature (1)..(25): SEQ ID NO: 933; WAN024DER; Start 479; Stop 503
ctggaattacgattgaaaagcaaaa

SEQ ID NO: 278142 - DNA, 25 bp, Artificial
  probe
  misc_feature (1)..(25): SEQ ID NO: 933; WAN024DER; Start 484; Stop 508
attacgattgaaaagcaaaaggaag

SEQ ID NO: 278143 - DNA, 25 bp, Artificial
  probe
  misc_feature (1)..(25): SEQ ID NO: 933; WAN024DER; Start 541; Stop 565
caaggaacaattttggtggagaaag

SEQ ID NO: 278144 - DNA, 25 bp, Artificial
  probe
  misc_feature (1)..(25): SEQ ID NO: 933; WAN024DER; Start 482; Stop 506
gaattacgattgaaaagcaaaagga

SEQ ID NO: 278145 - DNA, 25 bp, Artificial
  probe
  misc_feature (1)..(25): SEQ ID NO: 933; WAN024DER; Start 394; Stop 418
ttgaccattcttgctaggacaagtt

SEQ ID NO: 278146 - DNA, 25 bp, Artificial
  probe
  misc_feature (1)..(25): SEQ ID NO: 933; WAN024DER; Start 540; Stop 564
tcaaggaacaattttggtggagaaa

SEQ ID NO: 278147 - DNA, 25 bp, Artificial
  probe
  misc_feature (1)..(25): SEQ ID NO: 933; WAN024DER; Start 483; Stop 507
aattacgattgaaaagcaaaaggaa

SEQ ID NO: 278148 - DNA, 25 bp, Artificial
  probe
  misc_feature (1)..(25): SEQ ID NO: 933; WAN024DER; Start 475; Stop 499
ttatctggaattacgattgaaaagc

SEQ ID NO: 278149 - DNA, 25 bp, Artificial
  probe
  misc_feature (1)..(25): SEQ ID NO: 933; WAN024DER; Start 393; Stop 417
cttgaccattcttgctaggacaagt

SEQ ID NO: 278150 - DNA, 25 bp, Artificial
  probe
  misc_feature (1)..(25): SEQ ID NO: 933; WAN024DER; Start 539; Stop 563
ctcaaggaacaattttggtggagaa

SEQ ID NO: 278151 - DNA, 25 bp, Artificial
  probe
  misc_feature (1)..(25): SEQ ID NO: 933; WAN024DER; Start 428; Stop 452
cctcaagccagcttatcctaactcc

SEQ ID NO: 278152 - DNA, 25 bp, Artificial
  probe
  misc_feature (1)..(25): SEQ ID NO: 933; WAN024DER; Start 437; Stop 461
agcttatcctaactcctcaccaaaa

SEQ ID NO: 278153 - DNA, 25 bp, Artificial
  probe
  misc_feature (1)..(25): SEQ ID NO: 933; WAN024DER; Start 392; Stop 416
ccttgaccattcttgctaggacaag

SEQ ID NO: 278154 - DNA, 25 bp, Artificial
  probe
  misc_feature (1)..(25): SEQ ID NO: 933; WAN024DER; Start 396; Stop 420
gaccattcttgctaggacaagtttg

SEQ ID NO: 278155 - DNA, 25 bp, Artificial
  probe
  misc_feature (1)..(25): SEQ ID NO: 933; WAN024DER; Start 391; Stop 415
gccttgaccattcttgctaggacaa

SEQ ID NO: 278156 - DNA, 25 bp, Artificial
  probe
  misc_feature (1)..(25): SEQ ID NO: 933; WAN024DER; Start 395; Stop 419
tgaccattcttgctaggacaagttt

SEQ ID NO: 278157 - DNA, 25 bp, Artificial
  probe
  misc_feature (1)..(25): SEQ ID NO: 933; WAN024DER; Start 397; Stop 421
accattcttgctaggacaagtttgt

SEQ ID NO: 278158 - DNA, 25 bp, Artificial
  probe
  misc_feature (1)..(25): SEQ ID NO: 933; WAN024DER; Start 538; Stop 562
cctcaaggaacaattttggtggaga

SEQ ID NO: 278159 - DNA, 25 bp, Artificial
  probe
  misc_feature (1)..(25): SEQ ID NO: 933; WAN024DER; Start 259; Stop 283
aaagagcaattggagaaggcagaag

SEQ ID NO: 278160 - DNA, 25 bp, Artificial
  probe
  misc_feature (1)..(25): SEQ ID NO: 933; WAN024DER; Start 472; Stop 496
aaattatctggaattacgattgaaa

SEQ ID NO: 278161 - DNA, 25 bp, Artificial
  probe
  misc_feature (1)..(25): SEQ ID NO: 934; WAN024GNL; Start 124; Stop 148
aatgctgaagatactaaggttacgg

SEQ ID NO: 278162 - DNA, 25 bp, Artificial
  probe
  misc_feature (1)..(25): SEQ ID NO: 934; WAN024GNL; Start 123; Stop 147
caatgctgaagatactaaggttacg

SEQ ID NO: 278163 - DNA, 25 bp, Artificial
  probe
  misc_feature (1)..(25): SEQ ID NO: 934; WAN024GNL; Start 128; Stop 152
ctgaagatactaaggttacggatgc

SEQ ID NO: 278164 - DNA, 25 bp, Artificial
  probe
  misc_feature (1)..(25): SEQ ID NO: 934; WAN024GNL; Start 127; Stop 151
gctgaagatactaaggttacggatg

SEQ ID NO: 278165 - DNA, 25 bp, Artificial
  probe
  misc_feature (1)..(25): SEQ ID NO: 934; WAN024GNL; Start 126; Stop 150
tgctgaagatactaaggttacggat

SEQ ID NO: 278166 - DNA, 25 bp, Artificial
  probe
  misc_feature (1)..(25): SEQ ID NO: 934; WAN024GNL; Start 125; Stop 149
atgctgaagatactaaggttacgga

SEQ ID NO: 278167 - DNA, 25 bp, Artificial
  probe
  misc_feature (1)..(25): SEQ ID NO: 934; WAN024GNL; Start 122; Stop 146
gcaatgctgaagatactaaggttac

SEQ ID NO: 278168 - DNA, 25 bp, Artificial
  probe
  misc_feature (1)..(25): SEQ ID NO: 934; WAN024GNL; Start 1243; Stop 1267
atccagatgatgtctcaaggttcta

SEQ ID NO: 278169 - DNA, 25 bp, Artificial
  probe
  misc_feature (1)..(25): SEQ ID NO: 934; WAN024GNL; Start 1249; Stop 1273
atgatgtctcaaggttctagtgaag

SEQ ID NO: 278170 - DNA, 25 bp, Artificial
  probe
  misc_feature (1)..(25): SEQ ID NO: 934; WAN024GNL; Start 1251; Stop 1275
gatgtctcaaggttctagtgaagtt

SEQ ID NO: 278171 - DNA, 25 bp, Artificial
  probe
  misc_feature (1)..(25): SEQ ID NO: 934; WAN024GNL; Start 1248; Stop 1272
gatgatgtctcaaggttctagtgaa

SEQ ID NO: 278172 - DNA, 25 bp, Artificial
  probe
  misc_feature (1)..(25): SEQ ID NO: 934; WAN024GNL; Start 121; Stop 145
cgcaatgctgaagatactaaggtta

SEQ ID NO: 278173 - DNA, 25 bp, Artificial
  probe
  misc_feature (1)..(25): SEQ ID NO: 934; WAN024GNL; Start 129; Stop 153
tgaagatactaaggttacggatgcc

SEQ ID NO: 278174 - DNA, 25 bp, Artificial
  probe
  misc_feature (1)..(25): SEQ ID NO: 934; WAN024GNL; Start 1247; Stop 1271
agatgatgtctcaaggttctagtga

SEQ ID NO: 278175 - DNA, 25 bp, Artificial
  probe
  misc_feature (1)..(25): SEQ ID NO: 934; WAN024GNL; Start 1246; Stop 1270
cagatgatgtctcaaggttctagtg

SEQ ID NO: 278176 - DNA, 25 bp, Artificial
  probe
  misc_feature (1)..(25): SEQ ID NO: 934; WAN024GNL; Start 600; Stop 624
tattacaggttctatcattgctgct

SEQ ID NO: 278177 - DNA, 25 bp, Artificial
  probe
  misc_feature (1)..(25): SEQ ID NO: 934; WAN024GNL; Start 1250; Stop 1274
tgatgtctcaaggttctagtgaagt

SEQ ID NO: 278178 - DNA, 25 bp, Artificial
  probe
  misc_feature (1)..(25): SEQ ID NO: 934; WAN024GNL; Start 844; Stop 868
catccaggtactcgtatcgttctaa

SEQ ID NO: 278179 - DNA, 25 bp, Artificial
  probe
  misc_feature (1)..(25): SEQ ID NO: 934; WAN024GNL; Start 987; Stop 1011
aatcctggaagaacttaacatcggt

SEQ ID NO: 278180 - DNA, 25 bp, Artificial
  probe
  misc_feature (1)..(25): SEQ ID NO: 934; WAN024GNL; Start 1244; Stop 1268
tccagatgatgtctcaaggttctag

SEQ ID NO: 278181 - DNA, 25 bp, Artificial
  probe
  misc_feature (1)..(25): SEQ ID NO: 934; WAN024GNL; Start 599; Stop 623
atattacaggttctatcattgctgc

SEQ ID NO: 278182 - DNA, 25 bp, Artificial
  probe
  misc_feature (1)..(25): SEQ ID NO: 934; WAN024GNL; Start 30; Stop 54
tcttgcctctgctagtcaattagaa

SEQ ID NO: 278183 - DNA, 25 bp, Artificial
  probe
  misc_feature (1)..(25): SEQ ID NO: 934; WAN024GNL; Start 27; Stop 51
ttctcttgcctctgctagtcaatta

SEQ ID NO: 278184 - DNA, 25 bp, Artificial
  probe
  misc_feature (1)..(25): SEQ ID NO: 934; WAN024GNL; Start 1245; Stop 1269
ccagatgatgtctcaaggttctagt

SEQ ID NO: 278185 - DNA, 25 bp, Artificial
  probe
  misc_feature (1)..(25): SEQ ID NO: 934; WAN024GNL; Start 601; Stop 625
attacaggttctatcattgctgctg

SEQ ID NO: 278186 - DNA, 25 bp, Artificial
  probe
  misc_feature (1)..(25): SEQ ID NO: 934; WAN024GNL; Start 988; Stop 1012
atcctggaagaacttaacatcggtt

SEQ ID NO: 278187 - DNA, 25 bp, Artificial
  probe
  misc_feature (1)..(25): SEQ ID NO: 934; WAN024GNL; Start 29; Stop 53
ctcttgcctctgctagtcaattaga

SEQ ID NO: 278188 - DNA, 25 bp, Artificial
  probe
  misc_feature (1)..(25): SEQ ID NO: 934; WAN024GNL; Start 28; Stop 52
tctcttgcctctgctagtcaattag

SEQ ID NO: 278189 - DNA, 25 bp, Artificial
  probe
  misc_feature (1)..(25): SEQ ID NO: 934; WAN024GNL; Start 469; Stop 493
gctcgcatcattccatcaagttatg

SEQ ID NO: 278190 - DNA, 25 bp, Artificial
  probe
  misc_feature (1)..(25): SEQ ID NO: 934; WAN024GNL; Start 478; Stop 502
attccatcaagttatgacaagattg

SEQ ID NO: 278191 - DNA, 25 bp, Artificial
  probe
  misc_feature (1)..(25): SEQ ID NO: 934; WAN024GNL; Start 477; Stop 501
cattccatcaagttatgacaagatt

SEQ ID NO: 278192 - DNA, 25 bp, Artificial
  probe
  misc_feature (1)..(25): SEQ ID NO: 934; WAN024GNL; Start 144; Stop 168
tacggatgccctgattaaatactac

SEQ ID NO: 278193 - DNA, 25 bp, Artificial
  probe
  misc_feature (1)..(25): SEQ ID NO: 934; WAN024GNL; Start 1295; Stop 1319
ataaagaccaagagaaagcagcaat

SEQ ID NO: 278194 - DNA, 25 bp, Artificial
  probe
  misc_feature (1)..(25): SEQ ID NO: 935; WAN024CX5; Start 30; Stop 54
tgaacatcaagtgagactagagaga

SEQ ID NO: 278195 - DNA, 25 bp, Artificial
  probe
  misc_feature (1)..(25): SEQ ID NO: 935; WAN024CX5; Start 31; Stop 55
gaacatcaagtgagactagagagaa

SEQ ID NO: 278196 - DNA, 25 bp, Artificial
  probe
  misc_feature (1)..(25): SEQ ID NO: 935; WAN024CX5; Start 672; Stop 696
ctatgaagaccatcgttgtcctatt

SEQ ID NO: 278197 - DNA, 25 bp, Artificial
  probe
  misc_feature (1)..(25): SEQ ID NO: 935; WAN024CX5; Start 32; Stop 56
aacatcaagtgagactagagagaat

SEQ ID NO: 278198 - DNA, 25 bp, Artificial
  probe
  misc_feature (1)..(25): SEQ ID NO: 935; WAN024CX5; Start 671; Stop 695
tctatgaagaccatcgttgtcctat

SEQ ID NO: 278199 - DNA, 25 bp, Artificial
  probe
  misc_feature (1)..(25): SEQ ID NO: 935; WAN024CX5; Start 670; Stop 694
ttctatgaagaccatcgttgtccta

SEQ ID NO: 278200 - DNA, 25 bp, Artificial
  probe
  misc_feature (1)..(25): SEQ ID NO: 935; WAN024CX5; Start 33; Stop 57
acatcaagtgagactagagagaata

SEQ ID NO: 278201 - DNA, 25 bp, Artificial
  probe
  misc_feature (1)..(25): SEQ ID NO: 935; WAN024CX5; Start 377; Stop 401
tctacacgaagagtatgttacttga

SEQ ID NO: 278202 - DNA, 25 bp, Artificial
  probe
  misc_feature (1)..(25): SEQ ID NO: 935; WAN024CX5; Start 89; Stop 113
caatatcatacaagacaacgggaaa

SEQ ID NO: 278203 - DNA, 25 bp, Artificial
  probe
  misc_feature (1)..(25): SEQ ID NO: 935; WAN024CX5; Start 40; Stop 64
gtgagactagagagaatattggatg

SEQ ID NO: 278204 - DNA, 25 bp, Artificial
  probe
  misc_feature (1)..(25): SEQ ID NO: 935; WAN024CX5; Start 41; Stop 65
tgagactagagagaatattggatga

SEQ ID NO: 278205 - DNA, 25 bp, Artificial
  probe
  misc_feature (1)..(25): SEQ ID NO: 935; WAN024CX5; Start 88; Stop 112
ccaatatcatacaagacaacgggaa

SEQ ID NO: 278206 - DNA, 25 bp, Artificial
  probe
  misc_feature (1)..(25): SEQ ID NO: 935; WAN024CX5; Start 112; Stop 136
aaagtccgtgaatttgaagaataca

SEQ ID NO: 278207 - DNA, 25 bp, Artificial
  probe
  misc_feature (1)..(25): SEQ ID NO: 935; WAN024CX5; Start 115; Stop 139
gtccgtgaatttgaagaatacattg

SEQ ID NO: 278208 - DNA, 25 bp, Artificial
  probe
  misc_feature (1)..(25): SEQ ID NO: 935; WAN024CX5; Start 378; Stop 402
ctacacgaagagtatgttacttgaa

SEQ ID NO: 278209 - DNA, 25 bp, Artificial
  probe
  misc_feature (1)..(25): SEQ ID NO: 935; WAN024CX5; Start 376; Stop 400
ttctacacgaagagtatgttacttg

SEQ ID NO: 278210 - DNA, 25 bp, Artificial
  probe
  misc_feature (1)..(25): SEQ ID NO: 935; WAN024CX5; Start 37; Stop 61
caagtgagactagagagaatattgg

SEQ ID NO: 278211 - DNA, 25 bp, Artificial
  probe
  misc_feature (1)..(25): SEQ ID NO: 935; WAN024CX5; Start 116; Stop 140
tccgtgaatttgaagaatacattga

SEQ ID NO: 278212 - DNA, 25 bp, Artificial
  probe
  misc_feature (1)..(25): SEQ ID NO: 935; WAN024CX5; Start 114; Stop 138
agtccgtgaatttgaagaatacatt

SEQ ID NO: 278213 - DNA, 25 bp, Artificial
  probe
  misc_feature (1)..(25): SEQ ID NO: 935; WAN024CX5; Start 113; Stop 137
aagtccgtgaatttgaagaatacat

SEQ ID NO: 278214 - DNA, 25 bp, Artificial
  probe
  misc_feature (1)..(25): SEQ ID NO: 935; WAN024CX5; Start 38; Stop 62
aagtgagactagagagaatattgga

SEQ ID NO: 278215 - DNA, 25 bp, Artificial
  probe
  misc_feature (1)..(25): SEQ ID NO: 935; WAN024CX5; Start 680; Stop 704
accatcgttgtcctatttcaagatt

SEQ ID NO: 278216 - DNA, 25 bp, Artificial
  probe
  misc_feature (1)..(25): SEQ ID NO: 935; WAN024CX5; Start 39; Stop 63
agtgagactagagagaatattggat

SEQ ID NO: 278217 - DNA, 25 bp, Artificial
  probe
  misc_feature (1)..(25): SEQ ID NO: 935; WAN024CX5; Start 681; Stop 705
ccatcgttgtcctatttcaagatta

SEQ ID NO: 278218 - DNA, 25 bp, Artificial
  probe
  misc_feature (1)..(25): SEQ ID NO: 935; WAN024CX5; Start 117; Stop 141
ccgtgaatttgaagaatacattgaa

SEQ ID NO: 278219 - DNA, 25 bp, Artificial
  probe
  misc_feature (1)..(25): SEQ ID NO: 935; WAN024CX5; Start 34; Stop 58
catcaagtgagactagagagaatat

SEQ ID NO: 278220 - DNA, 25 bp, Artificial
  probe
  misc_feature (1)..(25): SEQ ID NO: 935; WAN024CX5; Start 673; Stop 697
tatgaagaccatcgttgtcctattt

SEQ ID NO: 278221 - DNA, 25 bp, Artificial
  probe
  misc_feature (1)..(25): SEQ ID NO: 935; WAN024CX5; Start 220; Stop 244
ctcattcgtcattacaatccttacg

SEQ ID NO: 278222 - DNA, 25 bp, Artificial
  probe
  misc_feature (1)..(25): SEQ ID NO: 935; WAN024CX5; Start 42; Stop 66
gagactagagagaatattggatgaa

SEQ ID NO: 278223 - DNA, 25 bp, Artificial
  probe
  misc_feature (1)..(25): SEQ ID NO: 935; WAN024CX5; Start 29; Stop 53
ttgaacatcaagtgagactagagag

SEQ ID NO: 278224 - DNA, 25 bp, Artificial
  probe
  misc_feature (1)..(25): SEQ ID NO: 935; WAN024CX5; Start 679; Stop 703
gaccatcgttgtcctatttcaagat

SEQ ID NO: 278225 - DNA, 25 bp, Artificial
  probe
  misc_feature (1)..(25): SEQ ID NO: 935; WAN024CX5; Start 674; Stop 698
atgaagaccatcgttgtcctatttc

SEQ ID NO: 278226 - DNA, 25 bp, Artificial
  probe
  misc_feature (1)..(25): SEQ ID NO: 935; WAN024CX5; Start 28; Stop 52
attgaacatcaagtgagactagaga

SEQ ID NO: 278227 - DNA, 25 bp, Artificial
  probe
  misc_feature (1)..(25): SEQ ID NO: 936; WAN024FUN; Start 146; Stop 170
cctgttattatccaaccaatcgtaa

SEQ ID NO: 278228 - DNA, 25 bp, Artificial
  probe
  misc_feature (1)..(25): SEQ ID NO: 936; WAN024FUN; Start 118; Stop 142
agtgtactctctgaggaagttgtat

SEQ ID NO: 278229 - DNA, 25 bp, Artificial
  probe
  misc_feature (1)..(25): SEQ ID NO: 936; WAN024FUN; Start 119; Stop 143
gtgtactctctgaggaagttgtata

SEQ ID NO: 278230 - DNA, 25 bp, Artificial
  probe
  misc_feature (1)..(25): SEQ ID NO: 936; WAN024FUN; Start 117; Stop 141
gagtgtactctctgaggaagttgta

SEQ ID NO: 278231 - DNA, 25 bp, Artificial
  probe
  misc_feature (1)..(25): SEQ ID NO: 936; WAN024FUN; Start 122; Stop 146
tactctctgaggaagttgtatatcc

SEQ ID NO: 278232 - DNA, 25 bp, Artificial
  probe
  misc_feature (1)..(25): SEQ ID NO: 936; WAN024FUN; Start 120; Stop 144
tgtactctctgaggaagttgtatat

SEQ ID NO: 278233 - DNA, 25 bp, Artificial
  probe
  misc_feature (1)..(25): SEQ ID NO: 936; WAN024FUN; Start 232; Stop 256
gatttgattatttcttctggtgccg

SEQ ID NO: 278234 - DNA, 25 bp, Artificial
  probe
  misc_feature (1)..(25): SEQ ID NO: 936; WAN024FUN; Start 147; Stop 171
ctgttattatccaaccaatcgtaat

SEQ ID NO: 278235 - DNA, 25 bp, Artificial
  probe
  misc_feature (1)..(25): SEQ ID NO: 936; WAN024FUN; Start 231; Stop 255
agatttgattatttcttctggtgcc

SEQ ID NO: 278236 - DNA, 25 bp, Artificial
  probe
  misc_feature (1)..(25): SEQ ID NO: 936; WAN024FUN; Start 145; Stop 169
ccctgttattatccaaccaatcgta

SEQ ID NO: 278237 - DNA, 25 bp, Artificial
  probe
  misc_feature (1)..(25): SEQ ID NO: 936; WAN024FUN; Start 143; Stop 167
atccctgttattatccaaccaatcg

SEQ ID NO: 278238 - DNA, 25 bp, Artificial
  probe
  misc_feature (1)..(25): SEQ ID NO: 936; WAN024FUN; Start 121; Stop 145
gtactctctgaggaagttgtatatc

SEQ ID NO: 278239 - DNA, 25 bp, Artificial
  probe
  misc_feature (1)..(25): SEQ ID NO: 936; WAN024FUN; Start 237; Stop 261
gattatttcttctggtgccgctatc

SEQ ID NO: 278240 - DNA, 25 bp, Artificial
  probe
  misc_feature (1)..(25): SEQ ID NO: 936; WAN024FUN; Start 144; Stop 168
tccctgttattatccaaccaatcgt

SEQ ID NO: 278241 - DNA, 25 bp, Artificial
  probe
  misc_feature (1)..(25): SEQ ID NO: 936; WAN024FUN; Start 326; Stop 350
atagaattgatgcttcaacactgac

SEQ ID NO: 278242 - DNA, 25 bp, Artificial
  probe
  misc_feature (1)..(25): SEQ ID NO: 936; WAN024FUN; Start 324; Stop 348
tgatagaattgatgcttcaacactg

SEQ ID NO: 278243 - DNA, 25 bp, Artificial
  probe
  misc_feature (1)..(25): SEQ ID NO: 936; WAN024FUN; Start 142; Stop 166
tatccctgttattatccaaccaatc

SEQ ID NO: 278244 - DNA, 25 bp, Artificial
  probe
  misc_feature (1)..(25): SEQ ID NO: 936; WAN024FUN; Start 325; Stop 349
gatagaattgatgcttcaacactga

SEQ ID NO: 278245 - DNA, 25 bp, Artificial
  probe
  misc_feature (1)..(25): SEQ ID NO: 936; WAN024FUN; Start 327; Stop 351
tagaattgatgcttcaacactgaca

SEQ ID NO: 278246 - DNA, 25 bp, Artificial
  probe
  misc_feature (1)..(25): SEQ ID NO: 936; WAN024FUN; Start 236; Stop 260
tgattatttcttctggtgccgctat

SEQ ID NO: 278247 - DNA, 25 bp, Artificial
  probe
  misc_feature (1)..(25): SEQ ID NO: 936; WAN024FUN; Start 323; Stop 347
ttgatagaattgatgcttcaacact

SEQ ID NO: 278248 - DNA, 25 bp, Artificial
  probe
  misc_feature (1)..(25): SEQ ID NO: 936; WAN024FUN; Start 233; Stop 257
atttgattatttcttctggtgccgc

SEQ ID NO: 278249 - DNA, 25 bp, Artificial
  probe
  misc_feature (1)..(25): SEQ ID NO: 936; WAN024FUN; Start 235; Stop 259
ttgattatttcttctggtgccgcta

SEQ ID NO: 278250 - DNA, 25 bp, Artificial
  probe
  misc_feature (1)..(25): SEQ ID NO: 936; WAN024FUN; Start 127; Stop 151
tctgaggaagttgtatatccctgtt

SEQ ID NO: 278251 - DNA, 25 bp, Artificial
  probe
  misc_feature (1)..(25): SEQ ID NO: 936; WAN024FUN; Start 124; Stop 148
ctctctgaggaagttgtatatccct

SEQ ID NO: 278252 - DNA, 25 bp, Artificial
  probe
  misc_feature (1)..(25): SEQ ID NO: 936; WAN024FUN; Start 128; Stop 152
ctgaggaagttgtatatccctgtta

SEQ ID NO: 278253 - DNA, 25 bp, Artificial
  probe
  misc_feature (1)..(25): SEQ ID NO: 936; WAN024FUN; Start 125; Stop 149
tctctgaggaagttgtatatccctg

SEQ ID NO: 278254 - DNA, 25 bp, Artificial
  probe
  misc_feature (1)..(25): SEQ ID NO: 936; WAN024FUN; Start 123; Stop 147
actctctgaggaagttgtatatccc

SEQ ID NO: 278255 - DNA, 25 bp, Artificial
  probe
  misc_feature (1)..(25): SEQ ID NO: 936; WAN024FUN; Start 126; Stop 150
ctctgaggaagttgtatatccctgt

SEQ ID NO: 278256 - DNA, 25 bp, Artificial
  probe
  misc_feature (1)..(25): SEQ ID NO: 936; WAN024FUN; Start 139; Stop 163
gtatatccctgttattatccaacca

SEQ ID NO: 278257 - DNA, 25 bp, Artificial
  probe
  misc_feature (1)..(25): SEQ ID NO: 936; WAN024FUN; Start 138; Stop 162
tgtatatccctgttattatccaacc

SEQ ID NO: 278258 - DNA, 25 bp, Artificial
  probe
  misc_feature (1)..(25): SEQ ID NO: 936; WAN024FUN; Start 141; Stop 165
atatccctgttattatccaaccaat

SEQ ID NO: 278259 - DNA, 25 bp, Artificial
  probe
  misc_feature (1)..(25): SEQ ID NO: 936; WAN024FUN; Start 129; Stop 153
tgaggaagttgtatatccctgttat

SEQ ID NO: 278260 - DNA, 25 bp, Artificial
  probe
  misc_feature (1)..(25): SEQ ID NO: 937; WAN024FSN; Start 822; Stop 846
ttgctcaagagaaggacagttattg

SEQ ID NO: 278261 - DNA, 25 bp, Artificial
  probe
  misc_feature (1)..(25): SEQ ID NO: 937; WAN024FSN; Start 1816; Stop 1840
ttcgtttatagattgtttggtggtg

SEQ ID NO: 278262 - DNA, 25 bp, Artificial
  probe
  misc_feature (1)..(25): SEQ ID NO: 937; WAN024FSN; Start 1818; Stop 1842
cgtttatagattgtttggtggtgtc

SEQ ID NO: 278263 - DNA, 25 bp, Artificial
  probe
  misc_feature (1)..(25): SEQ ID NO: 937; WAN024FSN; Start 1819; Stop 1843
gtttatagattgtttggtggtgtca

SEQ ID NO: 278264 - DNA, 25 bp, Artificial
  probe
  misc_feature (1)..(25): SEQ ID NO: 937; WAN024FSN; Start 1817; Stop 1841
tcgtttatagattgtttggtggtgt

SEQ ID NO: 278265 - DNA, 25 bp, Artificial
  probe
  misc_feature (1)..(25): SEQ ID NO: 937; WAN024FSN; Start 1815; Stop 1839
tttcgtttatagattgtttggtggt

SEQ ID NO: 278266 - DNA, 25 bp, Artificial
  probe
  misc_feature (1)..(25): SEQ ID NO: 937; WAN024FSN; Start 821; Stop 845
tttgctcaagagaaggacagttatt

SEQ ID NO: 278267 - DNA, 25 bp, Artificial
  probe
  misc_feature (1)..(25): SEQ ID NO: 937; WAN024FSN; Start 96; Stop 120
tttgtatcagtgggctaaggaaatg

SEQ ID NO: 278268 - DNA, 25 bp, Artificial
  probe
  misc_feature (1)..(25): SEQ ID NO: 937; WAN024FSN; Start 1798; Stop 1822
gatttactttgggttgatttcgttt

SEQ ID NO: 278269 - DNA, 25 bp, Artificial
  probe
  misc_feature (1)..(25): SEQ ID NO: 937; WAN024FSN; Start 1807; Stop 1831
tgggttgatttcgtttatagattgt

SEQ ID NO: 278270 - DNA, 25 bp, Artificial
  probe
  misc_feature (1)..(25): SEQ ID NO: 937; WAN024FSN; Start 1803; Stop 1827
actttgggttgatttcgtttataga

SEQ ID NO: 278271 - DNA, 25 bp, Artificial
  probe
  misc_feature (1)..(25): SEQ ID NO: 937; WAN024FSN; Start 1246; Stop 1270
ggttggaaaggaacgatacaagata

SEQ ID NO: 278272 - DNA, 25 bp, Artificial
  probe
  misc_feature (1)..(25): SEQ ID NO: 937; WAN024FSN; Start 1830; Stop 1854
gtttggtggtgtcaatttcctattt

SEQ ID NO: 278273 - DNA, 25 bp, Artificial
  probe
  misc_feature (1)..(25): SEQ ID NO: 937; WAN024FSN; Start 1833; Stop 1857
tggtggtgtcaatttcctatttatt

SEQ ID NO: 278274 - DNA, 25 bp, Artificial
  probe
  misc_feature (1)..(25): SEQ ID NO: 937; WAN024FSN; Start 1829; Stop 1853
tgtttggtggtgtcaatttcctatt

SEQ ID NO: 278275 - DNA, 25 bp, Artificial
  probe
  misc_feature (1)..(25): SEQ ID NO: 937; WAN024FSN; Start 1828; Stop 1852
ttgtttggtggtgtcaatttcctat

SEQ ID NO: 278276 - DNA, 25 bp, Artificial
  probe
  misc_feature (1)..(25): SEQ ID NO: 937; WAN024FSN; Start 1820; Stop 1844
tttatagattgtttggtggtgtcaa

SEQ ID NO: 278277 - DNA, 25 bp, Artificial
  probe
  misc_feature (1)..(25): SEQ ID NO: 937; WAN024FSN; Start 1831; Stop 1855
tttggtggtgtcaatttcctattta

SEQ ID NO: 278278 - DNA, 25 bp, Artificial
  probe
  misc_feature (1)..(25): SEQ ID NO: 937; WAN024FSN; Start 1814; Stop 1838
atttcgtttatagattgtttggtgg

SEQ ID NO: 278279 - DNA, 25 bp, Artificial
  probe
  misc_feature (1)..(25): SEQ ID NO: 937; WAN024FSN; Start 1539; Stop 1563
tcaggcagttaaagattatcaagaa

SEQ ID NO: 278280 - DNA, 25 bp, Artificial
  probe
  misc_feature (1)..(25): SEQ ID NO: 937; WAN024FSN; Start 1835; Stop 1859
gtggtgtcaatttcctatttattcc

SEQ ID NO: 278281 - DNA, 25 bp, Artificial
  probe
  misc_feature (1)..(25): SEQ ID NO: 937; WAN024FSN; Start 1834; Stop 1858
ggtggtgtcaatttcctatttattc

SEQ ID NO: 278282 - DNA, 25 bp, Artificial
  probe
  misc_feature (1)..(25): SEQ ID NO: 937; WAN024FSN; Start 1832; Stop 1856
ttggtggtgtcaatttcctatttat

SEQ ID NO: 278283 - DNA, 25 bp, Artificial
  probe
  misc_feature (1)..(25): SEQ ID NO: 937; WAN024FSN; Start 1808; Stop 1832
gggttgatttcgtttatagattgtt

SEQ ID NO: 278284 - DNA, 25 bp, Artificial
  probe
  misc_feature (1)..(25): SEQ ID NO: 937; WAN024FSN; Start 1806; Stop 1830
ttgggttgatttcgtttatagattg

SEQ ID NO: 278285 - DNA, 25 bp, Artificial
  probe
  misc_feature (1)..(25): SEQ ID NO: 937; WAN024FSN; Start 1540; Stop 1564
caggcagttaaagattatcaagaag

SEQ ID NO: 278286 - DNA, 25 bp, Artificial
  probe
  misc_feature (1)..(25): SEQ ID NO: 937; WAN024FSN; Start 1538; Stop 1562
atcaggcagttaaagattatcaaga

SEQ ID NO: 278287 - DNA, 25 bp, Artificial
  probe
  misc_feature (1)..(25): SEQ ID NO: 937; WAN024FSN; Start 1541; Stop 1565
aggcagttaaagattatcaagaaga

SEQ ID NO: 278288 - DNA, 25 bp, Artificial
  probe
  misc_feature (1)..(25): SEQ ID NO: 937; WAN024FSN; Start 120; Stop 144
ggctttggaggtgaatttcaatata

SEQ ID NO: 278289 - DNA, 25 bp, Artificial
  probe
  misc_feature (1)..(25): SEQ ID NO: 937; WAN024FSN; Start 1501; Stop 1525
cccattattgacgatgataagaaac

SEQ ID NO: 278290 - DNA, 25 bp, Artificial
  probe
  misc_feature (1)..(25): SEQ ID NO: 937; WAN024FSN; Start 198; Stop 222
aggcactgaagaaatgtgttatcta

SEQ ID NO: 278291 - DNA, 25 bp, Artificial
  probe
  misc_feature (1)..(25): SEQ ID NO: 937; WAN024FSN; Start 197; Stop 221
taggcactgaagaaatgtgttatct

SEQ ID NO: 278292 - DNA, 25 bp, Artificial
  probe
  misc_feature (1)..(25): SEQ ID NO: 937; WAN024FSN; Start 1837; Stop 1861
ggtgtcaatttcctatttattccag

SEQ ID NO: 278293 - DNA, 25 bp, Artificial
  probe
  misc_feature (1)..(25): SEQ ID NO: 938; WAN024D27; Start 105; Stop 129
gcaagaagcaatccaactattagaa

SEQ ID NO: 278294 - DNA, 25 bp, Artificial
  probe
  misc_feature (1)..(25): SEQ ID NO: 938; WAN024D27; Start 104; Stop 128
ggcaagaagcaatccaactattaga

SEQ ID NO: 278295 - DNA, 25 bp, Artificial
  probe
  misc_feature (1)..(25): SEQ ID NO: 938; WAN024D27; Start 552; Stop 576
taatcgaacagaggcagctaatatc

SEQ ID NO: 278296 - DNA, 25 bp, Artificial
  probe
  misc_feature (1)..(25): SEQ ID NO: 938; WAN024D27; Start 551; Stop 575
gtaatcgaacagaggcagctaatat

SEQ ID NO: 278297 - DNA, 25 bp, Artificial
  probe
  misc_feature (1)..(25): SEQ ID NO: 938; WAN024D27; Start 363; Stop 387
caaggagtattcgcctgaattgatg

SEQ ID NO: 278298 - DNA, 25 bp, Artificial
  probe
  misc_feature (1)..(25): SEQ ID NO: 938; WAN024D27; Start 550; Stop 574
ggtaatcgaacagaggcagctaata

SEQ ID NO: 278299 - DNA, 25 bp, Artificial
  probe
  misc_feature (1)..(25): SEQ ID NO: 938; WAN024D27; Start 103; Stop 127
gggcaagaagcaatccaactattag

SEQ ID NO: 278300 - DNA, 25 bp, Artificial
  probe
  misc_feature (1)..(25): SEQ ID NO: 938; WAN024D27; Start 18; Stop 42
agaagatcaaagtatgttgcgagat

SEQ ID NO: 278301 - DNA, 25 bp, Artificial
  probe
  misc_feature (1)..(25): SEQ ID NO: 938; WAN024D27; Start 19; Stop 43
gaagatcaaagtatgttgcgagatg

SEQ ID NO: 278302 - DNA, 25 bp, Artificial
  probe
  misc_feature (1)..(25): SEQ ID NO: 938; WAN024D27; Start 17; Stop 41
cagaagatcaaagtatgttgcgaga

SEQ ID NO: 278303 - DNA, 25 bp, Artificial
  probe
  misc_feature (1)..(25): SEQ ID NO: 938; WAN024D27; Start 106; Stop 130
caagaagcaatccaactattagaaa

SEQ ID NO: 278304 - DNA, 25 bp, Artificial
  probe
  misc_feature (1)..(25): SEQ ID NO: 938; WAN024D27; Start 366; Stop 390
ggagtattcgcctgaattgatggaa

SEQ ID NO: 278305 - DNA, 25 bp, Artificial
  probe
  misc_feature (1)..(25): SEQ ID NO: 938; WAN024D27; Start 364; Stop 388
aaggagtattcgcctgaattgatgg

SEQ ID NO: 278306 - DNA, 25 bp, Artificial
  probe
  misc_feature (1)..(25): SEQ ID NO: 938; WAN024D27; Start 20; Stop 44
aagatcaaagtatgttgcgagatgc

SEQ ID NO: 278307 - DNA, 25 bp, Artificial
  probe
  misc_feature (1)..(25): SEQ ID NO: 938; WAN024D27; Start 155; Stop 179
ttgacgtagaaatgcctgttaagac

SEQ ID NO: 278308 - DNA, 25 bp, Artificial
  probe
  misc_feature (1)..(25): SEQ ID NO: 938; WAN024D27; Start 154; Stop 178
cttgacgtagaaatgcctgttaaga

SEQ ID NO: 278309 - DNA, 25 bp, Artificial
  probe
  misc_feature (1)..(25): SEQ ID NO: 938; WAN024D27; Start 362; Stop 386
gcaaggagtattcgcctgaattgat

SEQ ID NO: 278310 - DNA, 25 bp, Artificial
  probe
  misc_feature (1)..(25): SEQ ID NO: 938; WAN024D27; Start 511; Stop 535
cgaaactatgtcaccaatattcttt

SEQ ID NO: 278311 - DNA, 25 bp, Artificial
  probe
  misc_feature (1)..(25): SEQ ID NO: 938; WAN024D27; Start 365; Stop 389
aggagtattcgcctgaattgatgga

SEQ ID NO: 278312 - DNA, 25 bp, Artificial
  probe
  misc_feature (1)..(25): SEQ ID NO: 938; WAN024D27; Start 23; Stop 47
atcaaagtatgttgcgagatgccat

SEQ ID NO: 278313 - DNA, 25 bp, Artificial
  probe
  misc_feature (1)..(25): SEQ ID NO: 938; WAN024D27; Start 151; Stop 175
atccttgacgtagaaatgcctgtta

SEQ ID NO: 278314 - DNA, 25 bp, Artificial
  probe
  misc_feature (1)..(25): SEQ ID NO: 938; WAN024D27; Start 153; Stop 177
ccttgacgtagaaatgcctgttaag

SEQ ID NO: 278315 - DNA, 25 bp, Artificial
  probe
  misc_feature (1)..(25): SEQ ID NO: 938; WAN024D27; Start 152; Stop 176
tccttgacgtagaaatgcctgttaa

SEQ ID NO: 278316 - DNA, 25 bp, Artificial
  probe
  misc_feature (1)..(25): SEQ ID NO: 938; WAN024D27; Start 102; Stop 126
tgggcaagaagcaatccaactatta

SEQ ID NO: 278317 - DNA, 25 bp, Artificial
  probe
  misc_feature (1)..(25): SEQ ID NO: 938; WAN024D27; Start 109; Stop 133
gaagcaatccaactattagaaaagg

SEQ ID NO: 278318 - DNA, 25 bp, Artificial
  probe
  misc_feature (1)..(25): SEQ ID NO: 938; WAN024D27; Start 553; Stop 577
aatcgaacagaggcagctaatatcg

SEQ ID NO: 278319 - DNA, 25 bp, Artificial
  probe
  misc_feature (1)..(25): SEQ ID NO: 938; WAN024D27; Start 21; Stop 45
agatcaaagtatgttgcgagatgcc

SEQ ID NO: 278320 - DNA, 25 bp, Artificial
  probe
  misc_feature (1)..(25): SEQ ID NO: 938; WAN024D27; Start 101; Stop 125
atgggcaagaagcaatccaactatt

SEQ ID NO: 278321 - DNA, 25 bp, Artificial
  probe
  misc_feature (1)..(25): SEQ ID NO: 938; WAN024D27; Start 100; Stop 124
aatgggcaagaagcaatccaactat

SEQ ID NO: 278322 - DNA, 25 bp, Artificial
  probe
  misc_feature (1)..(25): SEQ ID NO: 938; WAN024D27; Start 22; Stop 46
gatcaaagtatgttgcgagatgcca

SEQ ID NO: 278323 - DNA, 25 bp, Artificial
  probe
  misc_feature (1)..(25): SEQ ID NO: 938; WAN024D27; Start 116; Stop 140
tccaactattagaaaaggagtctgt

SEQ ID NO: 278324 - DNA, 25 bp, Artificial
  probe
  misc_feature (1)..(25): SEQ ID NO: 938; WAN024D27; Start 112; Stop 136
gcaatccaactattagaaaaggagt

SEQ ID NO: 278325 - DNA, 25 bp, Artificial
  probe
  misc_feature (1)..(25): SEQ ID NO: 938; WAN024D27; Start 117; Stop 141
ccaactattagaaaaggagtctgta

SEQ ID NO: 278326 - DNA, 25 bp, Artificial
  probe
  misc_feature (1)..(25): SEQ ID NO: 939; WAN024G2K; Start 11; Stop 35
gaaaacgcttcctaaaacctaaagt

SEQ ID NO: 278327 - DNA, 25 bp, Artificial
  probe
  misc_feature (1)..(25): SEQ ID NO: 939; WAN024G2K; Start 9; Stop 33
cagaaaacgcttcctaaaacctaaa

SEQ ID NO: 278328 - DNA, 25 bp, Artificial
  probe
  misc_feature (1)..(25): SEQ ID NO: 939; WAN024G2K; Start 7; Stop 31
tacagaaaacgcttcctaaaaccta

SEQ ID NO: 278329 - DNA, 25 bp, Artificial
  probe
  misc_feature (1)..(25): SEQ ID NO: 939; WAN024G2K; Start 5; Stop 29
aatacagaaaacgcttcctaaaacc

SEQ ID NO: 278330 - DNA, 25 bp, Artificial
  probe
  misc_feature (1)..(25): SEQ ID NO: 939; WAN024G2K; Start 10; Stop 34
agaaaacgcttcctaaaacctaaag

SEQ ID NO: 278331 - DNA, 25 bp, Artificial
  probe
  misc_feature (1)..(25): SEQ ID NO: 939; WAN024G2K; Start 12; Stop 36
aaaacgcttcctaaaacctaaagtt

SEQ ID NO: 278332 - DNA, 25 bp, Artificial
  probe
  misc_feature (1)..(25): SEQ ID NO: 939; WAN024G2K; Start 6; Stop 30
atacagaaaacgcttcctaaaacct

SEQ ID NO: 278333 - DNA, 25 bp, Artificial
  probe
  misc_feature (1)..(25): SEQ ID NO: 939; WAN024G2K; Start 2; Stop 26
tgaaatacagaaaacgcttcctaaa

SEQ ID NO: 278334 - DNA, 25 bp, Artificial
  probe
  misc_feature (1)..(25): SEQ ID NO: 939; WAN024G2K; Start 8; Stop 32
acagaaaacgcttcctaaaacctaa

SEQ ID NO: 278335 - DNA, 25 bp, Artificial
  probe
  misc_feature (1)..(25): SEQ ID NO: 939; WAN024G2K; Start 1; Stop 25
atgaaatacagaaaacgcttcctaa

SEQ ID NO: 278336 - DNA, 25 bp, Artificial
  probe
  misc_feature (1)..(25): SEQ ID NO: 939; WAN024G2K; Start 4; Stop 28
aaatacagaaaacgcttcctaaaac

SEQ ID NO: 278337 - DNA, 25 bp, Artificial
  probe
  misc_feature (1)..(25): SEQ ID NO: 939; WAN024G2K; Start 3; Stop 27
gaaatacagaaaacgcttcctaaaa

SEQ ID NO: 278338 - DNA, 25 bp, Artificial
  probe
  misc_feature (1)..(25): SEQ ID NO: 939; WAN024G2K; Start 17; Stop 41
gcttcctaaaacctaaagtttgtga

SEQ ID NO: 278339 - DNA, 25 bp, Artificial
  probe
  misc_feature (1)..(25): SEQ ID NO: 939; WAN024G2K; Start 14; Stop 38
aacgcttcctaaaacctaaagtttg

SEQ ID NO: 278340 - DNA, 25 bp, Artificial
  probe
  misc_feature (1)..(25): SEQ ID NO: 939; WAN024G2K; Start 13; Stop 37
aaacgcttcctaaaacctaaagttt

SEQ ID NO: 278341 - DNA, 25 bp, Artificial
  probe
  misc_feature (1)..(25): SEQ ID NO: 939; WAN024G2K; Start 16; Stop 40
cgcttcctaaaacctaaagtttgtg

SEQ ID NO: 278342 - DNA, 25 bp, Artificial
  probe
  misc_feature (1)..(25): SEQ ID NO: 939; WAN024G2K; Start 15; Stop 39
acgcttcctaaaacctaaagtttgt

SEQ ID NO: 278343 - DNA, 25 bp, Artificial
  probe
  misc_feature (1)..(25): SEQ ID NO: 939; WAN024G2K; Start 18; Stop 42
cttcctaaaacctaaagtttgtgat

SEQ ID NO: 278344 - DNA, 25 bp, Artificial
  probe
  misc_feature (1)..(25): SEQ ID NO: 939; WAN024G2K; Start 19; Stop 43
ttcctaaaacctaaagtttgtgata

SEQ ID NO: 278345 - DNA, 25 bp, Artificial
  probe
  misc_feature (1)..(25): SEQ ID NO: 939; WAN024G2K; Start 20; Stop 44
tcctaaaacctaaagtttgtgatat

SEQ ID NO: 278346 - DNA, 25 bp, Artificial
  probe
  misc_feature (1)..(25): SEQ ID NO: 940; WAN024CYT; Start 185; Stop 209
gtattgaggtagttcgccgtattag

SEQ ID NO: 278347 - DNA, 25 bp, Artificial
  probe
  misc_feature (1)..(25): SEQ ID NO: 940; WAN024CYT; Start 369; Stop 393
ccttgagattgatggtaagaagttc

SEQ ID NO: 278348 - DNA, 25 bp, Artificial
  probe
  misc_feature (1)..(25): SEQ ID NO: 940; WAN024CYT; Start 186; Stop 210
tattgaggtagttcgccgtattagt

SEQ ID NO: 278349 - DNA, 25 bp, Artificial
  probe
  misc_feature (1)..(25): SEQ ID NO: 940; WAN024CYT; Start 239; Stop 263
ataacctcaactacacgatcatctc

SEQ ID NO: 278350 - DNA, 25 bp, Artificial
  probe
  misc_feature (1)..(25): SEQ ID NO: 940; WAN024CYT; Start 238; Stop 262
aataacctcaactacacgatcatct

SEQ ID NO: 278351 - DNA, 25 bp, Artificial
  probe
  misc_feature (1)..(25): SEQ ID NO: 940; WAN024CYT; Start 372; Stop 396
tgagattgatggtaagaagttctgt

SEQ ID NO: 278352 - DNA, 25 bp, Artificial
  probe
  misc_feature (1)..(25): SEQ ID NO: 940; WAN024CYT; Start 374; Stop 398
agattgatggtaagaagttctgtgg

SEQ ID NO: 278353 - DNA, 25 bp, Artificial
  probe
  misc_feature (1)..(25): SEQ ID NO: 940; WAN024CYT; Start 373; Stop 397
gagattgatggtaagaagttctgtg

SEQ ID NO: 278354 - DNA, 25 bp, Artificial
  probe
  misc_feature (1)..(25): SEQ ID NO: 940; WAN024CYT; Start 184; Stop 208
ggtattgaggtagttcgccgtatta

SEQ ID NO: 278355 - DNA, 25 bp, Artificial
  probe
  misc_feature (1)..(25): SEQ ID NO: 940; WAN024CYT; Start 371; Stop 395
ttgagattgatggtaagaagttctg

SEQ ID NO: 278356 - DNA, 25 bp, Artificial
  probe
  misc_feature (1)..(25): SEQ ID NO: 940; WAN024CYT; Start 240; Stop 264
taacctcaactacacgatcatctcc

SEQ ID NO: 278357 - DNA, 25 bp, Artificial
  probe
  misc_feature (1)..(25): SEQ ID NO: 940; WAN024CYT; Start 370; Stop 394
cttgagattgatggtaagaagttct

SEQ ID NO: 278358 - DNA, 25 bp, Artificial
  probe
  misc_feature (1)..(25): SEQ ID NO: 940; WAN024CYT; Start 187; Stop 211
attgaggtagttcgccgtattagtg

SEQ ID NO: 278359 - DNA, 25 bp, Artificial
  probe
  misc_feature (1)..(25): SEQ ID NO: 940; WAN024CYT; Start 38; Stop 62
ttaatattgccttggaagaatacgc

SEQ ID NO: 278360 - DNA, 25 bp, Artificial
  probe
  misc_feature (1)..(25): SEQ ID NO: 940; WAN024CYT; Start 359; Stop 383
gtcgtaatgaccttgagattgatgg

SEQ ID NO: 278361 - DNA, 25 bp, Artificial
  probe
  misc_feature (1)..(25): SEQ ID NO: 940; WAN024CYT; Start 375; Stop 399
gattgatggtaagaagttctgtggc

SEQ ID NO: 278362 - DNA, 25 bp, Artificial
  probe
  misc_feature (1)..(25): SEQ ID NO: 940; WAN024CYT; Start 368; Stop 392
accttgagattgatggtaagaagtt

SEQ ID NO: 278363 - DNA, 25 bp, Artificial
  probe
  misc_feature (1)..(25): SEQ ID NO: 940; WAN024CYT; Start 367; Stop 391
gaccttgagattgatggtaagaagt

SEQ ID NO: 278364 - DNA, 25 bp, Artificial
  probe
  misc_feature (1)..(25): SEQ ID NO: 940; WAN024CYT; Start 366; Stop 390
tgaccttgagattgatggtaagaag

SEQ ID NO: 278365 - DNA, 25 bp, Artificial
  probe
  misc_feature (1)..(25): SEQ ID NO: 940; WAN024CYT; Start 365; Stop 389
atgaccttgagattgatggtaagaa

SEQ ID NO: 278366 - DNA, 25 bp, Artificial
  probe
  misc_feature (1)..(25): SEQ ID NO: 940; WAN024CYT; Start 364; Stop 388
aatgaccttgagattgatggtaaga

SEQ ID NO: 278367 - DNA, 25 bp, Artificial
  probe
  misc_feature (1)..(25): SEQ ID NO: 940; WAN024CYT; Start 361; Stop 385
cgtaatgaccttgagattgatggta

SEQ ID NO: 278368 - DNA, 25 bp, Artificial
  probe
  misc_feature (1)..(25): SEQ ID NO: 940; WAN024CYT; Start 39; Stop 63
taatattgccttggaagaatacgcc

SEQ ID NO: 278369 - DNA, 25 bp, Artificial
  probe
  misc_feature (1)..(25): SEQ ID NO: 940; WAN024CYT; Start 379; Stop 403
gatggtaagaagttctgtggcaatg

SEQ ID NO: 278370 - DNA, 25 bp, Artificial
  probe
  misc_feature (1)..(25): SEQ ID NO: 940; WAN024CYT; Start 103; Stop 127
tggattaacaagccatctatcattg

SEQ ID NO: 278371 - DNA, 25 bp, Artificial
  probe
  misc_feature (1)..(25): SEQ ID NO: 940; WAN024CYT; Start 41; Stop 65
atattgccttggaagaatacgcctt

SEQ ID NO: 278372 - DNA, 25 bp, Artificial
  probe
  misc_feature (1)..(25): SEQ ID NO: 940; WAN024CYT; Start 704; Stop 728
cttgggactggaactatggtaaatc

SEQ ID NO: 278373 - DNA, 25 bp, Artificial
  probe
  misc_feature (1)..(25): SEQ ID NO: 940; WAN024CYT; Start 378; Stop 402
tgatggtaagaagttctgtggcaat

SEQ ID NO: 278374 - DNA, 25 bp, Artificial
  probe
  misc_feature (1)..(25): SEQ ID NO: 940; WAN024CYT; Start 376; Stop 400
attgatggtaagaagttctgtggca

SEQ ID NO: 278375 - DNA, 25 bp, Artificial
  probe
  misc_feature (1)..(25): SEQ ID NO: 940; WAN024CYT; Start 362; Stop 386
gtaatgaccttgagattgatggtaa

SEQ ID NO: 278376 - DNA, 25 bp, Artificial
  probe
  misc_feature (1)..(25): SEQ ID NO: 940; WAN024CYT; Start 102; Stop 126
ttggattaacaagccatctatcatt

SEQ ID NO: 278377 - DNA, 25 bp, Artificial
  probe
  misc_feature (1)..(25): SEQ ID NO: 940; WAN024CYT; Start 703; Stop 727
acttgggactggaactatggtaaat

SEQ ID NO: 278378 - DNA, 25 bp, Artificial
  probe
  misc_feature (1)..(25): SEQ ID NO: 940; WAN024CYT; Start 363; Stop 387
taatgaccttgagattgatggtaag

SEQ ID NO: 278379 - DNA, 25 bp, Artificial
  probe
  misc_feature (1)..(25): SEQ ID NO: 941; WAN024D2Q; Start 196; Stop 220
actgtgaactatgattataccgagg

SEQ ID NO: 278380 - DNA, 25 bp, Artificial
  probe
  misc_feature (1)..(25): SEQ ID NO: 941; WAN024D2Q; Start 197; Stop 221
ctgtgaactatgattataccgagga

SEQ ID NO: 278381 - DNA, 25 bp, Artificial
  probe
  misc_feature (1)..(25): SEQ ID NO: 941; WAN024D2Q; Start 403; Stop 427
gaatacgagtggattgacaagaatg

SEQ ID NO: 278382 - DNA, 25 bp, Artificial
  probe
  misc_feature (1)..(25): SEQ ID NO: 941; WAN024D2Q; Start 402; Stop 426
agaatacgagtggattgacaagaat

SEQ ID NO: 278383 - DNA, 25 bp, Artificial
  probe
  misc_feature (1)..(25): SEQ ID NO: 941; WAN024D2Q; Start 401; Stop 425
aagaatacgagtggattgacaagaa

SEQ ID NO: 278384 - DNA, 25 bp, Artificial
  probe
  misc_feature (1)..(25): SEQ ID NO: 941; WAN024D2Q; Start 200; Stop 224
tgaactatgattataccgaggaaca

SEQ ID NO: 278385 - DNA, 25 bp, Artificial
  probe
  misc_feature (1)..(25): SEQ ID NO: 941; WAN024D2Q; Start 198; Stop 222
tgtgaactatgattataccgaggaa

SEQ ID NO: 278386 - DNA, 25 bp, Artificial
  probe
  misc_feature (1)..(25): SEQ ID NO: 941; WAN024D2Q; Start 199; Stop 223
gtgaactatgattataccgaggaac

SEQ ID NO: 278387 - DNA, 25 bp, Artificial
  probe
  misc_feature (1)..(25): SEQ ID NO: 941; WAN024D2Q; Start 202; Stop 226
aactatgattataccgaggaacaga

SEQ ID NO: 278388 - DNA, 25 bp, Artificial
  probe
  misc_feature (1)..(25): SEQ ID NO: 941; WAN024D2Q; Start 194; Stop 218
acactgtgaactatgattataccga

SEQ ID NO: 278389 - DNA, 25 bp, Artificial
  probe
  misc_feature (1)..(25): SEQ ID NO: 941; WAN024D2Q; Start 404; Stop 428
aatacgagtggattgacaagaatgg

SEQ ID NO: 278390 - DNA, 25 bp, Artificial
  probe
  misc_feature (1)..(25): SEQ ID NO: 941; WAN024D2Q; Start 2475; Stop 2499
tgatgtaagcgagagagataatagt

SEQ ID NO: 278391 - DNA, 25 bp, Artificial
  probe
  misc_feature (1)..(25): SEQ ID NO: 941; WAN024D2Q; Start 203; Stop 227
actatgattataccgaggaacagat

SEQ ID NO: 278392 - DNA, 25 bp, Artificial
  probe
  misc_feature (1)..(25): SEQ ID NO: 941; WAN024D2Q; Start 201; Stop 225
gaactatgattataccgaggaacag

SEQ ID NO: 278393 - DNA, 25 bp, Artificial
  probe
  misc_feature (1)..(25): SEQ ID NO: 941; WAN024D2Q; Start 1647; Stop 1671
taatcaaggtattgtagcaagcgaa

SEQ ID NO: 278394 - DNA, 25 bp, Artificial
  probe
  misc_feature (1)..(25): SEQ ID NO: 941; WAN024D2Q; Start 214; Stop 238
accgaggaacagataagactatatt

SEQ ID NO: 278395 - DNA, 25 bp, Artificial
  probe
  misc_feature (1)..(25): SEQ ID NO: 941; WAN024D2Q; Start 646; Stop 670
gagtcttgtcttcggttctatactt

SEQ ID NO: 278396 - DNA, 25 bp, Artificial
  probe
  misc_feature (1)..(25): SEQ ID NO: 941; WAN024D2Q; Start 195; Stop 219
cactgtgaactatgattataccgag

SEQ ID NO: 278397 - DNA, 25 bp, Artificial
  probe
  misc_feature (1)..(25): SEQ ID NO: 941; WAN024D2Q; Start 108; Stop 132
ttggcgttctacaatgtcaattatt

SEQ ID NO: 278398 - DNA, 25 bp, Artificial
  probe
  misc_feature (1)..(25): SEQ ID NO: 941; WAN024D2Q; Start 1644; Stop 1668
ttctaatcaaggtattgtagcaagc

SEQ ID NO: 278399 - DNA, 25 bp, Artificial
  probe
  misc_feature (1)..(25): SEQ ID NO: 941; WAN024D2Q; Start 1646; Stop 1670
ctaatcaaggtattgtagcaagcga

SEQ ID NO: 278400 - DNA, 25 bp, Artificial
  probe
  misc_feature (1)..(25): SEQ ID NO: 941; WAN024D2Q; Start 1645; Stop 1669
tctaatcaaggtattgtagcaagcg

SEQ ID NO: 278401 - DNA, 25 bp, Artificial
  probe
  misc_feature (1)..(25): SEQ ID NO: 941; WAN024D2Q; Start 193; Stop 217
aacactgtgaactatgattataccg

SEQ ID NO: 278402 - DNA, 25 bp, Artificial
  probe
  misc_feature (1)..(25): SEQ ID NO: 941; WAN024D2Q; Start 1648; Stop 1672
aatcaaggtattgtagcaagcgaat

SEQ ID NO: 278403 - DNA, 25 bp, Artificial
  probe
  misc_feature (1)..(25): SEQ ID NO: 941; WAN024D2Q; Start 1240; Stop 1264
cttgatgttgagatgagtgctctta

SEQ ID NO: 278404 - DNA, 25 bp, Artificial
  probe
  misc_feature (1)..(25): SEQ ID NO: 941; WAN024D2Q; Start 1234; Stop 1258
gatggtcttgatgttgagatgagtg

SEQ ID NO: 278405 - DNA, 25 bp, Artificial
  probe
  misc_feature (1)..(25): SEQ ID NO: 941; WAN024D2Q; Start 926; Stop 950
gaactattgcttattcggatcacag

SEQ ID NO: 278406 - DNA, 25 bp, Artificial
  probe
  misc_feature (1)..(25): SEQ ID NO: 941; WAN024D2Q; Start 209; Stop 233
attataccgaggaacagataagact

SEQ ID NO: 278407 - DNA, 25 bp, Artificial
  probe
  misc_feature (1)..(25): SEQ ID NO: 941; WAN024D2Q; Start 207; Stop 231
tgattataccgaggaacagataaga

SEQ ID NO: 278408 - DNA, 25 bp, Artificial
  probe
  misc_feature (1)..(25): SEQ ID NO: 941; WAN024D2Q; Start 1241; Stop 1265
ttgatgttgagatgagtgctcttac

SEQ ID NO: 278409 - DNA, 25 bp, Artificial
  probe
  misc_feature (1)..(25): SEQ ID NO: 941; WAN024D2Q; Start 405; Stop 429
atacgagtggattgacaagaatgga

SEQ ID NO: 278410 - DNA, 25 bp, Artificial
  probe
  misc_feature (1)..(25): SEQ ID NO: 941; WAN024D2Q; Start 208; Stop 232
gattataccgaggaacagataagac

SEQ ID NO: 278411 - DNA, 25 bp, Artificial
  probe
  misc_feature (1)..(25): SEQ ID NO: 941; WAN024D2Q; Start 647; Stop 671
agtcttgtcttcggttctatactta

SEQ ID NO: 278412 - DNA, 25 bp, Artificial
  probe
  misc_feature (1)..(25): SEQ ID NO: 942; WAN024FSA; Start 154; Stop 178
gttaaggagatgttggctcagaatt

SEQ ID NO: 278413 - DNA, 25 bp, Artificial
  probe
  misc_feature (1)..(25): SEQ ID NO: 942; WAN024FSA; Start 153; Stop 177
tgttaaggagatgttggctcagaat

SEQ ID NO: 278414 - DNA, 25 bp, Artificial
  probe
  misc_feature (1)..(25): SEQ ID NO: 942; WAN024FSA; Start 223; Stop 247
gcaaccatcgactatatgaatgatt

SEQ ID NO: 278415 - DNA, 25 bp, Artificial
  probe
  misc_feature (1)..(25): SEQ ID NO: 942; WAN024FSA; Start 144; Stop 168
tccagagagtgttaaggagatgttg

SEQ ID NO: 278416 - DNA, 25 bp, Artificial
  probe
  misc_feature (1)..(25): SEQ ID NO: 942; WAN024FSA; Start 105; Stop 129
cattccctatctctttgtaaccaac

SEQ ID NO: 278417 - DNA, 25 bp, Artificial
  probe
  misc_feature (1)..(25): SEQ ID NO: 942; WAN024FSA; Start 147; Stop 171
agagagtgttaaggagatgttggct

SEQ ID NO: 278418 - DNA, 25 bp, Artificial
  probe
  misc_feature (1)..(25): SEQ ID NO: 942; WAN024FSA; Start 146; Stop 170
cagagagtgttaaggagatgttggc

SEQ ID NO: 278419 - DNA, 25 bp, Artificial
  probe
  misc_feature (1)..(25): SEQ ID NO: 942; WAN024FSA; Start 152; Stop 176
gtgttaaggagatgttggctcagaa

SEQ ID NO: 278420 - DNA, 25 bp, Artificial
  probe
  misc_feature (1)..(25): SEQ ID NO: 942; WAN024FSA; Start 148; Stop 172
gagagtgttaaggagatgttggctc

SEQ ID NO: 278421 - DNA, 25 bp, Artificial
  probe
  misc_feature (1)..(25): SEQ ID NO: 942; WAN024FSA; Start 155; Stop 179
ttaaggagatgttggctcagaattt

SEQ ID NO: 278422 - DNA, 25 bp, Artificial
  probe
  misc_feature (1)..(25): SEQ ID NO: 942; WAN024FSA; Start 103; Stop 127
gacattccctatctctttgtaacca

SEQ ID NO: 278423 - DNA, 25 bp, Artificial
  probe
  misc_feature (1)..(25): SEQ ID NO: 942; WAN024FSA; Start 106; Stop 130
attccctatctctttgtaaccaaca

SEQ ID NO: 278424 - DNA, 25 bp, Artificial
  probe
  misc_feature (1)..(25): SEQ ID NO: 942; WAN024FSA; Start 104; Stop 128
acattccctatctctttgtaaccaa

SEQ ID NO: 278425 - DNA, 25 bp, Artificial
  probe
  misc_feature (1)..(25): SEQ ID NO: 942; WAN024FSA; Start 150; Stop 174
gagtgttaaggagatgttggctcag

SEQ ID NO: 278426 - DNA, 25 bp, Artificial
  probe
  misc_feature (1)..(25): SEQ ID NO: 942; WAN024FSA; Start 145; Stop 169
ccagagagtgttaaggagatgttgg

SEQ ID NO: 278427 - DNA, 25 bp, Artificial
  probe
  misc_feature (1)..(25): SEQ ID NO: 942; WAN024FSA; Start 26; Stop 50
atttagacggaaccatttataaggg

SEQ ID NO: 278428 - DNA, 25 bp, Artificial
  probe
  misc_feature (1)..(25): SEQ ID NO: 942; WAN024FSA; Start 102; Stop 126
ggacattccctatctctttgtaacc

SEQ ID NO: 278429 - DNA, 25 bp, Artificial
  probe
  misc_feature (1)..(25): SEQ ID NO: 942; WAN024FSA; Start 151; Stop 175
agtgttaaggagatgttggctcaga

SEQ ID NO: 278430 - DNA, 25 bp, Artificial
  probe
  misc_feature (1)..(25): SEQ ID NO: 942; WAN024FSA; Start 149; Stop 173
agagtgttaaggagatgttggctca

SEQ ID NO: 278431 - DNA, 25 bp, Artificial
  probe
  misc_feature (1)..(25): SEQ ID NO: 942; WAN024FSA; Start 425; Stop 449
ttatcggaaccaatcctgacctcaa

SEQ ID NO: 278432 - DNA, 25 bp, Artificial
  probe
  misc_feature (1)..(25): SEQ ID NO: 942; WAN024FSA; Start 25; Stop 49
gatttagacggaaccatttataagg

SEQ ID NO: 278433 - DNA, 25 bp, Artificial
  probe
  misc_feature (1)..(25): SEQ ID NO: 942; WAN024FSA; Start 233; Stop 257
actatatgaatgatttggggcttga

SEQ ID NO: 278434 - DNA, 25 bp, Artificial
  probe
  misc_feature (1)..(25): SEQ ID NO: 942; WAN024FSA; Start 232; Stop 256
gactatatgaatgatttggggcttg

SEQ ID NO: 278435 - DNA, 25 bp, Artificial
  probe
  misc_feature (1)..(25): SEQ ID NO: 942; WAN024FSA; Start 236; Stop 260
atatgaatgatttggggcttgaaaa

SEQ ID NO: 278436 - DNA, 25 bp, Artificial
  probe
  misc_feature (1)..(25): SEQ ID NO: 942; WAN024FSA; Start 237; Stop 261
tatgaatgatttggggcttgaaaag

SEQ ID NO: 278437 - DNA, 25 bp, Artificial
  probe
  misc_feature (1)..(25): SEQ ID NO: 942; WAN024FSA; Start 234; Stop 258
ctatatgaatgatttggggcttgaa

SEQ ID NO: 278438 - DNA, 25 bp, Artificial
  probe
  misc_feature (1)..(25): SEQ ID NO: 942; WAN024FSA; Start 231; Stop 255
cgactatatgaatgatttggggctt

SEQ ID NO: 278439 - DNA, 25 bp, Artificial
  probe
  misc_feature (1)..(25): SEQ ID NO: 942; WAN024FSA; Start 227; Stop 251
ccatcgactatatgaatgatttggg

SEQ ID NO: 278440 - DNA, 25 bp, Artificial
  probe
  misc_feature (1)..(25): SEQ ID NO: 942; WAN024FSA; Start 235; Stop 259
tatatgaatgatttggggcttgaaa

SEQ ID NO: 278441 - DNA, 25 bp, Artificial
  probe
  misc_feature (1)..(25): SEQ ID NO: 942; WAN024FSA; Start 226; Stop 250
accatcgactatatgaatgatttgg

SEQ ID NO: 278442 - DNA, 25 bp, Artificial
  probe
  misc_feature (1)..(25): SEQ ID NO: 942; WAN024FSA; Start 310; Stop 334
gctggttatgtggaagacaaggaaa

SEQ ID NO: 278443 - DNA, 25 bp, Artificial
  probe
  misc_feature (1)..(25): SEQ ID NO: 942; WAN024FSA; Start 238; Stop 262
atgaatgatttggggcttgaaaaga

SEQ ID NO: 278444 - DNA, 25 bp, Artificial
  probe
  misc_feature (1)..(25): SEQ ID NO: 942; WAN024FSA; Start 426; Stop 450
tatcggaaccaatcctgacctcaac

SEQ ID NO: 278445 - DNA, 25 bp, Artificial
  probe
  misc_feature (1)..(25): SEQ ID NO: 943; WAN024DL4; Start 836; Stop 860
ttggttattggaaggatagtggaat

SEQ ID NO: 278446 - DNA, 25 bp, Artificial
  probe
  misc_feature (1)..(25): SEQ ID NO: 943; WAN024DL4; Start 1198; Stop 1222
aagttcattcagttagtcacgagag

SEQ ID NO: 278447 - DNA, 25 bp, Artificial
  probe
  misc_feature (1)..(25): SEQ ID NO: 943; WAN024DL4; Start 1060; Stop 1084
ttaatcaatcaagcaacagaatcgg

SEQ ID NO: 278448 - DNA, 25 bp, Artificial
  probe
  misc_feature (1)..(25): SEQ ID NO: 943; WAN024DL4; Start 837; Stop 861
tggttattggaaggatagtggaatt

SEQ ID NO: 278449 - DNA, 25 bp, Artificial
  probe
  misc_feature (1)..(25): SEQ ID NO: 943; WAN024DL4; Start 1284; Stop 1308
tcatagtaagcagatgttggtagac

SEQ ID NO: 278450 - DNA, 25 bp, Artificial
  probe
  misc_feature (1)..(25): SEQ ID NO: 943; WAN024DL4; Start 1195; Stop 1219
aagaagttcattcagttagtcacga

SEQ ID NO: 278451 - DNA, 25 bp, Artificial
  probe
  misc_feature (1)..(25): SEQ ID NO: 943; WAN024DL4; Start 411; Stop 435
ggataccaatgctgacatctatgat

SEQ ID NO: 278452 - DNA, 25 bp, Artificial
  probe
  misc_feature (1)..(25): SEQ ID NO: 943; WAN024DL4; Start 1061; Stop 1085
taatcaatcaagcaacagaatcggt

SEQ ID NO: 278453 - DNA, 25 bp, Artificial
  probe
  misc_feature (1)..(25): SEQ ID NO: 943; WAN024DL4; Start 1286; Stop 1310
atagtaagcagatgttggtagacga

SEQ ID NO: 278454 - DNA, 25 bp, Artificial
  probe
  misc_feature (1)..(25): SEQ ID NO: 943; WAN024DL4; Start 1197; Stop 1221
gaagttcattcagttagtcacgaga

SEQ ID NO: 278455 - DNA, 25 bp, Artificial
  probe
  misc_feature (1)..(25): SEQ ID NO: 943; WAN024DL4; Start 1196; Stop 1220
agaagttcattcagttagtcacgag

SEQ ID NO: 278456 - DNA, 25 bp, Artificial
  probe
  misc_feature (1)..(25): SEQ ID NO: 943; WAN024DL4; Start 1068; Stop 1092
tcaagcaacagaatcggtctatatt

SEQ ID NO: 278457 - DNA, 25 bp, Artificial
  probe
  misc_feature (1)..(25): SEQ ID NO: 943; WAN024DL4; Start 1067; Stop 1091
atcaagcaacagaatcggtctatat

SEQ ID NO: 278458 - DNA, 25 bp, Artificial
  probe
  misc_feature (1)..(25): SEQ ID NO: 943; WAN024DL4; Start 1066; Stop 1090
aatcaagcaacagaatcggtctata

SEQ ID NO: 278459 - DNA, 25 bp, Artificial
  probe
  misc_feature (1)..(25): SEQ ID NO: 943; WAN024DL4; Start 1283; Stop 1307
ttcatagtaagcagatgttggtaga

SEQ ID NO: 278460 - DNA, 25 bp, Artificial
  probe
  misc_feature (1)..(25): SEQ ID NO: 943; WAN024DL4; Start 1071; Stop 1095
agcaacagaatcggtctatattacg

SEQ ID NO: 278461 - DNA, 25 bp, Artificial
  probe
  misc_feature (1)..(25): SEQ ID NO: 943; WAN024DL4; Start 1287; Stop 1311
tagtaagcagatgttggtagacgaa

SEQ ID NO: 278462 - DNA, 25 bp, Artificial
  probe
  misc_feature (1)..(25): SEQ ID NO: 943; WAN024DL4; Start 1285; Stop 1309
catagtaagcagatgttggtagacg

SEQ ID NO: 278463 - DNA, 25 bp, Artificial
  probe
  misc_feature (1)..(25): SEQ ID NO: 943; WAN024DL4; Start 1194; Stop 1218
taagaagttcattcagttagtcacg

SEQ ID NO: 278464 - DNA, 25 bp, Artificial
  probe
  misc_feature (1)..(25): SEQ ID NO: 943; WAN024DL4; Start 1290; Stop 1314
taagcagatgttggtagacgaagat

SEQ ID NO: 278465 - DNA, 25 bp, Artificial
  probe
  misc_feature (1)..(25): SEQ ID NO: 943; WAN024DL4; Start 764; Stop 788
ttgttgatggtcagatagcctatac

SEQ ID NO: 278466 - DNA, 25 bp, Artificial
  probe
  misc_feature (1)..(25): SEQ ID NO: 943; WAN024DL4; Start 762; Stop 786
gattgttgatggtcagatagcctat

SEQ ID NO: 278467 - DNA, 25 bp, Artificial
  probe
  misc_feature (1)..(25): SEQ ID NO: 943; WAN024DL4; Start 550; Stop 574
ttgatgtggaatcgcatactagata

SEQ ID NO: 278468 - DNA, 25 bp, Artificial
  probe
  misc_feature (1)..(25): SEQ ID NO: 943; WAN024DL4; Start 1070; Stop 1094
aagcaacagaatcggtctatattac

SEQ ID NO: 278469 - DNA, 25 bp, Artificial
  probe
  misc_feature (1)..(25): SEQ ID NO: 943; WAN024DL4; Start 1069; Stop 1093
caagcaacagaatcggtctatatta

SEQ ID NO: 278470 - DNA, 25 bp, Artificial
  probe
  misc_feature (1)..(25): SEQ ID NO: 943; WAN024DL4; Start 765; Stop 789
tgttgatggtcagatagcctatact

SEQ ID NO: 278471 - DNA, 25 bp, Artificial
  probe
  misc_feature (1)..(25): SEQ ID NO: 943; WAN024DL4; Start 551; Stop 575
tgatgtggaatcgcatactagatat

SEQ ID NO: 278472 - DNA, 25 bp, Artificial
  probe
  misc_feature (1)..(25): SEQ ID NO: 943; WAN024DL4; Start 1065; Stop 1089
caatcaagcaacagaatcggtctat

SEQ ID NO: 278473 - DNA, 25 bp, Artificial
  probe
  misc_feature (1)..(25): SEQ ID NO: 943; WAN024DL4; Start 758; Stop 782
tattgattgttgatggtcagatagc

SEQ ID NO: 278474 - DNA, 25 bp, Artificial
  probe
  misc_feature (1)..(25): SEQ ID NO: 943; WAN024DL4; Start 1201; Stop 1225
ttcattcagttagtcacgagaggag

SEQ ID NO: 278475 - DNA, 25 bp, Artificial
  probe
  misc_feature (1)..(25): SEQ ID NO: 943; WAN024DL4; Start 763; Stop 787
attgttgatggtcagatagcctata

SEQ ID NO: 278476 - DNA, 25 bp, Artificial
  probe
  misc_feature (1)..(25): SEQ ID NO: 943; WAN024DL4; Start 1282; Stop 1306
attcatagtaagcagatgttggtag

SEQ ID NO: 278477 - DNA, 25 bp, Artificial
  probe
  misc_feature (1)..(25): SEQ ID NO: 943; WAN024DL4; Start 759; Stop 783
attgattgttgatggtcagatagcc

SEQ ID NO: 278478 - DNA, 25 bp, Artificial
  probe
  misc_feature (1)..(25): SEQ ID NO: 944; WAN024D93; Start 485; Stop 509
cagaatcaatggtcaaggaacaatt

SEQ ID NO: 278479 - DNA, 25 bp, Artificial
  probe
  misc_feature (1)..(25): SEQ ID NO: 944; WAN024D93; Start 68; Stop 92
agtcaggttctaatggttctcagtc

SEQ ID NO: 278480 - DNA, 25 bp, Artificial
  probe
  misc_feature (1)..(25): SEQ ID NO: 944; WAN024D93; Start 67; Stop 91
cagtcaggttctaatggttctcagt

SEQ ID NO: 278481 - DNA, 25 bp, Artificial
  probe
  misc_feature (1)..(25): SEQ ID NO: 944; WAN024D93; Start 789; Stop 813
agcaagtctaactgaagttgaagaa

SEQ ID NO: 278482 - DNA, 25 bp, Artificial
  probe
  misc_feature (1)..(25): SEQ ID NO: 944; WAN024D93; Start 790; Stop 814
gcaagtctaactgaagttgaagaat

SEQ ID NO: 278483 - DNA, 25 bp, Artificial
  probe
  misc_feature (1)..(25): SEQ ID NO: 944; WAN024D93; Start 325; Stop 349
ggaattagtgctactgacgagagaa

SEQ ID NO: 278484 - DNA, 25 bp, Artificial
  probe
  misc_feature (1)..(25): SEQ ID NO: 944; WAN024D93; Start 788; Stop 812
cagcaagtctaactgaagttgaaga

SEQ ID NO: 278485 - DNA, 25 bp, Artificial
  probe
  misc_feature (1)..(25): SEQ ID NO: 944; WAN024D93; Start 324; Stop 348
aggaattagtgctactgacgagaga

SEQ ID NO: 278486 - DNA, 25 bp, Artificial
  probe
  misc_feature (1)..(25): SEQ ID NO: 944; WAN024D93; Start 709; Stop 733
gatgatttgaaagaagtggtagaca

SEQ ID NO: 278487 - DNA, 25 bp, Artificial
  probe
  misc_feature (1)..(25): SEQ ID NO: 944; WAN024D93; Start 708; Stop 732
tgatgatttgaaagaagtggtagac

SEQ ID NO: 278488 - DNA, 25 bp, Artificial
  probe
  misc_feature (1)..(25): SEQ ID NO: 944; WAN024D93; Start 707; Stop 731
gtgatgatttgaaagaagtggtaga

SEQ ID NO: 278489 - DNA, 25 bp, Artificial
  probe
  misc_feature (1)..(25): SEQ ID NO: 944; WAN024D93; Start 706; Stop 730
agtgatgatttgaaagaagtggtag

SEQ ID NO: 278490 - DNA, 25 bp, Artificial
  probe
  misc_feature (1)..(25): SEQ ID NO: 944; WAN024D93; Start 484; Stop 508
ccagaatcaatggtcaaggaacaat

SEQ ID NO: 278491 - DNA, 25 bp, Artificial
  probe
  misc_feature (1)..(25): SEQ ID NO: 944; WAN024D93; Start 712; Stop 736
gatttgaaagaagtggtagacaagg

SEQ ID NO: 278492 - DNA, 25 bp, Artificial
  probe
  misc_feature (1)..(25): SEQ ID NO: 944; WAN024D93; Start 713; Stop 737
atttgaaagaagtggtagacaaggt

SEQ ID NO: 278493 - DNA, 25 bp, Artificial
  probe
  misc_feature (1)..(25): SEQ ID NO: 944; WAN024D93; Start 390; Stop 414
gattagtttcttggttcgtaaggct

SEQ ID NO: 278494 - DNA, 25 bp, Artificial
  probe
  misc_feature (1)..(25): SEQ ID NO: 944; WAN024D93; Start 532; Stop 556
ctaactaatatgggtgaagcagtca

SEQ ID NO: 278495 - DNA, 25 bp, Artificial
  probe
  misc_feature (1)..(25): SEQ ID NO: 944; WAN024D93; Start 477; Stop 501
gactgttccagaatcaatggtcaag

SEQ ID NO: 278496 - DNA, 25 bp, Artificial
  probe
  misc_feature (1)..(25): SEQ ID NO: 944; WAN024D93; Start 537; Stop 561
taatatgggtgaagcagtcaatgaa

SEQ ID NO: 278497 - DNA, 25 bp, Artificial
  probe
  misc_feature (1)..(25): SEQ ID NO: 944; WAN024D93; Start 534; Stop 558
aactaatatgggtgaagcagtcaat

SEQ ID NO: 278498 - DNA, 25 bp, Artificial
  probe
  misc_feature (1)..(25): SEQ ID NO: 944; WAN024D93; Start 533; Stop 557
taactaatatgggtgaagcagtcaa

SEQ ID NO: 278499 - DNA, 25 bp, Artificial
  probe
  misc_feature (1)..(25): SEQ ID NO: 944; WAN024D93; Start 711; Stop 735
tgatttgaaagaagtggtagacaag

SEQ ID NO: 278500 - DNA, 25 bp, Artificial
  probe
  misc_feature (1)..(25): SEQ ID NO: 944; WAN024D93; Start 389; Stop 413
agattagtttcttggttcgtaaggc

SEQ ID NO: 278501 - DNA, 25 bp, Artificial
  probe
  misc_feature (1)..(25): SEQ ID NO: 944; WAN024D93; Start 704; Stop 728
atagtgatgatttgaaagaagtggt

SEQ ID NO: 278502 - DNA, 25 bp, Artificial
  probe
  misc_feature (1)..(25): SEQ ID NO: 944; WAN024D93; Start 391; Stop 415
attagtttcttggttcgtaaggctg

SEQ ID NO: 278503 - DNA, 25 bp, Artificial
  probe
  misc_feature (1)..(25): SEQ ID NO: 944; WAN024D93; Start 536; Stop 560
ctaatatgggtgaagcagtcaatga

SEQ ID NO: 278504 - DNA, 25 bp, Artificial
  probe
  misc_feature (1)..(25): SEQ ID NO: 944; WAN024D93; Start 326; Stop 350
gaattagtgctactgacgagagaaa

SEQ ID NO: 278505 - DNA, 25 bp, Artificial
  probe
  misc_feature (1)..(25): SEQ ID NO: 944; WAN024D93; Start 323; Stop 347
caggaattagtgctactgacgagag

SEQ ID NO: 278506 - DNA, 25 bp, Artificial
  probe
  misc_feature (1)..(25): SEQ ID NO: 944; WAN024D93; Start 538; Stop 562
aatatgggtgaagcagtcaatgaat

SEQ ID NO: 278507 - DNA, 25 bp, Artificial
  probe
  misc_feature (1)..(25): SEQ ID NO: 944; WAN024D93; Start 531; Stop 555
cctaactaatatgggtgaagcagtc

SEQ ID NO: 278508 - DNA, 25 bp, Artificial
  probe
  misc_feature (1)..(25): SEQ ID NO: 944; WAN024D93; Start 535; Stop 559
actaatatgggtgaagcagtcaatg

SEQ ID NO: 278509 - DNA, 25 bp, Artificial
  probe
  misc_feature (1)..(25): SEQ ID NO: 944; WAN024D93; Start 539; Stop 563
atatgggtgaagcagtcaatgaatt

SEQ ID NO: 278510 - DNA, 25 bp, Artificial
  probe
  misc_feature (1)..(25): SEQ ID NO: 944; WAN024D93; Start 787; Stop 811
gcagcaagtctaactgaagttgaag

SEQ ID NO: 278511 - DNA, 25 bp, Artificial
  probe
  misc_feature (1)..(25): SEQ ID NO: 945; WAN024G73; Start 473; Stop 497
tacgcacaattaactacaactccta

SEQ ID NO: 278512 - DNA, 25 bp, Artificial
  probe
  misc_feature (1)..(25): SEQ ID NO: 945; WAN024G73; Start 553; Stop 577
actaataagcagattgtctctcagc

SEQ ID NO: 278513 - DNA, 25 bp, Artificial
  probe
  misc_feature (1)..(25): SEQ ID NO: 945; WAN024G73; Start 475; Stop 499
cgcacaattaactacaactcctact

SEQ ID NO: 278514 - DNA, 25 bp, Artificial
  probe
  misc_feature (1)..(25): SEQ ID NO: 945; WAN024G73; Start 476; Stop 500
gcacaattaactacaactcctactt

SEQ ID NO: 278515 - DNA, 25 bp, Artificial
  probe
  misc_feature (1)..(25): SEQ ID NO: 945; WAN024G73; Start 474; Stop 498
acgcacaattaactacaactcctac

SEQ ID NO: 278516 - DNA, 25 bp, Artificial
  probe
  misc_feature (1)..(25): SEQ ID NO: 945; WAN024G73; Start 552; Stop 576
aactaataagcagattgtctctcag

SEQ ID NO: 278517 - DNA, 25 bp, Artificial
  probe
  misc_feature (1)..(25): SEQ ID NO: 945; WAN024G73; Start 472; Stop 496
gtacgcacaattaactacaactcct

SEQ ID NO: 278518 - DNA, 25 bp, Artificial
  probe
  misc_feature (1)..(25): SEQ ID NO: 945; WAN024G73; Start 396; Stop 420
gcttcttcatctgacagactatctt

SEQ ID NO: 278519 - DNA, 25 bp, Artificial
  probe
  misc_feature (1)..(25): SEQ ID NO: 945; WAN024G73; Start 566; Stop 590
ttgtctctcagcttgctattaattg

SEQ ID NO: 278520 - DNA, 25 bp, Artificial
  probe
  misc_feature (1)..(25): SEQ ID NO: 945; WAN024G73; Start 564; Stop 588
gattgtctctcagcttgctattaat

SEQ ID NO: 278521 - DNA, 25 bp, Artificial
  probe
  misc_feature (1)..(25): SEQ ID NO: 945; WAN024G73; Start 563; Stop 587
agattgtctctcagcttgctattaa

SEQ ID NO: 278522 - DNA, 25 bp, Artificial
  probe
  misc_feature (1)..(25): SEQ ID NO: 945; WAN024G73; Start 593; Stop 617
tcattctaagcattgataaggaaga

SEQ ID NO: 278523 - DNA, 25 bp, Artificial
  probe
  misc_feature (1)..(25): SEQ ID NO: 945; WAN024G73; Start 562; Stop 586
cagattgtctctcagcttgctatta

SEQ ID NO: 278524 - DNA, 25 bp, Artificial
  probe
  misc_feature (1)..(25): SEQ ID NO: 945; WAN024G73; Start 394; Stop 418
gagcttcttcatctgacagactatc

SEQ ID NO: 278525 - DNA, 25 bp, Artificial
  probe
  misc_feature (1)..(25): SEQ ID NO: 945; WAN024G73; Start 395; Stop 419
agcttcttcatctgacagactatct

SEQ ID NO: 278526 - DNA, 25 bp, Artificial
  probe
  misc_feature (1)..(25): SEQ ID NO: 945; WAN024G73; Start 393; Stop 417
agagcttcttcatctgacagactat

SEQ ID NO: 278527 - DNA, 25 bp, Artificial
  probe
  misc_feature (1)..(25): SEQ ID NO: 945; WAN024G73; Start 477; Stop 501
cacaattaactacaactcctacttc

SEQ ID NO: 278528 - DNA, 25 bp, Artificial
  probe
  misc_feature (1)..(25): SEQ ID NO: 945; WAN024G73; Start 567; Stop 591
tgtctctcagcttgctattaattgc

SEQ ID NO: 278529 - DNA, 25 bp, Artificial
  probe
  misc_feature (1)..(25): SEQ ID NO: 945; WAN024G73; Start 565; Stop 589
attgtctctcagcttgctattaatt

SEQ ID NO: 278530 - DNA, 25 bp, Artificial
  probe
  misc_feature (1)..(25): SEQ ID NO: 945; WAN024G73; Start 576; Stop 600
gcttgctattaattgcttcattcta

SEQ ID NO: 278531 - DNA, 25 bp, Artificial
  probe
  misc_feature (1)..(25): SEQ ID NO: 945; WAN024G73; Start 470; Stop 494
gtgtacgcacaattaactacaactc

SEQ ID NO: 278532 - DNA, 25 bp, Artificial
  probe
  misc_feature (1)..(25): SEQ ID NO: 945; WAN024G73; Start 592; Stop 616
ttcattctaagcattgataaggaag

SEQ ID NO: 278533 - DNA, 25 bp, Artificial
  probe
  misc_feature (1)..(25): SEQ ID NO: 945; WAN024G73; Start 591; Stop 615
cttcattctaagcattgataaggaa

SEQ ID NO: 278534 - DNA, 25 bp, Artificial
  probe
  misc_feature (1)..(25): SEQ ID NO: 945; WAN024G73; Start 471; Stop 495
tgtacgcacaattaactacaactcc

SEQ ID NO: 278535 - DNA, 25 bp, Artificial
  probe
  misc_feature (1)..(25): SEQ ID NO: 945; WAN024G73; Start 286; Stop 310
gcatgtctactttctgatacttctg

SEQ ID NO: 278536 - DNA, 25 bp, Artificial
  probe
  misc_feature (1)..(25): SEQ ID NO: 945; WAN024G73; Start 285; Stop 309
agcatgtctactttctgatacttct

SEQ ID NO: 278537 - DNA, 25 bp, Artificial
  probe
  misc_feature (1)..(25): SEQ ID NO: 945; WAN024G73; Start 298; Stop 322
tctgatacttctgattacactctaa

SEQ ID NO: 278538 - DNA, 25 bp, Artificial
  probe
  misc_feature (1)..(25): SEQ ID NO: 945; WAN024G73; Start 297; Stop 321
ttctgatacttctgattacactcta

SEQ ID NO: 278539 - DNA, 25 bp, Artificial
  probe
  misc_feature (1)..(25): SEQ ID NO: 945; WAN024G73; Start 551; Stop 575
aaactaataagcagattgtctctca

SEQ ID NO: 278540 - DNA, 25 bp, Artificial
  probe
  misc_feature (1)..(25): SEQ ID NO: 945; WAN024G73; Start 572; Stop 596
ctcagcttgctattaattgcttcat

SEQ ID NO: 278541 - DNA, 25 bp, Artificial
  probe
  misc_feature (1)..(25): SEQ ID NO: 945; WAN024G73; Start 570; Stop 594
ctctcagcttgctattaattgcttc

SEQ ID NO: 278542 - DNA, 25 bp, Artificial
  probe
  misc_feature (1)..(25): SEQ ID NO: 945; WAN024G73; Start 554; Stop 578
ctaataagcagattgtctctcagct

SEQ ID NO: 278543 - DNA, 25 bp, Artificial
  probe
  misc_feature (1)..(25): SEQ ID NO: 945; WAN024G73; Start 573; Stop 597
tcagcttgctattaattgcttcatt

SEQ ID NO: 278544 - DNA, 25 bp, Artificial
  probe
  misc_feature (1)..(25): SEQ ID NO: 946; WAN024DIB; Start 316; Stop 340
aagattgaagaacatattggtttgc

SEQ ID NO: 278545 - DNA, 25 bp, Artificial
  probe
  misc_feature (1)..(25): SEQ ID NO: 946; WAN024DIB; Start 110; Stop 134
ttgaacaggcaagagaattggttga

SEQ ID NO: 278546 - DNA, 25 bp, Artificial
  probe
  misc_feature (1)..(25): SEQ ID NO: 946; WAN024DIB; Start 313; Stop 337
cgaaagattgaagaacatattggtt

SEQ ID NO: 278547 - DNA, 25 bp, Artificial
  probe
  misc_feature (1)..(25): SEQ ID NO: 946; WAN024DIB; Start 63; Stop 87
aaggtcagatttgatggatgctttg

SEQ ID NO: 278548 - DNA, 25 bp, Artificial
  probe
  misc_feature (1)..(25): SEQ ID NO: 946; WAN024DIB; Start 62; Stop 86
caaggtcagatttgatggatgcttt

SEQ ID NO: 278549 - DNA, 25 bp, Artificial
  probe
  misc_feature (1)..(25): SEQ ID NO: 946; WAN024DIB; Start 113; Stop 137
aacaggcaagagaattggttgagtc

SEQ ID NO: 278550 - DNA, 25 bp, Artificial
  probe
  misc_feature (1)..(25): SEQ ID NO: 946; WAN024DIB; Start 112; Stop 136
gaacaggcaagagaattggttgagt

SEQ ID NO: 278551 - DNA, 25 bp, Artificial
  probe
  misc_feature (1)..(25): SEQ ID NO: 946; WAN024DIB; Start 111; Stop 135
tgaacaggcaagagaattggttgag

SEQ ID NO: 278552 - DNA, 25 bp, Artificial
  probe
  misc_feature (1)..(25): SEQ ID NO: 946; WAN024DIB; Start 171; Stop 195
acagactaatttattagcggaggag

SEQ ID NO: 278553 - DNA, 25 bp, Artificial
  probe
  misc_feature (1)..(25): SEQ ID NO: 946; WAN024DIB; Start 166; Stop 190
cgagaacagactaatttattagcgg

SEQ ID NO: 278554 - DNA, 25 bp, Artificial
  probe
  misc_feature (1)..(25): SEQ ID NO: 946; WAN024DIB; Start 170; Stop 194
aacagactaatttattagcggagga

SEQ ID NO: 278555 - DNA, 25 bp, Artificial
  probe
  misc_feature (1)..(25): SEQ ID NO: 946; WAN024DIB; Start 172; Stop 196
cagactaatttattagcggaggagg

SEQ ID NO: 278556 - DNA, 25 bp, Artificial
  probe
  misc_feature (1)..(25): SEQ ID NO: 946; WAN024DIB; Start 160; Stop 184
gcccatcgagaacagactaatttat

SEQ ID NO: 278557 - DNA, 25 bp, Artificial
  probe
  misc_feature (1)..(25): SEQ ID NO: 946; WAN024DIB; Start 169; Stop 193
gaacagactaatttattagcggagg

SEQ ID NO: 278558 - DNA, 25 bp, Artificial
  probe
  misc_feature (1)..(25): SEQ ID NO: 946; WAN024DIB; Start 250; Stop 274
ttgatgacaacgatgctattgtatg

SEQ ID NO: 278559 - DNA, 25 bp, Artificial
  probe
  misc_feature (1)..(25): SEQ ID NO: 946; WAN024DIB; Start 312; Stop 336
tcgaaagattgaagaacatattggt

SEQ ID NO: 278560 - DNA, 25 bp, Artificial
  probe
  misc_feature (1)..(25): SEQ ID NO: 946; WAN024DIB; Start 251; Stop 275
tgatgacaacgatgctattgtatga

SEQ ID NO: 278561 - DNA, 25 bp, Artificial
  probe
  misc_feature (1)..(25): SEQ ID NO: 946; WAN024DIB; Start 109; Stop 133
tttgaacaggcaagagaattggttg

SEQ ID NO: 278562 - DNA, 25 bp, Artificial
  probe
  misc_feature (1)..(25): SEQ ID NO: 946; WAN024DIB; Start 253; Stop 277
atgacaacgatgctattgtatgatc

SEQ ID NO: 278563 - DNA, 25 bp, Artificial
  probe
  misc_feature (1)..(25): SEQ ID NO: 946; WAN024DIB; Start 252; Stop 276
gatgacaacgatgctattgtatgat

SEQ ID NO: 278564 - DNA, 25 bp, Artificial
  probe
  misc_feature (1)..(25): SEQ ID NO: 946; WAN024DIB; Start 161; Stop 185
cccatcgagaacagactaatttatt

SEQ ID NO: 278565 - DNA, 25 bp, Artificial
  probe
  misc_feature (1)..(25): SEQ ID NO: 946; WAN024DIB; Start 168; Stop 192
agaacagactaatttattagcggag

SEQ ID NO: 278566 - DNA, 25 bp, Artificial
  probe
  misc_feature (1)..(25): SEQ ID NO: 946; WAN024DIB; Start 167; Stop 191
gagaacagactaatttattagcgga

SEQ ID NO: 278567 - DNA, 25 bp, Artificial
  probe
  misc_feature (1)..(25): SEQ ID NO: 946; WAN024DIB; Start 317; Stop 341
agattgaagaacatattggtttgca

SEQ ID NO: 278568 - DNA, 25 bp, Artificial
  probe
  misc_feature (1)..(25): SEQ ID NO: 946; WAN024DIB; Start 175; Stop 199
actaatttattagcggaggaggcat

SEQ ID NO: 278569 - DNA, 25 bp, Artificial
  probe
  misc_feature (1)..(25): SEQ ID NO: 946; WAN024DIB; Start 159; Stop 183
tgcccatcgagaacagactaattta

SEQ ID NO: 278570 - DNA, 25 bp, Artificial
  probe
  misc_feature (1)..(25): SEQ ID NO: 946; WAN024DIB; Start 257; Stop 281
caacgatgctattgtatgatcaggt

SEQ ID NO: 278571 - DNA, 25 bp, Artificial
  probe
  misc_feature (1)..(25): SEQ ID NO: 946; WAN024DIB; Start 173; Stop 197
agactaatttattagcggaggaggc

SEQ ID NO: 278572 - DNA, 25 bp, Artificial
  probe
  misc_feature (1)..(25): SEQ ID NO: 946; WAN024DIB; Start 165; Stop 189
tcgagaacagactaatttattagcg

SEQ ID NO: 278573 - DNA, 25 bp, Artificial
  probe
  misc_feature (1)..(25): SEQ ID NO: 946; WAN024DIB; Start 115; Stop 139
caggcaagagaattggttgagtctg

SEQ ID NO: 278574 - DNA, 25 bp, Artificial
  probe
  misc_feature (1)..(25): SEQ ID NO: 946; WAN024DIB; Start 114; Stop 138
acaggcaagagaattggttgagtct

SEQ ID NO: 278575 - DNA, 25 bp, Artificial
  probe
  misc_feature (1)..(25): SEQ ID NO: 946; WAN024DIB; Start 91; Stop 115
tttgcgagagatggatattttgaac

SEQ ID NO: 278576 - DNA, 25 bp, Artificial
  probe
  misc_feature (1)..(25): SEQ ID NO: 946; WAN024DIB; Start 90; Stop 114
gtttgcgagagatggatattttgaa

SEQ ID NO: 278577 - DNA, 25 bp, Artificial
  probe
  misc_feature (1)..(25): SEQ ID NO: 947; WAN024B4D; Start 76; Stop 100
cgccttcaaatcgttctactaacta

SEQ ID NO: 278578 - DNA, 25 bp, Artificial
  probe
  misc_feature (1)..(25): SEQ ID NO: 947; WAN024B4D; Start 77; Stop 101
gccttcaaatcgttctactaactaa

SEQ ID NO: 278579 - DNA, 25 bp, Artificial
  probe
  misc_feature (1)..(25): SEQ ID NO: 947; WAN024B4D; Start 78; Stop 102
ccttcaaatcgttctactaactaat

SEQ ID NO: 278580 - DNA, 25 bp, Artificial
  probe
  misc_feature (1)..(25): SEQ ID NO: 947; WAN024B4D; Start 75; Stop 99
acgccttcaaatcgttctactaact

SEQ ID NO: 278581 - DNA, 25 bp, Artificial
  probe
  misc_feature (1)..(25): SEQ ID NO: 947; WAN024B4D; Start 72; Stop 96
taaacgccttcaaatcgttctacta

SEQ ID NO: 278582 - DNA, 25 bp, Artificial
  probe
  misc_feature (1)..(25): SEQ ID NO: 947; WAN024B4D; Start 71; Stop 95
ataaacgccttcaaatcgttctact

SEQ ID NO: 278583 - DNA, 25 bp, Artificial
  probe
  misc_feature (1)..(25): SEQ ID NO: 947; WAN024B4D; Start 73; Stop 97
aaacgccttcaaatcgttctactaa

SEQ ID NO: 278584 - DNA, 25 bp, Artificial
  probe
  misc_feature (1)..(25): SEQ ID NO: 947; WAN024B4D; Start 74; Stop 98
aacgccttcaaatcgttctactaac

SEQ ID NO: 278585 - DNA, 25 bp, Artificial
  probe
  misc_feature (1)..(25): SEQ ID NO: 948; WAN024CLH; Start 1215; Stop 1239
ggttcacttggatagaggttactac

SEQ ID NO: 278586 - DNA, 25 bp, Artificial
  probe
  misc_feature (1)..(25): SEQ ID NO: 948; WAN024CLH; Start 610; Stop 634
attgttgacttagccattctcctta

SEQ ID NO: 278587 - DNA, 25 bp, Artificial
  probe
  misc_feature (1)..(25): SEQ ID NO: 948; WAN024CLH; Start 1212; Stop 1236
attggttcacttggatagaggttac

SEQ ID NO: 278588 - DNA, 25 bp, Artificial
  probe
  misc_feature (1)..(25): SEQ ID NO: 948; WAN024CLH; Start 1214; Stop 1238
tggttcacttggatagaggttacta

SEQ ID NO: 278589 - DNA, 25 bp, Artificial
  probe
  misc_feature (1)..(25): SEQ ID NO: 948; WAN024CLH; Start 1216; Stop 1240
gttcacttggatagaggttactacg

SEQ ID NO: 278590 - DNA, 25 bp, Artificial
  probe
  misc_feature (1)..(25): SEQ ID NO: 948; WAN024CLH; Start 612; Stop 636
tgttgacttagccattctccttaat

SEQ ID NO: 278591 - DNA, 25 bp, Artificial
  probe
  misc_feature (1)..(25): SEQ ID NO: 948; WAN024CLH; Start 611; Stop 635
ttgttgacttagccattctccttaa

SEQ ID NO: 278592 - DNA, 25 bp, Artificial
  probe
  misc_feature (1)..(25): SEQ ID NO: 948; WAN024CLH; Start 187; Stop 211
attatgaatcaggtagttggtggtt

SEQ ID NO: 278593 - DNA, 25 bp, Artificial
  probe
  misc_feature (1)..(25): SEQ ID NO: 948; WAN024CLH; Start 852; Stop 876
tgaagtaattgaagaagacgaagga

SEQ ID NO: 278594 - DNA, 25 bp, Artificial
  probe
  misc_feature (1)..(25): SEQ ID NO: 948; WAN024CLH; Start 1211; Stop 1235
aattggttcacttggatagaggtta

SEQ ID NO: 278595 - DNA, 25 bp, Artificial
  probe
  misc_feature (1)..(25): SEQ ID NO: 948; WAN024CLH; Start 848; Stop 872
gtgttgaagtaattgaagaagacga

SEQ ID NO: 278596 - DNA, 25 bp, Artificial
  probe
  misc_feature (1)..(25): SEQ ID NO: 948; WAN024CLH; Start 847; Stop 871
ggtgttgaagtaattgaagaagacg

SEQ ID NO: 278597 - DNA, 25 bp, Artificial
  probe
  misc_feature (1)..(25): SEQ ID NO: 948; WAN024CLH; Start 186; Stop 210
tattatgaatcaggtagttggtggt

SEQ ID NO: 278598 - DNA, 25 bp, Artificial
  probe
  misc_feature (1)..(25): SEQ ID NO: 948; WAN024CLH; Start 851; Stop 875
ttgaagtaattgaagaagacgaagg

SEQ ID NO: 278599 - DNA, 25 bp, Artificial
  probe
  misc_feature (1)..(25): SEQ ID NO: 948; WAN024CLH; Start 1213; Stop 1237
ttggttcacttggatagaggttact

SEQ ID NO: 278600 - DNA, 25 bp, Artificial
  probe
  misc_feature (1)..(25): SEQ ID NO: 948; WAN024CLH; Start 853; Stop 877
gaagtaattgaagaagacgaaggaa

SEQ ID NO: 278601 - DNA, 25 bp, Artificial
  probe
  misc_feature (1)..(25): SEQ ID NO: 948; WAN024CLH; Start 1217; Stop 1241
ttcacttggatagaggttactacgg

SEQ ID NO: 278602 - DNA, 25 bp, Artificial
  probe
  misc_feature (1)..(25): SEQ ID NO: 948; WAN024CLH; Start 849; Stop 873
tgttgaagtaattgaagaagacgaa

SEQ ID NO: 278603 - DNA, 25 bp, Artificial
  probe
  misc_feature (1)..(25): SEQ ID NO: 948; WAN024CLH; Start 1219; Stop 1243
cacttggatagaggttactacggtt

SEQ ID NO: 278604 - DNA, 25 bp, Artificial
  probe
  misc_feature (1)..(25): SEQ ID NO: 948; WAN024CLH; Start 854; Stop 878
aagtaattgaagaagacgaaggaat

SEQ ID NO: 278605 - DNA, 25 bp, Artificial
  probe
  misc_feature (1)..(25): SEQ ID NO: 948; WAN024CLH; Start 850; Stop 874
gttgaagtaattgaagaagacgaag

SEQ ID NO: 278606 - DNA, 25 bp, Artificial
  probe
  misc_feature (1)..(25): SEQ ID NO: 948; WAN024CLH; Start 185; Stop 209
ttattatgaatcaggtagttggtgg

SEQ ID NO: 278607 - DNA, 25 bp, Artificial
  probe
  misc_feature (1)..(25): SEQ ID NO: 948; WAN024CLH; Start 1068; Stop 1092
gcattctgagattatccgtgataca

SEQ ID NO: 278608 - DNA, 25 bp, Artificial
  probe
  misc_feature (1)..(25): SEQ ID NO: 948; WAN024CLH; Start 1070; Stop 1094
attctgagattatccgtgatacagc

SEQ ID NO: 278609 - DNA, 25 bp, Artificial
  probe
  misc_feature (1)..(25): SEQ ID NO: 948; WAN024CLH; Start 1218; Stop 1242
tcacttggatagaggttactacggt

SEQ ID NO: 278610 - DNA, 25 bp, Artificial
  probe
  misc_feature (1)..(25): SEQ ID NO: 948; WAN024CLH; Start 1069; Stop 1093
cattctgagattatccgtgatacag

SEQ ID NO: 278611 - DNA, 25 bp, Artificial
  probe
  misc_feature (1)..(25): SEQ ID NO: 948; WAN024CLH; Start 700; Stop 724
cttcatggtacgactcacaatgtag

SEQ ID NO: 278612 - DNA, 25 bp, Artificial
  probe
  misc_feature (1)..(25): SEQ ID NO: 948; WAN024CLH; Start 855; Stop 879
agtaattgaagaagacgaaggaatt

SEQ ID NO: 278613 - DNA, 25 bp, Artificial
  probe
  misc_feature (1)..(25): SEQ ID NO: 948; WAN024CLH; Start 699; Stop 723
acttcatggtacgactcacaatgta

SEQ ID NO: 278614 - DNA, 25 bp, Artificial
  probe
  misc_feature (1)..(25): SEQ ID NO: 948; WAN024CLH; Start 8; Stop 32
caagagtaaaggaaacgagtatgga

SEQ ID NO: 278615 - DNA, 25 bp, Artificial
  probe
  misc_feature (1)..(25): SEQ ID NO: 948; WAN024CLH; Start 7; Stop 31
tcaagagtaaaggaaacgagtatgg

SEQ ID NO: 278616 - DNA, 25 bp, Artificial
  probe
  misc_feature (1)..(25): SEQ ID NO: 948; WAN024CLH; Start 1221; Stop 1245
cttggatagaggttactacggtttc

SEQ ID NO: 278617 - DNA, 25 bp, Artificial
  probe
  misc_feature (1)..(25): SEQ ID NO: 948; WAN024CLH; Start 701; Stop 725
ttcatggtacgactcacaatgtagt

SEQ ID NO: 278618 - DNA, 25 bp, Artificial
  probe
  misc_feature (1)..(25): SEQ ID NO: 949; WAN024DM8; Start 567; Stop 591
gcttaacaatggctggtatctaact

SEQ ID NO: 278619 - DNA, 25 bp, Artificial
  probe
  misc_feature (1)..(25): SEQ ID NO: 949; WAN024DM8; Start 566; Stop 590
ggcttaacaatggctggtatctaac

SEQ ID NO: 278620 - DNA, 25 bp, Artificial
  probe
  misc_feature (1)..(25): SEQ ID NO: 949; WAN024DM8; Start 568; Stop 592
cttaacaatggctggtatctaacta

SEQ ID NO: 278621 - DNA, 25 bp, Artificial
  probe
  misc_feature (1)..(25): SEQ ID NO: 949; WAN024DM8; Start 565; Stop 589
tggcttaacaatggctggtatctaa

SEQ ID NO: 278622 - DNA, 25 bp, Artificial
  probe
  misc_feature (1)..(25): SEQ ID NO: 949; WAN024DM8; Start 569; Stop 593
ttaacaatggctggtatctaactaa

SEQ ID NO: 278623 - DNA, 25 bp, Artificial
  probe
  misc_feature (1)..(25): SEQ ID NO: 949; WAN024DM8; Start 564; Stop 588
ctggcttaacaatggctggtatcta

SEQ ID NO: 278624 - DNA, 25 bp, Artificial
  probe
  misc_feature (1)..(25): SEQ ID NO: 949; WAN024DM8; Start 570; Stop 594
taacaatggctggtatctaactaat

SEQ ID NO: 278625 - DNA, 25 bp, Artificial
  probe
  misc_feature (1)..(25): SEQ ID NO: 949; WAN024DM8; Start 562; Stop 586
ttctggcttaacaatggctggtatc

SEQ ID NO: 278626 - DNA, 25 bp, Artificial
  probe
  misc_feature (1)..(25): SEQ ID NO: 949; WAN024DM8; Start 448; Stop 472
cgttaccaattaacagattcatacc

SEQ ID NO: 278627 - DNA, 25 bp, Artificial
  probe
  misc_feature (1)..(25): SEQ ID NO: 949; WAN024DM8; Start 451; Stop 475
taccaattaacagattcatacctga

SEQ ID NO: 278628 - DNA, 25 bp, Artificial
  probe
  misc_feature (1)..(25): SEQ ID NO: 949; WAN024DM8; Start 441; Stop 465
tatcggacgttaccaattaacagat

SEQ ID NO: 278629 - DNA, 25 bp, Artificial
  probe
  misc_feature (1)..(25): SEQ ID NO: 949; WAN024DM8; Start 440; Stop 464
atatcggacgttaccaattaacaga

SEQ ID NO: 278630 - DNA, 25 bp, Artificial
  probe
  misc_feature (1)..(25): SEQ ID NO: 949; WAN024DM8; Start 456; Stop 480
attaacagattcatacctgaacggt

SEQ ID NO: 278631 - DNA, 25 bp, Artificial
  probe
  misc_feature (1)..(25): SEQ ID NO: 949; WAN024DM8; Start 445; Stop 469
ggacgttaccaattaacagattcat

SEQ ID NO: 278632 - DNA, 25 bp, Artificial
  probe
  misc_feature (1)..(25): SEQ ID NO: 949; WAN024DM8; Start 442; Stop 466
atcggacgttaccaattaacagatt

SEQ ID NO: 278633 - DNA, 25 bp, Artificial
  probe
  misc_feature (1)..(25): SEQ ID NO: 949; WAN024DM8; Start 457; Stop 481
ttaacagattcatacctgaacggtg

SEQ ID NO: 278634 - DNA, 25 bp, Artificial
  probe
  misc_feature (1)..(25): SEQ ID NO: 949; WAN024DM8; Start 455; Stop 479
aattaacagattcatacctgaacgg

SEQ ID NO: 278635 - DNA, 25 bp, Artificial
  probe
  misc_feature (1)..(25): SEQ ID NO: 949; WAN024DM8; Start 443; Stop 467
tcggacgttaccaattaacagattc

SEQ ID NO: 278636 - DNA, 25 bp, Artificial
  probe
  misc_feature (1)..(25): SEQ ID NO: 949; WAN024DM8; Start 563; Stop 587
tctggcttaacaatggctggtatct

SEQ ID NO: 278637 - DNA, 25 bp, Artificial
  probe
  misc_feature (1)..(25): SEQ ID NO: 949; WAN024DM8; Start 444; Stop 468
cggacgttaccaattaacagattca

SEQ ID NO: 278638 - DNA, 25 bp, Artificial
  probe
  misc_feature (1)..(25): SEQ ID NO: 949; WAN024DM8; Start 439; Stop 463
tatatcggacgttaccaattaacag

SEQ ID NO: 278639 - DNA, 25 bp, Artificial
  probe
  misc_feature (1)..(25): SEQ ID NO: 949; WAN024DM8; Start 450; Stop 474
ttaccaattaacagattcatacctg

SEQ ID NO: 278640 - DNA, 25 bp, Artificial
  probe
  misc_feature (1)..(25): SEQ ID NO: 949; WAN024DM8; Start 458; Stop 482
taacagattcatacctgaacggtga

SEQ ID NO: 278641 - DNA, 25 bp, Artificial
  probe
  misc_feature (1)..(25): SEQ ID NO: 949; WAN024DM8; Start 454; Stop 478
caattaacagattcatacctgaacg

SEQ ID NO: 278642 - DNA, 25 bp, Artificial
  probe
  misc_feature (1)..(25): SEQ ID NO: 949; WAN024DM8; Start 438; Stop 462
ttatatcggacgttaccaattaaca

SEQ ID NO: 278643 - DNA, 25 bp, Artificial
  probe
  misc_feature (1)..(25): SEQ ID NO: 949; WAN024DM8; Start 452; Stop 476
accaattaacagattcatacctgaa

SEQ ID NO: 278644 - DNA, 25 bp, Artificial
  probe
  misc_feature (1)..(25): SEQ ID NO: 949; WAN024DM8; Start 449; Stop 473
gttaccaattaacagattcatacct

SEQ ID NO: 278645 - DNA, 25 bp, Artificial
  probe
  misc_feature (1)..(25): SEQ ID NO: 949; WAN024DM8; Start 464; Stop 488
attcatacctgaacggtgactactc

SEQ ID NO: 278646 - DNA, 25 bp, Artificial
  probe
  misc_feature (1)..(25): SEQ ID NO: 949; WAN024DM8; Start 463; Stop 487
gattcatacctgaacggtgactact

SEQ ID NO: 278647 - DNA, 25 bp, Artificial
  probe
  misc_feature (1)..(25): SEQ ID NO: 949; WAN024DM8; Start 462; Stop 486
agattcatacctgaacggtgactac

SEQ ID NO: 278648 - DNA, 25 bp, Artificial
  probe
  misc_feature (1)..(25): SEQ ID NO: 949; WAN024DM8; Start 461; Stop 485
cagattcatacctgaacggtgacta

SEQ ID NO: 278649 - DNA, 25 bp, Artificial
  probe
  misc_feature (1)..(25): SEQ ID NO: 949; WAN024DM8; Start 437; Stop 461
gttatatcggacgttaccaattaac

SEQ ID NO: 278650 - DNA, 25 bp, Artificial
  probe
  misc_feature (1)..(25): SEQ ID NO: 949; WAN024DM8; Start 453; Stop 477
ccaattaacagattcatacctgaac

SEQ ID NO: 278651 - DNA, 25 bp, Artificial
  probe
  misc_feature (1)..(25): SEQ ID NO: 950; WAN024CXG; Start 52; Stop 76
cagaactactacgatgtgaaggata

SEQ ID NO: 278652 - DNA, 25 bp, Artificial
  probe
  misc_feature (1)..(25): SEQ ID NO: 950; WAN024CXG; Start 488; Stop 512
tcttagatgaagcaacgagtatgtt

SEQ ID NO: 278653 - DNA, 25 bp, Artificial
  probe
  misc_feature (1)..(25): SEQ ID NO: 950; WAN024CXG; Start 53; Stop 77
agaactactacgatgtgaaggatat

SEQ ID NO: 278654 - DNA, 25 bp, Artificial
  probe
  misc_feature (1)..(25): SEQ ID NO: 950; WAN024CXG; Start 49; Stop 73
aatcagaactactacgatgtgaagg

SEQ ID NO: 278655 - DNA, 25 bp, Artificial
  probe
  misc_feature (1)..(25): SEQ ID NO: 950; WAN024CXG; Start 57; Stop 81
ctactacgatgtgaaggatattacg

SEQ ID NO: 278656 - DNA, 25 bp, Artificial
  probe
  misc_feature (1)..(25): SEQ ID NO: 950; WAN024CXG; Start 487; Stop 511
atcttagatgaagcaacgagtatgt

SEQ ID NO: 278657 - DNA, 25 bp, Artificial
  probe
  misc_feature (1)..(25): SEQ ID NO: 950; WAN024CXG; Start 51; Stop 75
tcagaactactacgatgtgaaggat

SEQ ID NO: 278658 - DNA, 25 bp, Artificial
  probe
  misc_feature (1)..(25): SEQ ID NO: 950; WAN024CXG; Start 50; Stop 74
atcagaactactacgatgtgaagga

SEQ ID NO: 278659 - DNA, 25 bp, Artificial
  probe
  misc_feature (1)..(25): SEQ ID NO: 950; WAN024CXG; Start 486; Stop 510
aatcttagatgaagcaacgagtatg

SEQ ID NO: 278660 - DNA, 25 bp, Artificial
  probe
  misc_feature (1)..(25): SEQ ID NO: 950; WAN024CXG; Start 54; Stop 78
gaactactacgatgtgaaggatatt

SEQ ID NO: 278661 - DNA, 25 bp, Artificial
  probe
  misc_feature (1)..(25): SEQ ID NO: 950; WAN024CXG; Start 151; Stop 175
cgattaattgatggcttactggaag

SEQ ID NO: 278662 - DNA, 25 bp, Artificial
  probe
  misc_feature (1)..(25): SEQ ID NO: 950; WAN024CXG; Start 150; Stop 174
tcgattaattgatggcttactggaa

SEQ ID NO: 278663 - DNA, 25 bp, Artificial
  probe
  misc_feature (1)..(25): SEQ ID NO: 950; WAN024CXG; Start 149; Stop 173
ttcgattaattgatggcttactgga

SEQ ID NO: 278664 - DNA, 25 bp, Artificial
  probe
  misc_feature (1)..(25): SEQ ID NO: 950; WAN024CXG; Start 148; Stop 172
gttcgattaattgatggcttactgg

SEQ ID NO: 278665 - DNA, 25 bp, Artificial
  probe
  misc_feature (1)..(25): SEQ ID NO: 950; WAN024CXG; Start 147; Stop 171
ggttcgattaattgatggcttactg

SEQ ID NO: 278666 - DNA, 25 bp, Artificial
  probe
  misc_feature (1)..(25): SEQ ID NO: 950; WAN024CXG; Start 56; Stop 80
actactacgatgtgaaggatattac

SEQ ID NO: 278667 - DNA, 25 bp, Artificial
  probe
  misc_feature (1)..(25): SEQ ID NO: 950; WAN024CXG; Start 484; Stop 508
ttaatcttagatgaagcaacgagta

SEQ ID NO: 278668 - DNA, 25 bp, Artificial
  probe
  misc_feature (1)..(25): SEQ ID NO: 950; WAN024CXG; Start 485; Stop 509
taatcttagatgaagcaacgagtat

SEQ ID NO: 278669 - DNA, 25 bp, Artificial
  probe
  misc_feature (1)..(25): SEQ ID NO: 950; WAN024CXG; Start 119; Stop 143
ggcataatggtagtggtaaatcaac

SEQ ID NO: 278670 - DNA, 25 bp, Artificial
  probe
  misc_feature (1)..(25): SEQ ID NO: 950; WAN024CXG; Start 116; Stop 140
tagggcataatggtagtggtaaatc

SEQ ID NO: 278671 - DNA, 25 bp, Artificial
  probe
  misc_feature (1)..(25): SEQ ID NO: 950; WAN024CXG; Start 115; Stop 139
gtagggcataatggtagtggtaaat

SEQ ID NO: 278672 - DNA, 25 bp, Artificial
  probe
  misc_feature (1)..(25): SEQ ID NO: 950; WAN024CXG; Start 146; Stop 170
cggttcgattaattgatggcttact

SEQ ID NO: 278673 - DNA, 25 bp, Artificial
  probe
  misc_feature (1)..(25): SEQ ID NO: 950; WAN024CXG; Start 118; Stop 142
gggcataatggtagtggtaaatcaa

SEQ ID NO: 278674 - DNA, 25 bp, Artificial
  probe
  misc_feature (1)..(25): SEQ ID NO: 950; WAN024CXG; Start 112; Stop 136
attgtagggcataatggtagtggta

SEQ ID NO: 278675 - DNA, 25 bp, Artificial
  probe
  misc_feature (1)..(25): SEQ ID NO: 950; WAN024CXG; Start 145; Stop 169
acggttcgattaattgatggcttac

SEQ ID NO: 278676 - DNA, 25 bp, Artificial
  probe
  misc_feature (1)..(25): SEQ ID NO: 950; WAN024CXG; Start 114; Stop 138
tgtagggcataatggtagtggtaaa

SEQ ID NO: 278677 - DNA, 25 bp, Artificial
  probe
  misc_feature (1)..(25): SEQ ID NO: 950; WAN024CXG; Start 113; Stop 137
ttgtagggcataatggtagtggtaa

SEQ ID NO: 278678 - DNA, 25 bp, Artificial
  probe
  misc_feature (1)..(25): SEQ ID NO: 950; WAN024CXG; Start 55; Stop 79
aactactacgatgtgaaggatatta

SEQ ID NO: 278679 - DNA, 25 bp, Artificial
  probe
  misc_feature (1)..(25): SEQ ID NO: 950; WAN024CXG; Start 526; Stop 550
cgtagagaacttattgggacagtaa

SEQ ID NO: 278680 - DNA, 25 bp, Artificial
  probe
  misc_feature (1)..(25): SEQ ID NO: 950; WAN024CXG; Start 117; Stop 141
agggcataatggtagtggtaaatca

SEQ ID NO: 278681 - DNA, 25 bp, Artificial
  probe
  misc_feature (1)..(25): SEQ ID NO: 950; WAN024CXG; Start 48; Stop 72
aaatcagaactactacgatgtgaag

SEQ ID NO: 278682 - DNA, 25 bp, Artificial
  probe
  misc_feature (1)..(25): SEQ ID NO: 950; WAN024CXG; Start 483; Stop 507
tttaatcttagatgaagcaacgagt

SEQ ID NO: 278683 - DNA, 25 bp, Artificial
  probe
  misc_feature (1)..(25): SEQ ID NO: 950; WAN024CXG; Start 111; Stop 135
gattgtagggcataatggtagtggt

SEQ ID NO: 278684 - DNA, 25 bp, Artificial
  probe
  misc_feature (1)..(25): SEQ ID NO: 951; WAN024CVG; Start 794; Stop 818
caggtgattatgctctaacagaagt

SEQ ID NO: 278685 - DNA, 25 bp, Artificial
  probe
  misc_feature (1)..(25): SEQ ID NO: 951; WAN024CVG; Start 503; Stop 527
ttgaattaccattgaacgatgttgt

SEQ ID NO: 278686 - DNA, 25 bp, Artificial
  probe
  misc_feature (1)..(25): SEQ ID NO: 951; WAN024CVG; Start 504; Stop 528
tgaattaccattgaacgatgttgtg

SEQ ID NO: 278687 - DNA, 25 bp, Artificial
  probe
  misc_feature (1)..(25): SEQ ID NO: 951; WAN024CVG; Start 1460; Stop 1484
aagaagagaagcagttggttgttac

SEQ ID NO: 278688 - DNA, 25 bp, Artificial
  probe
  misc_feature (1)..(25): SEQ ID NO: 951; WAN024CVG; Start 795; Stop 819
aggtgattatgctctaacagaagta

SEQ ID NO: 278689 - DNA, 25 bp, Artificial
  probe
  misc_feature (1)..(25): SEQ ID NO: 951; WAN024CVG; Start 440; Stop 464
tatcaacttatgtcggtgaagatgg

SEQ ID NO: 278690 - DNA, 25 bp, Artificial
  probe
  misc_feature (1)..(25): SEQ ID NO: 951; WAN024CVG; Start 796; Stop 820
ggtgattatgctctaacagaagtag

SEQ ID NO: 278691 - DNA, 25 bp, Artificial
  probe
  misc_feature (1)..(25): SEQ ID NO: 951; WAN024CVG; Start 439; Stop 463
ttatcaacttatgtcggtgaagatg

SEQ ID NO: 278692 - DNA, 25 bp, Artificial
  probe
  misc_feature (1)..(25): SEQ ID NO: 951; WAN024CVG; Start 502; Stop 526
attgaattaccattgaacgatgttg

SEQ ID NO: 278693 - DNA, 25 bp, Artificial
  probe
  misc_feature (1)..(25): SEQ ID NO: 951; WAN024CVG; Start 1459; Stop 1483
caagaagagaagcagttggttgtta

SEQ ID NO: 278694 - DNA, 25 bp, Artificial
  probe
  misc_feature (1)..(25): SEQ ID NO: 951; WAN024CVG; Start 645; Stop 669
agttggagatgttgtagagtacgaa

SEQ ID NO: 278695 - DNA, 25 bp, Artificial
  probe
  misc_feature (1)..(25): SEQ ID NO: 951; WAN024CVG; Start 644; Stop 668
aagttggagatgttgtagagtacga

SEQ ID NO: 278696 - DNA, 25 bp, Artificial
  probe
  misc_feature (1)..(25): SEQ ID NO: 951; WAN024CVG; Start 1978; Stop 2002
gatgaggatcaacttgctctaacta

SEQ ID NO: 278697 - DNA, 25 bp, Artificial
  probe
  misc_feature (1)..(25): SEQ ID NO: 951; WAN024CVG; Start 1451; Stop 1475
aagtgagtcaagaagagaagcagtt

SEQ ID NO: 278698 - DNA, 25 bp, Artificial
  probe
  misc_feature (1)..(25): SEQ ID NO: 951; WAN024CVG; Start 1980; Stop 2004
tgaggatcaacttgctctaactaat

SEQ ID NO: 278699 - DNA, 25 bp, Artificial
  probe
  misc_feature (1)..(25): SEQ ID NO: 951; WAN024CVG; Start 1979; Stop 2003
atgaggatcaacttgctctaactaa

SEQ ID NO: 278700 - DNA, 25 bp, Artificial
  probe
  misc_feature (1)..(25): SEQ ID NO: 951; WAN024CVG; Start 1976; Stop 2000
aagatgaggatcaacttgctctaac

SEQ ID NO: 278701 - DNA, 25 bp, Artificial
  probe
  misc_feature (1)..(25): SEQ ID NO: 951; WAN024CVG; Start 643; Stop 667
caagttggagatgttgtagagtacg

SEQ ID NO: 278702 - DNA, 25 bp, Artificial
  probe
  misc_feature (1)..(25): SEQ ID NO: 951; WAN024CVG; Start 441; Stop 465
atcaacttatgtcggtgaagatgga

SEQ ID NO: 278703 - DNA, 25 bp, Artificial
  probe
  misc_feature (1)..(25): SEQ ID NO: 951; WAN024CVG; Start 501; Stop 525
aattgaattaccattgaacgatgtt

SEQ ID NO: 278704 - DNA, 25 bp, Artificial
  probe
  misc_feature (1)..(25): SEQ ID NO: 951; WAN024CVG; Start 712; Stop 736
aactggagcgatagaatgactgaag

SEQ ID NO: 278705 - DNA, 25 bp, Artificial
  probe
  misc_feature (1)..(25): SEQ ID NO: 951; WAN024CVG; Start 1461; Stop 1485
agaagagaagcagttggttgttaca

SEQ ID NO: 278706 - DNA, 25 bp, Artificial
  probe
  misc_feature (1)..(25): SEQ ID NO: 951; WAN024CVG; Start 1977; Stop 2001
agatgaggatcaacttgctctaact

SEQ ID NO: 278707 - DNA, 25 bp, Artificial
  probe
  misc_feature (1)..(25): SEQ ID NO: 951; WAN024CVG; Start 897; Stop 921
aatcacttattcggcaacattgaat

SEQ ID NO: 278708 - DNA, 25 bp, Artificial
  probe
  misc_feature (1)..(25): SEQ ID NO: 951; WAN024CVG; Start 1462; Stop 1486
gaagagaagcagttggttgttacaa

SEQ ID NO: 278709 - DNA, 25 bp, Artificial
  probe
  misc_feature (1)..(25): SEQ ID NO: 951; WAN024CVG; Start 1408; Stop 1432
aatgctgataatgctggtcaatatt

SEQ ID NO: 278710 - DNA, 25 bp, Artificial
  probe
  misc_feature (1)..(25): SEQ ID NO: 951; WAN024CVG; Start 898; Stop 922
atcacttattcggcaacattgaatg

SEQ ID NO: 278711 - DNA, 25 bp, Artificial
  probe
  misc_feature (1)..(25): SEQ ID NO: 951; WAN024CVG; Start 442; Stop 466
tcaacttatgtcggtgaagatggag

SEQ ID NO: 278712 - DNA, 25 bp, Artificial
  probe
  misc_feature (1)..(25): SEQ ID NO: 951; WAN024CVG; Start 902; Stop 926
cttattcggcaacattgaatgacaa

SEQ ID NO: 278713 - DNA, 25 bp, Artificial
  probe
  misc_feature (1)..(25): SEQ ID NO: 951; WAN024CVG; Start 507; Stop 531
attaccattgaacgatgttgtggat

SEQ ID NO: 278714 - DNA, 25 bp, Artificial
  probe
  misc_feature (1)..(25): SEQ ID NO: 951; WAN024CVG; Start 505; Stop 529
gaattaccattgaacgatgttgtgg

SEQ ID NO: 278715 - DNA, 25 bp, Artificial
  probe
  misc_feature (1)..(25): SEQ ID NO: 951; WAN024CVG; Start 968; Stop 992
actatggtaataatccagatcacgg

SEQ ID NO: 278716 - DNA, 25 bp, Artificial
  probe
  misc_feature (1)..(25): SEQ ID NO: 951; WAN024CVG; Start 1226; Stop 1250
aagggtattcagcagattatcaaga

SEQ ID NO: 278717 - DNA, 25 bp, Artificial
  probe
  misc_feature (1)..(25): SEQ ID NO: 952; WAN024F46; Start 171; Stop 195
taagcaagaagtccatagtgtccta

SEQ ID NO: 278718 - DNA, 25 bp, Artificial
  probe
  misc_feature (1)..(25): SEQ ID NO: 952; WAN024F46; Start 584; Stop 608
atcttgtattggtcattgttacgct

SEQ ID NO: 278719 - DNA, 25 bp, Artificial
  probe
  misc_feature (1)..(25): SEQ ID NO: 952; WAN024F46; Start 588; Stop 612
tgtattggtcattgttacgctcatt

SEQ ID NO: 278720 - DNA, 25 bp, Artificial
  probe
  misc_feature (1)..(25): SEQ ID NO: 952; WAN024F46; Start 587; Stop 611
ttgtattggtcattgttacgctcat

SEQ ID NO: 278721 - DNA, 25 bp, Artificial
  probe
  misc_feature (1)..(25): SEQ ID NO: 952; WAN024F46; Start 585; Stop 609
tcttgtattggtcattgttacgctc

SEQ ID NO: 278722 - DNA, 25 bp, Artificial
  probe
  misc_feature (1)..(25): SEQ ID NO: 952; WAN024F46; Start 586; Stop 610
cttgtattggtcattgttacgctca

SEQ ID NO: 278723 - DNA, 25 bp, Artificial
  probe
  misc_feature (1)..(25): SEQ ID NO: 952; WAN024F46; Start 185; Stop 209
atagtgtcctagccagtaagaagtc

SEQ ID NO: 278724 - DNA, 25 bp, Artificial
  probe
  misc_feature (1)..(25): SEQ ID NO: 952; WAN024F46; Start 583; Stop 607
gatcttgtattggtcattgttacgc

SEQ ID NO: 278725 - DNA, 25 bp, Artificial
  probe
  misc_feature (1)..(25): SEQ ID NO: 952; WAN024F46; Start 184; Stop 208
catagtgtcctagccagtaagaagt

SEQ ID NO: 278726 - DNA, 25 bp, Artificial
  probe
  misc_feature (1)..(25): SEQ ID NO: 952; WAN024F46; Start 170; Stop 194
gtaagcaagaagtccatagtgtcct

SEQ ID NO: 278727 - DNA, 25 bp, Artificial
  probe
  misc_feature (1)..(25): SEQ ID NO: 952; WAN024F46; Start 172; Stop 196
aagcaagaagtccatagtgtcctag

SEQ ID NO: 278728 - DNA, 25 bp, Artificial
  probe
  misc_feature (1)..(25): SEQ ID NO: 952; WAN024F46; Start 183; Stop 207
ccatagtgtcctagccagtaagaag

SEQ ID NO: 278729 - DNA, 25 bp, Artificial
  probe
  misc_feature (1)..(25): SEQ ID NO: 952; WAN024F46; Start 471; Stop 495
aatgaccattgtctcacttctgatt

SEQ ID NO: 278730 - DNA, 25 bp, Artificial
  probe
  misc_feature (1)..(25): SEQ ID NO: 952; WAN024F46; Start 182; Stop 206
tccatagtgtcctagccagtaagaa

SEQ ID NO: 278731 - DNA, 25 bp, Artificial
  probe
  misc_feature (1)..(25): SEQ ID NO: 952; WAN024F46; Start 179; Stop 203
aagtccatagtgtcctagccagtaa

SEQ ID NO: 278732 - DNA, 25 bp, Artificial
  probe
  misc_feature (1)..(25): SEQ ID NO: 952; WAN024F46; Start 589; Stop 613
gtattggtcattgttacgctcattt

SEQ ID NO: 278733 - DNA, 25 bp, Artificial
  probe
  misc_feature (1)..(25): SEQ ID NO: 952; WAN024F46; Start 135; Stop 159
aggaatctgtgctggagtaaattat

SEQ ID NO: 278734 - DNA, 25 bp, Artificial
  probe
  misc_feature (1)..(25): SEQ ID NO: 952; WAN024F46; Start 136; Stop 160
ggaatctgtgctggagtaaattatc

SEQ ID NO: 278735 - DNA, 25 bp, Artificial
  probe
  misc_feature (1)..(25): SEQ ID NO: 952; WAN024F46; Start 535; Stop 559
ccaaattcggttaagaaggaagttt

SEQ ID NO: 278736 - DNA, 25 bp, Artificial
  probe
  misc_feature (1)..(25): SEQ ID NO: 952; WAN024F46; Start 181; Stop 205
gtccatagtgtcctagccagtaaga

SEQ ID NO: 278737 - DNA, 25 bp, Artificial
  probe
  misc_feature (1)..(25): SEQ ID NO: 952; WAN024F46; Start 180; Stop 204
agtccatagtgtcctagccagtaag

SEQ ID NO: 278738 - DNA, 25 bp, Artificial
  probe
  misc_feature (1)..(25): SEQ ID NO: 952; WAN024F46; Start 178; Stop 202
gaagtccatagtgtcctagccagta

SEQ ID NO: 278739 - DNA, 25 bp, Artificial
  probe
  misc_feature (1)..(25): SEQ ID NO: 952; WAN024F46; Start 343; Stop 367
ctatttgggctagatttgctgattt

SEQ ID NO: 278740 - DNA, 25 bp, Artificial
  probe
  misc_feature (1)..(25): SEQ ID NO: 952; WAN024F46; Start 169; Stop 193
cgtaagcaagaagtccatagtgtcc

SEQ ID NO: 278741 - DNA, 25 bp, Artificial
  probe
  misc_feature (1)..(25): SEQ ID NO: 952; WAN024F46; Start 525; Stop 549
ctatcttgtcccaaattcggttaag

SEQ ID NO: 278742 - DNA, 25 bp, Artificial
  probe
  misc_feature (1)..(25): SEQ ID NO: 952; WAN024F46; Start 137; Stop 161
gaatctgtgctggagtaaattatct

SEQ ID NO: 278743 - DNA, 25 bp, Artificial
  probe
  misc_feature (1)..(25): SEQ ID NO: 952; WAN024F46; Start 536; Stop 560
caaattcggttaagaaggaagtttc

SEQ ID NO: 278744 - DNA, 25 bp, Artificial
  probe
  misc_feature (1)..(25): SEQ ID NO: 952; WAN024F46; Start 524; Stop 548
cctatcttgtcccaaattcggttaa

SEQ ID NO: 278745 - DNA, 25 bp, Artificial
  probe
  misc_feature (1)..(25): SEQ ID NO: 952; WAN024F46; Start 342; Stop 366
cctatttgggctagatttgctgatt

SEQ ID NO: 278746 - DNA, 25 bp, Artificial
  probe
  misc_feature (1)..(25): SEQ ID NO: 952; WAN024F46; Start 339; Stop 363
tttcctatttgggctagatttgctg

SEQ ID NO: 278747 - DNA, 25 bp, Artificial
  probe
  misc_feature (1)..(25): SEQ ID NO: 952; WAN024F46; Start 534; Stop 558
cccaaattcggttaagaaggaagtt

SEQ ID NO: 278748 - DNA, 25 bp, Artificial
  probe
  misc_feature (1)..(25): SEQ ID NO: 952; WAN024F46; Start 186; Stop 210
tagtgtcctagccagtaagaagtcg

SEQ ID NO: 278749 - DNA, 25 bp, Artificial
  probe
  misc_feature (1)..(25): SEQ ID NO: 952; WAN024F46; Start 139; Stop 163
atctgtgctggagtaaattatcttt

SEQ ID NO: 278750 - DNA, 25 bp, Artificial
  probe
  misc_feature (1)..(25): SEQ ID NO: 953; WAN024B4C; Start 78; Stop 102
ccttcaaatcgttctatttcgtctg

SEQ ID NO: 278751 - DNA, 25 bp, Artificial
  probe
  misc_feature (1)..(25): SEQ ID NO: 953; WAN024B4C; Start 82; Stop 106
caaatcgttctatttcgtctgatgg

SEQ ID NO: 278752 - DNA, 25 bp, Artificial
  probe
  misc_feature (1)..(25): SEQ ID NO: 953; WAN024B4C; Start 81; Stop 105
tcaaatcgttctatttcgtctgatg

SEQ ID NO: 278753 - DNA, 25 bp, Artificial
  probe
  misc_feature (1)..(25): SEQ ID NO: 953; WAN024B4C; Start 79; Stop 103
cttcaaatcgttctatttcgtctga

SEQ ID NO: 278754 - DNA, 25 bp, Artificial
  probe
  misc_feature (1)..(25): SEQ ID NO: 953; WAN024B4C; Start 80; Stop 104
ttcaaatcgttctatttcgtctgat

SEQ ID NO: 278755 - DNA, 25 bp, Artificial
  probe
  misc_feature (1)..(25): SEQ ID NO: 953; WAN024B4C; Start 83; Stop 107
aaatcgttctatttcgtctgatggg

SEQ ID NO: 278756 - DNA, 25 bp, Artificial
  probe
  misc_feature (1)..(25): SEQ ID NO: 953; WAN024B4C; Start 77; Stop 101
gccttcaaatcgttctatttcgtct

SEQ ID NO: 278757 - DNA, 25 bp, Artificial
  probe
  misc_feature (1)..(25): SEQ ID NO: 953; WAN024B4C; Start 84; Stop 108
aatcgttctatttcgtctgatgggc

SEQ ID NO: 278758 - DNA, 25 bp, Artificial
  probe
  misc_feature (1)..(25): SEQ ID NO: 953; WAN024B4C; Start 76; Stop 100
cgccttcaaatcgttctatttcgtc

SEQ ID NO: 278759 - DNA, 25 bp, Artificial
  probe
  misc_feature (1)..(25): SEQ ID NO: 953; WAN024B4C; Start 75; Stop 99
acgccttcaaatcgttctatttcgt

SEQ ID NO: 278760 - DNA, 25 bp, Artificial
  probe
  misc_feature (1)..(25): SEQ ID NO: 953; WAN024B4C; Start 73; Stop 97
aaacgccttcaaatcgttctatttc

SEQ ID NO: 278761 - DNA, 25 bp, Artificial
  probe
  misc_feature (1)..(25): SEQ ID NO: 953; WAN024B4C; Start 74; Stop 98
aacgccttcaaatcgttctatttcg

SEQ ID NO: 278762 - DNA, 25 bp, Artificial
  probe
  misc_feature (1)..(25): SEQ ID NO: 954; WAN024C5P; Start 241; Stop 265
tcaatattcctagtcgtaaccatca

SEQ ID NO: 278763 - DNA, 25 bp, Artificial
  probe
  misc_feature (1)..(25): SEQ ID NO: 954; WAN024C5P; Start 242; Stop 266
caatattcctagtcgtaaccatcat

SEQ ID NO: 278764 - DNA, 25 bp, Artificial
  probe
  misc_feature (1)..(25): SEQ ID NO: 954; WAN024C5P; Start 95; Stop 119
tactactcctactcctctttcttcc

SEQ ID NO: 278765 - DNA, 25 bp, Artificial
  probe
  misc_feature (1)..(25): SEQ ID NO: 954; WAN024C5P; Start 240; Stop 264
ttcaatattcctagtcgtaaccatc

SEQ ID NO: 278766 - DNA, 25 bp, Artificial
  probe
  misc_feature (1)..(25): SEQ ID NO: 954; WAN024C5P; Start 184; Stop 208
ttctttctcctcatatcctttccac

SEQ ID NO: 278767 - DNA, 25 bp, Artificial
  probe
  misc_feature (1)..(25): SEQ ID NO: 954; WAN024C5P; Start 186; Stop 210
ctttctcctcatatcctttccacaa

SEQ ID NO: 278768 - DNA, 25 bp, Artificial
  probe
  misc_feature (1)..(25): SEQ ID NO: 954; WAN024C5P; Start 183; Stop 207
cttctttctcctcatatcctttcca

SEQ ID NO: 278769 - DNA, 25 bp, Artificial
  probe
  misc_feature (1)..(25): SEQ ID NO: 954; WAN024C5P; Start 190; Stop 214
ctcctcatatcctttccacaacttt

SEQ ID NO: 278770 - DNA, 25 bp, Artificial
  probe
  misc_feature (1)..(25): SEQ ID NO: 954; WAN024C5P; Start 187; Stop 211
tttctcctcatatcctttccacaac

SEQ ID NO: 278771 - DNA, 25 bp, Artificial
  probe
  misc_feature (1)..(25): SEQ ID NO: 954; WAN024C5P; Start 182; Stop 206
tcttctttctcctcatatcctttcc

SEQ ID NO: 278772 - DNA, 25 bp, Artificial
  probe
  misc_feature (1)..(25): SEQ ID NO: 954; WAN024C5P; Start 180; Stop 204
cctcttctttctcctcatatccttt

SEQ ID NO: 278773 - DNA, 25 bp, Artificial
  probe
  misc_feature (1)..(25): SEQ ID NO: 954; WAN024C5P; Start 185; Stop 209
tctttctcctcatatcctttccaca

SEQ ID NO: 278774 - DNA, 25 bp, Artificial
  probe
  misc_feature (1)..(25): SEQ ID NO: 954; WAN024C5P; Start 179; Stop 203
ccctcttctttctcctcatatcctt

SEQ ID NO: 278775 - DNA, 25 bp, Artificial
  probe
  misc_feature (1)..(25): SEQ ID NO: 954; WAN024C5P; Start 97; Stop 121
ctactcctactcctctttcttcctg

SEQ ID NO: 278776 - DNA, 25 bp, Artificial
  probe
  misc_feature (1)..(25): SEQ ID NO: 954; WAN024C5P; Start 252; Stop 276
agtcgtaaccatcatttcaagtttg

SEQ ID NO: 278777 - DNA, 25 bp, Artificial
  probe
  misc_feature (1)..(25): SEQ ID NO: 954; WAN024C5P; Start 189; Stop 213
tctcctcatatcctttccacaactt

SEQ ID NO: 278778 - DNA, 25 bp, Artificial
  probe
  misc_feature (1)..(25): SEQ ID NO: 954; WAN024C5P; Start 188; Stop 212
ttctcctcatatcctttccacaact

SEQ ID NO: 278779 - DNA, 25 bp, Artificial
  probe
  misc_feature (1)..(25): SEQ ID NO: 954; WAN024C5P; Start 247; Stop 271
ttcctagtcgtaaccatcatttcaa

SEQ ID NO: 278780 - DNA, 25 bp, Artificial
  probe
  misc_feature (1)..(25): SEQ ID NO: 954; WAN024C5P; Start 246; Stop 270
attcctagtcgtaaccatcatttca

SEQ ID NO: 278781 - DNA, 25 bp, Artificial
  probe
  misc_feature (1)..(25): SEQ ID NO: 954; WAN024C5P; Start 96; Stop 120
actactcctactcctctttcttcct

SEQ ID NO: 278782 - DNA, 25 bp, Artificial
  probe
  misc_feature (1)..(25): SEQ ID NO: 954; WAN024C5P; Start 248; Stop 272
tcctagtcgtaaccatcatttcaag

SEQ ID NO: 278783 - DNA, 25 bp, Artificial
  probe
  misc_feature (1)..(25): SEQ ID NO: 954; WAN024C5P; Start 249; Stop 273
cctagtcgtaaccatcatttcaagt

SEQ ID NO: 278784 - DNA, 25 bp, Artificial
  probe
  misc_feature (1)..(25): SEQ ID NO: 954; WAN024C5P; Start 94; Stop 118
ttactactcctactcctctttcttc

SEQ ID NO: 278785 - DNA, 25 bp, Artificial
  probe
  misc_feature (1)..(25): SEQ ID NO: 954; WAN024C5P; Start 243; Stop 267
aatattcctagtcgtaaccatcatt

SEQ ID NO: 278786 - DNA, 25 bp, Artificial
  probe
  misc_feature (1)..(25): SEQ ID NO: 954; WAN024C5P; Start 181; Stop 205
ctcttctttctcctcatatcctttc

SEQ ID NO: 278787 - DNA, 25 bp, Artificial
  probe
  misc_feature (1)..(25): SEQ ID NO: 954; WAN024C5P; Start 251; Stop 275
tagtcgtaaccatcatttcaagttt

SEQ ID NO: 278788 - DNA, 25 bp, Artificial
  probe
  misc_feature (1)..(25): SEQ ID NO: 954; WAN024C5P; Start 250; Stop 274
ctagtcgtaaccatcatttcaagtt

SEQ ID NO: 278789 - DNA, 25 bp, Artificial
  probe
  misc_feature (1)..(25): SEQ ID NO: 954; WAN024C5P; Start 93; Stop 117
tttactactcctactcctctttctt

SEQ ID NO: 278790 - DNA, 25 bp, Artificial
  probe
  misc_feature (1)..(25): SEQ ID NO: 954; WAN024C5P; Start 245; Stop 269
tattcctagtcgtaaccatcatttc

SEQ ID NO: 278791 - DNA, 25 bp, Artificial
  probe
  misc_feature (1)..(25): SEQ ID NO: 954; WAN024C5P; Start 176; Stop 200
cagccctcttctttctcctcatatc

SEQ ID NO: 278792 - DNA, 25 bp, Artificial
  probe
  misc_feature (1)..(25): SEQ ID NO: 954; WAN024C5P; Start 244; Stop 268
atattcctagtcgtaaccatcattt

SEQ ID NO: 278793 - DNA, 25 bp, Artificial
  probe
  misc_feature (1)..(25): SEQ ID NO: 954; WAN024C5P; Start 98; Stop 122
tactcctactcctctttcttcctgc

SEQ ID NO: 278794 - DNA, 25 bp, Artificial
  probe
  misc_feature (1)..(25): SEQ ID NO: 954; WAN024C5P; Start 253; Stop 277
gtcgtaaccatcatttcaagtttgg

SEQ ID NO: 278795 - DNA, 25 bp, Artificial
  probe
  misc_feature (1)..(25): SEQ ID NO: 955; WAN024FC7; Start 810; Stop 834
ctataataatcgtgctcttggttcg

SEQ ID NO: 278796 - DNA, 25 bp, Artificial
  probe
  misc_feature (1)..(25): SEQ ID NO: 955; WAN024FC7; Start 76; Stop 100
gatgatgtgattattcgtgtggttc

SEQ ID NO: 278797 - DNA, 25 bp, Artificial
  probe
  misc_feature (1)..(25): SEQ ID NO: 955; WAN024FC7; Start 809; Stop 833
actataataatcgtgctcttggttc

SEQ ID NO: 278798 - DNA, 25 bp, Artificial
  probe
  misc_feature (1)..(25): SEQ ID NO: 955; WAN024FC7; Start 68; Stop 92
tagaagcggatgatgtgattattcg

SEQ ID NO: 278799 - DNA, 25 bp, Artificial
  probe
  misc_feature (1)..(25): SEQ ID NO: 955; WAN024FC7; Start 75; Stop 99
ggatgatgtgattattcgtgtggtt

SEQ ID NO: 278800 - DNA, 25 bp, Artificial
  probe
  misc_feature (1)..(25): SEQ ID NO: 955; WAN024FC7; Start 67; Stop 91
atagaagcggatgatgtgattattc

SEQ ID NO: 278801 - DNA, 25 bp, Artificial
  probe
  misc_feature (1)..(25): SEQ ID NO: 955; WAN024FC7; Start 63; Stop 87
aataatagaagcggatgatgtgatt

SEQ ID NO: 278802 - DNA, 25 bp, Artificial
  probe
  misc_feature (1)..(25): SEQ ID NO: 955; WAN024FC7; Start 77; Stop 101
atgatgtgattattcgtgtggttcg

SEQ ID NO: 278803 - DNA, 25 bp, Artificial
  probe
  misc_feature (1)..(25): SEQ ID NO: 955; WAN024FC7; Start 66; Stop 90
aatagaagcggatgatgtgattatt

SEQ ID NO: 278804 - DNA, 25 bp, Artificial
  probe
  misc_feature (1)..(25): SEQ ID NO: 955; WAN024FC7; Start 807; Stop 831
acactataataatcgtgctcttggt

SEQ ID NO: 278805 - DNA, 25 bp, Artificial
  probe
  misc_feature (1)..(25): SEQ ID NO: 955; WAN024FC7; Start 806; Stop 830
cacactataataatcgtgctcttgg

SEQ ID NO: 278806 - DNA, 25 bp, Artificial
  probe
  misc_feature (1)..(25): SEQ ID NO: 955; WAN024FC7; Start 805; Stop 829
ccacactataataatcgtgctcttg

SEQ ID NO: 278807 - DNA, 25 bp, Artificial
  probe
  misc_feature (1)..(25): SEQ ID NO: 955; WAN024FC7; Start 808; Stop 832
cactataataatcgtgctcttggtt

SEQ ID NO: 278808 - DNA, 25 bp, Artificial
  probe
  misc_feature (1)..(25): SEQ ID NO: 955; WAN024FC7; Start 65; Stop 89
taatagaagcggatgatgtgattat

SEQ ID NO: 278809 - DNA, 25 bp, Artificial
  probe
  misc_feature (1)..(25): SEQ ID NO: 955; WAN024FC7; Start 64; Stop 88
ataatagaagcggatgatgtgatta

SEQ ID NO: 278810 - DNA, 25 bp, Artificial
  probe
  misc_feature (1)..(25): SEQ ID NO: 955; WAN024FC7; Start 70; Stop 94
gaagcggatgatgtgattattcgtg

SEQ ID NO: 278811 - DNA, 25 bp, Artificial
  probe
  misc_feature (1)..(25): SEQ ID NO: 955; WAN024FC7; Start 69; Stop 93
agaagcggatgatgtgattattcgt

SEQ ID NO: 278812 - DNA, 25 bp, Artificial
  probe
  misc_feature (1)..(25): SEQ ID NO: 955; WAN024FC7; Start 110; Stop 134
tttgtggttcagatttatggaggta

SEQ ID NO: 278813 - DNA, 25 bp, Artificial
  probe
  misc_feature (1)..(25): SEQ ID NO: 955; WAN024FC7; Start 78; Stop 102
tgatgtgattattcgtgtggttcgt

SEQ ID NO: 278814 - DNA, 25 bp, Artificial
  probe
  misc_feature (1)..(25): SEQ ID NO: 955; WAN024FC7; Start 61; Stop 85
caaataatagaagcggatgatgtga

SEQ ID NO: 278815 - DNA, 25 bp, Artificial
  probe
  misc_feature (1)..(25): SEQ ID NO: 955; WAN024FC7; Start 60; Stop 84
gcaaataatagaagcggatgatgtg

SEQ ID NO: 278816 - DNA, 25 bp, Artificial
  probe
  misc_feature (1)..(25): SEQ ID NO: 955; WAN024FC7; Start 71; Stop 95
aagcggatgatgtgattattcgtgt

SEQ ID NO: 278817 - DNA, 25 bp, Artificial
  probe
  misc_feature (1)..(25): SEQ ID NO: 955; WAN024FC7; Start 109; Stop 133
gtttgtggttcagatttatggaggt

SEQ ID NO: 278818 - DNA, 25 bp, Artificial
  probe
  misc_feature (1)..(25): SEQ ID NO: 955; WAN024FC7; Start 62; Stop 86
aaataatagaagcggatgatgtgat

SEQ ID NO: 278819 - DNA, 25 bp, Artificial
  probe
  misc_feature (1)..(25): SEQ ID NO: 955; WAN024FC7; Start 578; Stop 602
catcacaaattatccttatgagccg

SEQ ID NO: 278820 - DNA, 25 bp, Artificial
  probe
  misc_feature (1)..(25): SEQ ID NO: 955; WAN024FC7; Start 74; Stop 98
cggatgatgtgattattcgtgtggt

SEQ ID NO: 278821 - DNA, 25 bp, Artificial
  probe
  misc_feature (1)..(25): SEQ ID NO: 955; WAN024FC7; Start 577; Stop 601
gcatcacaaattatccttatgagcc

SEQ ID NO: 278822 - DNA, 25 bp, Artificial
  probe
  misc_feature (1)..(25): SEQ ID NO: 955; WAN024FC7; Start 579; Stop 603
atcacaaattatccttatgagccgt

SEQ ID NO: 278823 - DNA, 25 bp, Artificial
  probe
  misc_feature (1)..(25): SEQ ID NO: 955; WAN024FC7; Start 576; Stop 600
agcatcacaaattatccttatgagc

SEQ ID NO: 278824 - DNA, 25 bp, Artificial
  probe
  misc_feature (1)..(25): SEQ ID NO: 955; WAN024FC7; Start 111; Stop 135
ttgtggttcagatttatggaggtac

SEQ ID NO: 278825 - DNA, 25 bp, Artificial
  probe
  misc_feature (1)..(25): SEQ ID NO: 955; WAN024FC7; Start 656; Stop 680
cagaacgtggtcaagaaggaattac

SEQ ID NO: 278826 - DNA, 25 bp, Artificial
  probe
  misc_feature (1)..(25): SEQ ID NO: 955; WAN024FC7; Start 798; Stop 822
aggagtcccacactataataatcgt

SEQ ID NO: 278827 - DNA, 25 bp, Artificial
  probe
  misc_feature (1)..(25): SEQ ID NO: 955; WAN024FC7; Start 580; Stop 604
tcacaaattatccttatgagccgtc

SEQ ID NO: 278828 - DNA, 25 bp, Artificial
  probe
  misc_feature (1)..(25): SEQ ID NO: 956; WAN024CJ9; Start 660; Stop 684
tgttattaagcctaagagtgactgg

SEQ ID NO: 278829 - DNA, 25 bp, Artificial
  probe
  misc_feature (1)..(25): SEQ ID NO: 956; WAN024CJ9; Start 205; Stop 229
gaagaagatgcgattgctgataatt

SEQ ID NO: 278830 - DNA, 25 bp, Artificial
  probe
  misc_feature (1)..(25): SEQ ID NO: 956; WAN024CJ9; Start 204; Stop 228
tgaagaagatgcgattgctgataat

SEQ ID NO: 278831 - DNA, 25 bp, Artificial
  probe
  misc_feature (1)..(25): SEQ ID NO: 956; WAN024CJ9; Start 203; Stop 227
atgaagaagatgcgattgctgataa

SEQ ID NO: 278832 - DNA, 25 bp, Artificial
  probe
  misc_feature (1)..(25): SEQ ID NO: 956; WAN024CJ9; Start 659; Stop 683
ctgttattaagcctaagagtgactg

SEQ ID NO: 278833 - DNA, 25 bp, Artificial
  probe
  misc_feature (1)..(25): SEQ ID NO: 956; WAN024CJ9; Start 736; Stop 760
aataccaacctagatagtgatgagc

SEQ ID NO: 278834 - DNA, 25 bp, Artificial
  probe
  misc_feature (1)..(25): SEQ ID NO: 956; WAN024CJ9; Start 202; Stop 226
gatgaagaagatgcgattgctgata

SEQ ID NO: 278835 - DNA, 25 bp, Artificial
  probe
  misc_feature (1)..(25): SEQ ID NO: 956; WAN024CJ9; Start 258; Stop 282
taatgtgttgatgagcaataagagc

SEQ ID NO: 278836 - DNA, 25 bp, Artificial
  probe
  misc_feature (1)..(25): SEQ ID NO: 956; WAN024CJ9; Start 843; Stop 867
atataagcggtactcactcaatcag

SEQ ID NO: 278837 - DNA, 25 bp, Artificial
  probe
  misc_feature (1)..(25): SEQ ID NO: 956; WAN024CJ9; Start 842; Stop 866
aatataagcggtactcactcaatca

SEQ ID NO: 278838 - DNA, 25 bp, Artificial
  probe
  misc_feature (1)..(25): SEQ ID NO: 956; WAN024CJ9; Start 170; Stop 194
gtgaacaatgccaagaagaacagaa

SEQ ID NO: 278839 - DNA, 25 bp, Artificial
  probe
  misc_feature (1)..(25): SEQ ID NO: 956; WAN024CJ9; Start 844; Stop 868
tataagcggtactcactcaatcagt

SEQ ID NO: 278840 - DNA, 25 bp, Artificial
  probe
  misc_feature (1)..(25): SEQ ID NO: 956; WAN024CJ9; Start 846; Stop 870
taagcggtactcactcaatcagtta

SEQ ID NO: 278841 - DNA, 25 bp, Artificial
  probe
  misc_feature (1)..(25): SEQ ID NO: 956; WAN024CJ9; Start 737; Stop 761
ataccaacctagatagtgatgagct

SEQ ID NO: 278842 - DNA, 25 bp, Artificial
  probe
  misc_feature (1)..(25): SEQ ID NO: 956; WAN024CJ9; Start 740; Stop 764
ccaacctagatagtgatgagcttaa

SEQ ID NO: 278843 - DNA, 25 bp, Artificial
  probe
  misc_feature (1)..(25): SEQ ID NO: 956; WAN024CJ9; Start 739; Stop 763
accaacctagatagtgatgagctta

SEQ ID NO: 278844 - DNA, 25 bp, Artificial
  probe
  misc_feature (1)..(25): SEQ ID NO: 956; WAN024CJ9; Start 738; Stop 762
taccaacctagatagtgatgagctt

SEQ ID NO: 278845 - DNA, 25 bp, Artificial
  probe
  misc_feature (1)..(25): SEQ ID NO: 956; WAN024CJ9; Start 406; Stop 430
aatacgcttatcacaggaggtacag

SEQ ID NO: 278846 - DNA, 25 bp, Artificial
  probe
  misc_feature (1)..(25): SEQ ID NO: 956; WAN024CJ9; Start 201; Stop 225
agatgaagaagatgcgattgctgat

SEQ ID NO: 278847 - DNA, 25 bp, Artificial
  probe
  misc_feature (1)..(25): SEQ ID NO: 956; WAN024CJ9; Start 845; Stop 869
ataagcggtactcactcaatcagtt

SEQ ID NO: 278848 - DNA, 25 bp, Artificial
  probe
  misc_feature (1)..(25): SEQ ID NO: 956; WAN024CJ9; Start 200; Stop 224
aagatgaagaagatgcgattgctga

SEQ ID NO: 278849 - DNA, 25 bp, Artificial
  probe
  misc_feature (1)..(25): SEQ ID NO: 956; WAN024CJ9; Start 257; Stop 281
ataatgtgttgatgagcaataagag

SEQ ID NO: 278850 - DNA, 25 bp, Artificial
  probe
  misc_feature (1)..(25): SEQ ID NO: 956; WAN024CJ9; Start 78; Stop 102
gctaacacaaatcaaaggagaaaga

SEQ ID NO: 278851 - DNA, 25 bp, Artificial
  probe
  misc_feature (1)..(25): SEQ ID NO: 956; WAN024CJ9; Start 457; Stop 481
gctattgccaaaggtataaatgagg

SEQ ID NO: 278852 - DNA, 25 bp, Artificial
  probe
  misc_feature (1)..(25): SEQ ID NO: 956; WAN024CJ9; Start 45; Stop 69
actagacgaattgtgtcctaagcat

SEQ ID NO: 278853 - DNA, 25 bp, Artificial
  probe
  misc_feature (1)..(25): SEQ ID NO: 956; WAN024CJ9; Start 847; Stop 871
aagcggtactcactcaatcagttaa

SEQ ID NO: 278854 - DNA, 25 bp, Artificial
  probe
  misc_feature (1)..(25): SEQ ID NO: 956; WAN024CJ9; Start 81; Stop 105
aacacaaatcaaaggagaaagacat

SEQ ID NO: 278855 - DNA, 25 bp, Artificial
  probe
  misc_feature (1)..(25): SEQ ID NO: 956; WAN024CJ9; Start 458; Stop 482
ctattgccaaaggtataaatgaggg

SEQ ID NO: 278856 - DNA, 25 bp, Artificial
  probe
  misc_feature (1)..(25): SEQ ID NO: 956; WAN024CJ9; Start 456; Stop 480
tgctattgccaaaggtataaatgag

SEQ ID NO: 278857 - DNA, 25 bp, Artificial
  probe
  misc_feature (1)..(25): SEQ ID NO: 956; WAN024CJ9; Start 211; Stop 235
gatgcgattgctgataatttgaatg

SEQ ID NO: 278858 - DNA, 25 bp, Artificial
  probe
  misc_feature (1)..(25): SEQ ID NO: 956; WAN024CJ9; Start 209; Stop 233
aagatgcgattgctgataatttgaa

SEQ ID NO: 278859 - DNA, 25 bp, Artificial
  probe
  misc_feature (1)..(25): SEQ ID NO: 956; WAN024CJ9; Start 661; Stop 685
gttattaagcctaagagtgactggg

SEQ ID NO: 278860 - DNA, 25 bp, Artificial
  probe
  misc_feature (1)..(25): SEQ ID NO: 956; WAN024CJ9; Start 210; Stop 234
agatgcgattgctgataatttgaat

SEQ ID NO: 278861 - DNA, 25 bp, Artificial
  probe
  misc_feature (1)..(25): SEQ ID NO: 957; WAN024DTT; Start 90; Stop 114
tatctactggaatagcgacaactct

SEQ ID NO: 278862 - DNA, 25 bp, Artificial
  probe
  misc_feature (1)..(25): SEQ ID NO: 957; WAN024DTT; Start 89; Stop 113
gtatctactggaatagcgacaactc

SEQ ID NO: 278863 - DNA, 25 bp, Artificial
  probe
  misc_feature (1)..(25): SEQ ID NO: 957; WAN024DTT; Start 52; Stop 76
cctgtagtgattatgtctggagtat

SEQ ID NO: 278864 - DNA, 25 bp, Artificial
  probe
  misc_feature (1)..(25): SEQ ID NO: 957; WAN024DTT; Start 1681; Stop 1705
gacagtcctattgataagtatggct

SEQ ID NO: 278865 - DNA, 25 bp, Artificial
  probe
  misc_feature (1)..(25): SEQ ID NO: 957; WAN024DTT; Start 1680; Stop 1704
agacagtcctattgataagtatggc

SEQ ID NO: 278866 - DNA, 25 bp, Artificial
  probe
  misc_feature (1)..(25): SEQ ID NO: 957; WAN024DTT; Start 1682; Stop 1706
acagtcctattgataagtatggctt

SEQ ID NO: 278867 - DNA, 25 bp, Artificial
  probe
  misc_feature (1)..(25): SEQ ID NO: 957; WAN024DTT; Start 412; Stop 436
gccttatctacttcctatgctctga

SEQ ID NO: 278868 - DNA, 25 bp, Artificial
  probe
  misc_feature (1)..(25): SEQ ID NO: 957; WAN024DTT; Start 413; Stop 437
ccttatctacttcctatgctctgat

SEQ ID NO: 278869 - DNA, 25 bp, Artificial
  probe
  misc_feature (1)..(25): SEQ ID NO: 957; WAN024DTT; Start 407; Stop 431
aactagccttatctacttcctatgc

SEQ ID NO: 278870 - DNA, 25 bp, Artificial
  probe
  misc_feature (1)..(25): SEQ ID NO: 957; WAN024DTT; Start 2087; Stop 2111
caactgataatgtcttctccttctt

SEQ ID NO: 278871 - DNA, 25 bp, Artificial
  probe
  misc_feature (1)..(25): SEQ ID NO: 957; WAN024DTT; Start 47; Stop 71
tcattcctgtagtgattatgtctgg

SEQ ID NO: 278872 - DNA, 25 bp, Artificial
  probe
  misc_feature (1)..(25): SEQ ID NO: 957; WAN024DTT; Start 1663; Stop 1687
atccagtacaatatctcagacagtc

SEQ ID NO: 278873 - DNA, 25 bp, Artificial
  probe
  misc_feature (1)..(25): SEQ ID NO: 957; WAN024DTT; Start 417; Stop 441
atctacttcctatgctctgatgagt

SEQ ID NO: 278874 - DNA, 25 bp, Artificial
  probe
  misc_feature (1)..(25): SEQ ID NO: 957; WAN024DTT; Start 91; Stop 115
atctactggaatagcgacaactctc

SEQ ID NO: 278875 - DNA, 25 bp, Artificial
  probe
  misc_feature (1)..(25): SEQ ID NO: 957; WAN024DTT; Start 418; Stop 442
tctacttcctatgctctgatgagtt

SEQ ID NO: 278876 - DNA, 25 bp, Artificial
  probe
  misc_feature (1)..(25): SEQ ID NO: 957; WAN024DTT; Start 415; Stop 439
ttatctacttcctatgctctgatga

SEQ ID NO: 278877 - DNA, 25 bp, Artificial
  probe
  misc_feature (1)..(25): SEQ ID NO: 957; WAN024DTT; Start 1660; Stop 1684
ggtatccagtacaatatctcagaca

SEQ ID NO: 278878 - DNA, 25 bp, Artificial
  probe
  misc_feature (1)..(25): SEQ ID NO: 957; WAN024DTT; Start 1666; Stop 1690
cagtacaatatctcagacagtccta

SEQ ID NO: 278879 - DNA, 25 bp, Artificial
  probe
  misc_feature (1)..(25): SEQ ID NO: 957; WAN024DTT; Start 1665; Stop 1689
ccagtacaatatctcagacagtcct

SEQ ID NO: 278880 - DNA, 25 bp, Artificial
  probe
  misc_feature (1)..(25): SEQ ID NO: 957; WAN024DTT; Start 1664; Stop 1688
tccagtacaatatctcagacagtcc

SEQ ID NO: 278881 - DNA, 25 bp, Artificial
  probe
  misc_feature (1)..(25): SEQ ID NO: 957; WAN024DTT; Start 1679; Stop 1703
cagacagtcctattgataagtatgg

SEQ ID NO: 278882 - DNA, 25 bp, Artificial
  probe
  misc_feature (1)..(25): SEQ ID NO: 957; WAN024DTT; Start 2086; Stop 2110
acaactgataatgtcttctccttct

SEQ ID NO: 278883 - DNA, 25 bp, Artificial
  probe
  misc_feature (1)..(25): SEQ ID NO: 957; WAN024DTT; Start 1517; Stop 1541
tcaactacaatggaatctctcaatt

SEQ ID NO: 278884 - DNA, 25 bp, Artificial
  probe
  misc_feature (1)..(25): SEQ ID NO: 957; WAN024DTT; Start 414; Stop 438
cttatctacttcctatgctctgatg

SEQ ID NO: 278885 - DNA, 25 bp, Artificial
  probe
  misc_feature (1)..(25): SEQ ID NO: 957; WAN024DTT; Start 1516; Stop 1540
ttcaactacaatggaatctctcaat

SEQ ID NO: 278886 - DNA, 25 bp, Artificial
  probe
  misc_feature (1)..(25): SEQ ID NO: 957; WAN024DTT; Start 416; Stop 440
tatctacttcctatgctctgatgag

SEQ ID NO: 278887 - DNA, 25 bp, Artificial
  probe
  misc_feature (1)..(25): SEQ ID NO: 957; WAN024DTT; Start 1675; Stop 1699
atctcagacagtcctattgataagt

SEQ ID NO: 278888 - DNA, 25 bp, Artificial
  probe
  misc_feature (1)..(25): SEQ ID NO: 957; WAN024DTT; Start 1808; Stop 1832
atgaacataccttggataatcaggc

SEQ ID NO: 278889 - DNA, 25 bp, Artificial
  probe
  misc_feature (1)..(25): SEQ ID NO: 957; WAN024DTT; Start 1662; Stop 1686
tatccagtacaatatctcagacagt

SEQ ID NO: 278890 - DNA, 25 bp, Artificial
  probe
  misc_feature (1)..(25): SEQ ID NO: 957; WAN024DTT; Start 2471; Stop 2495
ttattactggagcaatctgttcctt

SEQ ID NO: 278891 - DNA, 25 bp, Artificial
  probe
  misc_feature (1)..(25): SEQ ID NO: 957; WAN024DTT; Start 51; Stop 75
tcctgtagtgattatgtctggagta

SEQ ID NO: 278892 - DNA, 25 bp, Artificial
  probe
  misc_feature (1)..(25): SEQ ID NO: 957; WAN024DTT; Start 48; Stop 72
cattcctgtagtgattatgtctgga

SEQ ID NO: 278893 - DNA, 25 bp, Artificial
  probe
  misc_feature (1)..(25): SEQ ID NO: 957; WAN024DTT; Start 101; Stop 125
atagcgacaactctcctctattagg

SEQ ID NO: 278894 - DNA, 25 bp, Artificial
  probe
  misc_feature (1)..(25): SEQ ID NO: 958; WAN024D3O; Start 182; Stop 206
gtgaccttattcttccagagattct

SEQ ID NO: 278895 - DNA, 25 bp, Artificial
  probe
  misc_feature (1)..(25): SEQ ID NO: 958; WAN024D3O; Start 550; Stop 574
cttactgaagcaatgacctctgtag

SEQ ID NO: 278896 - DNA, 25 bp, Artificial
  probe
  misc_feature (1)..(25): SEQ ID NO: 958; WAN024D3O; Start 552; Stop 576
tactgaagcaatgacctctgtagaa

SEQ ID NO: 278897 - DNA, 25 bp, Artificial
  probe
  misc_feature (1)..(25): SEQ ID NO: 958; WAN024D3O; Start 551; Stop 575
ttactgaagcaatgacctctgtaga

SEQ ID NO: 278898 - DNA, 25 bp, Artificial
  probe
  misc_feature (1)..(25): SEQ ID NO: 958; WAN024D3O; Start 181; Stop 205
ggtgaccttattcttccagagattc

SEQ ID NO: 278899 - DNA, 25 bp, Artificial
  probe
  misc_feature (1)..(25): SEQ ID NO: 958; WAN024D3O; Start 545; Stop 569
gaatccttactgaagcaatgacctc

SEQ ID NO: 278900 - DNA, 25 bp, Artificial
  probe
  misc_feature (1)..(25): SEQ ID NO: 958; WAN024D3O; Start 546; Stop 570
aatccttactgaagcaatgacctct

SEQ ID NO: 278901 - DNA, 25 bp, Artificial
  probe
  misc_feature (1)..(25): SEQ ID NO: 958; WAN024D3O; Start 183; Stop 207
tgaccttattcttccagagattcta

SEQ ID NO: 278902 - DNA, 25 bp, Artificial
  probe
  misc_feature (1)..(25): SEQ ID NO: 958; WAN024D3O; Start 549; Stop 573
ccttactgaagcaatgacctctgta

SEQ ID NO: 278903 - DNA, 25 bp, Artificial
  probe
  misc_feature (1)..(25): SEQ ID NO: 958; WAN024D3O; Start 547; Stop 571
atccttactgaagcaatgacctctg

SEQ ID NO: 278904 - DNA, 25 bp, Artificial
  probe
  misc_feature (1)..(25): SEQ ID NO: 958; WAN024D3O; Start 184; Stop 208
gaccttattcttccagagattctag

SEQ ID NO: 278905 - DNA, 25 bp, Artificial
  probe
  misc_feature (1)..(25): SEQ ID NO: 958; WAN024D3O; Start 175; Stop 199
atgaatggtgaccttattcttccag

SEQ ID NO: 278906 - DNA, 25 bp, Artificial
  probe
  misc_feature (1)..(25): SEQ ID NO: 958; WAN024D3O; Start 179; Stop 203
atggtgaccttattcttccagagat

SEQ ID NO: 278907 - DNA, 25 bp, Artificial
  probe
  misc_feature (1)..(25): SEQ ID NO: 958; WAN024D3O; Start 177; Stop 201
gaatggtgaccttattcttccagag

SEQ ID NO: 278908 - DNA, 25 bp, Artificial
  probe
  misc_feature (1)..(25): SEQ ID NO: 958; WAN024D3O; Start 180; Stop 204
tggtgaccttattcttccagagatt

SEQ ID NO: 278909 - DNA, 25 bp, Artificial
  probe
  misc_feature (1)..(25): SEQ ID NO: 958; WAN024D3O; Start 178; Stop 202
aatggtgaccttattcttccagaga

SEQ ID NO: 278910 - DNA, 25 bp, Artificial
  probe
  misc_feature (1)..(25): SEQ ID NO: 958; WAN024D3O; Start 544; Stop 568
ggaatccttactgaagcaatgacct

SEQ ID NO: 278911 - DNA, 25 bp, Artificial
  probe
  misc_feature (1)..(25): SEQ ID NO: 958; WAN024D3O; Start 386; Stop 410
tgacactccatcttaaaccaaatct

SEQ ID NO: 278912 - DNA, 25 bp, Artificial
  probe
  misc_feature (1)..(25): SEQ ID NO: 958; WAN024D3O; Start 34; Stop 58
tctaaagaaaccgactatatcagcg

SEQ ID NO: 278913 - DNA, 25 bp, Artificial
  probe
  misc_feature (1)..(25): SEQ ID NO: 958; WAN024D3O; Start 23; Stop 47
accaaatcctatctaaagaaaccga

SEQ ID NO: 278914 - DNA, 25 bp, Artificial
  probe
  misc_feature (1)..(25): SEQ ID NO: 958; WAN024D3O; Start 387; Stop 411
gacactccatcttaaaccaaatctc

SEQ ID NO: 278915 - DNA, 25 bp, Artificial
  probe
  misc_feature (1)..(25): SEQ ID NO: 958; WAN024D3O; Start 24; Stop 48
ccaaatcctatctaaagaaaccgac

SEQ ID NO: 278916 - DNA, 25 bp, Artificial
  probe
  misc_feature (1)..(25): SEQ ID NO: 958; WAN024D3O; Start 388; Stop 412
acactccatcttaaaccaaatctcc

SEQ ID NO: 278917 - DNA, 25 bp, Artificial
  probe
  misc_feature (1)..(25): SEQ ID NO: 958; WAN024D3O; Start 176; Stop 200
tgaatggtgaccttattcttccaga

SEQ ID NO: 278918 - DNA, 25 bp, Artificial
  probe
  misc_feature (1)..(25): SEQ ID NO: 958; WAN024D3O; Start 619; Stop 643
ttcactattaaagacttccctcagg

SEQ ID NO: 278919 - DNA, 25 bp, Artificial
  probe
  misc_feature (1)..(25): SEQ ID NO: 958; WAN024D3O; Start 890; Stop 914
aaatctggctaaatagtggcgaaat

SEQ ID NO: 278920 - DNA, 25 bp, Artificial
  probe
  misc_feature (1)..(25): SEQ ID NO: 958; WAN024D3O; Start 16; Stop 40
gctgtctaccaaatcctatctaaag

SEQ ID NO: 278921 - DNA, 25 bp, Artificial
  probe
  misc_feature (1)..(25): SEQ ID NO: 958; WAN024D3O; Start 385; Stop 409
atgacactccatcttaaaccaaatc

SEQ ID NO: 278922 - DNA, 25 bp, Artificial
  probe
  misc_feature (1)..(25): SEQ ID NO: 958; WAN024D3O; Start 829; Stop 853
ggacttgctaaagacatctcagaaa

SEQ ID NO: 278923 - DNA, 25 bp, Artificial
  probe
  misc_feature (1)..(25): SEQ ID NO: 958; WAN024D3O; Start 891; Stop 915
aatctggctaaatagtggcgaaatt

SEQ ID NO: 278924 - DNA, 25 bp, Artificial
  probe
  misc_feature (1)..(25): SEQ ID NO: 958; WAN024D3O; Start 389; Stop 413
cactccatcttaaaccaaatctccc

SEQ ID NO: 278925 - DNA, 25 bp, Artificial
  probe
  misc_feature (1)..(25): SEQ ID NO: 958; WAN024D3O; Start 561; Stop 585
aatgacctctgtagaaactggctta

SEQ ID NO: 278926 - DNA, 25 bp, Artificial
  probe
  misc_feature (1)..(25): SEQ ID NO: 958; WAN024D3O; Start 25; Stop 49
caaatcctatctaaagaaaccgact

SEQ ID NO: 278927 - DNA, 25 bp, Artificial
  probe
  misc_feature (1)..(25): SEQ ID NO: 959; WAN024FII; Start 11; Stop 35
atcgttatattattgcctttgctgg

SEQ ID NO: 278928 - DNA, 25 bp, Artificial
  probe
  misc_feature (1)..(25): SEQ ID NO: 959; WAN024FII; Start 240; Stop 264
atacgcaggtggaaatatcttaaca

SEQ ID NO: 278929 - DNA, 25 bp, Artificial
  probe
  misc_feature (1)..(25): SEQ ID NO: 959; WAN024FII; Start 893; Stop 917
tttctctctcactttggctctttac

SEQ ID NO: 278930 - DNA, 25 bp, Artificial
  probe
  misc_feature (1)..(25): SEQ ID NO: 959; WAN024FII; Start 540; Stop 564
ttcacaattcattaagcgtccaaat

SEQ ID NO: 278931 - DNA, 25 bp, Artificial
  probe
  misc_feature (1)..(25): SEQ ID NO: 959; WAN024FII; Start 241; Stop 265
tacgcaggtggaaatatcttaacag

SEQ ID NO: 278932 - DNA, 25 bp, Artificial
  probe
  misc_feature (1)..(25): SEQ ID NO: 959; WAN024FII; Start 244; Stop 268
gcaggtggaaatatcttaacaggat

SEQ ID NO: 278933 - DNA, 25 bp, Artificial
  probe
  misc_feature (1)..(25): SEQ ID NO: 959; WAN024FII; Start 1172; Stop 1196
tgtcttattatctaggtcgttcaat

SEQ ID NO: 278934 - DNA, 25 bp, Artificial
  probe
  misc_feature (1)..(25): SEQ ID NO: 959; WAN024FII; Start 236; Stop 260
ttctatacgcaggtggaaatatctt

SEQ ID NO: 278935 - DNA, 25 bp, Artificial
  probe
  misc_feature (1)..(25): SEQ ID NO: 959; WAN024FII; Start 1171; Stop 1195
ttgtcttattatctaggtcgttcaa

SEQ ID NO: 278936 - DNA, 25 bp, Artificial
  probe
  misc_feature (1)..(25): SEQ ID NO: 959; WAN024FII; Start 237; Stop 261
tctatacgcaggtggaaatatctta

SEQ ID NO: 278937 - DNA, 25 bp, Artificial
  probe
  misc_feature (1)..(25): SEQ ID NO: 959; WAN024FII; Start 697; Stop 721
gcttgtggtttaggcttaatttcag

SEQ ID NO: 278938 - DNA, 25 bp, Artificial
  probe
  misc_feature (1)..(25): SEQ ID NO: 959; WAN024FII; Start 1167; Stop 1191
ggctttgtcttattatctaggtcgt

SEQ ID NO: 278939 - DNA, 25 bp, Artificial
  probe
  misc_feature (1)..(25): SEQ ID NO: 959; WAN024FII; Start 1166; Stop 1190
tggctttgtcttattatctaggtcg

SEQ ID NO: 278940 - DNA, 25 bp, Artificial
  probe
  misc_feature (1)..(25): SEQ ID NO: 959; WAN024FII; Start 539; Stop 563
cttcacaattcattaagcgtccaaa

SEQ ID NO: 278941 - DNA, 25 bp, Artificial
  probe
  misc_feature (1)..(25): SEQ ID NO: 959; WAN024FII; Start 899; Stop 923
tctcactttggctctttacagattc

SEQ ID NO: 278942 - DNA, 25 bp, Artificial
  probe
  misc_feature (1)..(25): SEQ ID NO: 959; WAN024FII; Start 898; Stop 922
ctctcactttggctctttacagatt

SEQ ID NO: 278943 - DNA, 25 bp, Artificial
  probe
  misc_feature (1)..(25): SEQ ID NO: 959; WAN024FII; Start 12; Stop 36
tcgttatattattgcctttgctggg

SEQ ID NO: 278944 - DNA, 25 bp, Artificial
  probe
  misc_feature (1)..(25): SEQ ID NO: 959; WAN024FII; Start 1174; Stop 1198
tcttattatctaggtcgttcaatca

SEQ ID NO: 278945 - DNA, 25 bp, Artificial
  probe
  misc_feature (1)..(25): SEQ ID NO: 959; WAN024FII; Start 73; Stop 97
tggagtgtttatcgtaaccctatta

SEQ ID NO: 278946 - DNA, 25 bp, Artificial
  probe
  misc_feature (1)..(25): SEQ ID NO: 959; WAN024FII; Start 894; Stop 918
ttctctctcactttggctctttaca

SEQ ID NO: 278947 - DNA, 25 bp, Artificial
  probe
  misc_feature (1)..(25): SEQ ID NO: 959; WAN024FII; Start 8; Stop 32
cgaatcgttatattattgcctttgc

SEQ ID NO: 278948 - DNA, 25 bp, Artificial
  probe
  misc_feature (1)..(25): SEQ ID NO: 959; WAN024FII; Start 239; Stop 263
tatacgcaggtggaaatatcttaac

SEQ ID NO: 278949 - DNA, 25 bp, Artificial
  probe
  misc_feature (1)..(25): SEQ ID NO: 959; WAN024FII; Start 1173; Stop 1197
gtcttattatctaggtcgttcaatc

SEQ ID NO: 278950 - DNA, 25 bp, Artificial
  probe
  misc_feature (1)..(25): SEQ ID NO: 959; WAN024FII; Start 245; Stop 269
caggtggaaatatcttaacaggatt

SEQ ID NO: 278951 - DNA, 25 bp, Artificial
  probe
  misc_feature (1)..(25): SEQ ID NO: 959; WAN024FII; Start 10; Stop 34
aatcgttatattattgcctttgctg

SEQ ID NO: 278952 - DNA, 25 bp, Artificial
  probe
  misc_feature (1)..(25): SEQ ID NO: 959; WAN024FII; Start 897; Stop 921
tctctcactttggctctttacagat

SEQ ID NO: 278953 - DNA, 25 bp, Artificial
  probe
  misc_feature (1)..(25): SEQ ID NO: 959; WAN024FII; Start 238; Stop 262
ctatacgcaggtggaaatatcttaa

SEQ ID NO: 278954 - DNA, 25 bp, Artificial
  probe
  misc_feature (1)..(25): SEQ ID NO: 959; WAN024FII; Start 1168; Stop 1192
gctttgtcttattatctaggtcgtt

SEQ ID NO: 278955 - DNA, 25 bp, Artificial
  probe
  misc_feature (1)..(25): SEQ ID NO: 959; WAN024FII; Start 9; Stop 33
gaatcgttatattattgcctttgct

SEQ ID NO: 278956 - DNA, 25 bp, Artificial
  probe
  misc_feature (1)..(25): SEQ ID NO: 959; WAN024FII; Start 900; Stop 924
ctcactttggctctttacagattcc

SEQ ID NO: 278957 - DNA, 25 bp, Artificial
  probe
  misc_feature (1)..(25): SEQ ID NO: 959; WAN024FII; Start 895; Stop 919
tctctctcactttggctctttacag

SEQ ID NO: 278958 - DNA, 25 bp, Artificial
  probe
  misc_feature (1)..(25): SEQ ID NO: 959; WAN024FII; Start 1165; Stop 1189
ttggctttgtcttattatctaggtc

SEQ ID NO: 278959 - DNA, 25 bp, Artificial
  probe
  misc_feature (1)..(25): SEQ ID NO: 959; WAN024FII; Start 1158; Stop 1182
tatcgccttggctttgtcttattat

SEQ ID NO: 278960 - DNA, 25 bp, Artificial
  probe
  misc_feature (1)..(25): SEQ ID NO: 960; WAN024D8V; Start 104; Stop 128
ctgagaatctgacctatgttacctg

SEQ ID NO: 278961 - DNA, 25 bp, Artificial
  probe
  misc_feature (1)..(25): SEQ ID NO: 960; WAN024D8V; Start 105; Stop 129
tgagaatctgacctatgttacctgg

SEQ ID NO: 278962 - DNA, 25 bp, Artificial
  probe
  misc_feature (1)..(25): SEQ ID NO: 960; WAN024D8V; Start 103; Stop 127
gctgagaatctgacctatgttacct

SEQ ID NO: 278963 - DNA, 25 bp, Artificial
  probe
  misc_feature (1)..(25): SEQ ID NO: 960; WAN024D8V; Start 102; Stop 126
cgctgagaatctgacctatgttacc

SEQ ID NO: 278964 - DNA, 25 bp, Artificial
  probe
  misc_feature (1)..(25): SEQ ID NO: 960; WAN024D8V; Start 101; Stop 125
ccgctgagaatctgacctatgttac

SEQ ID NO: 278965 - DNA, 25 bp, Artificial
  probe
  misc_feature (1)..(25): SEQ ID NO: 960; WAN024D8V; Start 174; Stop 198
ttgggttgcttcctatactaatctc

SEQ ID NO: 278966 - DNA, 25 bp, Artificial
  probe
  misc_feature (1)..(25): SEQ ID NO: 960; WAN024D8V; Start 100; Stop 124
tccgctgagaatctgacctatgtta

SEQ ID NO: 278967 - DNA, 25 bp, Artificial
  probe
  misc_feature (1)..(25): SEQ ID NO: 960; WAN024D8V; Start 175; Stop 199
tgggttgcttcctatactaatctca

SEQ ID NO: 278968 - DNA, 25 bp, Artificial
  probe
  misc_feature (1)..(25): SEQ ID NO: 960; WAN024D8V; Start 173; Stop 197
attgggttgcttcctatactaatct

SEQ ID NO: 278969 - DNA, 25 bp, Artificial
  probe
  misc_feature (1)..(25): SEQ ID NO: 960; WAN024D8V; Start 47; Stop 71
taagaagatttgtggagagtgatgc

SEQ ID NO: 278970 - DNA, 25 bp, Artificial
  probe
  misc_feature (1)..(25): SEQ ID NO: 960; WAN024D8V; Start 176; Stop 200
gggttgcttcctatactaatctcaa

SEQ ID NO: 278971 - DNA, 25 bp, Artificial
  probe
  misc_feature (1)..(25): SEQ ID NO: 960; WAN024D8V; Start 46; Stop 70
ttaagaagatttgtggagagtgatg

SEQ ID NO: 278972 - DNA, 25 bp, Artificial
  probe
  misc_feature (1)..(25): SEQ ID NO: 960; WAN024D8V; Start 172; Stop 196
aattgggttgcttcctatactaatc

SEQ ID NO: 278973 - DNA, 25 bp, Artificial
  probe
  misc_feature (1)..(25): SEQ ID NO: 960; WAN024D8V; Start 501; Stop 525
aggctatcttgcggatcttatttat

SEQ ID NO: 278974 - DNA, 25 bp, Artificial
  probe
  misc_feature (1)..(25): SEQ ID NO: 960; WAN024D8V; Start 500; Stop 524
aaggctatcttgcggatcttattta

SEQ ID NO: 278975 - DNA, 25 bp, Artificial
  probe
  misc_feature (1)..(25): SEQ ID NO: 960; WAN024D8V; Start 99; Stop 123
atccgctgagaatctgacctatgtt

SEQ ID NO: 278976 - DNA, 25 bp, Artificial
  probe
  misc_feature (1)..(25): SEQ ID NO: 960; WAN024D8V; Start 502; Stop 526
ggctatcttgcggatcttatttatt

SEQ ID NO: 278977 - DNA, 25 bp, Artificial
  probe
  misc_feature (1)..(25): SEQ ID NO: 960; WAN024D8V; Start 499; Stop 523
aaaggctatcttgcggatcttattt

SEQ ID NO: 278978 - DNA, 25 bp, Artificial
  probe
  misc_feature (1)..(25): SEQ ID NO: 960; WAN024D8V; Start 180; Stop 204
tgcttcctatactaatctcaactat

SEQ ID NO: 278979 - DNA, 25 bp, Artificial
  probe
  misc_feature (1)..(25): SEQ ID NO: 960; WAN024D8V; Start 265; Stop 289
gttaagatagacgaggctgatttaa

SEQ ID NO: 278980 - DNA, 25 bp, Artificial
  probe
  misc_feature (1)..(25): SEQ ID NO: 960; WAN024D8V; Start 45; Stop 69
tttaagaagatttgtggagagtgat

SEQ ID NO: 278981 - DNA, 25 bp, Artificial
  probe
  misc_feature (1)..(25): SEQ ID NO: 960; WAN024D8V; Start 96; Stop 120
ttcatccgctgagaatctgacctat

SEQ ID NO: 278982 - DNA, 25 bp, Artificial
  probe
  misc_feature (1)..(25): SEQ ID NO: 960; WAN024D8V; Start 179; Stop 203
ttgcttcctatactaatctcaacta

SEQ ID NO: 278983 - DNA, 25 bp, Artificial
  probe
  misc_feature (1)..(25): SEQ ID NO: 960; WAN024D8V; Start 13; Stop 37
ggtacgcaaatattacagacagaac

SEQ ID NO: 278984 - DNA, 25 bp, Artificial
  probe
  misc_feature (1)..(25): SEQ ID NO: 960; WAN024D8V; Start 266; Stop 290
ttaagatagacgaggctgatttaag

SEQ ID NO: 278985 - DNA, 25 bp, Artificial
  probe
  misc_feature (1)..(25): SEQ ID NO: 960; WAN024D8V; Start 14; Stop 38
gtacgcaaatattacagacagaacg

SEQ ID NO: 278986 - DNA, 25 bp, Artificial
  probe
  misc_feature (1)..(25): SEQ ID NO: 960; WAN024D8V; Start 507; Stop 531
tcttgcggatcttatttattatggt

SEQ ID NO: 278987 - DNA, 25 bp, Artificial
  probe
  misc_feature (1)..(25): SEQ ID NO: 960; WAN024D8V; Start 455; Stop 479
ctggaatgtcctatctacaaaccat

SEQ ID NO: 278988 - DNA, 25 bp, Artificial
  probe
  misc_feature (1)..(25): SEQ ID NO: 960; WAN024D8V; Start 95; Stop 119
cttcatccgctgagaatctgaccta

SEQ ID NO: 278989 - DNA, 25 bp, Artificial
  probe
  misc_feature (1)..(25): SEQ ID NO: 960; WAN024D8V; Start 451; Stop 475
aaggctggaatgtcctatctacaaa

SEQ ID NO: 278990 - DNA, 25 bp, Artificial
  probe
  misc_feature (1)..(25): SEQ ID NO: 960; WAN024D8V; Start 450; Stop 474
aaaggctggaatgtcctatctacaa

SEQ ID NO: 278991 - DNA, 25 bp, Artificial
  probe
  misc_feature (1)..(25): SEQ ID NO: 960; WAN024D8V; Start 97; Stop 121
tcatccgctgagaatctgacctatg

SEQ ID NO: 278992 - DNA, 25 bp, Artificial
  probe
  misc_feature (1)..(25): SEQ ID NO: 960; WAN024D8V; Start 98; Stop 122
catccgctgagaatctgacctatgt

SEQ ID NO: 278993 - DNA, 25 bp, Artificial
  probe
  misc_feature (1)..(25): SEQ ID NO: 961; WAN024C5L; Start 1886; Stop 1910
aagttacgacagagtcttcttatgc

SEQ ID NO: 278994 - DNA, 25 bp, Artificial
  probe
  misc_feature (1)..(25): SEQ ID NO: 961; WAN024C5L; Start 695; Stop 719
ggattatcacctatgagaaggatcg

SEQ ID NO: 278995 - DNA, 25 bp, Artificial
  probe
  misc_feature (1)..(25): SEQ ID NO: 961; WAN024C5L; Start 698; Stop 722
ttatcacctatgagaaggatcgtct

SEQ ID NO: 278996 - DNA, 25 bp, Artificial
  probe
  misc_feature (1)..(25): SEQ ID NO: 961; WAN024C5L; Start 1702; Stop 1726
tatatcttctctgttgtgtcgatgc

SEQ ID NO: 278997 - DNA, 25 bp, Artificial
  probe
  misc_feature (1)..(25): SEQ ID NO: 961; WAN024C5L; Start 697; Stop 721
attatcacctatgagaaggatcgtc

SEQ ID NO: 278998 - DNA, 25 bp, Artificial
  probe
  misc_feature (1)..(25): SEQ ID NO: 961; WAN024C5L; Start 696; Stop 720
gattatcacctatgagaaggatcgt

SEQ ID NO: 278999 - DNA, 25 bp, Artificial
  probe
  misc_feature (1)..(25): SEQ ID NO: 961; WAN024C5L; Start 1851; Stop 1875
tctcaatcttcaatctccagccaag

SEQ ID NO: 279000 - DNA, 25 bp, Artificial
  probe
  misc_feature (1)..(25): SEQ ID NO: 961; WAN024C5L; Start 1700; Stop 1724
actatatcttctctgttgtgtcgat

SEQ ID NO: 279001 - DNA, 25 bp, Artificial
  probe
  misc_feature (1)..(25): SEQ ID NO: 961; WAN024C5L; Start 272; Stop 296
cgacctcttataatgtctatgctgt

SEQ ID NO: 279002 - DNA, 25 bp, Artificial
  probe
  misc_feature (1)..(25): SEQ ID NO: 961; WAN024C5L; Start 699; Stop 723
tatcacctatgagaaggatcgtctg

SEQ ID NO: 279003 - DNA, 25 bp, Artificial
  probe
  misc_feature (1)..(25): SEQ ID NO: 961; WAN024C5L; Start 1701; Stop 1725
ctatatcttctctgttgtgtcgatg

SEQ ID NO: 279004 - DNA, 25 bp, Artificial
  probe
  misc_feature (1)..(25): SEQ ID NO: 961; WAN024C5L; Start 269; Stop 293
atgcgacctcttataatgtctatgc

SEQ ID NO: 279005 - DNA, 25 bp, Artificial
  probe
  misc_feature (1)..(25): SEQ ID NO: 961; WAN024C5L; Start 1699; Stop 1723
aactatatcttctctgttgtgtcga

SEQ ID NO: 279006 - DNA, 25 bp, Artificial
  probe
  misc_feature (1)..(25): SEQ ID NO: 961; WAN024C5L; Start 576; Stop 600
gtttgcttcttcctttatcggttta

SEQ ID NO: 279007 - DNA, 25 bp, Artificial
  probe
  misc_feature (1)..(25): SEQ ID NO: 961; WAN024C5L; Start 577; Stop 601
tttgcttcttcctttatcggtttag

SEQ ID NO: 279008 - DNA, 25 bp, Artificial
  probe
  misc_feature (1)..(25): SEQ ID NO: 961; WAN024C5L; Start 1739; Stop 1763
atcctgactttatcctctatgtgac

SEQ ID NO: 279009 - DNA, 25 bp, Artificial
  probe
  misc_feature (1)..(25): SEQ ID NO: 961; WAN024C5L; Start 268; Stop 292
gatgcgacctcttataatgtctatg

SEQ ID NO: 279010 - DNA, 25 bp, Artificial
  probe
  misc_feature (1)..(25): SEQ ID NO: 961; WAN024C5L; Start 267; Stop 291
agatgcgacctcttataatgtctat

SEQ ID NO: 279011 - DNA, 25 bp, Artificial
  probe
  misc_feature (1)..(25): SEQ ID NO: 961; WAN024C5L; Start 271; Stop 295
gcgacctcttataatgtctatgctg

SEQ ID NO: 279012 - DNA, 25 bp, Artificial
  probe
  misc_feature (1)..(25): SEQ ID NO: 961; WAN024C5L; Start 575; Stop 599
agtttgcttcttcctttatcggttt

SEQ ID NO: 279013 - DNA, 25 bp, Artificial
  probe
  misc_feature (1)..(25): SEQ ID NO: 961; WAN024C5L; Start 646; Stop 670
tcatctggtttggagagttctttaa

SEQ ID NO: 279014 - DNA, 25 bp, Artificial
  probe
  misc_feature (1)..(25): SEQ ID NO: 961; WAN024C5L; Start 645; Stop 669
gtcatctggtttggagagttcttta

SEQ ID NO: 279015 - DNA, 25 bp, Artificial
  probe
  misc_feature (1)..(25): SEQ ID NO: 961; WAN024C5L; Start 270; Stop 294
tgcgacctcttataatgtctatgct

SEQ ID NO: 279016 - DNA, 25 bp, Artificial
  probe
  misc_feature (1)..(25): SEQ ID NO: 961; WAN024C5L; Start 782; Stop 806
tttacacaaccctttctagtccttt

SEQ ID NO: 279017 - DNA, 25 bp, Artificial
  probe
  misc_feature (1)..(25): SEQ ID NO: 961; WAN024C5L; Start 1738; Stop 1762
aatcctgactttatcctctatgtga

SEQ ID NO: 279018 - DNA, 25 bp, Artificial
  probe
  misc_feature (1)..(25): SEQ ID NO: 961; WAN024C5L; Start 1859; Stop 1883
ttcaatctccagccaagaatttaga

SEQ ID NO: 279019 - DNA, 25 bp, Artificial
  probe
  misc_feature (1)..(25): SEQ ID NO: 961; WAN024C5L; Start 1858; Stop 1882
cttcaatctccagccaagaatttag

SEQ ID NO: 279020 - DNA, 25 bp, Artificial
  probe
  misc_feature (1)..(25): SEQ ID NO: 961; WAN024C5L; Start 1740; Stop 1764
tcctgactttatcctctatgtgacg

SEQ ID NO: 279021 - DNA, 25 bp, Artificial
  probe
  misc_feature (1)..(25): SEQ ID NO: 961; WAN024C5L; Start 1865; Stop 1889
ctccagccaagaatttagataaagt

SEQ ID NO: 279022 - DNA, 25 bp, Artificial
  probe
  misc_feature (1)..(25): SEQ ID NO: 961; WAN024C5L; Start 688; Stop 712
acagatgggattatcacctatgaga

SEQ ID NO: 279023 - DNA, 25 bp, Artificial
  probe
  misc_feature (1)..(25): SEQ ID NO: 961; WAN024C5L; Start 1988; Stop 2012
tcggtactggaacaaagattaaaga

SEQ ID NO: 279024 - DNA, 25 bp, Artificial
  probe
  misc_feature (1)..(25): SEQ ID NO: 961; WAN024C5L; Start 1987; Stop 2011
gtcggtactggaacaaagattaaag

SEQ ID NO: 279025 - DNA, 25 bp, Artificial
  probe
  misc_feature (1)..(25): SEQ ID NO: 961; WAN024C5L; Start 1742; Stop 1766
ctgactttatcctctatgtgacggt

SEQ ID NO: 279026 - DNA, 25 bp, Artificial
  probe
  misc_feature (1)..(25): SEQ ID NO: 962; WAN024DL7; Start 434; Stop 458
cggaccaaatcgttttaactaaact

SEQ ID NO: 279027 - DNA, 25 bp, Artificial
  probe
  misc_feature (1)..(25): SEQ ID NO: 962; WAN024DL7; Start 433; Stop 457
tcggaccaaatcgttttaactaaac

SEQ ID NO: 279028 - DNA, 25 bp, Artificial
  probe
  misc_feature (1)..(25): SEQ ID NO: 962; WAN024DL7; Start 435; Stop 459
ggaccaaatcgttttaactaaacta

SEQ ID NO: 279029 - DNA, 25 bp, Artificial
  probe
  misc_feature (1)..(25): SEQ ID NO: 962; WAN024DL7; Start 437; Stop 461
accaaatcgttttaactaaactaac

SEQ ID NO: 279030 - DNA, 25 bp, Artificial
  probe
  misc_feature (1)..(25): SEQ ID NO: 962; WAN024DL7; Start 438; Stop 462
ccaaatcgttttaactaaactaact

SEQ ID NO: 279031 - DNA, 25 bp, Artificial
  probe
  misc_feature (1)..(25): SEQ ID NO: 962; WAN024DL7; Start 436; Stop 460
gaccaaatcgttttaactaaactaa

SEQ ID NO: 279032 - DNA, 25 bp, Artificial
  probe
  misc_feature (1)..(25): SEQ ID NO: 963; WAN024FKH; Start 1516; Stop 1540
aaggagaagacggttgtgattatag

SEQ ID NO: 279033 - DNA, 25 bp, Artificial
  probe
  misc_feature (1)..(25): SEQ ID NO: 963; WAN024FKH; Start 1484; Stop 1508
atgcgattatcagtagcctctattc

SEQ ID NO: 279034 - DNA, 25 bp, Artificial
  probe
  misc_feature (1)..(25): SEQ ID NO: 963; WAN024FKH; Start 1482; Stop 1506
gtatgcgattatcagtagcctctat

SEQ ID NO: 279035 - DNA, 25 bp, Artificial
  probe
  misc_feature (1)..(25): SEQ ID NO: 963; WAN024FKH; Start 1481; Stop 1505
agtatgcgattatcagtagcctcta

SEQ ID NO: 279036 - DNA, 25 bp, Artificial
  probe
  misc_feature (1)..(25): SEQ ID NO: 963; WAN024FKH; Start 1611; Stop 1635
aggaactcataaggaactactggaa

SEQ ID NO: 279037 - DNA, 25 bp, Artificial
  probe
  misc_feature (1)..(25): SEQ ID NO: 963; WAN024FKH; Start 1256; Stop 1280
tgaatcgcttagtaactgatgatga

SEQ ID NO: 279038 - DNA, 25 bp, Artificial
  probe
  misc_feature (1)..(25): SEQ ID NO: 963; WAN024FKH; Start 1485; Stop 1509
tgcgattatcagtagcctctattct

SEQ ID NO: 279039 - DNA, 25 bp, Artificial
  probe
  misc_feature (1)..(25): SEQ ID NO: 963; WAN024FKH; Start 1483; Stop 1507
tatgcgattatcagtagcctctatt

SEQ ID NO: 279040 - DNA, 25 bp, Artificial
  probe
  misc_feature (1)..(25): SEQ ID NO: 963; WAN024FKH; Start 1261; Stop 1285
cgcttagtaactgatgatgaattga

SEQ ID NO: 279041 - DNA, 25 bp, Artificial
  probe
  misc_feature (1)..(25): SEQ ID NO: 963; WAN024FKH; Start 1260; Stop 1284
tcgcttagtaactgatgatgaattg

SEQ ID NO: 279042 - DNA, 25 bp, Artificial
  probe
  misc_feature (1)..(25): SEQ ID NO: 963; WAN024FKH; Start 1255; Stop 1279
ttgaatcgcttagtaactgatgatg

SEQ ID NO: 279043 - DNA, 25 bp, Artificial
  probe
  misc_feature (1)..(25): SEQ ID NO: 963; WAN024FKH; Start 55; Stop 79
cttgttctgtctagtctacttgctt

SEQ ID NO: 279044 - DNA, 25 bp, Artificial
  probe
  misc_feature (1)..(25): SEQ ID NO: 963; WAN024FKH; Start 1257; Stop 1281
gaatcgcttagtaactgatgatgaa

SEQ ID NO: 279045 - DNA, 25 bp, Artificial
  probe
  misc_feature (1)..(25): SEQ ID NO: 963; WAN024FKH; Start 1122; Stop 1146
ttcaggagatattctaatggagcaa

SEQ ID NO: 279046 - DNA, 25 bp, Artificial
  probe
  misc_feature (1)..(25): SEQ ID NO: 963; WAN024FKH; Start 1219; Stop 1243
ttatctggcagtattcgtgacaatc

SEQ ID NO: 279047 - DNA, 25 bp, Artificial
  probe
  misc_feature (1)..(25): SEQ ID NO: 963; WAN024FKH; Start 1218; Stop 1242
cttatctggcagtattcgtgacaat

SEQ ID NO: 279048 - DNA, 25 bp, Artificial
  probe
  misc_feature (1)..(25): SEQ ID NO: 963; WAN024FKH; Start 1125; Stop 1149
aggagatattctaatggagcaatca

SEQ ID NO: 279049 - DNA, 25 bp, Artificial
  probe
  misc_feature (1)..(25): SEQ ID NO: 963; WAN024FKH; Start 1123; Stop 1147
tcaggagatattctaatggagcaat

SEQ ID NO: 279050 - DNA, 25 bp, Artificial
  probe
  misc_feature (1)..(25): SEQ ID NO: 963; WAN024FKH; Start 1607; Stop 1631
gctcaggaactcataaggaactact

SEQ ID NO: 279051 - DNA, 25 bp, Artificial
  probe
  misc_feature (1)..(25): SEQ ID NO: 963; WAN024FKH; Start 1124; Stop 1148
caggagatattctaatggagcaatc

SEQ ID NO: 279052 - DNA, 25 bp, Artificial
  probe
  misc_feature (1)..(25): SEQ ID NO: 963; WAN024FKH; Start 1258; Stop 1282
aatcgcttagtaactgatgatgaat

SEQ ID NO: 279053 - DNA, 25 bp, Artificial
  probe
  misc_feature (1)..(25): SEQ ID NO: 963; WAN024FKH; Start 1220; Stop 1244
tatctggcagtattcgtgacaatct

SEQ ID NO: 279054 - DNA, 25 bp, Artificial
  probe
  misc_feature (1)..(25): SEQ ID NO: 963; WAN024FKH; Start 1259; Stop 1283
atcgcttagtaactgatgatgaatt

SEQ ID NO: 279055 - DNA, 25 bp, Artificial
  probe
  misc_feature (1)..(25): SEQ ID NO: 963; WAN024FKH; Start 1126; Stop 1150
ggagatattctaatggagcaatcaa

SEQ ID NO: 279056 - DNA, 25 bp, Artificial
  probe
  misc_feature (1)..(25): SEQ ID NO: 963; WAN024FKH; Start 1339; Stop 1363
ggactagatactgaagttggtgaac

SEQ ID NO: 279057 - DNA, 25 bp, Artificial
  probe
  misc_feature (1)..(25): SEQ ID NO: 963; WAN024FKH; Start 1217; Stop 1241
tcttatctggcagtattcgtgacaa

SEQ ID NO: 279058 - DNA, 25 bp, Artificial
  probe
  misc_feature (1)..(25): SEQ ID NO: 963; WAN024FKH; Start 1608; Stop 1632
ctcaggaactcataaggaactactg

SEQ ID NO: 279059 - DNA, 25 bp, Artificial
  probe
  misc_feature (1)..(25): SEQ ID NO: 963; WAN024FKH; Start 399; Stop 423
ggtacttggttccattgtagtctta

SEQ ID NO: 279060 - DNA, 25 bp, Artificial
  probe
  misc_feature (1)..(25): SEQ ID NO: 963; WAN024FKH; Start 1340; Stop 1364
gactagatactgaagttggtgaacg

SEQ ID NO: 279061 - DNA, 25 bp, Artificial
  probe
  misc_feature (1)..(25): SEQ ID NO: 963; WAN024FKH; Start 1517; Stop 1541
aggagaagacggttgtgattatagc

SEQ ID NO: 279062 - DNA, 25 bp, Artificial
  probe
  misc_feature (1)..(25): SEQ ID NO: 963; WAN024FKH; Start 1487; Stop 1511
cgattatcagtagcctctattctgt

SEQ ID NO: 279063 - DNA, 25 bp, Artificial
  probe
  misc_feature (1)..(25): SEQ ID NO: 963; WAN024FKH; Start 1486; Stop 1510
gcgattatcagtagcctctattctg

SEQ ID NO: 279064 - DNA, 25 bp, Artificial
  probe
  misc_feature (1)..(25): SEQ ID NO: 963; WAN024FKH; Start 1469; Stop 1493
atgcggattctgagtatgcgattat

SEQ ID NO: 279065 - DNA, 25 bp, Artificial
  probe
  misc_feature (1)..(25): SEQ ID NO: 964; WAN024GBF; Start 70; Stop 94
ttgttgtctgaggctagagagtatg

SEQ ID NO: 279066 - DNA, 25 bp, Artificial
  probe
  misc_feature (1)..(25): SEQ ID NO: 964; WAN024GBF; Start 143; Stop 167
aaggacttgaaggcacagatgttaa

SEQ ID NO: 279067 - DNA, 25 bp, Artificial
  probe
  misc_feature (1)..(25): SEQ ID NO: 964; WAN024GBF; Start 61; Stop 85
attgatagtttgttgtctgaggcta

SEQ ID NO: 279068 - DNA, 25 bp, Artificial
  probe
  misc_feature (1)..(25): SEQ ID NO: 964; WAN024GBF; Start 147; Stop 171
acttgaaggcacagatgttaaggtt

SEQ ID NO: 279069 - DNA, 25 bp, Artificial
  probe
  misc_feature (1)..(25): SEQ ID NO: 964; WAN024GBF; Start 59; Stop 83
aaattgatagtttgttgtctgaggc

SEQ ID NO: 279070 - DNA, 25 bp, Artificial
  probe
  misc_feature (1)..(25): SEQ ID NO: 964; WAN024GBF; Start 144; Stop 168
aggacttgaaggcacagatgttaag

SEQ ID NO: 279071 - DNA, 25 bp, Artificial
  probe
  misc_feature (1)..(25): SEQ ID NO: 964; WAN024GBF; Start 60; Stop 84
aattgatagtttgttgtctgaggct

SEQ ID NO: 279072 - DNA, 25 bp, Artificial
  probe
  misc_feature (1)..(25): SEQ ID NO: 964; WAN024GBF; Start 62; Stop 86
ttgatagtttgttgtctgaggctag

SEQ ID NO: 279073 - DNA, 25 bp, Artificial
  probe
  misc_feature (1)..(25): SEQ ID NO: 964; WAN024GBF; Start 146; Stop 170
gacttgaaggcacagatgttaaggt

SEQ ID NO: 279074 - DNA, 25 bp, Artificial
  probe
  misc_feature (1)..(25): SEQ ID NO: 964; WAN024GBF; Start 64; Stop 88
gatagtttgttgtctgaggctagag

SEQ ID NO: 279075 - DNA, 25 bp, Artificial
  probe
  misc_feature (1)..(25): SEQ ID NO: 964; WAN024GBF; Start 69; Stop 93
tttgttgtctgaggctagagagtat

SEQ ID NO: 279076 - DNA, 25 bp, Artificial
  probe
  misc_feature (1)..(25): SEQ ID NO: 964; WAN024GBF; Start 65; Stop 89
atagtttgttgtctgaggctagaga

SEQ ID NO: 279077 - DNA, 25 bp, Artificial
  probe
  misc_feature (1)..(25): SEQ ID NO: 964; WAN024GBF; Start 63; Stop 87
tgatagtttgttgtctgaggctaga

SEQ ID NO: 279078 - DNA, 25 bp, Artificial
  probe
  misc_feature (1)..(25): SEQ ID NO: 964; WAN024GBF; Start 149; Stop 173
ttgaaggcacagatgttaaggtttg

SEQ ID NO: 279079 - DNA, 25 bp, Artificial
  probe
  misc_feature (1)..(25): SEQ ID NO: 964; WAN024GBF; Start 148; Stop 172
cttgaaggcacagatgttaaggttt

SEQ ID NO: 279080 - DNA, 25 bp, Artificial
  probe
  misc_feature (1)..(25): SEQ ID NO: 964; WAN024GBF; Start 66; Stop 90
tagtttgttgtctgaggctagagag

SEQ ID NO: 279081 - DNA, 25 bp, Artificial
  probe
  misc_feature (1)..(25): SEQ ID NO: 964; WAN024GBF; Start 68; Stop 92
gtttgttgtctgaggctagagagta

SEQ ID NO: 279082 - DNA, 25 bp, Artificial
  probe
  misc_feature (1)..(25): SEQ ID NO: 964; WAN024GBF; Start 145; Stop 169
ggacttgaaggcacagatgttaagg

SEQ ID NO: 279083 - DNA, 25 bp, Artificial
  probe
  misc_feature (1)..(25): SEQ ID NO: 964; WAN024GBF; Start 142; Stop 166
aaaggacttgaaggcacagatgtta

SEQ ID NO: 279084 - DNA, 25 bp, Artificial
  probe
  misc_feature (1)..(25): SEQ ID NO: 964; WAN024GBF; Start 164; Stop 188
ttaaggtttgcacagtagtaggttt

SEQ ID NO: 279085 - DNA, 25 bp, Artificial
  probe
  misc_feature (1)..(25): SEQ ID NO: 964; WAN024GBF; Start 165; Stop 189
taaggtttgcacagtagtaggtttc

SEQ ID NO: 279086 - DNA, 25 bp, Artificial
  probe
  misc_feature (1)..(25): SEQ ID NO: 964; WAN024GBF; Start 163; Stop 187
gttaaggtttgcacagtagtaggtt

SEQ ID NO: 279087 - DNA, 25 bp, Artificial
  probe
  misc_feature (1)..(25): SEQ ID NO: 964; WAN024GBF; Start 160; Stop 184
gatgttaaggtttgcacagtagtag

SEQ ID NO: 279088 - DNA, 25 bp, Artificial
  probe
  misc_feature (1)..(25): SEQ ID NO: 964; WAN024GBF; Start 159; Stop 183
agatgttaaggtttgcacagtagta

SEQ ID NO: 279089 - DNA, 25 bp, Artificial
  probe
  misc_feature (1)..(25): SEQ ID NO: 964; WAN024GBF; Start 161; Stop 185
atgttaaggtttgcacagtagtagg

SEQ ID NO: 279090 - DNA, 25 bp, Artificial
  probe
  misc_feature (1)..(25): SEQ ID NO: 964; WAN024GBF; Start 158; Stop 182
cagatgttaaggtttgcacagtagt

SEQ ID NO: 279091 - DNA, 25 bp, Artificial
  probe
  misc_feature (1)..(25): SEQ ID NO: 964; WAN024GBF; Start 157; Stop 181
acagatgttaaggtttgcacagtag

SEQ ID NO: 279092 - DNA, 25 bp, Artificial
  probe
  misc_feature (1)..(25): SEQ ID NO: 964; WAN024GBF; Start 67; Stop 91
agtttgttgtctgaggctagagagt

SEQ ID NO: 279093 - DNA, 25 bp, Artificial
  probe
  misc_feature (1)..(25): SEQ ID NO: 964; WAN024GBF; Start 156; Stop 180
cacagatgttaaggtttgcacagta

SEQ ID NO: 279094 - DNA, 25 bp, Artificial
  probe
  misc_feature (1)..(25): SEQ ID NO: 964; WAN024GBF; Start 58; Stop 82
caaattgatagtttgttgtctgagg

SEQ ID NO: 279095 - DNA, 25 bp, Artificial
  probe
  misc_feature (1)..(25): SEQ ID NO: 964; WAN024GBF; Start 162; Stop 186
tgttaaggtttgcacagtagtaggt

SEQ ID NO: 279096 - DNA, 25 bp, Artificial
  probe
  misc_feature (1)..(25): SEQ ID NO: 964; WAN024GBF; Start 166; Stop 190
aaggtttgcacagtagtaggtttcc

SEQ ID NO: 279097 - DNA, 25 bp, Artificial
  probe
  misc_feature (1)..(25): SEQ ID NO: 964; WAN024GBF; Start 112; Stop 136
gttaatccgacctgggttgaacatg

SEQ ID NO: 279098 - DNA, 25 bp, Artificial
  probe
  misc_feature (1)..(25): SEQ ID NO: 965; WAN024D8R; Start 89; Stop 113
ttataccgccgatattgcttacatt

SEQ ID NO: 279099 - DNA, 25 bp, Artificial
  probe
  misc_feature (1)..(25): SEQ ID NO: 965; WAN024D8R; Start 169; Stop 193
tatgctatgctcggtatgttaatgg

SEQ ID NO: 279100 - DNA, 25 bp, Artificial
  probe
  misc_feature (1)..(25): SEQ ID NO: 965; WAN024D8R; Start 90; Stop 114
tataccgccgatattgcttacattc

SEQ ID NO: 279101 - DNA, 25 bp, Artificial
  probe
  misc_feature (1)..(25): SEQ ID NO: 965; WAN024D8R; Start 177; Stop 201
gctcggtatgttaatggctgttata

SEQ ID NO: 279102 - DNA, 25 bp, Artificial
  probe
  misc_feature (1)..(25): SEQ ID NO: 965; WAN024D8R; Start 168; Stop 192
ttatgctatgctcggtatgttaatg

SEQ ID NO: 279103 - DNA, 25 bp, Artificial
  probe
  misc_feature (1)..(25): SEQ ID NO: 965; WAN024D8R; Start 52; Stop 76
tcatcaggcgtaatatatctcagtt

SEQ ID NO: 279104 - DNA, 25 bp, Artificial
  probe
  misc_feature (1)..(25): SEQ ID NO: 965; WAN024D8R; Start 51; Stop 75
ttcatcaggcgtaatatatctcagt

SEQ ID NO: 279105 - DNA, 25 bp, Artificial
  probe
  misc_feature (1)..(25): SEQ ID NO: 965; WAN024D8R; Start 91; Stop 115
ataccgccgatattgcttacattct

SEQ ID NO: 279106 - DNA, 25 bp, Artificial
  probe
  misc_feature (1)..(25): SEQ ID NO: 965; WAN024D8R; Start 179; Stop 203
tcggtatgttaatggctgttataca

SEQ ID NO: 279107 - DNA, 25 bp, Artificial
  probe
  misc_feature (1)..(25): SEQ ID NO: 965; WAN024D8R; Start 638; Stop 662
cgatgtctattagtcagtatcttgt

SEQ ID NO: 279108 - DNA, 25 bp, Artificial
  probe
  misc_feature (1)..(25): SEQ ID NO: 965; WAN024D8R; Start 637; Stop 661
acgatgtctattagtcagtatcttg

SEQ ID NO: 279109 - DNA, 25 bp, Artificial
  probe
  misc_feature (1)..(25): SEQ ID NO: 965; WAN024D8R; Start 178; Stop 202
ctcggtatgttaatggctgttatac

SEQ ID NO: 279110 - DNA, 25 bp, Artificial
  probe
  misc_feature (1)..(25): SEQ ID NO: 965; WAN024D8R; Start 176; Stop 200
tgctcggtatgttaatggctgttat

SEQ ID NO: 279111 - DNA, 25 bp, Artificial
  probe
  misc_feature (1)..(25): SEQ ID NO: 965; WAN024D8R; Start 175; Stop 199
atgctcggtatgttaatggctgtta

SEQ ID NO: 279112 - DNA, 25 bp, Artificial
  probe
  misc_feature (1)..(25): SEQ ID NO: 965; WAN024D8R; Start 174; Stop 198
tatgctcggtatgttaatggctgtt

SEQ ID NO: 279113 - DNA, 25 bp, Artificial
  probe
  misc_feature (1)..(25): SEQ ID NO: 965; WAN024D8R; Start 92; Stop 116
taccgccgatattgcttacattctt

SEQ ID NO: 279114 - DNA, 25 bp, Artificial
  probe
  misc_feature (1)..(25): SEQ ID NO: 965; WAN024D8R; Start 50; Stop 74
attcatcaggcgtaatatatctcag

SEQ ID NO: 279115 - DNA, 25 bp, Artificial
  probe
  misc_feature (1)..(25): SEQ ID NO: 965; WAN024D8R; Start 188; Stop 212
taatggctgttatacatgctaatcg

SEQ ID NO: 279116 - DNA, 25 bp, Artificial
  probe
  misc_feature (1)..(25): SEQ ID NO: 965; WAN024D8R; Start 173; Stop 197
ctatgctcggtatgttaatggctgt

SEQ ID NO: 279117 - DNA, 25 bp, Artificial
  probe
  misc_feature (1)..(25): SEQ ID NO: 965; WAN024D8R; Start 72; Stop 96
cagtttgcttatctcgtttataccg

SEQ ID NO: 279118 - DNA, 25 bp, Artificial
  probe
  misc_feature (1)..(25): SEQ ID NO: 965; WAN024D8R; Start 95; Stop 119
cgccgatattgcttacattctttat

SEQ ID NO: 279119 - DNA, 25 bp, Artificial
  probe
  misc_feature (1)..(25): SEQ ID NO: 965; WAN024D8R; Start 185; Stop 209
tgttaatggctgttatacatgctaa

SEQ ID NO: 279120 - DNA, 25 bp, Artificial
  probe
  misc_feature (1)..(25): SEQ ID NO: 965; WAN024D8R; Start 117; Stop 141
tattctaaagactcaagggacatcg

SEQ ID NO: 279121 - DNA, 25 bp, Artificial
  probe
  misc_feature (1)..(25): SEQ ID NO: 965; WAN024D8R; Start 88; Stop 112
tttataccgccgatattgcttacat

SEQ ID NO: 279122 - DNA, 25 bp, Artificial
  probe
  misc_feature (1)..(25): SEQ ID NO: 965; WAN024D8R; Start 71; Stop 95
tcagtttgcttatctcgtttatacc

SEQ ID NO: 279123 - DNA, 25 bp, Artificial
  probe
  misc_feature (1)..(25): SEQ ID NO: 965; WAN024D8R; Start 189; Stop 213
aatggctgttatacatgctaatcga

SEQ ID NO: 279124 - DNA, 25 bp, Artificial
  probe
  misc_feature (1)..(25): SEQ ID NO: 965; WAN024D8R; Start 624; Stop 648
tgtggcttcaaatacgatgtctatt

SEQ ID NO: 279125 - DNA, 25 bp, Artificial
  probe
  misc_feature (1)..(25): SEQ ID NO: 965; WAN024D8R; Start 87; Stop 111
gtttataccgccgatattgcttaca

SEQ ID NO: 279126 - DNA, 25 bp, Artificial
  probe
  misc_feature (1)..(25): SEQ ID NO: 965; WAN024D8R; Start 190; Stop 214
atggctgttatacatgctaatcgag

SEQ ID NO: 279127 - DNA, 25 bp, Artificial
  probe
  misc_feature (1)..(25): SEQ ID NO: 965; WAN024D8R; Start 623; Stop 647
ttgtggcttcaaatacgatgtctat

SEQ ID NO: 279128 - DNA, 25 bp, Artificial
  probe
  misc_feature (1)..(25): SEQ ID NO: 965; WAN024D8R; Start 625; Stop 649
gtggcttcaaatacgatgtctatta

SEQ ID NO: 279129 - DNA, 25 bp, Artificial
  probe
  misc_feature (1)..(25): SEQ ID NO: 965; WAN024D8R; Start 73; Stop 97
agtttgcttatctcgtttataccgc

SEQ ID NO: 279130 - DNA, 25 bp, Artificial
  probe
  misc_feature (1)..(25): SEQ ID NO: 965; WAN024D8R; Start 94; Stop 118
ccgccgatattgcttacattcttta

SEQ ID NO: 279131 - DNA, 25 bp, Artificial
  probe
  misc_feature (1)..(25): SEQ ID NO: 966; WAN024D9P; Start 215; Stop 239
agccagttgagttagttgaatctta

SEQ ID NO: 279132 - DNA, 25 bp, Artificial
  probe
  misc_feature (1)..(25): SEQ ID NO: 966; WAN024D9P; Start 216; Stop 240
gccagttgagttagttgaatcttat

SEQ ID NO: 279133 - DNA, 25 bp, Artificial
  probe
  misc_feature (1)..(25): SEQ ID NO: 966; WAN024D9P; Start 214; Stop 238
gagccagttgagttagttgaatctt

SEQ ID NO: 279134 - DNA, 25 bp, Artificial
  probe
  misc_feature (1)..(25): SEQ ID NO: 966; WAN024D9P; Start 226; Stop 250
ttagttgaatcttatccagtcacgg

SEQ ID NO: 279135 - DNA, 25 bp, Artificial
  probe
  misc_feature (1)..(25): SEQ ID NO: 966; WAN024D9P; Start 225; Stop 249
gttagttgaatcttatccagtcacg

SEQ ID NO: 279136 - DNA, 25 bp, Artificial
  probe
  misc_feature (1)..(25): SEQ ID NO: 966; WAN024D9P; Start 222; Stop 246
tgagttagttgaatcttatccagtc

SEQ ID NO: 279137 - DNA, 25 bp, Artificial
  probe
  misc_feature (1)..(25): SEQ ID NO: 966; WAN024D9P; Start 210; Stop 234
tatggagccagttgagttagttgaa

SEQ ID NO: 279138 - DNA, 25 bp, Artificial
  probe
  misc_feature (1)..(25): SEQ ID NO: 966; WAN024D9P; Start 348; Stop 372
gagtgtatcagacaatatcctgcta

SEQ ID NO: 279139 - DNA, 25 bp, Artificial
  probe
  misc_feature (1)..(25): SEQ ID NO: 966; WAN024D9P; Start 346; Stop 370
gagagtgtatcagacaatatcctgc

SEQ ID NO: 279140 - DNA, 25 bp, Artificial
  probe
  misc_feature (1)..(25): SEQ ID NO: 966; WAN024D9P; Start 345; Stop 369
tgagagtgtatcagacaatatcctg

SEQ ID NO: 279141 - DNA, 25 bp, Artificial
  probe
  misc_feature (1)..(25): SEQ ID NO: 966; WAN024D9P; Start 347; Stop 371
agagtgtatcagacaatatcctgct

SEQ ID NO: 279142 - DNA, 25 bp, Artificial
  probe
  misc_feature (1)..(25): SEQ ID NO: 966; WAN024D9P; Start 224; Stop 248
agttagttgaatcttatccagtcac

SEQ ID NO: 279143 - DNA, 25 bp, Artificial
  probe
  misc_feature (1)..(25): SEQ ID NO: 966; WAN024D9P; Start 349; Stop 373
agtgtatcagacaatatcctgctaa

SEQ ID NO: 279144 - DNA, 25 bp, Artificial
  probe
  misc_feature (1)..(25): SEQ ID NO: 966; WAN024D9P; Start 221; Stop 245
ttgagttagttgaatcttatccagt

SEQ ID NO: 279145 - DNA, 25 bp, Artificial
  probe
  misc_feature (1)..(25): SEQ ID NO: 966; WAN024D9P; Start 219; Stop 243
agttgagttagttgaatcttatcca

SEQ ID NO: 279146 - DNA, 25 bp, Artificial
  probe
  misc_feature (1)..(25): SEQ ID NO: 966; WAN024D9P; Start 211; Stop 235
atggagccagttgagttagttgaat

SEQ ID NO: 279147 - DNA, 25 bp, Artificial
  probe
  misc_feature (1)..(25): SEQ ID NO: 966; WAN024D9P; Start 223; Stop 247
gagttagttgaatcttatccagtca

SEQ ID NO: 279148 - DNA, 25 bp, Artificial
  probe
  misc_feature (1)..(25): SEQ ID NO: 966; WAN024D9P; Start 220; Stop 244
gttgagttagttgaatcttatccag

SEQ ID NO: 279149 - DNA, 25 bp, Artificial
  probe
  misc_feature (1)..(25): SEQ ID NO: 966; WAN024D9P; Start 218; Stop 242
cagttgagttagttgaatcttatcc

SEQ ID NO: 279150 - DNA, 25 bp, Artificial
  probe
  misc_feature (1)..(25): SEQ ID NO: 966; WAN024D9P; Start 217; Stop 241
ccagttgagttagttgaatcttatc

SEQ ID NO: 279151 - DNA, 25 bp, Artificial
  probe
  misc_feature (1)..(25): SEQ ID NO: 966; WAN024D9P; Start 213; Stop 237
ggagccagttgagttagttgaatct

SEQ ID NO: 279152 - DNA, 25 bp, Artificial
  probe
  misc_feature (1)..(25): SEQ ID NO: 966; WAN024D9P; Start 209; Stop 233
gtatggagccagttgagttagttga

SEQ ID NO: 279153 - DNA, 25 bp, Artificial
  probe
  misc_feature (1)..(25): SEQ ID NO: 966; WAN024D9P; Start 208; Stop 232
agtatggagccagttgagttagttg

SEQ ID NO: 279154 - DNA, 25 bp, Artificial
  probe
  misc_feature (1)..(25): SEQ ID NO: 966; WAN024D9P; Start 207; Stop 231
cagtatggagccagttgagttagtt

SEQ ID NO: 279155 - DNA, 25 bp, Artificial
  probe
  misc_feature (1)..(25): SEQ ID NO: 966; WAN024D9P; Start 227; Stop 251
tagttgaatcttatccagtcacgga

SEQ ID NO: 279156 - DNA, 25 bp, Artificial
  probe
  misc_feature (1)..(25): SEQ ID NO: 966; WAN024D9P; Start 229; Stop 253
gttgaatcttatccagtcacggaag

SEQ ID NO: 279157 - DNA, 25 bp, Artificial
  probe
  misc_feature (1)..(25): SEQ ID NO: 966; WAN024D9P; Start 357; Stop 381
agacaatatcctgctaaacattcct

SEQ ID NO: 279158 - DNA, 25 bp, Artificial
  probe
  misc_feature (1)..(25): SEQ ID NO: 966; WAN024D9P; Start 212; Stop 236
tggagccagttgagttagttgaatc

SEQ ID NO: 279159 - DNA, 25 bp, Artificial
  probe
  misc_feature (1)..(25): SEQ ID NO: 966; WAN024D9P; Start 231; Stop 255
tgaatcttatccagtcacggaagtt

SEQ ID NO: 279160 - DNA, 25 bp, Artificial
  probe
  misc_feature (1)..(25): SEQ ID NO: 966; WAN024D9P; Start 230; Stop 254
ttgaatcttatccagtcacggaagt

SEQ ID NO: 279161 - DNA, 25 bp, Artificial
  probe
  misc_feature (1)..(25): SEQ ID NO: 966; WAN024D9P; Start 228; Stop 252
agttgaatcttatccagtcacggaa

SEQ ID NO: 279162 - DNA, 25 bp, Artificial
  probe
  misc_feature (1)..(25): SEQ ID NO: 966; WAN024D9P; Start 61; Stop 85
ttagatttagttgatgacctgcgtg

SEQ ID NO: 279163 - DNA, 25 bp, Artificial
  probe
  misc_feature (1)..(25): SEQ ID NO: 966; WAN024D9P; Start 60; Stop 84
gttagatttagttgatgacctgcgt

SEQ ID NO: 279164 - DNA, 25 bp, Artificial
  probe
  misc_feature (1)..(25): SEQ ID NO: 968; WAN024ATZ; Start 70; Stop 94
gcccagttagaaaaggctgagtttg

SEQ ID NO: 279165 - DNA, 25 bp, Artificial
  probe
  misc_feature (1)..(25): SEQ ID NO: 969; WAN024CQJ; Start 326; Stop 350
atggcaagacaacgactaaggatat

SEQ ID NO: 279166 - DNA, 25 bp, Artificial
  probe
  misc_feature (1)..(25): SEQ ID NO: 969; WAN024CQJ; Start 325; Stop 349
aatggcaagacaacgactaaggata

SEQ ID NO: 279167 - DNA, 25 bp, Artificial
  probe
  misc_feature (1)..(25): SEQ ID NO: 969; WAN024CQJ; Start 329; Stop 353
gcaagacaacgactaaggatatgtt

SEQ ID NO: 279168 - DNA, 25 bp, Artificial
  probe
  misc_feature (1)..(25): SEQ ID NO: 969; WAN024CQJ; Start 327; Stop 351
tggcaagacaacgactaaggatatg

SEQ ID NO: 279169 - DNA, 25 bp, Artificial
  probe
  misc_feature (1)..(25): SEQ ID NO: 969; WAN024CQJ; Start 86; Stop 110
ctgagtttgatagtcgtttgattgg

SEQ ID NO: 279170 - DNA, 25 bp, Artificial
  probe
  misc_feature (1)..(25): SEQ ID NO: 969; WAN024CQJ; Start 85; Stop 109
gctgagtttgatagtcgtttgattg

SEQ ID NO: 279171 - DNA, 25 bp, Artificial
  probe
  misc_feature (1)..(25): SEQ ID NO: 969; WAN024CQJ; Start 328; Stop 352
ggcaagacaacgactaaggatatgt

SEQ ID NO: 279172 - DNA, 25 bp, Artificial
  probe
  misc_feature (1)..(25): SEQ ID NO: 969; WAN024CQJ; Start 321; Stop 345
ttcaaatggcaagacaacgactaag

SEQ ID NO: 279173 - DNA, 25 bp, Artificial
  probe
  misc_feature (1)..(25): SEQ ID NO: 969; WAN024CQJ; Start 313; Stop 337
gttacaggttcaaatggcaagacaa

SEQ ID NO: 279174 - DNA, 25 bp, Artificial
  probe
  misc_feature (1)..(25): SEQ ID NO: 969; WAN024CQJ; Start 862; Stop 886
gaaggagtttcagaggagcaaattc

SEQ ID NO: 279175 - DNA, 25 bp, Artificial
  probe
  misc_feature (1)..(25): SEQ ID NO: 969; WAN024CQJ; Start 208; Stop 232
aaagaggtctcaaatcatccttaca

SEQ ID NO: 279176 - DNA, 25 bp, Artificial
  probe
  misc_feature (1)..(25): SEQ ID NO: 969; WAN024CQJ; Start 860; Stop 884
aagaaggagtttcagaggagcaaat

SEQ ID NO: 279177 - DNA, 25 bp, Artificial
  probe
  misc_feature (1)..(25): SEQ ID NO: 969; WAN024CQJ; Start 210; Stop 234
agaggtctcaaatcatccttacatt

SEQ ID NO: 279178 - DNA, 25 bp, Artificial
  probe
  misc_feature (1)..(25): SEQ ID NO: 969; WAN024CQJ; Start 209; Stop 233
aagaggtctcaaatcatccttacat

SEQ ID NO: 279179 - DNA, 25 bp, Artificial
  probe
  misc_feature (1)..(25): SEQ ID NO: 969; WAN024CQJ; Start 656; Stop 680
ctgaccctatcgtagaggactattt

SEQ ID NO: 279180 - DNA, 25 bp, Artificial
  probe
  misc_feature (1)..(25): SEQ ID NO: 969; WAN024CQJ; Start 314; Stop 338
ttacaggttcaaatggcaagacaac

SEQ ID NO: 279181 - DNA, 25 bp, Artificial
  probe
  misc_feature (1)..(25): SEQ ID NO: 969; WAN024CQJ; Start 861; Stop 885
agaaggagtttcagaggagcaaatt

SEQ ID NO: 279182 - DNA, 25 bp, Artificial
  probe
  misc_feature (1)..(25): SEQ ID NO: 969; WAN024CQJ; Start 657; Stop 681
tgaccctatcgtagaggactatttg

SEQ ID NO: 279183 - DNA, 25 bp, Artificial
  probe
  misc_feature (1)..(25): SEQ ID NO: 969; WAN024CQJ; Start 320; Stop 344
gttcaaatggcaagacaacgactaa

SEQ ID NO: 279184 - DNA, 25 bp, Artificial
  probe
  misc_feature (1)..(25): SEQ ID NO: 969; WAN024CQJ; Start 502; Stop 526
catctcttgtctgaattggctcgtc

SEQ ID NO: 279185 - DNA, 25 bp, Artificial
  probe
  misc_feature (1)..(25): SEQ ID NO: 969; WAN024CQJ; Start 294; Stop 318
gactgttgatgtctttgctgttaca

SEQ ID NO: 279186 - DNA, 25 bp, Artificial
  probe
  misc_feature (1)..(25): SEQ ID NO: 969; WAN024CQJ; Start 324; Stop 348
aaatggcaagacaacgactaaggat

SEQ ID NO: 279187 - DNA, 25 bp, Artificial
  probe
  misc_feature (1)..(25): SEQ ID NO: 969; WAN024CQJ; Start 661; Stop 685
cctatcgtagaggactatttgccaa

SEQ ID NO: 279188 - DNA, 25 bp, Artificial
  probe
  misc_feature (1)..(25): SEQ ID NO: 969; WAN024CQJ; Start 658; Stop 682
gaccctatcgtagaggactatttgc

SEQ ID NO: 279189 - DNA, 25 bp, Artificial
  probe
  misc_feature (1)..(25): SEQ ID NO: 969; WAN024CQJ; Start 859; Stop 883
caagaaggagtttcagaggagcaaa

SEQ ID NO: 279190 - DNA, 25 bp, Artificial
  probe
  misc_feature (1)..(25): SEQ ID NO: 969; WAN024CQJ; Start 330; Stop 354
caagacaacgactaaggatatgttg

SEQ ID NO: 279191 - DNA, 25 bp, Artificial
  probe
  misc_feature (1)..(25): SEQ ID NO: 969; WAN024CQJ; Start 301; Stop 325
gatgtctttgctgttacaggttcaa

SEQ ID NO: 279192 - DNA, 25 bp, Artificial
  probe
  misc_feature (1)..(25): SEQ ID NO: 969; WAN024CQJ; Start 299; Stop 323
ttgatgtctttgctgttacaggttc

SEQ ID NO: 279193 - DNA, 25 bp, Artificial
  probe
  misc_feature (1)..(25): SEQ ID NO: 969; WAN024CQJ; Start 501; Stop 525
tcatctcttgtctgaattggctcgt

SEQ ID NO: 279194 - DNA, 25 bp, Artificial
  probe
  misc_feature (1)..(25): SEQ ID NO: 969; WAN024CQJ; Start 331; Stop 355
aagacaacgactaaggatatgttgg

SEQ ID NO: 279195 - DNA, 25 bp, Artificial
  probe
  misc_feature (1)..(25): SEQ ID NO: 969; WAN024CQJ; Start 293; Stop 317
cgactgttgatgtctttgctgttac

SEQ ID NO: 279196 - DNA, 25 bp, Artificial
  probe
  misc_feature (1)..(25): SEQ ID NO: 969; WAN024CQJ; Start 298; Stop 322
gttgatgtctttgctgttacaggtt

SEQ ID NO: 279197 - DNA, 25 bp, Artificial
  probe
  misc_feature (1)..(25): SEQ ID NO: 969; WAN024CQJ; Start 323; Stop 347
caaatggcaagacaacgactaagga

SEQ ID NO: 279198 - DNA, 25 bp, Artificial
  probe
  misc_feature (1)..(25): SEQ ID NO: 970; WAN024BFH; Start 289; Stop 313
atcttgccaggtggttatatctatc

SEQ ID NO: 279199 - DNA, 25 bp, Artificial
  probe
  misc_feature (1)..(25): SEQ ID NO: 970; WAN024BFH; Start 290; Stop 314
tcttgccaggtggttatatctatct

SEQ ID NO: 279200 - DNA, 25 bp, Artificial
  probe
  misc_feature (1)..(25): SEQ ID NO: 970; WAN024BFH; Start 287; Stop 311
gtatcttgccaggtggttatatcta

SEQ ID NO: 279201 - DNA, 25 bp, Artificial
  probe
  misc_feature (1)..(25): SEQ ID NO: 970; WAN024BFH; Start 504; Stop 528
ttcaactgttagcgtcaactatgtt

SEQ ID NO: 279202 - DNA, 25 bp, Artificial
  probe
  misc_feature (1)..(25): SEQ ID NO: 970; WAN024BFH; Start 6; Stop 30
attaagaagaagtgatcggatggtt

SEQ ID NO: 279203 - DNA, 25 bp, Artificial
  probe
  misc_feature (1)..(25): SEQ ID NO: 970; WAN024BFH; Start 5; Stop 29
aattaagaagaagtgatcggatggt

SEQ ID NO: 279204 - DNA, 25 bp, Artificial
  probe
  misc_feature (1)..(25): SEQ ID NO: 970; WAN024BFH; Start 7; Stop 31
ttaagaagaagtgatcggatggttg

SEQ ID NO: 279205 - DNA, 25 bp, Artificial
  probe
  misc_feature (1)..(25): SEQ ID NO: 970; WAN024BFH; Start 288; Stop 312
tatcttgccaggtggttatatctat

SEQ ID NO: 279206 - DNA, 25 bp, Artificial
  probe
  misc_feature (1)..(25): SEQ ID NO: 970; WAN024BFH; Start 503; Stop 527
gttcaactgttagcgtcaactatgt

SEQ ID NO: 279207 - DNA, 25 bp, Artificial
  probe
  misc_feature (1)..(25): SEQ ID NO: 970; WAN024BFH; Start 764; Stop 788
atattgatgtcaagaaccaagccat

SEQ ID NO: 279208 - DNA, 25 bp, Artificial
  probe
  misc_feature (1)..(25): SEQ ID NO: 970; WAN024BFH; Start 297; Stop 321
aggtggttatatctatctgtctgat

SEQ ID NO: 279209 - DNA, 25 bp, Artificial
  probe
  misc_feature (1)..(25): SEQ ID NO: 970; WAN024BFH; Start 295; Stop 319
ccaggtggttatatctatctgtctg

SEQ ID NO: 279210 - DNA, 25 bp, Artificial
  probe
  misc_feature (1)..(25): SEQ ID NO: 970; WAN024BFH; Start 291; Stop 315
cttgccaggtggttatatctatctg

SEQ ID NO: 279211 - DNA, 25 bp, Artificial
  probe
  misc_feature (1)..(25): SEQ ID NO: 970; WAN024BFH; Start 286; Stop 310
cgtatcttgccaggtggttatatct

SEQ ID NO: 279212 - DNA, 25 bp, Artificial
  probe
  misc_feature (1)..(25): SEQ ID NO: 970; WAN024BFH; Start 296; Stop 320
caggtggttatatctatctgtctga

SEQ ID NO: 279213 - DNA, 25 bp, Artificial
  probe
  misc_feature (1)..(25): SEQ ID NO: 970; WAN024BFH; Start 8; Stop 32
taagaagaagtgatcggatggttgt

SEQ ID NO: 279214 - DNA, 25 bp, Artificial
  probe
  misc_feature (1)..(25): SEQ ID NO: 970; WAN024BFH; Start 292; Stop 316
ttgccaggtggttatatctatctgt

SEQ ID NO: 279215 - DNA, 25 bp, Artificial
  probe
  misc_feature (1)..(25): SEQ ID NO: 970; WAN024BFH; Start 502; Stop 526
ggttcaactgttagcgtcaactatg

SEQ ID NO: 279216 - DNA, 25 bp, Artificial
  probe
  misc_feature (1)..(25): SEQ ID NO: 970; WAN024BFH; Start 501; Stop 525
aggttcaactgttagcgtcaactat

SEQ ID NO: 279217 - DNA, 25 bp, Artificial
  probe
  misc_feature (1)..(25): SEQ ID NO: 970; WAN024BFH; Start 294; Stop 318
gccaggtggttatatctatctgtct

SEQ ID NO: 279218 - DNA, 25 bp, Artificial
  probe
  misc_feature (1)..(25): SEQ ID NO: 970; WAN024BFH; Start 293; Stop 317
tgccaggtggttatatctatctgtc

SEQ ID NO: 279219 - DNA, 25 bp, Artificial
  probe
  misc_feature (1)..(25): SEQ ID NO: 970; WAN024BFH; Start 763; Stop 787
aatattgatgtcaagaaccaagcca

SEQ ID NO: 279220 - DNA, 25 bp, Artificial
  probe
  misc_feature (1)..(25): SEQ ID NO: 970; WAN024BFH; Start 500; Stop 524
aaggttcaactgttagcgtcaacta

SEQ ID NO: 279221 - DNA, 25 bp, Artificial
  probe
  misc_feature (1)..(25): SEQ ID NO: 970; WAN024BFH; Start 298; Stop 322
ggtggttatatctatctgtctgatt

SEQ ID NO: 279222 - DNA, 25 bp, Artificial
  probe
  misc_feature (1)..(25): SEQ ID NO: 970; WAN024BFH; Start 235; Stop 259
gatgctaaggaaatggttgaagact

SEQ ID NO: 279223 - DNA, 25 bp, Artificial
  probe
  misc_feature (1)..(25): SEQ ID NO: 970; WAN024BFH; Start 492; Stop 516
aattaccgaaggttcaactgttagc

SEQ ID NO: 279224 - DNA, 25 bp, Artificial
  probe
  misc_feature (1)..(25): SEQ ID NO: 970; WAN024BFH; Start 236; Stop 260
atgctaaggaaatggttgaagactt

SEQ ID NO: 279225 - DNA, 25 bp, Artificial
  probe
  misc_feature (1)..(25): SEQ ID NO: 970; WAN024BFH; Start 285; Stop 309
ccgtatcttgccaggtggttatatc

SEQ ID NO: 279226 - DNA, 25 bp, Artificial
  probe
  misc_feature (1)..(25): SEQ ID NO: 970; WAN024BFH; Start 506; Stop 530
caactgttagcgtcaactatgtttc

SEQ ID NO: 279227 - DNA, 25 bp, Artificial
  probe
  misc_feature (1)..(25): SEQ ID NO: 970; WAN024BFH; Start 790; Stop 814
gatgttgaggttggcaatatctttg

SEQ ID NO: 279228 - DNA, 25 bp, Artificial
  probe
  misc_feature (1)..(25): SEQ ID NO: 970; WAN024BFH; Start 507; Stop 531
aactgttagcgtcaactatgtttca

SEQ ID NO: 279229 - DNA, 25 bp, Artificial
  probe
  misc_feature (1)..(25): SEQ ID NO: 970; WAN024BFH; Start 505; Stop 529
tcaactgttagcgtcaactatgttt

SEQ ID NO: 279230 - DNA, 25 bp, Artificial
  probe
  misc_feature (1)..(25): SEQ ID NO: 970; WAN024BFH; Start 517; Stop 541
gtcaactatgtttcaggttcaagtg

SEQ ID NO: 279231 - DNA, 25 bp, Artificial
  probe
  misc_feature (1)..(25): SEQ ID NO: 971; WAN024BFD; Start 64; Stop 88
gagaagctttcaaataaatttggga

SEQ ID NO: 279232 - DNA, 25 bp, Artificial
  probe
  misc_feature (1)..(25): SEQ ID NO: 971; WAN024BFD; Start 63; Stop 87
agagaagctttcaaataaatttggg

SEQ ID NO: 279233 - DNA, 25 bp, Artificial
  probe
  misc_feature (1)..(25): SEQ ID NO: 971; WAN024BFD; Start 65; Stop 89
agaagctttcaaataaatttgggat

SEQ ID NO: 279234 - DNA, 25 bp, Artificial
  probe
  misc_feature (1)..(25): SEQ ID NO: 971; WAN024BFD; Start 68; Stop 92
agctttcaaataaatttgggataaa

SEQ ID NO: 279235 - DNA, 25 bp, Artificial
  probe
  misc_feature (1)..(25): SEQ ID NO: 971; WAN024BFD; Start 226; Stop 250
actaaagatagagtttctcttgaat

SEQ ID NO: 279236 - DNA, 25 bp, Artificial
  probe
  misc_feature (1)..(25): SEQ ID NO: 971; WAN024BFD; Start 14; Stop 38
atgatgataaagttcagatctatga

SEQ ID NO: 279237 - DNA, 25 bp, Artificial
  probe
  misc_feature (1)..(25): SEQ ID NO: 971; WAN024BFD; Start 69; Stop 93
gctttcaaataaatttgggataaat

SEQ ID NO: 279238 - DNA, 25 bp, Artificial
  probe
  misc_feature (1)..(25): SEQ ID NO: 971; WAN024BFD; Start 66; Stop 90
gaagctttcaaataaatttgggata

SEQ ID NO: 279239 - DNA, 25 bp, Artificial
  probe
  misc_feature (1)..(25): SEQ ID NO: 971; WAN024BFD; Start 62; Stop 86
tagagaagctttcaaataaatttgg

SEQ ID NO: 279240 - DNA, 25 bp, Artificial
  probe
  misc_feature (1)..(25): SEQ ID NO: 971; WAN024BFD; Start 15; Stop 39
tgatgataaagttcagatctatgaa

SEQ ID NO: 279241 - DNA, 25 bp, Artificial
  probe
  misc_feature (1)..(25): SEQ ID NO: 971; WAN024BFD; Start 67; Stop 91
aagctttcaaataaatttgggataa

SEQ ID NO: 279242 - DNA, 25 bp, Artificial
  probe
  misc_feature (1)..(25): SEQ ID NO: 971; WAN024BFD; Start 59; Stop 83
gcttagagaagctttcaaataaatt

SEQ ID NO: 279243 - DNA, 25 bp, Artificial
  probe
  misc_feature (1)..(25): SEQ ID NO: 972; WAN024D96; Start 464; Stop 488
tagacttgatgaactatacacgagg

SEQ ID NO: 279244 - DNA, 25 bp, Artificial
  probe
  misc_feature (1)..(25): SEQ ID NO: 972; WAN024D96; Start 467; Stop 491
acttgatgaactatacacgaggctt

SEQ ID NO: 279245 - DNA, 25 bp, Artificial
  probe
  misc_feature (1)..(25): SEQ ID NO: 972; WAN024D96; Start 463; Stop 487
ttagacttgatgaactatacacgag

SEQ ID NO: 279246 - DNA, 25 bp, Artificial
  probe
  misc_feature (1)..(25): SEQ ID NO: 972; WAN024D96; Start 462; Stop 486
cttagacttgatgaactatacacga

SEQ ID NO: 279247 - DNA, 25 bp, Artificial
  probe
  misc_feature (1)..(25): SEQ ID NO: 972; WAN024D96; Start 461; Stop 485
tcttagacttgatgaactatacacg

SEQ ID NO: 279248 - DNA, 25 bp, Artificial
  probe
  misc_feature (1)..(25): SEQ ID NO: 972; WAN024D96; Start 466; Stop 490
gacttgatgaactatacacgaggct

SEQ ID NO: 279249 - DNA, 25 bp, Artificial
  probe
  misc_feature (1)..(25): SEQ ID NO: 972; WAN024D96; Start 465; Stop 489
agacttgatgaactatacacgaggc

SEQ ID NO: 279250 - DNA, 25 bp, Artificial
  probe
  misc_feature (1)..(25): SEQ ID NO: 972; WAN024D96; Start 231; Stop 255
tatccatctaatcaaggaagttgcg

SEQ ID NO: 279251 - DNA, 25 bp, Artificial
  probe
  misc_feature (1)..(25): SEQ ID NO: 972; WAN024D96; Start 454; Stop 478
caggatgtcttagacttgatgaact

SEQ ID NO: 279252 - DNA, 25 bp, Artificial
  probe
  misc_feature (1)..(25): SEQ ID NO: 972; WAN024D96; Start 230; Stop 254
atatccatctaatcaaggaagttgc

SEQ ID NO: 279253 - DNA, 25 bp, Artificial
  probe
  misc_feature (1)..(25): SEQ ID NO: 972; WAN024D96; Start 469; Stop 493
ttgatgaactatacacgaggcttta

SEQ ID NO: 279254 - DNA, 25 bp, Artificial
  probe
  misc_feature (1)..(25): SEQ ID NO: 972; WAN024D96; Start 18; Stop 42
agtaatgccaagaagtttagaggag

SEQ ID NO: 279255 - DNA, 25 bp, Artificial
  probe
  misc_feature (1)..(25): SEQ ID NO: 972; WAN024D96; Start 17; Stop 41
cagtaatgccaagaagtttagagga

SEQ ID NO: 279256 - DNA, 25 bp, Artificial
  probe
  misc_feature (1)..(25): SEQ ID NO: 972; WAN024D96; Start 16; Stop 40
tcagtaatgccaagaagtttagagg

SEQ ID NO: 279257 - DNA, 25 bp, Artificial
  probe
  misc_feature (1)..(25): SEQ ID NO: 972; WAN024D96; Start 470; Stop 494
tgatgaactatacacgaggctttaa

SEQ ID NO: 279258 - DNA, 25 bp, Artificial
  probe
  misc_feature (1)..(25): SEQ ID NO: 972; WAN024D96; Start 468; Stop 492
cttgatgaactatacacgaggcttt

SEQ ID NO: 279259 - DNA, 25 bp, Artificial
  probe
  misc_feature (1)..(25): SEQ ID NO: 972; WAN024D96; Start 12; Stop 36
cgtttcagtaatgccaagaagttta

SEQ ID NO: 279260 - DNA, 25 bp, Artificial
  probe
  misc_feature (1)..(25): SEQ ID NO: 972; WAN024D96; Start 455; Stop 479
aggatgtcttagacttgatgaacta

SEQ ID NO: 279261 - DNA, 25 bp, Artificial
  probe
  misc_feature (1)..(25): SEQ ID NO: 972; WAN024D96; Start 8; Stop 32
taatcgtttcagtaatgccaagaag

SEQ ID NO: 279262 - DNA, 25 bp, Artificial
  probe
  misc_feature (1)..(25): SEQ ID NO: 972; WAN024D96; Start 453; Stop 477
gcaggatgtcttagacttgatgaac

SEQ ID NO: 279263 - DNA, 25 bp, Artificial
  probe
  misc_feature (1)..(25): SEQ ID NO: 972; WAN024D96; Start 19; Stop 43
gtaatgccaagaagtttagaggagg

SEQ ID NO: 279264 - DNA, 25 bp, Artificial
  probe
  misc_feature (1)..(25): SEQ ID NO: 972; WAN024D96; Start 217; Stop 241
tctccagaagagtatatccatctaa

SEQ ID NO: 279265 - DNA, 25 bp, Artificial
  probe
  misc_feature (1)..(25): SEQ ID NO: 972; WAN024D96; Start 452; Stop 476
agcaggatgtcttagacttgatgaa

SEQ ID NO: 279266 - DNA, 25 bp, Artificial
  probe
  misc_feature (1)..(25): SEQ ID NO: 972; WAN024D96; Start 7; Stop 31
ttaatcgtttcagtaatgccaagaa

SEQ ID NO: 279267 - DNA, 25 bp, Artificial
  probe
  misc_feature (1)..(25): SEQ ID NO: 972; WAN024D96; Start 15; Stop 39
ttcagtaatgccaagaagtttagag

SEQ ID NO: 279268 - DNA, 25 bp, Artificial
  probe
  misc_feature (1)..(25): SEQ ID NO: 972; WAN024D96; Start 100; Stop 124
gactatctgcctaaagaagcgattt

SEQ ID NO: 279269 - DNA, 25 bp, Artificial
  probe
  misc_feature (1)..(25): SEQ ID NO: 972; WAN024D96; Start 379; Stop 403
atgatggaaatcttgtcagagttga

SEQ ID NO: 279270 - DNA, 25 bp, Artificial
  probe
  misc_feature (1)..(25): SEQ ID NO: 972; WAN024D96; Start 10; Stop 34
atcgtttcagtaatgccaagaagtt

SEQ ID NO: 279271 - DNA, 25 bp, Artificial
  probe
  misc_feature (1)..(25): SEQ ID NO: 972; WAN024D96; Start 9; Stop 33
aatcgtttcagtaatgccaagaagt

SEQ ID NO: 279272 - DNA, 25 bp, Artificial
  probe
  misc_feature (1)..(25): SEQ ID NO: 972; WAN024D96; Start 451; Stop 475
gagcaggatgtcttagacttgatga

SEQ ID NO: 279273 - DNA, 25 bp, Artificial
  probe
  misc_feature (1)..(25): SEQ ID NO: 972; WAN024D96; Start 13; Stop 37
gtttcagtaatgccaagaagtttag

SEQ ID NO: 279274 - DNA, 25 bp, Artificial
  probe
  misc_feature (1)..(25): SEQ ID NO: 972; WAN024D96; Start 216; Stop 240
ttctccagaagagtatatccatcta

SEQ ID NO: 279275 - DNA, 25 bp, Artificial
  probe
  misc_feature (1)..(25): SEQ ID NO: 972; WAN024D96; Start 14; Stop 38
tttcagtaatgccaagaagtttaga

SEQ ID NO: 279276 - DNA, 25 bp, Artificial
  probe
  misc_feature (1)..(25): SEQ ID NO: 973; WAN024DX4; Start 985; Stop 1009
ctagatgtctatatcgcagtcttgg

SEQ ID NO: 279277 - DNA, 25 bp, Artificial
  probe
  misc_feature (1)..(25): SEQ ID NO: 973; WAN024DX4; Start 984; Stop 1008
cctagatgtctatatcgcagtcttg

SEQ ID NO: 279278 - DNA, 25 bp, Artificial
  probe
  misc_feature (1)..(25): SEQ ID NO: 973; WAN024DX4; Start 463; Stop 487
gaaatcggtattcaaggtgtcaaat

SEQ ID NO: 279279 - DNA, 25 bp, Artificial
  probe
  misc_feature (1)..(25): SEQ ID NO: 973; WAN024DX4; Start 464; Stop 488
aaatcggtattcaaggtgtcaaatt

SEQ ID NO: 279280 - DNA, 25 bp, Artificial
  probe
  misc_feature (1)..(25): SEQ ID NO: 973; WAN024DX4; Start 465; Stop 489
aatcggtattcaaggtgtcaaattg

SEQ ID NO: 279281 - DNA, 25 bp, Artificial
  probe
  misc_feature (1)..(25): SEQ ID NO: 973; WAN024DX4; Start 536; Stop 560
aagccttgattgactatttgacacc

SEQ ID NO: 279282 - DNA, 25 bp, Artificial
  probe
  misc_feature (1)..(25): SEQ ID NO: 973; WAN024DX4; Start 462; Stop 486
ggaaatcggtattcaaggtgtcaaa

SEQ ID NO: 279283 - DNA, 25 bp, Artificial
  probe
  misc_feature (1)..(25): SEQ ID NO: 973; WAN024DX4; Start 983; Stop 1007
ccctagatgtctatatcgcagtctt

SEQ ID NO: 279284 - DNA, 25 bp, Artificial
  probe
  misc_feature (1)..(25): SEQ ID NO: 973; WAN024DX4; Start 459; Stop 483
gaaggaaatcggtattcaaggtgtc

SEQ ID NO: 279285 - DNA, 25 bp, Artificial
  probe
  misc_feature (1)..(25): SEQ ID NO: 973; WAN024DX4; Start 986; Stop 1010
tagatgtctatatcgcagtcttggg

SEQ ID NO: 279286 - DNA, 25 bp, Artificial
  probe
  misc_feature (1)..(25): SEQ ID NO: 973; WAN024DX4; Start 612; Stop 636
tcttcgtgtcttggactctaaggaa

SEQ ID NO: 279287 - DNA, 25 bp, Artificial
  probe
  misc_feature (1)..(25): SEQ ID NO: 973; WAN024DX4; Start 540; Stop 564
cttgattgactatttgacaccgctc

SEQ ID NO: 279288 - DNA, 25 bp, Artificial
  probe
  misc_feature (1)..(25): SEQ ID NO: 973; WAN024DX4; Start 535; Stop 559
caagccttgattgactatttgacac

SEQ ID NO: 279289 - DNA, 25 bp, Artificial
  probe
  misc_feature (1)..(25): SEQ ID NO: 973; WAN024DX4; Start 608; Stop 632
atcctcttcgtgtcttggactctaa

SEQ ID NO: 279290 - DNA, 25 bp, Artificial
  probe
  misc_feature (1)..(25): SEQ ID NO: 973; WAN024DX4; Start 607; Stop 631
aatcctcttcgtgtcttggactcta

SEQ ID NO: 279291 - DNA, 25 bp, Artificial
  probe
  misc_feature (1)..(25): SEQ ID NO: 973; WAN024DX4; Start 461; Stop 485
aggaaatcggtattcaaggtgtcaa

SEQ ID NO: 279292 - DNA, 25 bp, Artificial
  probe
  misc_feature (1)..(25): SEQ ID NO: 973; WAN024DX4; Start 460; Stop 484
aaggaaatcggtattcaaggtgtca

SEQ ID NO: 279293 - DNA, 25 bp, Artificial
  probe
  misc_feature (1)..(25): SEQ ID NO: 973; WAN024DX4; Start 865; Stop 889
gatggtttggttgcttactttggag

SEQ ID NO: 279294 - DNA, 25 bp, Artificial
  probe
  misc_feature (1)..(25): SEQ ID NO: 973; WAN024DX4; Start 466; Stop 490
atcggtattcaaggtgtcaaattgc

SEQ ID NO: 279295 - DNA, 25 bp, Artificial
  probe
  misc_feature (1)..(25): SEQ ID NO: 973; WAN024DX4; Start 611; Stop 635
ctcttcgtgtcttggactctaagga

SEQ ID NO: 279296 - DNA, 25 bp, Artificial
  probe
  misc_feature (1)..(25): SEQ ID NO: 973; WAN024DX4; Start 534; Stop 558
ccaagccttgattgactatttgaca

SEQ ID NO: 279297 - DNA, 25 bp, Artificial
  probe
  misc_feature (1)..(25): SEQ ID NO: 973; WAN024DX4; Start 609; Stop 633
tcctcttcgtgtcttggactctaag

SEQ ID NO: 279298 - DNA, 25 bp, Artificial
  probe
  misc_feature (1)..(25): SEQ ID NO: 973; WAN024DX4; Start 780; Stop 804
tctggactactacaaccacaccatt

SEQ ID NO: 279299 - DNA, 25 bp, Artificial
  probe
  misc_feature (1)..(25): SEQ ID NO: 973; WAN024DX4; Start 613; Stop 637
cttcgtgtcttggactctaaggaaa

SEQ ID NO: 279300 - DNA, 25 bp, Artificial
  probe
  misc_feature (1)..(25): SEQ ID NO: 973; WAN024DX4; Start 541; Stop 565
ttgattgactatttgacaccgctca

SEQ ID NO: 279301 - DNA, 25 bp, Artificial
  probe
  misc_feature (1)..(25): SEQ ID NO: 973; WAN024DX4; Start 1192; Stop 1216
aagaacaaccaaacccgagaagaag

SEQ ID NO: 279302 - DNA, 25 bp, Artificial
  probe
  misc_feature (1)..(25): SEQ ID NO: 973; WAN024DX4; Start 539; Stop 563
ccttgattgactatttgacaccgct

SEQ ID NO: 279303 - DNA, 25 bp, Artificial
  probe
  misc_feature (1)..(25): SEQ ID NO: 973; WAN024DX4; Start 537; Stop 561
agccttgattgactatttgacaccg

SEQ ID NO: 279304 - DNA, 25 bp, Artificial
  probe
  misc_feature (1)..(25): SEQ ID NO: 973; WAN024DX4; Start 533; Stop 557
gccaagccttgattgactatttgac

SEQ ID NO: 279305 - DNA, 25 bp, Artificial
  probe
  misc_feature (1)..(25): SEQ ID NO: 973; WAN024DX4; Start 982; Stop 1006
gccctagatgtctatatcgcagtct

SEQ ID NO: 279306 - DNA, 25 bp, Artificial
  probe
  misc_feature (1)..(25): SEQ ID NO: 973; WAN024DX4; Start 1061; Stop 1085
aaggtttcaaagcagagcgtgatta

SEQ ID NO: 279307 - DNA, 25 bp, Artificial
  probe
  misc_feature (1)..(25): SEQ ID NO: 973; WAN024DX4; Start 781; Stop 805
ctggactactacaaccacaccattt

SEQ ID NO: 279308 - DNA, 25 bp, Artificial
  probe
  misc_feature (1)..(25): SEQ ID NO: 973; WAN024DX4; Start 779; Stop 803
gtctggactactacaaccacaccat

SEQ ID NO: 279309 - DNA, 25 bp, Artificial
  probe
  misc_feature (1)..(25): SEQ ID NO: 974; WAN024DXC; Start 115; Stop 139
tatgctgttactctactctatgtgg

SEQ ID NO: 279310 - DNA, 25 bp, Artificial
  probe
  misc_feature (1)..(25): SEQ ID NO: 974; WAN024DXC; Start 249; Stop 273
gttcttatctctggtcgttcaattc

SEQ ID NO: 279311 - DNA, 25 bp, Artificial
  probe
  misc_feature (1)..(25): SEQ ID NO: 974; WAN024DXC; Start 254; Stop 278
tatctctggtcgttcaattcttctt

SEQ ID NO: 279312 - DNA, 25 bp, Artificial
  probe
  misc_feature (1)..(25): SEQ ID NO: 974; WAN024DXC; Start 253; Stop 277
ttatctctggtcgttcaattcttct

SEQ ID NO: 279313 - DNA, 25 bp, Artificial
  probe
  misc_feature (1)..(25): SEQ ID NO: 974; WAN024DXC; Start 251; Stop 275
tcttatctctggtcgttcaattctt

SEQ ID NO: 279314 - DNA, 25 bp, Artificial
  probe
  misc_feature (1)..(25): SEQ ID NO: 974; WAN024DXC; Start 250; Stop 274
ttcttatctctggtcgttcaattct

SEQ ID NO: 279315 - DNA, 25 bp, Artificial
  probe
  misc_feature (1)..(25): SEQ ID NO: 974; WAN024DXC; Start 252; Stop 276
cttatctctggtcgttcaattcttc

SEQ ID NO: 279316 - DNA, 25 bp, Artificial
  probe
  misc_feature (1)..(25): SEQ ID NO: 974; WAN024DXC; Start 113; Stop 137
cctatgctgttactctactctatgt

SEQ ID NO: 279317 - DNA, 25 bp, Artificial
  probe
  misc_feature (1)..(25): SEQ ID NO: 974; WAN024DXC; Start 248; Stop 272
ggttcttatctctggtcgttcaatt

SEQ ID NO: 279318 - DNA, 25 bp, Artificial
  probe
  misc_feature (1)..(25): SEQ ID NO: 974; WAN024DXC; Start 247; Stop 271
tggttcttatctctggtcgttcaat

SEQ ID NO: 279319 - DNA, 25 bp, Artificial
  probe
  misc_feature (1)..(25): SEQ ID NO: 974; WAN024DXC; Start 255; Stop 279
atctctggtcgttcaattcttcttg

SEQ ID NO: 279320 - DNA, 25 bp, Artificial
  probe
  misc_feature (1)..(25): SEQ ID NO: 974; WAN024DXC; Start 114; Stop 138
ctatgctgttactctactctatgtg

SEQ ID NO: 279321 - DNA, 25 bp, Artificial
  probe
  misc_feature (1)..(25): SEQ ID NO: 974; WAN024DXC; Start 265; Stop 289
gttcaattcttcttgccagatgatc

SEQ ID NO: 279322 - DNA, 25 bp, Artificial
  probe
  misc_feature (1)..(25): SEQ ID NO: 974; WAN024DXC; Start 269; Stop 293
aattcttcttgccagatgatccttc

SEQ ID NO: 279323 - DNA, 25 bp, Artificial
  probe
  misc_feature (1)..(25): SEQ ID NO: 974; WAN024DXC; Start 246; Stop 270
ttggttcttatctctggtcgttcaa

SEQ ID NO: 279324 - DNA, 25 bp, Artificial
  probe
  misc_feature (1)..(25): SEQ ID NO: 974; WAN024DXC; Start 268; Stop 292
caattcttcttgccagatgatcctt

SEQ ID NO: 279325 - DNA, 25 bp, Artificial
  probe
  misc_feature (1)..(25): SEQ ID NO: 974; WAN024DXC; Start 266; Stop 290
ttcaattcttcttgccagatgatcc

SEQ ID NO: 279326 - DNA, 25 bp, Artificial
  probe
  misc_feature (1)..(25): SEQ ID NO: 974; WAN024DXC; Start 264; Stop 288
cgttcaattcttcttgccagatgat

SEQ ID NO: 279327 - DNA, 25 bp, Artificial
  probe
  misc_feature (1)..(25): SEQ ID NO: 974; WAN024DXC; Start 274; Stop 298
ttcttgccagatgatccttcagtaa

SEQ ID NO: 279328 - DNA, 25 bp, Artificial
  probe
  misc_feature (1)..(25): SEQ ID NO: 974; WAN024DXC; Start 579; Stop 603
ctacagtatttctcttcacgctttg

SEQ ID NO: 279329 - DNA, 25 bp, Artificial
  probe
  misc_feature (1)..(25): SEQ ID NO: 974; WAN024DXC; Start 578; Stop 602
tctacagtatttctcttcacgcttt

SEQ ID NO: 279330 - DNA, 25 bp, Artificial
  probe
  misc_feature (1)..(25): SEQ ID NO: 974; WAN024DXC; Start 422; Stop 446
ctaagcaggacaatagtaaacgaac

SEQ ID NO: 279331 - DNA, 25 bp, Artificial
  probe
  misc_feature (1)..(25): SEQ ID NO: 974; WAN024DXC; Start 111; Stop 135
accctatgctgttactctactctat

SEQ ID NO: 279332 - DNA, 25 bp, Artificial
  probe
  misc_feature (1)..(25): SEQ ID NO: 974; WAN024DXC; Start 112; Stop 136
ccctatgctgttactctactctatg

SEQ ID NO: 279333 - DNA, 25 bp, Artificial
  probe
  misc_feature (1)..(25): SEQ ID NO: 974; WAN024DXC; Start 340; Stop 364
ttctcattctttgctgtggttattt

SEQ ID NO: 279334 - DNA, 25 bp, Artificial
  probe
  misc_feature (1)..(25): SEQ ID NO: 974; WAN024DXC; Start 339; Stop 363
tttctcattctttgctgtggttatt

SEQ ID NO: 279335 - DNA, 25 bp, Artificial
  probe
  misc_feature (1)..(25): SEQ ID NO: 974; WAN024DXC; Start 290; Stop 314
cttcagtaaatcagcaaatagcgac

SEQ ID NO: 279336 - DNA, 25 bp, Artificial
  probe
  misc_feature (1)..(25): SEQ ID NO: 974; WAN024DXC; Start 287; Stop 311
atccttcagtaaatcagcaaatagc

SEQ ID NO: 279337 - DNA, 25 bp, Artificial
  probe
  misc_feature (1)..(25): SEQ ID NO: 974; WAN024DXC; Start 110; Stop 134
caccctatgctgttactctactcta

SEQ ID NO: 279338 - DNA, 25 bp, Artificial
  probe
  misc_feature (1)..(25): SEQ ID NO: 974; WAN024DXC; Start 577; Stop 601
gtctacagtatttctcttcacgctt

SEQ ID NO: 279339 - DNA, 25 bp, Artificial
  probe
  misc_feature (1)..(25): SEQ ID NO: 974; WAN024DXC; Start 270; Stop 294
attcttcttgccagatgatccttca

SEQ ID NO: 279340 - DNA, 25 bp, Artificial
  probe
  misc_feature (1)..(25): SEQ ID NO: 974; WAN024DXC; Start 267; Stop 291
tcaattcttcttgccagatgatcct

SEQ ID NO: 279341 - DNA, 25 bp, Artificial
  probe
  misc_feature (1)..(25): SEQ ID NO: 974; WAN024DXC; Start 430; Stop 454
gacaatagtaaacgaaccctgattt

SEQ ID NO: 279342 - DNA, 25 bp, Artificial
  probe
  misc_feature (1)..(25): SEQ ID NO: 975; WAN024CTZ; Start 1657; Stop 1681
aaacgggtgattgataagtctgtag

SEQ ID NO: 279343 - DNA, 25 bp, Artificial
  probe
  misc_feature (1)..(25): SEQ ID NO: 975; WAN024CTZ; Start 646; Stop 670
ggtgtagaagatgcgagtaagaaat

SEQ ID NO: 279344 - DNA, 25 bp, Artificial
  probe
  misc_feature (1)..(25): SEQ ID NO: 975; WAN024CTZ; Start 647; Stop 671
gtgtagaagatgcgagtaagaaata

SEQ ID NO: 279345 - DNA, 25 bp, Artificial
  probe
  misc_feature (1)..(25): SEQ ID NO: 975; WAN024CTZ; Start 645; Stop 669
gggtgtagaagatgcgagtaagaaa

SEQ ID NO: 279346 - DNA, 25 bp, Artificial
  probe
  misc_feature (1)..(25): SEQ ID NO: 975; WAN024CTZ; Start 1658; Stop 1682
aacgggtgattgataagtctgtagc

SEQ ID NO: 279347 - DNA, 25 bp, Artificial
  probe
  misc_feature (1)..(25): SEQ ID NO: 975; WAN024CTZ; Start 1661; Stop 1685
gggtgattgataagtctgtagctga

SEQ ID NO: 279348 - DNA, 25 bp, Artificial
  probe
  misc_feature (1)..(25): SEQ ID NO: 975; WAN024CTZ; Start 1656; Stop 1680
aaaacgggtgattgataagtctgta

SEQ ID NO: 279349 - DNA, 25 bp, Artificial
  probe
  misc_feature (1)..(25): SEQ ID NO: 975; WAN024CTZ; Start 988; Stop 1012
aataatggctaccgcatttacacag

SEQ ID NO: 279350 - DNA, 25 bp, Artificial
  probe
  misc_feature (1)..(25): SEQ ID NO: 975; WAN024CTZ; Start 173; Stop 197
tccttatactaggtttgagtgcagg

SEQ ID NO: 279351 - DNA, 25 bp, Artificial
  probe
  misc_feature (1)..(25): SEQ ID NO: 975; WAN024CTZ; Start 989; Stop 1013
ataatggctaccgcatttacacaga

SEQ ID NO: 279352 - DNA, 25 bp, Artificial
  probe
  misc_feature (1)..(25): SEQ ID NO: 975; WAN024CTZ; Start 1660; Stop 1684
cgggtgattgataagtctgtagctg

SEQ ID NO: 279353 - DNA, 25 bp, Artificial
  probe
  misc_feature (1)..(25): SEQ ID NO: 975; WAN024CTZ; Start 2066; Stop 2090
atgataatttgtctgatattcgagg

SEQ ID NO: 279354 - DNA, 25 bp, Artificial
  probe
  misc_feature (1)..(25): SEQ ID NO: 975; WAN024CTZ; Start 1659; Stop 1683
acgggtgattgataagtctgtagct

SEQ ID NO: 279355 - DNA, 25 bp, Artificial
  probe
  misc_feature (1)..(25): SEQ ID NO: 975; WAN024CTZ; Start 2064; Stop 2088
agatgataatttgtctgatattcga

SEQ ID NO: 279356 - DNA, 25 bp, Artificial
  probe
  misc_feature (1)..(25): SEQ ID NO: 975; WAN024CTZ; Start 2065; Stop 2089
gatgataatttgtctgatattcgag

SEQ ID NO: 279357 - DNA, 25 bp, Artificial
  probe
  misc_feature (1)..(25): SEQ ID NO: 975; WAN024CTZ; Start 644; Stop 668
ggggtgtagaagatgcgagtaagaa

SEQ ID NO: 279358 - DNA, 25 bp, Artificial
  probe
  misc_feature (1)..(25): SEQ ID NO: 975; WAN024CTZ; Start 633; Stop 657
aaatggtgtgtggggtgtagaagat

SEQ ID NO: 279359 - DNA, 25 bp, Artificial
  probe
  misc_feature (1)..(25): SEQ ID NO: 975; WAN024CTZ; Start 625; Stop 649
tattttggaaatggtgtgtggggtg

SEQ ID NO: 279360 - DNA, 25 bp, Artificial
  probe
  misc_feature (1)..(25): SEQ ID NO: 975; WAN024CTZ; Start 1811; Stop 1835
gtgaccagtgggtaattggttatac

SEQ ID NO: 279361 - DNA, 25 bp, Artificial
  probe
  misc_feature (1)..(25): SEQ ID NO: 975; WAN024CTZ; Start 1810; Stop 1834
agtgaccagtgggtaattggttata

SEQ ID NO: 279362 - DNA, 25 bp, Artificial
  probe
  misc_feature (1)..(25): SEQ ID NO: 975; WAN024CTZ; Start 634; Stop 658
aatggtgtgtggggtgtagaagatg

SEQ ID NO: 279363 - DNA, 25 bp, Artificial
  probe
  misc_feature (1)..(25): SEQ ID NO: 975; WAN024CTZ; Start 632; Stop 656
gaaatggtgtgtggggtgtagaaga

SEQ ID NO: 279364 - DNA, 25 bp, Artificial
  probe
  misc_feature (1)..(25): SEQ ID NO: 975; WAN024CTZ; Start 1809; Stop 1833
aagtgaccagtgggtaattggttat

SEQ ID NO: 279365 - DNA, 25 bp, Artificial
  probe
  misc_feature (1)..(25): SEQ ID NO: 975; WAN024CTZ; Start 642; Stop 666
gtggggtgtagaagatgcgagtaag

SEQ ID NO: 279366 - DNA, 25 bp, Artificial
  probe
  misc_feature (1)..(25): SEQ ID NO: 975; WAN024CTZ; Start 643; Stop 667
tggggtgtagaagatgcgagtaaga

SEQ ID NO: 279367 - DNA, 25 bp, Artificial
  probe
  misc_feature (1)..(25): SEQ ID NO: 975; WAN024CTZ; Start 627; Stop 651
ttttggaaatggtgtgtggggtgta

SEQ ID NO: 279368 - DNA, 25 bp, Artificial
  probe
  misc_feature (1)..(25): SEQ ID NO: 975; WAN024CTZ; Start 2063; Stop 2087
cagatgataatttgtctgatattcg

SEQ ID NO: 279369 - DNA, 25 bp, Artificial
  probe
  misc_feature (1)..(25): SEQ ID NO: 975; WAN024CTZ; Start 1808; Stop 1832
caagtgaccagtgggtaattggtta

SEQ ID NO: 279370 - DNA, 25 bp, Artificial
  probe
  misc_feature (1)..(25): SEQ ID NO: 975; WAN024CTZ; Start 628; Stop 652
tttggaaatggtgtgtggggtgtag

SEQ ID NO: 279371 - DNA, 25 bp, Artificial
  probe
  misc_feature (1)..(25): SEQ ID NO: 975; WAN024CTZ; Start 2062; Stop 2086
acagatgataatttgtctgatattc

SEQ ID NO: 279372 - DNA, 25 bp, Artificial
  probe
  misc_feature (1)..(25): SEQ ID NO: 975; WAN024CTZ; Start 1995; Stop 2019
ttataagcaaaatggaattgcacca

SEQ ID NO: 279373 - DNA, 25 bp, Artificial
  probe
  misc_feature (1)..(25): SEQ ID NO: 975; WAN024CTZ; Start 1996; Stop 2020
tataagcaaaatggaattgcaccag

SEQ ID NO: 279374 - DNA, 25 bp, Artificial
  probe
  misc_feature (1)..(25): SEQ ID NO: 975; WAN024CTZ; Start 1807; Stop 1831
acaagtgaccagtgggtaattggtt

SEQ ID NO: 279375 - DNA, 25 bp, Artificial
  probe
  misc_feature (1)..(25): SEQ ID NO: 976; WAN024D7C; Start 188; Stop 212
aaccaagtattgccaagttagatga

SEQ ID NO: 279376 - DNA, 25 bp, Artificial
  probe
  misc_feature (1)..(25): SEQ ID NO: 976; WAN024D7C; Start 187; Stop 211
caaccaagtattgccaagttagatg

SEQ ID NO: 279377 - DNA, 25 bp, Artificial
  probe
  misc_feature (1)..(25): SEQ ID NO: 976; WAN024D7C; Start 186; Stop 210
tcaaccaagtattgccaagttagat

SEQ ID NO: 279378 - DNA, 25 bp, Artificial
  probe
  misc_feature (1)..(25): SEQ ID NO: 976; WAN024D7C; Start 185; Stop 209
gtcaaccaagtattgccaagttaga

SEQ ID NO: 279379 - DNA, 25 bp, Artificial
  probe
  misc_feature (1)..(25): SEQ ID NO: 976; WAN024D7C; Start 184; Stop 208
agtcaaccaagtattgccaagttag

SEQ ID NO: 279380 - DNA, 25 bp, Artificial
  probe
  misc_feature (1)..(25): SEQ ID NO: 976; WAN024D7C; Start 175; Stop 199
cctaagaccagtcaaccaagtattg

SEQ ID NO: 279381 - DNA, 25 bp, Artificial
  probe
  misc_feature (1)..(25): SEQ ID NO: 976; WAN024D7C; Start 183; Stop 207
cagtcaaccaagtattgccaagtta

SEQ ID NO: 279382 - DNA, 25 bp, Artificial
  probe
  misc_feature (1)..(25): SEQ ID NO: 976; WAN024D7C; Start 176; Stop 200
ctaagaccagtcaaccaagtattgc

SEQ ID NO: 279383 - DNA, 25 bp, Artificial
  probe
  misc_feature (1)..(25): SEQ ID NO: 976; WAN024D7C; Start 94; Stop 118
attgatggtgaggaatatgtcgaag

SEQ ID NO: 279384 - DNA, 25 bp, Artificial
  probe
  misc_feature (1)..(25): SEQ ID NO: 976; WAN024D7C; Start 174; Stop 198
gcctaagaccagtcaaccaagtatt

SEQ ID NO: 279385 - DNA, 25 bp, Artificial
  probe
  misc_feature (1)..(25): SEQ ID NO: 976; WAN024D7C; Start 93; Stop 117
tattgatggtgaggaatatgtcgaa

SEQ ID NO: 279386 - DNA, 25 bp, Artificial
  probe
  misc_feature (1)..(25): SEQ ID NO: 976; WAN024D7C; Start 107; Stop 131
aatatgtcgaaggcatcaatctgtc

SEQ ID NO: 279387 - DNA, 25 bp, Artificial
  probe
  misc_feature (1)..(25): SEQ ID NO: 976; WAN024D7C; Start 106; Stop 130
gaatatgtcgaaggcatcaatctgt

SEQ ID NO: 279388 - DNA, 25 bp, Artificial
  probe
  misc_feature (1)..(25): SEQ ID NO: 976; WAN024D7C; Start 813; Stop 837
aggaagtattgctctgggttatatt

SEQ ID NO: 279389 - DNA, 25 bp, Artificial
  probe
  misc_feature (1)..(25): SEQ ID NO: 976; WAN024D7C; Start 334; Stop 358
attgctttcccagacactttgatta

SEQ ID NO: 279390 - DNA, 25 bp, Artificial
  probe
  misc_feature (1)..(25): SEQ ID NO: 976; WAN024D7C; Start 165; Stop 189
ttctgaattgcctaagaccagtcaa

SEQ ID NO: 279391 - DNA, 25 bp, Artificial
  probe
  misc_feature (1)..(25): SEQ ID NO: 976; WAN024D7C; Start 177; Stop 201
taagaccagtcaaccaagtattgcc

SEQ ID NO: 279392 - DNA, 25 bp, Artificial
  probe
  misc_feature (1)..(25): SEQ ID NO: 976; WAN024D7C; Start 647; Stop 671
aaattatcaaggaaacaacggcttc

SEQ ID NO: 279393 - DNA, 25 bp, Artificial
  probe
  misc_feature (1)..(25): SEQ ID NO: 976; WAN024D7C; Start 646; Stop 670
gaaattatcaaggaaacaacggctt

SEQ ID NO: 279394 - DNA, 25 bp, Artificial
  probe
  misc_feature (1)..(25): SEQ ID NO: 976; WAN024D7C; Start 583; Stop 607
caaggtgtgattgaagtttacgaaa

SEQ ID NO: 279395 - DNA, 25 bp, Artificial
  probe
  misc_feature (1)..(25): SEQ ID NO: 976; WAN024D7C; Start 338; Stop 362
ctttcccagacactttgattacaag

SEQ ID NO: 279396 - DNA, 25 bp, Artificial
  probe
  misc_feature (1)..(25): SEQ ID NO: 976; WAN024D7C; Start 225; Stop 249
gctcaaagaacaaggctatacacat

SEQ ID NO: 279397 - DNA, 25 bp, Artificial
  probe
  misc_feature (1)..(25): SEQ ID NO: 976; WAN024D7C; Start 103; Stop 127
gaggaatatgtcgaaggcatcaatc

SEQ ID NO: 279398 - DNA, 25 bp, Artificial
  probe
  misc_feature (1)..(25): SEQ ID NO: 976; WAN024D7C; Start 301; Stop 325
cagtatatggtcgatgactatgagg

SEQ ID NO: 279399 - DNA, 25 bp, Artificial
  probe
  misc_feature (1)..(25): SEQ ID NO: 976; WAN024D7C; Start 815; Stop 839
gaagtattgctctgggttatattcc

SEQ ID NO: 279400 - DNA, 25 bp, Artificial
  probe
  misc_feature (1)..(25): SEQ ID NO: 976; WAN024D7C; Start 814; Stop 838
ggaagtattgctctgggttatattc

SEQ ID NO: 279401 - DNA, 25 bp, Artificial
  probe
  misc_feature (1)..(25): SEQ ID NO: 976; WAN024D7C; Start 105; Stop 129
ggaatatgtcgaaggcatcaatctg

SEQ ID NO: 279402 - DNA, 25 bp, Artificial
  probe
  misc_feature (1)..(25): SEQ ID NO: 976; WAN024D7C; Start 313; Stop 337
gatgactatgagggcttaaccattg

SEQ ID NO: 279403 - DNA, 25 bp, Artificial
  probe
  misc_feature (1)..(25): SEQ ID NO: 976; WAN024D7C; Start 164; Stop 188
cttctgaattgcctaagaccagtca

SEQ ID NO: 279404 - DNA, 25 bp, Artificial
  probe
  misc_feature (1)..(25): SEQ ID NO: 976; WAN024D7C; Start 108; Stop 132
atatgtcgaaggcatcaatctgtct

SEQ ID NO: 279405 - DNA, 25 bp, Artificial
  probe
  misc_feature (1)..(25): SEQ ID NO: 976; WAN024D7C; Start 104; Stop 128
aggaatatgtcgaaggcatcaatct

SEQ ID NO: 279406 - DNA, 25 bp, Artificial
  probe
  misc_feature (1)..(25): SEQ ID NO: 976; WAN024D7C; Start 335; Stop 359
ttgctttcccagacactttgattac

SEQ ID NO: 279407 - DNA, 25 bp, Artificial
  probe
  misc_feature (1)..(25): SEQ ID NO: 976; WAN024D7C; Start 648; Stop 672
aattatcaaggaaacaacggcttca

SEQ ID NO: 279408 - DNA, 25 bp, Artificial
  probe
  misc_feature (1)..(25): SEQ ID NO: 977; WAN024ATY; Start 86; Stop 110
ctgagtttgacagtcgtttgattac

SEQ ID NO: 279409 - DNA, 25 bp, Artificial
  probe
  misc_feature (1)..(25): SEQ ID NO: 977; WAN024ATY; Start 45; Stop 69
aaatgatgtcagtatctttgaggac

SEQ ID NO: 279410 - DNA, 25 bp, Artificial
  probe
  misc_feature (1)..(25): SEQ ID NO: 977; WAN024ATY; Start 85; Stop 109
gctgagtttgacagtcgtttgatta

SEQ ID NO: 279411 - DNA, 25 bp, Artificial
  probe
  misc_feature (1)..(25): SEQ ID NO: 977; WAN024ATY; Start 102; Stop 126
tttgattacgacaggggacttattt

SEQ ID NO: 279412 - DNA, 25 bp, Artificial
  probe
  misc_feature (1)..(25): SEQ ID NO: 977; WAN024ATY; Start 103; Stop 127
ttgattacgacaggggacttatttg

SEQ ID NO: 279413 - DNA, 25 bp, Artificial
  probe
  misc_feature (1)..(25): SEQ ID NO: 977; WAN024ATY; Start 101; Stop 125
gtttgattacgacaggggacttatt

SEQ ID NO: 279414 - DNA, 25 bp, Artificial
  probe
  misc_feature (1)..(25): SEQ ID NO: 977; WAN024ATY; Start 155; Stop 179
atgactttatcgaaagagcctttga

SEQ ID NO: 279415 - DNA, 25 bp, Artificial
  probe
  misc_feature (1)..(25): SEQ ID NO: 977; WAN024ATY; Start 154; Stop 178
catgactttatcgaaagagcctttg

SEQ ID NO: 279416 - DNA, 25 bp, Artificial
  probe
  misc_feature (1)..(25): SEQ ID NO: 977; WAN024ATY; Start 156; Stop 180
tgactttatcgaaagagcctttgaa

SEQ ID NO: 279417 - DNA, 25 bp, Artificial
  probe
  misc_feature (1)..(25): SEQ ID NO: 977; WAN024ATY; Start 115; Stop 139
ggggacttatttgtgcctctaaaag

SEQ ID NO: 279418 - DNA, 25 bp, Artificial
  probe
  misc_feature (1)..(25): SEQ ID NO: 977; WAN024ATY; Start 153; Stop 177
ccatgactttatcgaaagagccttt

SEQ ID NO: 279419 - DNA, 25 bp, Artificial
  probe
  misc_feature (1)..(25): SEQ ID NO: 977; WAN024ATY; Start 87; Stop 111
tgagtttgacagtcgtttgattacg

SEQ ID NO: 279420 - DNA, 25 bp, Artificial
  probe
  misc_feature (1)..(25): SEQ ID NO: 977; WAN024ATY; Start 118; Stop 142
gacttatttgtgcctctaaaaggtg

SEQ ID NO: 279421 - DNA, 25 bp, Artificial
  probe
  misc_feature (1)..(25): SEQ ID NO: 977; WAN024ATY; Start 105; Stop 129
gattacgacaggggacttatttgtg

SEQ ID NO: 279422 - DNA, 25 bp, Artificial
  probe
  misc_feature (1)..(25): SEQ ID NO: 977; WAN024ATY; Start 44; Stop 68
aaaatgatgtcagtatctttgagga

SEQ ID NO: 279423 - DNA, 25 bp, Artificial
  probe
  misc_feature (1)..(25): SEQ ID NO: 977; WAN024ATY; Start 117; Stop 141
ggacttatttgtgcctctaaaaggt

SEQ ID NO: 279424 - DNA, 25 bp, Artificial
  probe
  misc_feature (1)..(25): SEQ ID NO: 977; WAN024ATY; Start 104; Stop 128
tgattacgacaggggacttatttgt

SEQ ID NO: 279425 - DNA, 25 bp, Artificial
  probe
  misc_feature (1)..(25): SEQ ID NO: 977; WAN024ATY; Start 54; Stop 78
cagtatctttgaggacactcagtta

SEQ ID NO: 279426 - DNA, 25 bp, Artificial
  probe
  misc_feature (1)..(25): SEQ ID NO: 977; WAN024ATY; Start 116; Stop 140
gggacttatttgtgcctctaaaagg

SEQ ID NO: 279427 - DNA, 25 bp, Artificial
  probe
  misc_feature (1)..(25): SEQ ID NO: 977; WAN024ATY; Start 58; Stop 82
atctttgaggacactcagttagaaa

SEQ ID NO: 279428 - DNA, 25 bp, Artificial
  probe
  misc_feature (1)..(25): SEQ ID NO: 977; WAN024ATY; Start 56; Stop 80
gtatctttgaggacactcagttaga

SEQ ID NO: 279429 - DNA, 25 bp, Artificial
  probe
  misc_feature (1)..(25): SEQ ID NO: 977; WAN024ATY; Start 55; Stop 79
agtatctttgaggacactcagttag

SEQ ID NO: 279430 - DNA, 25 bp, Artificial
  probe
  misc_feature (1)..(25): SEQ ID NO: 977; WAN024ATY; Start 119; Stop 143
acttatttgtgcctctaaaaggtgc

SEQ ID NO: 279431 - DNA, 25 bp, Artificial
  probe
  misc_feature (1)..(25): SEQ ID NO: 977; WAN024ATY; Start 114; Stop 138
aggggacttatttgtgcctctaaaa

SEQ ID NO: 279432 - DNA, 25 bp, Artificial
  probe
  misc_feature (1)..(25): SEQ ID NO: 977; WAN024ATY; Start 57; Stop 81
tatctttgaggacactcagttagaa

SEQ ID NO: 279433 - DNA, 25 bp, Artificial
  probe
  misc_feature (1)..(25): SEQ ID NO: 977; WAN024ATY; Start 53; Stop 77
tcagtatctttgaggacactcagtt

SEQ ID NO: 279434 - DNA, 25 bp, Artificial
  probe
  misc_feature (1)..(25): SEQ ID NO: 977; WAN024ATY; Start 52; Stop 76
gtcagtatctttgaggacactcagt

SEQ ID NO: 279435 - DNA, 25 bp, Artificial
  probe
  misc_feature (1)..(25): SEQ ID NO: 977; WAN024ATY; Start 113; Stop 137
caggggacttatttgtgcctctaaa

SEQ ID NO: 279436 - DNA, 25 bp, Artificial
  probe
  misc_feature (1)..(25): SEQ ID NO: 977; WAN024ATY; Start 47; Stop 71
atgatgtcagtatctttgaggacac

SEQ ID NO: 279437 - DNA, 25 bp, Artificial
  probe
  misc_feature (1)..(25): SEQ ID NO: 977; WAN024ATY; Start 46; Stop 70
aatgatgtcagtatctttgaggaca

SEQ ID NO: 279438 - DNA, 25 bp, Artificial
  probe
  misc_feature (1)..(25): SEQ ID NO: 977; WAN024ATY; Start 49; Stop 73
gatgtcagtatctttgaggacactc

SEQ ID NO: 279439 - DNA, 25 bp, Artificial
  probe
  misc_feature (1)..(25): SEQ ID NO: 977; WAN024ATY; Start 120; Stop 144
cttatttgtgcctctaaaaggtgcg

SEQ ID NO: 279440 - DNA, 25 bp, Artificial
  probe
  misc_feature (1)..(25): SEQ ID NO: 977; WAN024ATY; Start 50; Stop 74
atgtcagtatctttgaggacactca

SEQ ID NO: 279441 - DNA, 25 bp, Artificial
  probe
  misc_feature (1)..(25): SEQ ID NO: 978; WAN024CZO; Start 1280; Stop 1304
ttgaagtgcggattgtctatgataa

SEQ ID NO: 279442 - DNA, 25 bp, Artificial
  probe
  misc_feature (1)..(25): SEQ ID NO: 978; WAN024CZO; Start 1279; Stop 1303
gttgaagtgcggattgtctatgata

SEQ ID NO: 279443 - DNA, 25 bp, Artificial
  probe
  misc_feature (1)..(25): SEQ ID NO: 978; WAN024CZO; Start 613; Stop 637
ccttccttatcagatacgacatcag

SEQ ID NO: 279444 - DNA, 25 bp, Artificial
  probe
  misc_feature (1)..(25): SEQ ID NO: 978; WAN024CZO; Start 614; Stop 638
cttccttatcagatacgacatcagc

SEQ ID NO: 279445 - DNA, 25 bp, Artificial
  probe
  misc_feature (1)..(25): SEQ ID NO: 978; WAN024CZO; Start 764; Stop 788
accgtacctataatgatccaacttc

SEQ ID NO: 279446 - DNA, 25 bp, Artificial
  probe
  misc_feature (1)..(25): SEQ ID NO: 978; WAN024CZO; Start 762; Stop 786
gaaccgtacctataatgatccaact

SEQ ID NO: 279447 - DNA, 25 bp, Artificial
  probe
  misc_feature (1)..(25): SEQ ID NO: 978; WAN024CZO; Start 761; Stop 785
tgaaccgtacctataatgatccaac

SEQ ID NO: 279448 - DNA, 25 bp, Artificial
  probe
  misc_feature (1)..(25): SEQ ID NO: 978; WAN024CZO; Start 765; Stop 789
ccgtacctataatgatccaacttct

SEQ ID NO: 279449 - DNA, 25 bp, Artificial
  probe
  misc_feature (1)..(25): SEQ ID NO: 978; WAN024CZO; Start 1082; Stop 1106
aagttgatgttgctattactggtgt

SEQ ID NO: 279450 - DNA, 25 bp, Artificial
  probe
  misc_feature (1)..(25): SEQ ID NO: 978; WAN024CZO; Start 763; Stop 787
aaccgtacctataatgatccaactt

SEQ ID NO: 279451 - DNA, 25 bp, Artificial
  probe
  misc_feature (1)..(25): SEQ ID NO: 978; WAN024CZO; Start 760; Stop 784
atgaaccgtacctataatgatccaa

SEQ ID NO: 279452 - DNA, 25 bp, Artificial
  probe
  misc_feature (1)..(25): SEQ ID NO: 978; WAN024CZO; Start 1139; Stop 1163
aagtcagacagattgattcaggaac

SEQ ID NO: 279453 - DNA, 25 bp, Artificial
  probe
  misc_feature (1)..(25): SEQ ID NO: 978; WAN024CZO; Start 1138; Stop 1162
caagtcagacagattgattcaggaa

SEQ ID NO: 279454 - DNA, 25 bp, Artificial
  probe
  misc_feature (1)..(25): SEQ ID NO: 978; WAN024CZO; Start 1141; Stop 1165
gtcagacagattgattcaggaacaa

SEQ ID NO: 279455 - DNA, 25 bp, Artificial
  probe
  misc_feature (1)..(25): SEQ ID NO: 978; WAN024CZO; Start 771; Stop 795
ctataatgatccaacttctcaggct

SEQ ID NO: 279456 - DNA, 25 bp, Artificial
  probe
  misc_feature (1)..(25): SEQ ID NO: 978; WAN024CZO; Start 274; Stop 298
tcgttatcaagtggacaagaaggtt

SEQ ID NO: 279457 - DNA, 25 bp, Artificial
  probe
  misc_feature (1)..(25): SEQ ID NO: 978; WAN024CZO; Start 766; Stop 790
cgtacctataatgatccaacttctc

SEQ ID NO: 279458 - DNA, 25 bp, Artificial
  probe
  misc_feature (1)..(25): SEQ ID NO: 978; WAN024CZO; Start 759; Stop 783
tatgaaccgtacctataatgatcca

SEQ ID NO: 279459 - DNA, 25 bp, Artificial
  probe
  misc_feature (1)..(25): SEQ ID NO: 978; WAN024CZO; Start 775; Stop 799
aatgatccaacttctcaggcttata

SEQ ID NO: 279460 - DNA, 25 bp, Artificial
  probe
  misc_feature (1)..(25): SEQ ID NO: 978; WAN024CZO; Start 774; Stop 798
taatgatccaacttctcaggcttat

SEQ ID NO: 279461 - DNA, 25 bp, Artificial
  probe
  misc_feature (1)..(25): SEQ ID NO: 978; WAN024CZO; Start 773; Stop 797
ataatgatccaacttctcaggctta

SEQ ID NO: 279462 - DNA, 25 bp, Artificial
  probe
  misc_feature (1)..(25): SEQ ID NO: 978; WAN024CZO; Start 772; Stop 796
tataatgatccaacttctcaggctt

SEQ ID NO: 279463 - DNA, 25 bp, Artificial
  probe
  misc_feature (1)..(25): SEQ ID NO: 978; WAN024CZO; Start 1136; Stop 1160
gacaagtcagacagattgattcagg

SEQ ID NO: 279464 - DNA, 25 bp, Artificial
  probe
  misc_feature (1)..(25): SEQ ID NO: 978; WAN024CZO; Start 1135; Stop 1159
ggacaagtcagacagattgattcag

SEQ ID NO: 279465 - DNA, 25 bp, Artificial
  probe
  misc_feature (1)..(25): SEQ ID NO: 978; WAN024CZO; Start 1140; Stop 1164
agtcagacagattgattcaggaaca

SEQ ID NO: 279466 - DNA, 25 bp, Artificial
  probe
  misc_feature (1)..(25): SEQ ID NO: 978; WAN024CZO; Start 1137; Stop 1161
acaagtcagacagattgattcagga

SEQ ID NO: 279467 - DNA, 25 bp, Artificial
  probe
  misc_feature (1)..(25): SEQ ID NO: 978; WAN024CZO; Start 1278; Stop 1302
agttgaagtgcggattgtctatgat

SEQ ID NO: 279468 - DNA, 25 bp, Artificial
  probe
  misc_feature (1)..(25): SEQ ID NO: 978; WAN024CZO; Start 814; Stop 838
ttagttagtgagttaggtactgctc

SEQ ID NO: 279469 - DNA, 25 bp, Artificial
  probe
  misc_feature (1)..(25): SEQ ID NO: 978; WAN024CZO; Start 273; Stop 297
ttcgttatcaagtggacaagaaggt

SEQ ID NO: 279470 - DNA, 25 bp, Artificial
  probe
  misc_feature (1)..(25): SEQ ID NO: 978; WAN024CZO; Start 815; Stop 839
tagttagtgagttaggtactgctcg

SEQ ID NO: 279471 - DNA, 25 bp, Artificial
  probe
  misc_feature (1)..(25): SEQ ID NO: 978; WAN024CZO; Start 813; Stop 837
attagttagtgagttaggtactgct

SEQ ID NO: 279472 - DNA, 25 bp, Artificial
  probe
  misc_feature (1)..(25): SEQ ID NO: 978; WAN024CZO; Start 777; Stop 801
tgatccaacttctcaggcttataat

SEQ ID NO: 279473 - DNA, 25 bp, Artificial
  probe
  misc_feature (1)..(25): SEQ ID NO: 978; WAN024CZO; Start 776; Stop 800
atgatccaacttctcaggcttataa

SEQ ID NO: 279474 - DNA, 25 bp, Artificial
  probe
  misc_feature (1)..(25): SEQ ID NO: 979; WAN024DHW; Start 76; Stop 100
atcacagatgaagtcttgaatacca

SEQ ID NO: 279475 - DNA, 25 bp, Artificial
  probe
  misc_feature (1)..(25): SEQ ID NO: 979; WAN024DHW; Start 78; Stop 102
cacagatgaagtcttgaataccact

SEQ ID NO: 279476 - DNA, 25 bp, Artificial
  probe
  misc_feature (1)..(25): SEQ ID NO: 979; WAN024DHW; Start 77; Stop 101
tcacagatgaagtcttgaataccac

SEQ ID NO: 279477 - DNA, 25 bp, Artificial
  probe
  misc_feature (1)..(25): SEQ ID NO: 979; WAN024DHW; Start 177; Stop 201
acttatcaaggaataccaagaagac

SEQ ID NO: 279478 - DNA, 25 bp, Artificial
  probe
  misc_feature (1)..(25): SEQ ID NO: 979; WAN024DHW; Start 81; Stop 105
agatgaagtcttgaataccactgac

SEQ ID NO: 279479 - DNA, 25 bp, Artificial
  probe
  misc_feature (1)..(25): SEQ ID NO: 979; WAN024DHW; Start 80; Stop 104
cagatgaagtcttgaataccactga

SEQ ID NO: 279480 - DNA, 25 bp, Artificial
  probe
  misc_feature (1)..(25): SEQ ID NO: 979; WAN024DHW; Start 79; Stop 103
acagatgaagtcttgaataccactg

SEQ ID NO: 279481 - DNA, 25 bp, Artificial
  probe
  misc_feature (1)..(25): SEQ ID NO: 979; WAN024DHW; Start 178; Stop 202
cttatcaaggaataccaagaagact

SEQ ID NO: 279482 - DNA, 25 bp, Artificial
  probe
  misc_feature (1)..(25): SEQ ID NO: 979; WAN024DHW; Start 82; Stop 106
gatgaagtcttgaataccactgacc

SEQ ID NO: 279483 - DNA, 25 bp, Artificial
  probe
  misc_feature (1)..(25): SEQ ID NO: 979; WAN024DHW; Start 179; Stop 203
ttatcaaggaataccaagaagactt

SEQ ID NO: 279484 - DNA, 25 bp, Artificial
  probe
  misc_feature (1)..(25): SEQ ID NO: 979; WAN024DHW; Start 176; Stop 200
aacttatcaaggaataccaagaaga

SEQ ID NO: 279485 - DNA, 25 bp, Artificial
  probe
  misc_feature (1)..(25): SEQ ID NO: 979; WAN024DHW; Start 174; Stop 198
agaacttatcaaggaataccaagaa

SEQ ID NO: 279486 - DNA, 25 bp, Artificial
  probe
  misc_feature (1)..(25): SEQ ID NO: 979; WAN024DHW; Start 173; Stop 197
aagaacttatcaaggaataccaaga

SEQ ID NO: 279487 - DNA, 25 bp, Artificial
  probe
  misc_feature (1)..(25): SEQ ID NO: 979; WAN024DHW; Start 175; Stop 199
gaacttatcaaggaataccaagaag

SEQ ID NO: 279488 - DNA, 25 bp, Artificial
  probe
  misc_feature (1)..(25): SEQ ID NO: 979; WAN024DHW; Start 235; Stop 259
atccagactagactagctgtgataa

SEQ ID NO: 279489 - DNA, 25 bp, Artificial
  probe
  misc_feature (1)..(25): SEQ ID NO: 979; WAN024DHW; Start 233; Stop 257
atatccagactagactagctgtgat

SEQ ID NO: 279490 - DNA, 25 bp, Artificial
  probe
  misc_feature (1)..(25): SEQ ID NO: 979; WAN024DHW; Start 234; Stop 258
tatccagactagactagctgtgata

SEQ ID NO: 279491 - DNA, 25 bp, Artificial
  probe
  misc_feature (1)..(25): SEQ ID NO: 979; WAN024DHW; Start 5; Stop 29
aattatccaacctactgctatttgc

SEQ ID NO: 279492 - DNA, 25 bp, Artificial
  probe
  misc_feature (1)..(25): SEQ ID NO: 979; WAN024DHW; Start 83; Stop 107
atgaagtcttgaataccactgaccg

SEQ ID NO: 279493 - DNA, 25 bp, Artificial
  probe
  misc_feature (1)..(25): SEQ ID NO: 979; WAN024DHW; Start 267; Stop 291
gcagggaactgaagataagtaacta

SEQ ID NO: 279494 - DNA, 25 bp, Artificial
  probe
  misc_feature (1)..(25): SEQ ID NO: 979; WAN024DHW; Start 232; Stop 256
gatatccagactagactagctgtga

SEQ ID NO: 279495 - DNA, 25 bp, Artificial
  probe
  misc_feature (1)..(25): SEQ ID NO: 979; WAN024DHW; Start 2; Stop 26
tgaaattatccaacctactgctatt

SEQ ID NO: 279496 - DNA, 25 bp, Artificial
  probe
  misc_feature (1)..(25): SEQ ID NO: 979; WAN024DHW; Start 1; Stop 25
atgaaattatccaacctactgctat

SEQ ID NO: 279497 - DNA, 25 bp, Artificial
  probe
  misc_feature (1)..(25): SEQ ID NO: 979; WAN024DHW; Start 73; Stop 97
accatcacagatgaagtcttgaata

SEQ ID NO: 279498 - DNA, 25 bp, Artificial
  probe
  misc_feature (1)..(25): SEQ ID NO: 979; WAN024DHW; Start 72; Stop 96
aaccatcacagatgaagtcttgaat

SEQ ID NO: 279499 - DNA, 25 bp, Artificial
  probe
  misc_feature (1)..(25): SEQ ID NO: 979; WAN024DHW; Start 75; Stop 99
catcacagatgaagtcttgaatacc

SEQ ID NO: 279500 - DNA, 25 bp, Artificial
  probe
  misc_feature (1)..(25): SEQ ID NO: 979; WAN024DHW; Start 74; Stop 98
ccatcacagatgaagtcttgaatac

SEQ ID NO: 279501 - DNA, 25 bp, Artificial
  probe
  misc_feature (1)..(25): SEQ ID NO: 979; WAN024DHW; Start 268; Stop 292
cagggaactgaagataagtaactaa

SEQ ID NO: 279502 - DNA, 25 bp, Artificial
  probe
  misc_feature (1)..(25): SEQ ID NO: 979; WAN024DHW; Start 184; Stop 208
aaggaataccaagaagacttgactt

SEQ ID NO: 279503 - DNA, 25 bp, Artificial
  probe
  misc_feature (1)..(25): SEQ ID NO: 979; WAN024DHW; Start 183; Stop 207
caaggaataccaagaagacttgact

SEQ ID NO: 279504 - DNA, 25 bp, Artificial
  probe
  misc_feature (1)..(25): SEQ ID NO: 979; WAN024DHW; Start 236; Stop 260
tccagactagactagctgtgataaa

SEQ ID NO: 279505 - DNA, 25 bp, Artificial
  probe
  misc_feature (1)..(25): SEQ ID NO: 979; WAN024DHW; Start 186; Stop 210
ggaataccaagaagacttgacttac

SEQ ID NO: 279506 - DNA, 25 bp, Artificial
  probe
  misc_feature (1)..(25): SEQ ID NO: 979; WAN024DHW; Start 185; Stop 209
aggaataccaagaagacttgactta

SEQ ID NO: 279507 - DNA, 25 bp, Artificial
  probe
  misc_feature (1)..(25): SEQ ID NO: 980; WAN024AU6; Start 563; Stop 587
ttaaggaggcagatctctaactaat

SEQ ID NO: 279508 - DNA, 25 bp, Artificial
  probe
  misc_feature (1)..(25): SEQ ID NO: 980; WAN024AU6; Start 5; Stop 29
aattattagaagagcgcatcctcaa

SEQ ID NO: 279509 - DNA, 25 bp, Artificial
  probe
  misc_feature (1)..(25): SEQ ID NO: 980; WAN024AU6; Start 6; Stop 30
attattagaagagcgcatcctcaag

SEQ ID NO: 279510 - DNA, 25 bp, Artificial
  probe
  misc_feature (1)..(25): SEQ ID NO: 980; WAN024AU6; Start 558; Stop 582
cgtatttaaggaggcagatctctaa

SEQ ID NO: 279511 - DNA, 25 bp, Artificial
  probe
  misc_feature (1)..(25): SEQ ID NO: 980; WAN024AU6; Start 557; Stop 581
tcgtatttaaggaggcagatctcta

SEQ ID NO: 279512 - DNA, 25 bp, Artificial
  probe
  misc_feature (1)..(25): SEQ ID NO: 980; WAN024AU6; Start 562; Stop 586
tttaaggaggcagatctctaactaa

SEQ ID NO: 279513 - DNA, 25 bp, Artificial
  probe
  misc_feature (1)..(25): SEQ ID NO: 980; WAN024AU6; Start 561; Stop 585
atttaaggaggcagatctctaacta

SEQ ID NO: 279514 - DNA, 25 bp, Artificial
  probe
  misc_feature (1)..(25): SEQ ID NO: 980; WAN024AU6; Start 560; Stop 584
tatttaaggaggcagatctctaact

SEQ ID NO: 279515 - DNA, 25 bp, Artificial
  probe
  misc_feature (1)..(25): SEQ ID NO: 980; WAN024AU6; Start 559; Stop 583
gtatttaaggaggcagatctctaac

SEQ ID NO: 279516 - DNA, 25 bp, Artificial
  probe
  misc_feature (1)..(25): SEQ ID NO: 980; WAN024AU6; Start 556; Stop 580
gtcgtatttaaggaggcagatctct

SEQ ID NO: 279517 - DNA, 25 bp, Artificial
  probe
  misc_feature (1)..(25): SEQ ID NO: 980; WAN024AU6; Start 7; Stop 31
ttattagaagagcgcatcctcaagg

SEQ ID NO: 279518 - DNA, 25 bp, Artificial
  probe
  misc_feature (1)..(25): SEQ ID NO: 980; WAN024AU6; Start 2; Stop 26
tgaaattattagaagagcgcatcct

SEQ ID NO: 279519 - DNA, 25 bp, Artificial
  probe
  misc_feature (1)..(25): SEQ ID NO: 980; WAN024AU6; Start 1; Stop 25
atgaaattattagaagagcgcatcc

SEQ ID NO: 279520 - DNA, 25 bp, Artificial
  probe
  misc_feature (1)..(25): SEQ ID NO: 980; WAN024AU6; Start 3; Stop 27
gaaattattagaagagcgcatcctc

SEQ ID NO: 279521 - DNA, 25 bp, Artificial
  probe
  misc_feature (1)..(25): SEQ ID NO: 980; WAN024AU6; Start 4; Stop 28
aaattattagaagagcgcatcctca

SEQ ID NO: 279522 - DNA, 25 bp, Artificial
  probe
  misc_feature (1)..(25): SEQ ID NO: 980; WAN024AU6; Start 8; Stop 32
tattagaagagcgcatcctcaagga

SEQ ID NO: 279523 - DNA, 25 bp, Artificial
  probe
  misc_feature (1)..(25): SEQ ID NO: 980; WAN024AU6; Start 9; Stop 33
attagaagagcgcatcctcaaggat

SEQ ID NO: 279524 - DNA, 25 bp, Artificial
  probe
  misc_feature (1)..(25): SEQ ID NO: 980; WAN024AU6; Start 22; Stop 46
atcctcaaggatgggcatatcttgg

SEQ ID NO: 279525 - DNA, 25 bp, Artificial
  probe
  misc_feature (1)..(25): SEQ ID NO: 981; WAN024D4W; Start 536; Stop 560
tcaacgatatggcttggattaacaa

SEQ ID NO: 279526 - DNA, 25 bp, Artificial
  probe
  misc_feature (1)..(25): SEQ ID NO: 981; WAN024D4W; Start 535; Stop 559
gtcaacgatatggcttggattaaca

SEQ ID NO: 279527 - DNA, 25 bp, Artificial
  probe
  misc_feature (1)..(25): SEQ ID NO: 981; WAN024D4W; Start 232; Stop 256
gttcatattgactggaccaactacc

SEQ ID NO: 279528 - DNA, 25 bp, Artificial
  probe
  misc_feature (1)..(25): SEQ ID NO: 981; WAN024D4W; Start 231; Stop 255
cgttcatattgactggaccaactac

SEQ ID NO: 279529 - DNA, 25 bp, Artificial
  probe
  misc_feature (1)..(25): SEQ ID NO: 981; WAN024D4W; Start 879; Stop 903
acatgattggaatagttacattgct

SEQ ID NO: 279530 - DNA, 25 bp, Artificial
  probe
  misc_feature (1)..(25): SEQ ID NO: 981; WAN024D4W; Start 791; Stop 815
tcacagcagataacgataactataa

SEQ ID NO: 279531 - DNA, 25 bp, Artificial
  probe
  misc_feature (1)..(25): SEQ ID NO: 981; WAN024D4W; Start 790; Stop 814
ttcacagcagataacgataactata

SEQ ID NO: 279532 - DNA, 25 bp, Artificial
  probe
  misc_feature (1)..(25): SEQ ID NO: 981; WAN024D4W; Start 82; Stop 106
acagcttcaagtccagattataagt

SEQ ID NO: 279533 - DNA, 25 bp, Artificial
  probe
  misc_feature (1)..(25): SEQ ID NO: 981; WAN024D4W; Start 878; Stop 902
aacatgattggaatagttacattgc

SEQ ID NO: 279534 - DNA, 25 bp, Artificial
  probe
  misc_feature (1)..(25): SEQ ID NO: 981; WAN024D4W; Start 1552; Stop 1576
ggactttctgattacctcgctatta

SEQ ID NO: 279535 - DNA, 25 bp, Artificial
  probe
  misc_feature (1)..(25): SEQ ID NO: 981; WAN024D4W; Start 1515; Stop 1539
tgagtgggatgattacaagaaagaa

SEQ ID NO: 279536 - DNA, 25 bp, Artificial
  probe
  misc_feature (1)..(25): SEQ ID NO: 981; WAN024D4W; Start 762; Stop 786
agtagtaggaaatgatggcaaagtt

SEQ ID NO: 279537 - DNA, 25 bp, Artificial
  probe
  misc_feature (1)..(25): SEQ ID NO: 981; WAN024D4W; Start 687; Stop 711
tattagtggtaacggaaacgaagat

SEQ ID NO: 279538 - DNA, 25 bp, Artificial
  probe
  misc_feature (1)..(25): SEQ ID NO: 981; WAN024D4W; Start 686; Stop 710
ttattagtggtaacggaaacgaaga

SEQ ID NO: 279539 - DNA, 25 bp, Artificial
  probe
  misc_feature (1)..(25): SEQ ID NO: 981; WAN024D4W; Start 1514; Stop 1538
ctgagtgggatgattacaagaaaga

SEQ ID NO: 279540 - DNA, 25 bp, Artificial
  probe
  misc_feature (1)..(25): SEQ ID NO: 981; WAN024D4W; Start 1408; Stop 1432
tttatgacacaggaagatttggaca

SEQ ID NO: 279541 - DNA, 25 bp, Artificial
  probe
  misc_feature (1)..(25): SEQ ID NO: 981; WAN024D4W; Start 1516; Stop 1540
gagtgggatgattacaagaaagaac

SEQ ID NO: 279542 - DNA, 25 bp, Artificial
  probe
  misc_feature (1)..(25): SEQ ID NO: 981; WAN024D4W; Start 83; Stop 107
cagcttcaagtccagattataagtt

SEQ ID NO: 279543 - DNA, 25 bp, Artificial
  probe
  misc_feature (1)..(25): SEQ ID NO: 981; WAN024D4W; Start 688; Stop 712
attagtggtaacggaaacgaagatt

SEQ ID NO: 279544 - DNA, 25 bp, Artificial
  probe
  misc_feature (1)..(25): SEQ ID NO: 981; WAN024D4W; Start 683; Stop 707
catttattagtggtaacggaaacga

SEQ ID NO: 279545 - DNA, 25 bp, Artificial
  probe
  misc_feature (1)..(25): SEQ ID NO: 981; WAN024D4W; Start 761; Stop 785
tagtagtaggaaatgatggcaaagt

SEQ ID NO: 279546 - DNA, 25 bp, Artificial
  probe
  misc_feature (1)..(25): SEQ ID NO: 981; WAN024D4W; Start 1409; Stop 1433
ttatgacacaggaagatttggacaa

SEQ ID NO: 279547 - DNA, 25 bp, Artificial
  probe
  misc_feature (1)..(25): SEQ ID NO: 981; WAN024D4W; Start 764; Stop 788
tagtaggaaatgatggcaaagttga

SEQ ID NO: 279548 - DNA, 25 bp, Artificial
  probe
  misc_feature (1)..(25): SEQ ID NO: 981; WAN024D4W; Start 763; Stop 787
gtagtaggaaatgatggcaaagttg

SEQ ID NO: 279549 - DNA, 25 bp, Artificial
  probe
  misc_feature (1)..(25): SEQ ID NO: 981; WAN024D4W; Start 685; Stop 709
tttattagtggtaacggaaacgaag

SEQ ID NO: 279550 - DNA, 25 bp, Artificial
  probe
  misc_feature (1)..(25): SEQ ID NO: 981; WAN024D4W; Start 1509; Stop 1533
tgatactgagtgggatgattacaag

SEQ ID NO: 279551 - DNA, 25 bp, Artificial
  probe
  misc_feature (1)..(25): SEQ ID NO: 981; WAN024D4W; Start 1546; Stop 1570
aaatacggactttctgattacctcg

SEQ ID NO: 279552 - DNA, 25 bp, Artificial
  probe
  misc_feature (1)..(25): SEQ ID NO: 981; WAN024D4W; Start 689; Stop 713
ttagtggtaacggaaacgaagattt

SEQ ID NO: 279553 - DNA, 25 bp, Artificial
  probe
  misc_feature (1)..(25): SEQ ID NO: 981; WAN024D4W; Start 1510; Stop 1534
gatactgagtgggatgattacaaga

SEQ ID NO: 279554 - DNA, 25 bp, Artificial
  probe
  misc_feature (1)..(25): SEQ ID NO: 981; WAN024D4W; Start 1513; Stop 1537
actgagtgggatgattacaagaaag

SEQ ID NO: 279555 - DNA, 25 bp, Artificial
  probe
  misc_feature (1)..(25): SEQ ID NO: 981; WAN024D4W; Start 1512; Stop 1536
tactgagtgggatgattacaagaaa

SEQ ID NO: 279556 - DNA, 25 bp, Artificial
  probe
  misc_feature (1)..(25): SEQ ID NO: 981; WAN024D4W; Start 1410; Stop 1434
tatgacacaggaagatttggacaag

SEQ ID NO: 279557 - DNA, 25 bp, Artificial
  probe
  misc_feature (1)..(25): SEQ ID NO: 981; WAN024D4W; Start 1407; Stop 1431
ctttatgacacaggaagatttggac

SEQ ID NO: 279558 - DNA, 25 bp, Artificial
  probe
  misc_feature (1)..(25): SEQ ID NO: 982; WAN024FAG; Start 21; Stop 45
aagatatactcgttggtctattcgc

SEQ ID NO: 279559 - DNA, 25 bp, Artificial
  probe
  misc_feature (1)..(25): SEQ ID NO: 982; WAN024FAG; Start 22; Stop 46
agatatactcgttggtctattcgcc

SEQ ID NO: 279560 - DNA, 25 bp, Artificial
  probe
  misc_feature (1)..(25): SEQ ID NO: 982; WAN024FAG; Start 358; Stop 382
aatccagagctaacagatgtcttaa

SEQ ID NO: 279561 - DNA, 25 bp, Artificial
  probe
  misc_feature (1)..(25): SEQ ID NO: 982; WAN024FAG; Start 23; Stop 47
gatatactcgttggtctattcgccg

SEQ ID NO: 279562 - DNA, 25 bp, Artificial
  probe
  misc_feature (1)..(25): SEQ ID NO: 982; WAN024FAG; Start 20; Stop 44
aaagatatactcgttggtctattcg

SEQ ID NO: 279563 - DNA, 25 bp, Artificial
  probe
  misc_feature (1)..(25): SEQ ID NO: 982; WAN024FAG; Start 24; Stop 48
atatactcgttggtctattcgccgt

SEQ ID NO: 279564 - DNA, 25 bp, Artificial
  probe
  misc_feature (1)..(25): SEQ ID NO: 982; WAN024FAG; Start 178; Stop 202
acgaaagagggtgacttatcagaaa

SEQ ID NO: 279565 - DNA, 25 bp, Artificial
  probe
  misc_feature (1)..(25): SEQ ID NO: 982; WAN024FAG; Start 177; Stop 201
aacgaaagagggtgacttatcagaa

SEQ ID NO: 279566 - DNA, 25 bp, Artificial
  probe
  misc_feature (1)..(25): SEQ ID NO: 982; WAN024FAG; Start 14; Stop 38
caaatcaaagatatactcgttggtc

SEQ ID NO: 279567 - DNA, 25 bp, Artificial
  probe
  misc_feature (1)..(25): SEQ ID NO: 982; WAN024FAG; Start 15; Stop 39
aaatcaaagatatactcgttggtct

SEQ ID NO: 279568 - DNA, 25 bp, Artificial
  probe
  misc_feature (1)..(25): SEQ ID NO: 982; WAN024FAG; Start 259; Stop 283
aattcacttccgacacctacagaaa

SEQ ID NO: 279569 - DNA, 25 bp, Artificial
  probe
  misc_feature (1)..(25): SEQ ID NO: 982; WAN024FAG; Start 272; Stop 296
cacctacagaaagaactgaagtgag

SEQ ID NO: 279570 - DNA, 25 bp, Artificial
  probe
  misc_feature (1)..(25): SEQ ID NO: 982; WAN024FAG; Start 176; Stop 200
gaacgaaagagggtgacttatcaga

SEQ ID NO: 279571 - DNA, 25 bp, Artificial
  probe
  misc_feature (1)..(25): SEQ ID NO: 982; WAN024FAG; Start 270; Stop 294
gacacctacagaaagaactgaagtg

SEQ ID NO: 279572 - DNA, 25 bp, Artificial
  probe
  misc_feature (1)..(25): SEQ ID NO: 982; WAN024FAG; Start 359; Stop 383
atccagagctaacagatgtcttaaa

SEQ ID NO: 279573 - DNA, 25 bp, Artificial
  probe
  misc_feature (1)..(25): SEQ ID NO: 982; WAN024FAG; Start 357; Stop 381
aaatccagagctaacagatgtctta

SEQ ID NO: 279574 - DNA, 25 bp, Artificial
  probe
  misc_feature (1)..(25): SEQ ID NO: 982; WAN024FAG; Start 260; Stop 284
attcacttccgacacctacagaaag

SEQ ID NO: 279575 - DNA, 25 bp, Artificial
  probe
  misc_feature (1)..(25): SEQ ID NO: 982; WAN024FAG; Start 271; Stop 295
acacctacagaaagaactgaagtga

SEQ ID NO: 279576 - DNA, 25 bp, Artificial
  probe
  misc_feature (1)..(25): SEQ ID NO: 982; WAN024FAG; Start 430; Stop 454
gcagaaactactcctgaacaagtaa

SEQ ID NO: 279577 - DNA, 25 bp, Artificial
  probe
  misc_feature (1)..(25): SEQ ID NO: 982; WAN024FAG; Start 9; Stop 33
caatccaaatcaaagatatactcgt

SEQ ID NO: 279578 - DNA, 25 bp, Artificial
  probe
  misc_feature (1)..(25): SEQ ID NO: 982; WAN024FAG; Start 25; Stop 49
tatactcgttggtctattcgccgtc

SEQ ID NO: 279579 - DNA, 25 bp, Artificial
  probe
  misc_feature (1)..(25): SEQ ID NO: 982; WAN024FAG; Start 431; Stop 455
cagaaactactcctgaacaagtaaa

SEQ ID NO: 279580 - DNA, 25 bp, Artificial
  probe
  misc_feature (1)..(25): SEQ ID NO: 982; WAN024FAG; Start 429; Stop 453
agcagaaactactcctgaacaagta

SEQ ID NO: 279581 - DNA, 25 bp, Artificial
  probe
  misc_feature (1)..(25): SEQ ID NO: 982; WAN024FAG; Start 18; Stop 42
tcaaagatatactcgttggtctatt

SEQ ID NO: 279582 - DNA, 25 bp, Artificial
  probe
  misc_feature (1)..(25): SEQ ID NO: 982; WAN024FAG; Start 16; Stop 40
aatcaaagatatactcgttggtcta

SEQ ID NO: 279583 - DNA, 25 bp, Artificial
  probe
  misc_feature (1)..(25): SEQ ID NO: 982; WAN024FAG; Start 11; Stop 35
atccaaatcaaagatatactcgttg

SEQ ID NO: 279584 - DNA, 25 bp, Artificial
  probe
  misc_feature (1)..(25): SEQ ID NO: 982; WAN024FAG; Start 8; Stop 32
tcaatccaaatcaaagatatactcg

SEQ ID NO: 279585 - DNA, 25 bp, Artificial
  probe
  misc_feature (1)..(25): SEQ ID NO: 982; WAN024FAG; Start 19; Stop 43
caaagatatactcgttggtctattc

SEQ ID NO: 279586 - DNA, 25 bp, Artificial
  probe
  misc_feature (1)..(25): SEQ ID NO: 982; WAN024FAG; Start 273; Stop 297
acctacagaaagaactgaagtgagc

SEQ ID NO: 279587 - DNA, 25 bp, Artificial
  probe
  misc_feature (1)..(25): SEQ ID NO: 982; WAN024FAG; Start 269; Stop 293
cgacacctacagaaagaactgaagt

SEQ ID NO: 279588 - DNA, 25 bp, Artificial
  probe
  misc_feature (1)..(25): SEQ ID NO: 982; WAN024FAG; Start 175; Stop 199
ggaacgaaagagggtgacttatcag

SEQ ID NO: 279589 - DNA, 25 bp, Artificial
  probe
  misc_feature (1)..(25): SEQ ID NO: 982; WAN024FAG; Start 17; Stop 41
atcaaagatatactcgttggtctat

SEQ ID NO: 279590 - DNA, 25 bp, Artificial
  probe
  misc_feature (1)..(25): SEQ ID NO: 982; WAN024FAG; Start 276; Stop 300
tacagaaagaactgaagtgagcgag

SEQ ID NO: 279591 - DNA, 25 bp, Artificial
  probe
  misc_feature (1)..(25): SEQ ID NO: 983; WAN024FCO; Start 12; Stop 36
ctcttatgactatgtactcagccaa

SEQ ID NO: 279592 - DNA, 25 bp, Artificial
  probe
  misc_feature (1)..(25): SEQ ID NO: 983; WAN024FCO; Start 11; Stop 35
actcttatgactatgtactcagcca

SEQ ID NO: 279593 - DNA, 25 bp, Artificial
  probe
  misc_feature (1)..(25): SEQ ID NO: 983; WAN024FCO; Start 10; Stop 34
tactcttatgactatgtactcagcc

SEQ ID NO: 279594 - DNA, 25 bp, Artificial
  probe
  misc_feature (1)..(25): SEQ ID NO: 983; WAN024FCO; Start 61; Stop 85
gttggctttgggattgttctattag

SEQ ID NO: 279595 - DNA, 25 bp, Artificial
  probe
  misc_feature (1)..(25): SEQ ID NO: 983; WAN024FCO; Start 9; Stop 33
ctactcttatgactatgtactcagc

SEQ ID NO: 279596 - DNA, 25 bp, Artificial
  probe
  misc_feature (1)..(25): SEQ ID NO: 983; WAN024FCO; Start 60; Stop 84
ggttggctttgggattgttctatta

SEQ ID NO: 279597 - DNA, 25 bp, Artificial
  probe
  misc_feature (1)..(25): SEQ ID NO: 983; WAN024FCO; Start 71; Stop 95
ggattgttctattagctgtgacagt

SEQ ID NO: 279598 - DNA, 25 bp, Artificial
  probe
  misc_feature (1)..(25): SEQ ID NO: 983; WAN024FCO; Start 72; Stop 96
gattgttctattagctgtgacagtt

SEQ ID NO: 279599 - DNA, 25 bp, Artificial
  probe
  misc_feature (1)..(25): SEQ ID NO: 983; WAN024FCO; Start 16; Stop 40
tatgactatgtactcagccaaatcg

SEQ ID NO: 279600 - DNA, 25 bp, Artificial
  probe
  misc_feature (1)..(25): SEQ ID NO: 983; WAN024FCO; Start 13; Stop 37
tcttatgactatgtactcagccaaa

SEQ ID NO: 279601 - DNA, 25 bp, Artificial
  probe
  misc_feature (1)..(25): SEQ ID NO: 983; WAN024FCO; Start 67; Stop 91
tttgggattgttctattagctgtga

SEQ ID NO: 279602 - DNA, 25 bp, Artificial
  probe
  misc_feature (1)..(25): SEQ ID NO: 983; WAN024FCO; Start 66; Stop 90
ctttgggattgttctattagctgtg

SEQ ID NO: 279603 - DNA, 25 bp, Artificial
  probe
  misc_feature (1)..(25): SEQ ID NO: 983; WAN024FCO; Start 68; Stop 92
ttgggattgttctattagctgtgac

SEQ ID NO: 279604 - DNA, 25 bp, Artificial
  probe
  misc_feature (1)..(25): SEQ ID NO: 983; WAN024FCO; Start 58; Stop 82
atggttggctttgggattgttctat

SEQ ID NO: 279605 - DNA, 25 bp, Artificial
  probe
  misc_feature (1)..(25): SEQ ID NO: 983; WAN024FCO; Start 15; Stop 39
ttatgactatgtactcagccaaatc

SEQ ID NO: 279606 - DNA, 25 bp, Artificial
  probe
  misc_feature (1)..(25): SEQ ID NO: 983; WAN024FCO; Start 14; Stop 38
cttatgactatgtactcagccaaat

SEQ ID NO: 279607 - DNA, 25 bp, Artificial
  probe
  misc_feature (1)..(25): SEQ ID NO: 983; WAN024FCO; Start 59; Stop 83
tggttggctttgggattgttctatt

SEQ ID NO: 279608 - DNA, 25 bp, Artificial
  probe
  misc_feature (1)..(25): SEQ ID NO: 983; WAN024FCO; Start 8; Stop 32
tctactcttatgactatgtactcag

SEQ ID NO: 279609 - DNA, 25 bp, Artificial
  probe
  misc_feature (1)..(25): SEQ ID NO: 983; WAN024FCO; Start 17; Stop 41
atgactatgtactcagccaaatcgg

SEQ ID NO: 279610 - DNA, 25 bp, Artificial
  probe
  misc_feature (1)..(25): SEQ ID NO: 983; WAN024FCO; Start 70; Stop 94
gggattgttctattagctgtgacag

SEQ ID NO: 279611 - DNA, 25 bp, Artificial
  probe
  misc_feature (1)..(25): SEQ ID NO: 983; WAN024FCO; Start 73; Stop 97
attgttctattagctgtgacagttt

SEQ ID NO: 279612 - DNA, 25 bp, Artificial
  probe
  misc_feature (1)..(25): SEQ ID NO: 983; WAN024FCO; Start 69; Stop 93
tgggattgttctattagctgtgaca

SEQ ID NO: 279613 - DNA, 25 bp, Artificial
  probe
  misc_feature (1)..(25): SEQ ID NO: 983; WAN024FCO; Start 21; Stop 45
ctatgtactcagccaaatcggtcag

SEQ ID NO: 279614 - DNA, 25 bp, Artificial
  probe
  misc_feature (1)..(25): SEQ ID NO: 983; WAN024FCO; Start 54; Stop 78
tatcatggttggctttgggattgtt

SEQ ID NO: 279615 - DNA, 25 bp, Artificial
  probe
  misc_feature (1)..(25): SEQ ID NO: 983; WAN024FCO; Start 62; Stop 86
ttggctttgggattgttctattagc

SEQ ID NO: 279616 - DNA, 25 bp, Artificial
  probe
  misc_feature (1)..(25): SEQ ID NO: 983; WAN024FCO; Start 7; Stop 31
ttctactcttatgactatgtactca

SEQ ID NO: 279617 - DNA, 25 bp, Artificial
  probe
  misc_feature (1)..(25): SEQ ID NO: 983; WAN024FCO; Start 35; Stop 59
aaatcggtcagcaaaatggtatcat

SEQ ID NO: 279618 - DNA, 25 bp, Artificial
  probe
  misc_feature (1)..(25): SEQ ID NO: 983; WAN024FCO; Start 20; Stop 44
actatgtactcagccaaatcggtca

SEQ ID NO: 279619 - DNA, 25 bp, Artificial
  probe
  misc_feature (1)..(25): SEQ ID NO: 983; WAN024FCO; Start 19; Stop 43
gactatgtactcagccaaatcggtc

SEQ ID NO: 279620 - DNA, 25 bp, Artificial
  probe
  misc_feature (1)..(25): SEQ ID NO: 983; WAN024FCO; Start 57; Stop 81
catggttggctttgggattgttcta

SEQ ID NO: 279621 - DNA, 25 bp, Artificial
  probe
  misc_feature (1)..(25): SEQ ID NO: 983; WAN024FCO; Start 34; Stop 58
caaatcggtcagcaaaatggtatca

SEQ ID NO: 279622 - DNA, 25 bp, Artificial
  probe
  misc_feature (1)..(25): SEQ ID NO: 983; WAN024FCO; Start 65; Stop 89
gctttgggattgttctattagctgt

SEQ ID NO: 279623 - DNA, 25 bp, Artificial
  probe
  misc_feature (1)..(25): SEQ ID NO: 983; WAN024FCO; Start 53; Stop 77
gtatcatggttggctttgggattgt

SEQ ID NO: 279624 - DNA, 25 bp, Artificial
  probe
  misc_feature (1)..(25): SEQ ID NO: 984; WAN024CQL; Start 197; Stop 221
atgttgatgttatctgtggaggatt

SEQ ID NO: 279625 - DNA, 25 bp, Artificial
  probe
  misc_feature (1)..(25): SEQ ID NO: 984; WAN024CQL; Start 1082; Stop 1106
aattatacaagcaagcaggcaatag

SEQ ID NO: 279626 - DNA, 25 bp, Artificial
  probe
  misc_feature (1)..(25): SEQ ID NO: 984; WAN024CQL; Start 1075; Stop 1099
aacagtcaattatacaagcaagcag

SEQ ID NO: 279627 - DNA, 25 bp, Artificial
  probe
  misc_feature (1)..(25): SEQ ID NO: 984; WAN024CQL; Start 1081; Stop 1105
caattatacaagcaagcaggcaata

SEQ ID NO: 279628 - DNA, 25 bp, Artificial
  probe
  misc_feature (1)..(25): SEQ ID NO: 984; WAN024CQL; Start 1074; Stop 1098
taacagtcaattatacaagcaagca

SEQ ID NO: 279629 - DNA, 25 bp, Artificial
  probe
  misc_feature (1)..(25): SEQ ID NO: 984; WAN024CQL; Start 161; Stop 185
caacagtatcagatgacactattcg

SEQ ID NO: 279630 - DNA, 25 bp, Artificial
  probe
  misc_feature (1)..(25): SEQ ID NO: 984; WAN024CQL; Start 1073; Stop 1097
ctaacagtcaattatacaagcaagc

SEQ ID NO: 279631 - DNA, 25 bp, Artificial
  probe
  misc_feature (1)..(25): SEQ ID NO: 984; WAN024CQL; Start 158; Stop 182
tcacaacagtatcagatgacactat

SEQ ID NO: 279632 - DNA, 25 bp, Artificial
  probe
  misc_feature (1)..(25): SEQ ID NO: 984; WAN024CQL; Start 157; Stop 181
atcacaacagtatcagatgacacta

SEQ ID NO: 279633 - DNA, 25 bp, Artificial
  probe
  misc_feature (1)..(25): SEQ ID NO: 984; WAN024CQL; Start 1080; Stop 1104
tcaattatacaagcaagcaggcaat

SEQ ID NO: 279634 - DNA, 25 bp, Artificial
  probe
  misc_feature (1)..(25): SEQ ID NO: 984; WAN024CQL; Start 1062; Stop 1086
ggaggtcaactctaacagtcaatta

SEQ ID NO: 279635 - DNA, 25 bp, Artificial
  probe
  misc_feature (1)..(25): SEQ ID NO: 984; WAN024CQL; Start 1076; Stop 1100
acagtcaattatacaagcaagcagg

SEQ ID NO: 279636 - DNA, 25 bp, Artificial
  probe
  misc_feature (1)..(25): SEQ ID NO: 984; WAN024CQL; Start 1083; Stop 1107
attatacaagcaagcaggcaatagc

SEQ ID NO: 279637 - DNA, 25 bp, Artificial
  probe
  misc_feature (1)..(25): SEQ ID NO: 984; WAN024CQL; Start 159; Stop 183
cacaacagtatcagatgacactatt

SEQ ID NO: 279638 - DNA, 25 bp, Artificial
  probe
  misc_feature (1)..(25): SEQ ID NO: 984; WAN024CQL; Start 196; Stop 220
catgttgatgttatctgtggaggat

SEQ ID NO: 279639 - DNA, 25 bp, Artificial
  probe
  misc_feature (1)..(25): SEQ ID NO: 984; WAN024CQL; Start 478; Stop 502
cgtgtgttcattatcggacatctta

SEQ ID NO: 279640 - DNA, 25 bp, Artificial
  probe
  misc_feature (1)..(25): SEQ ID NO: 984; WAN024CQL; Start 1061; Stop 1085
aggaggtcaactctaacagtcaatt

SEQ ID NO: 279641 - DNA, 25 bp, Artificial
  probe
  misc_feature (1)..(25): SEQ ID NO: 984; WAN024CQL; Start 160; Stop 184
acaacagtatcagatgacactattc

SEQ ID NO: 279642 - DNA, 25 bp, Artificial
  probe
  misc_feature (1)..(25): SEQ ID NO: 984; WAN024CQL; Start 150; Stop 174
acatgacatcacaacagtatcagat

SEQ ID NO: 279643 - DNA, 25 bp, Artificial
  probe
  misc_feature (1)..(25): SEQ ID NO: 984; WAN024CQL; Start 149; Stop 173
tacatgacatcacaacagtatcaga

SEQ ID NO: 279644 - DNA, 25 bp, Artificial
  probe
  misc_feature (1)..(25): SEQ ID NO: 984; WAN024CQL; Start 143; Stop 167
ttgaattacatgacatcacaacagt

SEQ ID NO: 279645 - DNA, 25 bp, Artificial
  probe
  misc_feature (1)..(25): SEQ ID NO: 984; WAN024CQL; Start 1063; Stop 1087
gaggtcaactctaacagtcaattat

SEQ ID NO: 279646 - DNA, 25 bp, Artificial
  probe
  misc_feature (1)..(25): SEQ ID NO: 984; WAN024CQL; Start 1079; Stop 1103
gtcaattatacaagcaagcaggcaa

SEQ ID NO: 279647 - DNA, 25 bp, Artificial
  probe
  misc_feature (1)..(25): SEQ ID NO: 984; WAN024CQL; Start 148; Stop 172
ttacatgacatcacaacagtatcag

SEQ ID NO: 279648 - DNA, 25 bp, Artificial
  probe
  misc_feature (1)..(25): SEQ ID NO: 984; WAN024CQL; Start 1070; Stop 1094
actctaacagtcaattatacaagca

SEQ ID NO: 279649 - DNA, 25 bp, Artificial
  probe
  misc_feature (1)..(25): SEQ ID NO: 984; WAN024CQL; Start 1060; Stop 1084
caggaggtcaactctaacagtcaat

SEQ ID NO: 279650 - DNA, 25 bp, Artificial
  probe
  misc_feature (1)..(25): SEQ ID NO: 984; WAN024CQL; Start 166; Stop 190
gtatcagatgacactattcgaggaa

SEQ ID NO: 279651 - DNA, 25 bp, Artificial
  probe
  misc_feature (1)..(25): SEQ ID NO: 984; WAN024CQL; Start 1007; Stop 1031
ctagagaatgctggaggttacaagg

SEQ ID NO: 279652 - DNA, 25 bp, Artificial
  probe
  misc_feature (1)..(25): SEQ ID NO: 984; WAN024CQL; Start 777; Stop 801
ttcaccaacaatcagagcgtatcaa

SEQ ID NO: 279653 - DNA, 25 bp, Artificial
  probe
  misc_feature (1)..(25): SEQ ID NO: 984; WAN024CQL; Start 144; Stop 168
tgaattacatgacatcacaacagta

SEQ ID NO: 279654 - DNA, 25 bp, Artificial
  probe
  misc_feature (1)..(25): SEQ ID NO: 984; WAN024CQL; Start 919; Stop 943
cgagtaggtaagcagatagcaaata

SEQ ID NO: 279655 - DNA, 25 bp, Artificial
  probe
  misc_feature (1)..(25): SEQ ID NO: 984; WAN024CQL; Start 881; Stop 905
taaacctatcgcatccaaactctaa

SEQ ID NO: 279656 - DNA, 25 bp, Artificial
  probe
  misc_feature (1)..(25): SEQ ID NO: 984; WAN024CQL; Start 752; Stop 776
gcgttgtttatgagattgatggtat

SEQ ID NO: 279657 - DNA, 25 bp, Artificial
  probe
  misc_feature (1)..(25): SEQ ID NO: 985; WAN024CCY; Start 1094; Stop 1118
tgttgttcagtatgttagttaccct

SEQ ID NO: 279658 - DNA, 25 bp, Artificial
  probe
  misc_feature (1)..(25): SEQ ID NO: 985; WAN024CCY; Start 1093; Stop 1117
atgttgttcagtatgttagttaccc

SEQ ID NO: 279659 - DNA, 25 bp, Artificial
  probe
  misc_feature (1)..(25): SEQ ID NO: 985; WAN024CCY; Start 506; Stop 530
atgaatacaaggtaatgatttgggc

SEQ ID NO: 279660 - DNA, 25 bp, Artificial
  probe
  misc_feature (1)..(25): SEQ ID NO: 985; WAN024CCY; Start 736; Stop 760
gaaacattcgggaaagtatcactga

SEQ ID NO: 279661 - DNA, 25 bp, Artificial
  probe
  misc_feature (1)..(25): SEQ ID NO: 985; WAN024CCY; Start 1092; Stop 1116
tatgttgttcagtatgttagttacc

SEQ ID NO: 279662 - DNA, 25 bp, Artificial
  probe
  misc_feature (1)..(25): SEQ ID NO: 985; WAN024CCY; Start 1095; Stop 1119
gttgttcagtatgttagttacccta

SEQ ID NO: 279663 - DNA, 25 bp, Artificial
  probe
  misc_feature (1)..(25): SEQ ID NO: 985; WAN024CCY; Start 1312; Stop 1336
gcagtaatagtttatttgttagcgt

SEQ ID NO: 279664 - DNA, 25 bp, Artificial
  probe
  misc_feature (1)..(25): SEQ ID NO: 985; WAN024CCY; Start 635; Stop 659
ttgacaatatccgtgttggaatcaa

SEQ ID NO: 279665 - DNA, 25 bp, Artificial
  probe
  misc_feature (1)..(25): SEQ ID NO: 985; WAN024CCY; Start 504; Stop 528
gcatgaatacaaggtaatgatttgg

SEQ ID NO: 279666 - DNA, 25 bp, Artificial
  probe
  misc_feature (1)..(25): SEQ ID NO: 985; WAN024CCY; Start 503; Stop 527
ggcatgaatacaaggtaatgatttg

SEQ ID NO: 279667 - DNA, 25 bp, Artificial
  probe
  misc_feature (1)..(25): SEQ ID NO: 985; WAN024CCY; Start 634; Stop 658
tttgacaatatccgtgttggaatca

SEQ ID NO: 279668 - DNA, 25 bp, Artificial
  probe
  misc_feature (1)..(25): SEQ ID NO: 985; WAN024CCY; Start 505; Stop 529
catgaatacaaggtaatgatttggg

SEQ ID NO: 279669 - DNA, 25 bp, Artificial
  probe
  misc_feature (1)..(25): SEQ ID NO: 985; WAN024CCY; Start 1088; Stop 1112
tgattatgttgttcagtatgttagt

SEQ ID NO: 279670 - DNA, 25 bp, Artificial
  probe
  misc_feature (1)..(25): SEQ ID NO: 985; WAN024CCY; Start 683; Stop 707
gtagtatgattattggtattgttcg

SEQ ID NO: 279671 - DNA, 25 bp, Artificial
  probe
  misc_feature (1)..(25): SEQ ID NO: 985; WAN024CCY; Start 679; Stop 703
gcaagtagtatgattattggtattg

SEQ ID NO: 279672 - DNA, 25 bp, Artificial
  probe
  misc_feature (1)..(25): SEQ ID NO: 985; WAN024CCY; Start 1084; Stop 1108
actttgattatgttgttcagtatgt

SEQ ID NO: 279673 - DNA, 25 bp, Artificial
  probe
  misc_feature (1)..(25): SEQ ID NO: 985; WAN024CCY; Start 1096; Stop 1120
ttgttcagtatgttagttaccctaa

SEQ ID NO: 279674 - DNA, 25 bp, Artificial
  probe
  misc_feature (1)..(25): SEQ ID NO: 985; WAN024CCY; Start 1097; Stop 1121
tgttcagtatgttagttaccctaat

SEQ ID NO: 279675 - DNA, 25 bp, Artificial
  probe
  misc_feature (1)..(25): SEQ ID NO: 985; WAN024CCY; Start 1283; Stop 1307
cttcaagttggtacttaccgatttg

SEQ ID NO: 279676 - DNA, 25 bp, Artificial
  probe
  misc_feature (1)..(25): SEQ ID NO: 985; WAN024CCY; Start 1089; Stop 1113
gattatgttgttcagtatgttagtt

SEQ ID NO: 279677 - DNA, 25 bp, Artificial
  probe
  misc_feature (1)..(25): SEQ ID NO: 985; WAN024CCY; Start 717; Stop 741
tcaatggaattggaatatcgaaaca

SEQ ID NO: 279678 - DNA, 25 bp, Artificial
  probe
  misc_feature (1)..(25): SEQ ID NO: 985; WAN024CCY; Start 1284; Stop 1308
ttcaagttggtacttaccgatttgg

SEQ ID NO: 279679 - DNA, 25 bp, Artificial
  probe
  misc_feature (1)..(25): SEQ ID NO: 985; WAN024CCY; Start 1091; Stop 1115
ttatgttgttcagtatgttagttac

SEQ ID NO: 279680 - DNA, 25 bp, Artificial
  probe
  misc_feature (1)..(25): SEQ ID NO: 985; WAN024CCY; Start 99; Stop 123
aattatgggagtaactgagtatagt

SEQ ID NO: 279681 - DNA, 25 bp, Artificial
  probe
  misc_feature (1)..(25): SEQ ID NO: 985; WAN024CCY; Start 1087; Stop 1111
ttgattatgttgttcagtatgttag

SEQ ID NO: 279682 - DNA, 25 bp, Artificial
  probe
  misc_feature (1)..(25): SEQ ID NO: 985; WAN024CCY; Start 720; Stop 744
atggaattggaatatcgaaacattc

SEQ ID NO: 279683 - DNA, 25 bp, Artificial
  probe
  misc_feature (1)..(25): SEQ ID NO: 985; WAN024CCY; Start 688; Stop 712
atgattattggtattgttcgaatgg

SEQ ID NO: 279684 - DNA, 25 bp, Artificial
  probe
  misc_feature (1)..(25): SEQ ID NO: 985; WAN024CCY; Start 106; Stop 130
ggagtaactgagtatagttattggc

SEQ ID NO: 279685 - DNA, 25 bp, Artificial
  probe
  misc_feature (1)..(25): SEQ ID NO: 985; WAN024CCY; Start 678; Stop 702
tgcaagtagtatgattattggtatt

SEQ ID NO: 279686 - DNA, 25 bp, Artificial
  probe
  misc_feature (1)..(25): SEQ ID NO: 985; WAN024CCY; Start 718; Stop 742
caatggaattggaatatcgaaacat

SEQ ID NO: 279687 - DNA, 25 bp, Artificial
  probe
  misc_feature (1)..(25): SEQ ID NO: 985; WAN024CCY; Start 716; Stop 740
ttcaatggaattggaatatcgaaac

SEQ ID NO: 279688 - DNA, 25 bp, Artificial
  probe
  misc_feature (1)..(25): SEQ ID NO: 985; WAN024CCY; Start 633; Stop 657
ttttgacaatatccgtgttggaatc

SEQ ID NO: 279689 - DNA, 25 bp, Artificial
  probe
  misc_feature (1)..(25): SEQ ID NO: 985; WAN024CCY; Start 632; Stop 656
cttttgacaatatccgtgttggaat

SEQ ID NO: 279690 - DNA, 25 bp, Artificial
  probe
  misc_feature (1)..(25): SEQ ID NO: 986; WAN024FGE; Start 895; Stop 919
ttagaagcaagtaaggtagaagtgg

SEQ ID NO: 279691 - DNA, 25 bp, Artificial
  probe
  misc_feature (1)..(25): SEQ ID NO: 986; WAN024FGE; Start 902; Stop 926
caagtaaggtagaagtggtagaagt

SEQ ID NO: 279692 - DNA, 25 bp, Artificial
  probe
  misc_feature (1)..(25): SEQ ID NO: 986; WAN024FGE; Start 901; Stop 925
gcaagtaaggtagaagtggtagaag

SEQ ID NO: 279693 - DNA, 25 bp, Artificial
  probe
  misc_feature (1)..(25): SEQ ID NO: 986; WAN024FGE; Start 898; Stop 922
gaagcaagtaaggtagaagtggtag

SEQ ID NO: 279694 - DNA, 25 bp, Artificial
  probe
  misc_feature (1)..(25): SEQ ID NO: 986; WAN024FGE; Start 900; Stop 924
agcaagtaaggtagaagtggtagaa

SEQ ID NO: 279695 - DNA, 25 bp, Artificial
  probe
  misc_feature (1)..(25): SEQ ID NO: 986; WAN024FGE; Start 899; Stop 923
aagcaagtaaggtagaagtggtaga

SEQ ID NO: 279696 - DNA, 25 bp, Artificial
  probe
  misc_feature (1)..(25): SEQ ID NO: 986; WAN024FGE; Start 897; Stop 921
agaagcaagtaaggtagaagtggta

SEQ ID NO: 279697 - DNA, 25 bp, Artificial
  probe
  misc_feature (1)..(25): SEQ ID NO: 986; WAN024FGE; Start 896; Stop 920
tagaagcaagtaaggtagaagtggt

SEQ ID NO: 279698 - DNA, 25 bp, Artificial
  probe
  misc_feature (1)..(25): SEQ ID NO: 986; WAN024FGE; Start 1157; Stop 1181
ggactcaatactactcaccatacta

SEQ ID NO: 279699 - DNA, 25 bp, Artificial
  probe
  misc_feature (1)..(25): SEQ ID NO: 986; WAN024FGE; Start 1166; Stop 1190
actactcaccatactacaacactat

SEQ ID NO: 279700 - DNA, 25 bp, Artificial
  probe
  misc_feature (1)..(25): SEQ ID NO: 986; WAN024FGE; Start 1164; Stop 1188
atactactcaccatactacaacact

SEQ ID NO: 279701 - DNA, 25 bp, Artificial
  probe
  misc_feature (1)..(25): SEQ ID NO: 986; WAN024FGE; Start 1169; Stop 1193
actcaccatactacaacactattga

SEQ ID NO: 279702 - DNA, 25 bp, Artificial
  probe
  misc_feature (1)..(25): SEQ ID NO: 986; WAN024FGE; Start 1159; Stop 1183
actcaatactactcaccatactaca

SEQ ID NO: 279703 - DNA, 25 bp, Artificial
  probe
  misc_feature (1)..(25): SEQ ID NO: 986; WAN024FGE; Start 903; Stop 927
aagtaaggtagaagtggtagaagta

SEQ ID NO: 279704 - DNA, 25 bp, Artificial
  probe
  misc_feature (1)..(25): SEQ ID NO: 986; WAN024FGE; Start 904; Stop 928
agtaaggtagaagtggtagaagtac

SEQ ID NO: 279705 - DNA, 25 bp, Artificial
  probe
  misc_feature (1)..(25): SEQ ID NO: 986; WAN024FGE; Start 1165; Stop 1189
tactactcaccatactacaacacta

SEQ ID NO: 279706 - DNA, 25 bp, Artificial
  probe
  misc_feature (1)..(25): SEQ ID NO: 986; WAN024FGE; Start 1163; Stop 1187
aatactactcaccatactacaacac

SEQ ID NO: 279707 - DNA, 25 bp, Artificial
  probe
  misc_feature (1)..(25): SEQ ID NO: 986; WAN024FGE; Start 1162; Stop 1186
caatactactcaccatactacaaca

SEQ ID NO: 279708 - DNA, 25 bp, Artificial
  probe
  misc_feature (1)..(25): SEQ ID NO: 986; WAN024FGE; Start 1171; Stop 1195
tcaccatactacaacactattgatg

SEQ ID NO: 279709 - DNA, 25 bp, Artificial
  probe
  misc_feature (1)..(25): SEQ ID NO: 986; WAN024FGE; Start 1158; Stop 1182
gactcaatactactcaccatactac

SEQ ID NO: 279710 - DNA, 25 bp, Artificial
  probe
  misc_feature (1)..(25): SEQ ID NO: 986; WAN024FGE; Start 1167; Stop 1191
ctactcaccatactacaacactatt

SEQ ID NO: 279711 - DNA, 25 bp, Artificial
  probe
  misc_feature (1)..(25): SEQ ID NO: 986; WAN024FGE; Start 1161; Stop 1185
tcaatactactcaccatactacaac

SEQ ID NO: 279712 - DNA, 25 bp, Artificial
  probe
  misc_feature (1)..(25): SEQ ID NO: 986; WAN024FGE; Start 1170; Stop 1194
ctcaccatactacaacactattgat

SEQ ID NO: 279713 - DNA, 25 bp, Artificial
  probe
  misc_feature (1)..(25): SEQ ID NO: 986; WAN024FGE; Start 1168; Stop 1192
tactcaccatactacaacactattg

SEQ ID NO: 279714 - DNA, 25 bp, Artificial
  probe
  misc_feature (1)..(25): SEQ ID NO: 986; WAN024FGE; Start 1160; Stop 1184
ctcaatactactcaccatactacaa

SEQ ID NO: 279715 - DNA, 25 bp, Artificial
  probe
  misc_feature (1)..(25): SEQ ID NO: 986; WAN024FGE; Start 1155; Stop 1179
ctggactcaatactactcaccatac

SEQ ID NO: 279716 - DNA, 25 bp, Artificial
  probe
  misc_feature (1)..(25): SEQ ID NO: 986; WAN024FGE; Start 1156; Stop 1180
tggactcaatactactcaccatact

SEQ ID NO: 279717 - DNA, 25 bp, Artificial
  probe
  misc_feature (1)..(25): SEQ ID NO: 986; WAN024FGE; Start 614; Stop 638
gttcattgttcagttctggtcaagg

SEQ ID NO: 279718 - DNA, 25 bp, Artificial
  probe
  misc_feature (1)..(25): SEQ ID NO: 986; WAN024FGE; Start 613; Stop 637
ggttcattgttcagttctggtcaag

SEQ ID NO: 279719 - DNA, 25 bp, Artificial
  probe
  misc_feature (1)..(25): SEQ ID NO: 986; WAN024FGE; Start 835; Stop 859
ggtcaaacatcttacacaatccttt

SEQ ID NO: 279720 - DNA, 25 bp, Artificial
  probe
  misc_feature (1)..(25): SEQ ID NO: 986; WAN024FGE; Start 658; Stop 682
gcctttatctctaacctttatagcg

SEQ ID NO: 279721 - DNA, 25 bp, Artificial
  probe
  misc_feature (1)..(25): SEQ ID NO: 986; WAN024FGE; Start 612; Stop 636
aggttcattgttcagttctggtcaa

SEQ ID NO: 279722 - DNA, 25 bp, Artificial
  probe
  misc_feature (1)..(25): SEQ ID NO: 986; WAN024FGE; Start 831; Stop 855
caacggtcaaacatcttacacaatc

SEQ ID NO: 279723 - DNA, 25 bp, Artificial
  probe
  misc_feature (1)..(25): SEQ ID NO: 987; WAN024AVV; Start 205; Stop 229
gtatcatcagcacctgtaaccattg

SEQ ID NO: 279724 - DNA, 25 bp, Artificial
  probe
  misc_feature (1)..(25): SEQ ID NO: 987; WAN024AVV; Start 232; Stop 256
ctatttacagatacagaccttgcca

SEQ ID NO: 279725 - DNA, 25 bp, Artificial
  probe
  misc_feature (1)..(25): SEQ ID NO: 987; WAN024AVV; Start 226; Stop 250
attgccctatttacagatacagacc

SEQ ID NO: 279726 - DNA, 25 bp, Artificial
  probe
  misc_feature (1)..(25): SEQ ID NO: 987; WAN024AVV; Start 224; Stop 248
ccattgccctatttacagatacaga

SEQ ID NO: 279727 - DNA, 25 bp, Artificial
  probe
  misc_feature (1)..(25): SEQ ID NO: 987; WAN024AVV; Start 222; Stop 246
aaccattgccctatttacagataca

SEQ ID NO: 279728 - DNA, 25 bp, Artificial
  probe
  misc_feature (1)..(25): SEQ ID NO: 987; WAN024AVV; Start 223; Stop 247
accattgccctatttacagatacag

SEQ ID NO: 279729 - DNA, 25 bp, Artificial
  probe
  misc_feature (1)..(25): SEQ ID NO: 987; WAN024AVV; Start 233; Stop 257
tatttacagatacagaccttgccaa

SEQ ID NO: 279730 - DNA, 25 bp, Artificial
  probe
  misc_feature (1)..(25): SEQ ID NO: 987; WAN024AVV; Start 231; Stop 255
cctatttacagatacagaccttgcc

SEQ ID NO: 279731 - DNA, 25 bp, Artificial
  probe
  misc_feature (1)..(25): SEQ ID NO: 987; WAN024AVV; Start 230; Stop 254
ccctatttacagatacagaccttgc

SEQ ID NO: 279732 - DNA, 25 bp, Artificial
  probe
  misc_feature (1)..(25): SEQ ID NO: 987; WAN024AVV; Start 229; Stop 253
gccctatttacagatacagaccttg

SEQ ID NO: 279733 - DNA, 25 bp, Artificial
  probe
  misc_feature (1)..(25): SEQ ID NO: 987; WAN024AVV; Start 225; Stop 249
cattgccctatttacagatacagac

SEQ ID NO: 279734 - DNA, 25 bp, Artificial
  probe
  misc_feature (1)..(25): SEQ ID NO: 987; WAN024AVV; Start 234; Stop 258
atttacagatacagaccttgccaaa

SEQ ID NO: 279735 - DNA, 25 bp, Artificial
  probe
  misc_feature (1)..(25): SEQ ID NO: 987; WAN024AVV; Start 228; Stop 252
tgccctatttacagatacagacctt

SEQ ID NO: 279736 - DNA, 25 bp, Artificial
  probe
  misc_feature (1)..(25): SEQ ID NO: 987; WAN024AVV; Start 227; Stop 251
ttgccctatttacagatacagacct

SEQ ID NO: 279737 - DNA, 25 bp, Artificial
  probe
  misc_feature (1)..(25): SEQ ID NO: 987; WAN024AVV; Start 46; Stop 70
ttcactgataagcctgttgatccaa

SEQ ID NO: 279738 - DNA, 25 bp, Artificial
  probe
  misc_feature (1)..(25): SEQ ID NO: 987; WAN024AVV; Start 235; Stop 259
tttacagatacagaccttgccaaac

SEQ ID NO: 279739 - DNA, 25 bp, Artificial
  probe
  misc_feature (1)..(25): SEQ ID NO: 987; WAN024AVV; Start 350; Stop 374
cacgctacaatgaacaacaagtcag

SEQ ID NO: 279740 - DNA, 25 bp, Artificial
  probe
  misc_feature (1)..(25): SEQ ID NO: 987; WAN024AVV; Start 221; Stop 245
taaccattgccctatttacagatac

SEQ ID NO: 279741 - DNA, 25 bp, Artificial
  probe
  misc_feature (1)..(25): SEQ ID NO: 987; WAN024AVV; Start 573; Stop 597
cttgccagtagatgaaatcattgaa

SEQ ID NO: 279742 - DNA, 25 bp, Artificial
  probe
  misc_feature (1)..(25): SEQ ID NO: 987; WAN024AVV; Start 354; Stop 378
ctacaatgaacaacaagtcagcgac

SEQ ID NO: 279743 - DNA, 25 bp, Artificial
  probe
  misc_feature (1)..(25): SEQ ID NO: 987; WAN024AVV; Start 574; Stop 598
ttgccagtagatgaaatcattgaaa

SEQ ID NO: 279744 - DNA, 25 bp, Artificial
  probe
  misc_feature (1)..(25): SEQ ID NO: 987; WAN024AVV; Start 43; Stop 67
catttcactgataagcctgttgatc

SEQ ID NO: 279745 - DNA, 25 bp, Artificial
  probe
  misc_feature (1)..(25): SEQ ID NO: 987; WAN024AVV; Start 284; Stop 308
gtggtgctaacaatttctcagaaga

SEQ ID NO: 279746 - DNA, 25 bp, Artificial
  probe
  misc_feature (1)..(25): SEQ ID NO: 987; WAN024AVV; Start 40; Stop 64
aagcatttcactgataagcctgttg

SEQ ID NO: 279747 - DNA, 25 bp, Artificial
  probe
  misc_feature (1)..(25): SEQ ID NO: 987; WAN024AVV; Start 39; Stop 63
caagcatttcactgataagcctgtt

SEQ ID NO: 279748 - DNA, 25 bp, Artificial
  probe
  misc_feature (1)..(25): SEQ ID NO: 987; WAN024AVV; Start 419; Stop 443
ttctcgctcttacagaccaaggaat

SEQ ID NO: 279749 - DNA, 25 bp, Artificial
  probe
  misc_feature (1)..(25): SEQ ID NO: 987; WAN024AVV; Start 420; Stop 444
tctcgctcttacagaccaaggaatt

SEQ ID NO: 279750 - DNA, 25 bp, Artificial
  probe
  misc_feature (1)..(25): SEQ ID NO: 987; WAN024AVV; Start 572; Stop 596
gcttgccagtagatgaaatcattga

SEQ ID NO: 279751 - DNA, 25 bp, Artificial
  probe
  misc_feature (1)..(25): SEQ ID NO: 987; WAN024AVV; Start 44; Stop 68
atttcactgataagcctgttgatcc

SEQ ID NO: 279752 - DNA, 25 bp, Artificial
  probe
  misc_feature (1)..(25): SEQ ID NO: 987; WAN024AVV; Start 421; Stop 445
ctcgctcttacagaccaaggaattg

SEQ ID NO: 279753 - DNA, 25 bp, Artificial
  probe
  misc_feature (1)..(25): SEQ ID NO: 987; WAN024AVV; Start 204; Stop 228
ggtatcatcagcacctgtaaccatt

SEQ ID NO: 279754 - DNA, 25 bp, Artificial
  probe
  misc_feature (1)..(25): SEQ ID NO: 987; WAN024AVV; Start 42; Stop 66
gcatttcactgataagcctgttgat

SEQ ID NO: 279755 - DNA, 25 bp, Artificial
  probe
  misc_feature (1)..(25): SEQ ID NO: 987; WAN024AVV; Start 283; Stop 307
ggtggtgctaacaatttctcagaag

SEQ ID NO: 279756 - DNA, 25 bp, Artificial
  probe
  misc_feature (1)..(25): SEQ ID NO: 988; WAN024AVW; Start 235; Stop 259
tttacagatacggacttagccaaac

SEQ ID NO: 279757 - DNA, 25 bp, Artificial
  probe
  misc_feature (1)..(25): SEQ ID NO: 988; WAN024AVW; Start 234; Stop 258
gtttacagatacggacttagccaaa

SEQ ID NO: 279758 - DNA, 25 bp, Artificial
  probe
  misc_feature (1)..(25): SEQ ID NO: 988; WAN024AVW; Start 231; Stop 255
cttgtttacagatacggacttagcc

SEQ ID NO: 279759 - DNA, 25 bp, Artificial
  probe
  misc_feature (1)..(25): SEQ ID NO: 988; WAN024AVW; Start 230; Stop 254
ccttgtttacagatacggacttagc

SEQ ID NO: 279760 - DNA, 25 bp, Artificial
  probe
  misc_feature (1)..(25): SEQ ID NO: 988; WAN024AVW; Start 229; Stop 253
gccttgtttacagatacggacttag

SEQ ID NO: 279761 - DNA, 25 bp, Artificial
  probe
  misc_feature (1)..(25): SEQ ID NO: 988; WAN024AVW; Start 221; Stop 245
taaccattgccttgtttacagatac

SEQ ID NO: 279762 - DNA, 25 bp, Artificial
  probe
  misc_feature (1)..(25): SEQ ID NO: 988; WAN024AVW; Start 233; Stop 257
tgtttacagatacggacttagccaa

SEQ ID NO: 279763 - DNA, 25 bp, Artificial
  probe
  misc_feature (1)..(25): SEQ ID NO: 988; WAN024AVW; Start 232; Stop 256
ttgtttacagatacggacttagcca

SEQ ID NO: 279764 - DNA, 25 bp, Artificial
  probe
  misc_feature (1)..(25): SEQ ID NO: 988; WAN024AVW; Start 228; Stop 252
tgccttgtttacagatacggactta

SEQ ID NO: 279765 - DNA, 25 bp, Artificial
  probe
  misc_feature (1)..(25): SEQ ID NO: 988; WAN024AVW; Start 222; Stop 246
aaccattgccttgtttacagatacg

SEQ ID NO: 279766 - DNA, 25 bp, Artificial
  probe
  misc_feature (1)..(25): SEQ ID NO: 988; WAN024AVW; Start 226; Stop 250
attgccttgtttacagatacggact

SEQ ID NO: 279767 - DNA, 25 bp, Artificial
  probe
  misc_feature (1)..(25): SEQ ID NO: 988; WAN024AVW; Start 225; Stop 249
cattgccttgtttacagatacggac

SEQ ID NO: 279768 - DNA, 25 bp, Artificial
  probe
  misc_feature (1)..(25): SEQ ID NO: 988; WAN024AVW; Start 220; Stop 244
gtaaccattgccttgtttacagata

SEQ ID NO: 279769 - DNA, 25 bp, Artificial
  probe
  misc_feature (1)..(25): SEQ ID NO: 988; WAN024AVW; Start 227; Stop 251
ttgccttgtttacagatacggactt

SEQ ID NO: 279770 - DNA, 25 bp, Artificial
  probe
  misc_feature (1)..(25): SEQ ID NO: 988; WAN024AVW; Start 172; Stop 196
gcaaagttagcttatggttccaatt

SEQ ID NO: 279771 - DNA, 25 bp, Artificial
  probe
  misc_feature (1)..(25): SEQ ID NO: 988; WAN024AVW; Start 236; Stop 260
ttacagatacggacttagccaaacg

SEQ ID NO: 279772 - DNA, 25 bp, Artificial
  probe
  misc_feature (1)..(25): SEQ ID NO: 988; WAN024AVW; Start 173; Stop 197
caaagttagcttatggttccaattt

SEQ ID NO: 279773 - DNA, 25 bp, Artificial
  probe
  misc_feature (1)..(25): SEQ ID NO: 988; WAN024AVW; Start 171; Stop 195
ggcaaagttagcttatggttccaat

SEQ ID NO: 279774 - DNA, 25 bp, Artificial
  probe
  misc_feature (1)..(25): SEQ ID NO: 988; WAN024AVW; Start 224; Stop 248
ccattgccttgtttacagatacgga

SEQ ID NO: 279775 - DNA, 25 bp, Artificial
  probe
  misc_feature (1)..(25): SEQ ID NO: 988; WAN024AVW; Start 135; Stop 159
gaaatttgtggtggtacgtgagaaa

SEQ ID NO: 279776 - DNA, 25 bp, Artificial
  probe
  misc_feature (1)..(25): SEQ ID NO: 988; WAN024AVW; Start 281; Stop 305
ttggtggtgctaataacttttctga

SEQ ID NO: 279777 - DNA, 25 bp, Artificial
  probe
  misc_feature (1)..(25): SEQ ID NO: 988; WAN024AVW; Start 34; Stop 58
gcgactaagcattttactgataagc

SEQ ID NO: 279778 - DNA, 25 bp, Artificial
  probe
  misc_feature (1)..(25): SEQ ID NO: 988; WAN024AVW; Start 282; Stop 306
tggtggtgctaataacttttctgaa

SEQ ID NO: 279779 - DNA, 25 bp, Artificial
  probe
  misc_feature (1)..(25): SEQ ID NO: 988; WAN024AVW; Start 223; Stop 247
accattgccttgtttacagatacgg

SEQ ID NO: 279780 - DNA, 25 bp, Artificial
  probe
  misc_feature (1)..(25): SEQ ID NO: 988; WAN024AVW; Start 283; Stop 307
ggtggtgctaataacttttctgaag

SEQ ID NO: 279781 - DNA, 25 bp, Artificial
  probe
  misc_feature (1)..(25): SEQ ID NO: 988; WAN024AVW; Start 284; Stop 308
gtggtgctaataacttttctgaaga

SEQ ID NO: 279782 - DNA, 25 bp, Artificial
  probe
  misc_feature (1)..(25): SEQ ID NO: 988; WAN024AVW; Start 280; Stop 304
gttggtggtgctaataacttttctg

SEQ ID NO: 279783 - DNA, 25 bp, Artificial
  probe
  misc_feature (1)..(25): SEQ ID NO: 988; WAN024AVW; Start 279; Stop 303
tgttggtggtgctaataacttttct

SEQ ID NO: 279784 - DNA, 25 bp, Artificial
  probe
  misc_feature (1)..(25): SEQ ID NO: 988; WAN024AVW; Start 278; Stop 302
gtgttggtggtgctaataacttttc

SEQ ID NO: 279785 - DNA, 25 bp, Artificial
  probe
  misc_feature (1)..(25): SEQ ID NO: 988; WAN024AVW; Start 285; Stop 309
tggtgctaataacttttctgaagag

SEQ ID NO: 279786 - DNA, 25 bp, Artificial
  probe
  misc_feature (1)..(25): SEQ ID NO: 988; WAN024AVW; Start 191; Stop 215
ccaattttgaacaggtatcatcagc

SEQ ID NO: 279787 - DNA, 25 bp, Artificial
  probe
  misc_feature (1)..(25): SEQ ID NO: 988; WAN024AVW; Start 190; Stop 214
tccaattttgaacaggtatcatcag

SEQ ID NO: 279788 - DNA, 25 bp, Artificial
  probe
  misc_feature (1)..(25): SEQ ID NO: 988; WAN024AVW; Start 192; Stop 216
caattttgaacaggtatcatcagcg

SEQ ID NO: 279789 - DNA, 25 bp, Artificial
  probe
  misc_feature (1)..(25): SEQ ID NO: 989; WAN024FNS; Start 776; Stop 800
acaaccaattcctctactacaacaa

SEQ ID NO: 279790 - DNA, 25 bp, Artificial
  probe
  misc_feature (1)..(25): SEQ ID NO: 989; WAN024FNS; Start 775; Stop 799
aacaaccaattcctctactacaaca

SEQ ID NO: 279791 - DNA, 25 bp, Artificial
  probe
  misc_feature (1)..(25): SEQ ID NO: 989; WAN024FNS; Start 777; Stop 801
caaccaattcctctactacaacaac

SEQ ID NO: 279792 - DNA, 25 bp, Artificial
  probe
  misc_feature (1)..(25): SEQ ID NO: 989; WAN024FNS; Start 985; Stop 1009
gttatcaacactcacaactaccaag

SEQ ID NO: 279793 - DNA, 25 bp, Artificial
  probe
  misc_feature (1)..(25): SEQ ID NO: 989; WAN024FNS; Start 986; Stop 1010
ttatcaacactcacaactaccaagc

SEQ ID NO: 279794 - DNA, 25 bp, Artificial
  probe
  misc_feature (1)..(25): SEQ ID NO: 989; WAN024FNS; Start 778; Stop 802
aaccaattcctctactacaacaacg

SEQ ID NO: 279795 - DNA, 25 bp, Artificial
  probe
  misc_feature (1)..(25): SEQ ID NO: 989; WAN024FNS; Start 1003; Stop 1027
taccaagcaatgtactatcctgatg

SEQ ID NO: 279796 - DNA, 25 bp, Artificial
  probe
  misc_feature (1)..(25): SEQ ID NO: 989; WAN024FNS; Start 1002; Stop 1026
ctaccaagcaatgtactatcctgat

SEQ ID NO: 279797 - DNA, 25 bp, Artificial
  probe
  misc_feature (1)..(25): SEQ ID NO: 989; WAN024FNS; Start 1000; Stop 1024
aactaccaagcaatgtactatcctg

SEQ ID NO: 279798 - DNA, 25 bp, Artificial
  probe
  misc_feature (1)..(25): SEQ ID NO: 989; WAN024FNS; Start 999; Stop 1023
caactaccaagcaatgtactatcct

SEQ ID NO: 279799 - DNA, 25 bp, Artificial
  probe
  misc_feature (1)..(25): SEQ ID NO: 989; WAN024FNS; Start 781; Stop 805
caattcctctactacaacaacgctc

SEQ ID NO: 279800 - DNA, 25 bp, Artificial
  probe
  misc_feature (1)..(25): SEQ ID NO: 989; WAN024FNS; Start 1001; Stop 1025
actaccaagcaatgtactatcctga

SEQ ID NO: 279801 - DNA, 25 bp, Artificial
  probe
  misc_feature (1)..(25): SEQ ID NO: 989; WAN024FNS; Start 987; Stop 1011
tatcaacactcacaactaccaagca

SEQ ID NO: 279802 - DNA, 25 bp, Artificial
  probe
  misc_feature (1)..(25): SEQ ID NO: 989; WAN024FNS; Start 326; Stop 350
catactatgaccaaggaacatcacg

SEQ ID NO: 279803 - DNA, 25 bp, Artificial
  probe
  misc_feature (1)..(25): SEQ ID NO: 989; WAN024FNS; Start 782; Stop 806
aattcctctactacaacaacgctca

SEQ ID NO: 279804 - DNA, 25 bp, Artificial
  probe
  misc_feature (1)..(25): SEQ ID NO: 989; WAN024FNS; Start 996; Stop 1020
tcacaactaccaagcaatgtactat

SEQ ID NO: 279805 - DNA, 25 bp, Artificial
  probe
  misc_feature (1)..(25): SEQ ID NO: 989; WAN024FNS; Start 997; Stop 1021
cacaactaccaagcaatgtactatc

SEQ ID NO: 279806 - DNA, 25 bp, Artificial
  probe
  misc_feature (1)..(25): SEQ ID NO: 989; WAN024FNS; Start 995; Stop 1019
ctcacaactaccaagcaatgtacta

SEQ ID NO: 279807 - DNA, 25 bp, Artificial
  probe
  misc_feature (1)..(25): SEQ ID NO: 989; WAN024FNS; Start 998; Stop 1022
acaactaccaagcaatgtactatcc

SEQ ID NO: 279808 - DNA, 25 bp, Artificial
  probe
  misc_feature (1)..(25): SEQ ID NO: 989; WAN024FNS; Start 783; Stop 807
attcctctactacaacaacgctcac

SEQ ID NO: 279809 - DNA, 25 bp, Artificial
  probe
  misc_feature (1)..(25): SEQ ID NO: 989; WAN024FNS; Start 463; Stop 487
aatatcaccaacgaaggcactgtta

SEQ ID NO: 279810 - DNA, 25 bp, Artificial
  probe
  misc_feature (1)..(25): SEQ ID NO: 989; WAN024FNS; Start 809; Stop 833
aagatccagacactatgttcgctaa

SEQ ID NO: 279811 - DNA, 25 bp, Artificial
  probe
  misc_feature (1)..(25): SEQ ID NO: 989; WAN024FNS; Start 464; Stop 488
atatcaccaacgaaggcactgttaa

SEQ ID NO: 279812 - DNA, 25 bp, Artificial
  probe
  misc_feature (1)..(25): SEQ ID NO: 989; WAN024FNS; Start 990; Stop 1014
caacactcacaactaccaagcaatg

SEQ ID NO: 279813 - DNA, 25 bp, Artificial
  probe
  misc_feature (1)..(25): SEQ ID NO: 989; WAN024FNS; Start 989; Stop 1013
tcaacactcacaactaccaagcaat

SEQ ID NO: 279814 - DNA, 25 bp, Artificial
  probe
  misc_feature (1)..(25): SEQ ID NO: 989; WAN024FNS; Start 988; Stop 1012
atcaacactcacaactaccaagcaa

SEQ ID NO: 279815 - DNA, 25 bp, Artificial
  probe
  misc_feature (1)..(25): SEQ ID NO: 989; WAN024FNS; Start 789; Stop 813
ctactacaacaacgctcaccaagat

SEQ ID NO: 279816 - DNA, 25 bp, Artificial
  probe
  misc_feature (1)..(25): SEQ ID NO: 989; WAN024FNS; Start 565; Stop 589
gaatcagaagacttggattgtggaa

SEQ ID NO: 279817 - DNA, 25 bp, Artificial
  probe
  misc_feature (1)..(25): SEQ ID NO: 989; WAN024FNS; Start 1024; Stop 1048
gatggatcatacgctggtatcaatg

SEQ ID NO: 279818 - DNA, 25 bp, Artificial
  probe
  misc_feature (1)..(25): SEQ ID NO: 989; WAN024FNS; Start 780; Stop 804
ccaattcctctactacaacaacgct

SEQ ID NO: 279819 - DNA, 25 bp, Artificial
  probe
  misc_feature (1)..(25): SEQ ID NO: 989; WAN024FNS; Start 594; Stop 618
aatcgctacaaccatcacagaagtt

SEQ ID NO: 279820 - DNA, 25 bp, Artificial
  probe
  misc_feature (1)..(25): SEQ ID NO: 989; WAN024FNS; Start 452; Stop 476
ataacaacggaaatatcaccaacga

SEQ ID NO: 279821 - DNA, 25 bp, Artificial
  probe
  misc_feature (1)..(25): SEQ ID NO: 989; WAN024FNS; Start 992; Stop 1016
acactcacaactaccaagcaatgta

SEQ ID NO: 279822 - DNA, 25 bp, Artificial
  probe
  misc_feature (1)..(25): SEQ ID NO: 990; WAN024FV5; Start 855; Stop 879
tacggattattcatcggcttctatt

SEQ ID NO: 279823 - DNA, 25 bp, Artificial
  probe
  misc_feature (1)..(25): SEQ ID NO: 990; WAN024FV5; Start 854; Stop 878
ttacggattattcatcggcttctat

SEQ ID NO: 279824 - DNA, 25 bp, Artificial
  probe
  misc_feature (1)..(25): SEQ ID NO: 990; WAN024FV5; Start 853; Stop 877
attacggattattcatcggcttcta

SEQ ID NO: 279825 - DNA, 25 bp, Artificial
  probe
  misc_feature (1)..(25): SEQ ID NO: 990; WAN024FV5; Start 1106; Stop 1130
tacagtgtgctaattggattgaaga

SEQ ID NO: 279826 - DNA, 25 bp, Artificial
  probe
  misc_feature (1)..(25): SEQ ID NO: 990; WAN024FV5; Start 852; Stop 876
gattacggattattcatcggcttct

SEQ ID NO: 279827 - DNA, 25 bp, Artificial
  probe
  misc_feature (1)..(25): SEQ ID NO: 990; WAN024FV5; Start 1107; Stop 1131
acagtgtgctaattggattgaagaa

SEQ ID NO: 279828 - DNA, 25 bp, Artificial
  probe
  misc_feature (1)..(25): SEQ ID NO: 990; WAN024FV5; Start 856; Stop 880
acggattattcatcggcttctattg

SEQ ID NO: 279829 - DNA, 25 bp, Artificial
  probe
  misc_feature (1)..(25): SEQ ID NO: 990; WAN024FV5; Start 1059; Stop 1083
tctgtatgaattagaggatgttcgt

SEQ ID NO: 279830 - DNA, 25 bp, Artificial
  probe
  misc_feature (1)..(25): SEQ ID NO: 990; WAN024FV5; Start 1056; Stop 1080
tcgtctgtatgaattagaggatgtt

SEQ ID NO: 279831 - DNA, 25 bp, Artificial
  probe
  misc_feature (1)..(25): SEQ ID NO: 990; WAN024FV5; Start 1055; Stop 1079
ttcgtctgtatgaattagaggatgt

SEQ ID NO: 279832 - DNA, 25 bp, Artificial
  probe
  misc_feature (1)..(25): SEQ ID NO: 990; WAN024FV5; Start 1052; Stop 1076
aagttcgtctgtatgaattagagga

SEQ ID NO: 279833 - DNA, 25 bp, Artificial
  probe
  misc_feature (1)..(25): SEQ ID NO: 990; WAN024FV5; Start 1105; Stop 1129
gtacagtgtgctaattggattgaag

SEQ ID NO: 279834 - DNA, 25 bp, Artificial
  probe
  misc_feature (1)..(25): SEQ ID NO: 990; WAN024FV5; Start 1058; Stop 1082
gtctgtatgaattagaggatgttcg

SEQ ID NO: 279835 - DNA, 25 bp, Artificial
  probe
  misc_feature (1)..(25): SEQ ID NO: 990; WAN024FV5; Start 1057; Stop 1081
cgtctgtatgaattagaggatgttc

SEQ ID NO: 279836 - DNA, 25 bp, Artificial
  probe
  misc_feature (1)..(25): SEQ ID NO: 990; WAN024FV5; Start 1054; Stop 1078
gttcgtctgtatgaattagaggatg

SEQ ID NO: 279837 - DNA, 25 bp, Artificial
  probe
  misc_feature (1)..(25): SEQ ID NO: 990; WAN024FV5; Start 1053; Stop 1077
agttcgtctgtatgaattagaggat

SEQ ID NO: 279838 - DNA, 25 bp, Artificial
  probe
  misc_feature (1)..(25): SEQ ID NO: 990; WAN024FV5; Start 651; Stop 675
tgatggatcgttgaatgcctataat

SEQ ID NO: 279839 - DNA, 25 bp, Artificial
  probe
  misc_feature (1)..(25): SEQ ID NO: 990; WAN024FV5; Start 650; Stop 674
atgatggatcgttgaatgcctataa

SEQ ID NO: 279840 - DNA, 25 bp, Artificial
  probe
  misc_feature (1)..(25): SEQ ID NO: 990; WAN024FV5; Start 1104; Stop 1128
agtacagtgtgctaattggattgaa

SEQ ID NO: 279841 - DNA, 25 bp, Artificial
  probe
  misc_feature (1)..(25): SEQ ID NO: 990; WAN024FV5; Start 1101; Stop 1125
atcagtacagtgtgctaattggatt

SEQ ID NO: 279842 - DNA, 25 bp, Artificial
  probe
  misc_feature (1)..(25): SEQ ID NO: 990; WAN024FV5; Start 857; Stop 881
cggattattcatcggcttctattga

SEQ ID NO: 279843 - DNA, 25 bp, Artificial
  probe
  misc_feature (1)..(25): SEQ ID NO: 990; WAN024FV5; Start 652; Stop 676
gatggatcgttgaatgcctataatt

SEQ ID NO: 279844 - DNA, 25 bp, Artificial
  probe
  misc_feature (1)..(25): SEQ ID NO: 990; WAN024FV5; Start 1060; Stop 1084
ctgtatgaattagaggatgttcgtt

SEQ ID NO: 279845 - DNA, 25 bp, Artificial
  probe
  misc_feature (1)..(25): SEQ ID NO: 990; WAN024FV5; Start 649; Stop 673
gatgatggatcgttgaatgcctata

SEQ ID NO: 279846 - DNA, 25 bp, Artificial
  probe
  misc_feature (1)..(25): SEQ ID NO: 990; WAN024FV5; Start 851; Stop 875
tgattacggattattcatcggcttc

SEQ ID NO: 279847 - DNA, 25 bp, Artificial
  probe
  misc_feature (1)..(25): SEQ ID NO: 990; WAN024FV5; Start 1100; Stop 1124
catcagtacagtgtgctaattggat

SEQ ID NO: 279848 - DNA, 25 bp, Artificial
  probe
  misc_feature (1)..(25): SEQ ID NO: 990; WAN024FV5; Start 1103; Stop 1127
cagtacagtgtgctaattggattga

SEQ ID NO: 279849 - DNA, 25 bp, Artificial
  probe
  misc_feature (1)..(25): SEQ ID NO: 990; WAN024FV5; Start 1102; Stop 1126
tcagtacagtgtgctaattggattg

SEQ ID NO: 279850 - DNA, 25 bp, Artificial
  probe
  misc_feature (1)..(25): SEQ ID NO: 990; WAN024FV5; Start 858; Stop 882
ggattattcatcggcttctattgat

SEQ ID NO: 279851 - DNA, 25 bp, Artificial
  probe
  misc_feature (1)..(25): SEQ ID NO: 990; WAN024FV5; Start 128; Stop 152
atatacttgaagaacttgtctctcg

SEQ ID NO: 279852 - DNA, 25 bp, Artificial
  probe
  misc_feature (1)..(25): SEQ ID NO: 990; WAN024FV5; Start 648; Stop 672
agatgatggatcgttgaatgcctat

SEQ ID NO: 279853 - DNA, 25 bp, Artificial
  probe
  misc_feature (1)..(25): SEQ ID NO: 990; WAN024FV5; Start 412; Stop 436
atggcgaagtatgatggaaagatta

SEQ ID NO: 279854 - DNA, 25 bp, Artificial
  probe
  misc_feature (1)..(25): SEQ ID NO: 990; WAN024FV5; Start 407; Stop 431
ttagaatggcgaagtatgatggaaa

SEQ ID NO: 279855 - DNA, 25 bp, Artificial
  probe
  misc_feature (1)..(25): SEQ ID NO: 991; WAN024CPB; Start 46; Stop 70
gtatccttgagtctatgtgcctatg

SEQ ID NO: 279856 - DNA, 25 bp, Artificial
  probe
  misc_feature (1)..(25): SEQ ID NO: 991; WAN024CPB; Start 1265; Stop 1289
cttctccatctcttccaatcaatcc

SEQ ID NO: 279857 - DNA, 25 bp, Artificial
  probe
  misc_feature (1)..(25): SEQ ID NO: 991; WAN024CPB; Start 1264; Stop 1288
ccttctccatctcttccaatcaatc

SEQ ID NO: 279858 - DNA, 25 bp, Artificial
  probe
  misc_feature (1)..(25): SEQ ID NO: 991; WAN024CPB; Start 1336; Stop 1360
gctaatcgtattatcgctgaagatg

SEQ ID NO: 279859 - DNA, 25 bp, Artificial
  probe
  misc_feature (1)..(25): SEQ ID NO: 991; WAN024CPB; Start 1335; Stop 1359
tgctaatcgtattatcgctgaagat

SEQ ID NO: 279860 - DNA, 25 bp, Artificial
  probe
  misc_feature (1)..(25): SEQ ID NO: 991; WAN024CPB; Start 1334; Stop 1358
atgctaatcgtattatcgctgaaga

SEQ ID NO: 279861 - DNA, 25 bp, Artificial
  probe
  misc_feature (1)..(25): SEQ ID NO: 991; WAN024CPB; Start 1333; Stop 1357
gatgctaatcgtattatcgctgaag

SEQ ID NO: 279862 - DNA, 25 bp, Artificial
  probe
  misc_feature (1)..(25): SEQ ID NO: 991; WAN024CPB; Start 1340; Stop 1364
atcgtattatcgctgaagatgaatc

SEQ ID NO: 279863 - DNA, 25 bp, Artificial
  probe
  misc_feature (1)..(25): SEQ ID NO: 991; WAN024CPB; Start 1332; Stop 1356
tgatgctaatcgtattatcgctgaa

SEQ ID NO: 279864 - DNA, 25 bp, Artificial
  probe
  misc_feature (1)..(25): SEQ ID NO: 991; WAN024CPB; Start 1331; Stop 1355
ttgatgctaatcgtattatcgctga

SEQ ID NO: 279865 - DNA, 25 bp, Artificial
  probe
  misc_feature (1)..(25): SEQ ID NO: 991; WAN024CPB; Start 1778; Stop 1802
ctggagaagaattaacgaatgttgt

SEQ ID NO: 279866 - DNA, 25 bp, Artificial
  probe
  misc_feature (1)..(25): SEQ ID NO: 991; WAN024CPB; Start 1777; Stop 1801
actggagaagaattaacgaatgttg

SEQ ID NO: 279867 - DNA, 25 bp, Artificial
  probe
  misc_feature (1)..(25): SEQ ID NO: 991; WAN024CPB; Start 1246; Stop 1270
aacaatagtctagcaacaccttctc

SEQ ID NO: 279868 - DNA, 25 bp, Artificial
  probe
  misc_feature (1)..(25): SEQ ID NO: 991; WAN024CPB; Start 1042; Stop 1066
aatgaagtagtgtctagtctaggca

SEQ ID NO: 279869 - DNA, 25 bp, Artificial
  probe
  misc_feature (1)..(25): SEQ ID NO: 991; WAN024CPB; Start 1266; Stop 1290
ttctccatctcttccaatcaatcca

SEQ ID NO: 279870 - DNA, 25 bp, Artificial
  probe
  misc_feature (1)..(25): SEQ ID NO: 991; WAN024CPB; Start 1263; Stop 1287
accttctccatctcttccaatcaat

SEQ ID NO: 279871 - DNA, 25 bp, Artificial
  probe
  misc_feature (1)..(25): SEQ ID NO: 991; WAN024CPB; Start 1043; Stop 1067
atgaagtagtgtctagtctaggcag

SEQ ID NO: 279872 - DNA, 25 bp, Artificial
  probe
  misc_feature (1)..(25): SEQ ID NO: 991; WAN024CPB; Start 1341; Stop 1365
tcgtattatcgctgaagatgaatca

SEQ ID NO: 279873 - DNA, 25 bp, Artificial
  probe
  misc_feature (1)..(25): SEQ ID NO: 991; WAN024CPB; Start 1339; Stop 1363
aatcgtattatcgctgaagatgaat

SEQ ID NO: 279874 - DNA, 25 bp, Artificial
  probe
  misc_feature (1)..(25): SEQ ID NO: 991; WAN024CPB; Start 1779; Stop 1803
tggagaagaattaacgaatgttgtt

SEQ ID NO: 279875 - DNA, 25 bp, Artificial
  probe
  misc_feature (1)..(25): SEQ ID NO: 991; WAN024CPB; Start 883; Stop 907
gctaagattatcagtcgtacaccaa

SEQ ID NO: 279876 - DNA, 25 bp, Artificial
  probe
  misc_feature (1)..(25): SEQ ID NO: 991; WAN024CPB; Start 1041; Stop 1065
taatgaagtagtgtctagtctaggc

SEQ ID NO: 279877 - DNA, 25 bp, Artificial
  probe
  misc_feature (1)..(25): SEQ ID NO: 991; WAN024CPB; Start 47; Stop 71
tatccttgagtctatgtgcctatgc

SEQ ID NO: 279878 - DNA, 25 bp, Artificial
  probe
  misc_feature (1)..(25): SEQ ID NO: 991; WAN024CPB; Start 1249; Stop 1273
aatagtctagcaacaccttctccat

SEQ ID NO: 279879 - DNA, 25 bp, Artificial
  probe
  misc_feature (1)..(25): SEQ ID NO: 991; WAN024CPB; Start 1699; Stop 1723
attggtcattctcacagtaactatg

SEQ ID NO: 279880 - DNA, 25 bp, Artificial
  probe
  misc_feature (1)..(25): SEQ ID NO: 991; WAN024CPB; Start 1267; Stop 1291
tctccatctcttccaatcaatccag

SEQ ID NO: 279881 - DNA, 25 bp, Artificial
  probe
  misc_feature (1)..(25): SEQ ID NO: 991; WAN024CPB; Start 247; Stop 271
cacggtgaccactatcattactata

SEQ ID NO: 279882 - DNA, 25 bp, Artificial
  probe
  misc_feature (1)..(25): SEQ ID NO: 991; WAN024CPB; Start 1337; Stop 1361
ctaatcgtattatcgctgaagatga

SEQ ID NO: 279883 - DNA, 25 bp, Artificial
  probe
  misc_feature (1)..(25): SEQ ID NO: 991; WAN024CPB; Start 1045; Stop 1069
gaagtagtgtctagtctaggcagtc

SEQ ID NO: 279884 - DNA, 25 bp, Artificial
  probe
  misc_feature (1)..(25): SEQ ID NO: 991; WAN024CPB; Start 346; Stop 370
gctgatattgtcaatgaagtcaagg

SEQ ID NO: 279885 - DNA, 25 bp, Artificial
  probe
  misc_feature (1)..(25): SEQ ID NO: 991; WAN024CPB; Start 345; Stop 369
cgctgatattgtcaatgaagtcaag

SEQ ID NO: 279886 - DNA, 25 bp, Artificial
  probe
  misc_feature (1)..(25): SEQ ID NO: 991; WAN024CPB; Start 1307; Stop 1331
aacatgaagaagatggatacggatt

SEQ ID NO: 279887 - DNA, 25 bp, Artificial
  probe
  misc_feature (1)..(25): SEQ ID NO: 991; WAN024CPB; Start 1250; Stop 1274
atagtctagcaacaccttctccatc

SEQ ID NO: 279888 - DNA, 25 bp, Artificial
  probe
  misc_feature (1)..(25): SEQ ID NO: 992; WAN024DVM; Start 284; Stop 308
ttcaattattcacttttgtcttcaa

SEQ ID NO: 279889 - DNA, 25 bp, Artificial
  probe
  misc_feature (1)..(25): SEQ ID NO: 992; WAN024DVM; Start 283; Stop 307
attcaattattcacttttgtcttca

SEQ ID NO: 279890 - DNA, 25 bp, Artificial
  probe
  misc_feature (1)..(25): SEQ ID NO: 992; WAN024DVM; Start 112; Stop 136
tttcaattgcaaatgatgtgttatt

SEQ ID NO: 279891 - DNA, 25 bp, Artificial
  probe
  misc_feature (1)..(25): SEQ ID NO: 992; WAN024DVM; Start 113; Stop 137
ttcaattgcaaatgatgtgttatta

SEQ ID NO: 279892 - DNA, 25 bp, Artificial
  probe
  misc_feature (1)..(25): SEQ ID NO: 992; WAN024DVM; Start 114; Stop 138
tcaattgcaaatgatgtgttattat

SEQ ID NO: 279893 - DNA, 25 bp, Artificial
  probe
  misc_feature (1)..(25): SEQ ID NO: 992; WAN024DVM; Start 285; Stop 309
tcaattattcacttttgtcttcaaa

SEQ ID NO: 279894 - DNA, 25 bp, Artificial
  probe
  misc_feature (1)..(25): SEQ ID NO: 992; WAN024DVM; Start 115; Stop 139
caattgcaaatgatgtgttattatt

SEQ ID NO: 279895 - DNA, 25 bp, Artificial
  probe
  misc_feature (1)..(25): SEQ ID NO: 992; WAN024DVM; Start 111; Stop 135
ttttcaattgcaaatgatgtgttat

SEQ ID NO: 279896 - DNA, 25 bp, Artificial
  probe
  misc_feature (1)..(25): SEQ ID NO: 992; WAN024DVM; Start 286; Stop 310
caattattcacttttgtcttcaaaa

SEQ ID NO: 279897 - DNA, 25 bp, Artificial
  probe
  misc_feature (1)..(25): SEQ ID NO: 993; WAN024G6M; Start 754; Stop 778
ctcgttattatctggcaaggctata

SEQ ID NO: 279898 - DNA, 25 bp, Artificial
  probe
  misc_feature (1)..(25): SEQ ID NO: 993; WAN024G6M; Start 755; Stop 779
tcgttattatctggcaaggctatat

SEQ ID NO: 279899 - DNA, 25 bp, Artificial
  probe
  misc_feature (1)..(25): SEQ ID NO: 993; WAN024G6M; Start 715; Stop 739
ttaacacctctgacctatctgattg

SEQ ID NO: 279900 - DNA, 25 bp, Artificial
  probe
  misc_feature (1)..(25): SEQ ID NO: 993; WAN024G6M; Start 368; Stop 392
ttcagactggtatcaatcaattcct

SEQ ID NO: 279901 - DNA, 25 bp, Artificial
  probe
  misc_feature (1)..(25): SEQ ID NO: 993; WAN024G6M; Start 748; Stop 772
actcttctcgttattatctggcaag

SEQ ID NO: 279902 - DNA, 25 bp, Artificial
  probe
  misc_feature (1)..(25): SEQ ID NO: 993; WAN024G6M; Start 747; Stop 771
aactcttctcgttattatctggcaa

SEQ ID NO: 279903 - DNA, 25 bp, Artificial
  probe
  misc_feature (1)..(25): SEQ ID NO: 993; WAN024G6M; Start 744; Stop 768
tggaactcttctcgttattatctgg

SEQ ID NO: 279904 - DNA, 25 bp, Artificial
  probe
  misc_feature (1)..(25): SEQ ID NO: 993; WAN024G6M; Start 738; Stop 762
tgtcaatggaactcttctcgttatt

SEQ ID NO: 279905 - DNA, 25 bp, Artificial
  probe
  misc_feature (1)..(25): SEQ ID NO: 993; WAN024G6M; Start 756; Stop 780
cgttattatctggcaaggctatatt

SEQ ID NO: 279906 - DNA, 25 bp, Artificial
  probe
  misc_feature (1)..(25): SEQ ID NO: 993; WAN024G6M; Start 746; Stop 770
gaactcttctcgttattatctggca

SEQ ID NO: 279907 - DNA, 25 bp, Artificial
  probe
  misc_feature (1)..(25): SEQ ID NO: 993; WAN024G6M; Start 737; Stop 761
ttgtcaatggaactcttctcgttat

SEQ ID NO: 279908 - DNA, 25 bp, Artificial
  probe
  misc_feature (1)..(25): SEQ ID NO: 993; WAN024G6M; Start 714; Stop 738
attaacacctctgacctatctgatt

SEQ ID NO: 279909 - DNA, 25 bp, Artificial
  probe
  misc_feature (1)..(25): SEQ ID NO: 993; WAN024G6M; Start 749; Stop 773
ctcttctcgttattatctggcaagg

SEQ ID NO: 279910 - DNA, 25 bp, Artificial
  probe
  misc_feature (1)..(25): SEQ ID NO: 993; WAN024G6M; Start 753; Stop 777
tctcgttattatctggcaaggctat

SEQ ID NO: 279911 - DNA, 25 bp, Artificial
  probe
  misc_feature (1)..(25): SEQ ID NO: 993; WAN024G6M; Start 367; Stop 391
attcagactggtatcaatcaattcc

SEQ ID NO: 279912 - DNA, 25 bp, Artificial
  probe
  misc_feature (1)..(25): SEQ ID NO: 993; WAN024G6M; Start 377; Stop 401
gtatcaatcaattcctgcgtctctt

SEQ ID NO: 279913 - DNA, 25 bp, Artificial
  probe
  misc_feature (1)..(25): SEQ ID NO: 993; WAN024G6M; Start 745; Stop 769
ggaactcttctcgttattatctggc

SEQ ID NO: 279914 - DNA, 25 bp, Artificial
  probe
  misc_feature (1)..(25): SEQ ID NO: 993; WAN024G6M; Start 752; Stop 776
ttctcgttattatctggcaaggcta

SEQ ID NO: 279915 - DNA, 25 bp, Artificial
  probe
  misc_feature (1)..(25): SEQ ID NO: 993; WAN024G6M; Start 736; Stop 760
attgtcaatggaactcttctcgtta

SEQ ID NO: 279916 - DNA, 25 bp, Artificial
  probe
  misc_feature (1)..(25): SEQ ID NO: 993; WAN024G6M; Start 712; Stop 736
ttattaacacctctgacctatctga

SEQ ID NO: 279917 - DNA, 25 bp, Artificial
  probe
  misc_feature (1)..(25): SEQ ID NO: 993; WAN024G6M; Start 739; Stop 763
gtcaatggaactcttctcgttatta

SEQ ID NO: 279918 - DNA, 25 bp, Artificial
  probe
  misc_feature (1)..(25): SEQ ID NO: 993; WAN024G6M; Start 731; Stop 755
atctgattgtcaatggaactcttct

SEQ ID NO: 279919 - DNA, 25 bp, Artificial
  probe
  misc_feature (1)..(25): SEQ ID NO: 993; WAN024G6M; Start 728; Stop 752
cctatctgattgtcaatggaactct

SEQ ID NO: 279920 - DNA, 25 bp, Artificial
  probe
  misc_feature (1)..(25): SEQ ID NO: 993; WAN024G6M; Start 713; Stop 737
tattaacacctctgacctatctgat

SEQ ID NO: 279921 - DNA, 25 bp, Artificial
  probe
  misc_feature (1)..(25): SEQ ID NO: 993; WAN024G6M; Start 727; Stop 751
acctatctgattgtcaatggaactc

SEQ ID NO: 279922 - DNA, 25 bp, Artificial
  probe
  misc_feature (1)..(25): SEQ ID NO: 993; WAN024G6M; Start 732; Stop 756
tctgattgtcaatggaactcttctc

SEQ ID NO: 279923 - DNA, 25 bp, Artificial
  probe
  misc_feature (1)..(25): SEQ ID NO: 993; WAN024G6M; Start 716; Stop 740
taacacctctgacctatctgattgt

SEQ ID NO: 279924 - DNA, 25 bp, Artificial
  probe
  misc_feature (1)..(25): SEQ ID NO: 993; WAN024G6M; Start 369; Stop 393
tcagactggtatcaatcaattcctg

SEQ ID NO: 279925 - DNA, 25 bp, Artificial
  probe
  misc_feature (1)..(25): SEQ ID NO: 993; WAN024G6M; Start 819; Stop 843
tgctcttatcaattacctcttacag

SEQ ID NO: 279926 - DNA, 25 bp, Artificial
  probe
  misc_feature (1)..(25): SEQ ID NO: 993; WAN024G6M; Start 743; Stop 767
atggaactcttctcgttattatctg

SEQ ID NO: 279927 - DNA, 25 bp, Artificial
  probe
  misc_feature (1)..(25): SEQ ID NO: 993; WAN024G6M; Start 735; Stop 759
gattgtcaatggaactcttctcgtt

SEQ ID NO: 279928 - DNA, 25 bp, Artificial
  probe
  misc_feature (1)..(25): SEQ ID NO: 993; WAN024G6M; Start 726; Stop 750
gacctatctgattgtcaatggaact

SEQ ID NO: 279929 - DNA, 25 bp, Artificial
  probe
  misc_feature (1)..(25): SEQ ID NO: 993; WAN024G6M; Start 730; Stop 754
tatctgattgtcaatggaactcttc

SEQ ID NO: 279930 - DNA, 25 bp, Artificial
  probe
  misc_feature (1)..(25): SEQ ID NO: 994; WAN024DHV; Start 260; Stop 284
aagaaggtcaatacgctgtcaagta

SEQ ID NO: 279931 - DNA, 25 bp, Artificial
  probe
  misc_feature (1)..(25): SEQ ID NO: 994; WAN024DHV; Start 258; Stop 282
agaagaaggtcaatacgctgtcaag

SEQ ID NO: 279932 - DNA, 25 bp, Artificial
  probe
  misc_feature (1)..(25): SEQ ID NO: 994; WAN024DHV; Start 257; Stop 281
gagaagaaggtcaatacgctgtcaa

SEQ ID NO: 279933 - DNA, 25 bp, Artificial
  probe
  misc_feature (1)..(25): SEQ ID NO: 994; WAN024DHV; Start 262; Stop 286
gaaggtcaatacgctgtcaagtatg

SEQ ID NO: 279934 - DNA, 25 bp, Artificial
  probe
  misc_feature (1)..(25): SEQ ID NO: 994; WAN024DHV; Start 65; Stop 89
atatccaaacacatccaactaaagc

SEQ ID NO: 279935 - DNA, 25 bp, Artificial
  probe
  misc_feature (1)..(25): SEQ ID NO: 994; WAN024DHV; Start 261; Stop 285
agaaggtcaatacgctgtcaagtat

SEQ ID NO: 279936 - DNA, 25 bp, Artificial
  probe
  misc_feature (1)..(25): SEQ ID NO: 994; WAN024DHV; Start 259; Stop 283
gaagaaggtcaatacgctgtcaagt

SEQ ID NO: 279937 - DNA, 25 bp, Artificial
  probe
  misc_feature (1)..(25): SEQ ID NO: 994; WAN024DHV; Start 66; Stop 90
tatccaaacacatccaactaaagcc

SEQ ID NO: 279938 - DNA, 25 bp, Artificial
  probe
  misc_feature (1)..(25): SEQ ID NO: 994; WAN024DHV; Start 71; Stop 95
aaacacatccaactaaagcccatac

SEQ ID NO: 279939 - DNA, 25 bp, Artificial
  probe
  misc_feature (1)..(25): SEQ ID NO: 994; WAN024DHV; Start 70; Stop 94
caaacacatccaactaaagcccata

SEQ ID NO: 279940 - DNA, 25 bp, Artificial
  probe
  misc_feature (1)..(25): SEQ ID NO: 994; WAN024DHV; Start 60; Stop 84
ctactatatccaaacacatccaact

SEQ ID NO: 279941 - DNA, 25 bp, Artificial
  probe
  misc_feature (1)..(25): SEQ ID NO: 994; WAN024DHV; Start 59; Stop 83
tctactatatccaaacacatccaac

SEQ ID NO: 279942 - DNA, 25 bp, Artificial
  probe
  misc_feature (1)..(25): SEQ ID NO: 994; WAN024DHV; Start 62; Stop 86
actatatccaaacacatccaactaa

SEQ ID NO: 279943 - DNA, 25 bp, Artificial
  probe
  misc_feature (1)..(25): SEQ ID NO: 994; WAN024DHV; Start 263; Stop 287
aaggtcaatacgctgtcaagtatgc

SEQ ID NO: 279944 - DNA, 25 bp, Artificial
  probe
  misc_feature (1)..(25): SEQ ID NO: 994; WAN024DHV; Start 292; Stop 316
cgtcgctatagagaaattcgtcaaa

SEQ ID NO: 279945 - DNA, 25 bp, Artificial
  probe
  misc_feature (1)..(25): SEQ ID NO: 994; WAN024DHV; Start 61; Stop 85
tactatatccaaacacatccaacta

SEQ ID NO: 279946 - DNA, 25 bp, Artificial
  probe
  misc_feature (1)..(25): SEQ ID NO: 994; WAN024DHV; Start 179; Stop 203
tgagatgtcatcgaaattgtttggt

SEQ ID NO: 279947 - DNA, 25 bp, Artificial
  probe
  misc_feature (1)..(25): SEQ ID NO: 994; WAN024DHV; Start 64; Stop 88
tatatccaaacacatccaactaaag

SEQ ID NO: 279948 - DNA, 25 bp, Artificial
  probe
  misc_feature (1)..(25): SEQ ID NO: 994; WAN024DHV; Start 63; Stop 87
ctatatccaaacacatccaactaaa

SEQ ID NO: 279949 - DNA, 25 bp, Artificial
  probe
  misc_feature (1)..(25): SEQ ID NO: 994; WAN024DHV; Start 256; Stop 280
ggagaagaaggtcaatacgctgtca

SEQ ID NO: 279950 - DNA, 25 bp, Artificial
  probe
  misc_feature (1)..(25): SEQ ID NO: 994; WAN024DHV; Start 67; Stop 91
atccaaacacatccaactaaagccc

SEQ ID NO: 279951 - DNA, 25 bp, Artificial
  probe
  misc_feature (1)..(25): SEQ ID NO: 994; WAN024DHV; Start 268; Stop 292
caatacgctgtcaagtatgccagac

SEQ ID NO: 279952 - DNA, 25 bp, Artificial
  probe
  misc_feature (1)..(25): SEQ ID NO: 994; WAN024DHV; Start 266; Stop 290
gtcaatacgctgtcaagtatgccag

SEQ ID NO: 279953 - DNA, 25 bp, Artificial
  probe
  misc_feature (1)..(25): SEQ ID NO: 994; WAN024DHV; Start 267; Stop 291
tcaatacgctgtcaagtatgccaga

SEQ ID NO: 279954 - DNA, 25 bp, Artificial
  probe
  misc_feature (1)..(25): SEQ ID NO: 994; WAN024DHV; Start 69; Stop 93
ccaaacacatccaactaaagcccat

SEQ ID NO: 279955 - DNA, 25 bp, Artificial
  probe
  misc_feature (1)..(25): SEQ ID NO: 994; WAN024DHV; Start 178; Stop 202
atgagatgtcatcgaaattgtttgg

SEQ ID NO: 279956 - DNA, 25 bp, Artificial
  probe
  misc_feature (1)..(25): SEQ ID NO: 994; WAN024DHV; Start 293; Stop 317
gtcgctatagagaaattcgtcaaaa

SEQ ID NO: 279957 - DNA, 25 bp, Artificial
  probe
  misc_feature (1)..(25): SEQ ID NO: 994; WAN024DHV; Start 264; Stop 288
aggtcaatacgctgtcaagtatgcc

SEQ ID NO: 279958 - DNA, 25 bp, Artificial
  probe
  misc_feature (1)..(25): SEQ ID NO: 994; WAN024DHV; Start 68; Stop 92
tccaaacacatccaactaaagccca

SEQ ID NO: 279959 - DNA, 25 bp, Artificial
  probe
  misc_feature (1)..(25): SEQ ID NO: 994; WAN024DHV; Start 291; Stop 315
acgtcgctatagagaaattcgtcaa

SEQ ID NO: 279960 - DNA, 25 bp, Artificial
  probe
  misc_feature (1)..(25): SEQ ID NO: 994; WAN024DHV; Start 224; Stop 248
cgattgattttcaagaaagaatcct

SEQ ID NO: 279961 - DNA, 25 bp, Artificial
  probe
  misc_feature (1)..(25): SEQ ID NO: 994; WAN024DHV; Start 223; Stop 247
tcgattgattttcaagaaagaatcc

SEQ ID NO: 279962 - DNA, 25 bp, Artificial
  probe
  misc_feature (1)..(25): SEQ ID NO: 994; WAN024DHV; Start 138; Stop 162
aaatttaagtaatcttgagaaccaa

SEQ ID NO: 279963 - DNA, 25 bp, Artificial
  probe
  misc_feature (1)..(25): SEQ ID NO: 995; WAN024CI6; Start 418; Stop 442
gaagaaggattgacgactaagaaga

SEQ ID NO: 279964 - DNA, 25 bp, Artificial
  probe
  misc_feature (1)..(25): SEQ ID NO: 995; WAN024CI6; Start 420; Stop 444
agaaggattgacgactaagaagatt

SEQ ID NO: 279965 - DNA, 25 bp, Artificial
  probe
  misc_feature (1)..(25): SEQ ID NO: 995; WAN024CI6; Start 419; Stop 443
aagaaggattgacgactaagaagat

SEQ ID NO: 279966 - DNA, 25 bp, Artificial
  probe
  misc_feature (1)..(25): SEQ ID NO: 995; WAN024CI6; Start 121; Stop 145
tacaacattgcttcagatagtcctt

SEQ ID NO: 279967 - DNA, 25 bp, Artificial
  probe
  misc_feature (1)..(25): SEQ ID NO: 995; WAN024CI6; Start 120; Stop 144
ttacaacattgcttcagatagtcct

SEQ ID NO: 279968 - DNA, 25 bp, Artificial
  probe
  misc_feature (1)..(25): SEQ ID NO: 995; WAN024CI6; Start 417; Stop 441
ggaagaaggattgacgactaagaag

SEQ ID NO: 279969 - DNA, 25 bp, Artificial
  probe
  misc_feature (1)..(25): SEQ ID NO: 995; WAN024CI6; Start 414; Stop 438
gatggaagaaggattgacgactaag

SEQ ID NO: 279970 - DNA, 25 bp, Artificial
  probe
  misc_feature (1)..(25): SEQ ID NO: 995; WAN024CI6; Start 152; Stop 176
tgaataagcgtctggatggtattat

SEQ ID NO: 279971 - DNA, 25 bp, Artificial
  probe
  misc_feature (1)..(25): SEQ ID NO: 995; WAN024CI6; Start 151; Stop 175
atgaataagcgtctggatggtatta

SEQ ID NO: 279972 - DNA, 25 bp, Artificial
  probe
  misc_feature (1)..(25): SEQ ID NO: 995; WAN024CI6; Start 122; Stop 146
acaacattgcttcagatagtccttc

SEQ ID NO: 279973 - DNA, 25 bp, Artificial
  probe
  misc_feature (1)..(25): SEQ ID NO: 995; WAN024CI6; Start 421; Stop 445
gaaggattgacgactaagaagattc

SEQ ID NO: 279974 - DNA, 25 bp, Artificial
  probe
  misc_feature (1)..(25): SEQ ID NO: 995; WAN024CI6; Start 150; Stop 174
aatgaataagcgtctggatggtatt

SEQ ID NO: 279975 - DNA, 25 bp, Artificial
  probe
  misc_feature (1)..(25): SEQ ID NO: 995; WAN024CI6; Start 415; Stop 439
atggaagaaggattgacgactaaga

SEQ ID NO: 279976 - DNA, 25 bp, Artificial
  probe
  misc_feature (1)..(25): SEQ ID NO: 995; WAN024CI6; Start 154; Stop 178
aataagcgtctggatggtattatgg

SEQ ID NO: 279977 - DNA, 25 bp, Artificial
  probe
  misc_feature (1)..(25): SEQ ID NO: 995; WAN024CI6; Start 153; Stop 177
gaataagcgtctggatggtattatg

SEQ ID NO: 279978 - DNA, 25 bp, Artificial
  probe
  misc_feature (1)..(25): SEQ ID NO: 995; WAN024CI6; Start 416; Stop 440
tggaagaaggattgacgactaagaa

SEQ ID NO: 279979 - DNA, 25 bp, Artificial
  probe
  misc_feature (1)..(25): SEQ ID NO: 995; WAN024CI6; Start 123; Stop 147
caacattgcttcagatagtccttct

SEQ ID NO: 279980 - DNA, 25 bp, Artificial
  probe
  misc_feature (1)..(25): SEQ ID NO: 995; WAN024CI6; Start 413; Stop 437
tgatggaagaaggattgacgactaa

SEQ ID NO: 279981 - DNA, 25 bp, Artificial
  probe
  misc_feature (1)..(25): SEQ ID NO: 995; WAN024CI6; Start 422; Stop 446
aaggattgacgactaagaagattct

SEQ ID NO: 279982 - DNA, 25 bp, Artificial
  probe
  misc_feature (1)..(25): SEQ ID NO: 995; WAN024CI6; Start 412; Stop 436
ctgatggaagaaggattgacgacta

SEQ ID NO: 279983 - DNA, 25 bp, Artificial
  probe
  misc_feature (1)..(25): SEQ ID NO: 995; WAN024CI6; Start 35; Stop 59
ctggtgatagtacggttatcttagc

SEQ ID NO: 279984 - DNA, 25 bp, Artificial
  probe
  misc_feature (1)..(25): SEQ ID NO: 995; WAN024CI6; Start 34; Stop 58
gctggtgatagtacggttatcttag

SEQ ID NO: 279985 - DNA, 25 bp, Artificial
  probe
  misc_feature (1)..(25): SEQ ID NO: 995; WAN024CI6; Start 644; Stop 668
aagatgaggaattgttgctagaatt

SEQ ID NO: 279986 - DNA, 25 bp, Artificial
  probe
  misc_feature (1)..(25): SEQ ID NO: 995; WAN024CI6; Start 648; Stop 672
tgaggaattgttgctagaattatca

SEQ ID NO: 279987 - DNA, 25 bp, Artificial
  probe
  misc_feature (1)..(25): SEQ ID NO: 995; WAN024CI6; Start 33; Stop 57
ggctggtgatagtacggttatctta

SEQ ID NO: 279988 - DNA, 25 bp, Artificial
  probe
  misc_feature (1)..(25): SEQ ID NO: 995; WAN024CI6; Start 155; Stop 179
ataagcgtctggatggtattatggc

SEQ ID NO: 279989 - DNA, 25 bp, Artificial
  probe
  misc_feature (1)..(25): SEQ ID NO: 995; WAN024CI6; Start 91; Stop 115
ctgggatttagagaggttggtattt

SEQ ID NO: 279990 - DNA, 25 bp, Artificial
  probe
  misc_feature (1)..(25): SEQ ID NO: 995; WAN024CI6; Start 149; Stop 173
aaatgaataagcgtctggatggtat

SEQ ID NO: 279991 - DNA, 25 bp, Artificial
  probe
  misc_feature (1)..(25): SEQ ID NO: 995; WAN024CI6; Start 645; Stop 669
agatgaggaattgttgctagaatta

SEQ ID NO: 279992 - DNA, 25 bp, Artificial
  probe
  misc_feature (1)..(25): SEQ ID NO: 995; WAN024CI6; Start 148; Stop 172
gaaatgaataagcgtctggatggta

SEQ ID NO: 279993 - DNA, 25 bp, Artificial
  probe
  misc_feature (1)..(25): SEQ ID NO: 995; WAN024CI6; Start 90; Stop 114
actgggatttagagaggttggtatt

SEQ ID NO: 279994 - DNA, 25 bp, Artificial
  probe
  misc_feature (1)..(25): SEQ ID NO: 995; WAN024CI6; Start 37; Stop 61
ggtgatagtacggttatcttagctc

SEQ ID NO: 279995 - DNA, 25 bp, Artificial
  probe
  misc_feature (1)..(25): SEQ ID NO: 995; WAN024CI6; Start 138; Stop 162
tagtccttctgaaatgaataagcgt

SEQ ID NO: 279996 - DNA, 25 bp, Artificial
  probe
  misc_feature (1)..(25): SEQ ID NO: 996; WAN024DQN; Start 50; Stop 74
aagaagttcggaatctactgacaga

SEQ ID NO: 279997 - DNA, 25 bp, Artificial
  probe
  misc_feature (1)..(25): SEQ ID NO: 996; WAN024DQN; Start 401; Stop 425
cacttgatttaacggatatagcagg

SEQ ID NO: 279998 - DNA, 25 bp, Artificial
  probe
  misc_feature (1)..(25): SEQ ID NO: 996; WAN024DQN; Start 400; Stop 424
acacttgatttaacggatatagcag

SEQ ID NO: 279999 - DNA, 25 bp, Artificial
  probe
  misc_feature (1)..(25): SEQ ID NO: 996; WAN024DQN; Start 399; Stop 423
gacacttgatttaacggatatagca

SEQ ID NO: 280000 - DNA, 25 bp, Artificial
  probe
  misc_feature (1)..(25): SEQ ID NO: 996; WAN024DQN; Start 585; Stop 609
aaagaccagaagtttccttgaattg

SEQ ID NO: 280001 - DNA, 25 bp, Artificial
  probe
  misc_feature (1)..(25): SEQ ID NO: 996; WAN024DQN; Start 398; Stop 422
agacacttgatttaacggatatagc

SEQ ID NO: 280002 - DNA, 25 bp, Artificial
  probe
  misc_feature (1)..(25): SEQ ID NO: 996; WAN024DQN; Start 470; Stop 494
aaccgaatcttagttctatgaaagc

SEQ ID NO: 280003 - DNA, 25 bp, Artificial
  probe
  misc_feature (1)..(25): SEQ ID NO: 996; WAN024DQN; Start 51; Stop 75
agaagttcggaatctactgacagat

SEQ ID NO: 280004 - DNA, 25 bp, Artificial
  probe
  misc_feature (1)..(25): SEQ ID NO: 996; WAN024DQN; Start 76; Stop 100
tatccttctgaggctatcgagttat

SEQ ID NO: 280005 - DNA, 25 bp, Artificial
  probe
  misc_feature (1)..(25): SEQ ID NO: 996; WAN024DQN; Start 44; Stop 68
cttggaaagaagttcggaatctact

SEQ ID NO: 280006 - DNA, 25 bp, Artificial
  probe
  misc_feature (1)..(25): SEQ ID NO: 996; WAN024DQN; Start 75; Stop 99
ttatccttctgaggctatcgagtta

SEQ ID NO: 280007 - DNA, 25 bp, Artificial
  probe
  misc_feature (1)..(25): SEQ ID NO: 996; WAN024DQN; Start 599; Stop 623
tccttgaattgctgaaactaactaa

SEQ ID NO: 280008 - DNA, 25 bp, Artificial
  probe
  misc_feature (1)..(25): SEQ ID NO: 996; WAN024DQN; Start 48; Stop 72
gaaagaagttcggaatctactgaca

SEQ ID NO: 280009 - DNA, 25 bp, Artificial
  probe
  misc_feature (1)..(25): SEQ ID NO: 996; WAN024DQN; Start 45; Stop 69
ttggaaagaagttcggaatctactg

SEQ ID NO: 280010 - DNA, 25 bp, Artificial
  probe
  misc_feature (1)..(25): SEQ ID NO: 996; WAN024DQN; Start 49; Stop 73
aaagaagttcggaatctactgacag

SEQ ID NO: 280011 - DNA, 25 bp, Artificial
  probe
  misc_feature (1)..(25): SEQ ID NO: 996; WAN024DQN; Start 394; Stop 418
ttgaagacacttgatttaacggata

SEQ ID NO: 280012 - DNA, 25 bp, Artificial
  probe
  misc_feature (1)..(25): SEQ ID NO: 996; WAN024DQN; Start 77; Stop 101
atccttctgaggctatcgagttatt

SEQ ID NO: 280013 - DNA, 25 bp, Artificial
  probe
  misc_feature (1)..(25): SEQ ID NO: 996; WAN024DQN; Start 74; Stop 98
attatccttctgaggctatcgagtt

SEQ ID NO: 280014 - DNA, 25 bp, Artificial
  probe
  misc_feature (1)..(25): SEQ ID NO: 996; WAN024DQN; Start 598; Stop 622
ttccttgaattgctgaaactaacta

SEQ ID NO: 280015 - DNA, 25 bp, Artificial
  probe
  misc_feature (1)..(25): SEQ ID NO: 996; WAN024DQN; Start 72; Stop 96
agattatccttctgaggctatcgag

SEQ ID NO: 280016 - DNA, 25 bp, Artificial
  probe
  misc_feature (1)..(25): SEQ ID NO: 996; WAN024DQN; Start 47; Stop 71
ggaaagaagttcggaatctactgac

SEQ ID NO: 280017 - DNA, 25 bp, Artificial
  probe
  misc_feature (1)..(25): SEQ ID NO: 996; WAN024DQN; Start 509; Stop 533
taacagattcgcagtttcagatcat

SEQ ID NO: 280018 - DNA, 25 bp, Artificial
  probe
  misc_feature (1)..(25): SEQ ID NO: 996; WAN024DQN; Start 395; Stop 419
tgaagacacttgatttaacggatat

SEQ ID NO: 280019 - DNA, 25 bp, Artificial
  probe
  misc_feature (1)..(25): SEQ ID NO: 996; WAN024DQN; Start 508; Stop 532
ttaacagattcgcagtttcagatca

SEQ ID NO: 280020 - DNA, 25 bp, Artificial
  probe
  misc_feature (1)..(25): SEQ ID NO: 996; WAN024DQN; Start 73; Stop 97
gattatccttctgaggctatcgagt

SEQ ID NO: 280021 - DNA, 25 bp, Artificial
  probe
  misc_feature (1)..(25): SEQ ID NO: 996; WAN024DQN; Start 46; Stop 70
tggaaagaagttcggaatctactga

SEQ ID NO: 280022 - DNA, 25 bp, Artificial
  probe
  misc_feature (1)..(25): SEQ ID NO: 996; WAN024DQN; Start 219; Stop 243
actttccagttacgatttaccaaat

SEQ ID NO: 280023 - DNA, 25 bp, Artificial
  probe
  misc_feature (1)..(25): SEQ ID NO: 996; WAN024DQN; Start 586; Stop 610
aagaccagaagtttccttgaattgc

SEQ ID NO: 280024 - DNA, 25 bp, Artificial
  probe
  misc_feature (1)..(25): SEQ ID NO: 996; WAN024DQN; Start 510; Stop 534
aacagattcgcagtttcagatcatt

SEQ ID NO: 280025 - DNA, 25 bp, Artificial
  probe
  misc_feature (1)..(25): SEQ ID NO: 996; WAN024DQN; Start 600; Stop 624
ccttgaattgctgaaactaactaat

SEQ ID NO: 280026 - DNA, 25 bp, Artificial
  probe
  misc_feature (1)..(25): SEQ ID NO: 996; WAN024DQN; Start 511; Stop 535
acagattcgcagtttcagatcattc

SEQ ID NO: 280027 - DNA, 25 bp, Artificial
  probe
  misc_feature (1)..(25): SEQ ID NO: 996; WAN024DQN; Start 93; Stop 117
cgagttatttccttctggagttagt

SEQ ID NO: 280028 - DNA, 25 bp, Artificial
  probe
  misc_feature (1)..(25): SEQ ID NO: 996; WAN024DQN; Start 471; Stop 495
accgaatcttagttctatgaaagct

SEQ ID NO: 280029 - DNA, 25 bp, Artificial
  probe
  misc_feature (1)..(25): SEQ ID NO: 997; WAN024C4J; Start 910; Stop 934
attagttcttctggaggtggtatca

SEQ ID NO: 280030 - DNA, 25 bp, Artificial
  probe
  misc_feature (1)..(25): SEQ ID NO: 997; WAN024C4J; Start 1115; Stop 1139
gacaagcaatcactcaagttaagaa

SEQ ID NO: 280031 - DNA, 25 bp, Artificial
  probe
  misc_feature (1)..(25): SEQ ID NO: 997; WAN024C4J; Start 1112; Stop 1136
taggacaagcaatcactcaagttaa

SEQ ID NO: 280032 - DNA, 25 bp, Artificial
  probe
  misc_feature (1)..(25): SEQ ID NO: 997; WAN024C4J; Start 1111; Stop 1135
ttaggacaagcaatcactcaagtta

SEQ ID NO: 280033 - DNA, 25 bp, Artificial
  probe
  misc_feature (1)..(25): SEQ ID NO: 997; WAN024C4J; Start 908; Stop 932
caattagttcttctggaggtggtat

SEQ ID NO: 280034 - DNA, 25 bp, Artificial
  probe
  misc_feature (1)..(25): SEQ ID NO: 997; WAN024C4J; Start 909; Stop 933
aattagttcttctggaggtggtatc

SEQ ID NO: 280035 - DNA, 25 bp, Artificial
  probe
  misc_feature (1)..(25): SEQ ID NO: 997; WAN024C4J; Start 1116; Stop 1140
acaagcaatcactcaagttaagaat

SEQ ID NO: 280036 - DNA, 25 bp, Artificial
  probe
  misc_feature (1)..(25): SEQ ID NO: 997; WAN024C4J; Start 1117; Stop 1141
caagcaatcactcaagttaagaatg

SEQ ID NO: 280037 - DNA, 25 bp, Artificial
  probe
  misc_feature (1)..(25): SEQ ID NO: 997; WAN024C4J; Start 1114; Stop 1138
ggacaagcaatcactcaagttaaga

SEQ ID NO: 280038 - DNA, 25 bp, Artificial
  probe
  misc_feature (1)..(25): SEQ ID NO: 997; WAN024C4J; Start 1113; Stop 1137
aggacaagcaatcactcaagttaag

SEQ ID NO: 280039 - DNA, 25 bp, Artificial
  probe
  misc_feature (1)..(25): SEQ ID NO: 997; WAN024C4J; Start 904; Stop 928
gtagcaattagttcttctggaggtg

SEQ ID NO: 280040 - DNA, 25 bp, Artificial
  probe
  misc_feature (1)..(25): SEQ ID NO: 997; WAN024C4J; Start 902; Stop 926
gtgtagcaattagttcttctggagg

SEQ ID NO: 280041 - DNA, 25 bp, Artificial
  probe
  misc_feature (1)..(25): SEQ ID NO: 997; WAN024C4J; Start 901; Stop 925
ggtgtagcaattagttcttctggag

SEQ ID NO: 280042 - DNA, 25 bp, Artificial
  probe
  misc_feature (1)..(25): SEQ ID NO: 997; WAN024C4J; Start 903; Stop 927
tgtagcaattagttcttctggaggt

SEQ ID NO: 280043 - DNA, 25 bp, Artificial
  probe
  misc_feature (1)..(25): SEQ ID NO: 997; WAN024C4J; Start 900; Stop 924
aggtgtagcaattagttcttctgga

SEQ ID NO: 280044 - DNA, 25 bp, Artificial
  probe
  misc_feature (1)..(25): SEQ ID NO: 997; WAN024C4J; Start 267; Stop 291
aatgaataacaaggttgctagtggt

SEQ ID NO: 280045 - DNA, 25 bp, Artificial
  probe
  misc_feature (1)..(25): SEQ ID NO: 997; WAN024C4J; Start 266; Stop 290
taatgaataacaaggttgctagtgg

SEQ ID NO: 280046 - DNA, 25 bp, Artificial
  probe
  misc_feature (1)..(25): SEQ ID NO: 997; WAN024C4J; Start 268; Stop 292
atgaataacaaggttgctagtggtg

SEQ ID NO: 280047 - DNA, 25 bp, Artificial
  probe
  misc_feature (1)..(25): SEQ ID NO: 997; WAN024C4J; Start 905; Stop 929
tagcaattagttcttctggaggtgg

SEQ ID NO: 280048 - DNA, 25 bp, Artificial
  probe
  misc_feature (1)..(25): SEQ ID NO: 997; WAN024C4J; Start 755; Stop 779
ctaatggttctaagaatgctggtgg

SEQ ID NO: 280049 - DNA, 25 bp, Artificial
  probe
  misc_feature (1)..(25): SEQ ID NO: 997; WAN024C4J; Start 922; Stop 946
ggaggtggtatcactatctcaagta

SEQ ID NO: 280050 - DNA, 25 bp, Artificial
  probe
  misc_feature (1)..(25): SEQ ID NO: 997; WAN024C4J; Start 907; Stop 931
gcaattagttcttctggaggtggta

SEQ ID NO: 280051 - DNA, 25 bp, Artificial
  probe
  misc_feature (1)..(25): SEQ ID NO: 997; WAN024C4J; Start 925; Stop 949
ggtggtatcactatctcaagtaaga

SEQ ID NO: 280052 - DNA, 25 bp, Artificial
  probe
  misc_feature (1)..(25): SEQ ID NO: 997; WAN024C4J; Start 924; Stop 948
aggtggtatcactatctcaagtaag

SEQ ID NO: 280053 - DNA, 25 bp, Artificial
  probe
  misc_feature (1)..(25): SEQ ID NO: 997; WAN024C4J; Start 923; Stop 947
gaggtggtatcactatctcaagtaa

SEQ ID NO: 280054 - DNA, 25 bp, Artificial
  probe
  misc_feature (1)..(25): SEQ ID NO: 997; WAN024C4J; Start 915; Stop 939
ttcttctggaggtggtatcactatc

SEQ ID NO: 280055 - DNA, 25 bp, Artificial
  probe
  misc_feature (1)..(25): SEQ ID NO: 997; WAN024C4J; Start 899; Stop 923
caggtgtagcaattagttcttctgg

SEQ ID NO: 280056 - DNA, 25 bp, Artificial
  probe
  misc_feature (1)..(25): SEQ ID NO: 997; WAN024C4J; Start 754; Stop 778
gctaatggttctaagaatgctggtg

SEQ ID NO: 280057 - DNA, 25 bp, Artificial
  probe
  misc_feature (1)..(25): SEQ ID NO: 997; WAN024C4J; Start 914; Stop 938
gttcttctggaggtggtatcactat

SEQ ID NO: 280058 - DNA, 25 bp, Artificial
  probe
  misc_feature (1)..(25): SEQ ID NO: 997; WAN024C4J; Start 749; Stop 773
ttcaagctaatggttctaagaatgc

SEQ ID NO: 280059 - DNA, 25 bp, Artificial
  probe
  misc_feature (1)..(25): SEQ ID NO: 997; WAN024C4J; Start 917; Stop 941
cttctggaggtggtatcactatctc

SEQ ID NO: 280060 - DNA, 25 bp, Artificial
  probe
  misc_feature (1)..(25): SEQ ID NO: 997; WAN024C4J; Start 269; Stop 293
tgaataacaaggttgctagtggtga

SEQ ID NO: 280061 - DNA, 25 bp, Artificial
  probe
  misc_feature (1)..(25): SEQ ID NO: 997; WAN024C4J; Start 911; Stop 935
ttagttcttctggaggtggtatcac

SEQ ID NO: 280062 - DNA, 25 bp, Artificial
  probe
  misc_feature (1)..(25): SEQ ID NO: 998; WAN024CF2; Start 399; Stop 423
taccttggatattcaccgaacacta

SEQ ID NO: 280063 - DNA, 25 bp, Artificial
  probe
  misc_feature (1)..(25): SEQ ID NO: 998; WAN024CF2; Start 363; Stop 387
catctatctgattgttgaagaagga

SEQ ID NO: 280064 - DNA, 25 bp, Artificial
  probe
  misc_feature (1)..(25): SEQ ID NO: 998; WAN024CF2; Start 356; Stop 380
cgtctgacatctatctgattgttga

SEQ ID NO: 280065 - DNA, 25 bp, Artificial
  probe
  misc_feature (1)..(25): SEQ ID NO: 998; WAN024CF2; Start 182; Stop 206
gtcatctattcaacttatcgtcaga

SEQ ID NO: 280066 - DNA, 25 bp, Artificial
  probe
  misc_feature (1)..(25): SEQ ID NO: 998; WAN024CF2; Start 180; Stop 204
cagtcatctattcaacttatcgtca

SEQ ID NO: 280067 - DNA, 25 bp, Artificial
  probe
  misc_feature (1)..(25): SEQ ID NO: 998; WAN024CF2; Start 179; Stop 203
acagtcatctattcaacttatcgtc

SEQ ID NO: 280068 - DNA, 25 bp, Artificial
  probe
  misc_feature (1)..(25): SEQ ID NO: 998; WAN024CF2; Start 178; Stop 202
gacagtcatctattcaacttatcgt

SEQ ID NO: 280069 - DNA, 25 bp, Artificial
  probe
  misc_feature (1)..(25): SEQ ID NO: 998; WAN024CF2; Start 181; Stop 205
agtcatctattcaacttatcgtcag

SEQ ID NO: 280070 - DNA, 25 bp, Artificial
  probe
  misc_feature (1)..(25): SEQ ID NO: 998; WAN024CF2; Start 362; Stop 386
acatctatctgattgttgaagaagg

SEQ ID NO: 280071 - DNA, 25 bp, Artificial
  probe
  misc_feature (1)..(25): SEQ ID NO: 998; WAN024CF2; Start 177; Stop 201
agacagtcatctattcaacttatcg

SEQ ID NO: 280072 - DNA, 25 bp, Artificial
  probe
  misc_feature (1)..(25): SEQ ID NO: 998; WAN024CF2; Start 357; Stop 381
gtctgacatctatctgattgttgaa

SEQ ID NO: 280073 - DNA, 25 bp, Artificial
  probe
  misc_feature (1)..(25): SEQ ID NO: 998; WAN024CF2; Start 359; Stop 383
ctgacatctatctgattgttgaaga

SEQ ID NO: 280074 - DNA, 25 bp, Artificial
  probe
  misc_feature (1)..(25): SEQ ID NO: 998; WAN024CF2; Start 358; Stop 382
tctgacatctatctgattgttgaag

SEQ ID NO: 280075 - DNA, 25 bp, Artificial
  probe
  misc_feature (1)..(25): SEQ ID NO: 998; WAN024CF2; Start 365; Stop 389
tctatctgattgttgaagaaggatt

SEQ ID NO: 280076 - DNA, 25 bp, Artificial
  probe
  misc_feature (1)..(25): SEQ ID NO: 998; WAN024CF2; Start 530; Stop 554
gccataccacagatgttccagataa

SEQ ID NO: 280077 - DNA, 25 bp, Artificial
  probe
  misc_feature (1)..(25): SEQ ID NO: 998; WAN024CF2; Start 400; Stop 424
accttggatattcaccgaacactag

SEQ ID NO: 280078 - DNA, 25 bp, Artificial
  probe
  misc_feature (1)..(25): SEQ ID NO: 998; WAN024CF2; Start 355; Stop 379
gcgtctgacatctatctgattgttg

SEQ ID NO: 280079 - DNA, 25 bp, Artificial
  probe
  misc_feature (1)..(25): SEQ ID NO: 998; WAN024CF2; Start 183; Stop 207
tcatctattcaacttatcgtcagaa

SEQ ID NO: 280080 - DNA, 25 bp, Artificial
  probe
  misc_feature (1)..(25): SEQ ID NO: 998; WAN024CF2; Start 366; Stop 390
ctatctgattgttgaagaaggattc

SEQ ID NO: 280081 - DNA, 25 bp, Artificial
  probe
  misc_feature (1)..(25): SEQ ID NO: 998; WAN024CF2; Start 364; Stop 388
atctatctgattgttgaagaaggat

SEQ ID NO: 280082 - DNA, 25 bp, Artificial
  probe
  misc_feature (1)..(25): SEQ ID NO: 998; WAN024CF2; Start 360; Stop 384
tgacatctatctgattgttgaagaa

SEQ ID NO: 280083 - DNA, 25 bp, Artificial
  probe
  misc_feature (1)..(25): SEQ ID NO: 998; WAN024CF2; Start 354; Stop 378
tgcgtctgacatctatctgattgtt

SEQ ID NO: 280084 - DNA, 25 bp, Artificial
  probe
  misc_feature (1)..(25): SEQ ID NO: 998; WAN024CF2; Start 642; Stop 666
aatgaaacacgccaaagtaaacaat

SEQ ID NO: 280085 - DNA, 25 bp, Artificial
  probe
  misc_feature (1)..(25): SEQ ID NO: 998; WAN024CF2; Start 398; Stop 422
gtaccttggatattcaccgaacact

SEQ ID NO: 280086 - DNA, 25 bp, Artificial
  probe
  misc_feature (1)..(25): SEQ ID NO: 998; WAN024CF2; Start 643; Stop 667
atgaaacacgccaaagtaaacaatt

SEQ ID NO: 280087 - DNA, 25 bp, Artificial
  probe
  misc_feature (1)..(25): SEQ ID NO: 998; WAN024CF2; Start 644; Stop 668
tgaaacacgccaaagtaaacaattt

SEQ ID NO: 280088 - DNA, 25 bp, Artificial
  probe
  misc_feature (1)..(25): SEQ ID NO: 998; WAN024CF2; Start 361; Stop 385
gacatctatctgattgttgaagaag

SEQ ID NO: 280089 - DNA, 25 bp, Artificial
  probe
  misc_feature (1)..(25): SEQ ID NO: 998; WAN024CF2; Start 531; Stop 555
ccataccacagatgttccagataaa

SEQ ID NO: 280090 - DNA, 25 bp, Artificial
  probe
  misc_feature (1)..(25): SEQ ID NO: 998; WAN024CF2; Start 648; Stop 672
acacgccaaagtaaacaatttaagt

SEQ ID NO: 280091 - DNA, 25 bp, Artificial
  probe
  misc_feature (1)..(25): SEQ ID NO: 998; WAN024CF2; Start 641; Stop 665
caatgaaacacgccaaagtaaacaa

SEQ ID NO: 280092 - DNA, 25 bp, Artificial
  probe
  misc_feature (1)..(25): SEQ ID NO: 998; WAN024CF2; Start 106; Stop 130
attggaacaggtaaagggcatttaa

SEQ ID NO: 280093 - DNA, 25 bp, Artificial
  probe
  misc_feature (1)..(25): SEQ ID NO: 998; WAN024CF2; Start 647; Stop 671
aacacgccaaagtaaacaatttaag

SEQ ID NO: 280094 - DNA, 25 bp, Artificial
  probe
  misc_feature (1)..(25): SEQ ID NO: 998; WAN024CF2; Start 645; Stop 669
gaaacacgccaaagtaaacaattta

SEQ ID NO: 280095 - DNA, 25 bp, Artificial
  probe
  misc_feature (1)..(25): SEQ ID NO: 999; WAN024C6F; Start 152; Stop 176
atacaggtgacttcgtgattgttat

SEQ ID NO: 280096 - DNA, 25 bp, Artificial
  probe
  misc_feature (1)..(25): SEQ ID NO: 999; WAN024C6F; Start 153; Stop 177
tacaggtgacttcgtgattgttatc

SEQ ID NO: 280097 - DNA, 25 bp, Artificial
  probe
  misc_feature (1)..(25): SEQ ID NO: 999; WAN024C6F; Start 151; Stop 175
gatacaggtgacttcgtgattgtta

SEQ ID NO: 280098 - DNA, 25 bp, Artificial
  probe
  misc_feature (1)..(25): SEQ ID NO: 999; WAN024C6F; Start 408; Stop 432
acaacaaccagaagttcttgacatt

SEQ ID NO: 280099 - DNA, 25 bp, Artificial
  probe
  misc_feature (1)..(25): SEQ ID NO: 999; WAN024C6F; Start 407; Stop 431
cacaacaaccagaagttcttgacat

SEQ ID NO: 280100 - DNA, 25 bp, Artificial
  probe
  misc_feature (1)..(25): SEQ ID NO: 999; WAN024C6F; Start 222; Stop 246
aatctactacactcactcaaaccac

SEQ ID NO: 280101 - DNA, 25 bp, Artificial
  probe
  misc_feature (1)..(25): SEQ ID NO: 999; WAN024C6F; Start 365; Stop 389
tgaagttgaaagtatttgttggagc

SEQ ID NO: 280102 - DNA, 25 bp, Artificial
  probe
  misc_feature (1)..(25): SEQ ID NO: 999; WAN024C6F; Start 221; Stop 245
aaatctactacactcactcaaacca

SEQ ID NO: 280103 - DNA, 25 bp, Artificial
  probe
  misc_feature (1)..(25): SEQ ID NO: 999; WAN024C6F; Start 131; Stop 155
caacatttacaccacacactgatac

SEQ ID NO: 280104 - DNA, 25 bp, Artificial
  probe
  misc_feature (1)..(25): SEQ ID NO: 999; WAN024C6F; Start 132; Stop 156
aacatttacaccacacactgataca

SEQ ID NO: 280105 - DNA, 25 bp, Artificial
  probe
  misc_feature (1)..(25): SEQ ID NO: 999; WAN024C6F; Start 150; Stop 174
tgatacaggtgacttcgtgattgtt

SEQ ID NO: 280106 - DNA, 25 bp, Artificial
  probe
  misc_feature (1)..(25): SEQ ID NO: 999; WAN024C6F; Start 314; Stop 338
aatcagttaaaggtatgcttccaca

SEQ ID NO: 280107 - DNA, 25 bp, Artificial
  probe
  misc_feature (1)..(25): SEQ ID NO: 999; WAN024C6F; Start 313; Stop 337
aaatcagttaaaggtatgcttccac

SEQ ID NO: 280108 - DNA, 25 bp, Artificial
  probe
  misc_feature (1)..(25): SEQ ID NO: 999; WAN024C6F; Start 123; Stop 147
aaacaaaccaacatttacaccacac

SEQ ID NO: 280109 - DNA, 25 bp, Artificial
  probe
  misc_feature (1)..(25): SEQ ID NO: 999; WAN024C6F; Start 318; Stop 342
agttaaaggtatgcttccacacaat

SEQ ID NO: 280110 - DNA, 25 bp, Artificial
  probe
  misc_feature (1)..(25): SEQ ID NO: 999; WAN024C6F; Start 130; Stop 154
ccaacatttacaccacacactgata

SEQ ID NO: 280111 - DNA, 25 bp, Artificial
  probe
  misc_feature (1)..(25): SEQ ID NO: 999; WAN024C6F; Start 319; Stop 343
gttaaaggtatgcttccacacaata

SEQ ID NO: 280112 - DNA, 25 bp, Artificial
  probe
  misc_feature (1)..(25): SEQ ID NO: 999; WAN024C6F; Start 312; Stop 336
gaaatcagttaaaggtatgcttcca

SEQ ID NO: 280113 - DNA, 25 bp, Artificial
  probe
  misc_feature (1)..(25): SEQ ID NO: 999; WAN024C6F; Start 325; Stop 349
ggtatgcttccacacaatacacttg

SEQ ID NO: 280114 - DNA, 25 bp, Artificial
  probe
  misc_feature (1)..(25): SEQ ID NO: 999; WAN024C6F; Start 324; Stop 348
aggtatgcttccacacaatacactt

SEQ ID NO: 280115 - DNA, 25 bp, Artificial
  probe
  misc_feature (1)..(25): SEQ ID NO: 999; WAN024C6F; Start 323; Stop 347
aaggtatgcttccacacaatacact

SEQ ID NO: 280116 - DNA, 25 bp, Artificial
  probe
  misc_feature (1)..(25): SEQ ID NO: 999; WAN024C6F; Start 311; Stop 335
agaaatcagttaaaggtatgcttcc

SEQ ID NO: 280117 - DNA, 25 bp, Artificial
  probe
  misc_feature (1)..(25): SEQ ID NO: 999; WAN024C6F; Start 315; Stop 339
atcagttaaaggtatgcttccacac

SEQ ID NO: 280118 - DNA, 25 bp, Artificial
  probe
  misc_feature (1)..(25): SEQ ID NO: 999; WAN024C6F; Start 223; Stop 247
atctactacactcactcaaaccacc

SEQ ID NO: 280119 - DNA, 25 bp, Artificial
  probe
  misc_feature (1)..(25): SEQ ID NO: 999; WAN024C6F; Start 317; Stop 341
cagttaaaggtatgcttccacacaa

SEQ ID NO: 280120 - DNA, 25 bp, Artificial
  probe
  misc_feature (1)..(25): SEQ ID NO: 999; WAN024C6F; Start 149; Stop 173
ctgatacaggtgacttcgtgattgt

SEQ ID NO: 280121 - DNA, 25 bp, Artificial
  probe
  misc_feature (1)..(25): SEQ ID NO: 999; WAN024C6F; Start 148; Stop 172
actgatacaggtgacttcgtgattg

SEQ ID NO: 280122 - DNA, 25 bp, Artificial
  probe
  misc_feature (1)..(25): SEQ ID NO: 999; WAN024C6F; Start 410; Stop 434
aacaaccagaagttcttgacatttc

SEQ ID NO: 280123 - DNA, 25 bp, Artificial
  probe
  misc_feature (1)..(25): SEQ ID NO: 999; WAN024C6F; Start 326; Stop 350
gtatgcttccacacaatacacttgg

SEQ ID NO: 280124 - DNA, 25 bp, Artificial
  probe
  misc_feature (1)..(25): SEQ ID NO: 999; WAN024C6F; Start 162; Stop 186
cttcgtgattgttatcaatgctgaa

SEQ ID NO: 280125 - DNA, 25 bp, Artificial
  probe
  misc_feature (1)..(25): SEQ ID NO: 999; WAN024C6F; Start 409; Stop 433
caacaaccagaagttcttgacattt

SEQ ID NO: 280126 - DNA, 25 bp, Artificial
  probe
  misc_feature (1)..(25): SEQ ID NO: 999; WAN024C6F; Start 124; Stop 148
aacaaaccaacatttacaccacaca

SEQ ID NO: 280127 - DNA, 25 bp, Artificial
  probe
  misc_feature (1)..(25): SEQ ID NO: 999; WAN024C6F; Start 421; Stop 445
gttcttgacatttcaggacttatct

SEQ ID NO: 280128 - DNA, 25 bp, Artificial
  probe
  misc_feature (1)..(25): SEQ ID NO: 1000; WAN024C4T; Start 28; Stop 52
gctaagtatgtgagtatctgcttct

SEQ ID NO: 280129 - DNA, 25 bp, Artificial
  probe
  misc_feature (1)..(25): SEQ ID NO: 1000; WAN024C4T; Start 32; Stop 56
agtatgtgagtatctgcttcttaac

SEQ ID NO: 280130 - DNA, 25 bp, Artificial
  probe
  misc_feature (1)..(25): SEQ ID NO: 1000; WAN024C4T; Start 29; Stop 53
ctaagtatgtgagtatctgcttctt

SEQ ID NO: 280131 - DNA, 25 bp, Artificial
  probe
  misc_feature (1)..(25): SEQ ID NO: 1000; WAN024C4T; Start 33; Stop 57
gtatgtgagtatctgcttcttaact

SEQ ID NO: 280132 - DNA, 25 bp, Artificial
  probe
  misc_feature (1)..(25): SEQ ID NO: 1000; WAN024C4T; Start 31; Stop 55
aagtatgtgagtatctgcttcttaa

SEQ ID NO: 280133 - DNA, 25 bp, Artificial
  probe
  misc_feature (1)..(25): SEQ ID NO: 1000; WAN024C4T; Start 396; Stop 420
gacctatttctcaacttccacttct

SEQ ID NO: 280134 - DNA, 25 bp, Artificial
  probe
  misc_feature (1)..(25): SEQ ID NO: 1000; WAN024C4T; Start 3; Stop 27
gaacaaacaaactatcctgcgaata

SEQ ID NO: 280135 - DNA, 25 bp, Artificial
  probe
  misc_feature (1)..(25): SEQ ID NO: 1000; WAN024C4T; Start 397; Stop 421
acctatttctcaacttccacttctg

SEQ ID NO: 280136 - DNA, 25 bp, Artificial
  probe
  misc_feature (1)..(25): SEQ ID NO: 1000; WAN024C4T; Start 34; Stop 58
tatgtgagtatctgcttcttaactt

SEQ ID NO: 280137 - DNA, 25 bp, Artificial
  probe
  misc_feature (1)..(25): SEQ ID NO: 1000; WAN024C4T; Start 124; Stop 148
ctatctgagagcaaattagtcgcaa

SEQ ID NO: 280138 - DNA, 25 bp, Artificial
  probe
  misc_feature (1)..(25): SEQ ID NO: 1000; WAN024C4T; Start 2; Stop 26
tgaacaaacaaactatcctgcgaat

SEQ ID NO: 280139 - DNA, 25 bp, Artificial
  probe
  misc_feature (1)..(25): SEQ ID NO: 1000; WAN024C4T; Start 1; Stop 25
atgaacaaacaaactatcctgcgaa

SEQ ID NO: 280140 - DNA, 25 bp, Artificial
  probe
  misc_feature (1)..(25): SEQ ID NO: 1000; WAN024C4T; Start 125; Stop 149
tatctgagagcaaattagtcgcaac

SEQ ID NO: 280141 - DNA, 25 bp, Artificial
  probe
  misc_feature (1)..(25): SEQ ID NO: 1000; WAN024C4T; Start 398; Stop 422
cctatttctcaacttccacttctga

SEQ ID NO: 280142 - DNA, 25 bp, Artificial
  probe
  misc_feature (1)..(25): SEQ ID NO: 1000; WAN024C4T; Start 395; Stop 419
tgacctatttctcaacttccacttc

SEQ ID NO: 280143 - DNA, 25 bp, Artificial
  probe
  misc_feature (1)..(25): SEQ ID NO: 1000; WAN024C4T; Start 304; Stop 328
gataccatccgaattataggagctt

SEQ ID NO: 280144 - DNA, 25 bp, Artificial
  probe
  misc_feature (1)..(25): SEQ ID NO: 1000; WAN024C4T; Start 81; Stop 105
gggaggaggcatatttctctattac

SEQ ID NO: 280145 - DNA, 25 bp, Artificial
  probe
  misc_feature (1)..(25): SEQ ID NO: 1000; WAN024C4T; Start 80; Stop 104
tgggaggaggcatatttctctatta

SEQ ID NO: 280146 - DNA, 25 bp, Artificial
  probe
  misc_feature (1)..(25): SEQ ID NO: 1000; WAN024C4T; Start 82; Stop 106
ggaggaggcatatttctctattacg

SEQ ID NO: 280147 - DNA, 25 bp, Artificial
  probe
  misc_feature (1)..(25): SEQ ID NO: 1000; WAN024C4T; Start 4; Stop 28
aacaaacaaactatcctgcgaatag

SEQ ID NO: 280148 - DNA, 25 bp, Artificial
  probe
  misc_feature (1)..(25): SEQ ID NO: 1000; WAN024C4T; Start 231; Stop 255
cgaaattcctactgatttggtcaag

SEQ ID NO: 280149 - DNA, 25 bp, Artificial
  probe
  misc_feature (1)..(25): SEQ ID NO: 1000; WAN024C4T; Start 228; Stop 252
caacgaaattcctactgatttggtc

SEQ ID NO: 280150 - DNA, 25 bp, Artificial
  probe
  misc_feature (1)..(25): SEQ ID NO: 1000; WAN024C4T; Start 644; Stop 668
aatacgatccctattctcatccaga

SEQ ID NO: 280151 - DNA, 25 bp, Artificial
  probe
  misc_feature (1)..(25): SEQ ID NO: 1000; WAN024C4T; Start 643; Stop 667
caatacgatccctattctcatccag

SEQ ID NO: 280152 - DNA, 25 bp, Artificial
  probe
  misc_feature (1)..(25): SEQ ID NO: 1000; WAN024C4T; Start 641; Stop 665
atcaatacgatccctattctcatcc

SEQ ID NO: 280153 - DNA, 25 bp, Artificial
  probe
  misc_feature (1)..(25): SEQ ID NO: 1000; WAN024C4T; Start 137; Stop 161
aattagtcgcaaccacgtctagtaa

SEQ ID NO: 280154 - DNA, 25 bp, Artificial
  probe
  misc_feature (1)..(25): SEQ ID NO: 1000; WAN024C4T; Start 642; Stop 666
tcaatacgatccctattctcatcca

SEQ ID NO: 280155 - DNA, 25 bp, Artificial
  probe
  misc_feature (1)..(25): SEQ ID NO: 1000; WAN024C4T; Start 242; Stop 266
ctgatttggtcaaggctatcgtatc

SEQ ID NO: 280156 - DNA, 25 bp, Artificial
  probe
  misc_feature (1)..(25): SEQ ID NO: 1000; WAN024C4T; Start 240; Stop 264
tactgatttggtcaaggctatcgta

SEQ ID NO: 280157 - DNA, 25 bp, Artificial
  probe
  misc_feature (1)..(25): SEQ ID NO: 1000; WAN024C4T; Start 230; Stop 254
acgaaattcctactgatttggtcaa

SEQ ID NO: 280158 - DNA, 25 bp, Artificial
  probe
  misc_feature (1)..(25): SEQ ID NO: 1000; WAN024C4T; Start 229; Stop 253
aacgaaattcctactgatttggtca

SEQ ID NO: 280159 - DNA, 25 bp, Artificial
  probe
  misc_feature (1)..(25): SEQ ID NO: 1000; WAN024C4T; Start 120; Stop 144
agccctatctgagagcaaattagtc

SEQ ID NO: 280160 - DNA, 25 bp, Artificial
  probe
  misc_feature (1)..(25): SEQ ID NO: 1000; WAN024C4T; Start 399; Stop 423
ctatttctcaacttccacttctgat

SEQ ID NO: 280161 - DNA, 25 bp, Artificial
  probe
  misc_feature (1)..(25): SEQ ID NO: 1001; WAN024FSG; Start 75; Stop 99
taatgatgttgaagctgcctatgaa

SEQ ID NO: 280162 - DNA, 25 bp, Artificial
  probe
  misc_feature (1)..(25): SEQ ID NO: 1001; WAN024FSG; Start 74; Stop 98
ttaatgatgttgaagctgcctatga

SEQ ID NO: 280163 - DNA, 25 bp, Artificial
  probe
  misc_feature (1)..(25): SEQ ID NO: 1001; WAN024FSG; Start 93; Stop 117
ctatgaaggcaaagtagaggctaaa

SEQ ID NO: 280164 - DNA, 25 bp, Artificial
  probe
  misc_feature (1)..(25): SEQ ID NO: 1001; WAN024FSG; Start 76; Stop 100
aatgatgttgaagctgcctatgaag

SEQ ID NO: 280165 - DNA, 25 bp, Artificial
  probe
  misc_feature (1)..(25): SEQ ID NO: 1001; WAN024FSG; Start 190; Stop 214
gaatttgaaacggttagtggctatt

SEQ ID NO: 280166 - DNA, 25 bp, Artificial
  probe
  misc_feature (1)..(25): SEQ ID NO: 1001; WAN024FSG; Start 189; Stop 213
agaatttgaaacggttagtggctat

SEQ ID NO: 280167 - DNA, 25 bp, Artificial
  probe
  misc_feature (1)..(25): SEQ ID NO: 1001; WAN024FSG; Start 191; Stop 215
aatttgaaacggttagtggctattc

SEQ ID NO: 280168 - DNA, 25 bp, Artificial
  probe
  misc_feature (1)..(25): SEQ ID NO: 1001; WAN024FSG; Start 188; Stop 212
gagaatttgaaacggttagtggcta

SEQ ID NO: 280169 - DNA, 25 bp, Artificial
  probe
  misc_feature (1)..(25): SEQ ID NO: 1001; WAN024FSG; Start 2; Stop 26
tgaacaaacagtatagttacccact

SEQ ID NO: 280170 - DNA, 25 bp, Artificial
  probe
  misc_feature (1)..(25): SEQ ID NO: 1001; WAN024FSG; Start 1; Stop 25
atgaacaaacagtatagttacccac

SEQ ID NO: 280171 - DNA, 25 bp, Artificial
  probe
  misc_feature (1)..(25): SEQ ID NO: 1001; WAN024FSG; Start 210; Stop 234
ctattcactttaccgagcagttcag

SEQ ID NO: 280172 - DNA, 25 bp, Artificial
  probe
  misc_feature (1)..(25): SEQ ID NO: 1001; WAN024FSG; Start 124; Stop 148
ctggactcctataagggattcaaag

SEQ ID NO: 280173 - DNA, 25 bp, Artificial
  probe
  misc_feature (1)..(25): SEQ ID NO: 1001; WAN024FSG; Start 122; Stop 146
tactggactcctataagggattcaa

SEQ ID NO: 280174 - DNA, 25 bp, Artificial
  probe
  misc_feature (1)..(25): SEQ ID NO: 1001; WAN024FSG; Start 121; Stop 145
ttactggactcctataagggattca

SEQ ID NO: 280175 - DNA, 25 bp, Artificial
  probe
  misc_feature (1)..(25): SEQ ID NO: 1001; WAN024FSG; Start 119; Stop 143
agttactggactcctataagggatt

SEQ ID NO: 280176 - DNA, 25 bp, Artificial
  probe
  misc_feature (1)..(25): SEQ ID NO: 1001; WAN024FSG; Start 118; Stop 142
aagttactggactcctataagggat

SEQ ID NO: 280177 - DNA, 25 bp, Artificial
  probe
  misc_feature (1)..(25): SEQ ID NO: 1001; WAN024FSG; Start 117; Stop 141
aaagttactggactcctataaggga

SEQ ID NO: 280178 - DNA, 25 bp, Artificial
  probe
  misc_feature (1)..(25): SEQ ID NO: 1001; WAN024FSG; Start 73; Stop 97
tttaatgatgttgaagctgcctatg

SEQ ID NO: 280179 - DNA, 25 bp, Artificial
  probe
  misc_feature (1)..(25): SEQ ID NO: 1001; WAN024FSG; Start 120; Stop 144
gttactggactcctataagggattc

SEQ ID NO: 280180 - DNA, 25 bp, Artificial
  probe
  misc_feature (1)..(25): SEQ ID NO: 1001; WAN024FSG; Start 123; Stop 147
actggactcctataagggattcaaa

SEQ ID NO: 280181 - DNA, 25 bp, Artificial
  probe
  misc_feature (1)..(25): SEQ ID NO: 1001; WAN024FSG; Start 185; Stop 209
gacgagaatttgaaacggttagtgg

SEQ ID NO: 280182 - DNA, 25 bp, Artificial
  probe
  misc_feature (1)..(25): SEQ ID NO: 1001; WAN024FSG; Start 184; Stop 208
ggacgagaatttgaaacggttagtg

SEQ ID NO: 280183 - DNA, 25 bp, Artificial
  probe
  misc_feature (1)..(25): SEQ ID NO: 1001; WAN024FSG; Start 14; Stop 38
atagttacccactagatttgtcgtg

SEQ ID NO: 280184 - DNA, 25 bp, Artificial
  probe
  misc_feature (1)..(25): SEQ ID NO: 1001; WAN024FSG; Start 92; Stop 116
cctatgaaggcaaagtagaggctaa

SEQ ID NO: 280185 - DNA, 25 bp, Artificial
  probe
  misc_feature (1)..(25): SEQ ID NO: 1001; WAN024FSG; Start 211; Stop 235
tattcactttaccgagcagttcagg

SEQ ID NO: 280186 - DNA, 25 bp, Artificial
  probe
  misc_feature (1)..(25): SEQ ID NO: 1001; WAN024FSG; Start 13; Stop 37
tatagttacccactagatttgtcgt

SEQ ID NO: 280187 - DNA, 25 bp, Artificial
  probe
  misc_feature (1)..(25): SEQ ID NO: 1001; WAN024FSG; Start 12; Stop 36
gtatagttacccactagatttgtcg

SEQ ID NO: 280188 - DNA, 25 bp, Artificial
  probe
  misc_feature (1)..(25): SEQ ID NO: 1001; WAN024FSG; Start 5; Stop 29
acaaacagtatagttacccactaga

SEQ ID NO: 280189 - DNA, 25 bp, Artificial
  probe
  misc_feature (1)..(25): SEQ ID NO: 1001; WAN024FSG; Start 181; Stop 205
ttgggacgagaatttgaaacggtta

SEQ ID NO: 280190 - DNA, 25 bp, Artificial
  probe
  misc_feature (1)..(25): SEQ ID NO: 1001; WAN024FSG; Start 125; Stop 149
tggactcctataagggattcaaagc

SEQ ID NO: 280191 - DNA, 25 bp, Artificial
  probe
  misc_feature (1)..(25): SEQ ID NO: 1001; WAN024FSG; Start 252; Stop 276
ggaaggaaagatttctcttggaaag

SEQ ID NO: 280192 - DNA, 25 bp, Artificial
  probe
  misc_feature (1)..(25): SEQ ID NO: 1001; WAN024FSG; Start 253; Stop 277
gaaggaaagatttctcttggaaagt

SEQ ID NO: 280193 - DNA, 25 bp, Artificial
  probe
  misc_feature (1)..(25): SEQ ID NO: 1001; WAN024FSG; Start 3; Stop 27
gaacaaacagtatagttacccacta

SEQ ID NO: 280194 - DNA, 25 bp, Artificial
  probe
  misc_feature (1)..(25): SEQ ID NO: 1002; WAN024C4S; Start 22; Stop 46
cgcctaatcaagtatctgaacatta

SEQ ID NO: 280195 - DNA, 25 bp, Artificial
  probe
  misc_feature (1)..(25): SEQ ID NO: 1002; WAN024C4S; Start 1962; Stop 1986
acacatggaataattcagtaacaca

SEQ ID NO: 280196 - DNA, 25 bp, Artificial
  probe
  misc_feature (1)..(25): SEQ ID NO: 1002; WAN024C4S; Start 1983; Stop 2007
cacaacaaacacaaacagtagaaac

SEQ ID NO: 280197 - DNA, 25 bp, Artificial
  probe
  misc_feature (1)..(25): SEQ ID NO: 1002; WAN024C4S; Start 1982; Stop 2006
acacaacaaacacaaacagtagaaa

SEQ ID NO: 280198 - DNA, 25 bp, Artificial
  probe
  misc_feature (1)..(25): SEQ ID NO: 1002; WAN024C4S; Start 1981; Stop 2005
aacacaacaaacacaaacagtagaa

SEQ ID NO: 280199 - DNA, 25 bp, Artificial
  probe
  misc_feature (1)..(25): SEQ ID NO: 1002; WAN024C4S; Start 1975; Stop 1999
ttcagtaacacaacaaacacaaaca

SEQ ID NO: 280200 - DNA, 25 bp, Artificial
  probe
  misc_feature (1)..(25): SEQ ID NO: 1002; WAN024C4S; Start 1978; Stop 2002
agtaacacaacaaacacaaacagta

SEQ ID NO: 280201 - DNA, 25 bp, Artificial
  probe
  misc_feature (1)..(25): SEQ ID NO: 1002; WAN024C4S; Start 1976; Stop 2000
tcagtaacacaacaaacacaaacag

SEQ ID NO: 280202 - DNA, 25 bp, Artificial
  probe
  misc_feature (1)..(25): SEQ ID NO: 1002; WAN024C4S; Start 1980; Stop 2004
taacacaacaaacacaaacagtaga

SEQ ID NO: 280203 - DNA, 25 bp, Artificial
  probe
  misc_feature (1)..(25): SEQ ID NO: 1002; WAN024C4S; Start 1979; Stop 2003
gtaacacaacaaacacaaacagtag

SEQ ID NO: 280204 - DNA, 25 bp, Artificial
  probe
  misc_feature (1)..(25): SEQ ID NO: 1002; WAN024C4S; Start 1977; Stop 2001
cagtaacacaacaaacacaaacagt

SEQ ID NO: 280205 - DNA, 25 bp, Artificial
  probe
  misc_feature (1)..(25): SEQ ID NO: 1002; WAN024C4S; Start 1974; Stop 1998
attcagtaacacaacaaacacaaac

SEQ ID NO: 280206 - DNA, 25 bp, Artificial
  probe
  misc_feature (1)..(25): SEQ ID NO: 1002; WAN024C4S; Start 1965; Stop 1989
catggaataattcagtaacacaaca

SEQ ID NO: 280207 - DNA, 25 bp, Artificial
  probe
  misc_feature (1)..(25): SEQ ID NO: 1002; WAN024C4S; Start 1964; Stop 1988
acatggaataattcagtaacacaac

SEQ ID NO: 280208 - DNA, 25 bp, Artificial
  probe
  misc_feature (1)..(25): SEQ ID NO: 1002; WAN024C4S; Start 1963; Stop 1987
cacatggaataattcagtaacacaa

SEQ ID NO: 280209 - DNA, 25 bp, Artificial
  probe
  misc_feature (1)..(25): SEQ ID NO: 1002; WAN024C4S; Start 1961; Stop 1985
aacacatggaataattcagtaacac

SEQ ID NO: 280210 - DNA, 25 bp, Artificial
  probe
  misc_feature (1)..(25): SEQ ID NO: 1002; WAN024C4S; Start 1960; Stop 1984
gaacacatggaataattcagtaaca

SEQ ID NO: 280211 - DNA, 25 bp, Artificial
  probe
  misc_feature (1)..(25): SEQ ID NO: 1002; WAN024C4S; Start 1966; Stop 1990
atggaataattcagtaacacaacaa

SEQ ID NO: 280212 - DNA, 25 bp, Artificial
  probe
  misc_feature (1)..(25): SEQ ID NO: 1002; WAN024C4S; Start 1989; Stop 2013
aaacacaaacagtagaaactccaag

SEQ ID NO: 280213 - DNA, 25 bp, Artificial
  probe
  misc_feature (1)..(25): SEQ ID NO: 1002; WAN024C4S; Start 1988; Stop 2012
caaacacaaacagtagaaactccaa

SEQ ID NO: 280214 - DNA, 25 bp, Artificial
  probe
  misc_feature (1)..(25): SEQ ID NO: 1002; WAN024C4S; Start 1986; Stop 2010
aacaaacacaaacagtagaaactcc

SEQ ID NO: 280215 - DNA, 25 bp, Artificial
  probe
  misc_feature (1)..(25): SEQ ID NO: 1002; WAN024C4S; Start 1984; Stop 2008
acaacaaacacaaacagtagaaact

SEQ ID NO: 280216 - DNA, 25 bp, Artificial
  probe
  misc_feature (1)..(25): SEQ ID NO: 1002; WAN024C4S; Start 1997; Stop 2021
acagtagaaactccaagcacaaata

SEQ ID NO: 280217 - DNA, 25 bp, Artificial
  probe
  misc_feature (1)..(25): SEQ ID NO: 1002; WAN024C4S; Start 1998; Stop 2022
cagtagaaactccaagcacaaataa

SEQ ID NO: 280218 - DNA, 25 bp, Artificial
  probe
  misc_feature (1)..(25): SEQ ID NO: 1002; WAN024C4S; Start 1985; Stop 2009
caacaaacacaaacagtagaaactc

SEQ ID NO: 280219 - DNA, 25 bp, Artificial
  probe
  misc_feature (1)..(25): SEQ ID NO: 1002; WAN024C4S; Start 769; Stop 793
gatgggctacaaagtctcaaatcag

SEQ ID NO: 280220 - DNA, 25 bp, Artificial
  probe
  misc_feature (1)..(25): SEQ ID NO: 1002; WAN024C4S; Start 762; Stop 786
aattactgatgggctacaaagtctc

SEQ ID NO: 280221 - DNA, 25 bp, Artificial
  probe
  misc_feature (1)..(25): SEQ ID NO: 1002; WAN024C4S; Start 1973; Stop 1997
aattcagtaacacaacaaacacaaa

SEQ ID NO: 280222 - DNA, 25 bp, Artificial
  probe
  misc_feature (1)..(25): SEQ ID NO: 1002; WAN024C4S; Start 1184; Stop 1208
atgatgttccttataactatcctgg

SEQ ID NO: 280223 - DNA, 25 bp, Artificial
  probe
  misc_feature (1)..(25): SEQ ID NO: 1002; WAN024C4S; Start 1959; Stop 1983
agaacacatggaataattcagtaac

SEQ ID NO: 280224 - DNA, 25 bp, Artificial
  probe
  misc_feature (1)..(25): SEQ ID NO: 1002; WAN024C4S; Start 761; Stop 785
caattactgatgggctacaaagtct

SEQ ID NO: 280225 - DNA, 25 bp, Artificial
  probe
  misc_feature (1)..(25): SEQ ID NO: 1002; WAN024C4S; Start 1987; Stop 2011
acaaacacaaacagtagaaactcca

SEQ ID NO: 280226 - DNA, 25 bp, Artificial
  probe
  misc_feature (1)..(25): SEQ ID NO: 1002; WAN024C4S; Start 1952; Stop 1976
aacgcaaagaacacatggaataatt

SEQ ID NO: 280227 - DNA, 25 bp, Artificial
  probe
  misc_feature (1)..(25): SEQ ID NO: 1003; WAN024C4Q; Start 733; Stop 757
cgaacagtatgagaaggctatcaat

SEQ ID NO: 280228 - DNA, 25 bp, Artificial
  probe
  misc_feature (1)..(25): SEQ ID NO: 1003; WAN024C4Q; Start 734; Stop 758
gaacagtatgagaaggctatcaata

SEQ ID NO: 280229 - DNA, 25 bp, Artificial
  probe
  misc_feature (1)..(25): SEQ ID NO: 1003; WAN024C4Q; Start 732; Stop 756
ccgaacagtatgagaaggctatcaa

SEQ ID NO: 280230 - DNA, 25 bp, Artificial
  probe
  misc_feature (1)..(25): SEQ ID NO: 1003; WAN024C4Q; Start 735; Stop 759
aacagtatgagaaggctatcaatac

SEQ ID NO: 280231 - DNA, 25 bp, Artificial
  probe
  misc_feature (1)..(25): SEQ ID NO: 1003; WAN024C4Q; Start 2144; Stop 2168
tcaaccagcacaaccataacattta

SEQ ID NO: 280232 - DNA, 25 bp, Artificial
  probe
  misc_feature (1)..(25): SEQ ID NO: 1003; WAN024C4Q; Start 2146; Stop 2170
aaccagcacaaccataacatttatc

SEQ ID NO: 280233 - DNA, 25 bp, Artificial
  probe
  misc_feature (1)..(25): SEQ ID NO: 1003; WAN024C4Q; Start 2145; Stop 2169
caaccagcacaaccataacatttat

SEQ ID NO: 280234 - DNA, 25 bp, Artificial
  probe
  misc_feature (1)..(25): SEQ ID NO: 1003; WAN024C4Q; Start 1893; Stop 1917
ccagaggattggaatataccagagg

SEQ ID NO: 280235 - DNA, 25 bp, Artificial
  probe
  misc_feature (1)..(25): SEQ ID NO: 1003; WAN024C4Q; Start 2147; Stop 2171
accagcacaaccataacatttatca

SEQ ID NO: 280236 - DNA, 25 bp, Artificial
  probe
  misc_feature (1)..(25): SEQ ID NO: 1003; WAN024C4Q; Start 704; Stop 728
gagatgaaaggtcaaggctacattt

SEQ ID NO: 280237 - DNA, 25 bp, Artificial
  probe
  misc_feature (1)..(25): SEQ ID NO: 1003; WAN024C4Q; Start 1863; Stop 1887
atgatgacctacctgtctgaaggaa

SEQ ID NO: 280238 - DNA, 25 bp, Artificial
  probe
  misc_feature (1)..(25): SEQ ID NO: 1003; WAN024C4Q; Start 2143; Stop 2167
ctcaaccagcacaaccataacattt

SEQ ID NO: 280239 - DNA, 25 bp, Artificial
  probe
  misc_feature (1)..(25): SEQ ID NO: 1003; WAN024C4Q; Start 703; Stop 727
agagatgaaaggtcaaggctacatt

SEQ ID NO: 280240 - DNA, 25 bp, Artificial
  probe
  misc_feature (1)..(25): SEQ ID NO: 1003; WAN024C4Q; Start 2142; Stop 2166
cctcaaccagcacaaccataacatt

SEQ ID NO: 280241 - DNA, 25 bp, Artificial
  probe
  misc_feature (1)..(25): SEQ ID NO: 1003; WAN024C4Q; Start 1864; Stop 1888
tgatgacctacctgtctgaaggaag

SEQ ID NO: 280242 - DNA, 25 bp, Artificial
  probe
  misc_feature (1)..(25): SEQ ID NO: 1003; WAN024C4Q; Start 702; Stop 726
cagagatgaaaggtcaaggctacat

SEQ ID NO: 280243 - DNA, 25 bp, Artificial
  probe
  misc_feature (1)..(25): SEQ ID NO: 1003; WAN024C4Q; Start 1894; Stop 1918
cagaggattggaatataccagaggg

SEQ ID NO: 280244 - DNA, 25 bp, Artificial
  probe
  misc_feature (1)..(25): SEQ ID NO: 1003; WAN024C4Q; Start 706; Stop 730
gatgaaaggtcaaggctacatttct

SEQ ID NO: 280245 - DNA, 25 bp, Artificial
  probe
  misc_feature (1)..(25): SEQ ID NO: 1003; WAN024C4Q; Start 705; Stop 729
agatgaaaggtcaaggctacatttc

SEQ ID NO: 280246 - DNA, 25 bp, Artificial
  probe
  misc_feature (1)..(25): SEQ ID NO: 1003; WAN024C4Q; Start 1313; Stop 1337
aacaaggttggtttagatagagcca

SEQ ID NO: 280247 - DNA, 25 bp, Artificial
  probe
  misc_feature (1)..(25): SEQ ID NO: 1003; WAN024C4Q; Start 1348; Stop 1372
aaatggtttaggaattgactatcca

SEQ ID NO: 280248 - DNA, 25 bp, Artificial
  probe
  misc_feature (1)..(25): SEQ ID NO: 1003; WAN024C4Q; Start 770; Stop 794
gatggactccaaagtttgaaatcag

SEQ ID NO: 280249 - DNA, 25 bp, Artificial
  probe
  misc_feature (1)..(25): SEQ ID NO: 1003; WAN024C4Q; Start 707; Stop 731
atgaaaggtcaaggctacatttctg

SEQ ID NO: 280250 - DNA, 25 bp, Artificial
  probe
  misc_feature (1)..(25): SEQ ID NO: 1003; WAN024C4Q; Start 1312; Stop 1336
aaacaaggttggtttagatagagcc

SEQ ID NO: 280251 - DNA, 25 bp, Artificial
  probe
  misc_feature (1)..(25): SEQ ID NO: 1003; WAN024C4Q; Start 771; Stop 795
atggactccaaagtttgaaatcagt

SEQ ID NO: 280252 - DNA, 25 bp, Artificial
  probe
  misc_feature (1)..(25): SEQ ID NO: 1003; WAN024C4Q; Start 2141; Stop 2165
tcctcaaccagcacaaccataacat

SEQ ID NO: 280253 - DNA, 25 bp, Artificial
  probe
  misc_feature (1)..(25): SEQ ID NO: 1003; WAN024C4Q; Start 2140; Stop 2164
atcctcaaccagcacaaccataaca

SEQ ID NO: 280254 - DNA, 25 bp, Artificial
  probe
  misc_feature (1)..(25): SEQ ID NO: 1003; WAN024C4Q; Start 701; Stop 725
tcagagatgaaaggtcaaggctaca

SEQ ID NO: 280255 - DNA, 25 bp, Artificial
  probe
  misc_feature (1)..(25): SEQ ID NO: 1003; WAN024C4Q; Start 775; Stop 799
actccaaagtttgaaatcagtcaat

SEQ ID NO: 280256 - DNA, 25 bp, Artificial
  probe
  misc_feature (1)..(25): SEQ ID NO: 1003; WAN024C4Q; Start 1869; Stop 1893
acctacctgtctgaaggaagcaatc

SEQ ID NO: 280257 - DNA, 25 bp, Artificial
  probe
  misc_feature (1)..(25): SEQ ID NO: 1003; WAN024C4Q; Start 1868; Stop 1892
gacctacctgtctgaaggaagcaat

SEQ ID NO: 280258 - DNA, 25 bp, Artificial
  probe
  misc_feature (1)..(25): SEQ ID NO: 1003; WAN024C4Q; Start 778; Stop 802
ccaaagtttgaaatcagtcaatagc

SEQ ID NO: 280259 - DNA, 25 bp, Artificial
  probe
  misc_feature (1)..(25): SEQ ID NO: 1003; WAN024C4Q; Start 1919; Stop 1943
gctctacagaaatggagaattcgta

SEQ ID NO: 280260 - DNA, 25 bp, Artificial
  probe
  misc_feature (1)..(25): SEQ ID NO: 1004; WAN024C4R; Start 2047; Stop 2071
tcaactactccaagcacgaataata

SEQ ID NO: 280261 - DNA, 25 bp, Artificial
  probe
  misc_feature (1)..(25): SEQ ID NO: 1004; WAN024C4R; Start 2079; Stop 2103
caataataccaataaccagcaacca

SEQ ID NO: 280262 - DNA, 25 bp, Artificial
  probe
  misc_feature (1)..(25): SEQ ID NO: 1004; WAN024C4R; Start 2078; Stop 2102
acaataataccaataaccagcaacc

SEQ ID NO: 280263 - DNA, 25 bp, Artificial
  probe
  misc_feature (1)..(25): SEQ ID NO: 1004; WAN024C4R; Start 2048; Stop 2072
caactactccaagcacgaataatag

SEQ ID NO: 280264 - DNA, 25 bp, Artificial
  probe
  misc_feature (1)..(25): SEQ ID NO: 1004; WAN024C4R; Start 2046; Stop 2070
ctcaactactccaagcacgaataat

SEQ ID NO: 280265 - DNA, 25 bp, Artificial
  probe
  misc_feature (1)..(25): SEQ ID NO: 1004; WAN024C4R; Start 2080; Stop 2104
aataataccaataaccagcaaccaa

SEQ ID NO: 280266 - DNA, 25 bp, Artificial
  probe
  misc_feature (1)..(25): SEQ ID NO: 1004; WAN024C4R; Start 1852; Stop 1876
taccgttcaatgatgacttatctgt

SEQ ID NO: 280267 - DNA, 25 bp, Artificial
  probe
  misc_feature (1)..(25): SEQ ID NO: 1004; WAN024C4R; Start 1851; Stop 1875
ttaccgttcaatgatgacttatctg

SEQ ID NO: 280268 - DNA, 25 bp, Artificial
  probe
  misc_feature (1)..(25): SEQ ID NO: 1004; WAN024C4R; Start 2077; Stop 2101
aacaataataccaataaccagcaac

SEQ ID NO: 280269 - DNA, 25 bp, Artificial
  probe
  misc_feature (1)..(25): SEQ ID NO: 1004; WAN024C4R; Start 1859; Stop 1883
caatgatgacttatctgtctgagga

SEQ ID NO: 280270 - DNA, 25 bp, Artificial
  probe
  misc_feature (1)..(25): SEQ ID NO: 1004; WAN024C4R; Start 1858; Stop 1882
tcaatgatgacttatctgtctgagg

SEQ ID NO: 280271 - DNA, 25 bp, Artificial
  probe
  misc_feature (1)..(25): SEQ ID NO: 1004; WAN024C4R; Start 1855; Stop 1879
cgttcaatgatgacttatctgtctg

SEQ ID NO: 280272 - DNA, 25 bp, Artificial
  probe
  misc_feature (1)..(25): SEQ ID NO: 1004; WAN024C4R; Start 1854; Stop 1878
ccgttcaatgatgacttatctgtct

SEQ ID NO: 280273 - DNA, 25 bp, Artificial
  probe
  misc_feature (1)..(25): SEQ ID NO: 1004; WAN024C4R; Start 1815; Stop 1839
tatcgttggtgatggcttctatgtt

SEQ ID NO: 280274 - DNA, 25 bp, Artificial
  probe
  misc_feature (1)..(25): SEQ ID NO: 1004; WAN024C4R; Start 1150; Stop 1174
tatgacatctacgactcaactgctt

SEQ ID NO: 280275 - DNA, 25 bp, Artificial
  probe
  misc_feature (1)..(25): SEQ ID NO: 1004; WAN024C4R; Start 1853; Stop 1877
accgttcaatgatgacttatctgtc

SEQ ID NO: 280276 - DNA, 25 bp, Artificial
  probe
  misc_feature (1)..(25): SEQ ID NO: 1004; WAN024C4R; Start 1860; Stop 1884
aatgatgacttatctgtctgaggat

SEQ ID NO: 280277 - DNA, 25 bp, Artificial
  probe
  misc_feature (1)..(25): SEQ ID NO: 1004; WAN024C4R; Start 1814; Stop 1838
ctatcgttggtgatggcttctatgt

SEQ ID NO: 280278 - DNA, 25 bp, Artificial
  probe
  misc_feature (1)..(25): SEQ ID NO: 1004; WAN024C4R; Start 1856; Stop 1880
gttcaatgatgacttatctgtctga

SEQ ID NO: 280279 - DNA, 25 bp, Artificial
  probe
  misc_feature (1)..(25): SEQ ID NO: 1004; WAN024C4R; Start 1136; Stop 1160
ctcctgccttagagtatgacatcta

SEQ ID NO: 280280 - DNA, 25 bp, Artificial
  probe
  misc_feature (1)..(25): SEQ ID NO: 1004; WAN024C4R; Start 1137; Stop 1161
tcctgccttagagtatgacatctac

SEQ ID NO: 280281 - DNA, 25 bp, Artificial
  probe
  misc_feature (1)..(25): SEQ ID NO: 1004; WAN024C4R; Start 1857; Stop 1881
ttcaatgatgacttatctgtctgag

SEQ ID NO: 280282 - DNA, 25 bp, Artificial
  probe
  misc_feature (1)..(25): SEQ ID NO: 1004; WAN024C4R; Start 1131; Stop 1155
ctatgctcctgccttagagtatgac

SEQ ID NO: 280283 - DNA, 25 bp, Artificial
  probe
  misc_feature (1)..(25): SEQ ID NO: 1004; WAN024C4R; Start 1129; Stop 1153
gactatgctcctgccttagagtatg

SEQ ID NO: 280284 - DNA, 25 bp, Artificial
  probe
  misc_feature (1)..(25): SEQ ID NO: 1004; WAN024C4R; Start 2049; Stop 2073
aactactccaagcacgaataatagt

SEQ ID NO: 280285 - DNA, 25 bp, Artificial
  probe
  misc_feature (1)..(25): SEQ ID NO: 1004; WAN024C4R; Start 2050; Stop 2074
actactccaagcacgaataatagtg

SEQ ID NO: 280286 - DNA, 25 bp, Artificial
  probe
  misc_feature (1)..(25): SEQ ID NO: 1004; WAN024C4R; Start 1149; Stop 1173
gtatgacatctacgactcaactgct

SEQ ID NO: 280287 - DNA, 25 bp, Artificial
  probe
  misc_feature (1)..(25): SEQ ID NO: 1004; WAN024C4R; Start 1148; Stop 1172
agtatgacatctacgactcaactgc

SEQ ID NO: 280288 - DNA, 25 bp, Artificial
  probe
  misc_feature (1)..(25): SEQ ID NO: 1004; WAN024C4R; Start 1861; Stop 1885
atgatgacttatctgtctgaggata

SEQ ID NO: 280289 - DNA, 25 bp, Artificial
  probe
  misc_feature (1)..(25): SEQ ID NO: 1004; WAN024C4R; Start 1128; Stop 1152
agactatgctcctgccttagagtat

SEQ ID NO: 280290 - DNA, 25 bp, Artificial
  probe
  misc_feature (1)..(25): SEQ ID NO: 1004; WAN024C4R; Start 1141; Stop 1165
gccttagagtatgacatctacgact

SEQ ID NO: 280291 - DNA, 25 bp, Artificial
  probe
  misc_feature (1)..(25): SEQ ID NO: 1004; WAN024C4R; Start 1139; Stop 1163
ctgccttagagtatgacatctacga

SEQ ID NO: 280292 - DNA, 25 bp, Artificial
  probe
  misc_feature (1)..(25): SEQ ID NO: 1004; WAN024C4R; Start 2084; Stop 2108
ataccaataaccagcaaccaaatac

SEQ ID NO: 280293 - DNA, 25 bp, Artificial
  probe
  misc_feature (1)..(25): SEQ ID NO: 1006; WAN024C4L; Start 1264; Stop 1288
caatatgctcttcaacaatcacgaa

SEQ ID NO: 280294 - DNA, 25 bp, Artificial
  probe
  misc_feature (1)..(25): SEQ ID NO: 1006; WAN024C4L; Start 712; Stop 736
aatcaaggttacatctctgctgaac

SEQ ID NO: 280295 - DNA, 25 bp, Artificial
  probe
  misc_feature (1)..(25): SEQ ID NO: 1006; WAN024C4L; Start 720; Stop 744
ttacatctctgctgaacagtatgag

SEQ ID NO: 280296 - DNA, 25 bp, Artificial
  probe
  misc_feature (1)..(25): SEQ ID NO: 1006; WAN024C4L; Start 719; Stop 743
gttacatctctgctgaacagtatga

SEQ ID NO: 280297 - DNA, 25 bp, Artificial
  probe
  misc_feature (1)..(25): SEQ ID NO: 1006; WAN024C4L; Start 1767; Stop 1791
taagtattctatggctgtatggaca

SEQ ID NO: 280298 - DNA, 25 bp, Artificial
  probe
  misc_feature (1)..(25): SEQ ID NO: 1006; WAN024C4L; Start 718; Stop 742
ggttacatctctgctgaacagtatg

SEQ ID NO: 280299 - DNA, 25 bp, Artificial
  probe
  misc_feature (1)..(25): SEQ ID NO: 1006; WAN024C4L; Start 717; Stop 741
aggttacatctctgctgaacagtat

SEQ ID NO: 280300 - DNA, 25 bp, Artificial
  probe
  misc_feature (1)..(25): SEQ ID NO: 1006; WAN024C4L; Start 713; Stop 737
atcaaggttacatctctgctgaaca

SEQ ID NO: 280301 - DNA, 25 bp, Artificial
  probe
  misc_feature (1)..(25): SEQ ID NO: 1006; WAN024C4L; Start 716; Stop 740
aaggttacatctctgctgaacagta

SEQ ID NO: 280302 - DNA, 25 bp, Artificial
  probe
  misc_feature (1)..(25): SEQ ID NO: 1006; WAN024C4L; Start 1386; Stop 1410
aaacgccatttcaagtaatacaaca

SEQ ID NO: 280303 - DNA, 25 bp, Artificial
  probe
  misc_feature (1)..(25): SEQ ID NO: 1006; WAN024C4L; Start 1418; Stop 1442
ataaacaatacggagcaagtagtga

SEQ ID NO: 280304 - DNA, 25 bp, Artificial
  probe
  misc_feature (1)..(25): SEQ ID NO: 1006; WAN024C4L; Start 1230; Stop 1254
ctgggatagagcatatttcggtaat

SEQ ID NO: 280305 - DNA, 25 bp, Artificial
  probe
  misc_feature (1)..(25): SEQ ID NO: 1006; WAN024C4L; Start 685; Stop 709
cgaaacttgctcttatctgaaatga

SEQ ID NO: 280306 - DNA, 25 bp, Artificial
  probe
  misc_feature (1)..(25): SEQ ID NO: 1006; WAN024C4L; Start 1419; Stop 1443
taaacaatacggagcaagtagtgaa

SEQ ID NO: 280307 - DNA, 25 bp, Artificial
  probe
  misc_feature (1)..(25): SEQ ID NO: 1006; WAN024C4L; Start 1225; Stop 1249
tacaactgggatagagcatatttcg

SEQ ID NO: 280308 - DNA, 25 bp, Artificial
  probe
  misc_feature (1)..(25): SEQ ID NO: 1006; WAN024C4L; Start 684; Stop 708
ccgaaacttgctcttatctgaaatg

SEQ ID NO: 280309 - DNA, 25 bp, Artificial
  probe
  misc_feature (1)..(25): SEQ ID NO: 1006; WAN024C4L; Start 1417; Stop 1441
aataaacaatacggagcaagtagtg

SEQ ID NO: 280310 - DNA, 25 bp, Artificial
  probe
  misc_feature (1)..(25): SEQ ID NO: 1006; WAN024C4L; Start 1743; Stop 1767
tgaaatgtttgttggttatactcgt

SEQ ID NO: 280311 - DNA, 25 bp, Artificial
  probe
  misc_feature (1)..(25): SEQ ID NO: 1006; WAN024C4L; Start 1420; Stop 1444
aaacaatacggagcaagtagtgaaa

SEQ ID NO: 280312 - DNA, 25 bp, Artificial
  probe
  misc_feature (1)..(25): SEQ ID NO: 1006; WAN024C4L; Start 1265; Stop 1289
aatatgctcttcaacaatcacgaaa

SEQ ID NO: 280313 - DNA, 25 bp, Artificial
  probe
  misc_feature (1)..(25): SEQ ID NO: 1006; WAN024C4L; Start 1266; Stop 1290
atatgctcttcaacaatcacgaaat

SEQ ID NO: 280314 - DNA, 25 bp, Artificial
  probe
  misc_feature (1)..(25): SEQ ID NO: 1006; WAN024C4L; Start 1229; Stop 1253
actgggatagagcatatttcggtaa

SEQ ID NO: 280315 - DNA, 25 bp, Artificial
  probe
  misc_feature (1)..(25): SEQ ID NO: 1006; WAN024C4L; Start 1228; Stop 1252
aactgggatagagcatatttcggta

SEQ ID NO: 280316 - DNA, 25 bp, Artificial
  probe
  misc_feature (1)..(25): SEQ ID NO: 1006; WAN024C4L; Start 1224; Stop 1248
ctacaactgggatagagcatatttc

SEQ ID NO: 280317 - DNA, 25 bp, Artificial
  probe
  misc_feature (1)..(25): SEQ ID NO: 1006; WAN024C4L; Start 1976; Stop 2000
cctctactcaacaatcctcaacagc

SEQ ID NO: 280318 - DNA, 25 bp, Artificial
  probe
  misc_feature (1)..(25): SEQ ID NO: 1006; WAN024C4L; Start 711; Stop 735
aaatcaaggttacatctctgctgaa

SEQ ID NO: 280319 - DNA, 25 bp, Artificial
  probe
  misc_feature (1)..(25): SEQ ID NO: 1006; WAN024C4L; Start 1231; Stop 1255
tgggatagagcatatttcggtaata

SEQ ID NO: 280320 - DNA, 25 bp, Artificial
  probe
  misc_feature (1)..(25): SEQ ID NO: 1006; WAN024C4L; Start 1413; Stop 1437
atctaataaacaatacggagcaagt

SEQ ID NO: 280321 - DNA, 25 bp, Artificial
  probe
  misc_feature (1)..(25): SEQ ID NO: 1006; WAN024C4L; Start 1962; Stop 1986
aatatggactgaaccctctactcaa

SEQ ID NO: 280322 - DNA, 25 bp, Artificial
  probe
  misc_feature (1)..(25): SEQ ID NO: 1006; WAN024C4L; Start 714; Stop 738
tcaaggttacatctctgctgaacag

SEQ ID NO: 280323 - DNA, 25 bp, Artificial
  probe
  misc_feature (1)..(25): SEQ ID NO: 1006; WAN024C4L; Start 1977; Stop 2001
ctctactcaacaatcctcaacagct

SEQ ID NO: 280324 - DNA, 25 bp, Artificial
  probe
  misc_feature (1)..(25): SEQ ID NO: 1006; WAN024C4L; Start 1742; Stop 1766
atgaaatgtttgttggttatactcg

SEQ ID NO: 280325 - DNA, 25 bp, Artificial
  probe
  misc_feature (1)..(25): SEQ ID NO: 1006; WAN024C4L; Start 1972; Stop 1996
gaaccctctactcaacaatcctcaa

SEQ ID NO: 280326 - DNA, 25 bp, Artificial
  probe
  misc_feature (1)..(25): SEQ ID NO: 1007; WAN024G9X; Start 149; Stop 173
ctaacacattccgattcaacttctc

SEQ ID NO: 280327 - DNA, 25 bp, Artificial
  probe
  misc_feature (1)..(25): SEQ ID NO: 1007; WAN024G9X; Start 799; Stop 823
ggtattatgattgctcgtggtgata

SEQ ID NO: 280328 - DNA, 25 bp, Artificial
  probe
  misc_feature (1)..(25): SEQ ID NO: 1007; WAN024G9X; Start 150; Stop 174
taacacattccgattcaacttctca

SEQ ID NO: 280329 - DNA, 25 bp, Artificial
  probe
  misc_feature (1)..(25): SEQ ID NO: 1007; WAN024G9X; Start 1053; Stop 1077
gtcagtaactacaatggctacaatc

SEQ ID NO: 280330 - DNA, 25 bp, Artificial
  probe
  misc_feature (1)..(25): SEQ ID NO: 1007; WAN024G9X; Start 416; Stop 440
tctatgatgatgttgaagttggtcg

SEQ ID NO: 280331 - DNA, 25 bp, Artificial
  probe
  misc_feature (1)..(25): SEQ ID NO: 1007; WAN024G9X; Start 1054; Stop 1078
tcagtaactacaatggctacaatcg

SEQ ID NO: 280332 - DNA, 25 bp, Artificial
  probe
  misc_feature (1)..(25): SEQ ID NO: 1007; WAN024G9X; Start 802; Stop 826
attatgattgctcgtggtgatatgg

SEQ ID NO: 280333 - DNA, 25 bp, Artificial
  probe
  misc_feature (1)..(25): SEQ ID NO: 1007; WAN024G9X; Start 418; Stop 442
tatgatgatgttgaagttggtcgtc

SEQ ID NO: 280334 - DNA, 25 bp, Artificial
  probe
  misc_feature (1)..(25): SEQ ID NO: 1007; WAN024G9X; Start 417; Stop 441
ctatgatgatgttgaagttggtcgt

SEQ ID NO: 280335 - DNA, 25 bp, Artificial
  probe
  misc_feature (1)..(25): SEQ ID NO: 1007; WAN024G9X; Start 801; Stop 825
tattatgattgctcgtggtgatatg

SEQ ID NO: 280336 - DNA, 25 bp, Artificial
  probe
  misc_feature (1)..(25): SEQ ID NO: 1007; WAN024G9X; Start 800; Stop 824
gtattatgattgctcgtggtgatat

SEQ ID NO: 280337 - DNA, 25 bp, Artificial
  probe
  misc_feature (1)..(25): SEQ ID NO: 1007; WAN024G9X; Start 415; Stop 439
atctatgatgatgttgaagttggtc

SEQ ID NO: 280338 - DNA, 25 bp, Artificial
  probe
  misc_feature (1)..(25): SEQ ID NO: 1007; WAN024G9X; Start 1353; Stop 1377
tccatcttcaactgacgatatgttc

SEQ ID NO: 280339 - DNA, 25 bp, Artificial
  probe
  misc_feature (1)..(25): SEQ ID NO: 1007; WAN024G9X; Start 1352; Stop 1376
ctccatcttcaactgacgatatgtt

SEQ ID NO: 280340 - DNA, 25 bp, Artificial
  probe
  misc_feature (1)..(25): SEQ ID NO: 1007; WAN024G9X; Start 1052; Stop 1076
agtcagtaactacaatggctacaat

SEQ ID NO: 280341 - DNA, 25 bp, Artificial
  probe
  misc_feature (1)..(25): SEQ ID NO: 1007; WAN024G9X; Start 1051; Stop 1075
gagtcagtaactacaatggctacaa

SEQ ID NO: 280342 - DNA, 25 bp, Artificial
  probe
  misc_feature (1)..(25): SEQ ID NO: 1007; WAN024G9X; Start 1141; Stop 1165
aactctaagacagaagtaatggctt

SEQ ID NO: 280343 - DNA, 25 bp, Artificial
  probe
  misc_feature (1)..(25): SEQ ID NO: 1007; WAN024G9X; Start 632; Stop 656
aacaaggtatcaacttcatcgcaat

SEQ ID NO: 280344 - DNA, 25 bp, Artificial
  probe
  misc_feature (1)..(25): SEQ ID NO: 1007; WAN024G9X; Start 794; Stop 818
ctgatggtattatgattgctcgtgg

SEQ ID NO: 280345 - DNA, 25 bp, Artificial
  probe
  misc_feature (1)..(25): SEQ ID NO: 1007; WAN024G9X; Start 148; Stop 172
gctaacacattccgattcaacttct

SEQ ID NO: 280346 - DNA, 25 bp, Artificial
  probe
  misc_feature (1)..(25): SEQ ID NO: 1007; WAN024G9X; Start 1137; Stop 1161
gcgtaactctaagacagaagtaatg

SEQ ID NO: 280347 - DNA, 25 bp, Artificial
  probe
  misc_feature (1)..(25): SEQ ID NO: 1007; WAN024G9X; Start 1136; Stop 1160
agcgtaactctaagacagaagtaat

SEQ ID NO: 280348 - DNA, 25 bp, Artificial
  probe
  misc_feature (1)..(25): SEQ ID NO: 1007; WAN024G9X; Start 1135; Stop 1159
gagcgtaactctaagacagaagtaa

SEQ ID NO: 280349 - DNA, 25 bp, Artificial
  probe
  misc_feature (1)..(25): SEQ ID NO: 1007; WAN024G9X; Start 633; Stop 657
acaaggtatcaacttcatcgcaatt

SEQ ID NO: 280350 - DNA, 25 bp, Artificial
  probe
  misc_feature (1)..(25): SEQ ID NO: 1007; WAN024G9X; Start 1139; Stop 1163
gtaactctaagacagaagtaatggc

SEQ ID NO: 280351 - DNA, 25 bp, Artificial
  probe
  misc_feature (1)..(25): SEQ ID NO: 1007; WAN024G9X; Start 796; Stop 820
gatggtattatgattgctcgtggtg

SEQ ID NO: 280352 - DNA, 25 bp, Artificial
  probe
  misc_feature (1)..(25): SEQ ID NO: 1007; WAN024G9X; Start 151; Stop 175
aacacattccgattcaacttctcac

SEQ ID NO: 280353 - DNA, 25 bp, Artificial
  probe
  misc_feature (1)..(25): SEQ ID NO: 1007; WAN024G9X; Start 147; Stop 171
tgctaacacattccgattcaacttc

SEQ ID NO: 280354 - DNA, 25 bp, Artificial
  probe
  misc_feature (1)..(25): SEQ ID NO: 1007; WAN024G9X; Start 1140; Stop 1164
taactctaagacagaagtaatggct

SEQ ID NO: 280355 - DNA, 25 bp, Artificial
  probe
  misc_feature (1)..(25): SEQ ID NO: 1007; WAN024G9X; Start 1134; Stop 1158
tgagcgtaactctaagacagaagta

SEQ ID NO: 280356 - DNA, 25 bp, Artificial
  probe
  misc_feature (1)..(25): SEQ ID NO: 1007; WAN024G9X; Start 1138; Stop 1162
cgtaactctaagacagaagtaatgg

SEQ ID NO: 280357 - DNA, 25 bp, Artificial
  probe
  misc_feature (1)..(25): SEQ ID NO: 1007; WAN024G9X; Start 631; Stop 655
gaacaaggtatcaacttcatcgcaa

SEQ ID NO: 280358 - DNA, 25 bp, Artificial
  probe
  misc_feature (1)..(25): SEQ ID NO: 1007; WAN024G9X; Start 798; Stop 822
tggtattatgattgctcgtggtgat

SEQ ID NO: 280359 - DNA, 25 bp, Artificial
  probe
  misc_feature (1)..(25): SEQ ID NO: 1008; WAN024C4V; Start 1494; Stop 1518
accaatgtatatccataaagtcgtc

SEQ ID NO: 280360 - DNA, 25 bp, Artificial
  probe
  misc_feature (1)..(25): SEQ ID NO: 1008; WAN024C4V; Start 1495; Stop 1519
ccaatgtatatccataaagtcgtct

SEQ ID NO: 280361 - DNA, 25 bp, Artificial
  probe
  misc_feature (1)..(25): SEQ ID NO: 1008; WAN024C4V; Start 1493; Stop 1517
aaccaatgtatatccataaagtcgt

SEQ ID NO: 280362 - DNA, 25 bp, Artificial
  probe
  misc_feature (1)..(25): SEQ ID NO: 1008; WAN024C4V; Start 1492; Stop 1516
aaaccaatgtatatccataaagtcg

SEQ ID NO: 280363 - DNA, 25 bp, Artificial
  probe
  misc_feature (1)..(25): SEQ ID NO: 1008; WAN024C4V; Start 1496; Stop 1520
caatgtatatccataaagtcgtctt

SEQ ID NO: 280364 - DNA, 25 bp, Artificial
  probe
  misc_feature (1)..(25): SEQ ID NO: 1008; WAN024C4V; Start 1437; Stop 1461
tagtgaaaagatggctgctgcttac

SEQ ID NO: 280365 - DNA, 25 bp, Artificial
  probe
  misc_feature (1)..(25): SEQ ID NO: 1008; WAN024C4V; Start 1436; Stop 1460
gtagtgaaaagatggctgctgctta

SEQ ID NO: 280366 - DNA, 25 bp, Artificial
  probe
  misc_feature (1)..(25): SEQ ID NO: 1008; WAN024C4V; Start 1433; Stop 1457
caagtagtgaaaagatggctgctgc

SEQ ID NO: 280367 - DNA, 25 bp, Artificial
  probe
  misc_feature (1)..(25): SEQ ID NO: 1008; WAN024C4V; Start 1434; Stop 1458
aagtagtgaaaagatggctgctgct

SEQ ID NO: 280368 - DNA, 25 bp, Artificial
  probe
  misc_feature (1)..(25): SEQ ID NO: 1008; WAN024C4V; Start 1435; Stop 1459
agtagtgaaaagatggctgctgctt

SEQ ID NO: 280369 - DNA, 25 bp, Artificial
  probe
  misc_feature (1)..(25): SEQ ID NO: 1008; WAN024C4V; Start 1429; Stop 1453
ggagcaagtagtgaaaagatggctg

SEQ ID NO: 280370 - DNA, 25 bp, Artificial
  probe
  misc_feature (1)..(25): SEQ ID NO: 1008; WAN024C4V; Start 1430; Stop 1454
gagcaagtagtgaaaagatggctgc

SEQ ID NO: 280371 - DNA, 25 bp, Artificial
  probe
  misc_feature (1)..(25): SEQ ID NO: 1008; WAN024C4V; Start 1432; Stop 1456
gcaagtagtgaaaagatggctgctg

SEQ ID NO: 280372 - DNA, 25 bp, Artificial
  probe
  misc_feature (1)..(25): SEQ ID NO: 1009; WAN024GEI; Start 156; Stop 180
taacaacaggctactccaattaaga

SEQ ID NO: 280373 - DNA, 25 bp, Artificial
  probe
  misc_feature (1)..(25): SEQ ID NO: 1009; WAN024GEI; Start 155; Stop 179
ttaacaacaggctactccaattaag

SEQ ID NO: 280374 - DNA, 25 bp, Artificial
  probe
  misc_feature (1)..(25): SEQ ID NO: 1009; WAN024GEI; Start 164; Stop 188
ggctactccaattaagagaactacc

SEQ ID NO: 280375 - DNA, 25 bp, Artificial
  probe
  misc_feature (1)..(25): SEQ ID NO: 1009; WAN024GEI; Start 163; Stop 187
aggctactccaattaagagaactac

SEQ ID NO: 280376 - DNA, 25 bp, Artificial
  probe
  misc_feature (1)..(25): SEQ ID NO: 1009; WAN024GEI; Start 162; Stop 186
caggctactccaattaagagaacta

SEQ ID NO: 280377 - DNA, 25 bp, Artificial
  probe
  misc_feature (1)..(25): SEQ ID NO: 1009; WAN024GEI; Start 160; Stop 184
aacaggctactccaattaagagaac

SEQ ID NO: 280378 - DNA, 25 bp, Artificial
  probe
  misc_feature (1)..(25): SEQ ID NO: 1009; WAN024GEI; Start 159; Stop 183
caacaggctactccaattaagagaa

SEQ ID NO: 280379 - DNA, 25 bp, Artificial
  probe
  misc_feature (1)..(25): SEQ ID NO: 1009; WAN024GEI; Start 157; Stop 181
aacaacaggctactccaattaagag

SEQ ID NO: 280380 - DNA, 25 bp, Artificial
  probe
  misc_feature (1)..(25): SEQ ID NO: 1009; WAN024GEI; Start 161; Stop 185
acaggctactccaattaagagaact

SEQ ID NO: 280381 - DNA, 25 bp, Artificial
  probe
  misc_feature (1)..(25): SEQ ID NO: 1009; WAN024GEI; Start 158; Stop 182
acaacaggctactccaattaagaga

SEQ ID NO: 280382 - DNA, 25 bp, Artificial
  probe
  misc_feature (1)..(25): SEQ ID NO: 1009; WAN024GEI; Start 165; Stop 189
gctactccaattaagagaactaccc

SEQ ID NO: 280383 - DNA, 25 bp, Artificial
  probe
  misc_feature (1)..(25): SEQ ID NO: 1009; WAN024GEI; Start 122; Stop 146
agttatcttgcatgattatcactcc

SEQ ID NO: 280384 - DNA, 25 bp, Artificial
  probe
  misc_feature (1)..(25): SEQ ID NO: 1009; WAN024GEI; Start 34; Stop 58
attgctaaaccaaatccgatacctg

SEQ ID NO: 280385 - DNA, 25 bp, Artificial
  probe
  misc_feature (1)..(25): SEQ ID NO: 1009; WAN024GEI; Start 154; Stop 178
tttaacaacaggctactccaattaa

SEQ ID NO: 280386 - DNA, 25 bp, Artificial
  probe
  misc_feature (1)..(25): SEQ ID NO: 1009; WAN024GEI; Start 38; Stop 62
ctaaaccaaatccgatacctgttgc

SEQ ID NO: 280387 - DNA, 25 bp, Artificial
  probe
  misc_feature (1)..(25): SEQ ID NO: 1009; WAN024GEI; Start 37; Stop 61
gctaaaccaaatccgatacctgttg

SEQ ID NO: 280388 - DNA, 25 bp, Artificial
  probe
  misc_feature (1)..(25): SEQ ID NO: 1009; WAN024GEI; Start 36; Stop 60
tgctaaaccaaatccgatacctgtt

SEQ ID NO: 280389 - DNA, 25 bp, Artificial
  probe
  misc_feature (1)..(25): SEQ ID NO: 1009; WAN024GEI; Start 4; Stop 28
aacaaacttcaacaaccagcaagag

SEQ ID NO: 280390 - DNA, 25 bp, Artificial
  probe
  misc_feature (1)..(25): SEQ ID NO: 1009; WAN024GEI; Start 3; Stop 27
gaacaaacttcaacaaccagcaaga

SEQ ID NO: 280391 - DNA, 25 bp, Artificial
  probe
  misc_feature (1)..(25): SEQ ID NO: 1009; WAN024GEI; Start 35; Stop 59
ttgctaaaccaaatccgatacctgt

SEQ ID NO: 280392 - DNA, 25 bp, Artificial
  probe
  misc_feature (1)..(25): SEQ ID NO: 1009; WAN024GEI; Start 33; Stop 57
gattgctaaaccaaatccgatacct

SEQ ID NO: 280393 - DNA, 25 bp, Artificial
  probe
  misc_feature (1)..(25): SEQ ID NO: 1009; WAN024GEI; Start 121; Stop 145
aagttatcttgcatgattatcactc

SEQ ID NO: 280394 - DNA, 25 bp, Artificial
  probe
  misc_feature (1)..(25): SEQ ID NO: 1009; WAN024GEI; Start 128; Stop 152
cttgcatgattatcactccctatct

SEQ ID NO: 280395 - DNA, 25 bp, Artificial
  probe
  misc_feature (1)..(25): SEQ ID NO: 1009; WAN024GEI; Start 127; Stop 151
tcttgcatgattatcactccctatc

SEQ ID NO: 280396 - DNA, 25 bp, Artificial
  probe
  misc_feature (1)..(25): SEQ ID NO: 1009; WAN024GEI; Start 123; Stop 147
gttatcttgcatgattatcactccc

SEQ ID NO: 280397 - DNA, 25 bp, Artificial
  probe
  misc_feature (1)..(25): SEQ ID NO: 1009; WAN024GEI; Start 130; Stop 154
tgcatgattatcactccctatcttt

SEQ ID NO: 280398 - DNA, 25 bp, Artificial
  probe
  misc_feature (1)..(25): SEQ ID NO: 1009; WAN024GEI; Start 129; Stop 153
ttgcatgattatcactccctatctt

SEQ ID NO: 280399 - DNA, 25 bp, Artificial
  probe
  misc_feature (1)..(25): SEQ ID NO: 1009; WAN024GEI; Start 124; Stop 148
ttatcttgcatgattatcactccct

SEQ ID NO: 280400 - DNA, 25 bp, Artificial
  probe
  misc_feature (1)..(25): SEQ ID NO: 1009; WAN024GEI; Start 126; Stop 150
atcttgcatgattatcactccctat

SEQ ID NO: 280401 - DNA, 25 bp, Artificial
  probe
  misc_feature (1)..(25): SEQ ID NO: 1009; WAN024GEI; Start 125; Stop 149
tatcttgcatgattatcactcccta

SEQ ID NO: 280402 - DNA, 25 bp, Artificial
  probe
  misc_feature (1)..(25): SEQ ID NO: 1009; WAN024GEI; Start 8; Stop 32
aacttcaacaaccagcaagagcaag

SEQ ID NO: 280403 - DNA, 25 bp, Artificial
  probe
  misc_feature (1)..(25): SEQ ID NO: 1009; WAN024GEI; Start 153; Stop 177
ttttaacaacaggctactccaatta

SEQ ID NO: 280404 - DNA, 25 bp, Artificial
  probe
  misc_feature (1)..(25): SEQ ID NO: 1009; WAN024GEI; Start 166; Stop 190
ctactccaattaagagaactacccc

SEQ ID NO: 280405 - DNA, 25 bp, Artificial
  probe
  misc_feature (1)..(25): SEQ ID NO: 1010; WAN024FSX; Start 361; Stop 385
ttactggatgttgttggaaggttat

SEQ ID NO: 280406 - DNA, 25 bp, Artificial
  probe
  misc_feature (1)..(25): SEQ ID NO: 1010; WAN024FSX; Start 415; Stop 439
aagttagtctatacctgctatgctg

SEQ ID NO: 280407 - DNA, 25 bp, Artificial
  probe
  misc_feature (1)..(25): SEQ ID NO: 1010; WAN024FSX; Start 418; Stop 442
ttagtctatacctgctatgctggaa

SEQ ID NO: 280408 - DNA, 25 bp, Artificial
  probe
  misc_feature (1)..(25): SEQ ID NO: 1010; WAN024FSX; Start 367; Stop 391
gatgttgttggaaggttatggtatc

SEQ ID NO: 280409 - DNA, 25 bp, Artificial
  probe
  misc_feature (1)..(25): SEQ ID NO: 1010; WAN024FSX; Start 362; Stop 386
tactggatgttgttggaaggttatg

SEQ ID NO: 280410 - DNA, 25 bp, Artificial
  probe
  misc_feature (1)..(25): SEQ ID NO: 1010; WAN024FSX; Start 366; Stop 390
ggatgttgttggaaggttatggtat

SEQ ID NO: 280411 - DNA, 25 bp, Artificial
  probe
  misc_feature (1)..(25): SEQ ID NO: 1010; WAN024FSX; Start 809; Stop 833
cggctaagacaatagtattaacgag

SEQ ID NO: 280412 - DNA, 25 bp, Artificial
  probe
  misc_feature (1)..(25): SEQ ID NO: 1010; WAN024FSX; Start 419; Stop 443
tagtctatacctgctatgctggaac

SEQ ID NO: 280413 - DNA, 25 bp, Artificial
  probe
  misc_feature (1)..(25): SEQ ID NO: 1010; WAN024FSX; Start 417; Stop 441
gttagtctatacctgctatgctgga

SEQ ID NO: 280414 - DNA, 25 bp, Artificial
  probe
  misc_feature (1)..(25): SEQ ID NO: 1010; WAN024FSX; Start 416; Stop 440
agttagtctatacctgctatgctgg

SEQ ID NO: 280415 - DNA, 25 bp, Artificial
  probe
  misc_feature (1)..(25): SEQ ID NO: 1010; WAN024FSX; Start 807; Stop 831
atcggctaagacaatagtattaacg

SEQ ID NO: 280416 - DNA, 25 bp, Artificial
  probe
  misc_feature (1)..(25): SEQ ID NO: 1010; WAN024FSX; Start 414; Stop 438
taagttagtctatacctgctatgct

SEQ ID NO: 280417 - DNA, 25 bp, Artificial
  probe
  misc_feature (1)..(25): SEQ ID NO: 1010; WAN024FSX; Start 810; Stop 834
ggctaagacaatagtattaacgagt

SEQ ID NO: 280418 - DNA, 25 bp, Artificial
  probe
  misc_feature (1)..(25): SEQ ID NO: 1010; WAN024FSX; Start 365; Stop 389
tggatgttgttggaaggttatggta

SEQ ID NO: 280419 - DNA, 25 bp, Artificial
  probe
  misc_feature (1)..(25): SEQ ID NO: 1010; WAN024FSX; Start 531; Stop 555
tcagttctcagaagtcattattcct

SEQ ID NO: 280420 - DNA, 25 bp, Artificial
  probe
  misc_feature (1)..(25): SEQ ID NO: 1010; WAN024FSX; Start 635; Stop 659
tggacaagtatgatgtgaatgctaa

SEQ ID NO: 280421 - DNA, 25 bp, Artificial
  probe
  misc_feature (1)..(25): SEQ ID NO: 1010; WAN024FSX; Start 634; Stop 658
ttggacaagtatgatgtgaatgcta

SEQ ID NO: 280422 - DNA, 25 bp, Artificial
  probe
  misc_feature (1)..(25): SEQ ID NO: 1010; WAN024FSX; Start 632; Stop 656
aattggacaagtatgatgtgaatgc

SEQ ID NO: 280423 - DNA, 25 bp, Artificial
  probe
  misc_feature (1)..(25): SEQ ID NO: 1010; WAN024FSX; Start 530; Stop 554
ctcagttctcagaagtcattattcc

SEQ ID NO: 280424 - DNA, 25 bp, Artificial
  probe
  misc_feature (1)..(25): SEQ ID NO: 1010; WAN024FSX; Start 527; Stop 551
ccactcagttctcagaagtcattat

SEQ ID NO: 280425 - DNA, 25 bp, Artificial
  probe
  misc_feature (1)..(25): SEQ ID NO: 1010; WAN024FSX; Start 815; Stop 839
agacaatagtattaacgagtggttc

SEQ ID NO: 280426 - DNA, 25 bp, Artificial
  probe
  misc_feature (1)..(25): SEQ ID NO: 1010; WAN024FSX; Start 413; Stop 437
ctaagttagtctatacctgctatgc

SEQ ID NO: 280427 - DNA, 25 bp, Artificial
  probe
  misc_feature (1)..(25): SEQ ID NO: 1010; WAN024FSX; Start 633; Stop 657
attggacaagtatgatgtgaatgct

SEQ ID NO: 280428 - DNA, 25 bp, Artificial
  probe
  misc_feature (1)..(25): SEQ ID NO: 1010; WAN024FSX; Start 1118; Stop 1142
aatggttgtggagttatagattctt

SEQ ID NO: 280429 - DNA, 25 bp, Artificial
  probe
  misc_feature (1)..(25): SEQ ID NO: 1010; WAN024FSX; Start 814; Stop 838
aagacaatagtattaacgagtggtt

SEQ ID NO: 280430 - DNA, 25 bp, Artificial
  probe
  misc_feature (1)..(25): SEQ ID NO: 1010; WAN024FSX; Start 528; Stop 552
cactcagttctcagaagtcattatt

SEQ ID NO: 280431 - DNA, 25 bp, Artificial
  probe
  misc_feature (1)..(25): SEQ ID NO: 1010; WAN024FSX; Start 532; Stop 556
cagttctcagaagtcattattcctg

SEQ ID NO: 280432 - DNA, 25 bp, Artificial
  probe
  misc_feature (1)..(25): SEQ ID NO: 1010; WAN024FSX; Start 831; Stop 855
gagtggttcgttagcacataatctt

SEQ ID NO: 280433 - DNA, 25 bp, Artificial
  probe
  misc_feature (1)..(25): SEQ ID NO: 1010; WAN024FSX; Start 368; Stop 392
atgttgttggaaggttatggtatcc

SEQ ID NO: 280434 - DNA, 25 bp, Artificial
  probe
  misc_feature (1)..(25): SEQ ID NO: 1010; WAN024FSX; Start 811; Stop 835
gctaagacaatagtattaacgagtg

SEQ ID NO: 280435 - DNA, 25 bp, Artificial
  probe
  misc_feature (1)..(25): SEQ ID NO: 1010; WAN024FSX; Start 529; Stop 553
actcagttctcagaagtcattattc

SEQ ID NO: 280436 - DNA, 25 bp, Artificial
  probe
  misc_feature (1)..(25): SEQ ID NO: 1010; WAN024FSX; Start 813; Stop 837
taagacaatagtattaacgagtggt

SEQ ID NO: 280437 - DNA, 25 bp, Artificial
  probe
  misc_feature (1)..(25): SEQ ID NO: 1010; WAN024FSX; Start 423; Stop 447
ctatacctgctatgctggaacagaa

SEQ ID NO: 280438 - DNA, 25 bp, Artificial
  probe
  misc_feature (1)..(25): SEQ ID NO: 1011; WAN024CYZ; Start 118; Stop 142
aatatggaacttcaacctgtcactt

SEQ ID NO: 280439 - DNA, 25 bp, Artificial
  probe
  misc_feature (1)..(25): SEQ ID NO: 1011; WAN024CYZ; Start 125; Stop 149
aacttcaacctgtcacttctctaac

SEQ ID NO: 280440 - DNA, 25 bp, Artificial
  probe
  misc_feature (1)..(25): SEQ ID NO: 1011; WAN024CYZ; Start 235; Stop 259
cgacaattacaaggcgattatacaa

SEQ ID NO: 280441 - DNA, 25 bp, Artificial
  probe
  misc_feature (1)..(25): SEQ ID NO: 1011; WAN024CYZ; Start 44; Stop 68
ttgtgttaattgtatcagcgattcc

SEQ ID NO: 280442 - DNA, 25 bp, Artificial
  probe
  misc_feature (1)..(25): SEQ ID NO: 1011; WAN024CYZ; Start 232; Stop 256
aaccgacaattacaaggcgattata

SEQ ID NO: 280443 - DNA, 25 bp, Artificial
  probe
  misc_feature (1)..(25): SEQ ID NO: 1011; WAN024CYZ; Start 231; Stop 255
taaccgacaattacaaggcgattat

SEQ ID NO: 280444 - DNA, 25 bp, Artificial
  probe
  misc_feature (1)..(25): SEQ ID NO: 1011; WAN024CYZ; Start 124; Stop 148
gaacttcaacctgtcacttctctaa

SEQ ID NO: 280445 - DNA, 25 bp, Artificial
  probe
  misc_feature (1)..(25): SEQ ID NO: 1011; WAN024CYZ; Start 230; Stop 254
ttaaccgacaattacaaggcgatta

SEQ ID NO: 280446 - DNA, 25 bp, Artificial
  probe
  misc_feature (1)..(25): SEQ ID NO: 1011; WAN024CYZ; Start 119; Stop 143
atatggaacttcaacctgtcacttc

SEQ ID NO: 280447 - DNA, 25 bp, Artificial
  probe
  misc_feature (1)..(25): SEQ ID NO: 1011; WAN024CYZ; Start 45; Stop 69
tgtgttaattgtatcagcgattcca

SEQ ID NO: 280448 - DNA, 25 bp, Artificial
  probe
  misc_feature (1)..(25): SEQ ID NO: 1011; WAN024CYZ; Start 46; Stop 70
gtgttaattgtatcagcgattccaa

SEQ ID NO: 280449 - DNA, 25 bp, Artificial
  probe
  misc_feature (1)..(25): SEQ ID NO: 1011; WAN024CYZ; Start 49; Stop 73
ttaattgtatcagcgattccaagtg

SEQ ID NO: 280450 - DNA, 25 bp, Artificial
  probe
  misc_feature (1)..(25): SEQ ID NO: 1011; WAN024CYZ; Start 48; Stop 72
gttaattgtatcagcgattccaagt

SEQ ID NO: 280451 - DNA, 25 bp, Artificial
  probe
  misc_feature (1)..(25): SEQ ID NO: 1011; WAN024CYZ; Start 47; Stop 71
tgttaattgtatcagcgattccaag

SEQ ID NO: 280452 - DNA, 25 bp, Artificial
  probe
  misc_feature (1)..(25): SEQ ID NO: 1011; WAN024CYZ; Start 234; Stop 258
ccgacaattacaaggcgattataca

SEQ ID NO: 280453 - DNA, 25 bp, Artificial
  probe
  misc_feature (1)..(25): SEQ ID NO: 1011; WAN024CYZ; Start 233; Stop 257
accgacaattacaaggcgattatac

SEQ ID NO: 280454 - DNA, 25 bp, Artificial
  probe
  misc_feature (1)..(25): SEQ ID NO: 1011; WAN024CYZ; Start 229; Stop 253
attaaccgacaattacaaggcgatt

SEQ ID NO: 280455 - DNA, 25 bp, Artificial
  probe
  misc_feature (1)..(25): SEQ ID NO: 1011; WAN024CYZ; Start 50; Stop 74
taattgtatcagcgattccaagtgt

SEQ ID NO: 280456 - DNA, 25 bp, Artificial
  probe
  misc_feature (1)..(25): SEQ ID NO: 1011; WAN024CYZ; Start 291; Stop 315
ttggcaaggtattacagttaatcaa

SEQ ID NO: 280457 - DNA, 25 bp, Artificial
  probe
  misc_feature (1)..(25): SEQ ID NO: 1011; WAN024CYZ; Start 120; Stop 144
tatggaacttcaacctgtcacttct

SEQ ID NO: 280458 - DNA, 25 bp, Artificial
  probe
  misc_feature (1)..(25): SEQ ID NO: 1011; WAN024CYZ; Start 51; Stop 75
aattgtatcagcgattccaagtgtt

SEQ ID NO: 280459 - DNA, 25 bp, Artificial
  probe
  misc_feature (1)..(25): SEQ ID NO: 1011; WAN024CYZ; Start 43; Stop 67
attgtgttaattgtatcagcgattc

SEQ ID NO: 280460 - DNA, 25 bp, Artificial
  probe
  misc_feature (1)..(25): SEQ ID NO: 1011; WAN024CYZ; Start 123; Stop 147
ggaacttcaacctgtcacttctcta

SEQ ID NO: 280461 - DNA, 25 bp, Artificial
  probe
  misc_feature (1)..(25): SEQ ID NO: 1011; WAN024CYZ; Start 228; Stop 252
aattaaccgacaattacaaggcgat

SEQ ID NO: 280462 - DNA, 25 bp, Artificial
  probe
  misc_feature (1)..(25): SEQ ID NO: 1011; WAN024CYZ; Start 236; Stop 260
gacaattacaaggcgattatacaat

SEQ ID NO: 280463 - DNA, 25 bp, Artificial
  probe
  misc_feature (1)..(25): SEQ ID NO: 1011; WAN024CYZ; Start 126; Stop 150
acttcaacctgtcacttctctaaca

SEQ ID NO: 280464 - DNA, 25 bp, Artificial
  probe
  misc_feature (1)..(25): SEQ ID NO: 1011; WAN024CYZ; Start 121; Stop 145
atggaacttcaacctgtcacttctc

SEQ ID NO: 280465 - DNA, 25 bp, Artificial
  probe
  misc_feature (1)..(25): SEQ ID NO: 1011; WAN024CYZ; Start 451; Stop 475
agttggtttgtaaatgatgttgctt

SEQ ID NO: 280466 - DNA, 25 bp, Artificial
  probe
  misc_feature (1)..(25): SEQ ID NO: 1011; WAN024CYZ; Start 42; Stop 66
aattgtgttaattgtatcagcgatt

SEQ ID NO: 280467 - DNA, 25 bp, Artificial
  probe
  misc_feature (1)..(25): SEQ ID NO: 1011; WAN024CYZ; Start 452; Stop 476
gttggtttgtaaatgatgttgcttt

SEQ ID NO: 280468 - DNA, 25 bp, Artificial
  probe
  misc_feature (1)..(25): SEQ ID NO: 1011; WAN024CYZ; Start 117; Stop 141
aaatatggaacttcaacctgtcact

SEQ ID NO: 280469 - DNA, 25 bp, Artificial
  probe
  misc_feature (1)..(25): SEQ ID NO: 1011; WAN024CYZ; Start 116; Stop 140
caaatatggaacttcaacctgtcac

SEQ ID NO: 280470 - DNA, 25 bp, Artificial
  probe
  misc_feature (1)..(25): SEQ ID NO: 1011; WAN024CYZ; Start 450; Stop 474
tagttggtttgtaaatgatgttgct

SEQ ID NO: 280471 - DNA, 25 bp, Artificial
  probe
  misc_feature (1)..(25): SEQ ID NO: 1012; WAN024GGJ; Start 47; Stop 71
ctggttgctacattcataaggataa

SEQ ID NO: 280472 - DNA, 25 bp, Artificial
  probe
  misc_feature (1)..(25): SEQ ID NO: 1012; WAN024GGJ; Start 260; Stop 284
ccaagtacaatatcatgctcaagga

SEQ ID NO: 280473 - DNA, 25 bp, Artificial
  probe
  misc_feature (1)..(25): SEQ ID NO: 1012; WAN024GGJ; Start 261; Stop 285
caagtacaatatcatgctcaaggat

SEQ ID NO: 280474 - DNA, 25 bp, Artificial
  probe
  misc_feature (1)..(25): SEQ ID NO: 1012; WAN024GGJ; Start 46; Stop 70
cctggttgctacattcataaggata

SEQ ID NO: 280475 - DNA, 25 bp, Artificial
  probe
  misc_feature (1)..(25): SEQ ID NO: 1012; WAN024GGJ; Start 262; Stop 286
aagtacaatatcatgctcaaggatg

SEQ ID NO: 280476 - DNA, 25 bp, Artificial
  probe
  misc_feature (1)..(25): SEQ ID NO: 1012; WAN024GGJ; Start 1336; Stop 1360
cctccagatttgattgtgattgatg

SEQ ID NO: 280477 - DNA, 25 bp, Artificial
  probe
  misc_feature (1)..(25): SEQ ID NO: 1012; WAN024GGJ; Start 1335; Stop 1359
tcctccagatttgattgtgattgat

SEQ ID NO: 280478 - DNA, 25 bp, Artificial
  probe
  misc_feature (1)..(25): SEQ ID NO: 1012; WAN024GGJ; Start 736; Stop 760
gatgtctttggctactatgtggata

SEQ ID NO: 280479 - DNA, 25 bp, Artificial
  probe
  misc_feature (1)..(25): SEQ ID NO: 1012; WAN024GGJ; Start 1800; Stop 1824
agaaagagtagattaccaaacggaa

SEQ ID NO: 280480 - DNA, 25 bp, Artificial
  probe
  misc_feature (1)..(25): SEQ ID NO: 1012; WAN024GGJ; Start 1799; Stop 1823
aagaaagagtagattaccaaacgga

SEQ ID NO: 280481 - DNA, 25 bp, Artificial
  probe
  misc_feature (1)..(25): SEQ ID NO: 1012; WAN024GGJ; Start 737; Stop 761
atgtctttggctactatgtggataa

SEQ ID NO: 280482 - DNA, 25 bp, Artificial
  probe
  misc_feature (1)..(25): SEQ ID NO: 1012; WAN024GGJ; Start 1805; Stop 1829
gagtagattaccaaacggaaggaaa

SEQ ID NO: 280483 - DNA, 25 bp, Artificial
  probe
  misc_feature (1)..(25): SEQ ID NO: 1012; WAN024GGJ; Start 1802; Stop 1826
aaagagtagattaccaaacggaagg

SEQ ID NO: 280484 - DNA, 25 bp, Artificial
  probe
  misc_feature (1)..(25): SEQ ID NO: 1012; WAN024GGJ; Start 1801; Stop 1825
gaaagagtagattaccaaacggaag

SEQ ID NO: 280485 - DNA, 25 bp, Artificial
  probe
  misc_feature (1)..(25): SEQ ID NO: 1012; WAN024GGJ; Start 1798; Stop 1822
gaagaaagagtagattaccaaacgg

SEQ ID NO: 280486 - DNA, 25 bp, Artificial
  probe
  misc_feature (1)..(25): SEQ ID NO: 1012; WAN024GGJ; Start 1334; Stop 1358
ctcctccagatttgattgtgattga

SEQ ID NO: 280487 - DNA, 25 bp, Artificial
  probe
  misc_feature (1)..(25): SEQ ID NO: 1012; WAN024GGJ; Start 1332; Stop 1356
gactcctccagatttgattgtgatt

SEQ ID NO: 280488 - DNA, 25 bp, Artificial
  probe
  misc_feature (1)..(25): SEQ ID NO: 1012; WAN024GGJ; Start 1806; Stop 1830
agtagattaccaaacggaaggaaac

SEQ ID NO: 280489 - DNA, 25 bp, Artificial
  probe
  misc_feature (1)..(25): SEQ ID NO: 1012; WAN024GGJ; Start 738; Stop 762
tgtctttggctactatgtggataag

SEQ ID NO: 280490 - DNA, 25 bp, Artificial
  probe
  misc_feature (1)..(25): SEQ ID NO: 1012; WAN024GGJ; Start 78; Stop 102
caccattatctatgtaggaaaggct

SEQ ID NO: 280491 - DNA, 25 bp, Artificial
  probe
  misc_feature (1)..(25): SEQ ID NO: 1012; WAN024GGJ; Start 1333; Stop 1357
actcctccagatttgattgtgattg

SEQ ID NO: 280492 - DNA, 25 bp, Artificial
  probe
  misc_feature (1)..(25): SEQ ID NO: 1012; WAN024GGJ; Start 1328; Stop 1352
ctttgactcctccagatttgattgt

SEQ ID NO: 280493 - DNA, 25 bp, Artificial
  probe
  misc_feature (1)..(25): SEQ ID NO: 1012; WAN024GGJ; Start 833; Stop 857
cctacttcaatgatccagatgagga

SEQ ID NO: 280494 - DNA, 25 bp, Artificial
  probe
  misc_feature (1)..(25): SEQ ID NO: 1012; WAN024GGJ; Start 739; Stop 763
gtctttggctactatgtggataagg

SEQ ID NO: 280495 - DNA, 25 bp, Artificial
  probe
  misc_feature (1)..(25): SEQ ID NO: 1012; WAN024GGJ; Start 76; Stop 100
ggcaccattatctatgtaggaaagg

SEQ ID NO: 280496 - DNA, 25 bp, Artificial
  probe
  misc_feature (1)..(25): SEQ ID NO: 1012; WAN024GGJ; Start 1329; Stop 1353
tttgactcctccagatttgattgtg

SEQ ID NO: 280497 - DNA, 25 bp, Artificial
  probe
  misc_feature (1)..(25): SEQ ID NO: 1012; WAN024GGJ; Start 1804; Stop 1828
agagtagattaccaaacggaaggaa

SEQ ID NO: 280498 - DNA, 25 bp, Artificial
  probe
  misc_feature (1)..(25): SEQ ID NO: 1012; WAN024GGJ; Start 1803; Stop 1827
aagagtagattaccaaacggaagga

SEQ ID NO: 280499 - DNA, 25 bp, Artificial
  probe
  misc_feature (1)..(25): SEQ ID NO: 1012; WAN024GGJ; Start 1440; Stop 1464
aaagaatgataagcaccaaacccat

SEQ ID NO: 280500 - DNA, 25 bp, Artificial
  probe
  misc_feature (1)..(25): SEQ ID NO: 1012; WAN024GGJ; Start 75; Stop 99
tggcaccattatctatgtaggaaag

SEQ ID NO: 280501 - DNA, 25 bp, Artificial
  probe
  misc_feature (1)..(25): SEQ ID NO: 1012; WAN024GGJ; Start 77; Stop 101
gcaccattatctatgtaggaaaggc

SEQ ID NO: 280502 - DNA, 25 bp, Artificial
  probe
  misc_feature (1)..(25): SEQ ID NO: 1012; WAN024GGJ; Start 1807; Stop 1831
gtagattaccaaacggaaggaaacc

SEQ ID NO: 280503 - DNA, 25 bp, Artificial
  probe
  misc_feature (1)..(25): SEQ ID NO: 1012; WAN024GGJ; Start 1331; Stop 1355
tgactcctccagatttgattgtgat

SEQ ID NO: 280504 - DNA, 25 bp, Artificial
  probe
  misc_feature (1)..(25): SEQ ID NO: 1013; WAN024GHI; Start 237; Stop 261
ccttaccgatgacaatcttaatctt

SEQ ID NO: 280505 - DNA, 25 bp, Artificial
  probe
  misc_feature (1)..(25): SEQ ID NO: 1013; WAN024GHI; Start 137; Stop 161
atagcatcttggtcactagagtaga

SEQ ID NO: 280506 - DNA, 25 bp, Artificial
  probe
  misc_feature (1)..(25): SEQ ID NO: 1013; WAN024GHI; Start 132; Stop 156
ggttaatagcatcttggtcactaga

SEQ ID NO: 280507 - DNA, 25 bp, Artificial
  probe
  misc_feature (1)..(25): SEQ ID NO: 1013; WAN024GHI; Start 131; Stop 155
cggttaatagcatcttggtcactag

SEQ ID NO: 280508 - DNA, 25 bp, Artificial
  probe
  misc_feature (1)..(25): SEQ ID NO: 1013; WAN024GHI; Start 130; Stop 154
acggttaatagcatcttggtcacta

SEQ ID NO: 280509 - DNA, 25 bp, Artificial
  probe
  misc_feature (1)..(25): SEQ ID NO: 1013; WAN024GHI; Start 136; Stop 160
aatagcatcttggtcactagagtag

SEQ ID NO: 280510 - DNA, 25 bp, Artificial
  probe
  misc_feature (1)..(25): SEQ ID NO: 1013; WAN024GHI; Start 327; Stop 351
gaatggttgcttcaatgacatcaag

SEQ ID NO: 280511 - DNA, 25 bp, Artificial
  probe
  misc_feature (1)..(25): SEQ ID NO: 1013; WAN024GHI; Start 134; Stop 158
ttaatagcatcttggtcactagagt

SEQ ID NO: 280512 - DNA, 25 bp, Artificial
  probe
  misc_feature (1)..(25): SEQ ID NO: 1013; WAN024GHI; Start 180; Stop 204
cgtctatatcaatcttaacacctgt

SEQ ID NO: 280513 - DNA, 25 bp, Artificial
  probe
  misc_feature (1)..(25): SEQ ID NO: 1013; WAN024GHI; Start 133; Stop 157
gttaatagcatcttggtcactagag

SEQ ID NO: 280514 - DNA, 25 bp, Artificial
  probe
  misc_feature (1)..(25): SEQ ID NO: 1013; WAN024GHI; Start 179; Stop 203
tcgtctatatcaatcttaacacctg

SEQ ID NO: 280515 - DNA, 25 bp, Artificial
  probe
  misc_feature (1)..(25): SEQ ID NO: 1013; WAN024GHI; Start 145; Stop 169
ttggtcactagagtagatagacaca

SEQ ID NO: 280516 - DNA, 25 bp, Artificial
  probe
  misc_feature (1)..(25): SEQ ID NO: 1013; WAN024GHI; Start 146; Stop 170
tggtcactagagtagatagacacat

SEQ ID NO: 280517 - DNA, 25 bp, Artificial
  probe
  misc_feature (1)..(25): SEQ ID NO: 1013; WAN024GHI; Start 144; Stop 168
cttggtcactagagtagatagacac

SEQ ID NO: 280518 - DNA, 25 bp, Artificial
  probe
  misc_feature (1)..(25): SEQ ID NO: 1013; WAN024GHI; Start 253; Stop 277
cttaatcttgtccacatcaatcttg

SEQ ID NO: 280519 - DNA, 25 bp, Artificial
  probe
  misc_feature (1)..(25): SEQ ID NO: 1013; WAN024GHI; Start 252; Stop 276
tcttaatcttgtccacatcaatctt

SEQ ID NO: 280520 - DNA, 25 bp, Artificial
  probe
  misc_feature (1)..(25): SEQ ID NO: 1013; WAN024GHI; Start 143; Stop 167
tcttggtcactagagtagatagaca

SEQ ID NO: 280521 - DNA, 25 bp, Artificial
  probe
  misc_feature (1)..(25): SEQ ID NO: 1013; WAN024GHI; Start 135; Stop 159
taatagcatcttggtcactagagta

SEQ ID NO: 280522 - DNA, 25 bp, Artificial
  probe
  misc_feature (1)..(25): SEQ ID NO: 1013; WAN024GHI; Start 318; Stop 342
gaacttctggaatggttgcttcaat

SEQ ID NO: 280523 - DNA, 25 bp, Artificial
  probe
  misc_feature (1)..(25): SEQ ID NO: 1013; WAN024GHI; Start 331; Stop 355
ggttgcttcaatgacatcaaggatt

SEQ ID NO: 280524 - DNA, 25 bp, Artificial
  probe
  misc_feature (1)..(25): SEQ ID NO: 1013; WAN024GHI; Start 251; Stop 275
atcttaatcttgtccacatcaatct

SEQ ID NO: 280525 - DNA, 25 bp, Artificial
  probe
  misc_feature (1)..(25): SEQ ID NO: 1013; WAN024GHI; Start 238; Stop 262
cttaccgatgacaatcttaatcttg

SEQ ID NO: 280526 - DNA, 25 bp, Artificial
  probe
  misc_feature (1)..(25): SEQ ID NO: 1013; WAN024GHI; Start 147; Stop 171
ggtcactagagtagatagacacatt

SEQ ID NO: 280527 - DNA, 25 bp, Artificial
  probe
  misc_feature (1)..(25): SEQ ID NO: 1013; WAN024GHI; Start 319; Stop 343
aacttctggaatggttgcttcaatg

SEQ ID NO: 280528 - DNA, 25 bp, Artificial
  probe
  misc_feature (1)..(25): SEQ ID NO: 1013; WAN024GHI; Start 328; Stop 352
aatggttgcttcaatgacatcaagg

SEQ ID NO: 280529 - DNA, 25 bp, Artificial
  probe
  misc_feature (1)..(25): SEQ ID NO: 1013; WAN024GHI; Start 254; Stop 278
ttaatcttgtccacatcaatcttga

SEQ ID NO: 280530 - DNA, 25 bp, Artificial
  probe
  misc_feature (1)..(25): SEQ ID NO: 1013; WAN024GHI; Start 326; Stop 350
ggaatggttgcttcaatgacatcaa

SEQ ID NO: 280531 - DNA, 25 bp, Artificial
  probe
  misc_feature (1)..(25): SEQ ID NO: 1013; WAN024GHI; Start 171; Stop 195
ttccttcttcgtctatatcaatctt

SEQ ID NO: 280532 - DNA, 25 bp, Artificial
  probe
  misc_feature (1)..(25): SEQ ID NO: 1013; WAN024GHI; Start 178; Stop 202
ttcgtctatatcaatcttaacacct

SEQ ID NO: 280533 - DNA, 25 bp, Artificial
  probe
  misc_feature (1)..(25): SEQ ID NO: 1013; WAN024GHI; Start 249; Stop 273
caatcttaatcttgtccacatcaat

SEQ ID NO: 280534 - DNA, 25 bp, Artificial
  probe
  misc_feature (1)..(25): SEQ ID NO: 1013; WAN024GHI; Start 177; Stop 201
cttcgtctatatcaatcttaacacc

SEQ ID NO: 280535 - DNA, 25 bp, Artificial
  probe
  misc_feature (1)..(25): SEQ ID NO: 1013; WAN024GHI; Start 129; Stop 153
cacggttaatagcatcttggtcact

SEQ ID NO: 280536 - DNA, 25 bp, Artificial
  probe
  misc_feature (1)..(25): SEQ ID NO: 1013; WAN024GHI; Start 425; Stop 449
atatccatttgaagggctgtaatcc

SEQ ID NO: 280537 - DNA, 25 bp, Artificial
  probe
  misc_feature (1)..(25): SEQ ID NO: 1014; WAN024FUU; Start 695; Stop 719
ctattccaatcggctatgatgtcta

SEQ ID NO: 280538 - DNA, 25 bp, Artificial
  probe
  misc_feature (1)..(25): SEQ ID NO: 1014; WAN024FUU; Start 697; Stop 721
attccaatcggctatgatgtctatc

SEQ ID NO: 280539 - DNA, 25 bp, Artificial
  probe
  misc_feature (1)..(25): SEQ ID NO: 1014; WAN024FUU; Start 696; Stop 720
tattccaatcggctatgatgtctat

SEQ ID NO: 280540 - DNA, 25 bp, Artificial
  probe
  misc_feature (1)..(25): SEQ ID NO: 1014; WAN024FUU; Start 698; Stop 722
ttccaatcggctatgatgtctatct

SEQ ID NO: 280541 - DNA, 25 bp, Artificial
  probe
  misc_feature (1)..(25): SEQ ID NO: 1014; WAN024FUU; Start 594; Stop 618
cattacagaattatgctcaggtcct

SEQ ID NO: 280542 - DNA, 25 bp, Artificial
  probe
  misc_feature (1)..(25): SEQ ID NO: 1014; WAN024FUU; Start 706; Stop 730
ggctatgatgtctatctcagaactg

SEQ ID NO: 280543 - DNA, 25 bp, Artificial
  probe
  misc_feature (1)..(25): SEQ ID NO: 1014; WAN024FUU; Start 703; Stop 727
atcggctatgatgtctatctcagaa

SEQ ID NO: 280544 - DNA, 25 bp, Artificial
  probe
  misc_feature (1)..(25): SEQ ID NO: 1014; WAN024FUU; Start 702; Stop 726
aatcggctatgatgtctatctcaga

SEQ ID NO: 280545 - DNA, 25 bp, Artificial
  probe
  misc_feature (1)..(25): SEQ ID NO: 1014; WAN024FUU; Start 701; Stop 725
caatcggctatgatgtctatctcag

SEQ ID NO: 280546 - DNA, 25 bp, Artificial
  probe
  misc_feature (1)..(25): SEQ ID NO: 1014; WAN024FUU; Start 708; Stop 732
ctatgatgtctatctcagaactgct

SEQ ID NO: 280547 - DNA, 25 bp, Artificial
  probe
  misc_feature (1)..(25): SEQ ID NO: 1014; WAN024FUU; Start 699; Stop 723
tccaatcggctatgatgtctatctc

SEQ ID NO: 280548 - DNA, 25 bp, Artificial
  probe
  misc_feature (1)..(25): SEQ ID NO: 1014; WAN024FUU; Start 709; Stop 733
tatgatgtctatctcagaactgctt

SEQ ID NO: 280549 - DNA, 25 bp, Artificial
  probe
  misc_feature (1)..(25): SEQ ID NO: 1014; WAN024FUU; Start 707; Stop 731
gctatgatgtctatctcagaactgc

SEQ ID NO: 280550 - DNA, 25 bp, Artificial
  probe
  misc_feature (1)..(25): SEQ ID NO: 1014; WAN024FUU; Start 581; Stop 605
ctgattgtgatggcattacagaatt

SEQ ID NO: 280551 - DNA, 25 bp, Artificial
  probe
  misc_feature (1)..(25): SEQ ID NO: 1014; WAN024FUU; Start 694; Stop 718
cctattccaatcggctatgatgtct

SEQ ID NO: 280552 - DNA, 25 bp, Artificial
  probe
  misc_feature (1)..(25): SEQ ID NO: 1014; WAN024FUU; Start 705; Stop 729
cggctatgatgtctatctcagaact

SEQ ID NO: 280553 - DNA, 25 bp, Artificial
  probe
  misc_feature (1)..(25): SEQ ID NO: 1014; WAN024FUU; Start 704; Stop 728
tcggctatgatgtctatctcagaac

SEQ ID NO: 280554 - DNA, 25 bp, Artificial
  probe
  misc_feature (1)..(25): SEQ ID NO: 1014; WAN024FUU; Start 582; Stop 606
tgattgtgatggcattacagaatta

SEQ ID NO: 280555 - DNA, 25 bp, Artificial
  probe
  misc_feature (1)..(25): SEQ ID NO: 1014; WAN024FUU; Start 700; Stop 724
ccaatcggctatgatgtctatctca

SEQ ID NO: 280556 - DNA, 25 bp, Artificial
  probe
  misc_feature (1)..(25): SEQ ID NO: 1014; WAN024FUU; Start 36; Stop 60
tcgtagtctggagatggctgaatat

SEQ ID NO: 280557 - DNA, 25 bp, Artificial
  probe
  misc_feature (1)..(25): SEQ ID NO: 1014; WAN024FUU; Start 584; Stop 608
attgtgatggcattacagaattatg

SEQ ID NO: 280558 - DNA, 25 bp, Artificial
  probe
  misc_feature (1)..(25): SEQ ID NO: 1014; WAN024FUU; Start 580; Stop 604
gctgattgtgatggcattacagaat

SEQ ID NO: 280559 - DNA, 25 bp, Artificial
  probe
  misc_feature (1)..(25): SEQ ID NO: 1014; WAN024FUU; Start 568; Stop 592
aagtatgatttggctgattgtgatg

SEQ ID NO: 280560 - DNA, 25 bp, Artificial
  probe
  misc_feature (1)..(25): SEQ ID NO: 1014; WAN024FUU; Start 310; Stop 334
tgtatcaagccttatcagcaggatt

SEQ ID NO: 280561 - DNA, 25 bp, Artificial
  probe
  misc_feature (1)..(25): SEQ ID NO: 1014; WAN024FUU; Start 583; Stop 607
gattgtgatggcattacagaattat

SEQ ID NO: 280562 - DNA, 25 bp, Artificial
  probe
  misc_feature (1)..(25): SEQ ID NO: 1014; WAN024FUU; Start 566; Stop 590
ctaagtatgatttggctgattgtga

SEQ ID NO: 280563 - DNA, 25 bp, Artificial
  probe
  misc_feature (1)..(25): SEQ ID NO: 1014; WAN024FUU; Start 565; Stop 589
actaagtatgatttggctgattgtg

SEQ ID NO: 280564 - DNA, 25 bp, Artificial
  probe
  misc_feature (1)..(25): SEQ ID NO: 1014; WAN024FUU; Start 37; Stop 61
cgtagtctggagatggctgaatatt

SEQ ID NO: 280565 - DNA, 25 bp, Artificial
  probe
  misc_feature (1)..(25): SEQ ID NO: 1014; WAN024FUU; Start 83; Stop 107
atgatttgctctgttatctctgtgg

SEQ ID NO: 280566 - DNA, 25 bp, Artificial
  probe
  misc_feature (1)..(25): SEQ ID NO: 1014; WAN024FUU; Start 564; Stop 588
gactaagtatgatttggctgattgt

SEQ ID NO: 280567 - DNA, 25 bp, Artificial
  probe
  misc_feature (1)..(25): SEQ ID NO: 1014; WAN024FUU; Start 563; Stop 587
tgactaagtatgatttggctgattg

SEQ ID NO: 280568 - DNA, 25 bp, Artificial
  probe
  misc_feature (1)..(25): SEQ ID NO: 1014; WAN024FUU; Start 595; Stop 619
attacagaattatgctcaggtcctg

SEQ ID NO: 280569 - DNA, 25 bp, Artificial
  probe
  misc_feature (1)..(25): SEQ ID NO: 1014; WAN024FUU; Start 303; Stop 327
aaccacctgtatcaagccttatcag

SEQ ID NO: 280570 - DNA, 25 bp, Artificial
  probe
  misc_feature (1)..(25): SEQ ID NO: 1015; WAN024D6W; Start 169; Stop 193
gatacagtaactctcatcaaggact

SEQ ID NO: 280571 - DNA, 25 bp, Artificial
  probe
  misc_feature (1)..(25): SEQ ID NO: 1015; WAN024D6W; Start 170; Stop 194
atacagtaactctcatcaaggactt

SEQ ID NO: 280572 - DNA, 25 bp, Artificial
  probe
  misc_feature (1)..(25): SEQ ID NO: 1015; WAN024D6W; Start 161; Stop 185
ctgatggtgatacagtaactctcat

SEQ ID NO: 280573 - DNA, 25 bp, Artificial
  probe
  misc_feature (1)..(25): SEQ ID NO: 1015; WAN024D6W; Start 171; Stop 195
tacagtaactctcatcaaggacttg

SEQ ID NO: 280574 - DNA, 25 bp, Artificial
  probe
  misc_feature (1)..(25): SEQ ID NO: 1015; WAN024D6W; Start 28; Stop 52
tgtaactcagagtatgtctacgaag

SEQ ID NO: 280575 - DNA, 25 bp, Artificial
  probe
  misc_feature (1)..(25): SEQ ID NO: 1015; WAN024D6W; Start 29; Stop 53
gtaactcagagtatgtctacgaaga

SEQ ID NO: 280576 - DNA, 25 bp, Artificial
  probe
  misc_feature (1)..(25): SEQ ID NO: 1015; WAN024D6W; Start 27; Stop 51
atgtaactcagagtatgtctacgaa

SEQ ID NO: 280577 - DNA, 25 bp, Artificial
  probe
  misc_feature (1)..(25): SEQ ID NO: 1015; WAN024D6W; Start 26; Stop 50
aatgtaactcagagtatgtctacga

SEQ ID NO: 280578 - DNA, 25 bp, Artificial
  probe
  misc_feature (1)..(25): SEQ ID NO: 1015; WAN024D6W; Start 103; Stop 127
gaagttgcagaagtagaagaaggtc

SEQ ID NO: 280579 - DNA, 25 bp, Artificial
  probe
  misc_feature (1)..(25): SEQ ID NO: 1015; WAN024D6W; Start 271; Stop 295
aatatcgactgtaagattgatggtt

SEQ ID NO: 280580 - DNA, 25 bp, Artificial
  probe
  misc_feature (1)..(25): SEQ ID NO: 1015; WAN024D6W; Start 102; Stop 126
tgaagttgcagaagtagaagaaggt

SEQ ID NO: 280581 - DNA, 25 bp, Artificial
  probe
  misc_feature (1)..(25): SEQ ID NO: 1015; WAN024D6W; Start 316; Stop 340
tcagagtttgtgaggaagatttaac

SEQ ID NO: 280582 - DNA, 25 bp, Artificial
  probe
  misc_feature (1)..(25): SEQ ID NO: 1015; WAN024D6W; Start 309; Stop 333
acttaaatcagagtttgtgaggaag

SEQ ID NO: 280583 - DNA, 25 bp, Artificial
  probe
  misc_feature (1)..(25): SEQ ID NO: 1015; WAN024D6W; Start 104; Stop 128
aagttgcagaagtagaagaaggtct

SEQ ID NO: 280584 - DNA, 25 bp, Artificial
  probe
  misc_feature (1)..(25): SEQ ID NO: 1015; WAN024D6W; Start 165; Stop 189
tggtgatacagtaactctcatcaag

SEQ ID NO: 280585 - DNA, 25 bp, Artificial
  probe
  misc_feature (1)..(25): SEQ ID NO: 1015; WAN024D6W; Start 168; Stop 192
tgatacagtaactctcatcaaggac

SEQ ID NO: 280586 - DNA, 25 bp, Artificial
  probe
  misc_feature (1)..(25): SEQ ID NO: 1015; WAN024D6W; Start 167; Stop 191
gtgatacagtaactctcatcaagga

SEQ ID NO: 280587 - DNA, 25 bp, Artificial
  probe
  misc_feature (1)..(25): SEQ ID NO: 1015; WAN024D6W; Start 166; Stop 190
ggtgatacagtaactctcatcaagg

SEQ ID NO: 280588 - DNA, 25 bp, Artificial
  probe
  misc_feature (1)..(25): SEQ ID NO: 1015; WAN024D6W; Start 113; Stop 137
aagtagaagaaggtcttgtcgctat

SEQ ID NO: 280589 - DNA, 25 bp, Artificial
  probe
  misc_feature (1)..(25): SEQ ID NO: 1015; WAN024D6W; Start 310; Stop 334
cttaaatcagagtttgtgaggaaga

SEQ ID NO: 280590 - DNA, 25 bp, Artificial
  probe
  misc_feature (1)..(25): SEQ ID NO: 1015; WAN024D6W; Start 164; Stop 188
atggtgatacagtaactctcatcaa

SEQ ID NO: 280591 - DNA, 25 bp, Artificial
  probe
  misc_feature (1)..(25): SEQ ID NO: 1015; WAN024D6W; Start 114; Stop 138
agtagaagaaggtcttgtcgctatc

SEQ ID NO: 280592 - DNA, 25 bp, Artificial
  probe
  misc_feature (1)..(25): SEQ ID NO: 1015; WAN024D6W; Start 101; Stop 125
ctgaagttgcagaagtagaagaagg

SEQ ID NO: 280593 - DNA, 25 bp, Artificial
  probe
  misc_feature (1)..(25): SEQ ID NO: 1015; WAN024D6W; Start 295; Stop 319
tttggtgccatgaaacttaaatcag

SEQ ID NO: 280594 - DNA, 25 bp, Artificial
  probe
  misc_feature (1)..(25): SEQ ID NO: 1015; WAN024D6W; Start 112; Stop 136
gaagtagaagaaggtcttgtcgcta

SEQ ID NO: 280595 - DNA, 25 bp, Artificial
  probe
  misc_feature (1)..(25): SEQ ID NO: 1015; WAN024D6W; Start 315; Stop 339
atcagagtttgtgaggaagatttaa

SEQ ID NO: 280596 - DNA, 25 bp, Artificial
  probe
  misc_feature (1)..(25): SEQ ID NO: 1015; WAN024D6W; Start 311; Stop 335
ttaaatcagagtttgtgaggaagat

SEQ ID NO: 280597 - DNA, 25 bp, Artificial
  probe
  misc_feature (1)..(25): SEQ ID NO: 1015; WAN024D6W; Start 163; Stop 187
gatggtgatacagtaactctcatca

SEQ ID NO: 280598 - DNA, 25 bp, Artificial
  probe
  misc_feature (1)..(25): SEQ ID NO: 1015; WAN024D6W; Start 162; Stop 186
tgatggtgatacagtaactctcatc

SEQ ID NO: 280599 - DNA, 25 bp, Artificial
  probe
  misc_feature (1)..(25): SEQ ID NO: 1015; WAN024D6W; Start 296; Stop 320
ttggtgccatgaaacttaaatcaga

SEQ ID NO: 280600 - DNA, 25 bp, Artificial
  probe
  misc_feature (1)..(25): SEQ ID NO: 1015; WAN024D6W; Start 100; Stop 124
gctgaagttgcagaagtagaagaag

SEQ ID NO: 280601 - DNA, 25 bp, Artificial
  probe
  misc_feature (1)..(25): SEQ ID NO: 1015; WAN024D6W; Start 270; Stop 294
caatatcgactgtaagattgatggt

SEQ ID NO: 280602 - DNA, 25 bp, Artificial
  probe
  misc_feature (1)..(25): SEQ ID NO: 1015; WAN024D6W; Start 269; Stop 293
acaatatcgactgtaagattgatgg

SEQ ID NO: 280603 - DNA, 25 bp, Artificial
  probe
  misc_feature (1)..(25): SEQ ID NO: 1016; WAN024CCI; Start 21; Stop 45
ccaagccttacaaatgacaattagt

SEQ ID NO: 280604 - DNA, 25 bp, Artificial
  probe
  misc_feature (1)..(25): SEQ ID NO: 1016; WAN024CCI; Start 20; Stop 44
accaagccttacaaatgacaattag

SEQ ID NO: 280605 - DNA, 25 bp, Artificial
  probe
  misc_feature (1)..(25): SEQ ID NO: 1016; WAN024CCI; Start 17; Stop 41
ttaaccaagccttacaaatgacaat

SEQ ID NO: 280606 - DNA, 25 bp, Artificial
  probe
  misc_feature (1)..(25): SEQ ID NO: 1016; WAN024CCI; Start 172; Stop 196
gaacaaactaaaccagcagacaaag

SEQ ID NO: 280607 - DNA, 25 bp, Artificial
  probe
  misc_feature (1)..(25): SEQ ID NO: 1016; WAN024CCI; Start 19; Stop 43
aaccaagccttacaaatgacaatta

SEQ ID NO: 280608 - DNA, 25 bp, Artificial
  probe
  misc_feature (1)..(25): SEQ ID NO: 1016; WAN024CCI; Start 18; Stop 42
taaccaagccttacaaatgacaatt

SEQ ID NO: 280609 - DNA, 25 bp, Artificial
  probe
  misc_feature (1)..(25): SEQ ID NO: 1016; WAN024CCI; Start 16; Stop 40
cttaaccaagccttacaaatgacaa

SEQ ID NO: 280610 - DNA, 25 bp, Artificial
  probe
  misc_feature (1)..(25): SEQ ID NO: 1016; WAN024CCI; Start 170; Stop 194
atgaacaaactaaaccagcagacaa

SEQ ID NO: 280611 - DNA, 25 bp, Artificial
  probe
  misc_feature (1)..(25): SEQ ID NO: 1016; WAN024CCI; Start 1; Stop 25
atgaacacagaacagcttaaccaag

SEQ ID NO: 280612 - DNA, 25 bp, Artificial
  probe
  misc_feature (1)..(25): SEQ ID NO: 1016; WAN024CCI; Start 22; Stop 46
caagccttacaaatgacaattagtg

SEQ ID NO: 280613 - DNA, 25 bp, Artificial
  probe
  misc_feature (1)..(25): SEQ ID NO: 1016; WAN024CCI; Start 24; Stop 48
agccttacaaatgacaattagtgaa

SEQ ID NO: 280614 - DNA, 25 bp, Artificial
  probe
  misc_feature (1)..(25): SEQ ID NO: 1016; WAN024CCI; Start 23; Stop 47
aagccttacaaatgacaattagtga

SEQ ID NO: 280615 - DNA, 25 bp, Artificial
  probe
  misc_feature (1)..(25): SEQ ID NO: 1016; WAN024CCI; Start 161; Stop 185
ctctgcttgatgaacaaactaaacc

SEQ ID NO: 280616 - DNA, 25 bp, Artificial
  probe
  misc_feature (1)..(25): SEQ ID NO: 1016; WAN024CCI; Start 171; Stop 195
tgaacaaactaaaccagcagacaaa

SEQ ID NO: 280617 - DNA, 25 bp, Artificial
  probe
  misc_feature (1)..(25): SEQ ID NO: 1016; WAN024CCI; Start 166; Stop 190
cttgatgaacaaactaaaccagcag

SEQ ID NO: 280618 - DNA, 25 bp, Artificial
  probe
  misc_feature (1)..(25): SEQ ID NO: 1016; WAN024CCI; Start 169; Stop 193
gatgaacaaactaaaccagcagaca

SEQ ID NO: 280619 - DNA, 25 bp, Artificial
  probe
  misc_feature (1)..(25): SEQ ID NO: 1016; WAN024CCI; Start 168; Stop 192
tgatgaacaaactaaaccagcagac

SEQ ID NO: 280620 - DNA, 25 bp, Artificial
  probe
  misc_feature (1)..(25): SEQ ID NO: 1016; WAN024CCI; Start 167; Stop 191
ttgatgaacaaactaaaccagcaga

SEQ ID NO: 280621 - DNA, 25 bp, Artificial
  probe
  misc_feature (1)..(25): SEQ ID NO: 1016; WAN024CCI; Start 162; Stop 186
tctgcttgatgaacaaactaaacca

SEQ ID NO: 280622 - DNA, 25 bp, Artificial
  probe
  misc_feature (1)..(25): SEQ ID NO: 1016; WAN024CCI; Start 160; Stop 184
gctctgcttgatgaacaaactaaac

SEQ ID NO: 280623 - DNA, 25 bp, Artificial
  probe
  misc_feature (1)..(25): SEQ ID NO: 1016; WAN024CCI; Start 89; Stop 113
tcttgagtattcagttgaatgagca

SEQ ID NO: 280624 - DNA, 25 bp, Artificial
  probe
  misc_feature (1)..(25): SEQ ID NO: 1016; WAN024CCI; Start 90; Stop 114
cttgagtattcagttgaatgagcaa

SEQ ID NO: 280625 - DNA, 25 bp, Artificial
  probe
  misc_feature (1)..(25): SEQ ID NO: 1016; WAN024CCI; Start 25; Stop 49
gccttacaaatgacaattagtgaaa

SEQ ID NO: 280626 - DNA, 25 bp, Artificial
  probe
  misc_feature (1)..(25): SEQ ID NO: 1016; WAN024CCI; Start 88; Stop 112
atcttgagtattcagttgaatgagc

SEQ ID NO: 280627 - DNA, 25 bp, Artificial
  probe
  misc_feature (1)..(25): SEQ ID NO: 1016; WAN024CCI; Start 173; Stop 197
aacaaactaaaccagcagacaaagg

SEQ ID NO: 280628 - DNA, 25 bp, Artificial
  probe
  misc_feature (1)..(25): SEQ ID NO: 1016; WAN024CCI; Start 175; Stop 199
caaactaaaccagcagacaaaggag

SEQ ID NO: 280629 - DNA, 25 bp, Artificial
  probe
  misc_feature (1)..(25): SEQ ID NO: 1016; WAN024CCI; Start 163; Stop 187
ctgcttgatgaacaaactaaaccag

SEQ ID NO: 280630 - DNA, 25 bp, Artificial
  probe
  misc_feature (1)..(25): SEQ ID NO: 1016; WAN024CCI; Start 177; Stop 201
aactaaaccagcagacaaaggagaa

SEQ ID NO: 280631 - DNA, 25 bp, Artificial
  probe
  misc_feature (1)..(25): SEQ ID NO: 1016; WAN024CCI; Start 176; Stop 200
aaactaaaccagcagacaaaggaga

SEQ ID NO: 280632 - DNA, 25 bp, Artificial
  probe
  misc_feature (1)..(25): SEQ ID NO: 1016; WAN024CCI; Start 174; Stop 198
acaaactaaaccagcagacaaagga

SEQ ID NO: 280633 - DNA, 25 bp, Artificial
  probe
  misc_feature (1)..(25): SEQ ID NO: 1016; WAN024CCI; Start 37; Stop 61
acaattagtgaaatgtcaacaactt

SEQ ID NO: 280634 - DNA, 25 bp, Artificial
  probe
  misc_feature (1)..(25): SEQ ID NO: 1016; WAN024CCI; Start 38; Stop 62
caattagtgaaatgtcaacaacttc

SEQ ID NO: 280635 - DNA, 25 bp, Artificial
  probe
  misc_feature (1)..(25): SEQ ID NO: 1016; WAN024CCI; Start 98; Stop 122
ttcagttgaatgagcaaagggaaga

SEQ ID NO: 280636 - DNA, 25 bp, Artificial
  probe
  misc_feature (1)..(25): SEQ ID NO: 1017; WAN024FB5; Start 646; Stop 670
gctatcttccagttcttaccagtag

SEQ ID NO: 280637 - DNA, 25 bp, Artificial
  probe
  misc_feature (1)..(25): SEQ ID NO: 1017; WAN024FB5; Start 647; Stop 671
ctatcttccagttcttaccagtagg

SEQ ID NO: 280638 - DNA, 25 bp, Artificial
  probe
  misc_feature (1)..(25): SEQ ID NO: 1017; WAN024FB5; Start 1880; Stop 1904
gtatggatacagtaggtcttgatgg

SEQ ID NO: 280639 - DNA, 25 bp, Artificial
  probe
  misc_feature (1)..(25): SEQ ID NO: 1017; WAN024FB5; Start 1879; Stop 1903
ggtatggatacagtaggtcttgatg

SEQ ID NO: 280640 - DNA, 25 bp, Artificial
  probe
  misc_feature (1)..(25): SEQ ID NO: 1017; WAN024FB5; Start 2023; Stop 2047
atcaccaaccaagatgcttatacag

SEQ ID NO: 280641 - DNA, 25 bp, Artificial
  probe
  misc_feature (1)..(25): SEQ ID NO: 1017; WAN024FB5; Start 1453; Stop 1477
ttgccaggtattctctctattcaac

SEQ ID NO: 280642 - DNA, 25 bp, Artificial
  probe
  misc_feature (1)..(25): SEQ ID NO: 1017; WAN024FB5; Start 1881; Stop 1905
tatggatacagtaggtcttgatggc

SEQ ID NO: 280643 - DNA, 25 bp, Artificial
  probe
  misc_feature (1)..(25): SEQ ID NO: 1017; WAN024FB5; Start 1418; Stop 1442
ttaatgtaactgcggcttctattgg

SEQ ID NO: 280644 - DNA, 25 bp, Artificial
  probe
  misc_feature (1)..(25): SEQ ID NO: 1017; WAN024FB5; Start 1878; Stop 1902
cggtatggatacagtaggtcttgat

SEQ ID NO: 280645 - DNA, 25 bp, Artificial
  probe
  misc_feature (1)..(25): SEQ ID NO: 1017; WAN024FB5; Start 488; Stop 512
ttactccgattattccagccttgat

SEQ ID NO: 280646 - DNA, 25 bp, Artificial
  probe
  misc_feature (1)..(25): SEQ ID NO: 1017; WAN024FB5; Start 1876; Stop 1900
atcggtatggatacagtaggtcttg

SEQ ID NO: 280647 - DNA, 25 bp, Artificial
  probe
  misc_feature (1)..(25): SEQ ID NO: 1017; WAN024FB5; Start 1875; Stop 1899
catcggtatggatacagtaggtctt

SEQ ID NO: 280648 - DNA, 25 bp, Artificial
  probe
  misc_feature (1)..(25): SEQ ID NO: 1017; WAN024FB5; Start 1970; Stop 1994
ttgatatggatgtcattaaggctgc

SEQ ID NO: 280649 - DNA, 25 bp, Artificial
  probe
  misc_feature (1)..(25): SEQ ID NO: 1017; WAN024FB5; Start 2013; Stop 2037
tcctgttatcatcaccaaccaagat

SEQ ID NO: 280650 - DNA, 25 bp, Artificial
  probe
  misc_feature (1)..(25): SEQ ID NO: 1017; WAN024FB5; Start 1421; Stop 1445
atgtaactgcggcttctattggtat

SEQ ID NO: 280651 - DNA, 25 bp, Artificial
  probe
  misc_feature (1)..(25): SEQ ID NO: 1017; WAN024FB5; Start 1467; Stop 1491
ctctattcaacctcaatacatgctg

SEQ ID NO: 280652 - DNA, 25 bp, Artificial
  probe
  misc_feature (1)..(25): SEQ ID NO: 1017; WAN024FB5; Start 1466; Stop 1490
tctctattcaacctcaatacatgct

SEQ ID NO: 280653 - DNA, 25 bp, Artificial
  probe
  misc_feature (1)..(25): SEQ ID NO: 1017; WAN024FB5; Start 1465; Stop 1489
ctctctattcaacctcaatacatgc

SEQ ID NO: 280654 - DNA, 25 bp, Artificial
  probe
  misc_feature (1)..(25): SEQ ID NO: 1017; WAN024FB5; Start 1877; Stop 1901
tcggtatggatacagtaggtcttga

SEQ ID NO: 280655 - DNA, 25 bp, Artificial
  probe
  misc_feature (1)..(25): SEQ ID NO: 1017; WAN024FB5; Start 1420; Stop 1444
aatgtaactgcggcttctattggta

SEQ ID NO: 280656 - DNA, 25 bp, Artificial
  probe
  misc_feature (1)..(25): SEQ ID NO: 1017; WAN024FB5; Start 1419; Stop 1443
taatgtaactgcggcttctattggt

SEQ ID NO: 280657 - DNA, 25 bp, Artificial
  probe
  misc_feature (1)..(25): SEQ ID NO: 1017; WAN024FB5; Start 2010; Stop 2034
aactcctgttatcatcaccaaccaa

SEQ ID NO: 280658 - DNA, 25 bp, Artificial
  probe
  misc_feature (1)..(25): SEQ ID NO: 1017; WAN024FB5; Start 1873; Stop 1897
cacatcggtatggatacagtaggtc

SEQ ID NO: 280659 - DNA, 25 bp, Artificial
  probe
  misc_feature (1)..(25): SEQ ID NO: 1017; WAN024FB5; Start 1468; Stop 1492
tctattcaacctcaatacatgctgc

SEQ ID NO: 280660 - DNA, 25 bp, Artificial
  probe
  misc_feature (1)..(25): SEQ ID NO: 1017; WAN024FB5; Start 645; Stop 669
agctatcttccagttcttaccagta

SEQ ID NO: 280661 - DNA, 25 bp, Artificial
  probe
  misc_feature (1)..(25): SEQ ID NO: 1017; WAN024FB5; Start 2012; Stop 2036
ctcctgttatcatcaccaaccaaga

SEQ ID NO: 280662 - DNA, 25 bp, Artificial
  probe
  misc_feature (1)..(25): SEQ ID NO: 1017; WAN024FB5; Start 1874; Stop 1898
acatcggtatggatacagtaggtct

SEQ ID NO: 280663 - DNA, 25 bp, Artificial
  probe
  misc_feature (1)..(25): SEQ ID NO: 1017; WAN024FB5; Start 1422; Stop 1446
tgtaactgcggcttctattggtatc

SEQ ID NO: 280664 - DNA, 25 bp, Artificial
  probe
  misc_feature (1)..(25): SEQ ID NO: 1017; WAN024FB5; Start 2011; Stop 2035
actcctgttatcatcaccaaccaag

SEQ ID NO: 280665 - DNA, 25 bp, Artificial
  probe
  misc_feature (1)..(25): SEQ ID NO: 1017; WAN024FB5; Start 644; Stop 668
aagctatcttccagttcttaccagt

SEQ ID NO: 280666 - DNA, 25 bp, Artificial
  probe
  misc_feature (1)..(25): SEQ ID NO: 1017; WAN024FB5; Start 1505; Stop 1529
ctatgctagttgcgattgttgttcc

SEQ ID NO: 280667 - DNA, 25 bp, Artificial
  probe
  misc_feature (1)..(25): SEQ ID NO: 1017; WAN024FB5; Start 1451; Stop 1475
gtttgccaggtattctctctattca

SEQ ID NO: 280668 - DNA, 25 bp, Artificial
  probe
  misc_feature (1)..(25): SEQ ID NO: 1017; WAN024FB5; Start 882; Stop 906
aggtttgagtctgtcttatcttgaa

SEQ ID NO: 280669 - DNA, 25 bp, Artificial
  probe
  misc_feature (1)..(25): SEQ ID NO: 1018; WAN024FO4; Start 306; Stop 330
tgtcttgaccttgatgaataactgg

SEQ ID NO: 280670 - DNA, 25 bp, Artificial
  probe
  misc_feature (1)..(25): SEQ ID NO: 1018; WAN024FO4; Start 305; Stop 329
ttgtcttgaccttgatgaataactg

SEQ ID NO: 280671 - DNA, 25 bp, Artificial
  probe
  misc_feature (1)..(25): SEQ ID NO: 1018; WAN024FO4; Start 303; Stop 327
cgttgtcttgaccttgatgaataac

SEQ ID NO: 280672 - DNA, 25 bp, Artificial
  probe
  misc_feature (1)..(25): SEQ ID NO: 1018; WAN024FO4; Start 304; Stop 328
gttgtcttgaccttgatgaataact

SEQ ID NO: 280673 - DNA, 25 bp, Artificial
  probe
  misc_feature (1)..(25): SEQ ID NO: 1018; WAN024FO4; Start 302; Stop 326
ccgttgtcttgaccttgatgaataa

SEQ ID NO: 280674 - DNA, 25 bp, Artificial
  probe
  misc_feature (1)..(25): SEQ ID NO: 1018; WAN024FO4; Start 183; Stop 207
tctcatgttcctatcatccaccatt

SEQ ID NO: 280675 - DNA, 25 bp, Artificial
  probe
  misc_feature (1)..(25): SEQ ID NO: 1018; WAN024FO4; Start 182; Stop 206
ttctcatgttcctatcatccaccat

SEQ ID NO: 280676 - DNA, 25 bp, Artificial
  probe
  misc_feature (1)..(25): SEQ ID NO: 1018; WAN024FO4; Start 84; Stop 108
catcatgcttatcttgctgcctatt

SEQ ID NO: 280677 - DNA, 25 bp, Artificial
  probe
  misc_feature (1)..(25): SEQ ID NO: 1018; WAN024FO4; Start 308; Stop 332
tcttgaccttgatgaataactggtt

SEQ ID NO: 280678 - DNA, 25 bp, Artificial
  probe
  misc_feature (1)..(25): SEQ ID NO: 1018; WAN024FO4; Start 333; Stop 357
tggctatctgattattgtcatccaa

SEQ ID NO: 280679 - DNA, 25 bp, Artificial
  probe
  misc_feature (1)..(25): SEQ ID NO: 1018; WAN024FO4; Start 332; Stop 356
ttggctatctgattattgtcatcca

SEQ ID NO: 280680 - DNA, 25 bp, Artificial
  probe
  misc_feature (1)..(25): SEQ ID NO: 1018; WAN024FO4; Start 116; Stop 140
tctatagttatgaagcacacggatt

SEQ ID NO: 280681 - DNA, 25 bp, Artificial
  probe
  misc_feature (1)..(25): SEQ ID NO: 1018; WAN024FO4; Start 307; Stop 331
gtcttgaccttgatgaataactggt

SEQ ID NO: 280682 - DNA, 25 bp, Artificial
  probe
  misc_feature (1)..(25): SEQ ID NO: 1018; WAN024FO4; Start 115; Stop 139
atctatagttatgaagcacacggat

SEQ ID NO: 280683 - DNA, 25 bp, Artificial
  probe
  misc_feature (1)..(25): SEQ ID NO: 1018; WAN024FO4; Start 327; Stop 351
ctggtttggctatctgattattgtc

SEQ ID NO: 280684 - DNA, 25 bp, Artificial
  probe
  misc_feature (1)..(25): SEQ ID NO: 1018; WAN024FO4; Start 326; Stop 350
actggtttggctatctgattattgt

SEQ ID NO: 280685 - DNA, 25 bp, Artificial
  probe
  misc_feature (1)..(25): SEQ ID NO: 1018; WAN024FO4; Start 114; Stop 138
catctatagttatgaagcacacgga

SEQ ID NO: 280686 - DNA, 25 bp, Artificial
  probe
  misc_feature (1)..(25): SEQ ID NO: 1018; WAN024FO4; Start 112; Stop 136
tccatctatagttatgaagcacacg

SEQ ID NO: 280687 - DNA, 25 bp, Artificial
  probe
  misc_feature (1)..(25): SEQ ID NO: 1018; WAN024FO4; Start 92; Stop 116
ttatcttgctgcctatttcatccat

SEQ ID NO: 280688 - DNA, 25 bp, Artificial
  probe
  misc_feature (1)..(25): SEQ ID NO: 1018; WAN024FO4; Start 192; Stop 216
cctatcatccaccatttatcactct

SEQ ID NO: 280689 - DNA, 25 bp, Artificial
  probe
  misc_feature (1)..(25): SEQ ID NO: 1018; WAN024FO4; Start 191; Stop 215
tcctatcatccaccatttatcactc

SEQ ID NO: 280690 - DNA, 25 bp, Artificial
  probe
  misc_feature (1)..(25): SEQ ID NO: 1018; WAN024FO4; Start 97; Stop 121
ttgctgcctatttcatccatctata

SEQ ID NO: 280691 - DNA, 25 bp, Artificial
  probe
  misc_feature (1)..(25): SEQ ID NO: 1018; WAN024FO4; Start 320; Stop 344
tgaataactggtttggctatctgat

SEQ ID NO: 280692 - DNA, 25 bp, Artificial
  probe
  misc_feature (1)..(25): SEQ ID NO: 1018; WAN024FO4; Start 319; Stop 343
atgaataactggtttggctatctga

SEQ ID NO: 280693 - DNA, 25 bp, Artificial
  probe
  misc_feature (1)..(25): SEQ ID NO: 1018; WAN024FO4; Start 188; Stop 212
tgttcctatcatccaccatttatca

SEQ ID NO: 280694 - DNA, 25 bp, Artificial
  probe
  misc_feature (1)..(25): SEQ ID NO: 1018; WAN024FO4; Start 83; Stop 107
tcatcatgcttatcttgctgcctat

SEQ ID NO: 280695 - DNA, 25 bp, Artificial
  probe
  misc_feature (1)..(25): SEQ ID NO: 1018; WAN024FO4; Start 317; Stop 341
tgatgaataactggtttggctatct

SEQ ID NO: 280696 - DNA, 25 bp, Artificial
  probe
  misc_feature (1)..(25): SEQ ID NO: 1018; WAN024FO4; Start 189; Stop 213
gttcctatcatccaccatttatcac

SEQ ID NO: 280697 - DNA, 25 bp, Artificial
  probe
  misc_feature (1)..(25): SEQ ID NO: 1018; WAN024FO4; Start 96; Stop 120
cttgctgcctatttcatccatctat

SEQ ID NO: 280698 - DNA, 25 bp, Artificial
  probe
  misc_feature (1)..(25): SEQ ID NO: 1018; WAN024FO4; Start 93; Stop 117
tatcttgctgcctatttcatccatc

SEQ ID NO: 280699 - DNA, 25 bp, Artificial
  probe
  misc_feature (1)..(25): SEQ ID NO: 1018; WAN024FO4; Start 318; Stop 342
gatgaataactggtttggctatctg

SEQ ID NO: 280700 - DNA, 25 bp, Artificial
  probe
  misc_feature (1)..(25): SEQ ID NO: 1018; WAN024FO4; Start 190; Stop 214
ttcctatcatccaccatttatcact

SEQ ID NO: 280701 - DNA, 25 bp, Artificial
  probe
  misc_feature (1)..(25): SEQ ID NO: 1018; WAN024FO4; Start 325; Stop 349
aactggtttggctatctgattattg

SEQ ID NO: 280702 - DNA, 25 bp, Artificial
  probe
  misc_feature (1)..(25): SEQ ID NO: 1019; WAN024CAH; Start 263; Stop 287
attatgattatgtatgtagcgaggt

SEQ ID NO: 280703 - DNA, 25 bp, Artificial
  probe
  misc_feature (1)..(25): SEQ ID NO: 1019; WAN024CAH; Start 262; Stop 286
cattatgattatgtatgtagcgagg

SEQ ID NO: 280704 - DNA, 25 bp, Artificial
  probe
  misc_feature (1)..(25): SEQ ID NO: 1019; WAN024CAH; Start 317; Stop 341
atagcgaaattcctgttatgtttgg

SEQ ID NO: 280705 - DNA, 25 bp, Artificial
  probe
  misc_feature (1)..(25): SEQ ID NO: 1019; WAN024CAH; Start 325; Stop 349
attcctgttatgtttggtgtgctaa

SEQ ID NO: 280706 - DNA, 25 bp, Artificial
  probe
  misc_feature (1)..(25): SEQ ID NO: 1019; WAN024CAH; Start 264; Stop 288
ttatgattatgtatgtagcgaggta

SEQ ID NO: 280707 - DNA, 25 bp, Artificial
  probe
  misc_feature (1)..(25): SEQ ID NO: 1019; WAN024CAH; Start 324; Stop 348
aattcctgttatgtttggtgtgcta

SEQ ID NO: 280708 - DNA, 25 bp, Artificial
  probe
  misc_feature (1)..(25): SEQ ID NO: 1019; WAN024CAH; Start 318; Stop 342
tagcgaaattcctgttatgtttggt

SEQ ID NO: 280709 - DNA, 25 bp, Artificial
  probe
  misc_feature (1)..(25): SEQ ID NO: 1019; WAN024CAH; Start 339; Stop 363
tggtgtgctaacgacagatacaatt

SEQ ID NO: 280710 - DNA, 25 bp, Artificial
  probe
  misc_feature (1)..(25): SEQ ID NO: 1019; WAN024CAH; Start 338; Stop 362
ttggtgtgctaacgacagatacaat

SEQ ID NO: 280711 - DNA, 25 bp, Artificial
  probe
  misc_feature (1)..(25): SEQ ID NO: 1019; WAN024CAH; Start 321; Stop 345
cgaaattcctgttatgtttggtgtg

SEQ ID NO: 280712 - DNA, 25 bp, Artificial
  probe
  misc_feature (1)..(25): SEQ ID NO: 1019; WAN024CAH; Start 322; Stop 346
gaaattcctgttatgtttggtgtgc

SEQ ID NO: 280713 - DNA, 25 bp, Artificial
  probe
  misc_feature (1)..(25): SEQ ID NO: 1019; WAN024CAH; Start 265; Stop 289
tatgattatgtatgtagcgaggtat

SEQ ID NO: 280714 - DNA, 25 bp, Artificial
  probe
  misc_feature (1)..(25): SEQ ID NO: 1019; WAN024CAH; Start 42; Stop 66
aataggtattgttgtagcgagattt

SEQ ID NO: 280715 - DNA, 25 bp, Artificial
  probe
  misc_feature (1)..(25): SEQ ID NO: 1019; WAN024CAH; Start 41; Stop 65
aaataggtattgttgtagcgagatt

SEQ ID NO: 280716 - DNA, 25 bp, Artificial
  probe
  misc_feature (1)..(25): SEQ ID NO: 1019; WAN024CAH; Start 46; Stop 70
ggtattgttgtagcgagatttaatg

SEQ ID NO: 280717 - DNA, 25 bp, Artificial
  probe
  misc_feature (1)..(25): SEQ ID NO: 1019; WAN024CAH; Start 45; Stop 69
aggtattgttgtagcgagatttaat

SEQ ID NO: 280718 - DNA, 25 bp, Artificial
  probe
  misc_feature (1)..(25): SEQ ID NO: 1019; WAN024CAH; Start 316; Stop 340
aatagcgaaattcctgttatgtttg

SEQ ID NO: 280719 - DNA, 25 bp, Artificial
  probe
  misc_feature (1)..(25): SEQ ID NO: 1019; WAN024CAH; Start 323; Stop 347
aaattcctgttatgtttggtgtgct

SEQ ID NO: 280720 - DNA, 25 bp, Artificial
  probe
  misc_feature (1)..(25): SEQ ID NO: 1019; WAN024CAH; Start 116; Stop 140
aaagagagaatgtaaacgagaaaga

SEQ ID NO: 280721 - DNA, 25 bp, Artificial
  probe
  misc_feature (1)..(25): SEQ ID NO: 1019; WAN024CAH; Start 117; Stop 141
aagagagaatgtaaacgagaaagat

SEQ ID NO: 280722 - DNA, 25 bp, Artificial
  probe
  misc_feature (1)..(25): SEQ ID NO: 1019; WAN024CAH; Start 44; Stop 68
taggtattgttgtagcgagatttaa

SEQ ID NO: 280723 - DNA, 25 bp, Artificial
  probe
  misc_feature (1)..(25): SEQ ID NO: 1019; WAN024CAH; Start 356; Stop 380
atacaattgaacaagccatagaacg

SEQ ID NO: 280724 - DNA, 25 bp, Artificial
  probe
  misc_feature (1)..(25): SEQ ID NO: 1019; WAN024CAH; Start 347; Stop 371
taacgacagatacaattgaacaagc

SEQ ID NO: 280725 - DNA, 25 bp, Artificial
  probe
  misc_feature (1)..(25): SEQ ID NO: 1019; WAN024CAH; Start 345; Stop 369
gctaacgacagatacaattgaacaa

SEQ ID NO: 280726 - DNA, 25 bp, Artificial
  probe
  misc_feature (1)..(25): SEQ ID NO: 1019; WAN024CAH; Start 315; Stop 339
aaatagcgaaattcctgttatgttt

SEQ ID NO: 280727 - DNA, 25 bp, Artificial
  probe
  misc_feature (1)..(25): SEQ ID NO: 1019; WAN024CAH; Start 43; Stop 67
ataggtattgttgtagcgagattta

SEQ ID NO: 280728 - DNA, 25 bp, Artificial
  probe
  misc_feature (1)..(25): SEQ ID NO: 1019; WAN024CAH; Start 343; Stop 367
gtgctaacgacagatacaattgaac

SEQ ID NO: 280729 - DNA, 25 bp, Artificial
  probe
  misc_feature (1)..(25): SEQ ID NO: 1019; WAN024CAH; Start 295; Stop 319
ggaatcgcccaaatcagtttaaata

SEQ ID NO: 280730 - DNA, 25 bp, Artificial
  probe
  misc_feature (1)..(25): SEQ ID NO: 1019; WAN024CAH; Start 352; Stop 376
acagatacaattgaacaagccatag

SEQ ID NO: 280731 - DNA, 25 bp, Artificial
  probe
  misc_feature (1)..(25): SEQ ID NO: 1019; WAN024CAH; Start 351; Stop 375
gacagatacaattgaacaagccata

SEQ ID NO: 280732 - DNA, 25 bp, Artificial
  probe
  misc_feature (1)..(25): SEQ ID NO: 1019; WAN024CAH; Start 319; Stop 343
agcgaaattcctgttatgtttggtg

SEQ ID NO: 280733 - DNA, 25 bp, Artificial
  probe
  misc_feature (1)..(25): SEQ ID NO: 1019; WAN024CAH; Start 297; Stop 321
aatcgcccaaatcagtttaaatagc

SEQ ID NO: 280734 - DNA, 25 bp, Artificial
  probe
  misc_feature (1)..(25): SEQ ID NO: 1019; WAN024CAH; Start 47; Stop 71
gtattgttgtagcgagatttaatga

SEQ ID NO: 280735 - DNA, 25 bp, Artificial
  probe
  misc_feature (1)..(25): SEQ ID NO: 1020; WAN024F2C; Start 217; Stop 241
aactggtatgacgacaaggattatc

SEQ ID NO: 280736 - DNA, 25 bp, Artificial
  probe
  misc_feature (1)..(25): SEQ ID NO: 1020; WAN024F2C; Start 359; Stop 383
atgatatgtctgatatgcttcgtgt

SEQ ID NO: 280737 - DNA, 25 bp, Artificial
  probe
  misc_feature (1)..(25): SEQ ID NO: 1020; WAN024F2C; Start 354; Stop 378
aaccgatgatatgtctgatatgctt

SEQ ID NO: 280738 - DNA, 25 bp, Artificial
  probe
  misc_feature (1)..(25): SEQ ID NO: 1020; WAN024F2C; Start 362; Stop 386
atatgtctgatatgcttcgtgtgtt

SEQ ID NO: 280739 - DNA, 25 bp, Artificial
  probe
  misc_feature (1)..(25): SEQ ID NO: 1020; WAN024F2C; Start 355; Stop 379
accgatgatatgtctgatatgcttc

SEQ ID NO: 280740 - DNA, 25 bp, Artificial
  probe
  misc_feature (1)..(25): SEQ ID NO: 1020; WAN024F2C; Start 358; Stop 382
gatgatatgtctgatatgcttcgtg

SEQ ID NO: 280741 - DNA, 25 bp, Artificial
  probe
  misc_feature (1)..(25): SEQ ID NO: 1020; WAN024F2C; Start 353; Stop 377
caaccgatgatatgtctgatatgct

SEQ ID NO: 280742 - DNA, 25 bp, Artificial
  probe
  misc_feature (1)..(25): SEQ ID NO: 1020; WAN024F2C; Start 361; Stop 385
gatatgtctgatatgcttcgtgtgt

SEQ ID NO: 280743 - DNA, 25 bp, Artificial
  probe
  misc_feature (1)..(25): SEQ ID NO: 1020; WAN024F2C; Start 360; Stop 384
tgatatgtctgatatgcttcgtgtg

SEQ ID NO: 280744 - DNA, 25 bp, Artificial
  probe
  misc_feature (1)..(25): SEQ ID NO: 1020; WAN024F2C; Start 216; Stop 240
aaactggtatgacgacaaggattat

SEQ ID NO: 280745 - DNA, 25 bp, Artificial
  probe
  misc_feature (1)..(25): SEQ ID NO: 1020; WAN024F2C; Start 363; Stop 387
tatgtctgatatgcttcgtgtgttt

SEQ ID NO: 280746 - DNA, 25 bp, Artificial
  probe
  misc_feature (1)..(25): SEQ ID NO: 1020; WAN024F2C; Start 351; Stop 375
tgcaaccgatgatatgtctgatatg

SEQ ID NO: 280747 - DNA, 25 bp, Artificial
  probe
  misc_feature (1)..(25): SEQ ID NO: 1020; WAN024F2C; Start 366; Stop 390
gtctgatatgcttcgtgtgtttcta

SEQ ID NO: 280748 - DNA, 25 bp, Artificial
  probe
  misc_feature (1)..(25): SEQ ID NO: 1020; WAN024F2C; Start 367; Stop 391
tctgatatgcttcgtgtgtttctag

SEQ ID NO: 280749 - DNA, 25 bp, Artificial
  probe
  misc_feature (1)..(25): SEQ ID NO: 1020; WAN024F2C; Start 154; Stop 178
attcgtgaagtgaaagaagaaactg

SEQ ID NO: 280750 - DNA, 25 bp, Artificial
  probe
  misc_feature (1)..(25): SEQ ID NO: 1020; WAN024F2C; Start 153; Stop 177
cattcgtgaagtgaaagaagaaact

SEQ ID NO: 280751 - DNA, 25 bp, Artificial
  probe
  misc_feature (1)..(25): SEQ ID NO: 1020; WAN024F2C; Start 152; Stop 176
tcattcgtgaagtgaaagaagaaac

SEQ ID NO: 280752 - DNA, 25 bp, Artificial
  probe
  misc_feature (1)..(25): SEQ ID NO: 1020; WAN024F2C; Start 151; Stop 175
gtcattcgtgaagtgaaagaagaaa

SEQ ID NO: 280753 - DNA, 25 bp, Artificial
  probe
  misc_feature (1)..(25): SEQ ID NO: 1020; WAN024F2C; Start 161; Stop 185
aagtgaaagaagaaactggtctgat

SEQ ID NO: 280754 - DNA, 25 bp, Artificial
  probe
  misc_feature (1)..(25): SEQ ID NO: 1020; WAN024F2C; Start 357; Stop 381
cgatgatatgtctgatatgcttcgt

SEQ ID NO: 280755 - DNA, 25 bp, Artificial
  probe
  misc_feature (1)..(25): SEQ ID NO: 1020; WAN024F2C; Start 364; Stop 388
atgtctgatatgcttcgtgtgtttc

SEQ ID NO: 280756 - DNA, 25 bp, Artificial
  probe
  misc_feature (1)..(25): SEQ ID NO: 1020; WAN024F2C; Start 160; Stop 184
gaagtgaaagaagaaactggtctga

SEQ ID NO: 280757 - DNA, 25 bp, Artificial
  probe
  misc_feature (1)..(25): SEQ ID NO: 1020; WAN024F2C; Start 150; Stop 174
tgtcattcgtgaagtgaaagaagaa

SEQ ID NO: 280758 - DNA, 25 bp, Artificial
  probe
  misc_feature (1)..(25): SEQ ID NO: 1020; WAN024F2C; Start 428; Stop 452
gtgacgactggctttatgatttgaa

SEQ ID NO: 280759 - DNA, 25 bp, Artificial
  probe
  misc_feature (1)..(25): SEQ ID NO: 1020; WAN024F2C; Start 429; Stop 453
tgacgactggctttatgatttgaag

SEQ ID NO: 280760 - DNA, 25 bp, Artificial
  probe
  misc_feature (1)..(25): SEQ ID NO: 1020; WAN024F2C; Start 159; Stop 183
tgaagtgaaagaagaaactggtctg

SEQ ID NO: 280761 - DNA, 25 bp, Artificial
  probe
  misc_feature (1)..(25): SEQ ID NO: 1020; WAN024F2C; Start 158; Stop 182
gtgaagtgaaagaagaaactggtct

SEQ ID NO: 280762 - DNA, 25 bp, Artificial
  probe
  misc_feature (1)..(25): SEQ ID NO: 1020; WAN024F2C; Start 356; Stop 380
ccgatgatatgtctgatatgcttcg

SEQ ID NO: 280763 - DNA, 25 bp, Artificial
  probe
  misc_feature (1)..(25): SEQ ID NO: 1020; WAN024F2C; Start 149; Stop 173
ctgtcattcgtgaagtgaaagaaga

SEQ ID NO: 280764 - DNA, 25 bp, Artificial
  probe
  misc_feature (1)..(25): SEQ ID NO: 1020; WAN024F2C; Start 258; Stop 282
ttacaagacagaacactttactggt

SEQ ID NO: 280765 - DNA, 25 bp, Artificial
  probe
  misc_feature (1)..(25): SEQ ID NO: 1020; WAN024F2C; Start 257; Stop 281
tttacaagacagaacactttactgg

SEQ ID NO: 280766 - DNA, 25 bp, Artificial
  probe
  misc_feature (1)..(25): SEQ ID NO: 1020; WAN024F2C; Start 162; Stop 186
agtgaaagaagaaactggtctgatc

SEQ ID NO: 280767 - DNA, 25 bp, Artificial
  probe
  misc_feature (1)..(25): SEQ ID NO: 1020; WAN024F2C; Start 155; Stop 179
ttcgtgaagtgaaagaagaaactgg

SEQ ID NO: 280768 - DNA, 25 bp, Artificial
  probe
  misc_feature (1)..(25): SEQ ID NO: 1021; WAN024FRQ; Start 957; Stop 981
tgaattagtcttagatgcctaccac

SEQ ID NO: 280769 - DNA, 25 bp, Artificial
  probe
  misc_feature (1)..(25): SEQ ID NO: 1021; WAN024FRQ; Start 956; Stop 980
gtgaattagtcttagatgcctacca

SEQ ID NO: 280770 - DNA, 25 bp, Artificial
  probe
  misc_feature (1)..(25): SEQ ID NO: 1021; WAN024FRQ; Start 958; Stop 982
gaattagtcttagatgcctaccacc

SEQ ID NO: 280771 - DNA, 25 bp, Artificial
  probe
  misc_feature (1)..(25): SEQ ID NO: 1021; WAN024FRQ; Start 146; Stop 170
ctattattgatatgctggaacctgg

SEQ ID NO: 280772 - DNA, 25 bp, Artificial
  probe
  misc_feature (1)..(25): SEQ ID NO: 1021; WAN024FRQ; Start 955; Stop 979
cgtgaattagtcttagatgcctacc

SEQ ID NO: 280773 - DNA, 25 bp, Artificial
  probe
  misc_feature (1)..(25): SEQ ID NO: 1021; WAN024FRQ; Start 954; Stop 978
ccgtgaattagtcttagatgcctac

SEQ ID NO: 280774 - DNA, 25 bp, Artificial
  probe
  misc_feature (1)..(25): SEQ ID NO: 1021; WAN024FRQ; Start 959; Stop 983
aattagtcttagatgcctaccacca

SEQ ID NO: 280775 - DNA, 25 bp, Artificial
  probe
  misc_feature (1)..(25): SEQ ID NO: 1021; WAN024FRQ; Start 960; Stop 984
attagtcttagatgcctaccaccat

SEQ ID NO: 280776 - DNA, 25 bp, Artificial
  probe
  misc_feature (1)..(25): SEQ ID NO: 1021; WAN024FRQ; Start 147; Stop 171
tattattgatatgctggaacctggt

SEQ ID NO: 280777 - DNA, 25 bp, Artificial
  probe
  misc_feature (1)..(25): SEQ ID NO: 1021; WAN024FRQ; Start 148; Stop 172
attattgatatgctggaacctggtg

SEQ ID NO: 280778 - DNA, 25 bp, Artificial
  probe
  misc_feature (1)..(25): SEQ ID NO: 1021; WAN024FRQ; Start 145; Stop 169
tctattattgatatgctggaacctg

SEQ ID NO: 280779 - DNA, 25 bp, Artificial
  probe
  misc_feature (1)..(25): SEQ ID NO: 1021; WAN024FRQ; Start 143; Stop 167
actctattattgatatgctggaacc

SEQ ID NO: 280780 - DNA, 25 bp, Artificial
  probe
  misc_feature (1)..(25): SEQ ID NO: 1021; WAN024FRQ; Start 150; Stop 174
tattgatatgctggaacctggtgat

SEQ ID NO: 280781 - DNA, 25 bp, Artificial
  probe
  misc_feature (1)..(25): SEQ ID NO: 1021; WAN024FRQ; Start 144; Stop 168
ctctattattgatatgctggaacct

SEQ ID NO: 280782 - DNA, 25 bp, Artificial
  probe
  misc_feature (1)..(25): SEQ ID NO: 1021; WAN024FRQ; Start 149; Stop 173
ttattgatatgctggaacctggtga

SEQ ID NO: 280783 - DNA, 25 bp, Artificial
  probe
  misc_feature (1)..(25): SEQ ID NO: 1021; WAN024FRQ; Start 953; Stop 977
gccgtgaattagtcttagatgccta

SEQ ID NO: 280784 - DNA, 25 bp, Artificial
  probe
  misc_feature (1)..(25): SEQ ID NO: 1021; WAN024FRQ; Start 142; Stop 166
cactctattattgatatgctggaac

SEQ ID NO: 280785 - DNA, 25 bp, Artificial
  probe
  misc_feature (1)..(25): SEQ ID NO: 1021; WAN024FRQ; Start 645; Stop 669
tagacctgtttctgtggataatctg

SEQ ID NO: 280786 - DNA, 25 bp, Artificial
  probe
  misc_feature (1)..(25): SEQ ID NO: 1021; WAN024FRQ; Start 641; Stop 665
cctttagacctgtttctgtggataa

SEQ ID NO: 280787 - DNA, 25 bp, Artificial
  probe
  misc_feature (1)..(25): SEQ ID NO: 1021; WAN024FRQ; Start 151; Stop 175
attgatatgctggaacctggtgatg

SEQ ID NO: 280788 - DNA, 25 bp, Artificial
  probe
  misc_feature (1)..(25): SEQ ID NO: 1021; WAN024FRQ; Start 644; Stop 668
ttagacctgtttctgtggataatct

SEQ ID NO: 280789 - DNA, 25 bp, Artificial
  probe
  misc_feature (1)..(25): SEQ ID NO: 1021; WAN024FRQ; Start 141; Stop 165
ccactctattattgatatgctggaa

SEQ ID NO: 280790 - DNA, 25 bp, Artificial
  probe
  misc_feature (1)..(25): SEQ ID NO: 1021; WAN024FRQ; Start 139; Stop 163
ttccactctattattgatatgctgg

SEQ ID NO: 280791 - DNA, 25 bp, Artificial
  probe
  misc_feature (1)..(25): SEQ ID NO: 1021; WAN024FRQ; Start 640; Stop 664
acctttagacctgtttctgtggata

SEQ ID NO: 280792 - DNA, 25 bp, Artificial
  probe
  misc_feature (1)..(25): SEQ ID NO: 1021; WAN024FRQ; Start 841; Stop 865
tggaccaatatctttatcaaacctg

SEQ ID NO: 280793 - DNA, 25 bp, Artificial
  probe
  misc_feature (1)..(25): SEQ ID NO: 1021; WAN024FRQ; Start 851; Stop 875
tctttatcaaacctgggtatgagtg

SEQ ID NO: 280794 - DNA, 25 bp, Artificial
  probe
  misc_feature (1)..(25): SEQ ID NO: 1021; WAN024FRQ; Start 654; Stop 678
ttctgtggataatctggacgaacac

SEQ ID NO: 280795 - DNA, 25 bp, Artificial
  probe
  misc_feature (1)..(25): SEQ ID NO: 1021; WAN024FRQ; Start 850; Stop 874
atctttatcaaacctgggtatgagt

SEQ ID NO: 280796 - DNA, 25 bp, Artificial
  probe
  misc_feature (1)..(25): SEQ ID NO: 1021; WAN024FRQ; Start 643; Stop 667
tttagacctgtttctgtggataatc

SEQ ID NO: 280797 - DNA, 25 bp, Artificial
  probe
  misc_feature (1)..(25): SEQ ID NO: 1021; WAN024FRQ; Start 642; Stop 666
ctttagacctgtttctgtggataat

SEQ ID NO: 280798 - DNA, 25 bp, Artificial
  probe
  misc_feature (1)..(25): SEQ ID NO: 1021; WAN024FRQ; Start 242; Stop 266
gtcatgtggaacttctcctccttaa

SEQ ID NO: 280799 - DNA, 25 bp, Artificial
  probe
  misc_feature (1)..(25): SEQ ID NO: 1021; WAN024FRQ; Start 660; Stop 684
ggataatctggacgaacacgaaatg

SEQ ID NO: 280800 - DNA, 25 bp, Artificial
  probe
  misc_feature (1)..(25): SEQ ID NO: 1021; WAN024FRQ; Start 647; Stop 671
gacctgtttctgtggataatctgga

SEQ ID NO: 280801 - DNA, 25 bp, Artificial
  probe
  misc_feature (1)..(25): SEQ ID NO: 1022; WAN024EZ9; Start 184; Stop 208
gatgccgaagagatgattaaggaat

SEQ ID NO: 280802 - DNA, 25 bp, Artificial
  probe
  misc_feature (1)..(25): SEQ ID NO: 1022; WAN024EZ9; Start 137; Stop 161
ccgtaatagcctaccgtgagtataa

SEQ ID NO: 280803 - DNA, 25 bp, Artificial
  probe
  misc_feature (1)..(25): SEQ ID NO: 1022; WAN024EZ9; Start 738; Stop 762
tatcgttcacttgccaaccaatatc

SEQ ID NO: 280804 - DNA, 25 bp, Artificial
  probe
  misc_feature (1)..(25): SEQ ID NO: 1022; WAN024EZ9; Start 616; Stop 640
cttgttatgccagaagttgaagagg

SEQ ID NO: 280805 - DNA, 25 bp, Artificial
  probe
  misc_feature (1)..(25): SEQ ID NO: 1022; WAN024EZ9; Start 737; Stop 761
gtatcgttcacttgccaaccaatat

SEQ ID NO: 280806 - DNA, 25 bp, Artificial
  probe
  misc_feature (1)..(25): SEQ ID NO: 1022; WAN024EZ9; Start 623; Stop 647
tgccagaagttgaagaggttgaata

SEQ ID NO: 280807 - DNA, 25 bp, Artificial
  probe
  misc_feature (1)..(25): SEQ ID NO: 1022; WAN024EZ9; Start 621; Stop 645
tatgccagaagttgaagaggttgaa

SEQ ID NO: 280808 - DNA, 25 bp, Artificial
  probe
  misc_feature (1)..(25): SEQ ID NO: 1022; WAN024EZ9; Start 620; Stop 644
ttatgccagaagttgaagaggttga

SEQ ID NO: 280809 - DNA, 25 bp, Artificial
  probe
  misc_feature (1)..(25): SEQ ID NO: 1022; WAN024EZ9; Start 619; Stop 643
gttatgccagaagttgaagaggttg

SEQ ID NO: 280810 - DNA, 25 bp, Artificial
  probe
  misc_feature (1)..(25): SEQ ID NO: 1022; WAN024EZ9; Start 136; Stop 160
accgtaatagcctaccgtgagtata

SEQ ID NO: 280811 - DNA, 25 bp, Artificial
  probe
  misc_feature (1)..(25): SEQ ID NO: 1022; WAN024EZ9; Start 618; Stop 642
tgttatgccagaagttgaagaggtt

SEQ ID NO: 280812 - DNA, 25 bp, Artificial
  probe
  misc_feature (1)..(25): SEQ ID NO: 1022; WAN024EZ9; Start 617; Stop 641
ttgttatgccagaagttgaagaggt

SEQ ID NO: 280813 - DNA, 25 bp, Artificial
  probe
  misc_feature (1)..(25): SEQ ID NO: 1022; WAN024EZ9; Start 622; Stop 646
atgccagaagttgaagaggttgaat

SEQ ID NO: 280814 - DNA, 25 bp, Artificial
  probe
  misc_feature (1)..(25): SEQ ID NO: 1022; WAN024EZ9; Start 185; Stop 209
atgccgaagagatgattaaggaatc

SEQ ID NO: 280815 - DNA, 25 bp, Artificial
  probe
  misc_feature (1)..(25): SEQ ID NO: 1022; WAN024EZ9; Start 183; Stop 207
cgatgccgaagagatgattaaggaa

SEQ ID NO: 280816 - DNA, 25 bp, Artificial
  probe
  misc_feature (1)..(25): SEQ ID NO: 1022; WAN024EZ9; Start 142; Stop 166
atagcctaccgtgagtataaacaag

SEQ ID NO: 280817 - DNA, 25 bp, Artificial
  probe
  misc_feature (1)..(25): SEQ ID NO: 1022; WAN024EZ9; Start 138; Stop 162
cgtaatagcctaccgtgagtataaa

SEQ ID NO: 280818 - DNA, 25 bp, Artificial
  probe
  misc_feature (1)..(25): SEQ ID NO: 1022; WAN024EZ9; Start 148; Stop 172
taccgtgagtataaacaagtccttc

SEQ ID NO: 280819 - DNA, 25 bp, Artificial
  probe
  misc_feature (1)..(25): SEQ ID NO: 1022; WAN024EZ9; Start 147; Stop 171
ctaccgtgagtataaacaagtcctt

SEQ ID NO: 280820 - DNA, 25 bp, Artificial
  probe
  misc_feature (1)..(25): SEQ ID NO: 1022; WAN024EZ9; Start 141; Stop 165
aatagcctaccgtgagtataaacaa

SEQ ID NO: 280821 - DNA, 25 bp, Artificial
  probe
  misc_feature (1)..(25): SEQ ID NO: 1022; WAN024EZ9; Start 143; Stop 167
tagcctaccgtgagtataaacaagt

SEQ ID NO: 280822 - DNA, 25 bp, Artificial
  probe
  misc_feature (1)..(25): SEQ ID NO: 1022; WAN024EZ9; Start 140; Stop 164
taatagcctaccgtgagtataaaca

SEQ ID NO: 280823 - DNA, 25 bp, Artificial
  probe
  misc_feature (1)..(25): SEQ ID NO: 1022; WAN024EZ9; Start 139; Stop 163
gtaatagcctaccgtgagtataaac

SEQ ID NO: 280824 - DNA, 25 bp, Artificial
  probe
  misc_feature (1)..(25): SEQ ID NO: 1022; WAN024EZ9; Start 384; Stop 408
tttcgctggagatttgctaactatg

SEQ ID NO: 280825 - DNA, 25 bp, Artificial
  probe
  misc_feature (1)..(25): SEQ ID NO: 1022; WAN024EZ9; Start 757; Stop 781
aatatcaaggttgagatgcaggaag

SEQ ID NO: 280826 - DNA, 25 bp, Artificial
  probe
  misc_feature (1)..(25): SEQ ID NO: 1022; WAN024EZ9; Start 146; Stop 170
cctaccgtgagtataaacaagtcct

SEQ ID NO: 280827 - DNA, 25 bp, Artificial
  probe
  misc_feature (1)..(25): SEQ ID NO: 1022; WAN024EZ9; Start 386; Stop 410
tcgctggagatttgctaactatgta

SEQ ID NO: 280828 - DNA, 25 bp, Artificial
  probe
  misc_feature (1)..(25): SEQ ID NO: 1022; WAN024EZ9; Start 614; Stop 638
ttcttgttatgccagaagttgaaga

SEQ ID NO: 280829 - DNA, 25 bp, Artificial
  probe
  misc_feature (1)..(25): SEQ ID NO: 1022; WAN024EZ9; Start 613; Stop 637
gttcttgttatgccagaagttgaag

SEQ ID NO: 280830 - DNA, 25 bp, Artificial
  probe
  misc_feature (1)..(25): SEQ ID NO: 1022; WAN024EZ9; Start 756; Stop 780
caatatcaaggttgagatgcaggaa

SEQ ID NO: 280831 - DNA, 25 bp, Artificial
  probe
  misc_feature (1)..(25): SEQ ID NO: 1022; WAN024EZ9; Start 332; Stop 356
agaatatcatccttgaaatccgtgg

SEQ ID NO: 280832 - DNA, 25 bp, Artificial
  probe
  misc_feature (1)..(25): SEQ ID NO: 1022; WAN024EZ9; Start 151; Stop 175
cgtgagtataaacaagtccttcaaa

SEQ ID NO: 280833 - DNA, 25 bp, Artificial
  probe
  misc_feature (1)..(25): SEQ ID NO: 1022; WAN024EZ9; Start 739; Stop 763
atcgttcacttgccaaccaatatca

SEQ ID NO: 280834 - DNA, 25 bp, Artificial
  probe
  misc_feature (1)..(25): SEQ ID NO: 1023; WAN024C6M; Start 98; Stop 122
aagatagatgtgaagaaggcaggaa

SEQ ID NO: 280835 - DNA, 25 bp, Artificial
  probe
  misc_feature (1)..(25): SEQ ID NO: 1023; WAN024C6M; Start 100; Stop 124
gatagatgtgaagaaggcaggaact

SEQ ID NO: 280836 - DNA, 25 bp, Artificial
  probe
  misc_feature (1)..(25): SEQ ID NO: 1023; WAN024C6M; Start 99; Stop 123
agatagatgtgaagaaggcaggaac

SEQ ID NO: 280837 - DNA, 25 bp, Artificial
  probe
  misc_feature (1)..(25): SEQ ID NO: 1023; WAN024C6M; Start 181; Stop 205
aacgataatcaagattggagctgta

SEQ ID NO: 280838 - DNA, 25 bp, Artificial
  probe
  misc_feature (1)..(25): SEQ ID NO: 1023; WAN024C6M; Start 117; Stop 141
caggaactgcttcagacatatcatc

SEQ ID NO: 280839 - DNA, 25 bp, Artificial
  probe
  misc_feature (1)..(25): SEQ ID NO: 1023; WAN024C6M; Start 182; Stop 206
acgataatcaagattggagctgtag

SEQ ID NO: 280840 - DNA, 25 bp, Artificial
  probe
  misc_feature (1)..(25): SEQ ID NO: 1023; WAN024C6M; Start 69; Stop 93
cttgagtgatagagtagctgaatcc

SEQ ID NO: 280841 - DNA, 25 bp, Artificial
  probe
  misc_feature (1)..(25): SEQ ID NO: 1023; WAN024C6M; Start 68; Stop 92
ccttgagtgatagagtagctgaatc

SEQ ID NO: 280842 - DNA, 25 bp, Artificial
  probe
  misc_feature (1)..(25): SEQ ID NO: 1023; WAN024C6M; Start 307; Stop 331
gataccagcagcagactcaacataa

SEQ ID NO: 280843 - DNA, 25 bp, Artificial
  probe
  misc_feature (1)..(25): SEQ ID NO: 1023; WAN024C6M; Start 184; Stop 208
gataatcaagattggagctgtagcc

SEQ ID NO: 280844 - DNA, 25 bp, Artificial
  probe
  misc_feature (1)..(25): SEQ ID NO: 1023; WAN024C6M; Start 96; Stop 120
taaagatagatgtgaagaaggcagg

SEQ ID NO: 280845 - DNA, 25 bp, Artificial
  probe
  misc_feature (1)..(25): SEQ ID NO: 1023; WAN024C6M; Start 36; Stop 60
tcaaagtgtaagtcaagaaaccaac

SEQ ID NO: 280846 - DNA, 25 bp, Artificial
  probe
  misc_feature (1)..(25): SEQ ID NO: 1023; WAN024C6M; Start 35; Stop 59
gtcaaagtgtaagtcaagaaaccaa

SEQ ID NO: 280847 - DNA, 25 bp, Artificial
  probe
  misc_feature (1)..(25): SEQ ID NO: 1023; WAN024C6M; Start 34; Stop 58
agtcaaagtgtaagtcaagaaacca

SEQ ID NO: 280848 - DNA, 25 bp, Artificial
  probe
  misc_feature (1)..(25): SEQ ID NO: 1023; WAN024C6M; Start 167; Stop 191
agcatcataatcccaacgataatca

SEQ ID NO: 280849 - DNA, 25 bp, Artificial
  probe
  misc_feature (1)..(25): SEQ ID NO: 1023; WAN024C6M; Start 168; Stop 192
gcatcataatcccaacgataatcaa

SEQ ID NO: 280850 - DNA, 25 bp, Artificial
  probe
  misc_feature (1)..(25): SEQ ID NO: 1023; WAN024C6M; Start 165; Stop 189
caagcatcataatcccaacgataat

SEQ ID NO: 280851 - DNA, 25 bp, Artificial
  probe
  misc_feature (1)..(25): SEQ ID NO: 1023; WAN024C6M; Start 183; Stop 207
cgataatcaagattggagctgtagc

SEQ ID NO: 280852 - DNA, 25 bp, Artificial
  probe
  misc_feature (1)..(25): SEQ ID NO: 1023; WAN024C6M; Start 166; Stop 190
aagcatcataatcccaacgataatc

SEQ ID NO: 280853 - DNA, 25 bp, Artificial
  probe
  misc_feature (1)..(25): SEQ ID NO: 1023; WAN024C6M; Start 33; Stop 57
tagtcaaagtgtaagtcaagaaacc

SEQ ID NO: 280854 - DNA, 25 bp, Artificial
  probe
  misc_feature (1)..(25): SEQ ID NO: 1023; WAN024C6M; Start 180; Stop 204
caacgataatcaagattggagctgt

SEQ ID NO: 280855 - DNA, 25 bp, Artificial
  probe
  misc_feature (1)..(25): SEQ ID NO: 1023; WAN024C6M; Start 93; Stop 117
ccataaagatagatgtgaagaaggc

SEQ ID NO: 280856 - DNA, 25 bp, Artificial
  probe
  misc_feature (1)..(25): SEQ ID NO: 1023; WAN024C6M; Start 85; Stop 109
gctgaatcccataaagatagatgtg

SEQ ID NO: 280857 - DNA, 25 bp, Artificial
  probe
  misc_feature (1)..(25): SEQ ID NO: 1023; WAN024C6M; Start 101; Stop 125
atagatgtgaagaaggcaggaactg

SEQ ID NO: 280858 - DNA, 25 bp, Artificial
  probe
  misc_feature (1)..(25): SEQ ID NO: 1023; WAN024C6M; Start 164; Stop 188
ccaagcatcataatcccaacgataa

SEQ ID NO: 280859 - DNA, 25 bp, Artificial
  probe
  misc_feature (1)..(25): SEQ ID NO: 1023; WAN024C6M; Start 97; Stop 121
aaagatagatgtgaagaaggcagga

SEQ ID NO: 280860 - DNA, 25 bp, Artificial
  probe
  misc_feature (1)..(25): SEQ ID NO: 1023; WAN024C6M; Start 38; Stop 62
aaagtgtaagtcaagaaaccaactg

SEQ ID NO: 280861 - DNA, 25 bp, Artificial
  probe
  misc_feature (1)..(25): SEQ ID NO: 1023; WAN024C6M; Start 37; Stop 61
caaagtgtaagtcaagaaaccaact

SEQ ID NO: 280862 - DNA, 25 bp, Artificial
  probe
  misc_feature (1)..(25): SEQ ID NO: 1023; WAN024C6M; Start 118; Stop 142
aggaactgcttcagacatatcatcc

SEQ ID NO: 280863 - DNA, 25 bp, Artificial
  probe
  misc_feature (1)..(25): SEQ ID NO: 1023; WAN024C6M; Start 95; Stop 119
ataaagatagatgtgaagaaggcag

SEQ ID NO: 280864 - DNA, 25 bp, Artificial
  probe
  misc_feature (1)..(25): SEQ ID NO: 1023; WAN024C6M; Start 94; Stop 118
cataaagatagatgtgaagaaggca

SEQ ID NO: 280865 - DNA, 25 bp, Artificial
  probe
  misc_feature (1)..(25): SEQ ID NO: 1023; WAN024C6M; Start 92; Stop 116
cccataaagatagatgtgaagaagg

SEQ ID NO: 280866 - DNA, 25 bp, Artificial
  probe
  misc_feature (1)..(25): SEQ ID NO: 1023; WAN024C6M; Start 169; Stop 193
catcataatcccaacgataatcaag

SEQ ID NO: 280867 - DNA, 25 bp, Artificial
  probe
  misc_feature (1)..(25): SEQ ID NO: 1024; WAN024DDE; Start 335; Stop 359
gctatcctgactataagaacttccg

SEQ ID NO: 280868 - DNA, 25 bp, Artificial
  probe
  misc_feature (1)..(25): SEQ ID NO: 1024; WAN024DDE; Start 334; Stop 358
cgctatcctgactataagaacttcc

SEQ ID NO: 280869 - DNA, 25 bp, Artificial
  probe
  misc_feature (1)..(25): SEQ ID NO: 1024; WAN024DDE; Start 336; Stop 360
ctatcctgactataagaacttccgt

SEQ ID NO: 280870 - DNA, 25 bp, Artificial
  probe
  misc_feature (1)..(25): SEQ ID NO: 1024; WAN024DDE; Start 339; Stop 363
tcctgactataagaacttccgtatt

SEQ ID NO: 280871 - DNA, 25 bp, Artificial
  probe
  misc_feature (1)..(25): SEQ ID NO: 1024; WAN024DDE; Start 338; Stop 362
atcctgactataagaacttccgtat

SEQ ID NO: 280872 - DNA, 25 bp, Artificial
  probe
  misc_feature (1)..(25): SEQ ID NO: 1024; WAN024DDE; Start 337; Stop 361
tatcctgactataagaacttccgta

SEQ ID NO: 280873 - DNA, 25 bp, Artificial
  probe
  misc_feature (1)..(25): SEQ ID NO: 1024; WAN024DDE; Start 70; Stop 94
aagatgtatgttagtcagccgagtc

SEQ ID NO: 280874 - DNA, 25 bp, Artificial
  probe
  misc_feature (1)..(25): SEQ ID NO: 1024; WAN024DDE; Start 785; Stop 809
gtctcaaggataacctagataaccg

SEQ ID NO: 280875 - DNA, 25 bp, Artificial
  probe
  misc_feature (1)..(25): SEQ ID NO: 1024; WAN024DDE; Start 784; Stop 808
cgtctcaaggataacctagataacc

SEQ ID NO: 280876 - DNA, 25 bp, Artificial
  probe
  misc_feature (1)..(25): SEQ ID NO: 1024; WAN024DDE; Start 783; Stop 807
tcgtctcaaggataacctagataac

SEQ ID NO: 280877 - DNA, 25 bp, Artificial
  probe
  misc_feature (1)..(25): SEQ ID NO: 1024; WAN024DDE; Start 1; Stop 25
atgaacattcaacaattacgctatg

SEQ ID NO: 280878 - DNA, 25 bp, Artificial
  probe
  misc_feature (1)..(25): SEQ ID NO: 1024; WAN024DDE; Start 788; Stop 812
tcaaggataacctagataaccgcat

SEQ ID NO: 280879 - DNA, 25 bp, Artificial
  probe
  misc_feature (1)..(25): SEQ ID NO: 1024; WAN024DDE; Start 772; Stop 796
attacagttattcgtctcaaggata

SEQ ID NO: 280880 - DNA, 25 bp, Artificial
  probe
  misc_feature (1)..(25): SEQ ID NO: 1024; WAN024DDE; Start 773; Stop 797
ttacagttattcgtctcaaggataa

SEQ ID NO: 280881 - DNA, 25 bp, Artificial
  probe
  misc_feature (1)..(25): SEQ ID NO: 1024; WAN024DDE; Start 786; Stop 810
tctcaaggataacctagataaccgc

SEQ ID NO: 280882 - DNA, 25 bp, Artificial
  probe
  misc_feature (1)..(25): SEQ ID NO: 1024; WAN024DDE; Start 782; Stop 806
ttcgtctcaaggataacctagataa

SEQ ID NO: 280883 - DNA, 25 bp, Artificial
  probe
  misc_feature (1)..(25): SEQ ID NO: 1024; WAN024DDE; Start 779; Stop 803
ttattcgtctcaaggataacctaga

SEQ ID NO: 280884 - DNA, 25 bp, Artificial
  probe
  misc_feature (1)..(25): SEQ ID NO: 1024; WAN024DDE; Start 94; Stop 118
ctgtctatttctgttcgtgatttgg

SEQ ID NO: 280885 - DNA, 25 bp, Artificial
  probe
  misc_feature (1)..(25): SEQ ID NO: 1024; WAN024DDE; Start 91; Stop 115
agtctgtctatttctgttcgtgatt

SEQ ID NO: 280886 - DNA, 25 bp, Artificial
  probe
  misc_feature (1)..(25): SEQ ID NO: 1024; WAN024DDE; Start 90; Stop 114
gagtctgtctatttctgttcgtgat

SEQ ID NO: 280887 - DNA, 25 bp, Artificial
  probe
  misc_feature (1)..(25): SEQ ID NO: 1024; WAN024DDE; Start 95; Stop 119
tgtctatttctgttcgtgatttgga

SEQ ID NO: 280888 - DNA, 25 bp, Artificial
  probe
  misc_feature (1)..(25): SEQ ID NO: 1024; WAN024DDE; Start 93; Stop 117
tctgtctatttctgttcgtgatttg

SEQ ID NO: 280889 - DNA, 25 bp, Artificial
  probe
  misc_feature (1)..(25): SEQ ID NO: 1024; WAN024DDE; Start 92; Stop 116
gtctgtctatttctgttcgtgattt

SEQ ID NO: 280890 - DNA, 25 bp, Artificial
  probe
  misc_feature (1)..(25): SEQ ID NO: 1024; WAN024DDE; Start 787; Stop 811
ctcaaggataacctagataaccgca

SEQ ID NO: 280891 - DNA, 25 bp, Artificial
  probe
  misc_feature (1)..(25): SEQ ID NO: 1024; WAN024DDE; Start 781; Stop 805
attcgtctcaaggataacctagata

SEQ ID NO: 280892 - DNA, 25 bp, Artificial
  probe
  misc_feature (1)..(25): SEQ ID NO: 1024; WAN024DDE; Start 780; Stop 804
tattcgtctcaaggataacctagat

SEQ ID NO: 280893 - DNA, 25 bp, Artificial
  probe
  misc_feature (1)..(25): SEQ ID NO: 1024; WAN024DDE; Start 789; Stop 813
caaggataacctagataaccgcatg

SEQ ID NO: 280894 - DNA, 25 bp, Artificial
  probe
  misc_feature (1)..(25): SEQ ID NO: 1024; WAN024DDE; Start 799; Stop 823
ctagataaccgcatggtctatgtta

SEQ ID NO: 280895 - DNA, 25 bp, Artificial
  probe
  misc_feature (1)..(25): SEQ ID NO: 1024; WAN024DDE; Start 96; Stop 120
gtctatttctgttcgtgatttggaa

SEQ ID NO: 280896 - DNA, 25 bp, Artificial
  probe
  misc_feature (1)..(25): SEQ ID NO: 1024; WAN024DDE; Start 71; Stop 95
agatgtatgttagtcagccgagtct

SEQ ID NO: 280897 - DNA, 25 bp, Artificial
  probe
  misc_feature (1)..(25): SEQ ID NO: 1024; WAN024DDE; Start 800; Stop 824
tagataaccgcatggtctatgttaa

SEQ ID NO: 280898 - DNA, 25 bp, Artificial
  probe
  misc_feature (1)..(25): SEQ ID NO: 1024; WAN024DDE; Start 795; Stop 819
taacctagataaccgcatggtctat

SEQ ID NO: 280899 - DNA, 25 bp, Artificial
  probe
  misc_feature (1)..(25): SEQ ID NO: 1024; WAN024DDE; Start 794; Stop 818
ataacctagataaccgcatggtcta

SEQ ID NO: 280900 - DNA, 25 bp, Artificial
  probe
  misc_feature (1)..(25): SEQ ID NO: 1025; WAN024CXY; Start 501; Stop 525
aagtagagagcagatattggaagaa

SEQ ID NO: 280901 - DNA, 25 bp, Artificial
  probe
  misc_feature (1)..(25): SEQ ID NO: 1025; WAN024CXY; Start 81; Stop 105
cattatggctaaggatggacaagag

SEQ ID NO: 280902 - DNA, 25 bp, Artificial
  probe
  misc_feature (1)..(25): SEQ ID NO: 1025; WAN024CXY; Start 80; Stop 104
tcattatggctaaggatggacaaga

SEQ ID NO: 280903 - DNA, 25 bp, Artificial
  probe
  misc_feature (1)..(25): SEQ ID NO: 1025; WAN024CXY; Start 568; Stop 592
gatgtctatattcgtactcttcgca

SEQ ID NO: 280904 - DNA, 25 bp, Artificial
  probe
  misc_feature (1)..(25): SEQ ID NO: 1025; WAN024CXY; Start 567; Stop 591
tgatgtctatattcgtactcttcgc

SEQ ID NO: 280905 - DNA, 25 bp, Artificial
  probe
  misc_feature (1)..(25): SEQ ID NO: 1025; WAN024CXY; Start 561; Stop 585
ggtcgttgatgtctatattcgtact

SEQ ID NO: 280906 - DNA, 25 bp, Artificial
  probe
  misc_feature (1)..(25): SEQ ID NO: 1025; WAN024CXY; Start 569; Stop 593
atgtctatattcgtactcttcgcaa

SEQ ID NO: 280907 - DNA, 25 bp, Artificial
  probe
  misc_feature (1)..(25): SEQ ID NO: 1025; WAN024CXY; Start 500; Stop 524
taagtagagagcagatattggaaga

SEQ ID NO: 280908 - DNA, 25 bp, Artificial
  probe
  misc_feature (1)..(25): SEQ ID NO: 1025; WAN024CXY; Start 82; Stop 106
attatggctaaggatggacaagagg

SEQ ID NO: 280909 - DNA, 25 bp, Artificial
  probe
  misc_feature (1)..(25): SEQ ID NO: 1025; WAN024CXY; Start 211; Stop 235
gatattcctgtcatcgtcttgagtg

SEQ ID NO: 280910 - DNA, 25 bp, Artificial
  probe
  misc_feature (1)..(25): SEQ ID NO: 1025; WAN024CXY; Start 563; Stop 587
tcgttgatgtctatattcgtactct

SEQ ID NO: 280911 - DNA, 25 bp, Artificial
  probe
  misc_feature (1)..(25): SEQ ID NO: 1025; WAN024CXY; Start 562; Stop 586
gtcgttgatgtctatattcgtactc

SEQ ID NO: 280912 - DNA, 25 bp, Artificial
  probe
  misc_feature (1)..(25): SEQ ID NO: 1025; WAN024CXY; Start 74; Stop 98
atcatgtcattatggctaaggatgg

SEQ ID NO: 280913 - DNA, 25 bp, Artificial
  probe
  misc_feature (1)..(25): SEQ ID NO: 1025; WAN024CXY; Start 70; Stop 94
ggttatcatgtcattatggctaagg

SEQ ID NO: 280914 - DNA, 25 bp, Artificial
  probe
  misc_feature (1)..(25): SEQ ID NO: 1025; WAN024CXY; Start 564; Stop 588
cgttgatgtctatattcgtactctt

SEQ ID NO: 280915 - DNA, 25 bp, Artificial
  probe
  misc_feature (1)..(25): SEQ ID NO: 1025; WAN024CXY; Start 499; Stop 523
ttaagtagagagcagatattggaag

SEQ ID NO: 280916 - DNA, 25 bp, Artificial
  probe
  misc_feature (1)..(25): SEQ ID NO: 1025; WAN024CXY; Start 79; Stop 103
gtcattatggctaaggatggacaag

SEQ ID NO: 280917 - DNA, 25 bp, Artificial
  probe
  misc_feature (1)..(25): SEQ ID NO: 1025; WAN024CXY; Start 566; Stop 590
ttgatgtctatattcgtactcttcg

SEQ ID NO: 280918 - DNA, 25 bp, Artificial
  probe
  misc_feature (1)..(25): SEQ ID NO: 1025; WAN024CXY; Start 75; Stop 99
tcatgtcattatggctaaggatgga

SEQ ID NO: 280919 - DNA, 25 bp, Artificial
  probe
  misc_feature (1)..(25): SEQ ID NO: 1025; WAN024CXY; Start 71; Stop 95
gttatcatgtcattatggctaagga

SEQ ID NO: 280920 - DNA, 25 bp, Artificial
  probe
  misc_feature (1)..(25): SEQ ID NO: 1025; WAN024CXY; Start 73; Stop 97
tatcatgtcattatggctaaggatg

SEQ ID NO: 280921 - DNA, 25 bp, Artificial
  probe
  misc_feature (1)..(25): SEQ ID NO: 1025; WAN024CXY; Start 22; Stop 46
gacgaggaaatgattagagaaggaa

SEQ ID NO: 280922 - DNA, 25 bp, Artificial
  probe
  misc_feature (1)..(25): SEQ ID NO: 1025; WAN024CXY; Start 20; Stop 44
atgacgaggaaatgattagagaagg

SEQ ID NO: 280923 - DNA, 25 bp, Artificial
  probe
  misc_feature (1)..(25): SEQ ID NO: 1025; WAN024CXY; Start 17; Stop 41
cagatgacgaggaaatgattagaga

SEQ ID NO: 280924 - DNA, 25 bp, Artificial
  probe
  misc_feature (1)..(25): SEQ ID NO: 1025; WAN024CXY; Start 23; Stop 47
acgaggaaatgattagagaaggaat

SEQ ID NO: 280925 - DNA, 25 bp, Artificial
  probe
  misc_feature (1)..(25): SEQ ID NO: 1025; WAN024CXY; Start 32; Stop 56
tgattagagaaggaattgcagcatt

SEQ ID NO: 280926 - DNA, 25 bp, Artificial
  probe
  misc_feature (1)..(25): SEQ ID NO: 1025; WAN024CXY; Start 30; Stop 54
aatgattagagaaggaattgcagca

SEQ ID NO: 280927 - DNA, 25 bp, Artificial
  probe
  misc_feature (1)..(25): SEQ ID NO: 1025; WAN024CXY; Start 18; Stop 42
agatgacgaggaaatgattagagaa

SEQ ID NO: 280928 - DNA, 25 bp, Artificial
  probe
  misc_feature (1)..(25): SEQ ID NO: 1025; WAN024CXY; Start 83; Stop 107
ttatggctaaggatggacaagaggt

SEQ ID NO: 280929 - DNA, 25 bp, Artificial
  probe
  misc_feature (1)..(25): SEQ ID NO: 1025; WAN024CXY; Start 76; Stop 100
catgtcattatggctaaggatggac

SEQ ID NO: 280930 - DNA, 25 bp, Artificial
  probe
  misc_feature (1)..(25): SEQ ID NO: 1025; WAN024CXY; Start 31; Stop 55
atgattagagaaggaattgcagcat

SEQ ID NO: 280931 - DNA, 25 bp, Artificial
  probe
  misc_feature (1)..(25): SEQ ID NO: 1025; WAN024CXY; Start 19; Stop 43
gatgacgaggaaatgattagagaag

SEQ ID NO: 280932 - DNA, 25 bp, Artificial
  probe
  misc_feature (1)..(25): SEQ ID NO: 1025; WAN024CXY; Start 559; Stop 583
agggtcgttgatgtctatattcgta

SEQ ID NO: 280933 - DNA, 25 bp, Artificial
  probe
  misc_feature (1)..(25): SEQ ID NO: 1026; WAN024C8K; Start 75; Stop 99
ttactgtctcaggcttatcatcttc

SEQ ID NO: 280934 - DNA, 25 bp, Artificial
  probe
  misc_feature (1)..(25): SEQ ID NO: 1026; WAN024C8K; Start 76; Stop 100
tactgtctcaggcttatcatcttca

SEQ ID NO: 280935 - DNA, 25 bp, Artificial
  probe
  misc_feature (1)..(25): SEQ ID NO: 1026; WAN024C8K; Start 37; Stop 61
tggttctccttgagcaatattaaca

SEQ ID NO: 280936 - DNA, 25 bp, Artificial
  probe
  misc_feature (1)..(25): SEQ ID NO: 1026; WAN024C8K; Start 41; Stop 65
tctccttgagcaatattaacatcca

SEQ ID NO: 280937 - DNA, 25 bp, Artificial
  probe
  misc_feature (1)..(25): SEQ ID NO: 1026; WAN024C8K; Start 36; Stop 60
ttggttctccttgagcaatattaac

SEQ ID NO: 280938 - DNA, 25 bp, Artificial
  probe
  misc_feature (1)..(25): SEQ ID NO: 1026; WAN024C8K; Start 98; Stop 122
tcacgttggtagtaatcttcttctt

SEQ ID NO: 280939 - DNA, 25 bp, Artificial
  probe
  misc_feature (1)..(25): SEQ ID NO: 1026; WAN024C8K; Start 97; Stop 121
ttcacgttggtagtaatcttcttct

SEQ ID NO: 280940 - DNA, 25 bp, Artificial
  probe
  misc_feature (1)..(25): SEQ ID NO: 1026; WAN024C8K; Start 95; Stop 119
tcttcacgttggtagtaatcttctt

SEQ ID NO: 280941 - DNA, 25 bp, Artificial
  probe
  misc_feature (1)..(25): SEQ ID NO: 1026; WAN024C8K; Start 92; Stop 116
tcatcttcacgttggtagtaatctt

SEQ ID NO: 280942 - DNA, 25 bp, Artificial
  probe
  misc_feature (1)..(25): SEQ ID NO: 1026; WAN024C8K; Start 23; Stop 47
tagtgagcaatgattggttctcctt

SEQ ID NO: 280943 - DNA, 25 bp, Artificial
  probe
  misc_feature (1)..(25): SEQ ID NO: 1026; WAN024C8K; Start 91; Stop 115
atcatcttcacgttggtagtaatct

SEQ ID NO: 280944 - DNA, 25 bp, Artificial
  probe
  misc_feature (1)..(25): SEQ ID NO: 1026; WAN024C8K; Start 87; Stop 111
gcttatcatcttcacgttggtagta

SEQ ID NO: 280945 - DNA, 25 bp, Artificial
  probe
  misc_feature (1)..(25): SEQ ID NO: 1026; WAN024C8K; Start 42; Stop 66
ctccttgagcaatattaacatccaa

SEQ ID NO: 280946 - DNA, 25 bp, Artificial
  probe
  misc_feature (1)..(25): SEQ ID NO: 1026; WAN024C8K; Start 38; Stop 62
ggttctccttgagcaatattaacat

SEQ ID NO: 280947 - DNA, 25 bp, Artificial
  probe
  misc_feature (1)..(25): SEQ ID NO: 1026; WAN024C8K; Start 96; Stop 120
cttcacgttggtagtaatcttcttc

SEQ ID NO: 280948 - DNA, 25 bp, Artificial
  probe
  misc_feature (1)..(25): SEQ ID NO: 1026; WAN024C8K; Start 94; Stop 118
atcttcacgttggtagtaatcttct

SEQ ID NO: 280949 - DNA, 25 bp, Artificial
  probe
  misc_feature (1)..(25): SEQ ID NO: 1026; WAN024C8K; Start 93; Stop 117
catcttcacgttggtagtaatcttc

SEQ ID NO: 280950 - DNA, 25 bp, Artificial
  probe
  misc_feature (1)..(25): SEQ ID NO: 1026; WAN024C8K; Start 40; Stop 64
ttctccttgagcaatattaacatcc

SEQ ID NO: 280951 - DNA, 25 bp, Artificial
  probe
  misc_feature (1)..(25): SEQ ID NO: 1026; WAN024C8K; Start 115; Stop 139
ttcttctttatagtcaactggtggg

SEQ ID NO: 280952 - DNA, 25 bp, Artificial
  probe
  misc_feature (1)..(25): SEQ ID NO: 1026; WAN024C8K; Start 77; Stop 101
actgtctcaggcttatcatcttcac

SEQ ID NO: 280953 - DNA, 25 bp, Artificial
  probe
  misc_feature (1)..(25): SEQ ID NO: 1026; WAN024C8K; Start 32; Stop 56
atgattggttctccttgagcaatat

SEQ ID NO: 280954 - DNA, 25 bp, Artificial
  probe
  misc_feature (1)..(25): SEQ ID NO: 1026; WAN024C8K; Start 114; Stop 138
cttcttctttatagtcaactggtgg

SEQ ID NO: 280955 - DNA, 25 bp, Artificial
  probe
  misc_feature (1)..(25): SEQ ID NO: 1026; WAN024C8K; Start 31; Stop 55
aatgattggttctccttgagcaata

SEQ ID NO: 280956 - DNA, 25 bp, Artificial
  probe
  misc_feature (1)..(25): SEQ ID NO: 1026; WAN024C8K; Start 117; Stop 141
cttctttatagtcaactggtgggtt

SEQ ID NO: 280957 - DNA, 25 bp, Artificial
  probe
  misc_feature (1)..(25): SEQ ID NO: 1026; WAN024C8K; Start 116; Stop 140
tcttctttatagtcaactggtgggt

SEQ ID NO: 280958 - DNA, 25 bp, Artificial
  probe
  misc_feature (1)..(25): SEQ ID NO: 1026; WAN024C8K; Start 122; Stop 146
ttatagtcaactggtgggttaaaga

SEQ ID NO: 280959 - DNA, 25 bp, Artificial
  probe
  misc_feature (1)..(25): SEQ ID NO: 1026; WAN024C8K; Start 119; Stop 143
tctttatagtcaactggtgggttaa

SEQ ID NO: 280960 - DNA, 25 bp, Artificial
  probe
  misc_feature (1)..(25): SEQ ID NO: 1026; WAN024C8K; Start 118; Stop 142
ttctttatagtcaactggtgggtta

SEQ ID NO: 280961 - DNA, 25 bp, Artificial
  probe
  misc_feature (1)..(25): SEQ ID NO: 1026; WAN024C8K; Start 88; Stop 112
cttatcatcttcacgttggtagtaa

SEQ ID NO: 280962 - DNA, 25 bp, Artificial
  probe
  misc_feature (1)..(25): SEQ ID NO: 1026; WAN024C8K; Start 22; Stop 46
gtagtgagcaatgattggttctcct

SEQ ID NO: 280963 - DNA, 25 bp, Artificial
  probe
  misc_feature (1)..(25): SEQ ID NO: 1026; WAN024C8K; Start 90; Stop 114
tatcatcttcacgttggtagtaatc

SEQ ID NO: 280964 - DNA, 25 bp, Artificial
  probe
  misc_feature (1)..(25): SEQ ID NO: 1026; WAN024C8K; Start 39; Stop 63
gttctccttgagcaatattaacatc

SEQ ID NO: 280965 - DNA, 25 bp, Artificial
  probe
  misc_feature (1)..(25): SEQ ID NO: 1026; WAN024C8K; Start 139; Stop 163
gttaaagaccttgtggaaagtttct

SEQ ID NO: 280966 - DNA, 25 bp, Artificial
  probe
  misc_feature (1)..(25): SEQ ID NO: 1027; WAN024CEP; Start 870; Stop 894
aatcagcagtagcaagtccattatt

SEQ ID NO: 280967 - DNA, 25 bp, Artificial
  probe
  misc_feature (1)..(25): SEQ ID NO: 1027; WAN024CEP; Start 869; Stop 893
taatcagcagtagcaagtccattat

SEQ ID NO: 280968 - DNA, 25 bp, Artificial
  probe
  misc_feature (1)..(25): SEQ ID NO: 1027; WAN024CEP; Start 868; Stop 892
ttaatcagcagtagcaagtccatta

SEQ ID NO: 280969 - DNA, 25 bp, Artificial
  probe
  misc_feature (1)..(25): SEQ ID NO: 1027; WAN024CEP; Start 874; Stop 898
agcagtagcaagtccattattgata

SEQ ID NO: 280970 - DNA, 25 bp, Artificial
  probe
  misc_feature (1)..(25): SEQ ID NO: 1027; WAN024CEP; Start 875; Stop 899
gcagtagcaagtccattattgataa

SEQ ID NO: 280971 - DNA, 25 bp, Artificial
  probe
  misc_feature (1)..(25): SEQ ID NO: 1027; WAN024CEP; Start 873; Stop 897
cagcagtagcaagtccattattgat

SEQ ID NO: 280972 - DNA, 25 bp, Artificial
  probe
  misc_feature (1)..(25): SEQ ID NO: 1027; WAN024CEP; Start 871; Stop 895
atcagcagtagcaagtccattattg

SEQ ID NO: 280973 - DNA, 25 bp, Artificial
  probe
  misc_feature (1)..(25): SEQ ID NO: 1027; WAN024CEP; Start 872; Stop 896
tcagcagtagcaagtccattattga

SEQ ID NO: 280974 - DNA, 25 bp, Artificial
  probe
  misc_feature (1)..(25): SEQ ID NO: 1027; WAN024CEP; Start 740; Stop 764
tatcctgtatggtcgctggtatctt

SEQ ID NO: 280975 - DNA, 25 bp, Artificial
  probe
  misc_feature (1)..(25): SEQ ID NO: 1027; WAN024CEP; Start 737; Stop 761
aactatcctgtatggtcgctggtat

SEQ ID NO: 280976 - DNA, 25 bp, Artificial
  probe
  misc_feature (1)..(25): SEQ ID NO: 1027; WAN024CEP; Start 866; Stop 890
atttaatcagcagtagcaagtccat

SEQ ID NO: 280977 - DNA, 25 bp, Artificial
  probe
  misc_feature (1)..(25): SEQ ID NO: 1027; WAN024CEP; Start 300; Stop 324
caaccgtaaccattcagatttctta

SEQ ID NO: 280978 - DNA, 25 bp, Artificial
  probe
  misc_feature (1)..(25): SEQ ID NO: 1027; WAN024CEP; Start 1355; Stop 1379
caaaccaaatcatttcagaaggaga

SEQ ID NO: 280979 - DNA, 25 bp, Artificial
  probe
  misc_feature (1)..(25): SEQ ID NO: 1027; WAN024CEP; Start 1354; Stop 1378
tcaaaccaaatcatttcagaaggag

SEQ ID NO: 280980 - DNA, 25 bp, Artificial
  probe
  misc_feature (1)..(25): SEQ ID NO: 1027; WAN024CEP; Start 1348; Stop 1372
gctcaatcaaaccaaatcatttcag

SEQ ID NO: 280981 - DNA, 25 bp, Artificial
  probe
  misc_feature (1)..(25): SEQ ID NO: 1027; WAN024CEP; Start 867; Stop 891
tttaatcagcagtagcaagtccatt

SEQ ID NO: 280982 - DNA, 25 bp, Artificial
  probe
  misc_feature (1)..(25): SEQ ID NO: 1027; WAN024CEP; Start 299; Stop 323
acaaccgtaaccattcagatttctt

SEQ ID NO: 280983 - DNA, 25 bp, Artificial
  probe
  misc_feature (1)..(25): SEQ ID NO: 1027; WAN024CEP; Start 437; Stop 461
tagaatggcgattagcattagtctt

SEQ ID NO: 280984 - DNA, 25 bp, Artificial
  probe
  misc_feature (1)..(25): SEQ ID NO: 1027; WAN024CEP; Start 865; Stop 889
aatttaatcagcagtagcaagtcca

SEQ ID NO: 280985 - DNA, 25 bp, Artificial
  probe
  misc_feature (1)..(25): SEQ ID NO: 1027; WAN024CEP; Start 739; Stop 763
ctatcctgtatggtcgctggtatct

SEQ ID NO: 280986 - DNA, 25 bp, Artificial
  probe
  misc_feature (1)..(25): SEQ ID NO: 1027; WAN024CEP; Start 436; Stop 460
atagaatggcgattagcattagtct

SEQ ID NO: 280987 - DNA, 25 bp, Artificial
  probe
  misc_feature (1)..(25): SEQ ID NO: 1027; WAN024CEP; Start 1353; Stop 1377
atcaaaccaaatcatttcagaagga

SEQ ID NO: 280988 - DNA, 25 bp, Artificial
  probe
  misc_feature (1)..(25): SEQ ID NO: 1027; WAN024CEP; Start 1433; Stop 1457
tatttgacgaacctacaagtaacct

SEQ ID NO: 280989 - DNA, 25 bp, Artificial
  probe
  misc_feature (1)..(25): SEQ ID NO: 1027; WAN024CEP; Start 1434; Stop 1458
atttgacgaacctacaagtaacctt

SEQ ID NO: 280990 - DNA, 25 bp, Artificial
  probe
  misc_feature (1)..(25): SEQ ID NO: 1027; WAN024CEP; Start 298; Stop 322
gacaaccgtaaccattcagatttct

SEQ ID NO: 280991 - DNA, 25 bp, Artificial
  probe
  misc_feature (1)..(25): SEQ ID NO: 1027; WAN024CEP; Start 302; Stop 326
accgtaaccattcagatttcttaaa

SEQ ID NO: 280992 - DNA, 25 bp, Artificial
  probe
  misc_feature (1)..(25): SEQ ID NO: 1027; WAN024CEP; Start 301; Stop 325
aaccgtaaccattcagatttcttaa

SEQ ID NO: 280993 - DNA, 25 bp, Artificial
  probe
  misc_feature (1)..(25): SEQ ID NO: 1027; WAN024CEP; Start 1356; Stop 1380
aaaccaaatcatttcagaaggagaa

SEQ ID NO: 280994 - DNA, 25 bp, Artificial
  probe
  misc_feature (1)..(25): SEQ ID NO: 1027; WAN024CEP; Start 728; Stop 752
ttggctctcaactatcctgtatggt

SEQ ID NO: 280995 - DNA, 25 bp, Artificial
  probe
  misc_feature (1)..(25): SEQ ID NO: 1027; WAN024CEP; Start 648; Stop 672
cagtttagaatttgaagagtccaga

SEQ ID NO: 280996 - DNA, 25 bp, Artificial
  probe
  misc_feature (1)..(25): SEQ ID NO: 1027; WAN024CEP; Start 738; Stop 762
actatcctgtatggtcgctggtatc

SEQ ID NO: 280997 - DNA, 25 bp, Artificial
  probe
  misc_feature (1)..(25): SEQ ID NO: 1027; WAN024CEP; Start 1270; Stop 1294
ttggctagaaaccttcatttaactg

SEQ ID NO: 280998 - DNA, 25 bp, Artificial
  probe
  misc_feature (1)..(25): SEQ ID NO: 1027; WAN024CEP; Start 1264; Stop 1288
atcaaattggctagaaaccttcatt

SEQ ID NO: 280999 - DNA, 25 bp, Artificial
  probe
  misc_feature (1)..(25): SEQ ID NO: 1028; WAN024DGT; Start 413; Stop 437
tgctagttgagaatgatacagagaa

SEQ ID NO: 281000 - DNA, 25 bp, Artificial
  probe
  misc_feature (1)..(25): SEQ ID NO: 1028; WAN024DGT; Start 412; Stop 436
ttgctagttgagaatgatacagaga

SEQ ID NO: 281001 - DNA, 25 bp, Artificial
  probe
  misc_feature (1)..(25): SEQ ID NO: 1028; WAN024DGT; Start 411; Stop 435
cttgctagttgagaatgatacagag

SEQ ID NO: 281002 - DNA, 25 bp, Artificial
  probe
  misc_feature (1)..(25): SEQ ID NO: 1028; WAN024DGT; Start 408; Stop 432
tgacttgctagttgagaatgataca

SEQ ID NO: 281003 - DNA, 25 bp, Artificial
  probe
  misc_feature (1)..(25): SEQ ID NO: 1028; WAN024DGT; Start 406; Stop 430
ggtgacttgctagttgagaatgata

SEQ ID NO: 281004 - DNA, 25 bp, Artificial
  probe
  misc_feature (1)..(25): SEQ ID NO: 1028; WAN024DGT; Start 410; Stop 434
acttgctagttgagaatgatacaga

SEQ ID NO: 281005 - DNA, 25 bp, Artificial
  probe
  misc_feature (1)..(25): SEQ ID NO: 1028; WAN024DGT; Start 407; Stop 431
gtgacttgctagttgagaatgatac

SEQ ID NO: 281006 - DNA, 25 bp, Artificial
  probe
  misc_feature (1)..(25): SEQ ID NO: 1028; WAN024DGT; Start 409; Stop 433
gacttgctagttgagaatgatacag

SEQ ID NO: 281007 - DNA, 25 bp, Artificial
  probe
  misc_feature (1)..(25): SEQ ID NO: 1028; WAN024DGT; Start 405; Stop 429
tggtgacttgctagttgagaatgat

SEQ ID NO: 281008 - DNA, 25 bp, Artificial
  probe
  misc_feature (1)..(25): SEQ ID NO: 1028; WAN024DGT; Start 477; Stop 501
ttatggtcatgttcacaagcagttg

SEQ ID NO: 281009 - DNA, 25 bp, Artificial
  probe
  misc_feature (1)..(25): SEQ ID NO: 1028; WAN024DGT; Start 404; Stop 428
gtggtgacttgctagttgagaatga

SEQ ID NO: 281010 - DNA, 25 bp, Artificial
  probe
  misc_feature (1)..(25): SEQ ID NO: 1028; WAN024DGT; Start 399; Stop 423
ctatggtggtgacttgctagttgag

SEQ ID NO: 281011 - DNA, 25 bp, Artificial
  probe
  misc_feature (1)..(25): SEQ ID NO: 1028; WAN024DGT; Start 794; Stop 818
ggtatgtagaggatgtgaagaattt

SEQ ID NO: 281012 - DNA, 25 bp, Artificial
  probe
  misc_feature (1)..(25): SEQ ID NO: 1028; WAN024DGT; Start 514; Stop 538
agtcaagggcaacaaatcatcaatc

SEQ ID NO: 281013 - DNA, 25 bp, Artificial
  probe
  misc_feature (1)..(25): SEQ ID NO: 1028; WAN024DGT; Start 414; Stop 438
gctagttgagaatgatacagagaaa

SEQ ID NO: 281014 - DNA, 25 bp, Artificial
  probe
  misc_feature (1)..(25): SEQ ID NO: 1028; WAN024DGT; Start 400; Stop 424
tatggtggtgacttgctagttgaga

SEQ ID NO: 281015 - DNA, 25 bp, Artificial
  probe
  misc_feature (1)..(25): SEQ ID NO: 1028; WAN024DGT; Start 476; Stop 500
tttatggtcatgttcacaagcagtt

SEQ ID NO: 281016 - DNA, 25 bp, Artificial
  probe
  misc_feature (1)..(25): SEQ ID NO: 1028; WAN024DGT; Start 22; Stop 46
ttatcagatgttcatggcaatgcga

SEQ ID NO: 281017 - DNA, 25 bp, Artificial
  probe
  misc_feature (1)..(25): SEQ ID NO: 1028; WAN024DGT; Start 474; Stop 498
agtttatggtcatgttcacaagcag

SEQ ID NO: 281018 - DNA, 25 bp, Artificial
  probe
  misc_feature (1)..(25): SEQ ID NO: 1028; WAN024DGT; Start 433; Stop 457
gagaaatttgaccaactgctagatg

SEQ ID NO: 281019 - DNA, 25 bp, Artificial
  probe
  misc_feature (1)..(25): SEQ ID NO: 1028; WAN024DGT; Start 432; Stop 456
agagaaatttgaccaactgctagat

SEQ ID NO: 281020 - DNA, 25 bp, Artificial
  probe
  misc_feature (1)..(25): SEQ ID NO: 1028; WAN024DGT; Start 475; Stop 499
gtttatggtcatgttcacaagcagt

SEQ ID NO: 281021 - DNA, 25 bp, Artificial
  probe
  misc_feature (1)..(25): SEQ ID NO: 1028; WAN024DGT; Start 473; Stop 497
cagtttatggtcatgttcacaagca

SEQ ID NO: 281022 - DNA, 25 bp, Artificial
  probe
  misc_feature (1)..(25): SEQ ID NO: 1028; WAN024DGT; Start 403; Stop 427
ggtggtgacttgctagttgagaatg

SEQ ID NO: 281023 - DNA, 25 bp, Artificial
  probe
  misc_feature (1)..(25): SEQ ID NO: 1028; WAN024DGT; Start 517; Stop 541
caagggcaacaaatcatcaatccag

SEQ ID NO: 281024 - DNA, 25 bp, Artificial
  probe
  misc_feature (1)..(25): SEQ ID NO: 1028; WAN024DGT; Start 515; Stop 539
gtcaagggcaacaaatcatcaatcc

SEQ ID NO: 281025 - DNA, 25 bp, Artificial
  probe
  misc_feature (1)..(25): SEQ ID NO: 1028; WAN024DGT; Start 516; Stop 540
tcaagggcaacaaatcatcaatcca

SEQ ID NO: 281026 - DNA, 25 bp, Artificial
  probe
  misc_feature (1)..(25): SEQ ID NO: 1028; WAN024DGT; Start 425; Stop 449
atgatacagagaaatttgaccaact

SEQ ID NO: 281027 - DNA, 25 bp, Artificial
  probe
  misc_feature (1)..(25): SEQ ID NO: 1028; WAN024DGT; Start 23; Stop 47
tatcagatgttcatggcaatgcgac

SEQ ID NO: 281028 - DNA, 25 bp, Artificial
  probe
  misc_feature (1)..(25): SEQ ID NO: 1028; WAN024DGT; Start 402; Stop 426
tggtggtgacttgctagttgagaat

SEQ ID NO: 281029 - DNA, 25 bp, Artificial
  probe
  misc_feature (1)..(25): SEQ ID NO: 1028; WAN024DGT; Start 401; Stop 425
atggtggtgacttgctagttgagaa

SEQ ID NO: 281030 - DNA, 25 bp, Artificial
  probe
  misc_feature (1)..(25): SEQ ID NO: 1028; WAN024DGT; Start 471; Stop 495
ggcagtttatggtcatgttcacaag

SEQ ID NO: 281031 - DNA, 25 bp, Artificial
  probe
  misc_feature (1)..(25): SEQ ID NO: 1028; WAN024DGT; Start 21; Stop 45
tttatcagatgttcatggcaatgcg

SEQ ID NO: 281032 - DNA, 25 bp, Artificial
  probe
  misc_feature (1)..(25): SEQ ID NO: 1029; WAN024GFV; Start 135; Stop 159
aataccgataacgataccaaggatg

SEQ ID NO: 281033 - DNA, 25 bp, Artificial
  probe
  misc_feature (1)..(25): SEQ ID NO: 1029; WAN024GFV; Start 136; Stop 160
ataccgataacgataccaaggatga

SEQ ID NO: 281034 - DNA, 25 bp, Artificial
  probe
  misc_feature (1)..(25): SEQ ID NO: 1029; WAN024GFV; Start 134; Stop 158
taataccgataacgataccaaggat

SEQ ID NO: 281035 - DNA, 25 bp, Artificial
  probe
  misc_feature (1)..(25): SEQ ID NO: 1029; WAN024GFV; Start 133; Stop 157
ataataccgataacgataccaagga

SEQ ID NO: 281036 - DNA, 25 bp, Artificial
  probe
  misc_feature (1)..(25): SEQ ID NO: 1029; WAN024GFV; Start 132; Stop 156
cataataccgataacgataccaagg

SEQ ID NO: 281037 - DNA, 25 bp, Artificial
  probe
  misc_feature (1)..(25): SEQ ID NO: 1029; WAN024GFV; Start 131; Stop 155
ccataataccgataacgataccaag

SEQ ID NO: 281038 - DNA, 25 bp, Artificial
  probe
  misc_feature (1)..(25): SEQ ID NO: 1029; WAN024GFV; Start 137; Stop 161
taccgataacgataccaaggatgaa

SEQ ID NO: 281039 - DNA, 25 bp, Artificial
  probe
  misc_feature (1)..(25): SEQ ID NO: 1029; WAN024GFV; Start 11; Stop 35
aaccgataagtgagaagagttccaa

SEQ ID NO: 281040 - DNA, 25 bp, Artificial
  probe
  misc_feature (1)..(25): SEQ ID NO: 1029; WAN024GFV; Start 7; Stop 31
catgaaccgataagtgagaagagtt

SEQ ID NO: 281041 - DNA, 25 bp, Artificial
  probe
  misc_feature (1)..(25): SEQ ID NO: 1029; WAN024GFV; Start 3; Stop 27
gaaccatgaaccgataagtgagaag

SEQ ID NO: 281042 - DNA, 25 bp, Artificial
  probe
  misc_feature (1)..(25): SEQ ID NO: 1029; WAN024GFV; Start 4; Stop 28
aaccatgaaccgataagtgagaaga

SEQ ID NO: 281043 - DNA, 25 bp, Artificial
  probe
  misc_feature (1)..(25): SEQ ID NO: 1029; WAN024GFV; Start 2; Stop 26
tgaaccatgaaccgataagtgagaa

SEQ ID NO: 281044 - DNA, 25 bp, Artificial
  probe
  misc_feature (1)..(25): SEQ ID NO: 1029; WAN024GFV; Start 1; Stop 25
atgaaccatgaaccgataagtgaga

SEQ ID NO: 281045 - DNA, 25 bp, Artificial
  probe
  misc_feature (1)..(25): SEQ ID NO: 1029; WAN024GFV; Start 6; Stop 30
ccatgaaccgataagtgagaagagt

SEQ ID NO: 281046 - DNA, 25 bp, Artificial
  probe
  misc_feature (1)..(25): SEQ ID NO: 1029; WAN024GFV; Start 5; Stop 29
accatgaaccgataagtgagaagag

SEQ ID NO: 281047 - DNA, 25 bp, Artificial
  probe
  misc_feature (1)..(25): SEQ ID NO: 1029; WAN024GFV; Start 130; Stop 154
cccataataccgataacgataccaa

SEQ ID NO: 281048 - DNA, 25 bp, Artificial
  probe
  misc_feature (1)..(25): SEQ ID NO: 1029; WAN024GFV; Start 128; Stop 152
ttcccataataccgataacgatacc

SEQ ID NO: 281049 - DNA, 25 bp, Artificial
  probe
  misc_feature (1)..(25): SEQ ID NO: 1029; WAN024GFV; Start 129; Stop 153
tcccataataccgataacgatacca

SEQ ID NO: 281050 - DNA, 25 bp, Artificial
  probe
  misc_feature (1)..(25): SEQ ID NO: 1029; WAN024GFV; Start 195; Stop 219
tttcttgttcaatttagcagcatca

SEQ ID NO: 281051 - DNA, 25 bp, Artificial
  probe
  misc_feature (1)..(25): SEQ ID NO: 1029; WAN024GFV; Start 152; Stop 176
caaggatgaaaccgatgaagaattt

SEQ ID NO: 281052 - DNA, 25 bp, Artificial
  probe
  misc_feature (1)..(25): SEQ ID NO: 1029; WAN024GFV; Start 202; Stop 226
ttcaatttagcagcatcaaagtcat

SEQ ID NO: 281053 - DNA, 25 bp, Artificial
  probe
  misc_feature (1)..(25): SEQ ID NO: 1029; WAN024GFV; Start 14; Stop 38
cgataagtgagaagagttccaaaga

SEQ ID NO: 281054 - DNA, 25 bp, Artificial
  probe
  misc_feature (1)..(25): SEQ ID NO: 1029; WAN024GFV; Start 18; Stop 42
aagtgagaagagttccaaagataca

SEQ ID NO: 281055 - DNA, 25 bp, Artificial
  probe
  misc_feature (1)..(25): SEQ ID NO: 1029; WAN024GFV; Start 201; Stop 225
gttcaatttagcagcatcaaagtca

SEQ ID NO: 281056 - DNA, 25 bp, Artificial
  probe
  misc_feature (1)..(25): SEQ ID NO: 1029; WAN024GFV; Start 200; Stop 224
tgttcaatttagcagcatcaaagtc

SEQ ID NO: 281057 - DNA, 25 bp, Artificial
  probe
  misc_feature (1)..(25): SEQ ID NO: 1029; WAN024GFV; Start 125; Stop 149
gagttcccataataccgataacgat

SEQ ID NO: 281058 - DNA, 25 bp, Artificial
  probe
  misc_feature (1)..(25): SEQ ID NO: 1029; WAN024GFV; Start 214; Stop 238
gcatcaaagtcatatttatcaaggc

SEQ ID NO: 281059 - DNA, 25 bp, Artificial
  probe
  misc_feature (1)..(25): SEQ ID NO: 1029; WAN024GFV; Start 210; Stop 234
agcagcatcaaagtcatatttatca

SEQ ID NO: 281060 - DNA, 25 bp, Artificial
  probe
  misc_feature (1)..(25): SEQ ID NO: 1029; WAN024GFV; Start 155; Stop 179
ggatgaaaccgatgaagaatttaga

SEQ ID NO: 281061 - DNA, 25 bp, Artificial
  probe
  misc_feature (1)..(25): SEQ ID NO: 1029; WAN024GFV; Start 203; Stop 227
tcaatttagcagcatcaaagtcata

SEQ ID NO: 281062 - DNA, 25 bp, Artificial
  probe
  misc_feature (1)..(25): SEQ ID NO: 1029; WAN024GFV; Start 154; Stop 178
aggatgaaaccgatgaagaatttag

SEQ ID NO: 281063 - DNA, 25 bp, Artificial
  probe
  misc_feature (1)..(25): SEQ ID NO: 1029; WAN024GFV; Start 70; Stop 94
cctttgataacaagacgccatttat

SEQ ID NO: 281064 - DNA, 25 bp, Artificial
  probe
  misc_feature (1)..(25): SEQ ID NO: 1029; WAN024GFV; Start 61; Stop 85
gacaaccatcctttgataacaagac

SEQ ID NO: 281065 - DNA, 25 bp, Artificial
  probe
  misc_feature (1)..(25): SEQ ID NO: 1030; WAN024FK7; Start 101; Stop 125
tgttcactctcgttcagattagaat

SEQ ID NO: 281066 - DNA, 25 bp, Artificial
  probe
  misc_feature (1)..(25): SEQ ID NO: 1030; WAN024FK7; Start 100; Stop 124
atgttcactctcgttcagattagaa

SEQ ID NO: 281067 - DNA, 25 bp, Artificial
  probe
  misc_feature (1)..(25): SEQ ID NO: 1030; WAN024FK7; Start 99; Stop 123
aatgttcactctcgttcagattaga

SEQ ID NO: 281068 - DNA, 25 bp, Artificial
  probe
  misc_feature (1)..(25): SEQ ID NO: 1030; WAN024FK7; Start 95; Stop 119
agataatgttcactctcgttcagat

SEQ ID NO: 281069 - DNA, 25 bp, Artificial
  probe
  misc_feature (1)..(25): SEQ ID NO: 1030; WAN024FK7; Start 96; Stop 120
gataatgttcactctcgttcagatt

SEQ ID NO: 281070 - DNA, 25 bp, Artificial
  probe
  misc_feature (1)..(25): SEQ ID NO: 1030; WAN024FK7; Start 106; Stop 130
actctcgttcagattagaataagga

SEQ ID NO: 281071 - DNA, 25 bp, Artificial
  probe
  misc_feature (1)..(25): SEQ ID NO: 1030; WAN024FK7; Start 105; Stop 129
cactctcgttcagattagaataagg

SEQ ID NO: 281072 - DNA, 25 bp, Artificial
  probe
  misc_feature (1)..(25): SEQ ID NO: 1030; WAN024FK7; Start 98; Stop 122
taatgttcactctcgttcagattag

SEQ ID NO: 281073 - DNA, 25 bp, Artificial
  probe
  misc_feature (1)..(25): SEQ ID NO: 1030; WAN024FK7; Start 102; Stop 126
gttcactctcgttcagattagaata

SEQ ID NO: 281074 - DNA, 25 bp, Artificial
  probe
  misc_feature (1)..(25): SEQ ID NO: 1030; WAN024FK7; Start 104; Stop 128
tcactctcgttcagattagaataag

SEQ ID NO: 281075 - DNA, 25 bp, Artificial
  probe
  misc_feature (1)..(25): SEQ ID NO: 1030; WAN024FK7; Start 97; Stop 121
ataatgttcactctcgttcagatta

SEQ ID NO: 281076 - DNA, 25 bp, Artificial
  probe
  misc_feature (1)..(25): SEQ ID NO: 1030; WAN024FK7; Start 107; Stop 131
ctctcgttcagattagaataaggat

SEQ ID NO: 281077 - DNA, 25 bp, Artificial
  probe
  misc_feature (1)..(25): SEQ ID NO: 1030; WAN024FK7; Start 103; Stop 127
ttcactctcgttcagattagaataa

SEQ ID NO: 281078 - DNA, 25 bp, Artificial
  probe
  misc_feature (1)..(25): SEQ ID NO: 1030; WAN024FK7; Start 14; Stop 38
aaacgcccattagacttgagaatac

SEQ ID NO: 281079 - DNA, 25 bp, Artificial
  probe
  misc_feature (1)..(25): SEQ ID NO: 1030; WAN024FK7; Start 13; Stop 37
caaacgcccattagacttgagaata

SEQ ID NO: 281080 - DNA, 25 bp, Artificial
  probe
  misc_feature (1)..(25): SEQ ID NO: 1030; WAN024FK7; Start 21; Stop 45
cattagacttgagaatactctgggc

SEQ ID NO: 281081 - DNA, 25 bp, Artificial
  probe
  misc_feature (1)..(25): SEQ ID NO: 1030; WAN024FK7; Start 18; Stop 42
gcccattagacttgagaatactctg

SEQ ID NO: 281082 - DNA, 25 bp, Artificial
  probe
  misc_feature (1)..(25): SEQ ID NO: 1030; WAN024FK7; Start 15; Stop 39
aacgcccattagacttgagaatact

SEQ ID NO: 281083 - DNA, 25 bp, Artificial
  probe
  misc_feature (1)..(25): SEQ ID NO: 1030; WAN024FK7; Start 58; Stop 82
ttcttccaaattagtcgtgatttcg

SEQ ID NO: 281084 - DNA, 25 bp, Artificial
  probe
  misc_feature (1)..(25): SEQ ID NO: 1030; WAN024FK7; Start 52; Stop 76
acagatttcttccaaattagtcgtg

SEQ ID NO: 281085 - DNA, 25 bp, Artificial
  probe
  misc_feature (1)..(25): SEQ ID NO: 1030; WAN024FK7; Start 22; Stop 46
attagacttgagaatactctgggca

SEQ ID NO: 281086 - DNA, 25 bp, Artificial
  probe
  misc_feature (1)..(25): SEQ ID NO: 1030; WAN024FK7; Start 53; Stop 77
cagatttcttccaaattagtcgtga

SEQ ID NO: 281087 - DNA, 25 bp, Artificial
  probe
  misc_feature (1)..(25): SEQ ID NO: 1030; WAN024FK7; Start 60; Stop 84
cttccaaattagtcgtgatttcgtg

SEQ ID NO: 281088 - DNA, 25 bp, Artificial
  probe
  misc_feature (1)..(25): SEQ ID NO: 1030; WAN024FK7; Start 59; Stop 83
tcttccaaattagtcgtgatttcgt

SEQ ID NO: 281089 - DNA, 25 bp, Artificial
  probe
  misc_feature (1)..(25): SEQ ID NO: 1030; WAN024FK7; Start 51; Stop 75
gacagatttcttccaaattagtcgt

SEQ ID NO: 281090 - DNA, 25 bp, Artificial
  probe
  misc_feature (1)..(25): SEQ ID NO: 1030; WAN024FK7; Start 61; Stop 85
ttccaaattagtcgtgatttcgtgt

SEQ ID NO: 281091 - DNA, 25 bp, Artificial
  probe
  misc_feature (1)..(25): SEQ ID NO: 1030; WAN024FK7; Start 84; Stop 108
gtcgagccaagagataatgttcact

SEQ ID NO: 281092 - DNA, 25 bp, Artificial
  probe
  misc_feature (1)..(25): SEQ ID NO: 1030; WAN024FK7; Start 135; Stop 159
ccttgaaatagggtggattacacaa

SEQ ID NO: 281093 - DNA, 25 bp, Artificial
  probe
  misc_feature (1)..(25): SEQ ID NO: 1030; WAN024FK7; Start 136; Stop 160
cttgaaatagggtggattacacaaa

SEQ ID NO: 281094 - DNA, 25 bp, Artificial
  probe
  misc_feature (1)..(25): SEQ ID NO: 1030; WAN024FK7; Start 54; Stop 78
agatttcttccaaattagtcgtgat

SEQ ID NO: 281095 - DNA, 25 bp, Artificial
  probe
  misc_feature (1)..(25): SEQ ID NO: 1030; WAN024FK7; Start 62; Stop 86
tccaaattagtcgtgatttcgtgtc

SEQ ID NO: 281096 - DNA, 25 bp, Artificial
  probe
  misc_feature (1)..(25): SEQ ID NO: 1030; WAN024FK7; Start 23; Stop 47
ttagacttgagaatactctgggcac

SEQ ID NO: 281097 - DNA, 25 bp, Artificial
  probe
  misc_feature (1)..(25): SEQ ID NO: 1030; WAN024FK7; Start 83; Stop 107
tgtcgagccaagagataatgttcac

SEQ ID NO: 281098 - DNA, 25 bp, Artificial
  probe
  misc_feature (1)..(25): SEQ ID NO: 1031; WAN024C5Y; Start 131; Stop 155
acgcaatcaagtatatgttacggtt

SEQ ID NO: 281099 - DNA, 25 bp, Artificial
  probe
  misc_feature (1)..(25): SEQ ID NO: 1031; WAN024C5Y; Start 129; Stop 153
caacgcaatcaagtatatgttacgg

SEQ ID NO: 281100 - DNA, 25 bp, Artificial
  probe
  misc_feature (1)..(25): SEQ ID NO: 1031; WAN024C5Y; Start 130; Stop 154
aacgcaatcaagtatatgttacggt

SEQ ID NO: 281101 - DNA, 25 bp, Artificial
  probe
  misc_feature (1)..(25): SEQ ID NO: 1031; WAN024C5Y; Start 127; Stop 151
ggcaacgcaatcaagtatatgttac

SEQ ID NO: 281102 - DNA, 25 bp, Artificial
  probe
  misc_feature (1)..(25): SEQ ID NO: 1031; WAN024C5Y; Start 128; Stop 152
gcaacgcaatcaagtatatgttacg

SEQ ID NO: 281103 - DNA, 25 bp, Artificial
  probe
  misc_feature (1)..(25): SEQ ID NO: 1031; WAN024C5Y; Start 132; Stop 156
cgcaatcaagtatatgttacggttt

SEQ ID NO: 281104 - DNA, 25 bp, Artificial
  probe
  misc_feature (1)..(25): SEQ ID NO: 1031; WAN024C5Y; Start 25; Stop 49
ataaataaaccaagccactaccagg

SEQ ID NO: 281105 - DNA, 25 bp, Artificial
  probe
  misc_feature (1)..(25): SEQ ID NO: 1031; WAN024C5Y; Start 133; Stop 157
gcaatcaagtatatgttacggtttc

SEQ ID NO: 281106 - DNA, 25 bp, Artificial
  probe
  misc_feature (1)..(25): SEQ ID NO: 1031; WAN024C5Y; Start 24; Stop 48
tataaataaaccaagccactaccag

SEQ ID NO: 281107 - DNA, 25 bp, Artificial
  probe
  misc_feature (1)..(25): SEQ ID NO: 1031; WAN024C5Y; Start 126; Stop 150
gggcaacgcaatcaagtatatgtta

SEQ ID NO: 281108 - DNA, 25 bp, Artificial
  probe
  misc_feature (1)..(25): SEQ ID NO: 1031; WAN024C5Y; Start 23; Stop 47
atataaataaaccaagccactacca

SEQ ID NO: 281109 - DNA, 25 bp, Artificial
  probe
  misc_feature (1)..(25): SEQ ID NO: 1031; WAN024C5Y; Start 18; Stop 42
tgacaatataaataaaccaagccac

SEQ ID NO: 281110 - DNA, 25 bp, Artificial
  probe
  misc_feature (1)..(25): SEQ ID NO: 1031; WAN024C5Y; Start 26; Stop 50
taaataaaccaagccactaccaggg

SEQ ID NO: 281111 - DNA, 25 bp, Artificial
  probe
  misc_feature (1)..(25): SEQ ID NO: 1031; WAN024C5Y; Start 19; Stop 43
gacaatataaataaaccaagccact

SEQ ID NO: 281112 - DNA, 25 bp, Artificial
  probe
  misc_feature (1)..(25): SEQ ID NO: 1031; WAN024C5Y; Start 134; Stop 158
caatcaagtatatgttacggtttca

SEQ ID NO: 281113 - DNA, 25 bp, Artificial
  probe
  misc_feature (1)..(25): SEQ ID NO: 1031; WAN024C5Y; Start 22; Stop 46
aatataaataaaccaagccactacc

SEQ ID NO: 281114 - DNA, 25 bp, Artificial
  probe
  misc_feature (1)..(25): SEQ ID NO: 1031; WAN024C5Y; Start 17; Stop 41
ttgacaatataaataaaccaagcca

SEQ ID NO: 281115 - DNA, 25 bp, Artificial
  probe
  misc_feature (1)..(25): SEQ ID NO: 1031; WAN024C5Y; Start 136; Stop 160
atcaagtatatgttacggtttcaaa

SEQ ID NO: 281116 - DNA, 25 bp, Artificial
  probe
  misc_feature (1)..(25): SEQ ID NO: 1031; WAN024C5Y; Start 135; Stop 159
aatcaagtatatgttacggtttcaa

SEQ ID NO: 281117 - DNA, 25 bp, Artificial
  probe
  misc_feature (1)..(25): SEQ ID NO: 1031; WAN024C5Y; Start 20; Stop 44
acaatataaataaaccaagccacta

SEQ ID NO: 281118 - DNA, 25 bp, Artificial
  probe
  misc_feature (1)..(25): SEQ ID NO: 1031; WAN024C5Y; Start 2; Stop 26
tgaacccagaaataattgacaatat

SEQ ID NO: 281119 - DNA, 25 bp, Artificial
  probe
  misc_feature (1)..(25): SEQ ID NO: 1031; WAN024C5Y; Start 1; Stop 25
atgaacccagaaataattgacaata

SEQ ID NO: 281120 - DNA, 25 bp, Artificial
  probe
  misc_feature (1)..(25): SEQ ID NO: 1031; WAN024C5Y; Start 21; Stop 45
caatataaataaaccaagccactac

SEQ ID NO: 281121 - DNA, 25 bp, Artificial
  probe
  misc_feature (1)..(25): SEQ ID NO: 1031; WAN024C5Y; Start 66; Stop 90
ggctatcgatgttgtgcataacttc

SEQ ID NO: 281122 - DNA, 25 bp, Artificial
  probe
  misc_feature (1)..(25): SEQ ID NO: 1031; WAN024C5Y; Start 62; Stop 86
ttgaggctatcgatgttgtgcataa

SEQ ID NO: 281123 - DNA, 25 bp, Artificial
  probe
  misc_feature (1)..(25): SEQ ID NO: 1031; WAN024C5Y; Start 65; Stop 89
aggctatcgatgttgtgcataactt

SEQ ID NO: 281124 - DNA, 25 bp, Artificial
  probe
  misc_feature (1)..(25): SEQ ID NO: 1031; WAN024C5Y; Start 16; Stop 40
attgacaatataaataaaccaagcc

SEQ ID NO: 281125 - DNA, 25 bp, Artificial
  probe
  misc_feature (1)..(25): SEQ ID NO: 1031; WAN024C5Y; Start 69; Stop 93
tatcgatgttgtgcataacttcgtt

SEQ ID NO: 281126 - DNA, 25 bp, Artificial
  probe
  misc_feature (1)..(25): SEQ ID NO: 1031; WAN024C5Y; Start 61; Stop 85
cttgaggctatcgatgttgtgcata

SEQ ID NO: 281127 - DNA, 25 bp, Artificial
  probe
  misc_feature (1)..(25): SEQ ID NO: 1031; WAN024C5Y; Start 64; Stop 88
gaggctatcgatgttgtgcataact

SEQ ID NO: 281128 - DNA, 25 bp, Artificial
  probe
  misc_feature (1)..(25): SEQ ID NO: 1031; WAN024C5Y; Start 68; Stop 92
ctatcgatgttgtgcataacttcgt

SEQ ID NO: 281129 - DNA, 25 bp, Artificial
  probe
  misc_feature (1)..(25): SEQ ID NO: 1031; WAN024C5Y; Start 137; Stop 161
tcaagtatatgttacggtttcaaaa

SEQ ID NO: 281130 - DNA, 25 bp, Artificial
  probe
  misc_feature (1)..(25): SEQ ID NO: 1031; WAN024C5Y; Start 63; Stop 87
tgaggctatcgatgttgtgcataac

SEQ ID NO: 281131 - DNA, 25 bp, Artificial
  probe
  misc_feature (1)..(25): SEQ ID NO: 1032; WAN024FVK; Start 243; Stop 267
attctcttaccaagtcctgacgata

SEQ ID NO: 281132 - DNA, 25 bp, Artificial
  probe
  misc_feature (1)..(25): SEQ ID NO: 1032; WAN024FVK; Start 244; Stop 268
ttctcttaccaagtcctgacgatag

SEQ ID NO: 281133 - DNA, 25 bp, Artificial
  probe
  misc_feature (1)..(25): SEQ ID NO: 1032; WAN024FVK; Start 242; Stop 266
aattctcttaccaagtcctgacgat

SEQ ID NO: 281134 - DNA, 25 bp, Artificial
  probe
  misc_feature (1)..(25): SEQ ID NO: 1032; WAN024FVK; Start 129; Stop 153
ccttaattgttggcatcttgtcatg

SEQ ID NO: 281135 - DNA, 25 bp, Artificial
  probe
  misc_feature (1)..(25): SEQ ID NO: 1032; WAN024FVK; Start 214; Stop 238
ttctttggtcacttgcttaatcatc

SEQ ID NO: 281136 - DNA, 25 bp, Artificial
  probe
  misc_feature (1)..(25): SEQ ID NO: 1032; WAN024FVK; Start 213; Stop 237
tttctttggtcacttgcttaatcat

SEQ ID NO: 281137 - DNA, 25 bp, Artificial
  probe
  misc_feature (1)..(25): SEQ ID NO: 1032; WAN024FVK; Start 232; Stop 256
aatcatcgcaaattctcttaccaag

SEQ ID NO: 281138 - DNA, 25 bp, Artificial
  probe
  misc_feature (1)..(25): SEQ ID NO: 1032; WAN024FVK; Start 228; Stop 252
gcttaatcatcgcaaattctcttac

SEQ ID NO: 281139 - DNA, 25 bp, Artificial
  probe
  misc_feature (1)..(25): SEQ ID NO: 1032; WAN024FVK; Start 233; Stop 257
atcatcgcaaattctcttaccaagt

SEQ ID NO: 281140 - DNA, 25 bp, Artificial
  probe
  misc_feature (1)..(25): SEQ ID NO: 1032; WAN024FVK; Start 231; Stop 255
taatcatcgcaaattctcttaccaa

SEQ ID NO: 281141 - DNA, 25 bp, Artificial
  probe
  misc_feature (1)..(25): SEQ ID NO: 1032; WAN024FVK; Start 230; Stop 254
ttaatcatcgcaaattctcttacca

SEQ ID NO: 281142 - DNA, 25 bp, Artificial
  probe
  misc_feature (1)..(25): SEQ ID NO: 1032; WAN024FVK; Start 151; Stop 175
atgagaagccagaaccataactgtc

SEQ ID NO: 281143 - DNA, 25 bp, Artificial
  probe
  misc_feature (1)..(25): SEQ ID NO: 1032; WAN024FVK; Start 215; Stop 239
tctttggtcacttgcttaatcatcg

SEQ ID NO: 281144 - DNA, 25 bp, Artificial
  probe
  misc_feature (1)..(25): SEQ ID NO: 1032; WAN024FVK; Start 229; Stop 253
cttaatcatcgcaaattctcttacc

SEQ ID NO: 281145 - DNA, 25 bp, Artificial
  probe
  misc_feature (1)..(25): SEQ ID NO: 1032; WAN024FVK; Start 234; Stop 258
tcatcgcaaattctcttaccaagtc

SEQ ID NO: 281146 - DNA, 25 bp, Artificial
  probe
  misc_feature (1)..(25): SEQ ID NO: 1032; WAN024FVK; Start 241; Stop 265
aaattctcttaccaagtcctgacga

SEQ ID NO: 281147 - DNA, 25 bp, Artificial
  probe
  misc_feature (1)..(25): SEQ ID NO: 1032; WAN024FVK; Start 240; Stop 264
caaattctcttaccaagtcctgacg

SEQ ID NO: 281148 - DNA, 25 bp, Artificial
  probe
  misc_feature (1)..(25): SEQ ID NO: 1032; WAN024FVK; Start 245; Stop 269
tctcttaccaagtcctgacgatagc

SEQ ID NO: 281149 - DNA, 25 bp, Artificial
  probe
  misc_feature (1)..(25): SEQ ID NO: 1032; WAN024FVK; Start 239; Stop 263
gcaaattctcttaccaagtcctgac

SEQ ID NO: 281150 - DNA, 25 bp, Artificial
  probe
  misc_feature (1)..(25): SEQ ID NO: 1032; WAN024FVK; Start 236; Stop 260
atcgcaaattctcttaccaagtcct

SEQ ID NO: 281151 - DNA, 25 bp, Artificial
  probe
  misc_feature (1)..(25): SEQ ID NO: 1032; WAN024FVK; Start 235; Stop 259
catcgcaaattctcttaccaagtcc

SEQ ID NO: 281152 - DNA, 25 bp, Artificial
  probe
  misc_feature (1)..(25): SEQ ID NO: 1032; WAN024FVK; Start 150; Stop 174
catgagaagccagaaccataactgt

SEQ ID NO: 281153 - DNA, 25 bp, Artificial
  probe
  misc_feature (1)..(25): SEQ ID NO: 1032; WAN024FVK; Start 73; Stop 97
ggtatcaactctcaagtcatgcagt

SEQ ID NO: 281154 - DNA, 25 bp, Artificial
  probe
  misc_feature (1)..(25): SEQ ID NO: 1032; WAN024FVK; Start 131; Stop 155
ttaattgttggcatcttgtcatgag

SEQ ID NO: 281155 - DNA, 25 bp, Artificial
  probe
  misc_feature (1)..(25): SEQ ID NO: 1032; WAN024FVK; Start 130; Stop 154
cttaattgttggcatcttgtcatga

SEQ ID NO: 281156 - DNA, 25 bp, Artificial
  probe
  misc_feature (1)..(25): SEQ ID NO: 1032; WAN024FVK; Start 216; Stop 240
ctttggtcacttgcttaatcatcgc

SEQ ID NO: 281157 - DNA, 25 bp, Artificial
  probe
  misc_feature (1)..(25): SEQ ID NO: 1032; WAN024FVK; Start 132; Stop 156
taattgttggcatcttgtcatgaga

SEQ ID NO: 281158 - DNA, 25 bp, Artificial
  probe
  misc_feature (1)..(25): SEQ ID NO: 1032; WAN024FVK; Start 238; Stop 262
cgcaaattctcttaccaagtcctga

SEQ ID NO: 281159 - DNA, 25 bp, Artificial
  probe
  misc_feature (1)..(25): SEQ ID NO: 1032; WAN024FVK; Start 237; Stop 261
tcgcaaattctcttaccaagtcctg

SEQ ID NO: 281160 - DNA, 25 bp, Artificial
  probe
  misc_feature (1)..(25): SEQ ID NO: 1032; WAN024FVK; Start 133; Stop 157
aattgttggcatcttgtcatgagaa

SEQ ID NO: 281161 - DNA, 25 bp, Artificial
  probe
  misc_feature (1)..(25): SEQ ID NO: 1032; WAN024FVK; Start 74; Stop 98
gtatcaactctcaagtcatgcagtt

SEQ ID NO: 281162 - DNA, 25 bp, Artificial
  probe
  misc_feature (1)..(25): SEQ ID NO: 1032; WAN024FVK; Start 42; Stop 66
ttctttattttgcttctacacggac

SEQ ID NO: 281163 - DNA, 25 bp, Artificial
  probe
  misc_feature (1)..(25): SEQ ID NO: 1032; WAN024FVK; Start 212; Stop 236
ttttctttggtcacttgcttaatca

SEQ ID NO: 281164 - DNA, 25 bp, Artificial
  probe
  misc_feature (1)..(25): SEQ ID NO: 1033; WAN024DU9; Start 652; Stop 676
gataaggtgactactggtggattag

SEQ ID NO: 281165 - DNA, 25 bp, Artificial
  probe
  misc_feature (1)..(25): SEQ ID NO: 1033; WAN024DU9; Start 651; Stop 675
agataaggtgactactggtggatta

SEQ ID NO: 281166 - DNA, 25 bp, Artificial
  probe
  misc_feature (1)..(25): SEQ ID NO: 1033; WAN024DU9; Start 653; Stop 677
ataaggtgactactggtggattagg

SEQ ID NO: 281167 - DNA, 25 bp, Artificial
  probe
  misc_feature (1)..(25): SEQ ID NO: 1033; WAN024DU9; Start 650; Stop 674
gagataaggtgactactggtggatt

SEQ ID NO: 281168 - DNA, 25 bp, Artificial
  probe
  misc_feature (1)..(25): SEQ ID NO: 1033; WAN024DU9; Start 65; Stop 89
ctctcttagcgacgacttattcaag

SEQ ID NO: 281169 - DNA, 25 bp, Artificial
  probe
  misc_feature (1)..(25): SEQ ID NO: 1033; WAN024DU9; Start 114; Stop 138
tggaatctcattggttgatagagtt

SEQ ID NO: 281170 - DNA, 25 bp, Artificial
  probe
  misc_feature (1)..(25): SEQ ID NO: 1033; WAN024DU9; Start 115; Stop 139
ggaatctcattggttgatagagttg

SEQ ID NO: 281171 - DNA, 25 bp, Artificial
  probe
  misc_feature (1)..(25): SEQ ID NO: 1033; WAN024DU9; Start 113; Stop 137
atggaatctcattggttgatagagt

SEQ ID NO: 281172 - DNA, 25 bp, Artificial
  probe
  misc_feature (1)..(25): SEQ ID NO: 1033; WAN024DU9; Start 654; Stop 678
taaggtgactactggtggattagga

SEQ ID NO: 281173 - DNA, 25 bp, Artificial
  probe
  misc_feature (1)..(25): SEQ ID NO: 1033; WAN024DU9; Start 112; Stop 136
gatggaatctcattggttgatagag

SEQ ID NO: 281174 - DNA, 25 bp, Artificial
  probe
  misc_feature (1)..(25): SEQ ID NO: 1033; WAN024DU9; Start 694; Stop 718
gatattcctgttggtgaagtggttg

SEQ ID NO: 281175 - DNA, 25 bp, Artificial
  probe
  misc_feature (1)..(25): SEQ ID NO: 1033; WAN024DU9; Start 116; Stop 140
gaatctcattggttgatagagttgt

SEQ ID NO: 281176 - DNA, 25 bp, Artificial
  probe
  misc_feature (1)..(25): SEQ ID NO: 1033; WAN024DU9; Start 693; Stop 717
tgatattcctgttggtgaagtggtt

SEQ ID NO: 281177 - DNA, 25 bp, Artificial
  probe
  misc_feature (1)..(25): SEQ ID NO: 1033; WAN024DU9; Start 688; Stop 712
gttgctgatattcctgttggtgaag

SEQ ID NO: 281178 - DNA, 25 bp, Artificial
  probe
  misc_feature (1)..(25): SEQ ID NO: 1033; WAN024DU9; Start 772; Stop 796
gcagatactcataatgtagatgtga

SEQ ID NO: 281179 - DNA, 25 bp, Artificial
  probe
  misc_feature (1)..(25): SEQ ID NO: 1033; WAN024DU9; Start 689; Stop 713
ttgctgatattcctgttggtgaagt

SEQ ID NO: 281180 - DNA, 25 bp, Artificial
  probe
  misc_feature (1)..(25): SEQ ID NO: 1033; WAN024DU9; Start 655; Stop 679
aaggtgactactggtggattaggaa

SEQ ID NO: 281181 - DNA, 25 bp, Artificial
  probe
  misc_feature (1)..(25): SEQ ID NO: 1033; WAN024DU9; Start 571; Stop 595
ggaattattattggctatgacaagg

SEQ ID NO: 281182 - DNA, 25 bp, Artificial
  probe
  misc_feature (1)..(25): SEQ ID NO: 1033; WAN024DU9; Start 692; Stop 716
ctgatattcctgttggtgaagtggt

SEQ ID NO: 281183 - DNA, 25 bp, Artificial
  probe
  misc_feature (1)..(25): SEQ ID NO: 1033; WAN024DU9; Start 625; Stop 649
aatagtaatagcgatattagtgcgg

SEQ ID NO: 281184 - DNA, 25 bp, Artificial
  probe
  misc_feature (1)..(25): SEQ ID NO: 1033; WAN024DU9; Start 118; Stop 142
atctcattggttgatagagttgtac

SEQ ID NO: 281185 - DNA, 25 bp, Artificial
  probe
  misc_feature (1)..(25): SEQ ID NO: 1033; WAN024DU9; Start 660; Stop 684
gactactggtggattaggaaacttt

SEQ ID NO: 281186 - DNA, 25 bp, Artificial
  probe
  misc_feature (1)..(25): SEQ ID NO: 1033; WAN024DU9; Start 649; Stop 673
ggagataaggtgactactggtggat

SEQ ID NO: 281187 - DNA, 25 bp, Artificial
  probe
  misc_feature (1)..(25): SEQ ID NO: 1033; WAN024DU9; Start 543; Stop 567
aattcaacatggctctactacaatt

SEQ ID NO: 281188 - DNA, 25 bp, Artificial
  probe
  misc_feature (1)..(25): SEQ ID NO: 1033; WAN024DU9; Start 117; Stop 141
aatctcattggttgatagagttgta

SEQ ID NO: 281189 - DNA, 25 bp, Artificial
  probe
  misc_feature (1)..(25): SEQ ID NO: 1033; WAN024DU9; Start 183; Stop 207
ggctcatttgacacgaacatataat

SEQ ID NO: 281190 - DNA, 25 bp, Artificial
  probe
  misc_feature (1)..(25): SEQ ID NO: 1033; WAN024DU9; Start 661; Stop 685
actactggtggattaggaaacttta

SEQ ID NO: 281191 - DNA, 25 bp, Artificial
  probe
  misc_feature (1)..(25): SEQ ID NO: 1033; WAN024DU9; Start 182; Stop 206
tggctcatttgacacgaacatataa

SEQ ID NO: 281192 - DNA, 25 bp, Artificial
  probe
  misc_feature (1)..(25): SEQ ID NO: 1033; WAN024DU9; Start 181; Stop 205
ttggctcatttgacacgaacatata

SEQ ID NO: 281193 - DNA, 25 bp, Artificial
  probe
  misc_feature (1)..(25): SEQ ID NO: 1033; WAN024DU9; Start 659; Stop 683
tgactactggtggattaggaaactt

SEQ ID NO: 281194 - DNA, 25 bp, Artificial
  probe
  misc_feature (1)..(25): SEQ ID NO: 1033; WAN024DU9; Start 664; Stop 688
actggtggattaggaaactttaacg

SEQ ID NO: 281195 - DNA, 25 bp, Artificial
  probe
  misc_feature (1)..(25): SEQ ID NO: 1033; WAN024DU9; Start 632; Stop 656
atagcgatattagtgcgggagataa

SEQ ID NO: 281196 - DNA, 25 bp, Artificial
  probe
  misc_feature (1)..(25): SEQ ID NO: 1033; WAN024DU9; Start 111; Stop 135
agatggaatctcattggttgataga

SEQ ID NO: 281197 - DNA, 25 bp, Artificial
  probe
  misc_feature (1)..(25): SEQ ID NO: 1034; WAN024F5Y; Start 32; Stop 56
atcttaacttctacaatgccatcgg

SEQ ID NO: 281198 - DNA, 25 bp, Artificial
  probe
  misc_feature (1)..(25): SEQ ID NO: 1034; WAN024F5Y; Start 212; Stop 236
tcatccttgacattgacagtaatca

SEQ ID NO: 281199 - DNA, 25 bp, Artificial
  probe
  misc_feature (1)..(25): SEQ ID NO: 1034; WAN024F5Y; Start 209; Stop 233
tcttcatccttgacattgacagtaa

SEQ ID NO: 281200 - DNA, 25 bp, Artificial
  probe
  misc_feature (1)..(25): SEQ ID NO: 1034; WAN024F5Y; Start 208; Stop 232
ttcttcatccttgacattgacagta

SEQ ID NO: 281201 - DNA, 25 bp, Artificial
  probe
  misc_feature (1)..(25): SEQ ID NO: 1034; WAN024F5Y; Start 31; Stop 55
gatcttaacttctacaatgccatcg

SEQ ID NO: 281202 - DNA, 25 bp, Artificial
  probe
  misc_feature (1)..(25): SEQ ID NO: 1034; WAN024F5Y; Start 211; Stop 235
ttcatccttgacattgacagtaatc

SEQ ID NO: 281203 - DNA, 25 bp, Artificial
  probe
  misc_feature (1)..(25): SEQ ID NO: 1034; WAN024F5Y; Start 210; Stop 234
cttcatccttgacattgacagtaat

SEQ ID NO: 281204 - DNA, 25 bp, Artificial
  probe
  misc_feature (1)..(25): SEQ ID NO: 1034; WAN024F5Y; Start 207; Stop 231
cttcttcatccttgacattgacagt

SEQ ID NO: 281205 - DNA, 25 bp, Artificial
  probe
  misc_feature (1)..(25): SEQ ID NO: 1034; WAN024F5Y; Start 30; Stop 54
tgatcttaacttctacaatgccatc

SEQ ID NO: 281206 - DNA, 25 bp, Artificial
  probe
  misc_feature (1)..(25): SEQ ID NO: 1034; WAN024F5Y; Start 27; Stop 51
ccttgatcttaacttctacaatgcc

SEQ ID NO: 281207 - DNA, 25 bp, Artificial
  probe
  misc_feature (1)..(25): SEQ ID NO: 1034; WAN024F5Y; Start 26; Stop 50
gccttgatcttaacttctacaatgc

SEQ ID NO: 281208 - DNA, 25 bp, Artificial
  probe
  misc_feature (1)..(25): SEQ ID NO: 1034; WAN024F5Y; Start 140; Stop 164
tcatctgtcaagacttcataaccag

SEQ ID NO: 281209 - DNA, 25 bp, Artificial
  probe
  misc_feature (1)..(25): SEQ ID NO: 1034; WAN024F5Y; Start 23; Stop 47
gttgccttgatcttaacttctacaa

SEQ ID NO: 281210 - DNA, 25 bp, Artificial
  probe
  misc_feature (1)..(25): SEQ ID NO: 1034; WAN024F5Y; Start 139; Stop 163
gtcatctgtcaagacttcataacca

SEQ ID NO: 281211 - DNA, 25 bp, Artificial
  probe
  misc_feature (1)..(25): SEQ ID NO: 1034; WAN024F5Y; Start 28; Stop 52
cttgatcttaacttctacaatgcca

SEQ ID NO: 281212 - DNA, 25 bp, Artificial
  probe
  misc_feature (1)..(25): SEQ ID NO: 1034; WAN024F5Y; Start 25; Stop 49
tgccttgatcttaacttctacaatg

SEQ ID NO: 281213 - DNA, 25 bp, Artificial
  probe
  misc_feature (1)..(25): SEQ ID NO: 1034; WAN024F5Y; Start 135; Stop 159
tacggtcatctgtcaagacttcata

SEQ ID NO: 281214 - DNA, 25 bp, Artificial
  probe
  misc_feature (1)..(25): SEQ ID NO: 1034; WAN024F5Y; Start 29; Stop 53
ttgatcttaacttctacaatgccat

SEQ ID NO: 281215 - DNA, 25 bp, Artificial
  probe
  misc_feature (1)..(25): SEQ ID NO: 1034; WAN024F5Y; Start 137; Stop 161
cggtcatctgtcaagacttcataac

SEQ ID NO: 281216 - DNA, 25 bp, Artificial
  probe
  misc_feature (1)..(25): SEQ ID NO: 1034; WAN024F5Y; Start 89; Stop 113
agaccaatcaagtcactatcgctaa

SEQ ID NO: 281217 - DNA, 25 bp, Artificial
  probe
  misc_feature (1)..(25): SEQ ID NO: 1034; WAN024F5Y; Start 88; Stop 112
aagaccaatcaagtcactatcgcta

SEQ ID NO: 281218 - DNA, 25 bp, Artificial
  probe
  misc_feature (1)..(25): SEQ ID NO: 1034; WAN024F5Y; Start 24; Stop 48
ttgccttgatcttaacttctacaat

SEQ ID NO: 281219 - DNA, 25 bp, Artificial
  probe
  misc_feature (1)..(25): SEQ ID NO: 1034; WAN024F5Y; Start 206; Stop 230
gcttcttcatccttgacattgacag

SEQ ID NO: 281220 - DNA, 25 bp, Artificial
  probe
  misc_feature (1)..(25): SEQ ID NO: 1034; WAN024F5Y; Start 141; Stop 165
catctgtcaagacttcataaccagc

SEQ ID NO: 281221 - DNA, 25 bp, Artificial
  probe
  misc_feature (1)..(25): SEQ ID NO: 1034; WAN024F5Y; Start 136; Stop 160
acggtcatctgtcaagacttcataa

SEQ ID NO: 281222 - DNA, 25 bp, Artificial
  probe
  misc_feature (1)..(25): SEQ ID NO: 1034; WAN024F5Y; Start 134; Stop 158
ttacggtcatctgtcaagacttcat

SEQ ID NO: 281223 - DNA, 25 bp, Artificial
  probe
  misc_feature (1)..(25): SEQ ID NO: 1034; WAN024F5Y; Start 138; Stop 162
ggtcatctgtcaagacttcataacc

SEQ ID NO: 281224 - DNA, 25 bp, Artificial
  probe
  misc_feature (1)..(25): SEQ ID NO: 1034; WAN024F5Y; Start 91; Stop 115
accaatcaagtcactatcgctaaat

SEQ ID NO: 281225 - DNA, 25 bp, Artificial
  probe
  misc_feature (1)..(25): SEQ ID NO: 1034; WAN024F5Y; Start 92; Stop 116
ccaatcaagtcactatcgctaaatt

SEQ ID NO: 281226 - DNA, 25 bp, Artificial
  probe
  misc_feature (1)..(25): SEQ ID NO: 1034; WAN024F5Y; Start 242; Stop 266
acatcaaatggtgccaattctttag

SEQ ID NO: 281227 - DNA, 25 bp, Artificial
  probe
  misc_feature (1)..(25): SEQ ID NO: 1034; WAN024F5Y; Start 133; Stop 157
gttacggtcatctgtcaagacttca

SEQ ID NO: 281228 - DNA, 25 bp, Artificial
  probe
  misc_feature (1)..(25): SEQ ID NO: 1034; WAN024F5Y; Start 243; Stop 267
catcaaatggtgccaattctttagg

SEQ ID NO: 281229 - DNA, 25 bp, Artificial
  probe
  misc_feature (1)..(25): SEQ ID NO: 1034; WAN024F5Y; Start 87; Stop 111
gaagaccaatcaagtcactatcgct

SEQ ID NO: 281230 - DNA, 25 bp, Artificial
  probe
  misc_feature (1)..(25): SEQ ID NO: 1035; WAN024CNW; Start 75; Stop 99
aagttcaatgttcgactcaatgttt

SEQ ID NO: 281231 - DNA, 25 bp, Artificial
  probe
  misc_feature (1)..(25): SEQ ID NO: 1035; WAN024CNW; Start 74; Stop 98
aaagttcaatgttcgactcaatgtt

SEQ ID NO: 281232 - DNA, 25 bp, Artificial
  probe
  misc_feature (1)..(25): SEQ ID NO: 1035; WAN024CNW; Start 77; Stop 101
gttcaatgttcgactcaatgtttaa

SEQ ID NO: 281233 - DNA, 25 bp, Artificial
  probe
  misc_feature (1)..(25): SEQ ID NO: 1035; WAN024CNW; Start 73; Stop 97
caaagttcaatgttcgactcaatgt

SEQ ID NO: 281234 - DNA, 25 bp, Artificial
  probe
  misc_feature (1)..(25): SEQ ID NO: 1035; WAN024CNW; Start 76; Stop 100
agttcaatgttcgactcaatgttta

SEQ ID NO: 281235 - DNA, 25 bp, Artificial
  probe
  misc_feature (1)..(25): SEQ ID NO: 1035; WAN024CNW; Start 71; Stop 95
gacaaagttcaatgttcgactcaat

SEQ ID NO: 281236 - DNA, 25 bp, Artificial
  probe
  misc_feature (1)..(25): SEQ ID NO: 1035; WAN024CNW; Start 72; Stop 96
acaaagttcaatgttcgactcaatg

SEQ ID NO: 281237 - DNA, 25 bp, Artificial
  probe
  misc_feature (1)..(25): SEQ ID NO: 1035; WAN024CNW; Start 78; Stop 102
ttcaatgttcgactcaatgtttaaa

SEQ ID NO: 281238 - DNA, 25 bp, Artificial
  probe
  misc_feature (1)..(25): SEQ ID NO: 1035; WAN024CNW; Start 79; Stop 103
tcaatgttcgactcaatgtttaaat

SEQ ID NO: 281239 - DNA, 25 bp, Artificial
  probe
  misc_feature (1)..(25): SEQ ID NO: 1035; WAN024CNW; Start 80; Stop 104
caatgttcgactcaatgtttaaata

SEQ ID NO: 281240 - DNA, 25 bp, Artificial
  probe
  misc_feature (1)..(25): SEQ ID NO: 1035; WAN024CNW; Start 70; Stop 94
cgacaaagttcaatgttcgactcaa

SEQ ID NO: 281241 - DNA, 25 bp, Artificial
  probe
  misc_feature (1)..(25): SEQ ID NO: 1035; WAN024CNW; Start 81; Stop 105
aatgttcgactcaatgtttaaataa

SEQ ID NO: 281242 - DNA, 25 bp, Artificial
  probe
  misc_feature (1)..(25): SEQ ID NO: 1035; WAN024CNW; Start 66; Stop 90
aaatcgacaaagttcaatgttcgac

SEQ ID NO: 281243 - DNA, 25 bp, Artificial
  probe
  misc_feature (1)..(25): SEQ ID NO: 1035; WAN024CNW; Start 38; Stop 62
tttcatatttaacaaaactttcagc

SEQ ID NO: 281244 - DNA, 25 bp, Artificial
  probe
  misc_feature (1)..(25): SEQ ID NO: 1035; WAN024CNW; Start 67; Stop 91
aatcgacaaagttcaatgttcgact

SEQ ID NO: 281245 - DNA, 25 bp, Artificial
  probe
  misc_feature (1)..(25): SEQ ID NO: 1035; WAN024CNW; Start 39; Stop 63
ttcatatttaacaaaactttcagct

SEQ ID NO: 281246 - DNA, 25 bp, Artificial
  probe
  misc_feature (1)..(25): SEQ ID NO: 1035; WAN024CNW; Start 68; Stop 92
atcgacaaagttcaatgttcgactc

SEQ ID NO: 281247 - DNA, 25 bp, Artificial
  probe
  misc_feature (1)..(25): SEQ ID NO: 1035; WAN024CNW; Start 5; Stop 29
acctttcgcttaggttcaatctttt

SEQ ID NO: 281248 - DNA, 25 bp, Artificial
  probe
  misc_feature (1)..(25): SEQ ID NO: 1035; WAN024CNW; Start 69; Stop 93
tcgacaaagttcaatgttcgactca

SEQ ID NO: 281249 - DNA, 25 bp, Artificial
  probe
  misc_feature (1)..(25): SEQ ID NO: 1035; WAN024CNW; Start 40; Stop 64
tcatatttaacaaaactttcagcta

SEQ ID NO: 281250 - DNA, 25 bp, Artificial
  probe
  misc_feature (1)..(25): SEQ ID NO: 1035; WAN024CNW; Start 65; Stop 89
aaaatcgacaaagttcaatgttcga

SEQ ID NO: 281251 - DNA, 25 bp, Artificial
  probe
  misc_feature (1)..(25): SEQ ID NO: 1036; WAN024CWH; Start 312; Stop 336
gcatgaggcgaattcagtagatatt

SEQ ID NO: 281252 - DNA, 25 bp, Artificial
  probe
  misc_feature (1)..(25): SEQ ID NO: 1036; WAN024CWH; Start 326; Stop 350
cagtagatatttcagaagctcttgc

SEQ ID NO: 281253 - DNA, 25 bp, Artificial
  probe
  misc_feature (1)..(25): SEQ ID NO: 1036; WAN024CWH; Start 112; Stop 136
gtcatcactagctcaatgaatagcc

SEQ ID NO: 281254 - DNA, 25 bp, Artificial
  probe
  misc_feature (1)..(25): SEQ ID NO: 1036; WAN024CWH; Start 123; Stop 147
ctcaatgaatagccgtcagttggac

SEQ ID NO: 281255 - DNA, 25 bp, Artificial
  probe
  misc_feature (1)..(25): SEQ ID NO: 1036; WAN024CWH; Start 325; Stop 349
tcagtagatatttcagaagctcttg

SEQ ID NO: 281256 - DNA, 25 bp, Artificial
  probe
  misc_feature (1)..(25): SEQ ID NO: 1036; WAN024CWH; Start 311; Stop 335
ggcatgaggcgaattcagtagatat

SEQ ID NO: 281257 - DNA, 25 bp, Artificial
  probe
  misc_feature (1)..(25): SEQ ID NO: 1036; WAN024CWH; Start 115; Stop 139
atcactagctcaatgaatagccgtc

SEQ ID NO: 281258 - DNA, 25 bp, Artificial
  probe
  misc_feature (1)..(25): SEQ ID NO: 1036; WAN024CWH; Start 317; Stop 341
aggcgaattcagtagatatttcaga

SEQ ID NO: 281259 - DNA, 25 bp, Artificial
  probe
  misc_feature (1)..(25): SEQ ID NO: 1036; WAN024CWH; Start 316; Stop 340
gaggcgaattcagtagatatttcag

SEQ ID NO: 281260 - DNA, 25 bp, Artificial
  probe
  misc_feature (1)..(25): SEQ ID NO: 1036; WAN024CWH; Start 324; Stop 348
ttcagtagatatttcagaagctctt

SEQ ID NO: 281261 - DNA, 25 bp, Artificial
  probe
  misc_feature (1)..(25): SEQ ID NO: 1036; WAN024CWH; Start 113; Stop 137
tcatcactagctcaatgaatagccg

SEQ ID NO: 281262 - DNA, 25 bp, Artificial
  probe
  misc_feature (1)..(25): SEQ ID NO: 1036; WAN024CWH; Start 318; Stop 342
ggcgaattcagtagatatttcagaa

SEQ ID NO: 281263 - DNA, 25 bp, Artificial
  probe
  misc_feature (1)..(25): SEQ ID NO: 1036; WAN024CWH; Start 119; Stop 143
ctagctcaatgaatagccgtcagtt

SEQ ID NO: 281264 - DNA, 25 bp, Artificial
  probe
  misc_feature (1)..(25): SEQ ID NO: 1036; WAN024CWH; Start 114; Stop 138
catcactagctcaatgaatagccgt

SEQ ID NO: 281265 - DNA, 25 bp, Artificial
  probe
  misc_feature (1)..(25): SEQ ID NO: 1036; WAN024CWH; Start 315; Stop 339
tgaggcgaattcagtagatatttca

SEQ ID NO: 281266 - DNA, 25 bp, Artificial
  probe
  misc_feature (1)..(25): SEQ ID NO: 1036; WAN024CWH; Start 327; Stop 351
agtagatatttcagaagctcttgct

SEQ ID NO: 281267 - DNA, 25 bp, Artificial
  probe
  misc_feature (1)..(25): SEQ ID NO: 1036; WAN024CWH; Start 323; Stop 347
attcagtagatatttcagaagctct

SEQ ID NO: 281268 - DNA, 25 bp, Artificial
  probe
  misc_feature (1)..(25): SEQ ID NO: 1036; WAN024CWH; Start 313; Stop 337
catgaggcgaattcagtagatattt

SEQ ID NO: 281269 - DNA, 25 bp, Artificial
  probe
  misc_feature (1)..(25): SEQ ID NO: 1036; WAN024CWH; Start 120; Stop 144
tagctcaatgaatagccgtcagttg

SEQ ID NO: 281270 - DNA, 25 bp, Artificial
  probe
  misc_feature (1)..(25): SEQ ID NO: 1036; WAN024CWH; Start 272; Stop 296
cagaagaaatgcgtgcccattataa

SEQ ID NO: 281271 - DNA, 25 bp, Artificial
  probe
  misc_feature (1)..(25): SEQ ID NO: 1036; WAN024CWH; Start 314; Stop 338
atgaggcgaattcagtagatatttc

SEQ ID NO: 281272 - DNA, 25 bp, Artificial
  probe
  misc_feature (1)..(25): SEQ ID NO: 1036; WAN024CWH; Start 271; Stop 295
tcagaagaaatgcgtgcccattata

SEQ ID NO: 281273 - DNA, 25 bp, Artificial
  probe
  misc_feature (1)..(25): SEQ ID NO: 1036; WAN024CWH; Start 320; Stop 344
cgaattcagtagatatttcagaagc

SEQ ID NO: 281274 - DNA, 25 bp, Artificial
  probe
  misc_feature (1)..(25): SEQ ID NO: 1036; WAN024CWH; Start 319; Stop 343
gcgaattcagtagatatttcagaag

SEQ ID NO: 281275 - DNA, 25 bp, Artificial
  probe
  misc_feature (1)..(25): SEQ ID NO: 1036; WAN024CWH; Start 307; Stop 331
ctatggcatgaggcgaattcagtag

SEQ ID NO: 281276 - DNA, 25 bp, Artificial
  probe
  misc_feature (1)..(25): SEQ ID NO: 1036; WAN024CWH; Start 117; Stop 141
cactagctcaatgaatagccgtcag

SEQ ID NO: 281277 - DNA, 25 bp, Artificial
  probe
  misc_feature (1)..(25): SEQ ID NO: 1036; WAN024CWH; Start 322; Stop 346
aattcagtagatatttcagaagctc

SEQ ID NO: 281278 - DNA, 25 bp, Artificial
  probe
  misc_feature (1)..(25): SEQ ID NO: 1036; WAN024CWH; Start 80; Stop 104
tacaagatttgactagtgtgacgga

SEQ ID NO: 281279 - DNA, 25 bp, Artificial
  probe
  misc_feature (1)..(25): SEQ ID NO: 1036; WAN024CWH; Start 79; Stop 103
gtacaagatttgactagtgtgacgg

SEQ ID NO: 281280 - DNA, 25 bp, Artificial
  probe
  misc_feature (1)..(25): SEQ ID NO: 1036; WAN024CWH; Start 11; Stop 35
aagaattactagaactagtcgtgaa

SEQ ID NO: 281281 - DNA, 25 bp, Artificial
  probe
  misc_feature (1)..(25): SEQ ID NO: 1036; WAN024CWH; Start 149; Stop 173
ctatcgcagctaatatccgtgaaaa

SEQ ID NO: 281282 - DNA, 25 bp, Artificial
  probe
  misc_feature (1)..(25): SEQ ID NO: 1036; WAN024CWH; Start 15; Stop 39
attactagaactagtcgtgaaagcg

SEQ ID NO: 281283 - DNA, 25 bp, Artificial
  probe
  misc_feature (1)..(25): SEQ ID NO: 1036; WAN024CWH; Start 310; Stop 334
tggcatgaggcgaattcagtagata

SEQ ID NO: 281284 - DNA, 25 bp, Artificial
  probe
  misc_feature (1)..(25): SEQ ID NO: 1037; WAN024G2Q; Start 96; Stop 120
tgataaggaactacacgataggatg

SEQ ID NO: 281285 - DNA, 25 bp, Artificial
  probe
  misc_feature (1)..(25): SEQ ID NO: 1037; WAN024G2Q; Start 97; Stop 121
gataaggaactacacgataggatga

SEQ ID NO: 281286 - DNA, 25 bp, Artificial
  probe
  misc_feature (1)..(25): SEQ ID NO: 1037; WAN024G2Q; Start 95; Stop 119
ttgataaggaactacacgataggat

SEQ ID NO: 281287 - DNA, 25 bp, Artificial
  probe
  misc_feature (1)..(25): SEQ ID NO: 1037; WAN024G2Q; Start 897; Stop 921
aatgtatgttgttcgtcctcaattc

SEQ ID NO: 281288 - DNA, 25 bp, Artificial
  probe
  misc_feature (1)..(25): SEQ ID NO: 1037; WAN024G2Q; Start 898; Stop 922
atgtatgttgttcgtcctcaattct

SEQ ID NO: 281289 - DNA, 25 bp, Artificial
  probe
  misc_feature (1)..(25): SEQ ID NO: 1037; WAN024G2Q; Start 899; Stop 923
tgtatgttgttcgtcctcaattctt

SEQ ID NO: 281290 - DNA, 25 bp, Artificial
  probe
  misc_feature (1)..(25): SEQ ID NO: 1037; WAN024G2Q; Start 832; Stop 856
atgcttgaggctgataatgactact

SEQ ID NO: 281291 - DNA, 25 bp, Artificial
  probe
  misc_feature (1)..(25): SEQ ID NO: 1037; WAN024G2Q; Start 833; Stop 857
tgcttgaggctgataatgactactt

SEQ ID NO: 281292 - DNA, 25 bp, Artificial
  probe
  misc_feature (1)..(25): SEQ ID NO: 1037; WAN024G2Q; Start 739; Stop 763
ggaacagagaagaagcacaagaatg

SEQ ID NO: 281293 - DNA, 25 bp, Artificial
  probe
  misc_feature (1)..(25): SEQ ID NO: 1037; WAN024G2Q; Start 831; Stop 855
catgcttgaggctgataatgactac

SEQ ID NO: 281294 - DNA, 25 bp, Artificial
  probe
  misc_feature (1)..(25): SEQ ID NO: 1037; WAN024G2Q; Start 834; Stop 858
gcttgaggctgataatgactacttt

SEQ ID NO: 281295 - DNA, 25 bp, Artificial
  probe
  misc_feature (1)..(25): SEQ ID NO: 1037; WAN024G2Q; Start 906; Stop 930
tgttcgtcctcaattctttatccaa

SEQ ID NO: 281296 - DNA, 25 bp, Artificial
  probe
  misc_feature (1)..(25): SEQ ID NO: 1037; WAN024G2Q; Start 907; Stop 931
gttcgtcctcaattctttatccaat

SEQ ID NO: 281297 - DNA, 25 bp, Artificial
  probe
  misc_feature (1)..(25): SEQ ID NO: 1037; WAN024G2Q; Start 94; Stop 118
tttgataaggaactacacgatagga

SEQ ID NO: 281298 - DNA, 25 bp, Artificial
  probe
  misc_feature (1)..(25): SEQ ID NO: 1037; WAN024G2Q; Start 664; Stop 688
tttatcttccgtgagtgtgatgaaa

SEQ ID NO: 281299 - DNA, 25 bp, Artificial
  probe
  misc_feature (1)..(25): SEQ ID NO: 1037; WAN024G2Q; Start 847; Stop 871
aatgactactttaacacagggattg

SEQ ID NO: 281300 - DNA, 25 bp, Artificial
  probe
  misc_feature (1)..(25): SEQ ID NO: 1037; WAN024G2Q; Start 575; Stop 599
gtgagtttaacaaggttcgtagttt

SEQ ID NO: 281301 - DNA, 25 bp, Artificial
  probe
  misc_feature (1)..(25): SEQ ID NO: 1037; WAN024G2Q; Start 574; Stop 598
agtgagtttaacaaggttcgtagtt

SEQ ID NO: 281302 - DNA, 25 bp, Artificial
  probe
  misc_feature (1)..(25): SEQ ID NO: 1037; WAN024G2Q; Start 556; Stop 580
ctagaacagtatgcagagagtgagt

SEQ ID NO: 281303 - DNA, 25 bp, Artificial
  probe
  misc_feature (1)..(25): SEQ ID NO: 1037; WAN024G2Q; Start 663; Stop 687
ctttatcttccgtgagtgtgatgaa

SEQ ID NO: 281304 - DNA, 25 bp, Artificial
  probe
  misc_feature (1)..(25): SEQ ID NO: 1037; WAN024G2Q; Start 577; Stop 601
gagtttaacaaggttcgtagtttcg

SEQ ID NO: 281305 - DNA, 25 bp, Artificial
  probe
  misc_feature (1)..(25): SEQ ID NO: 1037; WAN024G2Q; Start 840; Stop 864
ggctgataatgactactttaacaca

SEQ ID NO: 281306 - DNA, 25 bp, Artificial
  probe
  misc_feature (1)..(25): SEQ ID NO: 1037; WAN024G2Q; Start 576; Stop 600
tgagtttaacaaggttcgtagtttc

SEQ ID NO: 281307 - DNA, 25 bp, Artificial
  probe
  misc_feature (1)..(25): SEQ ID NO: 1037; WAN024G2Q; Start 572; Stop 596
agagtgagtttaacaaggttcgtag

SEQ ID NO: 281308 - DNA, 25 bp, Artificial
  probe
  misc_feature (1)..(25): SEQ ID NO: 1037; WAN024G2Q; Start 571; Stop 595
gagagtgagtttaacaaggttcgta

SEQ ID NO: 281309 - DNA, 25 bp, Artificial
  probe
  misc_feature (1)..(25): SEQ ID NO: 1037; WAN024G2Q; Start 557; Stop 581
tagaacagtatgcagagagtgagtt

SEQ ID NO: 281310 - DNA, 25 bp, Artificial
  probe
  misc_feature (1)..(25): SEQ ID NO: 1037; WAN024G2Q; Start 573; Stop 597
gagtgagtttaacaaggttcgtagt

SEQ ID NO: 281311 - DNA, 25 bp, Artificial
  probe
  misc_feature (1)..(25): SEQ ID NO: 1037; WAN024G2Q; Start 613; Stop 637
gcttactttgagaaggataacaagg

SEQ ID NO: 281312 - DNA, 25 bp, Artificial
  probe
  misc_feature (1)..(25): SEQ ID NO: 1037; WAN024G2Q; Start 830; Stop 854
ccatgcttgaggctgataatgacta

SEQ ID NO: 281313 - DNA, 25 bp, Artificial
  probe
  misc_feature (1)..(25): SEQ ID NO: 1037; WAN024G2Q; Start 904; Stop 928
gttgttcgtcctcaattctttatcc

SEQ ID NO: 281314 - DNA, 25 bp, Artificial
  probe
  misc_feature (1)..(25): SEQ ID NO: 1037; WAN024G2Q; Start 900; Stop 924
gtatgttgttcgtcctcaattcttt

SEQ ID NO: 281315 - DNA, 25 bp, Artificial
  probe
  misc_feature (1)..(25): SEQ ID NO: 1037; WAN024G2Q; Start 1230; Stop 1254
aaatccaacaatgaaagcgaagttc

SEQ ID NO: 281316 - DNA, 25 bp, Artificial
  probe
  misc_feature (1)..(25): SEQ ID NO: 1037; WAN024G2Q; Start 905; Stop 929
ttgttcgtcctcaattctttatcca

SEQ ID NO: 281317 - DNA, 25 bp, Artificial
  probe
  misc_feature (1)..(25): SEQ ID NO: 1038; WAN024CUL; Start 53; Stop 77
atgttgttagtgctgaagtattgac

SEQ ID NO: 281318 - DNA, 25 bp, Artificial
  probe
  misc_feature (1)..(25): SEQ ID NO: 1038; WAN024CUL; Start 51; Stop 75
tgatgttgttagtgctgaagtattg

SEQ ID NO: 281319 - DNA, 25 bp, Artificial
  probe
  misc_feature (1)..(25): SEQ ID NO: 1038; WAN024CUL; Start 50; Stop 74
gtgatgttgttagtgctgaagtatt

SEQ ID NO: 281320 - DNA, 25 bp, Artificial
  probe
  misc_feature (1)..(25): SEQ ID NO: 1038; WAN024CUL; Start 52; Stop 76
gatgttgttagtgctgaagtattga

SEQ ID NO: 281321 - DNA, 25 bp, Artificial
  probe
  misc_feature (1)..(25): SEQ ID NO: 1038; WAN024CUL; Start 49; Stop 73
ggtgatgttgttagtgctgaagtat

SEQ ID NO: 281322 - DNA, 25 bp, Artificial
  probe
  misc_feature (1)..(25): SEQ ID NO: 1038; WAN024CUL; Start 314; Stop 338
gcgaagaagaagttgttactgttaa

SEQ ID NO: 281323 - DNA, 25 bp, Artificial
  probe
  misc_feature (1)..(25): SEQ ID NO: 1038; WAN024CUL; Start 200; Stop 224
tattggatgttcttgtacttcgtca

SEQ ID NO: 281324 - DNA, 25 bp, Artificial
  probe
  misc_feature (1)..(25): SEQ ID NO: 1038; WAN024CUL; Start 199; Stop 223
gtattggatgttcttgtacttcgtc

SEQ ID NO: 281325 - DNA, 25 bp, Artificial
  probe
  misc_feature (1)..(25): SEQ ID NO: 1038; WAN024CUL; Start 971; Stop 995
aagttggtcaagaagttcaagttaa

SEQ ID NO: 281326 - DNA, 25 bp, Artificial
  probe
  misc_feature (1)..(25): SEQ ID NO: 1038; WAN024CUL; Start 575; Stop 599
ctgttggtgatgttgtaactggtaa

SEQ ID NO: 281327 - DNA, 25 bp, Artificial
  probe
  misc_feature (1)..(25): SEQ ID NO: 1038; WAN024CUL; Start 38; Stop 62
aagttgagactggtgatgttgttag

SEQ ID NO: 281328 - DNA, 25 bp, Artificial
  probe
  misc_feature (1)..(25): SEQ ID NO: 1038; WAN024CUL; Start 835; Stop 859
ggtgatgtagtagaaggaacagtta

SEQ ID NO: 281329 - DNA, 25 bp, Artificial
  probe
  misc_feature (1)..(25): SEQ ID NO: 1038; WAN024CUL; Start 37; Stop 61
caagttgagactggtgatgttgtta

SEQ ID NO: 281330 - DNA, 25 bp, Artificial
  probe
  misc_feature (1)..(25): SEQ ID NO: 1038; WAN024CUL; Start 54; Stop 78
tgttgttagtgctgaagtattgaca

SEQ ID NO: 281331 - DNA, 25 bp, Artificial
  probe
  misc_feature (1)..(25): SEQ ID NO: 1038; WAN024CUL; Start 834; Stop 858
aggtgatgtagtagaaggaacagtt

SEQ ID NO: 281332 - DNA, 25 bp, Artificial
  probe
  misc_feature (1)..(25): SEQ ID NO: 1038; WAN024CUL; Start 833; Stop 857
aaggtgatgtagtagaaggaacagt

SEQ ID NO: 281333 - DNA, 25 bp, Artificial
  probe
  misc_feature (1)..(25): SEQ ID NO: 1038; WAN024CUL; Start 60; Stop 84
tagtgctgaagtattgacagttgat

SEQ ID NO: 281334 - DNA, 25 bp, Artificial
  probe
  misc_feature (1)..(25): SEQ ID NO: 1038; WAN024CUL; Start 59; Stop 83
ttagtgctgaagtattgacagttga

SEQ ID NO: 281335 - DNA, 25 bp, Artificial
  probe
  misc_feature (1)..(25): SEQ ID NO: 1038; WAN024CUL; Start 58; Stop 82
gttagtgctgaagtattgacagttg

SEQ ID NO: 281336 - DNA, 25 bp, Artificial
  probe
  misc_feature (1)..(25): SEQ ID NO: 1038; WAN024CUL; Start 55; Stop 79
gttgttagtgctgaagtattgacag

SEQ ID NO: 281337 - DNA, 25 bp, Artificial
  probe
  misc_feature (1)..(25): SEQ ID NO: 1038; WAN024CUL; Start 201; Stop 225
attggatgttcttgtacttcgtcaa

SEQ ID NO: 281338 - DNA, 25 bp, Artificial
  probe
  misc_feature (1)..(25): SEQ ID NO: 1038; WAN024CUL; Start 57; Stop 81
tgttagtgctgaagtattgacagtt

SEQ ID NO: 281339 - DNA, 25 bp, Artificial
  probe
  misc_feature (1)..(25): SEQ ID NO: 1038; WAN024CUL; Start 56; Stop 80
ttgttagtgctgaagtattgacagt

SEQ ID NO: 281340 - DNA, 25 bp, Artificial
  probe
  misc_feature (1)..(25): SEQ ID NO: 1038; WAN024CUL; Start 48; Stop 72
tggtgatgttgttagtgctgaagta

SEQ ID NO: 281341 - DNA, 25 bp, Artificial
  probe
  misc_feature (1)..(25): SEQ ID NO: 1038; WAN024CUL; Start 40; Stop 64
gttgagactggtgatgttgttagtg

SEQ ID NO: 281342 - DNA, 25 bp, Artificial
  probe
  misc_feature (1)..(25): SEQ ID NO: 1038; WAN024CUL; Start 39; Stop 63
agttgagactggtgatgttgttagt

SEQ ID NO: 281343 - DNA, 25 bp, Artificial
  probe
  misc_feature (1)..(25): SEQ ID NO: 1038; WAN024CUL; Start 61; Stop 85
agtgctgaagtattgacagttgatg

SEQ ID NO: 281344 - DNA, 25 bp, Artificial
  probe
  misc_feature (1)..(25): SEQ ID NO: 1038; WAN024CUL; Start 67; Stop 91
gaagtattgacagttgatgcgactc

SEQ ID NO: 281345 - DNA, 25 bp, Artificial
  probe
  misc_feature (1)..(25): SEQ ID NO: 1038; WAN024CUL; Start 836; Stop 860
gtgatgtagtagaaggaacagttaa

SEQ ID NO: 281346 - DNA, 25 bp, Artificial
  probe
  misc_feature (1)..(25): SEQ ID NO: 1038; WAN024CUL; Start 569; Stop 593
aattggctgttggtgatgttgtaac

SEQ ID NO: 281347 - DNA, 25 bp, Artificial
  probe
  misc_feature (1)..(25): SEQ ID NO: 1038; WAN024CUL; Start 881; Stop 905
catttgttgaagtattgccaggtat

SEQ ID NO: 281348 - DNA, 25 bp, Artificial
  probe
  misc_feature (1)..(25): SEQ ID NO: 1038; WAN024CUL; Start 829; Stop 853
gctaaaggtgatgtagtagaaggaa

SEQ ID NO: 281349 - DNA, 25 bp, Artificial
  probe
  misc_feature (1)..(25): SEQ ID NO: 1038; WAN024CUL; Start 826; Stop 850
ttggctaaaggtgatgtagtagaag

SEQ ID NO: 281350 - DNA, 25 bp, Artificial
  probe
  misc_feature (1)..(25): SEQ ID NO: 1039; WAN024CN3; Start 2; Stop 26
tgaacgataagaaagaggttgatgg

SEQ ID NO: 281351 - DNA, 25 bp, Artificial
  probe
  misc_feature (1)..(25): SEQ ID NO: 1039; WAN024CN3; Start 1; Stop 25
atgaacgataagaaagaggttgatg

SEQ ID NO: 281352 - DNA, 25 bp, Artificial
  probe
  misc_feature (1)..(25): SEQ ID NO: 1039; WAN024CN3; Start 7; Stop 31
gataagaaagaggttgatggcgaac

SEQ ID NO: 281353 - DNA, 25 bp, Artificial
  probe
  misc_feature (1)..(25): SEQ ID NO: 1039; WAN024CN3; Start 3; Stop 27
gaacgataagaaagaggttgatggc

SEQ ID NO: 281354 - DNA, 25 bp, Artificial
  probe
  misc_feature (1)..(25): SEQ ID NO: 1039; WAN024CN3; Start 9; Stop 33
taagaaagaggttgatggcgaacat

SEQ ID NO: 281355 - DNA, 25 bp, Artificial
  probe
  misc_feature (1)..(25): SEQ ID NO: 1039; WAN024CN3; Start 8; Stop 32
ataagaaagaggttgatggcgaaca

SEQ ID NO: 281356 - DNA, 25 bp, Artificial
  probe
  misc_feature (1)..(25): SEQ ID NO: 1039; WAN024CN3; Start 54; Stop 78
agattggattcttgtcgcctcaatt

SEQ ID NO: 281357 - DNA, 25 bp, Artificial
  probe
  misc_feature (1)..(25): SEQ ID NO: 1039; WAN024CN3; Start 53; Stop 77
aagattggattcttgtcgcctcaat

SEQ ID NO: 281358 - DNA, 25 bp, Artificial
  probe
  misc_feature (1)..(25): SEQ ID NO: 1039; WAN024CN3; Start 6; Stop 30
cgataagaaagaggttgatggcgaa

SEQ ID NO: 281359 - DNA, 25 bp, Artificial
  probe
  misc_feature (1)..(25): SEQ ID NO: 1039; WAN024CN3; Start 60; Stop 84
gattcttgtcgcctcaatttcagac

SEQ ID NO: 281360 - DNA, 25 bp, Artificial
  probe
  misc_feature (1)..(25): SEQ ID NO: 1039; WAN024CN3; Start 49; Stop 73
tataaagattggattcttgtcgcct

SEQ ID NO: 281361 - DNA, 25 bp, Artificial
  probe
  misc_feature (1)..(25): SEQ ID NO: 1039; WAN024CN3; Start 61; Stop 85
attcttgtcgcctcaatttcagact

SEQ ID NO: 281362 - DNA, 25 bp, Artificial
  probe
  misc_feature (1)..(25): SEQ ID NO: 1039; WAN024CN3; Start 50; Stop 74
ataaagattggattcttgtcgcctc

SEQ ID NO: 281363 - DNA, 25 bp, Artificial
  probe
  misc_feature (1)..(25): SEQ ID NO: 1039; WAN024CN3; Start 10; Stop 34
aagaaagaggttgatggcgaacatt

SEQ ID NO: 281364 - DNA, 25 bp, Artificial
  probe
  misc_feature (1)..(25): SEQ ID NO: 1039; WAN024CN3; Start 57; Stop 81
ttggattcttgtcgcctcaatttca

SEQ ID NO: 281365 - DNA, 25 bp, Artificial
  probe
  misc_feature (1)..(25): SEQ ID NO: 1039; WAN024CN3; Start 48; Stop 72
ttataaagattggattcttgtcgcc

SEQ ID NO: 281366 - DNA, 25 bp, Artificial
  probe
  misc_feature (1)..(25): SEQ ID NO: 1039; WAN024CN3; Start 69; Stop 93
cgcctcaatttcagacttttctatt

SEQ ID NO: 281367 - DNA, 25 bp, Artificial
  probe
  misc_feature (1)..(25): SEQ ID NO: 1039; WAN024CN3; Start 63; Stop 87
tcttgtcgcctcaatttcagacttt

SEQ ID NO: 281368 - DNA, 25 bp, Artificial
  probe
  misc_feature (1)..(25): SEQ ID NO: 1039; WAN024CN3; Start 62; Stop 86
ttcttgtcgcctcaatttcagactt

SEQ ID NO: 281369 - DNA, 25 bp, Artificial
  probe
  misc_feature (1)..(25): SEQ ID NO: 1039; WAN024CN3; Start 4; Stop 28
aacgataagaaagaggttgatggcg

SEQ ID NO: 281370 - DNA, 25 bp, Artificial
  probe
  misc_feature (1)..(25): SEQ ID NO: 1039; WAN024CN3; Start 68; Stop 92
tcgcctcaatttcagacttttctat

SEQ ID NO: 281371 - DNA, 25 bp, Artificial
  probe
  misc_feature (1)..(25): SEQ ID NO: 1039; WAN024CN3; Start 59; Stop 83
ggattcttgtcgcctcaatttcaga

SEQ ID NO: 281372 - DNA, 25 bp, Artificial
  probe
  misc_feature (1)..(25): SEQ ID NO: 1039; WAN024CN3; Start 56; Stop 80
attggattcttgtcgcctcaatttc

SEQ ID NO: 281373 - DNA, 25 bp, Artificial
  probe
  misc_feature (1)..(25): SEQ ID NO: 1039; WAN024CN3; Start 55; Stop 79
gattggattcttgtcgcctcaattt

SEQ ID NO: 281374 - DNA, 25 bp, Artificial
  probe
  misc_feature (1)..(25): SEQ ID NO: 1039; WAN024CN3; Start 58; Stop 82
tggattcttgtcgcctcaatttcag

SEQ ID NO: 281375 - DNA, 25 bp, Artificial
  probe
  misc_feature (1)..(25): SEQ ID NO: 1039; WAN024CN3; Start 77; Stop 101
tttcagacttttctattgtaagcct

SEQ ID NO: 281376 - DNA, 25 bp, Artificial
  probe
  misc_feature (1)..(25): SEQ ID NO: 1039; WAN024CN3; Start 51; Stop 75
taaagattggattcttgtcgcctca

SEQ ID NO: 281377 - DNA, 25 bp, Artificial
  probe
  misc_feature (1)..(25): SEQ ID NO: 1039; WAN024CN3; Start 11; Stop 35
agaaagaggttgatggcgaacattg

SEQ ID NO: 281378 - DNA, 25 bp, Artificial
  probe
  misc_feature (1)..(25): SEQ ID NO: 1039; WAN024CN3; Start 5; Stop 29
acgataagaaagaggttgatggcga

SEQ ID NO: 281379 - DNA, 25 bp, Artificial
  probe
  misc_feature (1)..(25): SEQ ID NO: 1039; WAN024CN3; Start 67; Stop 91
gtcgcctcaatttcagacttttcta

SEQ ID NO: 281380 - DNA, 25 bp, Artificial
  probe
  misc_feature (1)..(25): SEQ ID NO: 1039; WAN024CN3; Start 80; Stop 104
cagacttttctattgtaagcctaac

SEQ ID NO: 281381 - DNA, 25 bp, Artificial
  probe
  misc_feature (1)..(25): SEQ ID NO: 1039; WAN024CN3; Start 79; Stop 103
tcagacttttctattgtaagcctaa

SEQ ID NO: 281382 - DNA, 25 bp, Artificial
  probe
  misc_feature (1)..(25): SEQ ID NO: 1039; WAN024CN3; Start 78; Stop 102
ttcagacttttctattgtaagccta

SEQ ID NO: 281383 - DNA, 25 bp, Artificial
  probe
  misc_feature (1)..(25): SEQ ID NO: 1040; WAN024G6B; Start 1971; Stop 1995
ggcatcatatagcagtggtagtatt

SEQ ID NO: 281384 - DNA, 25 bp, Artificial
  probe
  misc_feature (1)..(25): SEQ ID NO: 1040; WAN024G6B; Start 448; Stop 472
ttgattgatgatgttgcttatgctg

SEQ ID NO: 281385 - DNA, 25 bp, Artificial
  probe
  misc_feature (1)..(25): SEQ ID NO: 1040; WAN024G6B; Start 1967; Stop 1991
ttaaggcatcatatagcagtggtag

SEQ ID NO: 281386 - DNA, 25 bp, Artificial
  probe
  misc_feature (1)..(25): SEQ ID NO: 1040; WAN024G6B; Start 1304; Stop 1328
ctatgctggatgcttctgctaatat

SEQ ID NO: 281387 - DNA, 25 bp, Artificial
  probe
  misc_feature (1)..(25): SEQ ID NO: 1040; WAN024G6B; Start 1417; Stop 1441
ttaagcattacagagttggttgagt

SEQ ID NO: 281388 - DNA, 25 bp, Artificial
  probe
  misc_feature (1)..(25): SEQ ID NO: 1040; WAN024G6B; Start 1970; Stop 1994
aggcatcatatagcagtggtagtat

SEQ ID NO: 281389 - DNA, 25 bp, Artificial
  probe
  misc_feature (1)..(25): SEQ ID NO: 1040; WAN024G6B; Start 1297; Stop 1321
aatatgtctatgctggatgcttctg

SEQ ID NO: 281390 - DNA, 25 bp, Artificial
  probe
  misc_feature (1)..(25): SEQ ID NO: 1040; WAN024G6B; Start 1418; Stop 1442
taagcattacagagttggttgagtc

SEQ ID NO: 281391 - DNA, 25 bp, Artificial
  probe
  misc_feature (1)..(25): SEQ ID NO: 1040; WAN024G6B; Start 1969; Stop 1993
aaggcatcatatagcagtggtagta

SEQ ID NO: 281392 - DNA, 25 bp, Artificial
  probe
  misc_feature (1)..(25): SEQ ID NO: 1040; WAN024G6B; Start 1968; Stop 1992
taaggcatcatatagcagtggtagt

SEQ ID NO: 281393 - DNA, 25 bp, Artificial
  probe
  misc_feature (1)..(25): SEQ ID NO: 1040; WAN024G6B; Start 1095; Stop 1119
cctgctcaagtctaacattccttat

SEQ ID NO: 281394 - DNA, 25 bp, Artificial
  probe
  misc_feature (1)..(25): SEQ ID NO: 1040; WAN024G6B; Start 1830; Stop 1854
aattctctatctgaccaatgccaac

SEQ ID NO: 281395 - DNA, 25 bp, Artificial
  probe
  misc_feature (1)..(25): SEQ ID NO: 1040; WAN024G6B; Start 1098; Stop 1122
gctcaagtctaacattccttatacc

SEQ ID NO: 281396 - DNA, 25 bp, Artificial
  probe
  misc_feature (1)..(25): SEQ ID NO: 1040; WAN024G6B; Start 1303; Stop 1327
tctatgctggatgcttctgctaata

SEQ ID NO: 281397 - DNA, 25 bp, Artificial
  probe
  misc_feature (1)..(25): SEQ ID NO: 1040; WAN024G6B; Start 1831; Stop 1855
attctctatctgaccaatgccaact

SEQ ID NO: 281398 - DNA, 25 bp, Artificial
  probe
  misc_feature (1)..(25): SEQ ID NO: 1040; WAN024G6B; Start 1097; Stop 1121
tgctcaagtctaacattccttatac

SEQ ID NO: 281399 - DNA, 25 bp, Artificial
  probe
  misc_feature (1)..(25): SEQ ID NO: 1040; WAN024G6B; Start 145; Stop 169
ctggtcaatccttggaatatcttgg

SEQ ID NO: 281400 - DNA, 25 bp, Artificial
  probe
  misc_feature (1)..(25): SEQ ID NO: 1040; WAN024G6B; Start 1172; Stop 1196
ttgcttatctcaaccttattgctaa

SEQ ID NO: 281401 - DNA, 25 bp, Artificial
  probe
  misc_feature (1)..(25): SEQ ID NO: 1040; WAN024G6B; Start 1163; Stop 1187
gcgatattattgcttatctcaacct

SEQ ID NO: 281402 - DNA, 25 bp, Artificial
  probe
  misc_feature (1)..(25): SEQ ID NO: 1040; WAN024G6B; Start 1096; Stop 1120
ctgctcaagtctaacattccttata

SEQ ID NO: 281403 - DNA, 25 bp, Artificial
  probe
  misc_feature (1)..(25): SEQ ID NO: 1040; WAN024G6B; Start 1173; Stop 1197
tgcttatctcaaccttattgctaat

SEQ ID NO: 281404 - DNA, 25 bp, Artificial
  probe
  misc_feature (1)..(25): SEQ ID NO: 1040; WAN024G6B; Start 1171; Stop 1195
attgcttatctcaaccttattgcta

SEQ ID NO: 281405 - DNA, 25 bp, Artificial
  probe
  misc_feature (1)..(25): SEQ ID NO: 1040; WAN024G6B; Start 1170; Stop 1194
tattgcttatctcaaccttattgct

SEQ ID NO: 281406 - DNA, 25 bp, Artificial
  probe
  misc_feature (1)..(25): SEQ ID NO: 1040; WAN024G6B; Start 1305; Stop 1329
tatgctggatgcttctgctaatatt

SEQ ID NO: 281407 - DNA, 25 bp, Artificial
  probe
  misc_feature (1)..(25): SEQ ID NO: 1040; WAN024G6B; Start 1832; Stop 1856
ttctctatctgaccaatgccaactc

SEQ ID NO: 281408 - DNA, 25 bp, Artificial
  probe
  misc_feature (1)..(25): SEQ ID NO: 1040; WAN024G6B; Start 144; Stop 168
gctggtcaatccttggaatatcttg

SEQ ID NO: 281409 - DNA, 25 bp, Artificial
  probe
  misc_feature (1)..(25): SEQ ID NO: 1040; WAN024G6B; Start 1099; Stop 1123
ctcaagtctaacattccttatacca

SEQ ID NO: 281410 - DNA, 25 bp, Artificial
  probe
  misc_feature (1)..(25): SEQ ID NO: 1040; WAN024G6B; Start 650; Stop 674
ttgatgagtaccaagataccaacca

SEQ ID NO: 281411 - DNA, 25 bp, Artificial
  probe
  misc_feature (1)..(25): SEQ ID NO: 1040; WAN024G6B; Start 449; Stop 473
tgattgatgatgttgcttatgctgc

SEQ ID NO: 281412 - DNA, 25 bp, Artificial
  probe
  misc_feature (1)..(25): SEQ ID NO: 1040; WAN024G6B; Start 651; Stop 675
tgatgagtaccaagataccaaccac

SEQ ID NO: 281413 - DNA, 25 bp, Artificial
  probe
  misc_feature (1)..(25): SEQ ID NO: 1040; WAN024G6B; Start 1169; Stop 1193
ttattgcttatctcaaccttattgc

SEQ ID NO: 281414 - DNA, 25 bp, Artificial
  probe
  misc_feature (1)..(25): SEQ ID NO: 1040; WAN024G6B; Start 1302; Stop 1326
gtctatgctggatgcttctgctaat

SEQ ID NO: 281415 - DNA, 25 bp, Artificial
  probe
  misc_feature (1)..(25): SEQ ID NO: 1040; WAN024G6B; Start 1639; Stop 1663
gattcaggtagtcaggagacatcag

SEQ ID NO: 281416 - DNA, 25 bp, Artificial
  probe
  misc_feature (1)..(25): SEQ ID NO: 1041; WAN024B6A; Start 347; Stop 371
cgacttcagaccaagaattgactag

SEQ ID NO: 281417 - DNA, 25 bp, Artificial
  probe
  misc_feature (1)..(25): SEQ ID NO: 1041; WAN024B6A; Start 348; Stop 372
gacttcagaccaagaattgactagc

SEQ ID NO: 281418 - DNA, 25 bp, Artificial
  probe
  misc_feature (1)..(25): SEQ ID NO: 1041; WAN024B6A; Start 1230; Stop 1254
aatcgttgttcgtaaggaattgctg

SEQ ID NO: 281419 - DNA, 25 bp, Artificial
  probe
  misc_feature (1)..(25): SEQ ID NO: 1041; WAN024B6A; Start 238; Stop 262
cacaaactcatctcgcaatacaaat

SEQ ID NO: 281420 - DNA, 25 bp, Artificial
  probe
  misc_feature (1)..(25): SEQ ID NO: 1041; WAN024B6A; Start 994; Stop 1018
gcgacagatgtttatgactttgaat

SEQ ID NO: 281421 - DNA, 25 bp, Artificial
  probe
  misc_feature (1)..(25): SEQ ID NO: 1041; WAN024B6A; Start 780; Stop 804
ttctgttatcaatgctccaactgct

SEQ ID NO: 281422 - DNA, 25 bp, Artificial
  probe
  misc_feature (1)..(25): SEQ ID NO: 1041; WAN024B6A; Start 239; Stop 263
acaaactcatctcgcaatacaaatt

SEQ ID NO: 281423 - DNA, 25 bp, Artificial
  probe
  misc_feature (1)..(25): SEQ ID NO: 1041; WAN024B6A; Start 384; Stop 408
cttcttactccaaacacctcaacaa

SEQ ID NO: 281424 - DNA, 25 bp, Artificial
  probe
  misc_feature (1)..(25): SEQ ID NO: 1041; WAN024B6A; Start 1028; Stop 1052
acattaaacttactcaagacaaggc

SEQ ID NO: 281425 - DNA, 25 bp, Artificial
  probe
  misc_feature (1)..(25): SEQ ID NO: 1041; WAN024B6A; Start 388; Stop 412
ttactccaaacacctcaacaagatg

SEQ ID NO: 281426 - DNA, 25 bp, Artificial
  probe
  misc_feature (1)..(25): SEQ ID NO: 1041; WAN024B6A; Start 1030; Stop 1054
attaaacttactcaagacaaggctg

SEQ ID NO: 281427 - DNA, 25 bp, Artificial
  probe
  misc_feature (1)..(25): SEQ ID NO: 1041; WAN024B6A; Start 1029; Stop 1053
cattaaacttactcaagacaaggct

SEQ ID NO: 281428 - DNA, 25 bp, Artificial
  probe
  misc_feature (1)..(25): SEQ ID NO: 1041; WAN024B6A; Start 387; Stop 411
cttactccaaacacctcaacaagat

SEQ ID NO: 281429 - DNA, 25 bp, Artificial
  probe
  misc_feature (1)..(25): SEQ ID NO: 1041; WAN024B6A; Start 991; Stop 1015
cttgcgacagatgtttatgactttg

SEQ ID NO: 281430 - DNA, 25 bp, Artificial
  probe
  misc_feature (1)..(25): SEQ ID NO: 1041; WAN024B6A; Start 778; Stop 802
gtttctgttatcaatgctccaactg

SEQ ID NO: 281431 - DNA, 25 bp, Artificial
  probe
  misc_feature (1)..(25): SEQ ID NO: 1041; WAN024B6A; Start 1031; Stop 1055
ttaaacttactcaagacaaggctgg

SEQ ID NO: 281432 - DNA, 25 bp, Artificial
  probe
  misc_feature (1)..(25): SEQ ID NO: 1041; WAN024B6A; Start 349; Stop 373
acttcagaccaagaattgactagcc

SEQ ID NO: 281433 - DNA, 25 bp, Artificial
  probe
  misc_feature (1)..(25): SEQ ID NO: 1041; WAN024B6A; Start 385; Stop 409
ttcttactccaaacacctcaacaag

SEQ ID NO: 281434 - DNA, 25 bp, Artificial
  probe
  misc_feature (1)..(25): SEQ ID NO: 1041; WAN024B6A; Start 993; Stop 1017
tgcgacagatgtttatgactttgaa

SEQ ID NO: 281435 - DNA, 25 bp, Artificial
  probe
  misc_feature (1)..(25): SEQ ID NO: 1041; WAN024B6A; Start 992; Stop 1016
ttgcgacagatgtttatgactttga

SEQ ID NO: 281436 - DNA, 25 bp, Artificial
  probe
  misc_feature (1)..(25): SEQ ID NO: 1041; WAN024B6A; Start 526; Stop 550
aataaattgcttcgtcaagatgctc

SEQ ID NO: 281437 - DNA, 25 bp, Artificial
  probe
  misc_feature (1)..(25): SEQ ID NO: 1041; WAN024B6A; Start 1225; Stop 1249
taccaaatcgttgttcgtaaggaat

SEQ ID NO: 281438 - DNA, 25 bp, Artificial
  probe
  misc_feature (1)..(25): SEQ ID NO: 1041; WAN024B6A; Start 1224; Stop 1248
ataccaaatcgttgttcgtaaggaa

SEQ ID NO: 281439 - DNA, 25 bp, Artificial
  probe
  misc_feature (1)..(25): SEQ ID NO: 1041; WAN024B6A; Start 525; Stop 549
taataaattgcttcgtcaagatgct

SEQ ID NO: 281440 - DNA, 25 bp, Artificial
  probe
  misc_feature (1)..(25): SEQ ID NO: 1041; WAN024B6A; Start 1234; Stop 1258
gttgttcgtaaggaattgctgacag

SEQ ID NO: 281441 - DNA, 25 bp, Artificial
  probe
  misc_feature (1)..(25): SEQ ID NO: 1041; WAN024B6A; Start 346; Stop 370
gcgacttcagaccaagaattgacta

SEQ ID NO: 281442 - DNA, 25 bp, Artificial
  probe
  misc_feature (1)..(25): SEQ ID NO: 1041; WAN024B6A; Start 1231; Stop 1255
atcgttgttcgtaaggaattgctga

SEQ ID NO: 281443 - DNA, 25 bp, Artificial
  probe
  misc_feature (1)..(25): SEQ ID NO: 1041; WAN024B6A; Start 471; Stop 495
agtttatcctgagtctgtttcatct

SEQ ID NO: 281444 - DNA, 25 bp, Artificial
  probe
  misc_feature (1)..(25): SEQ ID NO: 1041; WAN024B6A; Start 342; Stop 366
cattgcgacttcagaccaagaattg

SEQ ID NO: 281445 - DNA, 25 bp, Artificial
  probe
  misc_feature (1)..(25): SEQ ID NO: 1041; WAN024B6A; Start 341; Stop 365
tcattgcgacttcagaccaagaatt

SEQ ID NO: 281446 - DNA, 25 bp, Artificial
  probe
  misc_feature (1)..(25): SEQ ID NO: 1041; WAN024B6A; Start 995; Stop 1019
cgacagatgtttatgactttgaatc

SEQ ID NO: 281447 - DNA, 25 bp, Artificial
  probe
  misc_feature (1)..(25): SEQ ID NO: 1041; WAN024B6A; Start 343; Stop 367
attgcgacttcagaccaagaattga

SEQ ID NO: 281448 - DNA, 25 bp, Artificial
  probe
  misc_feature (1)..(25): SEQ ID NO: 1041; WAN024B6A; Start 474; Stop 498
ttatcctgagtctgtttcatctagc

SEQ ID NO: 281449 - DNA, 25 bp, Artificial
  probe
  misc_feature (1)..(25): SEQ ID NO: 1042; WAN024G2T; Start 846; Stop 870
caatctctataagccaaggaaggtt

SEQ ID NO: 281450 - DNA, 25 bp, Artificial
  probe
  misc_feature (1)..(25): SEQ ID NO: 1042; WAN024G2T; Start 349; Stop 373
atgtattcggcagttaaggttaatg

SEQ ID NO: 281451 - DNA, 25 bp, Artificial
  probe
  misc_feature (1)..(25): SEQ ID NO: 1042; WAN024G2T; Start 352; Stop 376
tattcggcagttaaggttaatggtc

SEQ ID NO: 281452 - DNA, 25 bp, Artificial
  probe
  misc_feature (1)..(25): SEQ ID NO: 1042; WAN024G2T; Start 351; Stop 375
gtattcggcagttaaggttaatggt

SEQ ID NO: 281453 - DNA, 25 bp, Artificial
  probe
  misc_feature (1)..(25): SEQ ID NO: 1042; WAN024G2T; Start 350; Stop 374
tgtattcggcagttaaggttaatgg

SEQ ID NO: 281454 - DNA, 25 bp, Artificial
  probe
  misc_feature (1)..(25): SEQ ID NO: 1042; WAN024G2T; Start 347; Stop 371
ctatgtattcggcagttaaggttaa

SEQ ID NO: 281455 - DNA, 25 bp, Artificial
  probe
  misc_feature (1)..(25): SEQ ID NO: 1042; WAN024G2T; Start 348; Stop 372
tatgtattcggcagttaaggttaat

SEQ ID NO: 281456 - DNA, 25 bp, Artificial
  probe
  misc_feature (1)..(25): SEQ ID NO: 1042; WAN024G2T; Start 346; Stop 370
cctatgtattcggcagttaaggtta

SEQ ID NO: 281457 - DNA, 25 bp, Artificial
  probe
  misc_feature (1)..(25): SEQ ID NO: 1042; WAN024G2T; Start 845; Stop 869
gcaatctctataagccaaggaaggt

SEQ ID NO: 281458 - DNA, 25 bp, Artificial
  probe
  misc_feature (1)..(25): SEQ ID NO: 1042; WAN024G2T; Start 600; Stop 624
tagtgctgctggcttacaattagaa

SEQ ID NO: 281459 - DNA, 25 bp, Artificial
  probe
  misc_feature (1)..(25): SEQ ID NO: 1042; WAN024G2T; Start 847; Stop 871
aatctctataagccaaggaaggttt

SEQ ID NO: 281460 - DNA, 25 bp, Artificial
  probe
  misc_feature (1)..(25): SEQ ID NO: 1042; WAN024G2T; Start 599; Stop 623
ctagtgctgctggcttacaattaga

SEQ ID NO: 281461 - DNA, 25 bp, Artificial
  probe
  misc_feature (1)..(25): SEQ ID NO: 1042; WAN024G2T; Start 799; Stop 823
gctgcctttgaagatgataaattgt

SEQ ID NO: 281462 - DNA, 25 bp, Artificial
  probe
  misc_feature (1)..(25): SEQ ID NO: 1042; WAN024G2T; Start 455; Stop 479
gaacaagtccgatttcttatgatgg

SEQ ID NO: 281463 - DNA, 25 bp, Artificial
  probe
  misc_feature (1)..(25): SEQ ID NO: 1042; WAN024G2T; Start 454; Stop 478
cgaacaagtccgatttcttatgatg

SEQ ID NO: 281464 - DNA, 25 bp, Artificial
  probe
  misc_feature (1)..(25): SEQ ID NO: 1042; WAN024G2T; Start 363; Stop 387
taaggttaatggtcgcaagctctat

SEQ ID NO: 281465 - DNA, 25 bp, Artificial
  probe
  misc_feature (1)..(25): SEQ ID NO: 1042; WAN024G2T; Start 362; Stop 386
ttaaggttaatggtcgcaagctcta

SEQ ID NO: 281466 - DNA, 25 bp, Artificial
  probe
  misc_feature (1)..(25): SEQ ID NO: 1042; WAN024G2T; Start 369; Stop 393
taatggtcgcaagctctatgagtat

SEQ ID NO: 281467 - DNA, 25 bp, Artificial
  probe
  misc_feature (1)..(25): SEQ ID NO: 1042; WAN024G2T; Start 534; Stop 558
tactttgtcagttgatttgggtgaa

SEQ ID NO: 281468 - DNA, 25 bp, Artificial
  probe
  misc_feature (1)..(25): SEQ ID NO: 1042; WAN024G2T; Start 368; Stop 392
ttaatggtcgcaagctctatgagta

SEQ ID NO: 281469 - DNA, 25 bp, Artificial
  probe
  misc_feature (1)..(25): SEQ ID NO: 1042; WAN024G2T; Start 456; Stop 480
aacaagtccgatttcttatgatggc

SEQ ID NO: 281470 - DNA, 25 bp, Artificial
  probe
  misc_feature (1)..(25): SEQ ID NO: 1042; WAN024G2T; Start 800; Stop 824
ctgcctttgaagatgataaattgtt

SEQ ID NO: 281471 - DNA, 25 bp, Artificial
  probe
  misc_feature (1)..(25): SEQ ID NO: 1042; WAN024G2T; Start 453; Stop 477
gcgaacaagtccgatttcttatgat

SEQ ID NO: 281472 - DNA, 25 bp, Artificial
  probe
  misc_feature (1)..(25): SEQ ID NO: 1042; WAN024G2T; Start 353; Stop 377
attcggcagttaaggttaatggtcg

SEQ ID NO: 281473 - DNA, 25 bp, Artificial
  probe
  misc_feature (1)..(25): SEQ ID NO: 1042; WAN024G2T; Start 656; Stop 680
aagtagaggctgggcaattagattt

SEQ ID NO: 281474 - DNA, 25 bp, Artificial
  probe
  misc_feature (1)..(25): SEQ ID NO: 1042; WAN024G2T; Start 655; Stop 679
aaagtagaggctgggcaattagatt

SEQ ID NO: 281475 - DNA, 25 bp, Artificial
  probe
  misc_feature (1)..(25): SEQ ID NO: 1042; WAN024G2T; Start 602; Stop 626
gtgctgctggcttacaattagaaga

SEQ ID NO: 281476 - DNA, 25 bp, Artificial
  probe
  misc_feature (1)..(25): SEQ ID NO: 1042; WAN024G2T; Start 601; Stop 625
agtgctgctggcttacaattagaag

SEQ ID NO: 281477 - DNA, 25 bp, Artificial
  probe
  misc_feature (1)..(25): SEQ ID NO: 1042; WAN024G2T; Start 535; Stop 559
actttgtcagttgatttgggtgaaa

SEQ ID NO: 281478 - DNA, 25 bp, Artificial
  probe
  misc_feature (1)..(25): SEQ ID NO: 1042; WAN024G2T; Start 440; Stop 464
tttatcaatttgagcgaacaagtcc

SEQ ID NO: 281479 - DNA, 25 bp, Artificial
  probe
  misc_feature (1)..(25): SEQ ID NO: 1042; WAN024G2T; Start 528; Stop 552
catccgtactttgtcagttgatttg

SEQ ID NO: 281480 - DNA, 25 bp, Artificial
  probe
  misc_feature (1)..(25): SEQ ID NO: 1042; WAN024G2T; Start 798; Stop 822
ggctgcctttgaagatgataaattg

SEQ ID NO: 281481 - DNA, 25 bp, Artificial
  probe
  misc_feature (1)..(25): SEQ ID NO: 1042; WAN024G2T; Start 438; Stop 462
catttatcaatttgagcgaacaagt

SEQ ID NO: 281482 - DNA, 25 bp, Artificial
  probe
  misc_feature (1)..(25): SEQ ID NO: 1043; WAN024FZW; Start 281; Stop 305
atatcatactctgtccgctgtttca

SEQ ID NO: 281483 - DNA, 25 bp, Artificial
  probe
  misc_feature (1)..(25): SEQ ID NO: 1043; WAN024FZW; Start 282; Stop 306
tatcatactctgtccgctgtttcaa

SEQ ID NO: 281484 - DNA, 25 bp, Artificial
  probe
  misc_feature (1)..(25): SEQ ID NO: 1043; WAN024FZW; Start 62; Stop 86
cggaaaccataattaaccagcattt

SEQ ID NO: 281485 - DNA, 25 bp, Artificial
  probe
  misc_feature (1)..(25): SEQ ID NO: 1043; WAN024FZW; Start 61; Stop 85
acggaaaccataattaaccagcatt

SEQ ID NO: 281486 - DNA, 25 bp, Artificial
  probe
  misc_feature (1)..(25): SEQ ID NO: 1043; WAN024FZW; Start 60; Stop 84
aacggaaaccataattaaccagcat

SEQ ID NO: 281487 - DNA, 25 bp, Artificial
  probe
  misc_feature (1)..(25): SEQ ID NO: 1043; WAN024FZW; Start 58; Stop 82
caaacggaaaccataattaaccagc

SEQ ID NO: 281488 - DNA, 25 bp, Artificial
  probe
  misc_feature (1)..(25): SEQ ID NO: 1043; WAN024FZW; Start 57; Stop 81
gcaaacggaaaccataattaaccag

SEQ ID NO: 281489 - DNA, 25 bp, Artificial
  probe
  misc_feature (1)..(25): SEQ ID NO: 1043; WAN024FZW; Start 59; Stop 83
aaacggaaaccataattaaccagca

SEQ ID NO: 281490 - DNA, 25 bp, Artificial
  probe
  misc_feature (1)..(25): SEQ ID NO: 1043; WAN024FZW; Start 283; Stop 307
atcatactctgtccgctgtttcaaa

SEQ ID NO: 281491 - DNA, 25 bp, Artificial
  probe
  misc_feature (1)..(25): SEQ ID NO: 1043; WAN024FZW; Start 70; Stop 94
ataattaaccagcatttctttacgc

SEQ ID NO: 281492 - DNA, 25 bp, Artificial
  probe
  misc_feature (1)..(25): SEQ ID NO: 1043; WAN024FZW; Start 66; Stop 90
aaccataattaaccagcatttcttt

SEQ ID NO: 281493 - DNA, 25 bp, Artificial
  probe
  misc_feature (1)..(25): SEQ ID NO: 1043; WAN024FZW; Start 65; Stop 89
aaaccataattaaccagcatttctt

SEQ ID NO: 281494 - DNA, 25 bp, Artificial
  probe
  misc_feature (1)..(25): SEQ ID NO: 1043; WAN024FZW; Start 56; Stop 80
ggcaaacggaaaccataattaacca

SEQ ID NO: 281495 - DNA, 25 bp, Artificial
  probe
  misc_feature (1)..(25): SEQ ID NO: 1043; WAN024FZW; Start 53; Stop 77
gacggcaaacggaaaccataattaa

SEQ ID NO: 281496 - DNA, 25 bp, Artificial
  probe
  misc_feature (1)..(25): SEQ ID NO: 1043; WAN024FZW; Start 280; Stop 304
gatatcatactctgtccgctgtttc

SEQ ID NO: 281497 - DNA, 25 bp, Artificial
  probe
  misc_feature (1)..(25): SEQ ID NO: 1043; WAN024FZW; Start 275; Stop 299
atttcgatatcatactctgtccgct

SEQ ID NO: 281498 - DNA, 25 bp, Artificial
  probe
  misc_feature (1)..(25): SEQ ID NO: 1043; WAN024FZW; Start 274; Stop 298
catttcgatatcatactctgtccgc

SEQ ID NO: 281499 - DNA, 25 bp, Artificial
  probe
  misc_feature (1)..(25): SEQ ID NO: 1043; WAN024FZW; Start 54; Stop 78
acggcaaacggaaaccataattaac

SEQ ID NO: 281500 - DNA, 25 bp, Artificial
  probe
  misc_feature (1)..(25): SEQ ID NO: 1043; WAN024FZW; Start 278; Stop 302
tcgatatcatactctgtccgctgtt

SEQ ID NO: 281501 - DNA, 25 bp, Artificial
  probe
  misc_feature (1)..(25): SEQ ID NO: 1043; WAN024FZW; Start 277; Stop 301
ttcgatatcatactctgtccgctgt

SEQ ID NO: 281502 - DNA, 25 bp, Artificial
  probe
  misc_feature (1)..(25): SEQ ID NO: 1043; WAN024FZW; Start 216; Stop 240
gtccatccatgtggcgagaataatt

SEQ ID NO: 281503 - DNA, 25 bp, Artificial
  probe
  misc_feature (1)..(25): SEQ ID NO: 1043; WAN024FZW; Start 69; Stop 93
cataattaaccagcatttctttacg

SEQ ID NO: 281504 - DNA, 25 bp, Artificial
  probe
  misc_feature (1)..(25): SEQ ID NO: 1043; WAN024FZW; Start 318; Stop 342
caagcagtttaccttccttttcaaa

SEQ ID NO: 281505 - DNA, 25 bp, Artificial
  probe
  misc_feature (1)..(25): SEQ ID NO: 1043; WAN024FZW; Start 315; Stop 339
cttcaagcagtttaccttccttttc

SEQ ID NO: 281506 - DNA, 25 bp, Artificial
  probe
  misc_feature (1)..(25): SEQ ID NO: 1043; WAN024FZW; Start 63; Stop 87
ggaaaccataattaaccagcatttc

SEQ ID NO: 281507 - DNA, 25 bp, Artificial
  probe
  misc_feature (1)..(25): SEQ ID NO: 1043; WAN024FZW; Start 317; Stop 341
tcaagcagtttaccttccttttcaa

SEQ ID NO: 281508 - DNA, 25 bp, Artificial
  probe
  misc_feature (1)..(25): SEQ ID NO: 1043; WAN024FZW; Start 316; Stop 340
ttcaagcagtttaccttccttttca

SEQ ID NO: 281509 - DNA, 25 bp, Artificial
  probe
  misc_feature (1)..(25): SEQ ID NO: 1043; WAN024FZW; Start 52; Stop 76
agacggcaaacggaaaccataatta

SEQ ID NO: 281510 - DNA, 25 bp, Artificial
  probe
  misc_feature (1)..(25): SEQ ID NO: 1043; WAN024FZW; Start 284; Stop 308
tcatactctgtccgctgtttcaaac

SEQ ID NO: 281511 - DNA, 25 bp, Artificial
  probe
  misc_feature (1)..(25): SEQ ID NO: 1043; WAN024FZW; Start 319; Stop 343
aagcagtttaccttccttttcaaag

SEQ ID NO: 281512 - DNA, 25 bp, Artificial
  probe
  misc_feature (1)..(25): SEQ ID NO: 1043; WAN024FZW; Start 322; Stop 346
cagtttaccttccttttcaaagaca

SEQ ID NO: 281513 - DNA, 25 bp, Artificial
  probe
  misc_feature (1)..(25): SEQ ID NO: 1043; WAN024FZW; Start 67; Stop 91
accataattaaccagcatttcttta

SEQ ID NO: 281514 - DNA, 25 bp, Artificial
  probe
  misc_feature (1)..(25): SEQ ID NO: 1043; WAN024FZW; Start 323; Stop 347
agtttaccttccttttcaaagacag

SEQ ID NO: 281515 - DNA, 25 bp, Artificial
  probe
  misc_feature (1)..(25): SEQ ID NO: 1044; WAN024DNH; Start 5; Stop 29
actacctatttcaagaagacagttc

SEQ ID NO: 281516 - DNA, 25 bp, Artificial
  probe
  misc_feature (1)..(25): SEQ ID NO: 1044; WAN024DNH; Start 3; Stop 27
gaactacctatttcaagaagacagt

SEQ ID NO: 281517 - DNA, 25 bp, Artificial
  probe
  misc_feature (1)..(25): SEQ ID NO: 1044; WAN024DNH; Start 21; Stop 45
agacagttcttctcaaatctttaac

SEQ ID NO: 281518 - DNA, 25 bp, Artificial
  probe
  misc_feature (1)..(25): SEQ ID NO: 1044; WAN024DNH; Start 86; Stop 110
aaactgctgaagaattactaaatct

SEQ ID NO: 281519 - DNA, 25 bp, Artificial
  probe
  misc_feature (1)..(25): SEQ ID NO: 1044; WAN024DNH; Start 6; Stop 30
ctacctatttcaagaagacagttct

SEQ ID NO: 281520 - DNA, 25 bp, Artificial
  probe
  misc_feature (1)..(25): SEQ ID NO: 1044; WAN024DNH; Start 2; Stop 26
tgaactacctatttcaagaagacag

SEQ ID NO: 281521 - DNA, 25 bp, Artificial
  probe
  misc_feature (1)..(25): SEQ ID NO: 1044; WAN024DNH; Start 30; Stop 54
ttctcaaatctttaacttaggaact

SEQ ID NO: 281522 - DNA, 25 bp, Artificial
  probe
  misc_feature (1)..(25): SEQ ID NO: 1044; WAN024DNH; Start 4; Stop 28
aactacctatttcaagaagacagtt

SEQ ID NO: 281523 - DNA, 25 bp, Artificial
  probe
  misc_feature (1)..(25): SEQ ID NO: 1044; WAN024DNH; Start 90; Stop 114
tgctgaagaattactaaatctaact

SEQ ID NO: 281524 - DNA, 25 bp, Artificial
  probe
  misc_feature (1)..(25): SEQ ID NO: 1044; WAN024DNH; Start 88; Stop 112
actgctgaagaattactaaatctaa

SEQ ID NO: 281525 - DNA, 25 bp, Artificial
  probe
  misc_feature (1)..(25): SEQ ID NO: 1044; WAN024DNH; Start 87; Stop 111
aactgctgaagaattactaaatcta

SEQ ID NO: 281526 - DNA, 25 bp, Artificial
  probe
  misc_feature (1)..(25): SEQ ID NO: 1044; WAN024DNH; Start 29; Stop 53
cttctcaaatctttaacttaggaac

SEQ ID NO: 281527 - DNA, 25 bp, Artificial
  probe
  misc_feature (1)..(25): SEQ ID NO: 1044; WAN024DNH; Start 27; Stop 51
ttcttctcaaatctttaacttagga

SEQ ID NO: 281528 - DNA, 25 bp, Artificial
  probe
  misc_feature (1)..(25): SEQ ID NO: 1044; WAN024DNH; Start 26; Stop 50
gttcttctcaaatctttaacttagg

SEQ ID NO: 281529 - DNA, 25 bp, Artificial
  probe
  misc_feature (1)..(25): SEQ ID NO: 1044; WAN024DNH; Start 1; Stop 25
atgaactacctatttcaagaagaca

SEQ ID NO: 281530 - DNA, 25 bp, Artificial
  probe
  misc_feature (1)..(25): SEQ ID NO: 1044; WAN024DNH; Start 89; Stop 113
ctgctgaagaattactaaatctaac

SEQ ID NO: 281531 - DNA, 25 bp, Artificial
  probe
  misc_feature (1)..(25): SEQ ID NO: 1044; WAN024DNH; Start 58; Stop 82
aaaggctatactatcaaagaaatct

SEQ ID NO: 281532 - DNA, 25 bp, Artificial
  probe
  misc_feature (1)..(25): SEQ ID NO: 1044; WAN024DNH; Start 28; Stop 52
tcttctcaaatctttaacttaggaa

SEQ ID NO: 281533 - DNA, 25 bp, Artificial
  probe
  misc_feature (1)..(25): SEQ ID NO: 1044; WAN024DNH; Start 22; Stop 46
gacagttcttctcaaatctttaact

SEQ ID NO: 281534 - DNA, 25 bp, Artificial
  probe
  misc_feature (1)..(25): SEQ ID NO: 1044; WAN024DNH; Start 59; Stop 83
aaggctatactatcaaagaaatctt

SEQ ID NO: 281535 - DNA, 25 bp, Artificial
  probe
  misc_feature (1)..(25): SEQ ID NO: 1044; WAN024DNH; Start 31; Stop 55
tctcaaatctttaacttaggaacta

SEQ ID NO: 281536 - DNA, 25 bp, Artificial
  probe
  misc_feature (1)..(25): SEQ ID NO: 1044; WAN024DNH; Start 20; Stop 44
aagacagttcttctcaaatctttaa

SEQ ID NO: 281537 - DNA, 25 bp, Artificial
  probe
  misc_feature (1)..(25): SEQ ID NO: 1044; WAN024DNH; Start 23; Stop 47
acagttcttctcaaatctttaactt

SEQ ID NO: 281538 - DNA, 25 bp, Artificial
  probe
  misc_feature (1)..(25): SEQ ID NO: 1044; WAN024DNH; Start 85; Stop 109
aaaactgctgaagaattactaaatc

SEQ ID NO: 281539 - DNA, 25 bp, Artificial
  probe
  misc_feature (1)..(25): SEQ ID NO: 1044; WAN024DNH; Start 71; Stop 95
tcaaagaaatctttaaaactgctga

SEQ ID NO: 281540 - DNA, 25 bp, Artificial
  probe
  misc_feature (1)..(25): SEQ ID NO: 1044; WAN024DNH; Start 60; Stop 84
aggctatactatcaaagaaatcttt

SEQ ID NO: 281541 - DNA, 25 bp, Artificial
  probe
  misc_feature (1)..(25): SEQ ID NO: 1044; WAN024DNH; Start 75; Stop 99
agaaatctttaaaactgctgaagaa

SEQ ID NO: 281542 - DNA, 25 bp, Artificial
  probe
  misc_feature (1)..(25): SEQ ID NO: 1044; WAN024DNH; Start 74; Stop 98
aagaaatctttaaaactgctgaaga

SEQ ID NO: 281543 - DNA, 25 bp, Artificial
  probe
  misc_feature (1)..(25): SEQ ID NO: 1044; WAN024DNH; Start 72; Stop 96
caaagaaatctttaaaactgctgaa

SEQ ID NO: 281544 - DNA, 25 bp, Artificial
  probe
  misc_feature (1)..(25): SEQ ID NO: 1044; WAN024DNH; Start 7; Stop 31
tacctatttcaagaagacagttctt

SEQ ID NO: 281545 - DNA, 25 bp, Artificial
  probe
  misc_feature (1)..(25): SEQ ID NO: 1044; WAN024DNH; Start 57; Stop 81
aaaaggctatactatcaaagaaatc

SEQ ID NO: 281546 - DNA, 25 bp, Artificial
  probe
  misc_feature (1)..(25): SEQ ID NO: 1044; WAN024DNH; Start 73; Stop 97
aaagaaatctttaaaactgctgaag

SEQ ID NO: 281547 - DNA, 25 bp, Artificial
  probe
  misc_feature (1)..(25): SEQ ID NO: 1044; WAN024DNH; Start 70; Stop 94
atcaaagaaatctttaaaactgctg

SEQ ID NO: 281548 - DNA, 25 bp, Artificial
  probe
  misc_feature (1)..(25): SEQ ID NO: 1045; WAN024ETR; Start 443; Stop 467
cagtggttctcaatgttgatattcc

SEQ ID NO: 281549 - DNA, 25 bp, Artificial
  probe
  misc_feature (1)..(25): SEQ ID NO: 1045; WAN024ETR; Start 442; Stop 466
ccagtggttctcaatgttgatattc

SEQ ID NO: 281550 - DNA, 25 bp, Artificial
  probe
  misc_feature (1)..(25): SEQ ID NO: 1045; WAN024ETR; Start 310; Stop 334
attatcggtttggaagtctatgagg

SEQ ID NO: 281551 - DNA, 25 bp, Artificial
  probe
  misc_feature (1)..(25): SEQ ID NO: 1045; WAN024ETR; Start 444; Stop 468
agtggttctcaatgttgatattcca

SEQ ID NO: 281552 - DNA, 25 bp, Artificial
  probe
  misc_feature (1)..(25): SEQ ID NO: 1045; WAN024ETR; Start 168; Stop 192
ccgtaaacagaagaactttgacatt

SEQ ID NO: 281553 - DNA, 25 bp, Artificial
  probe
  misc_feature (1)..(25): SEQ ID NO: 1045; WAN024ETR; Start 445; Stop 469
gtggttctcaatgttgatattccaa

SEQ ID NO: 281554 - DNA, 25 bp, Artificial
  probe
  misc_feature (1)..(25): SEQ ID NO: 1045; WAN024ETR; Start 480; Stop 504
cgatgtggaaatcttagaagggtta

SEQ ID NO: 281555 - DNA, 25 bp, Artificial
  probe
  misc_feature (1)..(25): SEQ ID NO: 1045; WAN024ETR; Start 309; Stop 333
gattatcggtttggaagtctatgag

SEQ ID NO: 281556 - DNA, 25 bp, Artificial
  probe
  misc_feature (1)..(25): SEQ ID NO: 1045; WAN024ETR; Start 492; Stop 516
cttagaagggttagacgatgaagat

SEQ ID NO: 281557 - DNA, 25 bp, Artificial
  probe
  misc_feature (1)..(25): SEQ ID NO: 1045; WAN024ETR; Start 167; Stop 191
accgtaaacagaagaactttgacat

SEQ ID NO: 281558 - DNA, 25 bp, Artificial
  probe
  misc_feature (1)..(25): SEQ ID NO: 1045; WAN024ETR; Start 486; Stop 510
ggaaatcttagaagggttagacgat

SEQ ID NO: 281559 - DNA, 25 bp, Artificial
  probe
  misc_feature (1)..(25): SEQ ID NO: 1045; WAN024ETR; Start 483; Stop 507
tgtggaaatcttagaagggttagac

SEQ ID NO: 281560 - DNA, 25 bp, Artificial
  probe
  misc_feature (1)..(25): SEQ ID NO: 1045; WAN024ETR; Start 490; Stop 514
atcttagaagggttagacgatgaag

SEQ ID NO: 281561 - DNA, 25 bp, Artificial
  probe
  misc_feature (1)..(25): SEQ ID NO: 1045; WAN024ETR; Start 481; Stop 505
gatgtggaaatcttagaagggttag

SEQ ID NO: 281562 - DNA, 25 bp, Artificial
  probe
  misc_feature (1)..(25): SEQ ID NO: 1045; WAN024ETR; Start 308; Stop 332
agattatcggtttggaagtctatga

SEQ ID NO: 281563 - DNA, 25 bp, Artificial
  probe
  misc_feature (1)..(25): SEQ ID NO: 1045; WAN024ETR; Start 265; Stop 289
gaagatttgaatgacctagacgatg

SEQ ID NO: 281564 - DNA, 25 bp, Artificial
  probe
  misc_feature (1)..(25): SEQ ID NO: 1045; WAN024ETR; Start 264; Stop 288
ggaagatttgaatgacctagacgat

SEQ ID NO: 281565 - DNA, 25 bp, Artificial
  probe
  misc_feature (1)..(25): SEQ ID NO: 1045; WAN024ETR; Start 489; Stop 513
aatcttagaagggttagacgatgaa

SEQ ID NO: 281566 - DNA, 25 bp, Artificial
  probe
  misc_feature (1)..(25): SEQ ID NO: 1045; WAN024ETR; Start 488; Stop 512
aaatcttagaagggttagacgatga

SEQ ID NO: 281567 - DNA, 25 bp, Artificial
  probe
  misc_feature (1)..(25): SEQ ID NO: 1045; WAN024ETR; Start 266; Stop 290
aagatttgaatgacctagacgatgg

SEQ ID NO: 281568 - DNA, 25 bp, Artificial
  probe
  misc_feature (1)..(25): SEQ ID NO: 1045; WAN024ETR; Start 485; Stop 509
tggaaatcttagaagggttagacga

SEQ ID NO: 281569 - DNA, 25 bp, Artificial
  probe
  misc_feature (1)..(25): SEQ ID NO: 1045; WAN024ETR; Start 484; Stop 508
gtggaaatcttagaagggttagacg

SEQ ID NO: 281570 - DNA, 25 bp, Artificial
  probe
  misc_feature (1)..(25): SEQ ID NO: 1045; WAN024ETR; Start 482; Stop 506
atgtggaaatcttagaagggttaga

SEQ ID NO: 281571 - DNA, 25 bp, Artificial
  probe
  misc_feature (1)..(25): SEQ ID NO: 1045; WAN024ETR; Start 307; Stop 331
gagattatcggtttggaagtctatg

SEQ ID NO: 281572 - DNA, 25 bp, Artificial
  probe
  misc_feature (1)..(25): SEQ ID NO: 1045; WAN024ETR; Start 487; Stop 511
gaaatcttagaagggttagacgatg

SEQ ID NO: 281573 - DNA, 25 bp, Artificial
  probe
  misc_feature (1)..(25): SEQ ID NO: 1045; WAN024ETR; Start 316; Stop 340
ggtttggaagtctatgagggtgata

SEQ ID NO: 281574 - DNA, 25 bp, Artificial
  probe
  misc_feature (1)..(25): SEQ ID NO: 1045; WAN024ETR; Start 272; Stop 296
tgaatgacctagacgatggtgaatt

SEQ ID NO: 281575 - DNA, 25 bp, Artificial
  probe
  misc_feature (1)..(25): SEQ ID NO: 1045; WAN024ETR; Start 271; Stop 295
ttgaatgacctagacgatggtgaat

SEQ ID NO: 281576 - DNA, 25 bp, Artificial
  probe
  misc_feature (1)..(25): SEQ ID NO: 1045; WAN024ETR; Start 231; Stop 255
aaagtacaagggatacagtctcaag

SEQ ID NO: 281577 - DNA, 25 bp, Artificial
  probe
  misc_feature (1)..(25): SEQ ID NO: 1045; WAN024ETR; Start 166; Stop 190
caccgtaaacagaagaactttgaca

SEQ ID NO: 281578 - DNA, 25 bp, Artificial
  probe
  misc_feature (1)..(25): SEQ ID NO: 1045; WAN024ETR; Start 441; Stop 465
accagtggttctcaatgttgatatt

SEQ ID NO: 281579 - DNA, 25 bp, Artificial
  probe
  misc_feature (1)..(25): SEQ ID NO: 1045; WAN024ETR; Start 311; Stop 335
ttatcggtttggaagtctatgaggg

SEQ ID NO: 281580 - DNA, 25 bp, Artificial
  probe
  misc_feature (1)..(25): SEQ ID NO: 1045; WAN024ETR; Start 317; Stop 341
gtttggaagtctatgagggtgatag

SEQ ID NO: 281581 - DNA, 25 bp, Artificial
  probe
  misc_feature (1)..(25): SEQ ID NO: 1046; WAN024CZF; Start 585; Stop 609
tccacagtattatgcctattcacag

SEQ ID NO: 281582 - DNA, 25 bp, Artificial
  probe
  misc_feature (1)..(25): SEQ ID NO: 1046; WAN024CZF; Start 584; Stop 608
ttccacagtattatgcctattcaca

SEQ ID NO: 281583 - DNA, 25 bp, Artificial
  probe
  misc_feature (1)..(25): SEQ ID NO: 1046; WAN024CZF; Start 780; Stop 804
ttcactcctaccttatatccaatgc

SEQ ID NO: 281584 - DNA, 25 bp, Artificial
  probe
  misc_feature (1)..(25): SEQ ID NO: 1046; WAN024CZF; Start 583; Stop 607
attccacagtattatgcctattcac

SEQ ID NO: 281585 - DNA, 25 bp, Artificial
  probe
  misc_feature (1)..(25): SEQ ID NO: 1046; WAN024CZF; Start 576; Stop 600
cctctatattccacagtattatgcc

SEQ ID NO: 281586 - DNA, 25 bp, Artificial
  probe
  misc_feature (1)..(25): SEQ ID NO: 1046; WAN024CZF; Start 730; Stop 754
cttcttccttggtacttcctcaatt

SEQ ID NO: 281587 - DNA, 25 bp, Artificial
  probe
  misc_feature (1)..(25): SEQ ID NO: 1046; WAN024CZF; Start 591; Stop 615
gtattatgcctattcacaggtggaa

SEQ ID NO: 281588 - DNA, 25 bp, Artificial
  probe
  misc_feature (1)..(25): SEQ ID NO: 1046; WAN024CZF; Start 588; Stop 612
acagtattatgcctattcacaggtg

SEQ ID NO: 281589 - DNA, 25 bp, Artificial
  probe
  misc_feature (1)..(25): SEQ ID NO: 1046; WAN024CZF; Start 587; Stop 611
cacagtattatgcctattcacaggt

SEQ ID NO: 281590 - DNA, 25 bp, Artificial
  probe
  misc_feature (1)..(25): SEQ ID NO: 1046; WAN024CZF; Start 590; Stop 614
agtattatgcctattcacaggtgga

SEQ ID NO: 281591 - DNA, 25 bp, Artificial
  probe
  misc_feature (1)..(25): SEQ ID NO: 1046; WAN024CZF; Start 589; Stop 613
cagtattatgcctattcacaggtgg

SEQ ID NO: 281592 - DNA, 25 bp, Artificial
  probe
  misc_feature (1)..(25): SEQ ID NO: 1046; WAN024CZF; Start 586; Stop 610
ccacagtattatgcctattcacagg

SEQ ID NO: 281593 - DNA, 25 bp, Artificial
  probe
  misc_feature (1)..(25): SEQ ID NO: 1046; WAN024CZF; Start 577; Stop 601
ctctatattccacagtattatgcct

SEQ ID NO: 281594 - DNA, 25 bp, Artificial
  probe
  misc_feature (1)..(25): SEQ ID NO: 1046; WAN024CZF; Start 575; Stop 599
tcctctatattccacagtattatgc

SEQ ID NO: 281595 - DNA, 25 bp, Artificial
  probe
  misc_feature (1)..(25): SEQ ID NO: 1046; WAN024CZF; Start 593; Stop 617
attatgcctattcacaggtggaatt

SEQ ID NO: 281596 - DNA, 25 bp, Artificial
  probe
  misc_feature (1)..(25): SEQ ID NO: 1046; WAN024CZF; Start 592; Stop 616
tattatgcctattcacaggtggaat

SEQ ID NO: 281597 - DNA, 25 bp, Artificial
  probe
  misc_feature (1)..(25): SEQ ID NO: 1046; WAN024CZF; Start 582; Stop 606
tattccacagtattatgcctattca

SEQ ID NO: 281598 - DNA, 25 bp, Artificial
  probe
  misc_feature (1)..(25): SEQ ID NO: 1046; WAN024CZF; Start 78; Stop 102
tctcctctatatccttcccagtatg

SEQ ID NO: 281599 - DNA, 25 bp, Artificial
  probe
  misc_feature (1)..(25): SEQ ID NO: 1046; WAN024CZF; Start 72; Stop 96
tctctttctcctctatatccttccc

SEQ ID NO: 281600 - DNA, 25 bp, Artificial
  probe
  misc_feature (1)..(25): SEQ ID NO: 1046; WAN024CZF; Start 74; Stop 98
tctttctcctctatatccttcccag

SEQ ID NO: 281601 - DNA, 25 bp, Artificial
  probe
  misc_feature (1)..(25): SEQ ID NO: 1046; WAN024CZF; Start 73; Stop 97
ctctttctcctctatatccttccca

SEQ ID NO: 281602 - DNA, 25 bp, Artificial
  probe
  misc_feature (1)..(25): SEQ ID NO: 1046; WAN024CZF; Start 70; Stop 94
cgtctctttctcctctatatccttc

SEQ ID NO: 281603 - DNA, 25 bp, Artificial
  probe
  misc_feature (1)..(25): SEQ ID NO: 1046; WAN024CZF; Start 75; Stop 99
ctttctcctctatatccttcccagt

SEQ ID NO: 281604 - DNA, 25 bp, Artificial
  probe
  misc_feature (1)..(25): SEQ ID NO: 1046; WAN024CZF; Start 784; Stop 808
ctcctaccttatatccaatgcacta

SEQ ID NO: 281605 - DNA, 25 bp, Artificial
  probe
  misc_feature (1)..(25): SEQ ID NO: 1046; WAN024CZF; Start 783; Stop 807
actcctaccttatatccaatgcact

SEQ ID NO: 281606 - DNA, 25 bp, Artificial
  probe
  misc_feature (1)..(25): SEQ ID NO: 1046; WAN024CZF; Start 782; Stop 806
cactcctaccttatatccaatgcac

SEQ ID NO: 281607 - DNA, 25 bp, Artificial
  probe
  misc_feature (1)..(25): SEQ ID NO: 1046; WAN024CZF; Start 781; Stop 805
tcactcctaccttatatccaatgca

SEQ ID NO: 281608 - DNA, 25 bp, Artificial
  probe
  misc_feature (1)..(25): SEQ ID NO: 1046; WAN024CZF; Start 76; Stop 100
tttctcctctatatccttcccagta

SEQ ID NO: 281609 - DNA, 25 bp, Artificial
  probe
  misc_feature (1)..(25): SEQ ID NO: 1046; WAN024CZF; Start 69; Stop 93
ccgtctctttctcctctatatcctt

SEQ ID NO: 281610 - DNA, 25 bp, Artificial
  probe
  misc_feature (1)..(25): SEQ ID NO: 1046; WAN024CZF; Start 77; Stop 101
ttctcctctatatccttcccagtat

SEQ ID NO: 281611 - DNA, 25 bp, Artificial
  probe
  misc_feature (1)..(25): SEQ ID NO: 1046; WAN024CZF; Start 71; Stop 95
gtctctttctcctctatatccttcc

SEQ ID NO: 281612 - DNA, 25 bp, Artificial
  probe
  misc_feature (1)..(25): SEQ ID NO: 1046; WAN024CZF; Start 785; Stop 809
tcctaccttatatccaatgcactaa

SEQ ID NO: 281613 - DNA, 25 bp, Artificial
  probe
  misc_feature (1)..(25): SEQ ID NO: 1046; WAN024CZF; Start 79; Stop 103
ctcctctatatccttcccagtatgc

SEQ ID NO: 281614 - DNA, 25 bp, Artificial
  probe
  misc_feature (1)..(25): SEQ ID NO: 1047; WAN024EVT; Start 2005; Stop 2029
cttcgtgatgataagactgttggtt

SEQ ID NO: 281615 - DNA, 25 bp, Artificial
  probe
  misc_feature (1)..(25): SEQ ID NO: 1047; WAN024EVT; Start 2172; Stop 2196
ggaagtggtgaagattatggtcaag

SEQ ID NO: 281616 - DNA, 25 bp, Artificial
  probe
  misc_feature (1)..(25): SEQ ID NO: 1047; WAN024EVT; Start 2171; Stop 2195
aggaagtggtgaagattatggtcaa

SEQ ID NO: 281617 - DNA, 25 bp, Artificial
  probe
  misc_feature (1)..(25): SEQ ID NO: 1047; WAN024EVT; Start 2173; Stop 2197
gaagtggtgaagattatggtcaagc

SEQ ID NO: 281618 - DNA, 25 bp, Artificial
  probe
  misc_feature (1)..(25): SEQ ID NO: 1047; WAN024EVT; Start 142; Stop 166
aatgattatccgtatgagatggacc

SEQ ID NO: 281619 - DNA, 25 bp, Artificial
  probe
  misc_feature (1)..(25): SEQ ID NO: 1047; WAN024EVT; Start 99; Stop 123
tgccatgtctaatcacagttatagt

SEQ ID NO: 281620 - DNA, 25 bp, Artificial
  probe
  misc_feature (1)..(25): SEQ ID NO: 1047; WAN024EVT; Start 1391; Stop 1415
aagaagaggaagtacctgtctacaa

SEQ ID NO: 281621 - DNA, 25 bp, Artificial
  probe
  misc_feature (1)..(25): SEQ ID NO: 1047; WAN024EVT; Start 107; Stop 131
ctaatcacagttatagtgtagcagg

SEQ ID NO: 281622 - DNA, 25 bp, Artificial
  probe
  misc_feature (1)..(25): SEQ ID NO: 1047; WAN024EVT; Start 2170; Stop 2194
caggaagtggtgaagattatggtca

SEQ ID NO: 281623 - DNA, 25 bp, Artificial
  probe
  misc_feature (1)..(25): SEQ ID NO: 1047; WAN024EVT; Start 2004; Stop 2028
ccttcgtgatgataagactgttggt

SEQ ID NO: 281624 - DNA, 25 bp, Artificial
  probe
  misc_feature (1)..(25): SEQ ID NO: 1047; WAN024EVT; Start 2165; Stop 2189
atatgcaggaagtggtgaagattat

SEQ ID NO: 281625 - DNA, 25 bp, Artificial
  probe
  misc_feature (1)..(25): SEQ ID NO: 1047; WAN024EVT; Start 100; Stop 124
gccatgtctaatcacagttatagtg

SEQ ID NO: 281626 - DNA, 25 bp, Artificial
  probe
  misc_feature (1)..(25): SEQ ID NO: 1047; WAN024EVT; Start 98; Stop 122
ttgccatgtctaatcacagttatag

SEQ ID NO: 281627 - DNA, 25 bp, Artificial
  probe
  misc_feature (1)..(25): SEQ ID NO: 1047; WAN024EVT; Start 2166; Stop 2190
tatgcaggaagtggtgaagattatg

SEQ ID NO: 281628 - DNA, 25 bp, Artificial
  probe
  misc_feature (1)..(25): SEQ ID NO: 1047; WAN024EVT; Start 153; Stop 177
gtatgagatggaccgtttagaagag

SEQ ID NO: 281629 - DNA, 25 bp, Artificial
  probe
  misc_feature (1)..(25): SEQ ID NO: 1047; WAN024EVT; Start 791; Stop 815
gcgtgttagaacttgatttgatgaa

SEQ ID NO: 281630 - DNA, 25 bp, Artificial
  probe
  misc_feature (1)..(25): SEQ ID NO: 1047; WAN024EVT; Start 2006; Stop 2030
ttcgtgatgataagactgttggttt

SEQ ID NO: 281631 - DNA, 25 bp, Artificial
  probe
  misc_feature (1)..(25): SEQ ID NO: 1047; WAN024EVT; Start 1973; Stop 1997
tcattatgacatcgaatctaggtgc

SEQ ID NO: 281632 - DNA, 25 bp, Artificial
  probe
  misc_feature (1)..(25): SEQ ID NO: 1047; WAN024EVT; Start 2181; Stop 2205
gaagattatggtcaagcctttagtg

SEQ ID NO: 281633 - DNA, 25 bp, Artificial
  probe
  misc_feature (1)..(25): SEQ ID NO: 1047; WAN024EVT; Start 1720; Stop 1744
atccgctttgatatgagtgagtata

SEQ ID NO: 281634 - DNA, 25 bp, Artificial
  probe
  misc_feature (1)..(25): SEQ ID NO: 1047; WAN024EVT; Start 1723; Stop 1747
cgctttgatatgagtgagtatatgg

SEQ ID NO: 281635 - DNA, 25 bp, Artificial
  probe
  misc_feature (1)..(25): SEQ ID NO: 1047; WAN024EVT; Start 1722; Stop 1746
ccgctttgatatgagtgagtatatg

SEQ ID NO: 281636 - DNA, 25 bp, Artificial
  probe
  misc_feature (1)..(25): SEQ ID NO: 1047; WAN024EVT; Start 1721; Stop 1745
tccgctttgatatgagtgagtatat

SEQ ID NO: 281637 - DNA, 25 bp, Artificial
  probe
  misc_feature (1)..(25): SEQ ID NO: 1047; WAN024EVT; Start 105; Stop 129
gtctaatcacagttatagtgtagca

SEQ ID NO: 281638 - DNA, 25 bp, Artificial
  probe
  misc_feature (1)..(25): SEQ ID NO: 1047; WAN024EVT; Start 104; Stop 128
tgtctaatcacagttatagtgtagc

SEQ ID NO: 281639 - DNA, 25 bp, Artificial
  probe
  misc_feature (1)..(25): SEQ ID NO: 1047; WAN024EVT; Start 1974; Stop 1998
cattatgacatcgaatctaggtgcg

SEQ ID NO: 281640 - DNA, 25 bp, Artificial
  probe
  misc_feature (1)..(25): SEQ ID NO: 1047; WAN024EVT; Start 143; Stop 167
atgattatccgtatgagatggaccg

SEQ ID NO: 281641 - DNA, 25 bp, Artificial
  probe
  misc_feature (1)..(25): SEQ ID NO: 1047; WAN024EVT; Start 1513; Stop 1537
aatcttgaagcagaactccataaac

SEQ ID NO: 281642 - DNA, 25 bp, Artificial
  probe
  misc_feature (1)..(25): SEQ ID NO: 1047; WAN024EVT; Start 797; Stop 821
tagaacttgatttgatgaatgtcgt

SEQ ID NO: 281643 - DNA, 25 bp, Artificial
  probe
  misc_feature (1)..(25): SEQ ID NO: 1047; WAN024EVT; Start 2182; Stop 2206
aagattatggtcaagcctttagtgg

SEQ ID NO: 281644 - DNA, 25 bp, Artificial
  probe
  misc_feature (1)..(25): SEQ ID NO: 1047; WAN024EVT; Start 799; Stop 823
gaacttgatttgatgaatgtcgttg

SEQ ID NO: 281645 - DNA, 25 bp, Artificial
  probe
  misc_feature (1)..(25): SEQ ID NO: 1047; WAN024EVT; Start 798; Stop 822
agaacttgatttgatgaatgtcgtt

SEQ ID NO: 281646 - DNA, 25 bp, Artificial
  probe
  misc_feature (1)..(25): SEQ ID NO: 1047; WAN024EVT; Start 88; Stop 112
cacttgttgattgccatgtctaatc

SEQ ID NO: 281647 - DNA, 25 bp, Artificial
  probe
  misc_feature (1)..(25): SEQ ID NO: 1048; WAN024FIE; Start 1025; Stop 1049
tatctgtcctccttaatgccaacta

SEQ ID NO: 281648 - DNA, 25 bp, Artificial
  probe
  misc_feature (1)..(25): SEQ ID NO: 1048; WAN024FIE; Start 387; Stop 411
cattactaatatcttccgtgaccag

SEQ ID NO: 281649 - DNA, 25 bp, Artificial
  probe
  misc_feature (1)..(25): SEQ ID NO: 1048; WAN024FIE; Start 1026; Stop 1050
atctgtcctccttaatgccaactat

SEQ ID NO: 281650 - DNA, 25 bp, Artificial
  probe
  misc_feature (1)..(25): SEQ ID NO: 1048; WAN024FIE; Start 388; Stop 412
attactaatatcttccgtgaccaga

SEQ ID NO: 281651 - DNA, 25 bp, Artificial
  probe
  misc_feature (1)..(25): SEQ ID NO: 1048; WAN024FIE; Start 1019; Stop 1043
ttagcctatctgtcctccttaatgc

SEQ ID NO: 281652 - DNA, 25 bp, Artificial
  probe
  misc_feature (1)..(25): SEQ ID NO: 1048; WAN024FIE; Start 386; Stop 410
tcattactaatatcttccgtgacca

SEQ ID NO: 281653 - DNA, 25 bp, Artificial
  probe
  misc_feature (1)..(25): SEQ ID NO: 1048; WAN024FIE; Start 1024; Stop 1048
ctatctgtcctccttaatgccaact

SEQ ID NO: 281654 - DNA, 25 bp, Artificial
  probe
  misc_feature (1)..(25): SEQ ID NO: 1048; WAN024FIE; Start 473; Stop 497
ttccaactgctactgttctccttaa

SEQ ID NO: 281655 - DNA, 25 bp, Artificial
  probe
  misc_feature (1)..(25): SEQ ID NO: 1048; WAN024FIE; Start 1206; Stop 1230
gagtaatctggagcaagttctcaag

SEQ ID NO: 281656 - DNA, 25 bp, Artificial
  probe
  misc_feature (1)..(25): SEQ ID NO: 1048; WAN024FIE; Start 1027; Stop 1051
tctgtcctccttaatgccaactatg

SEQ ID NO: 281657 - DNA, 25 bp, Artificial
  probe
  misc_feature (1)..(25): SEQ ID NO: 1048; WAN024FIE; Start 1208; Stop 1232
gtaatctggagcaagttctcaagac

SEQ ID NO: 281658 - DNA, 25 bp, Artificial
  probe
  misc_feature (1)..(25): SEQ ID NO: 1048; WAN024FIE; Start 1207; Stop 1231
agtaatctggagcaagttctcaaga

SEQ ID NO: 281659 - DNA, 25 bp, Artificial
  probe
  misc_feature (1)..(25): SEQ ID NO: 1048; WAN024FIE; Start 352; Stop 376
cgtatctgtgactatatccagccta

SEQ ID NO: 281660 - DNA, 25 bp, Artificial
  probe
  misc_feature (1)..(25): SEQ ID NO: 1048; WAN024FIE; Start 353; Stop 377
gtatctgtgactatatccagcctag

SEQ ID NO: 281661 - DNA, 25 bp, Artificial
  probe
  misc_feature (1)..(25): SEQ ID NO: 1048; WAN024FIE; Start 349; Stop 373
tctcgtatctgtgactatatccagc

SEQ ID NO: 281662 - DNA, 25 bp, Artificial
  probe
  misc_feature (1)..(25): SEQ ID NO: 1048; WAN024FIE; Start 347; Stop 371
tatctcgtatctgtgactatatcca

SEQ ID NO: 281663 - DNA, 25 bp, Artificial
  probe
  misc_feature (1)..(25): SEQ ID NO: 1048; WAN024FIE; Start 348; Stop 372
atctcgtatctgtgactatatccag

SEQ ID NO: 281664 - DNA, 25 bp, Artificial
  probe
  misc_feature (1)..(25): SEQ ID NO: 1048; WAN024FIE; Start 472; Stop 496
gttccaactgctactgttctcctta

SEQ ID NO: 281665 - DNA, 25 bp, Artificial
  probe
  misc_feature (1)..(25): SEQ ID NO: 1048; WAN024FIE; Start 474; Stop 498
tccaactgctactgttctccttaac

SEQ ID NO: 281666 - DNA, 25 bp, Artificial
  probe
  misc_feature (1)..(25): SEQ ID NO: 1048; WAN024FIE; Start 1023; Stop 1047
cctatctgtcctccttaatgccaac

SEQ ID NO: 281667 - DNA, 25 bp, Artificial
  probe
  misc_feature (1)..(25): SEQ ID NO: 1048; WAN024FIE; Start 354; Stop 378
tatctgtgactatatccagcctagt

SEQ ID NO: 281668 - DNA, 25 bp, Artificial
  probe
  misc_feature (1)..(25): SEQ ID NO: 1048; WAN024FIE; Start 346; Stop 370
ctatctcgtatctgtgactatatcc

SEQ ID NO: 281669 - DNA, 25 bp, Artificial
  probe
  misc_feature (1)..(25): SEQ ID NO: 1048; WAN024FIE; Start 1045; Stop 1069
aactatgcagatggaattgacacta

SEQ ID NO: 281670 - DNA, 25 bp, Artificial
  probe
  misc_feature (1)..(25): SEQ ID NO: 1048; WAN024FIE; Start 1209; Stop 1233
taatctggagcaagttctcaagacc

SEQ ID NO: 281671 - DNA, 25 bp, Artificial
  probe
  misc_feature (1)..(25): SEQ ID NO: 1048; WAN024FIE; Start 1046; Stop 1070
actatgcagatggaattgacactag

SEQ ID NO: 281672 - DNA, 25 bp, Artificial
  probe
  misc_feature (1)..(25): SEQ ID NO: 1048; WAN024FIE; Start 1007; Stop 1031
caccttatccatttagcctatctgt

SEQ ID NO: 281673 - DNA, 25 bp, Artificial
  probe
  misc_feature (1)..(25): SEQ ID NO: 1048; WAN024FIE; Start 350; Stop 374
ctcgtatctgtgactatatccagcc

SEQ ID NO: 281674 - DNA, 25 bp, Artificial
  probe
  misc_feature (1)..(25): SEQ ID NO: 1048; WAN024FIE; Start 1009; Stop 1033
ccttatccatttagcctatctgtcc

SEQ ID NO: 281675 - DNA, 25 bp, Artificial
  probe
  misc_feature (1)..(25): SEQ ID NO: 1048; WAN024FIE; Start 1004; Stop 1028
tagcaccttatccatttagcctatc

SEQ ID NO: 281676 - DNA, 25 bp, Artificial
  probe
  misc_feature (1)..(25): SEQ ID NO: 1048; WAN024FIE; Start 513; Stop 537
tttctacaagccaactattccaaac

SEQ ID NO: 281677 - DNA, 25 bp, Artificial
  probe
  misc_feature (1)..(25): SEQ ID NO: 1048; WAN024FIE; Start 1008; Stop 1032
accttatccatttagcctatctgtc

SEQ ID NO: 281678 - DNA, 25 bp, Artificial
  probe
  misc_feature (1)..(25): SEQ ID NO: 1048; WAN024FIE; Start 793; Stop 817
atcggcgggctctataatatctata

SEQ ID NO: 281679 - DNA, 25 bp, Artificial
  probe
  misc_feature (1)..(25): SEQ ID NO: 1048; WAN024FIE; Start 383; Stop 407
ttgtcattactaatatcttccgtga

SEQ ID NO: 281680 - DNA, 25 bp, Artificial
  probe
  misc_feature (1)..(25): SEQ ID NO: 1049; WAN024G4R; Start 185; Stop 209
atatctcctaccatctcagttacga

SEQ ID NO: 281681 - DNA, 25 bp, Artificial
  probe
  misc_feature (1)..(25): SEQ ID NO: 1049; WAN024G4R; Start 184; Stop 208
aatatctcctaccatctcagttacg

SEQ ID NO: 281682 - DNA, 25 bp, Artificial
  probe
  misc_feature (1)..(25): SEQ ID NO: 1049; WAN024G4R; Start 182; Stop 206
cgaatatctcctaccatctcagtta

SEQ ID NO: 281683 - DNA, 25 bp, Artificial
  probe
  misc_feature (1)..(25): SEQ ID NO: 1049; WAN024G4R; Start 54; Stop 78
cttctccttcgctagatacttcttc

SEQ ID NO: 281684 - DNA, 25 bp, Artificial
  probe
  misc_feature (1)..(25): SEQ ID NO: 1049; WAN024G4R; Start 50; Stop 74
gtaacttctccttcgctagatactt

SEQ ID NO: 281685 - DNA, 25 bp, Artificial
  probe
  misc_feature (1)..(25): SEQ ID NO: 1049; WAN024G4R; Start 55; Stop 79
ttctccttcgctagatacttcttct

SEQ ID NO: 281686 - DNA, 25 bp, Artificial
  probe
  misc_feature (1)..(25): SEQ ID NO: 1049; WAN024G4R; Start 49; Stop 73
tgtaacttctccttcgctagatact

SEQ ID NO: 281687 - DNA, 25 bp, Artificial
  probe
  misc_feature (1)..(25): SEQ ID NO: 1049; WAN024G4R; Start 48; Stop 72
gtgtaacttctccttcgctagatac

SEQ ID NO: 281688 - DNA, 25 bp, Artificial
  probe
  misc_feature (1)..(25): SEQ ID NO: 1049; WAN024G4R; Start 186; Stop 210
tatctcctaccatctcagttacgag

SEQ ID NO: 281689 - DNA, 25 bp, Artificial
  probe
  misc_feature (1)..(25): SEQ ID NO: 1049; WAN024G4R; Start 51; Stop 75
taacttctccttcgctagatacttc

SEQ ID NO: 281690 - DNA, 25 bp, Artificial
  probe
  misc_feature (1)..(25): SEQ ID NO: 1049; WAN024G4R; Start 181; Stop 205
gcgaatatctcctaccatctcagtt

SEQ ID NO: 281691 - DNA, 25 bp, Artificial
  probe
  misc_feature (1)..(25): SEQ ID NO: 1049; WAN024G4R; Start 179; Stop 203
ttgcgaatatctcctaccatctcag

SEQ ID NO: 281692 - DNA, 25 bp, Artificial
  probe
  misc_feature (1)..(25): SEQ ID NO: 1049; WAN024G4R; Start 53; Stop 77
acttctccttcgctagatacttctt

SEQ ID NO: 281693 - DNA, 25 bp, Artificial
  probe
  misc_feature (1)..(25): SEQ ID NO: 1049; WAN024G4R; Start 52; Stop 76
aacttctccttcgctagatacttct

SEQ ID NO: 281694 - DNA, 25 bp, Artificial
  probe
  misc_feature (1)..(25): SEQ ID NO: 1049; WAN024G4R; Start 47; Stop 71
agtgtaacttctccttcgctagata

SEQ ID NO: 281695 - DNA, 25 bp, Artificial
  probe
  misc_feature (1)..(25): SEQ ID NO: 1049; WAN024G4R; Start 56; Stop 80
tctccttcgctagatacttcttctg

SEQ ID NO: 281696 - DNA, 25 bp, Artificial
  probe
  misc_feature (1)..(25): SEQ ID NO: 1049; WAN024G4R; Start 178; Stop 202
gttgcgaatatctcctaccatctca

SEQ ID NO: 281697 - DNA, 25 bp, Artificial
  probe
  misc_feature (1)..(25): SEQ ID NO: 1049; WAN024G4R; Start 193; Stop 217
taccatctcagttacgaggatcata

SEQ ID NO: 281698 - DNA, 25 bp, Artificial
  probe
  misc_feature (1)..(25): SEQ ID NO: 1049; WAN024G4R; Start 183; Stop 207
gaatatctcctaccatctcagttac

SEQ ID NO: 281699 - DNA, 25 bp, Artificial
  probe
  misc_feature (1)..(25): SEQ ID NO: 1049; WAN024G4R; Start 59; Stop 83
ccttcgctagatacttcttctggaa

SEQ ID NO: 281700 - DNA, 25 bp, Artificial
  probe
  misc_feature (1)..(25): SEQ ID NO: 1049; WAN024G4R; Start 194; Stop 218
accatctcagttacgaggatcatag

SEQ ID NO: 281701 - DNA, 25 bp, Artificial
  probe
  misc_feature (1)..(25): SEQ ID NO: 1049; WAN024G4R; Start 192; Stop 216
ctaccatctcagttacgaggatcat

SEQ ID NO: 281702 - DNA, 25 bp, Artificial
  probe
  misc_feature (1)..(25): SEQ ID NO: 1049; WAN024G4R; Start 57; Stop 81
ctccttcgctagatacttcttctgg

SEQ ID NO: 281703 - DNA, 25 bp, Artificial
  probe
  misc_feature (1)..(25): SEQ ID NO: 1049; WAN024G4R; Start 180; Stop 204
tgcgaatatctcctaccatctcagt

SEQ ID NO: 281704 - DNA, 25 bp, Artificial
  probe
  misc_feature (1)..(25): SEQ ID NO: 1049; WAN024G4R; Start 201; Stop 225
cagttacgaggatcatagcggttaa

SEQ ID NO: 281705 - DNA, 25 bp, Artificial
  probe
  misc_feature (1)..(25): SEQ ID NO: 1049; WAN024G4R; Start 172; Stop 196
cataaggttgcgaatatctcctacc

SEQ ID NO: 281706 - DNA, 25 bp, Artificial
  probe
  misc_feature (1)..(25): SEQ ID NO: 1049; WAN024G4R; Start 142; Stop 166
ataagaaacaagagtgacaagacca

SEQ ID NO: 281707 - DNA, 25 bp, Artificial
  probe
  misc_feature (1)..(25): SEQ ID NO: 1049; WAN024G4R; Start 143; Stop 167
taagaaacaagagtgacaagaccaa

SEQ ID NO: 281708 - DNA, 25 bp, Artificial
  probe
  misc_feature (1)..(25): SEQ ID NO: 1049; WAN024G4R; Start 174; Stop 198
taaggttgcgaatatctcctaccat

SEQ ID NO: 281709 - DNA, 25 bp, Artificial
  probe
  misc_feature (1)..(25): SEQ ID NO: 1049; WAN024G4R; Start 173; Stop 197
ataaggttgcgaatatctcctacca

SEQ ID NO: 281710 - DNA, 25 bp, Artificial
  probe
  misc_feature (1)..(25): SEQ ID NO: 1049; WAN024G4R; Start 144; Stop 168
aagaaacaagagtgacaagaccaag

SEQ ID NO: 281711 - DNA, 25 bp, Artificial
  probe
  misc_feature (1)..(25): SEQ ID NO: 1049; WAN024G4R; Start 195; Stop 219
ccatctcagttacgaggatcatagc

SEQ ID NO: 281712 - DNA, 25 bp, Artificial
  probe
  misc_feature (1)..(25): SEQ ID NO: 1049; WAN024G4R; Start 141; Stop 165
tataagaaacaagagtgacaagacc

SEQ ID NO: 281713 - DNA, 25 bp, Artificial
  probe
  misc_feature (1)..(25): SEQ ID NO: 1050; WAN024CFM; Start 214; Stop 238
aatagcgacggagagttaggttatt

SEQ ID NO: 281714 - DNA, 25 bp, Artificial
  probe
  misc_feature (1)..(25): SEQ ID NO: 1050; WAN024CFM; Start 215; Stop 239
atagcgacggagagttaggttattg

SEQ ID NO: 281715 - DNA, 25 bp, Artificial
  probe
  misc_feature (1)..(25): SEQ ID NO: 1050; WAN024CFM; Start 213; Stop 237
caatagcgacggagagttaggttat

SEQ ID NO: 281716 - DNA, 25 bp, Artificial
  probe
  misc_feature (1)..(25): SEQ ID NO: 1050; WAN024CFM; Start 607; Stop 631
tctattcaggaattgtcagataggc

SEQ ID NO: 281717 - DNA, 25 bp, Artificial
  probe
  misc_feature (1)..(25): SEQ ID NO: 1050; WAN024CFM; Start 603; Stop 627
gaactctattcaggaattgtcagat

SEQ ID NO: 281718 - DNA, 25 bp, Artificial
  probe
  misc_feature (1)..(25): SEQ ID NO: 1050; WAN024CFM; Start 606; Stop 630
ctctattcaggaattgtcagatagg

SEQ ID NO: 281719 - DNA, 25 bp, Artificial
  probe
  misc_feature (1)..(25): SEQ ID NO: 1050; WAN024CFM; Start 200; Stop 224
ttagaactggttacaatagcgacgg

SEQ ID NO: 281720 - DNA, 25 bp, Artificial
  probe
  misc_feature (1)..(25): SEQ ID NO: 1050; WAN024CFM; Start 209; Stop 233
gttacaatagcgacggagagttagg

SEQ ID NO: 281721 - DNA, 25 bp, Artificial
  probe
  misc_feature (1)..(25): SEQ ID NO: 1050; WAN024CFM; Start 208; Stop 232
ggttacaatagcgacggagagttag

SEQ ID NO: 281722 - DNA, 25 bp, Artificial
  probe
  misc_feature (1)..(25): SEQ ID NO: 1050; WAN024CFM; Start 484; Stop 508
taccttctacccattattacagcag

SEQ ID NO: 281723 - DNA, 25 bp, Artificial
  probe
  misc_feature (1)..(25): SEQ ID NO: 1050; WAN024CFM; Start 436; Stop 460
tggacttcatttactgggtttaact

SEQ ID NO: 281724 - DNA, 25 bp, Artificial
  probe
  misc_feature (1)..(25): SEQ ID NO: 1050; WAN024CFM; Start 483; Stop 507
ttaccttctacccattattacagca

SEQ ID NO: 281725 - DNA, 25 bp, Artificial
  probe
  misc_feature (1)..(25): SEQ ID NO: 1050; WAN024CFM; Start 487; Stop 511
cttctacccattattacagcaggaa

SEQ ID NO: 281726 - DNA, 25 bp, Artificial
  probe
  misc_feature (1)..(25): SEQ ID NO: 1050; WAN024CFM; Start 488; Stop 512
ttctacccattattacagcaggaaa

SEQ ID NO: 281727 - DNA, 25 bp, Artificial
  probe
  misc_feature (1)..(25): SEQ ID NO: 1050; WAN024CFM; Start 437; Stop 461
ggacttcatttactgggtttaactt

SEQ ID NO: 281728 - DNA, 25 bp, Artificial
  probe
  misc_feature (1)..(25): SEQ ID NO: 1050; WAN024CFM; Start 298; Stop 322
atttggactcctgtaaagaatgact

SEQ ID NO: 281729 - DNA, 25 bp, Artificial
  probe
  misc_feature (1)..(25): SEQ ID NO: 1050; WAN024CFM; Start 220; Stop 244
gacggagagttaggttattgggata

SEQ ID NO: 281730 - DNA, 25 bp, Artificial
  probe
  misc_feature (1)..(25): SEQ ID NO: 1050; WAN024CFM; Start 212; Stop 236
acaatagcgacggagagttaggtta

SEQ ID NO: 281731 - DNA, 25 bp, Artificial
  probe
  misc_feature (1)..(25): SEQ ID NO: 1050; WAN024CFM; Start 211; Stop 235
tacaatagcgacggagagttaggtt

SEQ ID NO: 281732 - DNA, 25 bp, Artificial
  probe
  misc_feature (1)..(25): SEQ ID NO: 1050; WAN024CFM; Start 210; Stop 234
ttacaatagcgacggagagttaggt

SEQ ID NO: 281733 - DNA, 25 bp, Artificial
  probe
  misc_feature (1)..(25): SEQ ID NO: 1050; WAN024CFM; Start 293; Stop 317
ctggtatttggactcctgtaaagaa

SEQ ID NO: 281734 - DNA, 25 bp, Artificial
  probe
  misc_feature (1)..(25): SEQ ID NO: 1050; WAN024CFM; Start 222; Stop 246
cggagagttaggttattgggataag

SEQ ID NO: 281735 - DNA, 25 bp, Artificial
  probe
  misc_feature (1)..(25): SEQ ID NO: 1050; WAN024CFM; Start 294; Stop 318
tggtatttggactcctgtaaagaat

SEQ ID NO: 281736 - DNA, 25 bp, Artificial
  probe
  misc_feature (1)..(25): SEQ ID NO: 1050; WAN024CFM; Start 295; Stop 319
ggtatttggactcctgtaaagaatg

SEQ ID NO: 281737 - DNA, 25 bp, Artificial
  probe
  misc_feature (1)..(25): SEQ ID NO: 1050; WAN024CFM; Start 291; Stop 315
ctctggtatttggactcctgtaaag

SEQ ID NO: 281738 - DNA, 25 bp, Artificial
  probe
  misc_feature (1)..(25): SEQ ID NO: 1050; WAN024CFM; Start 288; Stop 312
attctctggtatttggactcctgta

SEQ ID NO: 281739 - DNA, 25 bp, Artificial
  probe
  misc_feature (1)..(25): SEQ ID NO: 1050; WAN024CFM; Start 435; Stop 459
atggacttcatttactgggtttaac

SEQ ID NO: 281740 - DNA, 25 bp, Artificial
  probe
  misc_feature (1)..(25): SEQ ID NO: 1050; WAN024CFM; Start 199; Stop 223
tttagaactggttacaatagcgacg

SEQ ID NO: 281741 - DNA, 25 bp, Artificial
  probe
  misc_feature (1)..(25): SEQ ID NO: 1050; WAN024CFM; Start 284; Stop 308
aaacattctctggtatttggactcc

SEQ ID NO: 281742 - DNA, 25 bp, Artificial
  probe
  misc_feature (1)..(25): SEQ ID NO: 1050; WAN024CFM; Start 230; Stop 254
taggttattgggataagttagagcc

SEQ ID NO: 281743 - DNA, 25 bp, Artificial
  probe
  misc_feature (1)..(25): SEQ ID NO: 1050; WAN024CFM; Start 223; Stop 247
ggagagttaggttattgggataagt

SEQ ID NO: 281744 - DNA, 25 bp, Artificial
  probe
  misc_feature (1)..(25): SEQ ID NO: 1050; WAN024CFM; Start 221; Stop 245
acggagagttaggttattgggataa

SEQ ID NO: 281745 - DNA, 25 bp, Artificial
  probe
  misc_feature (1)..(25): SEQ ID NO: 1050; WAN024CFM; Start 290; Stop 314
tctctggtatttggactcctgtaaa

SEQ ID NO: 281746 - DNA, 25 bp, Artificial
  probe
  misc_feature (1)..(25): SEQ ID NO: 1051; WAN024D5F; Start 284; Stop 308
atattcgccaagattactaccaagt

SEQ ID NO: 281747 - DNA, 25 bp, Artificial
  probe
  misc_feature (1)..(25): SEQ ID NO: 1051; WAN024D5F; Start 465; Stop 489
cacttatgagatcatcacacctgaa

SEQ ID NO: 281748 - DNA, 25 bp, Artificial
  probe
  misc_feature (1)..(25): SEQ ID NO: 1051; WAN024D5F; Start 469; Stop 493
tatgagatcatcacacctgaattgg

SEQ ID NO: 281749 - DNA, 25 bp, Artificial
  probe
  misc_feature (1)..(25): SEQ ID NO: 1051; WAN024D5F; Start 466; Stop 490
acttatgagatcatcacacctgaat

SEQ ID NO: 281750 - DNA, 25 bp, Artificial
  probe
  misc_feature (1)..(25): SEQ ID NO: 1051; WAN024D5F; Start 281; Stop 305
tcaatattcgccaagattactacca

SEQ ID NO: 281751 - DNA, 25 bp, Artificial
  probe
  misc_feature (1)..(25): SEQ ID NO: 1051; WAN024D5F; Start 280; Stop 304
ctcaatattcgccaagattactacc

SEQ ID NO: 281752 - DNA, 25 bp, Artificial
  probe
  misc_feature (1)..(25): SEQ ID NO: 1051; WAN024D5F; Start 464; Stop 488
tcacttatgagatcatcacacctga

SEQ ID NO: 281753 - DNA, 25 bp, Artificial
  probe
  misc_feature (1)..(25): SEQ ID NO: 1051; WAN024D5F; Start 282; Stop 306
caatattcgccaagattactaccaa

SEQ ID NO: 281754 - DNA, 25 bp, Artificial
  probe
  misc_feature (1)..(25): SEQ ID NO: 1051; WAN024D5F; Start 468; Stop 492
ttatgagatcatcacacctgaattg

SEQ ID NO: 281755 - DNA, 25 bp, Artificial
  probe
  misc_feature (1)..(25): SEQ ID NO: 1051; WAN024D5F; Start 283; Stop 307
aatattcgccaagattactaccaag

SEQ ID NO: 281756 - DNA, 25 bp, Artificial
  probe
  misc_feature (1)..(25): SEQ ID NO: 1051; WAN024D5F; Start 467; Stop 491
cttatgagatcatcacacctgaatt

SEQ ID NO: 281757 - DNA, 25 bp, Artificial
  probe
  misc_feature (1)..(25): SEQ ID NO: 1051; WAN024D5F; Start 277; Stop 301
gctctcaatattcgccaagattact

SEQ ID NO: 281758 - DNA, 25 bp, Artificial
  probe
  misc_feature (1)..(25): SEQ ID NO: 1051; WAN024D5F; Start 431; Stop 455
gtattcaccaagatggagtccttaa

SEQ ID NO: 281759 - DNA, 25 bp, Artificial
  probe
  misc_feature (1)..(25): SEQ ID NO: 1051; WAN024D5F; Start 484; Stop 508
cctgaattggttggtgttaagattc

SEQ ID NO: 281760 - DNA, 25 bp, Artificial
  probe
  misc_feature (1)..(25): SEQ ID NO: 1051; WAN024D5F; Start 1075; Stop 1099
cacgatatgcctagtgtgtaactaa

SEQ ID NO: 281761 - DNA, 25 bp, Artificial
  probe
  misc_feature (1)..(25): SEQ ID NO: 1051; WAN024D5F; Start 285; Stop 309
tattcgccaagattactaccaagta

SEQ ID NO: 281762 - DNA, 25 bp, Artificial
  probe
  misc_feature (1)..(25): SEQ ID NO: 1051; WAN024D5F; Start 1076; Stop 1100
acgatatgcctagtgtgtaactaat

SEQ ID NO: 281763 - DNA, 25 bp, Artificial
  probe
  misc_feature (1)..(25): SEQ ID NO: 1051; WAN024D5F; Start 483; Stop 507
acctgaattggttggtgttaagatt

SEQ ID NO: 281764 - DNA, 25 bp, Artificial
  probe
  misc_feature (1)..(25): SEQ ID NO: 1051; WAN024D5F; Start 1071; Stop 1095
ttaccacgatatgcctagtgtgtaa

SEQ ID NO: 281765 - DNA, 25 bp, Artificial
  probe
  misc_feature (1)..(25): SEQ ID NO: 1051; WAN024D5F; Start 279; Stop 303
tctcaatattcgccaagattactac

SEQ ID NO: 281766 - DNA, 25 bp, Artificial
  probe
  misc_feature (1)..(25): SEQ ID NO: 1051; WAN024D5F; Start 1070; Stop 1094
cttaccacgatatgcctagtgtgta

SEQ ID NO: 281767 - DNA, 25 bp, Artificial
  probe
  misc_feature (1)..(25): SEQ ID NO: 1051; WAN024D5F; Start 278; Stop 302
ctctcaatattcgccaagattacta

SEQ ID NO: 281768 - DNA, 25 bp, Artificial
  probe
  misc_feature (1)..(25): SEQ ID NO: 1051; WAN024D5F; Start 430; Stop 454
ggtattcaccaagatggagtcctta

SEQ ID NO: 281769 - DNA, 25 bp, Artificial
  probe
  misc_feature (1)..(25): SEQ ID NO: 1051; WAN024D5F; Start 1072; Stop 1096
taccacgatatgcctagtgtgtaac

SEQ ID NO: 281770 - DNA, 25 bp, Artificial
  probe
  misc_feature (1)..(25): SEQ ID NO: 1051; WAN024D5F; Start 982; Stop 1006
gatgtgttgaaggcttctgctattg

SEQ ID NO: 281771 - DNA, 25 bp, Artificial
  probe
  misc_feature (1)..(25): SEQ ID NO: 1051; WAN024D5F; Start 692; Stop 716
aaggcttccactttgatgatttaca

SEQ ID NO: 281772 - DNA, 25 bp, Artificial
  probe
  misc_feature (1)..(25): SEQ ID NO: 1051; WAN024D5F; Start 842; Stop 866
agttctttaaccaatctgttcgttt

SEQ ID NO: 281773 - DNA, 25 bp, Artificial
  probe
  misc_feature (1)..(25): SEQ ID NO: 1051; WAN024D5F; Start 841; Stop 865
aagttctttaaccaatctgttcgtt

SEQ ID NO: 281774 - DNA, 25 bp, Artificial
  probe
  misc_feature (1)..(25): SEQ ID NO: 1051; WAN024D5F; Start 695; Stop 719
gcttccactttgatgatttacaact

SEQ ID NO: 281775 - DNA, 25 bp, Artificial
  probe
  misc_feature (1)..(25): SEQ ID NO: 1051; WAN024D5F; Start 301; Stop 325
taccaagtagaaaccagtattgtcc

SEQ ID NO: 281776 - DNA, 25 bp, Artificial
  probe
  misc_feature (1)..(25): SEQ ID NO: 1051; WAN024D5F; Start 538; Stop 562
tttgttgagaaactgagagaattgg

SEQ ID NO: 281777 - DNA, 25 bp, Artificial
  probe
  misc_feature (1)..(25): SEQ ID NO: 1051; WAN024D5F; Start 303; Stop 327
ccaagtagaaaccagtattgtccta

SEQ ID NO: 281778 - DNA, 25 bp, Artificial
  probe
  misc_feature (1)..(25): SEQ ID NO: 1051; WAN024D5F; Start 1074; Stop 1098
ccacgatatgcctagtgtgtaacta

SEQ ID NO: 281779 - DNA, 25 bp, Artificial
  probe
  misc_feature (1)..(25): SEQ ID NO: 1052; WAN024CPW; Start 624; Stop 648
taccaagactgaattgaagaacctc

SEQ ID NO: 281780 - DNA, 25 bp, Artificial
  probe
  misc_feature (1)..(25): SEQ ID NO: 1052; WAN024CPW; Start 623; Stop 647
gtaccaagactgaattgaagaacct

SEQ ID NO: 281781 - DNA, 25 bp, Artificial
  probe
  misc_feature (1)..(25): SEQ ID NO: 1052; WAN024CPW; Start 625; Stop 649
accaagactgaattgaagaacctca

SEQ ID NO: 281782 - DNA, 25 bp, Artificial
  probe
  misc_feature (1)..(25): SEQ ID NO: 1052; WAN024CPW; Start 925; Stop 949
cttggtttatcagactacgatgcta

SEQ ID NO: 281783 - DNA, 25 bp, Artificial
  probe
  misc_feature (1)..(25): SEQ ID NO: 1052; WAN024CPW; Start 448; Stop 472
ttgattgagattgtatctgaggcag

SEQ ID NO: 281784 - DNA, 25 bp, Artificial
  probe
  misc_feature (1)..(25): SEQ ID NO: 1052; WAN024CPW; Start 447; Stop 471
cttgattgagattgtatctgaggca

SEQ ID NO: 281785 - DNA, 25 bp, Artificial
  probe
  misc_feature (1)..(25): SEQ ID NO: 1052; WAN024CPW; Start 926; Stop 950
ttggtttatcagactacgatgctag

SEQ ID NO: 281786 - DNA, 25 bp, Artificial
  probe
  misc_feature (1)..(25): SEQ ID NO: 1052; WAN024CPW; Start 909; Stop 933
gcgttatgtatctgaccttggttta

SEQ ID NO: 281787 - DNA, 25 bp, Artificial
  probe
  misc_feature (1)..(25): SEQ ID NO: 1052; WAN024CPW; Start 446; Stop 470
ccttgattgagattgtatctgaggc

SEQ ID NO: 281788 - DNA, 25 bp, Artificial
  probe
  misc_feature (1)..(25): SEQ ID NO: 1052; WAN024CPW; Start 922; Stop 946
gaccttggtttatcagactacgatg

SEQ ID NO: 281789 - DNA, 25 bp, Artificial
  probe
  misc_feature (1)..(25): SEQ ID NO: 1052; WAN024CPW; Start 1150; Stop 1174
tcatctaagattgccaagaaagtct

SEQ ID NO: 281790 - DNA, 25 bp, Artificial
  probe
  misc_feature (1)..(25): SEQ ID NO: 1052; WAN024CPW; Start 910; Stop 934
cgttatgtatctgaccttggtttat

SEQ ID NO: 281791 - DNA, 25 bp, Artificial
  probe
  misc_feature (1)..(25): SEQ ID NO: 1052; WAN024CPW; Start 1140; Stop 1164
cggtactatttcatctaagattgcc

SEQ ID NO: 281792 - DNA, 25 bp, Artificial
  probe
  misc_feature (1)..(25): SEQ ID NO: 1052; WAN024CPW; Start 1149; Stop 1173
ttcatctaagattgccaagaaagtc

SEQ ID NO: 281793 - DNA, 25 bp, Artificial
  probe
  misc_feature (1)..(25): SEQ ID NO: 1052; WAN024CPW; Start 440; Stop 464
gggttcccttgattgagattgtatc

SEQ ID NO: 281794 - DNA, 25 bp, Artificial
  probe
  misc_feature (1)..(25): SEQ ID NO: 1052; WAN024CPW; Start 1139; Stop 1163
acggtactatttcatctaagattgc

SEQ ID NO: 281795 - DNA, 25 bp, Artificial
  probe
  misc_feature (1)..(25): SEQ ID NO: 1052; WAN024CPW; Start 921; Stop 945
tgaccttggtttatcagactacgat

SEQ ID NO: 281796 - DNA, 25 bp, Artificial
  probe
  misc_feature (1)..(25): SEQ ID NO: 1052; WAN024CPW; Start 1134; Stop 1158
cgaagacggtactatttcatctaag

SEQ ID NO: 281797 - DNA, 25 bp, Artificial
  probe
  misc_feature (1)..(25): SEQ ID NO: 1052; WAN024CPW; Start 628; Stop 652
aagactgaattgaagaacctcaact

SEQ ID NO: 281798 - DNA, 25 bp, Artificial
  probe
  misc_feature (1)..(25): SEQ ID NO: 1052; WAN024CPW; Start 627; Stop 651
caagactgaattgaagaacctcaac

SEQ ID NO: 281799 - DNA, 25 bp, Artificial
  probe
  misc_feature (1)..(25): SEQ ID NO: 1052; WAN024CPW; Start 629; Stop 653
agactgaattgaagaacctcaactc

SEQ ID NO: 281800 - DNA, 25 bp, Artificial
  probe
  misc_feature (1)..(25): SEQ ID NO: 1052; WAN024CPW; Start 1141; Stop 1165
ggtactatttcatctaagattgcca

SEQ ID NO: 281801 - DNA, 25 bp, Artificial
  probe
  misc_feature (1)..(25): SEQ ID NO: 1052; WAN024CPW; Start 632; Stop 656
ctgaattgaagaacctcaactcctt

SEQ ID NO: 281802 - DNA, 25 bp, Artificial
  probe
  misc_feature (1)..(25): SEQ ID NO: 1052; WAN024CPW; Start 626; Stop 650
ccaagactgaattgaagaacctcaa

SEQ ID NO: 281803 - DNA, 25 bp, Artificial
  probe
  misc_feature (1)..(25): SEQ ID NO: 1052; WAN024CPW; Start 924; Stop 948
ccttggtttatcagactacgatgct

SEQ ID NO: 281804 - DNA, 25 bp, Artificial
  probe
  misc_feature (1)..(25): SEQ ID NO: 1052; WAN024CPW; Start 1414; Stop 1438
caggaattggcgaagttgaaagaaa

SEQ ID NO: 281805 - DNA, 25 bp, Artificial
  probe
  misc_feature (1)..(25): SEQ ID NO: 1052; WAN024CPW; Start 1010; Stop 1034
gtgatgccaaacaagtctctaactg

SEQ ID NO: 281806 - DNA, 25 bp, Artificial
  probe
  misc_feature (1)..(25): SEQ ID NO: 1052; WAN024CPW; Start 635; Stop 659
aattgaagaacctcaactccttctc

SEQ ID NO: 281807 - DNA, 25 bp, Artificial
  probe
  misc_feature (1)..(25): SEQ ID NO: 1052; WAN024CPW; Start 634; Stop 658
gaattgaagaacctcaactccttct

SEQ ID NO: 281808 - DNA, 25 bp, Artificial
  probe
  misc_feature (1)..(25): SEQ ID NO: 1052; WAN024CPW; Start 1144; Stop 1168
actatttcatctaagattgccaaga

SEQ ID NO: 281809 - DNA, 25 bp, Artificial
  probe
  misc_feature (1)..(25): SEQ ID NO: 1052; WAN024CPW; Start 633; Stop 657
tgaattgaagaacctcaactccttc

SEQ ID NO: 281810 - DNA, 25 bp, Artificial
  probe
  misc_feature (1)..(25): SEQ ID NO: 1052; WAN024CPW; Start 630; Stop 654
gactgaattgaagaacctcaactcc

SEQ ID NO: 281811 - DNA, 25 bp, Artificial
  probe
  misc_feature (1)..(25): SEQ ID NO: 1052; WAN024CPW; Start 1130; Stop 1154
tcatcgaagacggtactatttcatc

SEQ ID NO: 281812 - DNA, 25 bp, Artificial
  probe
  misc_feature (1)..(25): SEQ ID NO: 1053; WAN024ASZ; Start 25; Stop 49
ttcgttctgtatctaatcatgtcca

SEQ ID NO: 281813 - DNA, 25 bp, Artificial
  probe
  misc_feature (1)..(25): SEQ ID NO: 1053; WAN024ASZ; Start 26; Stop 50
tcgttctgtatctaatcatgtccat

SEQ ID NO: 281814 - DNA, 25 bp, Artificial
  probe
  misc_feature (1)..(25): SEQ ID NO: 1053; WAN024ASZ; Start 27; Stop 51
cgttctgtatctaatcatgtccatc

SEQ ID NO: 281815 - DNA, 25 bp, Artificial
  probe
  misc_feature (1)..(25): SEQ ID NO: 1053; WAN024ASZ; Start 28; Stop 52
gttctgtatctaatcatgtccatct

SEQ ID NO: 281816 - DNA, 25 bp, Artificial
  probe
  misc_feature (1)..(25): SEQ ID NO: 1053; WAN024ASZ; Start 44; Stop 68
tgtccatctttctatatccgcttag

SEQ ID NO: 281817 - DNA, 25 bp, Artificial
  probe
  misc_feature (1)..(25): SEQ ID NO: 1053; WAN024ASZ; Start 43; Stop 67
atgtccatctttctatatccgctta

SEQ ID NO: 281818 - DNA, 25 bp, Artificial
  probe
  misc_feature (1)..(25): SEQ ID NO: 1053; WAN024ASZ; Start 46; Stop 70
tccatctttctatatccgcttaggg

SEQ ID NO: 281819 - DNA, 25 bp, Artificial
  probe
  misc_feature (1)..(25): SEQ ID NO: 1053; WAN024ASZ; Start 29; Stop 53
ttctgtatctaatcatgtccatctt

SEQ ID NO: 281820 - DNA, 25 bp, Artificial
  probe
  misc_feature (1)..(25): SEQ ID NO: 1053; WAN024ASZ; Start 40; Stop 64
atcatgtccatctttctatatccgc

SEQ ID NO: 281821 - DNA, 25 bp, Artificial
  probe
  misc_feature (1)..(25): SEQ ID NO: 1053; WAN024ASZ; Start 42; Stop 66
catgtccatctttctatatccgctt

SEQ ID NO: 281822 - DNA, 25 bp, Artificial
  probe
  misc_feature (1)..(25): SEQ ID NO: 1053; WAN024ASZ; Start 41; Stop 65
tcatgtccatctttctatatccgct

SEQ ID NO: 281823 - DNA, 25 bp, Artificial
  probe
  misc_feature (1)..(25): SEQ ID NO: 1053; WAN024ASZ; Start 24; Stop 48
tttcgttctgtatctaatcatgtcc

SEQ ID NO: 281824 - DNA, 25 bp, Artificial
  probe
  misc_feature (1)..(25): SEQ ID NO: 1053; WAN024ASZ; Start 49; Stop 73
atctttctatatccgcttagggaga

SEQ ID NO: 281825 - DNA, 25 bp, Artificial
  probe
  misc_feature (1)..(25): SEQ ID NO: 1053; WAN024ASZ; Start 48; Stop 72
catctttctatatccgcttagggag

SEQ ID NO: 281826 - DNA, 25 bp, Artificial
  probe
  misc_feature (1)..(25): SEQ ID NO: 1053; WAN024ASZ; Start 39; Stop 63
aatcatgtccatctttctatatccg

SEQ ID NO: 281827 - DNA, 25 bp, Artificial
  probe
  misc_feature (1)..(25): SEQ ID NO: 1053; WAN024ASZ; Start 50; Stop 74
tctttctatatccgcttagggagag

SEQ ID NO: 281828 - DNA, 25 bp, Artificial
  probe
  misc_feature (1)..(25): SEQ ID NO: 1053; WAN024ASZ; Start 51; Stop 75
ctttctatatccgcttagggagagt

SEQ ID NO: 281829 - DNA, 25 bp, Artificial
  probe
  misc_feature (1)..(25): SEQ ID NO: 1053; WAN024ASZ; Start 52; Stop 76
tttctatatccgcttagggagagtg

SEQ ID NO: 281830 - DNA, 25 bp, Artificial
  probe
  misc_feature (1)..(25): SEQ ID NO: 1053; WAN024ASZ; Start 47; Stop 71
ccatctttctatatccgcttaggga

SEQ ID NO: 281831 - DNA, 25 bp, Artificial
  probe
  misc_feature (1)..(25): SEQ ID NO: 1053; WAN024ASZ; Start 30; Stop 54
tctgtatctaatcatgtccatcttt

SEQ ID NO: 281832 - DNA, 25 bp, Artificial
  probe
  misc_feature (1)..(25): SEQ ID NO: 1053; WAN024ASZ; Start 31; Stop 55
ctgtatctaatcatgtccatctttc

SEQ ID NO: 281833 - DNA, 25 bp, Artificial
  probe
  misc_feature (1)..(25): SEQ ID NO: 1053; WAN024ASZ; Start 55; Stop 79
ctatatccgcttagggagagtgctt

SEQ ID NO: 281834 - DNA, 25 bp, Artificial
  probe
  misc_feature (1)..(25): SEQ ID NO: 1053; WAN024ASZ; Start 53; Stop 77
ttctatatccgcttagggagagtgc

SEQ ID NO: 281835 - DNA, 25 bp, Artificial
  probe
  misc_feature (1)..(25): SEQ ID NO: 1053; WAN024ASZ; Start 56; Stop 80
tatatccgcttagggagagtgcttg

SEQ ID NO: 281836 - DNA, 25 bp, Artificial
  probe
  misc_feature (1)..(25): SEQ ID NO: 1053; WAN024ASZ; Start 69; Stop 93
ggagagtgcttggtatcagctattt

SEQ ID NO: 281837 - DNA, 25 bp, Artificial
  probe
  misc_feature (1)..(25): SEQ ID NO: 1053; WAN024ASZ; Start 63; Stop 87
gcttagggagagtgcttggtatcag

SEQ ID NO: 281838 - DNA, 25 bp, Artificial
  probe
  misc_feature (1)..(25): SEQ ID NO: 1053; WAN024ASZ; Start 54; Stop 78
tctatatccgcttagggagagtgct

SEQ ID NO: 281839 - DNA, 25 bp, Artificial
  probe
  misc_feature (1)..(25): SEQ ID NO: 1053; WAN024ASZ; Start 23; Stop 47
ttttcgttctgtatctaatcatgtc

SEQ ID NO: 281840 - DNA, 25 bp, Artificial
  probe
  misc_feature (1)..(25): SEQ ID NO: 1053; WAN024ASZ; Start 38; Stop 62
taatcatgtccatctttctatatcc

SEQ ID NO: 281841 - DNA, 25 bp, Artificial
  probe
  misc_feature (1)..(25): SEQ ID NO: 1053; WAN024ASZ; Start 33; Stop 57
gtatctaatcatgtccatctttcta

SEQ ID NO: 281842 - DNA, 25 bp, Artificial
  probe
  misc_feature (1)..(25): SEQ ID NO: 1053; WAN024ASZ; Start 71; Stop 95
agagtgcttggtatcagctatttta

SEQ ID NO: 281843 - DNA, 25 bp, Artificial
  probe
  misc_feature (1)..(25): SEQ ID NO: 1053; WAN024ASZ; Start 70; Stop 94
gagagtgcttggtatcagctatttt

SEQ ID NO: 281844 - DNA, 25 bp, Artificial
  probe
  misc_feature (1)..(25): SEQ ID NO: 1053; WAN024ASZ; Start 72; Stop 96
gagtgcttggtatcagctattttat

SEQ ID NO: 281845 - DNA, 25 bp, Artificial
  probe
  misc_feature (1)..(25): SEQ ID NO: 1054; WAN024ASY; Start 62; Stop 86
cgcttagggaaagtatttggtatca

SEQ ID NO: 281846 - DNA, 25 bp, Artificial
  probe
  misc_feature (1)..(25): SEQ ID NO: 1054; WAN024ASY; Start 64; Stop 88
cttagggaaagtatttggtatcagc

SEQ ID NO: 281847 - DNA, 25 bp, Artificial
  probe
  misc_feature (1)..(25): SEQ ID NO: 1054; WAN024ASY; Start 63; Stop 87
gcttagggaaagtatttggtatcag

SEQ ID NO: 281848 - DNA, 25 bp, Artificial
  probe
  misc_feature (1)..(25): SEQ ID NO: 1054; WAN024ASY; Start 61; Stop 85
ccgcttagggaaagtatttggtatc

SEQ ID NO: 281849 - DNA, 25 bp, Artificial
  probe
  misc_feature (1)..(25): SEQ ID NO: 1054; WAN024ASY; Start 25; Stop 49
ttcatcttgtatctaatcatgtcca

SEQ ID NO: 281850 - DNA, 25 bp, Artificial
  probe
  misc_feature (1)..(25): SEQ ID NO: 1054; WAN024ASY; Start 29; Stop 53
tcttgtatctaatcatgtccatctt

SEQ ID NO: 281851 - DNA, 25 bp, Artificial
  probe
  misc_feature (1)..(25): SEQ ID NO: 1054; WAN024ASY; Start 26; Stop 50
tcatcttgtatctaatcatgtccat

SEQ ID NO: 281852 - DNA, 25 bp, Artificial
  probe
  misc_feature (1)..(25): SEQ ID NO: 1054; WAN024ASY; Start 28; Stop 52
atcttgtatctaatcatgtccatct

SEQ ID NO: 281853 - DNA, 25 bp, Artificial
  probe
  misc_feature (1)..(25): SEQ ID NO: 1054; WAN024ASY; Start 39; Stop 63
aatcatgtccatctttctttatccg

SEQ ID NO: 281854 - DNA, 25 bp, Artificial
  probe
  misc_feature (1)..(25): SEQ ID NO: 1054; WAN024ASY; Start 27; Stop 51
catcttgtatctaatcatgtccatc

SEQ ID NO: 281855 - DNA, 25 bp, Artificial
  probe
  misc_feature (1)..(25): SEQ ID NO: 1054; WAN024ASY; Start 65; Stop 89
ttagggaaagtatttggtatcagct

SEQ ID NO: 281856 - DNA, 25 bp, Artificial
  probe
  misc_feature (1)..(25): SEQ ID NO: 1054; WAN024ASY; Start 57; Stop 81
ttatccgcttagggaaagtatttgg

SEQ ID NO: 281857 - DNA, 25 bp, Artificial
  probe
  misc_feature (1)..(25): SEQ ID NO: 1054; WAN024ASY; Start 48; Stop 72
catctttctttatccgcttagggaa

SEQ ID NO: 281858 - DNA, 25 bp, Artificial
  probe
  misc_feature (1)..(25): SEQ ID NO: 1054; WAN024ASY; Start 67; Stop 91
agggaaagtatttggtatcagctat

SEQ ID NO: 281859 - DNA, 25 bp, Artificial
  probe
  misc_feature (1)..(25): SEQ ID NO: 1054; WAN024ASY; Start 56; Stop 80
tttatccgcttagggaaagtatttg

SEQ ID NO: 281860 - DNA, 25 bp, Artificial
  probe
  misc_feature (1)..(25): SEQ ID NO: 1054; WAN024ASY; Start 66; Stop 90
tagggaaagtatttggtatcagcta

SEQ ID NO: 281861 - DNA, 25 bp, Artificial
  probe
  misc_feature (1)..(25): SEQ ID NO: 1054; WAN024ASY; Start 68; Stop 92
gggaaagtatttggtatcagctatt

SEQ ID NO: 281862 - DNA, 25 bp, Artificial
  probe
  misc_feature (1)..(25): SEQ ID NO: 1054; WAN024ASY; Start 60; Stop 84
tccgcttagggaaagtatttggtat

SEQ ID NO: 281863 - DNA, 25 bp, Artificial
  probe
  misc_feature (1)..(25): SEQ ID NO: 1054; WAN024ASY; Start 59; Stop 83
atccgcttagggaaagtatttggta

SEQ ID NO: 281864 - DNA, 25 bp, Artificial
  probe
  misc_feature (1)..(25): SEQ ID NO: 1054; WAN024ASY; Start 58; Stop 82
tatccgcttagggaaagtatttggt

SEQ ID NO: 281865 - DNA, 25 bp, Artificial
  probe
  misc_feature (1)..(25): SEQ ID NO: 1054; WAN024ASY; Start 49; Stop 73
atctttctttatccgcttagggaaa

SEQ ID NO: 281866 - DNA, 25 bp, Artificial
  probe
  misc_feature (1)..(25): SEQ ID NO: 1054; WAN024ASY; Start 52; Stop 76
tttctttatccgcttagggaaagta

SEQ ID NO: 281867 - DNA, 25 bp, Artificial
  probe
  misc_feature (1)..(25): SEQ ID NO: 1054; WAN024ASY; Start 54; Stop 78
tctttatccgcttagggaaagtatt

SEQ ID NO: 281868 - DNA, 25 bp, Artificial
  probe
  misc_feature (1)..(25): SEQ ID NO: 1054; WAN024ASY; Start 53; Stop 77
ttctttatccgcttagggaaagtat

SEQ ID NO: 281869 - DNA, 25 bp, Artificial
  probe
  misc_feature (1)..(25): SEQ ID NO: 1054; WAN024ASY; Start 55; Stop 79
ctttatccgcttagggaaagtattt

SEQ ID NO: 281870 - DNA, 25 bp, Artificial
  probe
  misc_feature (1)..(25): SEQ ID NO: 1054; WAN024ASY; Start 69; Stop 93
ggaaagtatttggtatcagctattt

SEQ ID NO: 281871 - DNA, 25 bp, Artificial
  probe
  misc_feature (1)..(25): SEQ ID NO: 1054; WAN024ASY; Start 31; Stop 55
ttgtatctaatcatgtccatctttc

SEQ ID NO: 281872 - DNA, 25 bp, Artificial
  probe
  misc_feature (1)..(25): SEQ ID NO: 1054; WAN024ASY; Start 30; Stop 54
cttgtatctaatcatgtccatcttt

SEQ ID NO: 281873 - DNA, 25 bp, Artificial
  probe
  misc_feature (1)..(25): SEQ ID NO: 1054; WAN024ASY; Start 38; Stop 62
taatcatgtccatctttctttatcc

SEQ ID NO: 281874 - DNA, 25 bp, Artificial
  probe
  misc_feature (1)..(25): SEQ ID NO: 1054; WAN024ASY; Start 24; Stop 48
tttcatcttgtatctaatcatgtcc

SEQ ID NO: 281875 - DNA, 25 bp, Artificial
  probe
  misc_feature (1)..(25): SEQ ID NO: 1054; WAN024ASY; Start 33; Stop 57
gtatctaatcatgtccatctttctt

SEQ ID NO: 281876 - DNA, 25 bp, Artificial
  probe
  misc_feature (1)..(25): SEQ ID NO: 1054; WAN024ASY; Start 36; Stop 60
tctaatcatgtccatctttctttat

SEQ ID NO: 281877 - DNA, 25 bp, Artificial
  probe
  misc_feature (1)..(25): SEQ ID NO: 1054; WAN024ASY; Start 35; Stop 59
atctaatcatgtccatctttcttta

SEQ ID NO: 281878 - DNA, 25 bp, Artificial
  probe
  misc_feature (1)..(25): SEQ ID NO: 1055; WAN024DUA; Start 125; Stop 149
gtaacttaacagcacaacaacaaga

SEQ ID NO: 281879 - DNA, 25 bp, Artificial
  probe
  misc_feature (1)..(25): SEQ ID NO: 1055; WAN024DUA; Start 124; Stop 148
agtaacttaacagcacaacaacaag

SEQ ID NO: 281880 - DNA, 25 bp, Artificial
  probe
  misc_feature (1)..(25): SEQ ID NO: 1055; WAN024DUA; Start 126; Stop 150
taacttaacagcacaacaacaagaa

SEQ ID NO: 281881 - DNA, 25 bp, Artificial
  probe
  misc_feature (1)..(25): SEQ ID NO: 1055; WAN024DUA; Start 123; Stop 147
tagtaacttaacagcacaacaacaa

SEQ ID NO: 281882 - DNA, 25 bp, Artificial
  probe
  misc_feature (1)..(25): SEQ ID NO: 1055; WAN024DUA; Start 122; Stop 146
ttagtaacttaacagcacaacaaca

SEQ ID NO: 281883 - DNA, 25 bp, Artificial
  probe
  misc_feature (1)..(25): SEQ ID NO: 1055; WAN024DUA; Start 127; Stop 151
aacttaacagcacaacaacaagaag

SEQ ID NO: 281884 - DNA, 25 bp, Artificial
  probe
  misc_feature (1)..(25): SEQ ID NO: 1055; WAN024DUA; Start 596; Stop 620
ctgaattaagtcttgctgctgagaa

SEQ ID NO: 281885 - DNA, 25 bp, Artificial
  probe
  misc_feature (1)..(25): SEQ ID NO: 1055; WAN024DUA; Start 121; Stop 145
attagtaacttaacagcacaacaac

SEQ ID NO: 281886 - DNA, 25 bp, Artificial
  probe
  misc_feature (1)..(25): SEQ ID NO: 1055; WAN024DUA; Start 1129; Stop 1153
aatccaacaacaacttctgaaggtt

SEQ ID NO: 281887 - DNA, 25 bp, Artificial
  probe
  misc_feature (1)..(25): SEQ ID NO: 1055; WAN024DUA; Start 1124; Stop 1148
ggttcaatccaacaacaacttctga

SEQ ID NO: 281888 - DNA, 25 bp, Artificial
  probe
  misc_feature (1)..(25): SEQ ID NO: 1055; WAN024DUA; Start 1128; Stop 1152
caatccaacaacaacttctgaaggt

SEQ ID NO: 281889 - DNA, 25 bp, Artificial
  probe
  misc_feature (1)..(25): SEQ ID NO: 1055; WAN024DUA; Start 1127; Stop 1151
tcaatccaacaacaacttctgaagg

SEQ ID NO: 281890 - DNA, 25 bp, Artificial
  probe
  misc_feature (1)..(25): SEQ ID NO: 1055; WAN024DUA; Start 120; Stop 144
aattagtaacttaacagcacaacaa

SEQ ID NO: 281891 - DNA, 25 bp, Artificial
  probe
  misc_feature (1)..(25): SEQ ID NO: 1055; WAN024DUA; Start 1057; Stop 1081
acaacacgtatccaagtatcagaat

SEQ ID NO: 281892 - DNA, 25 bp, Artificial
  probe
  misc_feature (1)..(25): SEQ ID NO: 1055; WAN024DUA; Start 1060; Stop 1084
acacgtatccaagtatcagaatcaa

SEQ ID NO: 281893 - DNA, 25 bp, Artificial
  probe
  misc_feature (1)..(25): SEQ ID NO: 1055; WAN024DUA; Start 1059; Stop 1083
aacacgtatccaagtatcagaatca

SEQ ID NO: 281894 - DNA, 25 bp, Artificial
  probe
  misc_feature (1)..(25): SEQ ID NO: 1055; WAN024DUA; Start 1056; Stop 1080
aacaacacgtatccaagtatcagaa

SEQ ID NO: 281895 - DNA, 25 bp, Artificial
  probe
  misc_feature (1)..(25): SEQ ID NO: 1055; WAN024DUA; Start 1053; Stop 1077
atcaacaacacgtatccaagtatca

SEQ ID NO: 281896 - DNA, 25 bp, Artificial
  probe
  misc_feature (1)..(25): SEQ ID NO: 1055; WAN024DUA; Start 1058; Stop 1082
caacacgtatccaagtatcagaatc

SEQ ID NO: 281897 - DNA, 25 bp, Artificial
  probe
  misc_feature (1)..(25): SEQ ID NO: 1055; WAN024DUA; Start 128; Stop 152
acttaacagcacaacaacaagaagc

SEQ ID NO: 281898 - DNA, 25 bp, Artificial
  probe
  misc_feature (1)..(25): SEQ ID NO: 1055; WAN024DUA; Start 1121; Stop 1145
gatggttcaatccaacaacaacttc

SEQ ID NO: 281899 - DNA, 25 bp, Artificial
  probe
  misc_feature (1)..(25): SEQ ID NO: 1055; WAN024DUA; Start 1050; Stop 1074
tgaatcaacaacacgtatccaagta

SEQ ID NO: 281900 - DNA, 25 bp, Artificial
  probe
  misc_feature (1)..(25): SEQ ID NO: 1055; WAN024DUA; Start 1052; Stop 1076
aatcaacaacacgtatccaagtatc

SEQ ID NO: 281901 - DNA, 25 bp, Artificial
  probe
  misc_feature (1)..(25): SEQ ID NO: 1055; WAN024DUA; Start 1051; Stop 1075
gaatcaacaacacgtatccaagtat

SEQ ID NO: 281902 - DNA, 25 bp, Artificial
  probe
  misc_feature (1)..(25): SEQ ID NO: 1055; WAN024DUA; Start 191; Stop 215
ctattcaagctgagcagtctaactt

SEQ ID NO: 281903 - DNA, 25 bp, Artificial
  probe
  misc_feature (1)..(25): SEQ ID NO: 1055; WAN024DUA; Start 1055; Stop 1079
caacaacacgtatccaagtatcaga

SEQ ID NO: 281904 - DNA, 25 bp, Artificial
  probe
  misc_feature (1)..(25): SEQ ID NO: 1055; WAN024DUA; Start 1054; Stop 1078
tcaacaacacgtatccaagtatcag

SEQ ID NO: 281905 - DNA, 25 bp, Artificial
  probe
  misc_feature (1)..(25): SEQ ID NO: 1055; WAN024DUA; Start 1122; Stop 1146
atggttcaatccaacaacaacttct

SEQ ID NO: 281906 - DNA, 25 bp, Artificial
  probe
  misc_feature (1)..(25): SEQ ID NO: 1055; WAN024DUA; Start 235; Stop 259
ttacaagcagaatctaagaaactcg

SEQ ID NO: 281907 - DNA, 25 bp, Artificial
  probe
  misc_feature (1)..(25): SEQ ID NO: 1055; WAN024DUA; Start 752; Stop 776
cttcagcaaacactaacttaacagc

SEQ ID NO: 281908 - DNA, 25 bp, Artificial
  probe
  misc_feature (1)..(25): SEQ ID NO: 1055; WAN024DUA; Start 598; Stop 622
gaattaagtcttgctgctgagaaag

SEQ ID NO: 281909 - DNA, 25 bp, Artificial
  probe
  misc_feature (1)..(25): SEQ ID NO: 1055; WAN024DUA; Start 843; Stop 867
tacaaacgcttcaagttatccaatt

SEQ ID NO: 281910 - DNA, 25 bp, Artificial
  probe
  misc_feature (1)..(25): SEQ ID NO: 1055; WAN024DUA; Start 1049; Stop 1073
ttgaatcaacaacacgtatccaagt

SEQ ID NO: 281911 - DNA, 25 bp, Artificial
  probe
  misc_feature (1)..(25): SEQ ID NO: 1056; WAN024DCS; Start 234; Stop 258
ggttgatgatactattgccgaagaa

SEQ ID NO: 281912 - DNA, 25 bp, Artificial
  probe
  misc_feature (1)..(25): SEQ ID NO: 1056; WAN024DCS; Start 348; Stop 372
attagttgagttggcagttaagaag

SEQ ID NO: 281913 - DNA, 25 bp, Artificial
  probe
  misc_feature (1)..(25): SEQ ID NO: 1056; WAN024DCS; Start 349; Stop 373
ttagttgagttggcagttaagaagg

SEQ ID NO: 281914 - DNA, 25 bp, Artificial
  probe
  misc_feature (1)..(25): SEQ ID NO: 1056; WAN024DCS; Start 232; Stop 256
gaggttgatgatactattgccgaag

SEQ ID NO: 281915 - DNA, 25 bp, Artificial
  probe
  misc_feature (1)..(25): SEQ ID NO: 1056; WAN024DCS; Start 347; Stop 371
aattagttgagttggcagttaagaa

SEQ ID NO: 281916 - DNA, 25 bp, Artificial
  probe
  misc_feature (1)..(25): SEQ ID NO: 1056; WAN024DCS; Start 384; Stop 408
tgaattgacagatgaagcctataag

SEQ ID NO: 281917 - DNA, 25 bp, Artificial
  probe
  misc_feature (1)..(25): SEQ ID NO: 1056; WAN024DCS; Start 352; Stop 376
gttgagttggcagttaagaaggtag

SEQ ID NO: 281918 - DNA, 25 bp, Artificial
  probe
  misc_feature (1)..(25): SEQ ID NO: 1056; WAN024DCS; Start 233; Stop 257
aggttgatgatactattgccgaaga

SEQ ID NO: 281919 - DNA, 25 bp, Artificial
  probe
  misc_feature (1)..(25): SEQ ID NO: 1056; WAN024DCS; Start 231; Stop 255
agaggttgatgatactattgccgaa

SEQ ID NO: 281920 - DNA, 25 bp, Artificial
  probe
  misc_feature (1)..(25): SEQ ID NO: 1056; WAN024DCS; Start 230; Stop 254
aagaggttgatgatactattgccga

SEQ ID NO: 281921 - DNA, 25 bp, Artificial
  probe
  misc_feature (1)..(25): SEQ ID NO: 1056; WAN024DCS; Start 26; Stop 50
ccatcacactattatcagtagcaac

SEQ ID NO: 281922 - DNA, 25 bp, Artificial
  probe
  misc_feature (1)..(25): SEQ ID NO: 1056; WAN024DCS; Start 25; Stop 49
gccatcacactattatcagtagcaa

SEQ ID NO: 281923 - DNA, 25 bp, Artificial
  probe
  misc_feature (1)..(25): SEQ ID NO: 1056; WAN024DCS; Start 890; Stop 914
aatatatcggtggtggagattcaag

SEQ ID NO: 281924 - DNA, 25 bp, Artificial
  probe
  misc_feature (1)..(25): SEQ ID NO: 1056; WAN024DCS; Start 889; Stop 913
caatatatcggtggtggagattcaa

SEQ ID NO: 281925 - DNA, 25 bp, Artificial
  probe
  misc_feature (1)..(25): SEQ ID NO: 1056; WAN024DCS; Start 385; Stop 409
gaattgacagatgaagcctataaga

SEQ ID NO: 281926 - DNA, 25 bp, Artificial
  probe
  misc_feature (1)..(25): SEQ ID NO: 1056; WAN024DCS; Start 351; Stop 375
agttgagttggcagttaagaaggta

SEQ ID NO: 281927 - DNA, 25 bp, Artificial
  probe
  misc_feature (1)..(25): SEQ ID NO: 1056; WAN024DCS; Start 350; Stop 374
tagttgagttggcagttaagaaggt

SEQ ID NO: 281928 - DNA, 25 bp, Artificial
  probe
  misc_feature (1)..(25): SEQ ID NO: 1056; WAN024DCS; Start 27; Stop 51
catcacactattatcagtagcaact

SEQ ID NO: 281929 - DNA, 25 bp, Artificial
  probe
  misc_feature (1)..(25): SEQ ID NO: 1056; WAN024DCS; Start 386; Stop 410
aattgacagatgaagcctataagaa

SEQ ID NO: 281930 - DNA, 25 bp, Artificial
  probe
  misc_feature (1)..(25): SEQ ID NO: 1056; WAN024DCS; Start 838; Stop 862
caagcagccaatatcaaggttaagg

SEQ ID NO: 281931 - DNA, 25 bp, Artificial
  probe
  misc_feature (1)..(25): SEQ ID NO: 1056; WAN024DCS; Start 839; Stop 863
aagcagccaatatcaaggttaagga

SEQ ID NO: 281932 - DNA, 25 bp, Artificial
  probe
  misc_feature (1)..(25): SEQ ID NO: 1056; WAN024DCS; Start 22; Stop 46
ggtgccatcacactattatcagtag

SEQ ID NO: 281933 - DNA, 25 bp, Artificial
  probe
  misc_feature (1)..(25): SEQ ID NO: 1056; WAN024DCS; Start 383; Stop 407
ctgaattgacagatgaagcctataa

SEQ ID NO: 281934 - DNA, 25 bp, Artificial
  probe
  misc_feature (1)..(25): SEQ ID NO: 1056; WAN024DCS; Start 21; Stop 45
aggtgccatcacactattatcagta

SEQ ID NO: 281935 - DNA, 25 bp, Artificial
  probe
  misc_feature (1)..(25): SEQ ID NO: 1056; WAN024DCS; Start 908; Stop 932
attcaagctcaagcagtagtacatc

SEQ ID NO: 281936 - DNA, 25 bp, Artificial
  probe
  misc_feature (1)..(25): SEQ ID NO: 1056; WAN024DCS; Start 907; Stop 931
gattcaagctcaagcagtagtacat

SEQ ID NO: 281937 - DNA, 25 bp, Artificial
  probe
  misc_feature (1)..(25): SEQ ID NO: 1056; WAN024DCS; Start 23; Stop 47
gtgccatcacactattatcagtagc

SEQ ID NO: 281938 - DNA, 25 bp, Artificial
  probe
  misc_feature (1)..(25): SEQ ID NO: 1056; WAN024DCS; Start 28; Stop 52
atcacactattatcagtagcaactt

SEQ ID NO: 281939 - DNA, 25 bp, Artificial
  probe
  misc_feature (1)..(25): SEQ ID NO: 1056; WAN024DCS; Start 837; Stop 861
gcaagcagccaatatcaaggttaag

SEQ ID NO: 281940 - DNA, 25 bp, Artificial
  probe
  misc_feature (1)..(25): SEQ ID NO: 1056; WAN024DCS; Start 358; Stop 382
ttggcagttaagaaggtagcagaag

SEQ ID NO: 281941 - DNA, 25 bp, Artificial
  probe
  misc_feature (1)..(25): SEQ ID NO: 1056; WAN024DCS; Start 891; Stop 915
atatatcggtggtggagattcaagc

SEQ ID NO: 281942 - DNA, 25 bp, Artificial
  probe
  misc_feature (1)..(25): SEQ ID NO: 1056; WAN024DCS; Start 235; Stop 259
gttgatgatactattgccgaagaaa

SEQ ID NO: 281943 - DNA, 25 bp, Artificial
  probe
  misc_feature (1)..(25): SEQ ID NO: 1056; WAN024DCS; Start 840; Stop 864
agcagccaatatcaaggttaaggac

SEQ ID NO: 281944 - DNA, 25 bp, Artificial
  probe
  misc_feature (1)..(25): SEQ ID NO: 1057; WAN024FZU; Start 2037; Stop 2061
aactggtaagattatcattgctcgt

SEQ ID NO: 281945 - DNA, 25 bp, Artificial
  probe
  misc_feature (1)..(25): SEQ ID NO: 1057; WAN024FZU; Start 2045; Stop 2069
agattatcattgctcgtaactacca

SEQ ID NO: 281946 - DNA, 25 bp, Artificial
  probe
  misc_feature (1)..(25): SEQ ID NO: 1057; WAN024FZU; Start 2038; Stop 2062
actggtaagattatcattgctcgta

SEQ ID NO: 281947 - DNA, 25 bp, Artificial
  probe
  misc_feature (1)..(25): SEQ ID NO: 1057; WAN024FZU; Start 805; Stop 829
tatatcattgccagcgattcttctt

SEQ ID NO: 281948 - DNA, 25 bp, Artificial
  probe
  misc_feature (1)..(25): SEQ ID NO: 1057; WAN024FZU; Start 1995; Stop 2019
tacaactatcgtatctgctatcggt

SEQ ID NO: 281949 - DNA, 25 bp, Artificial
  probe
  misc_feature (1)..(25): SEQ ID NO: 1057; WAN024FZU; Start 1590; Stop 1614
tattgccattgtcatcggaattatc

SEQ ID NO: 281950 - DNA, 25 bp, Artificial
  probe
  misc_feature (1)..(25): SEQ ID NO: 1057; WAN024FZU; Start 1589; Stop 1613
ctattgccattgtcatcggaattat

SEQ ID NO: 281951 - DNA, 25 bp, Artificial
  probe
  misc_feature (1)..(25): SEQ ID NO: 1057; WAN024FZU; Start 756; Stop 780
aactacaactactctcgcaggatta

SEQ ID NO: 281952 - DNA, 25 bp, Artificial
  probe
  misc_feature (1)..(25): SEQ ID NO: 1057; WAN024FZU; Start 2040; Stop 2064
tggtaagattatcattgctcgtaac

SEQ ID NO: 281953 - DNA, 25 bp, Artificial
  probe
  misc_feature (1)..(25): SEQ ID NO: 1057; WAN024FZU; Start 757; Stop 781
actacaactactctcgcaggattaa

SEQ ID NO: 281954 - DNA, 25 bp, Artificial
  probe
  misc_feature (1)..(25): SEQ ID NO: 1057; WAN024FZU; Start 1601; Stop 1625
tcatcggaattatcttcggtatgtt

SEQ ID NO: 281955 - DNA, 25 bp, Artificial
  probe
  misc_feature (1)..(25): SEQ ID NO: 1057; WAN024FZU; Start 1598; Stop 1622
ttgtcatcggaattatcttcggtat

SEQ ID NO: 281956 - DNA, 25 bp, Artificial
  probe
  misc_feature (1)..(25): SEQ ID NO: 1057; WAN024FZU; Start 1597; Stop 1621
attgtcatcggaattatcttcggta

SEQ ID NO: 281957 - DNA, 25 bp, Artificial
  probe
  misc_feature (1)..(25): SEQ ID NO: 1057; WAN024FZU; Start 553; Stop 577
gaatatgccattaaccaaggtcaag

SEQ ID NO: 281958 - DNA, 25 bp, Artificial
  probe
  misc_feature (1)..(25): SEQ ID NO: 1057; WAN024FZU; Start 2044; Stop 2068
aagattatcattgctcgtaactacc

SEQ ID NO: 281959 - DNA, 25 bp, Artificial
  probe
  misc_feature (1)..(25): SEQ ID NO: 1057; WAN024FZU; Start 2041; Stop 2065
ggtaagattatcattgctcgtaact

SEQ ID NO: 281960 - DNA, 25 bp, Artificial
  probe
  misc_feature (1)..(25): SEQ ID NO: 1057; WAN024FZU; Start 2039; Stop 2063
ctggtaagattatcattgctcgtaa

SEQ ID NO: 281961 - DNA, 25 bp, Artificial
  probe
  misc_feature (1)..(25): SEQ ID NO: 1057; WAN024FZU; Start 1591; Stop 1615
attgccattgtcatcggaattatct

SEQ ID NO: 281962 - DNA, 25 bp, Artificial
  probe
  misc_feature (1)..(25): SEQ ID NO: 1057; WAN024FZU; Start 554; Stop 578
aatatgccattaaccaaggtcaaga

SEQ ID NO: 281963 - DNA, 25 bp, Artificial
  probe
  misc_feature (1)..(25): SEQ ID NO: 1057; WAN024FZU; Start 1600; Stop 1624
gtcatcggaattatcttcggtatgt

SEQ ID NO: 281964 - DNA, 25 bp, Artificial
  probe
  misc_feature (1)..(25): SEQ ID NO: 1057; WAN024FZU; Start 1599; Stop 1623
tgtcatcggaattatcttcggtatg

SEQ ID NO: 281965 - DNA, 25 bp, Artificial
  probe
  misc_feature (1)..(25): SEQ ID NO: 1057; WAN024FZU; Start 1592; Stop 1616
ttgccattgtcatcggaattatctt

SEQ ID NO: 281966 - DNA, 25 bp, Artificial
  probe
  misc_feature (1)..(25): SEQ ID NO: 1057; WAN024FZU; Start 1465; Stop 1489
gaatcttcaactgcttcaacaagta

SEQ ID NO: 281967 - DNA, 25 bp, Artificial
  probe
  misc_feature (1)..(25): SEQ ID NO: 1057; WAN024FZU; Start 1967; Stop 1991
tcaaccaattcgttatcgctcttaa

SEQ ID NO: 281968 - DNA, 25 bp, Artificial
  probe
  misc_feature (1)..(25): SEQ ID NO: 1057; WAN024FZU; Start 555; Stop 579
atatgccattaaccaaggtcaagac

SEQ ID NO: 281969 - DNA, 25 bp, Artificial
  probe
  misc_feature (1)..(25): SEQ ID NO: 1057; WAN024FZU; Start 2046; Stop 2070
gattatcattgctcgtaactaccaa

SEQ ID NO: 281970 - DNA, 25 bp, Artificial
  probe
  misc_feature (1)..(25): SEQ ID NO: 1057; WAN024FZU; Start 1596; Stop 1620
cattgtcatcggaattatcttcggt

SEQ ID NO: 281971 - DNA, 25 bp, Artificial
  probe
  misc_feature (1)..(25): SEQ ID NO: 1057; WAN024FZU; Start 804; Stop 828
atatatcattgccagcgattcttct

SEQ ID NO: 281972 - DNA, 25 bp, Artificial
  probe
  misc_feature (1)..(25): SEQ ID NO: 1057; WAN024FZU; Start 1996; Stop 2020
acaactatcgtatctgctatcggtt

SEQ ID NO: 281973 - DNA, 25 bp, Artificial
  probe
  misc_feature (1)..(25): SEQ ID NO: 1057; WAN024FZU; Start 803; Stop 827
aatatatcattgccagcgattcttc

SEQ ID NO: 281974 - DNA, 25 bp, Artificial
  probe
  misc_feature (1)..(25): SEQ ID NO: 1057; WAN024FZU; Start 1048; Stop 1072
tactacactgctaataccattcttg

SEQ ID NO: 281975 - DNA, 25 bp, Artificial
  probe
  misc_feature (1)..(25): SEQ ID NO: 1057; WAN024FZU; Start 1593; Stop 1617
tgccattgtcatcggaattatcttc

SEQ ID NO: 281976 - DNA, 25 bp, Artificial
  probe
  misc_feature (1)..(25): SEQ ID NO: 1057; WAN024FZU; Start 1248; Stop 1272
cattgatgccgttatggatgatgaa

SEQ ID NO: 281977 - DNA, 25 bp, Artificial
  probe
  misc_feature (1)..(25): SEQ ID NO: 1058; WAN024GDE; Start 694; Stop 718
gctatcgttgttcctggttactata

SEQ ID NO: 281978 - DNA, 25 bp, Artificial
  probe
  misc_feature (1)..(25): SEQ ID NO: 1058; WAN024GDE; Start 698; Stop 722
tcgttgttcctggttactataatga

SEQ ID NO: 281979 - DNA, 25 bp, Artificial
  probe
  misc_feature (1)..(25): SEQ ID NO: 1058; WAN024GDE; Start 699; Stop 723
cgttgttcctggttactataatgag

SEQ ID NO: 281980 - DNA, 25 bp, Artificial
  probe
  misc_feature (1)..(25): SEQ ID NO: 1058; WAN024GDE; Start 697; Stop 721
atcgttgttcctggttactataatg

SEQ ID NO: 281981 - DNA, 25 bp, Artificial
  probe
  misc_feature (1)..(25): SEQ ID NO: 1058; WAN024GDE; Start 958; Stop 982
tatgattcagttcaccttgtagcaa

SEQ ID NO: 281982 - DNA, 25 bp, Artificial
  probe
  misc_feature (1)..(25): SEQ ID NO: 1058; WAN024GDE; Start 957; Stop 981
ttatgattcagttcaccttgtagca

SEQ ID NO: 281983 - DNA, 25 bp, Artificial
  probe
  misc_feature (1)..(25): SEQ ID NO: 1058; WAN024GDE; Start 693; Stop 717
tgctatcgttgttcctggttactat

SEQ ID NO: 281984 - DNA, 25 bp, Artificial
  probe
  misc_feature (1)..(25): SEQ ID NO: 1058; WAN024GDE; Start 692; Stop 716
atgctatcgttgttcctggttacta

SEQ ID NO: 281985 - DNA, 25 bp, Artificial
  probe
  misc_feature (1)..(25): SEQ ID NO: 1058; WAN024GDE; Start 956; Stop 980
cttatgattcagttcaccttgtagc

SEQ ID NO: 281986 - DNA, 25 bp, Artificial
  probe
  misc_feature (1)..(25): SEQ ID NO: 1058; WAN024GDE; Start 955; Stop 979
gcttatgattcagttcaccttgtag

SEQ ID NO: 281987 - DNA, 25 bp, Artificial
  probe
  misc_feature (1)..(25): SEQ ID NO: 1058; WAN024GDE; Start 954; Stop 978
ggcttatgattcagttcaccttgta

SEQ ID NO: 281988 - DNA, 25 bp, Artificial
  probe
  misc_feature (1)..(25): SEQ ID NO: 1058; WAN024GDE; Start 909; Stop 933
ttaccgtgctaagtacaatgaagag

SEQ ID NO: 281989 - DNA, 25 bp, Artificial
  probe
  misc_feature (1)..(25): SEQ ID NO: 1058; WAN024GDE; Start 951; Stop 975
cttggcttatgattcagttcacctt

SEQ ID NO: 281990 - DNA, 25 bp, Artificial
  probe
  misc_feature (1)..(25): SEQ ID NO: 1058; WAN024GDE; Start 849; Stop 873
tatctcaggcttctcaactactgta

SEQ ID NO: 281991 - DNA, 25 bp, Artificial
  probe
  misc_feature (1)..(25): SEQ ID NO: 1058; WAN024GDE; Start 695; Stop 719
ctatcgttgttcctggttactataa

SEQ ID NO: 281992 - DNA, 25 bp, Artificial
  probe
  misc_feature (1)..(25): SEQ ID NO: 1058; WAN024GDE; Start 952; Stop 976
ttggcttatgattcagttcaccttg

SEQ ID NO: 281993 - DNA, 25 bp, Artificial
  probe
  misc_feature (1)..(25): SEQ ID NO: 1058; WAN024GDE; Start 848; Stop 872
ttatctcaggcttctcaactactgt

SEQ ID NO: 281994 - DNA, 25 bp, Artificial
  probe
  misc_feature (1)..(25): SEQ ID NO: 1058; WAN024GDE; Start 701; Stop 725
ttgttcctggttactataatgaggc

SEQ ID NO: 281995 - DNA, 25 bp, Artificial
  probe
  misc_feature (1)..(25): SEQ ID NO: 1058; WAN024GDE; Start 689; Stop 713
ttgatgctatcgttgttcctggtta

SEQ ID NO: 281996 - DNA, 25 bp, Artificial
  probe
  misc_feature (1)..(25): SEQ ID NO: 1058; WAN024GDE; Start 703; Stop 727
gttcctggttactataatgaggctg

SEQ ID NO: 281997 - DNA, 25 bp, Artificial
  probe
  misc_feature (1)..(25): SEQ ID NO: 1058; WAN024GDE; Start 702; Stop 726
tgttcctggttactataatgaggct

SEQ ID NO: 281998 - DNA, 25 bp, Artificial
  probe
  misc_feature (1)..(25): SEQ ID NO: 1058; WAN024GDE; Start 707; Stop 731
ctggttactataatgaggctggtaa

SEQ ID NO: 281999 - DNA, 25 bp, Artificial
  probe
  misc_feature (1)..(25): SEQ ID NO: 1058; WAN024GDE; Start 908; Stop 932
cttaccgtgctaagtacaatgaaga

SEQ ID NO: 282000 - DNA, 25 bp, Artificial
  probe
  misc_feature (1)..(25): SEQ ID NO: 1058; WAN024GDE; Start 706; Stop 730
cctggttactataatgaggctggta

SEQ ID NO: 282001 - DNA, 25 bp, Artificial
  probe
  misc_feature (1)..(25): SEQ ID NO: 1058; WAN024GDE; Start 700; Stop 724
gttgttcctggttactataatgagg

SEQ ID NO: 282002 - DNA, 25 bp, Artificial
  probe
  misc_feature (1)..(25): SEQ ID NO: 1058; WAN024GDE; Start 850; Stop 874
atctcaggcttctcaactactgtag

SEQ ID NO: 282003 - DNA, 25 bp, Artificial
  probe
  misc_feature (1)..(25): SEQ ID NO: 1058; WAN024GDE; Start 691; Stop 715
gatgctatcgttgttcctggttact

SEQ ID NO: 282004 - DNA, 25 bp, Artificial
  probe
  misc_feature (1)..(25): SEQ ID NO: 1058; WAN024GDE; Start 696; Stop 720
tatcgttgttcctggttactataat

SEQ ID NO: 282005 - DNA, 25 bp, Artificial
  probe
  misc_feature (1)..(25): SEQ ID NO: 1058; WAN024GDE; Start 704; Stop 728
ttcctggttactataatgaggctgg

SEQ ID NO: 282006 - DNA, 25 bp, Artificial
  probe
  misc_feature (1)..(25): SEQ ID NO: 1058; WAN024GDE; Start 846; Stop 870
ctttatctcaggcttctcaactact

SEQ ID NO: 282007 - DNA, 25 bp, Artificial
  probe
  misc_feature (1)..(25): SEQ ID NO: 1058; WAN024GDE; Start 845; Stop 869
actttatctcaggcttctcaactac

SEQ ID NO: 282008 - DNA, 25 bp, Artificial
  probe
  misc_feature (1)..(25): SEQ ID NO: 1058; WAN024GDE; Start 843; Stop 867
ctactttatctcaggcttctcaact

SEQ ID NO: 282009 - DNA, 25 bp, Artificial
  probe
  misc_feature (1)..(25): SEQ ID NO: 1058; WAN024GDE; Start 842; Stop 866
tctactttatctcaggcttctcaac

SEQ ID NO: 282010 - DNA, 25 bp, Artificial
  probe
  misc_feature (1)..(25): SEQ ID NO: 1059; WAN024BGU; Start 1133; Stop 1157
tcatcagtaatccaacatcttcctt

SEQ ID NO: 282011 - DNA, 25 bp, Artificial
  probe
  misc_feature (1)..(25): SEQ ID NO: 1059; WAN024BGU; Start 1132; Stop 1156
gtcatcagtaatccaacatcttcct

SEQ ID NO: 282012 - DNA, 25 bp, Artificial
  probe
  misc_feature (1)..(25): SEQ ID NO: 1059; WAN024BGU; Start 1130; Stop 1154
aggtcatcagtaatccaacatcttc

SEQ ID NO: 282013 - DNA, 25 bp, Artificial
  probe
  misc_feature (1)..(25): SEQ ID NO: 1059; WAN024BGU; Start 1126; Stop 1150
gctaaggtcatcagtaatccaacat

SEQ ID NO: 282014 - DNA, 25 bp, Artificial
  probe
  misc_feature (1)..(25): SEQ ID NO: 1059; WAN024BGU; Start 1128; Stop 1152
taaggtcatcagtaatccaacatct

SEQ ID NO: 282015 - DNA, 25 bp, Artificial
  probe
  misc_feature (1)..(25): SEQ ID NO: 1059; WAN024BGU; Start 891; Stop 915
ttatactattgatgtgacaggcgag

SEQ ID NO: 282016 - DNA, 25 bp, Artificial
  probe
  misc_feature (1)..(25): SEQ ID NO: 1059; WAN024BGU; Start 890; Stop 914
cttatactattgatgtgacaggcga

SEQ ID NO: 282017 - DNA, 25 bp, Artificial
  probe
  misc_feature (1)..(25): SEQ ID NO: 1059; WAN024BGU; Start 1129; Stop 1153
aaggtcatcagtaatccaacatctt

SEQ ID NO: 282018 - DNA, 25 bp, Artificial
  probe
  misc_feature (1)..(25): SEQ ID NO: 1059; WAN024BGU; Start 1127; Stop 1151
ctaaggtcatcagtaatccaacatc

SEQ ID NO: 282019 - DNA, 25 bp, Artificial
  probe
  misc_feature (1)..(25): SEQ ID NO: 1059; WAN024BGU; Start 1018; Stop 1042
aattatgtctggattgtggatgaac

SEQ ID NO: 282020 - DNA, 25 bp, Artificial
  probe
  misc_feature (1)..(25): SEQ ID NO: 1059; WAN024BGU; Start 1131; Stop 1155
ggtcatcagtaatccaacatcttcc

SEQ ID NO: 282021 - DNA, 25 bp, Artificial
  probe
  misc_feature (1)..(25): SEQ ID NO: 1059; WAN024BGU; Start 1134; Stop 1158
catcagtaatccaacatcttccttg

SEQ ID NO: 282022 - DNA, 25 bp, Artificial
  probe
  misc_feature (1)..(25): SEQ ID NO: 1059; WAN024BGU; Start 1124; Stop 1148
gtgctaaggtcatcagtaatccaac

SEQ ID NO: 282023 - DNA, 25 bp, Artificial
  probe
  misc_feature (1)..(25): SEQ ID NO: 1059; WAN024BGU; Start 374; Stop 398
atatcaatgaactcaatcaagcacg

SEQ ID NO: 282024 - DNA, 25 bp, Artificial
  probe
  misc_feature (1)..(25): SEQ ID NO: 1059; WAN024BGU; Start 299; Stop 323
tagtcaagtacagtagttcagaagc

SEQ ID NO: 282025 - DNA, 25 bp, Artificial
  probe
  misc_feature (1)..(25): SEQ ID NO: 1059; WAN024BGU; Start 987; Stop 1011
tgttagcagtctagtaatggatgat

SEQ ID NO: 282026 - DNA, 25 bp, Artificial
  probe
  misc_feature (1)..(25): SEQ ID NO: 1059; WAN024BGU; Start 1125; Stop 1149
tgctaaggtcatcagtaatccaaca

SEQ ID NO: 282027 - DNA, 25 bp, Artificial
  probe
  misc_feature (1)..(25): SEQ ID NO: 1059; WAN024BGU; Start 375; Stop 399
tatcaatgaactcaatcaagcacga

SEQ ID NO: 282028 - DNA, 25 bp, Artificial
  probe
  misc_feature (1)..(25): SEQ ID NO: 1059; WAN024BGU; Start 373; Stop 397
catatcaatgaactcaatcaagcac

SEQ ID NO: 282029 - DNA, 25 bp, Artificial
  probe
  misc_feature (1)..(25): SEQ ID NO: 1059; WAN024BGU; Start 1019; Stop 1043
attatgtctggattgtggatgaaca

SEQ ID NO: 282030 - DNA, 25 bp, Artificial
  probe
  misc_feature (1)..(25): SEQ ID NO: 1059; WAN024BGU; Start 892; Stop 916
tatactattgatgtgacaggcgagg

SEQ ID NO: 282031 - DNA, 25 bp, Artificial
  probe
  misc_feature (1)..(25): SEQ ID NO: 1059; WAN024BGU; Start 974; Stop 998
ctattcttgttcctgttagcagtct

SEQ ID NO: 282032 - DNA, 25 bp, Artificial
  probe
  misc_feature (1)..(25): SEQ ID NO: 1059; WAN024BGU; Start 376; Stop 400
atcaatgaactcaatcaagcacgaa

SEQ ID NO: 282033 - DNA, 25 bp, Artificial
  probe
  misc_feature (1)..(25): SEQ ID NO: 1059; WAN024BGU; Start 975; Stop 999
tattcttgttcctgttagcagtcta

SEQ ID NO: 282034 - DNA, 25 bp, Artificial
  probe
  misc_feature (1)..(25): SEQ ID NO: 1059; WAN024BGU; Start 981; Stop 1005
tgttcctgttagcagtctagtaatg

SEQ ID NO: 282035 - DNA, 25 bp, Artificial
  probe
  misc_feature (1)..(25): SEQ ID NO: 1059; WAN024BGU; Start 979; Stop 1003
cttgttcctgttagcagtctagtaa

SEQ ID NO: 282036 - DNA, 25 bp, Artificial
  probe
  misc_feature (1)..(25): SEQ ID NO: 1059; WAN024BGU; Start 976; Stop 1000
attcttgttcctgttagcagtctag

SEQ ID NO: 282037 - DNA, 25 bp, Artificial
  probe
  misc_feature (1)..(25): SEQ ID NO: 1059; WAN024BGU; Start 966; Stop 990
aactaaggctattcttgttcctgtt

SEQ ID NO: 282038 - DNA, 25 bp, Artificial
  probe
  misc_feature (1)..(25): SEQ ID NO: 1059; WAN024BGU; Start 986; Stop 1010
ctgttagcagtctagtaatggatga

SEQ ID NO: 282039 - DNA, 25 bp, Artificial
  probe
  misc_feature (1)..(25): SEQ ID NO: 1059; WAN024BGU; Start 667; Stop 691
caagttatggttcatattgtcagca

SEQ ID NO: 282040 - DNA, 25 bp, Artificial
  probe
  misc_feature (1)..(25): SEQ ID NO: 1059; WAN024BGU; Start 991; Stop 1015
agcagtctagtaatggatgatagta

SEQ ID NO: 282041 - DNA, 25 bp, Artificial
  probe
  misc_feature (1)..(25): SEQ ID NO: 1059; WAN024BGU; Start 990; Stop 1014
tagcagtctagtaatggatgatagt

SEQ ID NO: 282042 - DNA, 25 bp, Artificial
  probe
  misc_feature (1)..(25): SEQ ID NO: 1059; WAN024BGU; Start 985; Stop 1009
cctgttagcagtctagtaatggatg

SEQ ID NO: 282043 - DNA, 25 bp, Artificial
  probe
  misc_feature (1)..(25): SEQ ID NO: 1060; WAN024DKV; Start 457; Stop 481
cttgctagagatacgactgtgagaa

SEQ ID NO: 282044 - DNA, 25 bp, Artificial
  probe
  misc_feature (1)..(25): SEQ ID NO: 1060; WAN024DKV; Start 544; Stop 568
tataaagaaactgagtctaaggcgg

SEQ ID NO: 282045 - DNA, 25 bp, Artificial
  probe
  misc_feature (1)..(25): SEQ ID NO: 1060; WAN024DKV; Start 567; Stop 591
ggatatcttagtggaccaatcagaa

SEQ ID NO: 282046 - DNA, 25 bp, Artificial
  probe
  misc_feature (1)..(25): SEQ ID NO: 1060; WAN024DKV; Start 460; Stop 484
gctagagatacgactgtgagaaatc

SEQ ID NO: 282047 - DNA, 25 bp, Artificial
  probe
  misc_feature (1)..(25): SEQ ID NO: 1060; WAN024DKV; Start 543; Stop 567
ctataaagaaactgagtctaaggcg

SEQ ID NO: 282048 - DNA, 25 bp, Artificial
  probe
  misc_feature (1)..(25): SEQ ID NO: 1060; WAN024DKV; Start 459; Stop 483
tgctagagatacgactgtgagaaat

SEQ ID NO: 282049 - DNA, 25 bp, Artificial
  probe
  misc_feature (1)..(25): SEQ ID NO: 1060; WAN024DKV; Start 548; Stop 572
aagaaactgagtctaaggcggatat

SEQ ID NO: 282050 - DNA, 25 bp, Artificial
  probe
  misc_feature (1)..(25): SEQ ID NO: 1060; WAN024DKV; Start 458; Stop 482
ttgctagagatacgactgtgagaaa

SEQ ID NO: 282051 - DNA, 25 bp, Artificial
  probe
  misc_feature (1)..(25): SEQ ID NO: 1060; WAN024DKV; Start 456; Stop 480
ccttgctagagatacgactgtgaga

SEQ ID NO: 282052 - DNA, 25 bp, Artificial
  probe
  misc_feature (1)..(25): SEQ ID NO: 1060; WAN024DKV; Start 572; Stop 596
tcttagtggaccaatcagaagataa

SEQ ID NO: 282053 - DNA, 25 bp, Artificial
  probe
  misc_feature (1)..(25): SEQ ID NO: 1060; WAN024DKV; Start 566; Stop 590
cggatatcttagtggaccaatcaga

SEQ ID NO: 282054 - DNA, 25 bp, Artificial
  probe
  misc_feature (1)..(25): SEQ ID NO: 1060; WAN024DKV; Start 547; Stop 571
aaagaaactgagtctaaggcggata

SEQ ID NO: 282055 - DNA, 25 bp, Artificial
  probe
  misc_feature (1)..(25): SEQ ID NO: 1060; WAN024DKV; Start 546; Stop 570
taaagaaactgagtctaaggcggat

SEQ ID NO: 282056 - DNA, 25 bp, Artificial
  probe
  misc_feature (1)..(25): SEQ ID NO: 1060; WAN024DKV; Start 545; Stop 569
ataaagaaactgagtctaaggcgga

SEQ ID NO: 282057 - DNA, 25 bp, Artificial
  probe
  misc_feature (1)..(25): SEQ ID NO: 1060; WAN024DKV; Start 599; Stop 623
ttgatgtcaagaggacttaactaat

SEQ ID NO: 282058 - DNA, 25 bp, Artificial
  probe
  misc_feature (1)..(25): SEQ ID NO: 1060; WAN024DKV; Start 569; Stop 593
atatcttagtggaccaatcagaaga

SEQ ID NO: 282059 - DNA, 25 bp, Artificial
  probe
  misc_feature (1)..(25): SEQ ID NO: 1060; WAN024DKV; Start 568; Stop 592
gatatcttagtggaccaatcagaag

SEQ ID NO: 282060 - DNA, 25 bp, Artificial
  probe
  misc_feature (1)..(25): SEQ ID NO: 1060; WAN024DKV; Start 534; Stop 558
tctgcgatactataaagaaactgag

SEQ ID NO: 282061 - DNA, 25 bp, Artificial
  probe
  misc_feature (1)..(25): SEQ ID NO: 1060; WAN024DKV; Start 552; Stop 576
aactgagtctaaggcggatatctta

SEQ ID NO: 282062 - DNA, 25 bp, Artificial
  probe
  misc_feature (1)..(25): SEQ ID NO: 1060; WAN024DKV; Start 536; Stop 560
tgcgatactataaagaaactgagtc

SEQ ID NO: 282063 - DNA, 25 bp, Artificial
  probe
  misc_feature (1)..(25): SEQ ID NO: 1060; WAN024DKV; Start 535; Stop 559
ctgcgatactataaagaaactgagt

SEQ ID NO: 282064 - DNA, 25 bp, Artificial
  probe
  misc_feature (1)..(25): SEQ ID NO: 1060; WAN024DKV; Start 51; Stop 75
gaaagtcaggacactgggaatatac

SEQ ID NO: 282065 - DNA, 25 bp, Artificial
  probe
  misc_feature (1)..(25): SEQ ID NO: 1060; WAN024DKV; Start 70; Stop 94
atatacggtcatggagcttcaggta

SEQ ID NO: 282066 - DNA, 25 bp, Artificial
  probe
  misc_feature (1)..(25): SEQ ID NO: 1060; WAN024DKV; Start 573; Stop 597
cttagtggaccaatcagaagataaa

SEQ ID NO: 282067 - DNA, 25 bp, Artificial
  probe
  misc_feature (1)..(25): SEQ ID NO: 1060; WAN024DKV; Start 537; Stop 561
gcgatactataaagaaactgagtct

SEQ ID NO: 282068 - DNA, 25 bp, Artificial
  probe
  misc_feature (1)..(25): SEQ ID NO: 1060; WAN024DKV; Start 542; Stop 566
actataaagaaactgagtctaaggc

SEQ ID NO: 282069 - DNA, 25 bp, Artificial
  probe
  misc_feature (1)..(25): SEQ ID NO: 1060; WAN024DKV; Start 71; Stop 95
tatacggtcatggagcttcaggtaa

SEQ ID NO: 282070 - DNA, 25 bp, Artificial
  probe
  misc_feature (1)..(25): SEQ ID NO: 1060; WAN024DKV; Start 50; Stop 74
ggaaagtcaggacactgggaatata

SEQ ID NO: 282071 - DNA, 25 bp, Artificial
  probe
  misc_feature (1)..(25): SEQ ID NO: 1060; WAN024DKV; Start 533; Stop 557
atctgcgatactataaagaaactga

SEQ ID NO: 282072 - DNA, 25 bp, Artificial
  probe
  misc_feature (1)..(25): SEQ ID NO: 1060; WAN024DKV; Start 68; Stop 92
gaatatacggtcatggagcttcagg

SEQ ID NO: 282073 - DNA, 25 bp, Artificial
  probe
  misc_feature (1)..(25): SEQ ID NO: 1060; WAN024DKV; Start 67; Stop 91
ggaatatacggtcatggagcttcag

SEQ ID NO: 282074 - DNA, 25 bp, Artificial
  probe
  misc_feature (1)..(25): SEQ ID NO: 1060; WAN024DKV; Start 575; Stop 599
tagtggaccaatcagaagataaatt

SEQ ID NO: 282075 - DNA, 25 bp, Artificial
  probe
  misc_feature (1)..(25): SEQ ID NO: 1060; WAN024DKV; Start 574; Stop 598
ttagtggaccaatcagaagataaat

SEQ ID NO: 282076 - DNA, 25 bp, Artificial
  probe
  misc_feature (1)..(25): SEQ ID NO: 1061; WAN024CLL; Start 12; Stop 36
tcatttagtaggagatgctctgatt

SEQ ID NO: 282077 - DNA, 25 bp, Artificial
  probe
  misc_feature (1)..(25): SEQ ID NO: 1061; WAN024CLL; Start 10; Stop 34
aatcatttagtaggagatgctctga

SEQ ID NO: 282078 - DNA, 25 bp, Artificial
  probe
  misc_feature (1)..(25): SEQ ID NO: 1061; WAN024CLL; Start 13; Stop 37
catttagtaggagatgctctgattt

SEQ ID NO: 282079 - DNA, 25 bp, Artificial
  probe
  misc_feature (1)..(25): SEQ ID NO: 1061; WAN024CLL; Start 9; Stop 33
aaatcatttagtaggagatgctctg

SEQ ID NO: 282080 - DNA, 25 bp, Artificial
  probe
  misc_feature (1)..(25): SEQ ID NO: 1061; WAN024CLL; Start 49; Stop 73
gatcagattgaagagttggattatt

SEQ ID NO: 282081 - DNA, 25 bp, Artificial
  probe
  misc_feature (1)..(25): SEQ ID NO: 1061; WAN024CLL; Start 46; Stop 70
agtgatcagattgaagagttggatt

SEQ ID NO: 282082 - DNA, 25 bp, Artificial
  probe
  misc_feature (1)..(25): SEQ ID NO: 1061; WAN024CLL; Start 44; Stop 68
ttagtgatcagattgaagagttgga

SEQ ID NO: 282083 - DNA, 25 bp, Artificial
  probe
  misc_feature (1)..(25): SEQ ID NO: 1061; WAN024CLL; Start 43; Stop 67
gttagtgatcagattgaagagttgg

SEQ ID NO: 282084 - DNA, 25 bp, Artificial
  probe
  misc_feature (1)..(25): SEQ ID NO: 1061; WAN024CLL; Start 42; Stop 66
ggttagtgatcagattgaagagttg

SEQ ID NO: 282085 - DNA, 25 bp, Artificial
  probe
  misc_feature (1)..(25): SEQ ID NO: 1061; WAN024CLL; Start 41; Stop 65
cggttagtgatcagattgaagagtt

SEQ ID NO: 282086 - DNA, 25 bp, Artificial
  probe
  misc_feature (1)..(25): SEQ ID NO: 1061; WAN024CLL; Start 45; Stop 69
tagtgatcagattgaagagttggat

SEQ ID NO: 282087 - DNA, 25 bp, Artificial
  probe
  misc_feature (1)..(25): SEQ ID NO: 1061; WAN024CLL; Start 37; Stop 61
ttgacggttagtgatcagattgaag

SEQ ID NO: 282088 - DNA, 25 bp, Artificial
  probe
  misc_feature (1)..(25): SEQ ID NO: 1061; WAN024CLL; Start 39; Stop 63
gacggttagtgatcagattgaagag

SEQ ID NO: 282089 - DNA, 25 bp, Artificial
  probe
  misc_feature (1)..(25): SEQ ID NO: 1061; WAN024CLL; Start 47; Stop 71
gtgatcagattgaagagttggatta

SEQ ID NO: 282090 - DNA, 25 bp, Artificial
  probe
  misc_feature (1)..(25): SEQ ID NO: 1061; WAN024CLL; Start 40; Stop 64
acggttagtgatcagattgaagagt

SEQ ID NO: 282091 - DNA, 25 bp, Artificial
  probe
  misc_feature (1)..(25): SEQ ID NO: 1061; WAN024CLL; Start 38; Stop 62
tgacggttagtgatcagattgaaga

SEQ ID NO: 282092 - DNA, 25 bp, Artificial
  probe
  misc_feature (1)..(25): SEQ ID NO: 1061; WAN024CLL; Start 11; Stop 35
atcatttagtaggagatgctctgat

SEQ ID NO: 282093 - DNA, 25 bp, Artificial
  probe
  misc_feature (1)..(25): SEQ ID NO: 1061; WAN024CLL; Start 17; Stop 41
tagtaggagatgctctgattttgac

SEQ ID NO: 282094 - DNA, 25 bp, Artificial
  probe
  misc_feature (1)..(25): SEQ ID NO: 1061; WAN024CLL; Start 16; Stop 40
ttagtaggagatgctctgattttga

SEQ ID NO: 282095 - DNA, 25 bp, Artificial
  probe
  misc_feature (1)..(25): SEQ ID NO: 1061; WAN024CLL; Start 50; Stop 74
atcagattgaagagttggattattt

SEQ ID NO: 282096 - DNA, 25 bp, Artificial
  probe
  misc_feature (1)..(25): SEQ ID NO: 1061; WAN024CLL; Start 48; Stop 72
tgatcagattgaagagttggattat

SEQ ID NO: 282097 - DNA, 25 bp, Artificial
  probe
  misc_feature (1)..(25): SEQ ID NO: 1061; WAN024CLL; Start 15; Stop 39
tttagtaggagatgctctgattttg

SEQ ID NO: 282098 - DNA, 25 bp, Artificial
  probe
  misc_feature (1)..(25): SEQ ID NO: 1061; WAN024CLL; Start 25; Stop 49
gatgctctgattttgacggttagtg

SEQ ID NO: 282099 - DNA, 25 bp, Artificial
  probe
  misc_feature (1)..(25): SEQ ID NO: 1061; WAN024CLL; Start 23; Stop 47
gagatgctctgattttgacggttag

SEQ ID NO: 282100 - DNA, 25 bp, Artificial
  probe
  misc_feature (1)..(25): SEQ ID NO: 1061; WAN024CLL; Start 24; Stop 48
agatgctctgattttgacggttagt

SEQ ID NO: 282101 - DNA, 25 bp, Artificial
  probe
  misc_feature (1)..(25): SEQ ID NO: 1061; WAN024CLL; Start 27; Stop 51
tgctctgattttgacggttagtgat

SEQ ID NO: 282102 - DNA, 25 bp, Artificial
  probe
  misc_feature (1)..(25): SEQ ID NO: 1061; WAN024CLL; Start 26; Stop 50
atgctctgattttgacggttagtga

SEQ ID NO: 282103 - DNA, 25 bp, Artificial
  probe
  misc_feature (1)..(25): SEQ ID NO: 1061; WAN024CLL; Start 36; Stop 60
tttgacggttagtgatcagattgaa

SEQ ID NO: 282104 - DNA, 25 bp, Artificial
  probe
  misc_feature (1)..(25): SEQ ID NO: 1061; WAN024CLL; Start 28; Stop 52
gctctgattttgacggttagtgatc

SEQ ID NO: 282105 - DNA, 25 bp, Artificial
  probe
  misc_feature (1)..(25): SEQ ID NO: 1061; WAN024CLL; Start 14; Stop 38
atttagtaggagatgctctgatttt

SEQ ID NO: 282106 - DNA, 25 bp, Artificial
  probe
  misc_feature (1)..(25): SEQ ID NO: 1061; WAN024CLL; Start 8; Stop 32
aaaatcatttagtaggagatgctct

SEQ ID NO: 282107 - DNA, 25 bp, Artificial
  probe
  misc_feature (1)..(25): SEQ ID NO: 1061; WAN024CLL; Start 18; Stop 42
agtaggagatgctctgattttgacg

SEQ ID NO: 282108 - DNA, 25 bp, Artificial
  probe
  misc_feature (1)..(25): SEQ ID NO: 1061; WAN024CLL; Start 22; Stop 46
ggagatgctctgattttgacggtta

SEQ ID NO: 282109 - DNA, 25 bp, Artificial
  probe
  misc_feature (1)..(25): SEQ ID NO: 1062; WAN024DUJ; Start 357; Stop 381
caatacatcaggaatcatctctcgt

SEQ ID NO: 282110 - DNA, 25 bp, Artificial
  probe
  misc_feature (1)..(25): SEQ ID NO: 1062; WAN024DUJ; Start 356; Stop 380
acaatacatcaggaatcatctctcg

SEQ ID NO: 282111 - DNA, 25 bp, Artificial
  probe
  misc_feature (1)..(25): SEQ ID NO: 1062; WAN024DUJ; Start 354; Stop 378
acacaatacatcaggaatcatctct

SEQ ID NO: 282112 - DNA, 25 bp, Artificial
  probe
  misc_feature (1)..(25): SEQ ID NO: 1062; WAN024DUJ; Start 355; Stop 379
cacaatacatcaggaatcatctctc

SEQ ID NO: 282113 - DNA, 25 bp, Artificial
  probe
  misc_feature (1)..(25): SEQ ID NO: 1062; WAN024DUJ; Start 611; Stop 635
ctcaaggtgtagatgctaacttcat

SEQ ID NO: 282114 - DNA, 25 bp, Artificial
  probe
  misc_feature (1)..(25): SEQ ID NO: 1062; WAN024DUJ; Start 353; Stop 377
aacacaatacatcaggaatcatctc

SEQ ID NO: 282115 - DNA, 25 bp, Artificial
  probe
  misc_feature (1)..(25): SEQ ID NO: 1062; WAN024DUJ; Start 352; Stop 376
gaacacaatacatcaggaatcatct

SEQ ID NO: 282116 - DNA, 25 bp, Artificial
  probe
  misc_feature (1)..(25): SEQ ID NO: 1062; WAN024DUJ; Start 359; Stop 383
atacatcaggaatcatctctcgtaa

SEQ ID NO: 282117 - DNA, 25 bp, Artificial
  probe
  misc_feature (1)..(25): SEQ ID NO: 1062; WAN024DUJ; Start 358; Stop 382
aatacatcaggaatcatctctcgta

SEQ ID NO: 282118 - DNA, 25 bp, Artificial
  probe
  misc_feature (1)..(25): SEQ ID NO: 1062; WAN024DUJ; Start 667; Stop 691
tactattcaccagttatcatcgcaa

SEQ ID NO: 282119 - DNA, 25 bp, Artificial
  probe
  misc_feature (1)..(25): SEQ ID NO: 1062; WAN024DUJ; Start 666; Stop 690
ctactattcaccagttatcatcgca

SEQ ID NO: 282120 - DNA, 25 bp, Artificial
  probe
  misc_feature (1)..(25): SEQ ID NO: 1062; WAN024DUJ; Start 665; Stop 689
actactattcaccagttatcatcgc

SEQ ID NO: 282121 - DNA, 25 bp, Artificial
  probe
  misc_feature (1)..(25): SEQ ID NO: 1062; WAN024DUJ; Start 349; Stop 373
gttgaacacaatacatcaggaatca

SEQ ID NO: 282122 - DNA, 25 bp, Artificial
  probe
  misc_feature (1)..(25): SEQ ID NO: 1062; WAN024DUJ; Start 610; Stop 634
tctcaaggtgtagatgctaacttca

SEQ ID NO: 282123 - DNA, 25 bp, Artificial
  probe
  misc_feature (1)..(25): SEQ ID NO: 1062; WAN024DUJ; Start 351; Stop 375
tgaacacaatacatcaggaatcatc

SEQ ID NO: 282124 - DNA, 25 bp, Artificial
  probe
  misc_feature (1)..(25): SEQ ID NO: 1062; WAN024DUJ; Start 664; Stop 688
gactactattcaccagttatcatcg

SEQ ID NO: 282125 - DNA, 25 bp, Artificial
  probe
  misc_feature (1)..(25): SEQ ID NO: 1062; WAN024DUJ; Start 350; Stop 374
ttgaacacaatacatcaggaatcat

SEQ ID NO: 282126 - DNA, 25 bp, Artificial
  probe
  misc_feature (1)..(25): SEQ ID NO: 1062; WAN024DUJ; Start 616; Stop 640
ggtgtagatgctaacttcatgtact

SEQ ID NO: 282127 - DNA, 25 bp, Artificial
  probe
  misc_feature (1)..(25): SEQ ID NO: 1062; WAN024DUJ; Start 615; Stop 639
aggtgtagatgctaacttcatgtac

SEQ ID NO: 282128 - DNA, 25 bp, Artificial
  probe
  misc_feature (1)..(25): SEQ ID NO: 1062; WAN024DUJ; Start 614; Stop 638
aaggtgtagatgctaacttcatgta

SEQ ID NO: 282129 - DNA, 25 bp, Artificial
  probe
  misc_feature (1)..(25): SEQ ID NO: 1062; WAN024DUJ; Start 612; Stop 636
tcaaggtgtagatgctaacttcatg

SEQ ID NO: 282130 - DNA, 25 bp, Artificial
  probe
  misc_feature (1)..(25): SEQ ID NO: 1062; WAN024DUJ; Start 613; Stop 637
caaggtgtagatgctaacttcatgt

SEQ ID NO: 282131 - DNA, 25 bp, Artificial
  probe
  misc_feature (1)..(25): SEQ ID NO: 1062; WAN024DUJ; Start 618; Stop 642
tgtagatgctaacttcatgtacttg

SEQ ID NO: 282132 - DNA, 25 bp, Artificial
  probe
  misc_feature (1)..(25): SEQ ID NO: 1062; WAN024DUJ; Start 617; Stop 641
gtgtagatgctaacttcatgtactt

SEQ ID NO: 282133 - DNA, 25 bp, Artificial
  probe
  misc_feature (1)..(25): SEQ ID NO: 1062; WAN024DUJ; Start 348; Stop 372
tgttgaacacaatacatcaggaatc

SEQ ID NO: 282134 - DNA, 25 bp, Artificial
  probe
  misc_feature (1)..(25): SEQ ID NO: 1062; WAN024DUJ; Start 663; Stop 687
tgactactattcaccagttatcatc

SEQ ID NO: 282135 - DNA, 25 bp, Artificial
  probe
  misc_feature (1)..(25): SEQ ID NO: 1062; WAN024DUJ; Start 619; Stop 643
gtagatgctaacttcatgtacttga

SEQ ID NO: 282136 - DNA, 25 bp, Artificial
  probe
  misc_feature (1)..(25): SEQ ID NO: 1062; WAN024DUJ; Start 520; Stop 544
aataacgactcaaactcaatcacac

SEQ ID NO: 282137 - DNA, 25 bp, Artificial
  probe
  misc_feature (1)..(25): SEQ ID NO: 1062; WAN024DUJ; Start 517; Stop 541
ccaaataacgactcaaactcaatca

SEQ ID NO: 282138 - DNA, 25 bp, Artificial
  probe
  misc_feature (1)..(25): SEQ ID NO: 1062; WAN024DUJ; Start 516; Stop 540
accaaataacgactcaaactcaatc

SEQ ID NO: 282139 - DNA, 25 bp, Artificial
  probe
  misc_feature (1)..(25): SEQ ID NO: 1062; WAN024DUJ; Start 558; Stop 582
cgtctttgatactgcttggatttac

SEQ ID NO: 282140 - DNA, 25 bp, Artificial
  probe
  misc_feature (1)..(25): SEQ ID NO: 1062; WAN024DUJ; Start 361; Stop 385
acatcaggaatcatctctcgtaaat

SEQ ID NO: 282141 - DNA, 25 bp, Artificial
  probe
  misc_feature (1)..(25): SEQ ID NO: 1062; WAN024DUJ; Start 565; Stop 589
gatactgcttggatttactacggtt

SEQ ID NO: 282142 - DNA, 25 bp, Artificial
  probe
  misc_feature (1)..(25): SEQ ID NO: 1063; WAN024DJ5; Start 106; Stop 130
ggtgaagaatatgaggtaagtgaga

SEQ ID NO: 282143 - DNA, 25 bp, Artificial
  probe
  misc_feature (1)..(25): SEQ ID NO: 1063; WAN024DJ5; Start 108; Stop 132
tgaagaatatgaggtaagtgagaca

SEQ ID NO: 282144 - DNA, 25 bp, Artificial
  probe
  misc_feature (1)..(25): SEQ ID NO: 1063; WAN024DJ5; Start 107; Stop 131
gtgaagaatatgaggtaagtgagac

SEQ ID NO: 282145 - DNA, 25 bp, Artificial
  probe
  misc_feature (1)..(25): SEQ ID NO: 1063; WAN024DJ5; Start 109; Stop 133
gaagaatatgaggtaagtgagacac

SEQ ID NO: 282146 - DNA, 25 bp, Artificial
  probe
  misc_feature (1)..(25): SEQ ID NO: 1063; WAN024DJ5; Start 75; Stop 99
agtatctgctttgagtgttatttct

SEQ ID NO: 282147 - DNA, 25 bp, Artificial
  probe
  misc_feature (1)..(25): SEQ ID NO: 1063; WAN024DJ5; Start 26; Stop 50
tgggtatttcaattattgcgagtac

SEQ ID NO: 282148 - DNA, 25 bp, Artificial
  probe
  misc_feature (1)..(25): SEQ ID NO: 1063; WAN024DJ5; Start 78; Stop 102
atctgctttgagtgttatttctagt

SEQ ID NO: 282149 - DNA, 25 bp, Artificial
  probe
  misc_feature (1)..(25): SEQ ID NO: 1063; WAN024DJ5; Start 72; Stop 96
gacagtatctgctttgagtgttatt

SEQ ID NO: 282150 - DNA, 25 bp, Artificial
  probe
  misc_feature (1)..(25): SEQ ID NO: 1063; WAN024DJ5; Start 71; Stop 95
cgacagtatctgctttgagtgttat

SEQ ID NO: 282151 - DNA, 25 bp, Artificial
  probe
  misc_feature (1)..(25): SEQ ID NO: 1063; WAN024DJ5; Start 73; Stop 97
acagtatctgctttgagtgttattt

SEQ ID NO: 282152 - DNA, 25 bp, Artificial
  probe
  misc_feature (1)..(25): SEQ ID NO: 1063; WAN024DJ5; Start 79; Stop 103
tctgctttgagtgttatttctagta

SEQ ID NO: 282153 - DNA, 25 bp, Artificial
  probe
  misc_feature (1)..(25): SEQ ID NO: 1063; WAN024DJ5; Start 74; Stop 98
cagtatctgctttgagtgttatttc

SEQ ID NO: 282154 - DNA, 25 bp, Artificial
  probe
  misc_feature (1)..(25): SEQ ID NO: 1063; WAN024DJ5; Start 161; Stop 185
cttcattatctgagatttcaccaac

SEQ ID NO: 282155 - DNA, 25 bp, Artificial
  probe
  misc_feature (1)..(25): SEQ ID NO: 1063; WAN024DJ5; Start 160; Stop 184
tcttcattatctgagatttcaccaa

SEQ ID NO: 282156 - DNA, 25 bp, Artificial
  probe
  misc_feature (1)..(25): SEQ ID NO: 1063; WAN024DJ5; Start 159; Stop 183
ttcttcattatctgagatttcacca

SEQ ID NO: 282157 - DNA, 25 bp, Artificial
  probe
  misc_feature (1)..(25): SEQ ID NO: 1063; WAN024DJ5; Start 59; Stop 83
ctagccagttatcgacagtatctgc

SEQ ID NO: 282158 - DNA, 25 bp, Artificial
  probe
  misc_feature (1)..(25): SEQ ID NO: 1063; WAN024DJ5; Start 76; Stop 100
gtatctgctttgagtgttatttcta

SEQ ID NO: 282159 - DNA, 25 bp, Artificial
  probe
  misc_feature (1)..(25): SEQ ID NO: 1063; WAN024DJ5; Start 65; Stop 89
agttatcgacagtatctgctttgag

SEQ ID NO: 282160 - DNA, 25 bp, Artificial
  probe
  misc_feature (1)..(25): SEQ ID NO: 1063; WAN024DJ5; Start 67; Stop 91
ttatcgacagtatctgctttgagtg

SEQ ID NO: 282161 - DNA, 25 bp, Artificial
  probe
  misc_feature (1)..(25): SEQ ID NO: 1063; WAN024DJ5; Start 66; Stop 90
gttatcgacagtatctgctttgagt

SEQ ID NO: 282162 - DNA, 25 bp, Artificial
  probe
  misc_feature (1)..(25): SEQ ID NO: 1063; WAN024DJ5; Start 64; Stop 88
cagttatcgacagtatctgctttga

SEQ ID NO: 282163 - DNA, 25 bp, Artificial
  probe
  misc_feature (1)..(25): SEQ ID NO: 1063; WAN024DJ5; Start 63; Stop 87
ccagttatcgacagtatctgctttg

SEQ ID NO: 282164 - DNA, 25 bp, Artificial
  probe
  misc_feature (1)..(25): SEQ ID NO: 1063; WAN024DJ5; Start 68; Stop 92
tatcgacagtatctgctttgagtgt

SEQ ID NO: 282165 - DNA, 25 bp, Artificial
  probe
  misc_feature (1)..(25): SEQ ID NO: 1063; WAN024DJ5; Start 77; Stop 101
tatctgctttgagtgttatttctag

SEQ ID NO: 282166 - DNA, 25 bp, Artificial
  probe
  misc_feature (1)..(25): SEQ ID NO: 1063; WAN024DJ5; Start 70; Stop 94
tcgacagtatctgctttgagtgtta

SEQ ID NO: 282167 - DNA, 25 bp, Artificial
  probe
  misc_feature (1)..(25): SEQ ID NO: 1063; WAN024DJ5; Start 158; Stop 182
attcttcattatctgagatttcacc

SEQ ID NO: 282168 - DNA, 25 bp, Artificial
  probe
  misc_feature (1)..(25): SEQ ID NO: 1063; WAN024DJ5; Start 36; Stop 60
aattattgcgagtactttattggct

SEQ ID NO: 282169 - DNA, 25 bp, Artificial
  probe
  misc_feature (1)..(25): SEQ ID NO: 1063; WAN024DJ5; Start 38; Stop 62
ttattgcgagtactttattggctag

SEQ ID NO: 282170 - DNA, 25 bp, Artificial
  probe
  misc_feature (1)..(25): SEQ ID NO: 1063; WAN024DJ5; Start 60; Stop 84
tagccagttatcgacagtatctgct

SEQ ID NO: 282171 - DNA, 25 bp, Artificial
  probe
  misc_feature (1)..(25): SEQ ID NO: 1063; WAN024DJ5; Start 27; Stop 51
gggtatttcaattattgcgagtact

SEQ ID NO: 282172 - DNA, 25 bp, Artificial
  probe
  misc_feature (1)..(25): SEQ ID NO: 1063; WAN024DJ5; Start 69; Stop 93
atcgacagtatctgctttgagtgtt

SEQ ID NO: 282173 - DNA, 25 bp, Artificial
  probe
  misc_feature (1)..(25): SEQ ID NO: 1063; WAN024DJ5; Start 110; Stop 134
aagaatatgaggtaagtgagacact

SEQ ID NO: 282174 - DNA, 25 bp, Artificial
  probe
  misc_feature (1)..(25): SEQ ID NO: 1063; WAN024DJ5; Start 37; Stop 61
attattgcgagtactttattggcta

SEQ ID NO: 282175 - DNA, 25 bp, Artificial
  probe
  misc_feature (1)..(25): SEQ ID NO: 1064; WAN024DZL; Start 462; Stop 486
agtagcatcaagttcagaagttaca

SEQ ID NO: 282176 - DNA, 25 bp, Artificial
  probe
  misc_feature (1)..(25): SEQ ID NO: 1064; WAN024DZL; Start 463; Stop 487
gtagcatcaagttcagaagttacaa

SEQ ID NO: 282177 - DNA, 25 bp, Artificial
  probe
  misc_feature (1)..(25): SEQ ID NO: 1064; WAN024DZL; Start 459; Stop 483
agaagtagcatcaagttcagaagtt

SEQ ID NO: 282178 - DNA, 25 bp, Artificial
  probe
  misc_feature (1)..(25): SEQ ID NO: 1064; WAN024DZL; Start 458; Stop 482
aagaagtagcatcaagttcagaagt

SEQ ID NO: 282179 - DNA, 25 bp, Artificial
  probe
  misc_feature (1)..(25): SEQ ID NO: 1064; WAN024DZL; Start 461; Stop 485
aagtagcatcaagttcagaagttac

SEQ ID NO: 282180 - DNA, 25 bp, Artificial
  probe
  misc_feature (1)..(25): SEQ ID NO: 1064; WAN024DZL; Start 460; Stop 484
gaagtagcatcaagttcagaagtta

SEQ ID NO: 282181 - DNA, 25 bp, Artificial
  probe
  misc_feature (1)..(25): SEQ ID NO: 1064; WAN024DZL; Start 466; Stop 490
gcatcaagttcagaagttacaaaga

SEQ ID NO: 282182 - DNA, 25 bp, Artificial
  probe
  misc_feature (1)..(25): SEQ ID NO: 1064; WAN024DZL; Start 465; Stop 489
agcatcaagttcagaagttacaaag

SEQ ID NO: 282183 - DNA, 25 bp, Artificial
  probe
  misc_feature (1)..(25): SEQ ID NO: 1064; WAN024DZL; Start 471; Stop 495
aagttcagaagttacaaagacagtg

SEQ ID NO: 282184 - DNA, 25 bp, Artificial
  probe
  misc_feature (1)..(25): SEQ ID NO: 1064; WAN024DZL; Start 470; Stop 494
caagttcagaagttacaaagacagt

SEQ ID NO: 282185 - DNA, 25 bp, Artificial
  probe
  misc_feature (1)..(25): SEQ ID NO: 1064; WAN024DZL; Start 745; Stop 769
ataatttcaacaacttacgaggcac

SEQ ID NO: 282186 - DNA, 25 bp, Artificial
  probe
  misc_feature (1)..(25): SEQ ID NO: 1064; WAN024DZL; Start 469; Stop 493
tcaagttcagaagttacaaagacag

SEQ ID NO: 282187 - DNA, 25 bp, Artificial
  probe
  misc_feature (1)..(25): SEQ ID NO: 1064; WAN024DZL; Start 744; Stop 768
aataatttcaacaacttacgaggca

SEQ ID NO: 282188 - DNA, 25 bp, Artificial
  probe
  misc_feature (1)..(25): SEQ ID NO: 1064; WAN024DZL; Start 457; Stop 481
aaagaagtagcatcaagttcagaag

SEQ ID NO: 282189 - DNA, 25 bp, Artificial
  probe
  misc_feature (1)..(25): SEQ ID NO: 1064; WAN024DZL; Start 718; Stop 742
tctacttatcaaccagaagaaacga

SEQ ID NO: 282190 - DNA, 25 bp, Artificial
  probe
  misc_feature (1)..(25): SEQ ID NO: 1064; WAN024DZL; Start 464; Stop 488
tagcatcaagttcagaagttacaaa

SEQ ID NO: 282191 - DNA, 25 bp, Artificial
  probe
  misc_feature (1)..(25): SEQ ID NO: 1064; WAN024DZL; Start 468; Stop 492
atcaagttcagaagttacaaagaca

SEQ ID NO: 282192 - DNA, 25 bp, Artificial
  probe
  misc_feature (1)..(25): SEQ ID NO: 1064; WAN024DZL; Start 472; Stop 496
agttcagaagttacaaagacagtga

SEQ ID NO: 282193 - DNA, 25 bp, Artificial
  probe
  misc_feature (1)..(25): SEQ ID NO: 1064; WAN024DZL; Start 719; Stop 743
ctacttatcaaccagaagaaacgaa

SEQ ID NO: 282194 - DNA, 25 bp, Artificial
  probe
  misc_feature (1)..(25): SEQ ID NO: 1064; WAN024DZL; Start 743; Stop 767
aaataatttcaacaacttacgaggc

SEQ ID NO: 282195 - DNA, 25 bp, Artificial
  probe
  misc_feature (1)..(25): SEQ ID NO: 1064; WAN024DZL; Start 467; Stop 491
catcaagttcagaagttacaaagac

SEQ ID NO: 282196 - DNA, 25 bp, Artificial
  probe
  misc_feature (1)..(25): SEQ ID NO: 1064; WAN024DZL; Start 475; Stop 499
tcagaagttacaaagacagtgattg

SEQ ID NO: 282197 - DNA, 25 bp, Artificial
  probe
  misc_feature (1)..(25): SEQ ID NO: 1064; WAN024DZL; Start 473; Stop 497
gttcagaagttacaaagacagtgat

SEQ ID NO: 282198 - DNA, 25 bp, Artificial
  probe
  misc_feature (1)..(25): SEQ ID NO: 1064; WAN024DZL; Start 720; Stop 744
tacttatcaaccagaagaaacgaaa

SEQ ID NO: 282199 - DNA, 25 bp, Artificial
  probe
  misc_feature (1)..(25): SEQ ID NO: 1064; WAN024DZL; Start 746; Stop 770
taatttcaacaacttacgaggcacc

SEQ ID NO: 282200 - DNA, 25 bp, Artificial
  probe
  misc_feature (1)..(25): SEQ ID NO: 1064; WAN024DZL; Start 474; Stop 498
ttcagaagttacaaagacagtgatt

SEQ ID NO: 282201 - DNA, 25 bp, Artificial
  probe
  misc_feature (1)..(25): SEQ ID NO: 1064; WAN024DZL; Start 652; Stop 676
gaagcaactacaacaagttcagaag

SEQ ID NO: 282202 - DNA, 25 bp, Artificial
  probe
  misc_feature (1)..(25): SEQ ID NO: 1064; WAN024DZL; Start 651; Stop 675
ggaagcaactacaacaagttcagaa

SEQ ID NO: 282203 - DNA, 25 bp, Artificial
  probe
  misc_feature (1)..(25): SEQ ID NO: 1064; WAN024DZL; Start 653; Stop 677
aagcaactacaacaagttcagaagc

SEQ ID NO: 282204 - DNA, 25 bp, Artificial
  probe
  misc_feature (1)..(25): SEQ ID NO: 1064; WAN024DZL; Start 655; Stop 679
gcaactacaacaagttcagaagcaa

SEQ ID NO: 282205 - DNA, 25 bp, Artificial
  probe
  misc_feature (1)..(25): SEQ ID NO: 1064; WAN024DZL; Start 650; Stop 674
tggaagcaactacaacaagttcaga

SEQ ID NO: 282206 - DNA, 25 bp, Artificial
  probe
  misc_feature (1)..(25): SEQ ID NO: 1064; WAN024DZL; Start 649; Stop 673
gtggaagcaactacaacaagttcag

SEQ ID NO: 282207 - DNA, 25 bp, Artificial
  probe
  misc_feature (1)..(25): SEQ ID NO: 1064; WAN024DZL; Start 647; Stop 671
cagtggaagcaactacaacaagttc

SEQ ID NO: 282208 - DNA, 25 bp, Artificial
  probe
  misc_feature (1)..(25): SEQ ID NO: 1065; WAN024DZN; Start 430; Stop 454
gcagaagttacaaagacagtgattg

SEQ ID NO: 282209 - DNA, 25 bp, Artificial
  probe
  misc_feature (1)..(25): SEQ ID NO: 1065; WAN024DZN; Start 701; Stop 725
taatttcaacaacttacgaggctcc

SEQ ID NO: 282210 - DNA, 25 bp, Artificial
  probe
  misc_feature (1)..(25): SEQ ID NO: 1065; WAN024DZN; Start 418; Stop 442
tctcaaccaattgcagaagttacaa

SEQ ID NO: 282211 - DNA, 25 bp, Artificial
  probe
  misc_feature (1)..(25): SEQ ID NO: 1065; WAN024DZN; Start 429; Stop 453
tgcagaagttacaaagacagtgatt

SEQ ID NO: 282212 - DNA, 25 bp, Artificial
  probe
  misc_feature (1)..(25): SEQ ID NO: 1065; WAN024DZN; Start 880; Stop 904
ggtttggctatcgactttatggtac

SEQ ID NO: 282213 - DNA, 25 bp, Artificial
  probe
  misc_feature (1)..(25): SEQ ID NO: 1065; WAN024DZN; Start 879; Stop 903
aggtttggctatcgactttatggta

SEQ ID NO: 282214 - DNA, 25 bp, Artificial
  probe
  misc_feature (1)..(25): SEQ ID NO: 1065; WAN024DZN; Start 1095; Stop 1119
cgtttcaatgaatggactaactaat

SEQ ID NO: 282215 - DNA, 25 bp, Artificial
  probe
  misc_feature (1)..(25): SEQ ID NO: 1065; WAN024DZN; Start 1093; Stop 1117
cacgtttcaatgaatggactaacta

SEQ ID NO: 282216 - DNA, 25 bp, Artificial
  probe
  misc_feature (1)..(25): SEQ ID NO: 1065; WAN024DZN; Start 426; Stop 450
aattgcagaagttacaaagacagtg

SEQ ID NO: 282217 - DNA, 25 bp, Artificial
  probe
  misc_feature (1)..(25): SEQ ID NO: 1065; WAN024DZN; Start 702; Stop 726
aatttcaacaacttacgaggctcca

SEQ ID NO: 282218 - DNA, 25 bp, Artificial
  probe
  misc_feature (1)..(25): SEQ ID NO: 1065; WAN024DZN; Start 428; Stop 452
ttgcagaagttacaaagacagtgat

SEQ ID NO: 282219 - DNA, 25 bp, Artificial
  probe
  misc_feature (1)..(25): SEQ ID NO: 1065; WAN024DZN; Start 427; Stop 451
attgcagaagttacaaagacagtga

SEQ ID NO: 282220 - DNA, 25 bp, Artificial
  probe
  misc_feature (1)..(25): SEQ ID NO: 1065; WAN024DZN; Start 1092; Stop 1116
tcacgtttcaatgaatggactaact

SEQ ID NO: 282221 - DNA, 25 bp, Artificial
  probe
  misc_feature (1)..(25): SEQ ID NO: 1065; WAN024DZN; Start 1094; Stop 1118
acgtttcaatgaatggactaactaa

SEQ ID NO: 282222 - DNA, 25 bp, Artificial
  probe
  misc_feature (1)..(25): SEQ ID NO: 1065; WAN024DZN; Start 703; Stop 727
atttcaacaacttacgaggctccag

SEQ ID NO: 282223 - DNA, 25 bp, Artificial
  probe
  misc_feature (1)..(25): SEQ ID NO: 1065; WAN024DZN; Start 878; Stop 902
aaggtttggctatcgactttatggt

SEQ ID NO: 282224 - DNA, 25 bp, Artificial
  probe
  misc_feature (1)..(25): SEQ ID NO: 1065; WAN024DZN; Start 425; Stop 449
caattgcagaagttacaaagacagt

SEQ ID NO: 282225 - DNA, 25 bp, Artificial
  probe
  misc_feature (1)..(25): SEQ ID NO: 1065; WAN024DZN; Start 417; Stop 441
ttctcaaccaattgcagaagttaca

SEQ ID NO: 282226 - DNA, 25 bp, Artificial
  probe
  misc_feature (1)..(25): SEQ ID NO: 1065; WAN024DZN; Start 422; Stop 446
aaccaattgcagaagttacaaagac

SEQ ID NO: 282227 - DNA, 25 bp, Artificial
  probe
  misc_feature (1)..(25): SEQ ID NO: 1065; WAN024DZN; Start 421; Stop 445
caaccaattgcagaagttacaaaga

SEQ ID NO: 282228 - DNA, 25 bp, Artificial
  probe
  misc_feature (1)..(25): SEQ ID NO: 1065; WAN024DZN; Start 420; Stop 444
tcaaccaattgcagaagttacaaag

SEQ ID NO: 282229 - DNA, 25 bp, Artificial
  probe
  misc_feature (1)..(25): SEQ ID NO: 1065; WAN024DZN; Start 419; Stop 443
ctcaaccaattgcagaagttacaaa

SEQ ID NO: 282230 - DNA, 25 bp, Artificial
  probe
  misc_feature (1)..(25): SEQ ID NO: 1065; WAN024DZN; Start 877; Stop 901
aaaggtttggctatcgactttatgg

SEQ ID NO: 282231 - DNA, 25 bp, Artificial
  probe
  misc_feature (1)..(25): SEQ ID NO: 1065; WAN024DZN; Start 424; Stop 448
ccaattgcagaagttacaaagacag

SEQ ID NO: 282232 - DNA, 25 bp, Artificial
  probe
  misc_feature (1)..(25): SEQ ID NO: 1065; WAN024DZN; Start 423; Stop 447
accaattgcagaagttacaaagaca

SEQ ID NO: 282233 - DNA, 25 bp, Artificial
  probe
  misc_feature (1)..(25): SEQ ID NO: 1065; WAN024DZN; Start 1091; Stop 1115
ttcacgtttcaatgaatggactaac

SEQ ID NO: 282234 - DNA, 25 bp, Artificial
  probe
  misc_feature (1)..(25): SEQ ID NO: 1065; WAN024DZN; Start 1090; Stop 1114
gttcacgtttcaatgaatggactaa

SEQ ID NO: 282235 - DNA, 25 bp, Artificial
  probe
  misc_feature (1)..(25): SEQ ID NO: 1065; WAN024DZN; Start 1089; Stop 1113
cgttcacgtttcaatgaatggacta

SEQ ID NO: 282236 - DNA, 25 bp, Artificial
  probe
  misc_feature (1)..(25): SEQ ID NO: 1065; WAN024DZN; Start 416; Stop 440
tttctcaaccaattgcagaagttac

SEQ ID NO: 282237 - DNA, 25 bp, Artificial
  probe
  misc_feature (1)..(25): SEQ ID NO: 1065; WAN024DZN; Start 415; Stop 439
ctttctcaaccaattgcagaagtta

SEQ ID NO: 282238 - DNA, 25 bp, Artificial
  probe
  misc_feature (1)..(25): SEQ ID NO: 1065; WAN024DZN; Start 876; Stop 900
aaaaggtttggctatcgactttatg

SEQ ID NO: 282239 - DNA, 25 bp, Artificial
  probe
  misc_feature (1)..(25): SEQ ID NO: 1065; WAN024DZN; Start 875; Stop 899
gaaaaggtttggctatcgactttat

SEQ ID NO: 282240 - DNA, 25 bp, Artificial
  probe
  misc_feature (1)..(25): SEQ ID NO: 1065; WAN024DZN; Start 881; Stop 905
gtttggctatcgactttatggtacc

SEQ ID NO: 282241 - DNA, 25 bp, Artificial
  probe
  misc_feature (1)..(25): SEQ ID NO: 1066; WAN024DTM; Start 517; Stop 541
ttagagcgtatcatctcaggaattg

SEQ ID NO: 282242 - DNA, 25 bp, Artificial
  probe
  misc_feature (1)..(25): SEQ ID NO: 1066; WAN024DTM; Start 485; Stop 509
cagagggctttgactttactatttc

SEQ ID NO: 282243 - DNA, 25 bp, Artificial
  probe
  misc_feature (1)..(25): SEQ ID NO: 1066; WAN024DTM; Start 518; Stop 542
tagagcgtatcatctcaggaattgc

SEQ ID NO: 282244 - DNA, 25 bp, Artificial
  probe
  misc_feature (1)..(25): SEQ ID NO: 1066; WAN024DTM; Start 484; Stop 508
ccagagggctttgactttactattt

SEQ ID NO: 282245 - DNA, 25 bp, Artificial
  probe
  misc_feature (1)..(25): SEQ ID NO: 1066; WAN024DTM; Start 192; Stop 216
tttgattctgtctttattgggaggg

SEQ ID NO: 282246 - DNA, 25 bp, Artificial
  probe
  misc_feature (1)..(25): SEQ ID NO: 1066; WAN024DTM; Start 486; Stop 510
agagggctttgactttactatttcg

SEQ ID NO: 282247 - DNA, 25 bp, Artificial
  probe
  misc_feature (1)..(25): SEQ ID NO: 1066; WAN024DTM; Start 525; Stop 549
tatcatctcaggaattgcctctcac

SEQ ID NO: 282248 - DNA, 25 bp, Artificial
  probe
  misc_feature (1)..(25): SEQ ID NO: 1066; WAN024DTM; Start 524; Stop 548
gtatcatctcaggaattgcctctca

SEQ ID NO: 282249 - DNA, 25 bp, Artificial
  probe
  misc_feature (1)..(25): SEQ ID NO: 1066; WAN024DTM; Start 195; Stop 219
gattctgtctttattgggagggatg

SEQ ID NO: 282250 - DNA, 25 bp, Artificial
  probe
  misc_feature (1)..(25): SEQ ID NO: 1066; WAN024DTM; Start 194; Stop 218
tgattctgtctttattgggagggat

SEQ ID NO: 282251 - DNA, 25 bp, Artificial
  probe
  misc_feature (1)..(25): SEQ ID NO: 1066; WAN024DTM; Start 193; Stop 217
ttgattctgtctttattgggaggga

SEQ ID NO: 282252 - DNA, 25 bp, Artificial
  probe
  misc_feature (1)..(25): SEQ ID NO: 1066; WAN024DTM; Start 196; Stop 220
attctgtctttattgggagggatgt

SEQ ID NO: 282253 - DNA, 25 bp, Artificial
  probe
  misc_feature (1)..(25): SEQ ID NO: 1066; WAN024DTM; Start 600; Stop 624
ctataaaggacagaaggttggcaag

SEQ ID NO: 282254 - DNA, 25 bp, Artificial
  probe
  misc_feature (1)..(25): SEQ ID NO: 1066; WAN024DTM; Start 197; Stop 221
ttctgtctttattgggagggatgtt

SEQ ID NO: 282255 - DNA, 25 bp, Artificial
  probe
  misc_feature (1)..(25): SEQ ID NO: 1066; WAN024DTM; Start 601; Stop 625
tataaaggacagaaggttggcaaga

SEQ ID NO: 282256 - DNA, 25 bp, Artificial
  probe
  misc_feature (1)..(25): SEQ ID NO: 1066; WAN024DTM; Start 516; Stop 540
tttagagcgtatcatctcaggaatt

SEQ ID NO: 282257 - DNA, 25 bp, Artificial
  probe
  misc_feature (1)..(25): SEQ ID NO: 1066; WAN024DTM; Start 574; Stop 598
gtaggtgtttacttgctttacagag

SEQ ID NO: 282258 - DNA, 25 bp, Artificial
  probe
  misc_feature (1)..(25): SEQ ID NO: 1066; WAN024DTM; Start 301; Stop 325
ttaaatgcctttgaaagtgctattg

SEQ ID NO: 282259 - DNA, 25 bp, Artificial
  probe
  misc_feature (1)..(25): SEQ ID NO: 1066; WAN024DTM; Start 198; Stop 222
tctgtctttattgggagggatgttc

SEQ ID NO: 282260 - DNA, 25 bp, Artificial
  probe
  misc_feature (1)..(25): SEQ ID NO: 1066; WAN024DTM; Start 487; Stop 511
gagggctttgactttactatttcgc

SEQ ID NO: 282261 - DNA, 25 bp, Artificial
  probe
  misc_feature (1)..(25): SEQ ID NO: 1066; WAN024DTM; Start 523; Stop 547
cgtatcatctcaggaattgcctctc

SEQ ID NO: 282262 - DNA, 25 bp, Artificial
  probe
  misc_feature (1)..(25): SEQ ID NO: 1066; WAN024DTM; Start 591; Stop 615
ttacagagcctataaaggacagaag

SEQ ID NO: 282263 - DNA, 25 bp, Artificial
  probe
  misc_feature (1)..(25): SEQ ID NO: 1066; WAN024DTM; Start 602; Stop 626
ataaaggacagaaggttggcaagaa

SEQ ID NO: 282264 - DNA, 25 bp, Artificial
  probe
  misc_feature (1)..(25): SEQ ID NO: 1066; WAN024DTM; Start 590; Stop 614
tttacagagcctataaaggacagaa

SEQ ID NO: 282265 - DNA, 25 bp, Artificial
  probe
  misc_feature (1)..(25): SEQ ID NO: 1066; WAN024DTM; Start 592; Stop 616
tacagagcctataaaggacagaagg

SEQ ID NO: 282266 - DNA, 25 bp, Artificial
  probe
  misc_feature (1)..(25): SEQ ID NO: 1066; WAN024DTM; Start 603; Stop 627
taaaggacagaaggttggcaagaaa

SEQ ID NO: 282267 - DNA, 25 bp, Artificial
  probe
  misc_feature (1)..(25): SEQ ID NO: 1066; WAN024DTM; Start 573; Stop 597
agtaggtgtttacttgctttacaga

SEQ ID NO: 282268 - DNA, 25 bp, Artificial
  probe
  misc_feature (1)..(25): SEQ ID NO: 1066; WAN024DTM; Start 561; Stop 585
aggtctagctgtagtaggtgtttac

SEQ ID NO: 282269 - DNA, 25 bp, Artificial
  probe
  misc_feature (1)..(25): SEQ ID NO: 1066; WAN024DTM; Start 558; Stop 582
ttcaggtctagctgtagtaggtgtt

SEQ ID NO: 282270 - DNA, 25 bp, Artificial
  probe
  misc_feature (1)..(25): SEQ ID NO: 1066; WAN024DTM; Start 332; Stop 356
ctttggtagaagaacccttgaaatt

SEQ ID NO: 282271 - DNA, 25 bp, Artificial
  probe
  misc_feature (1)..(25): SEQ ID NO: 1066; WAN024DTM; Start 526; Stop 550
atcatctcaggaattgcctctcact

SEQ ID NO: 282272 - DNA, 25 bp, Artificial
  probe
  misc_feature (1)..(25): SEQ ID NO: 1066; WAN024DTM; Start 331; Stop 355
cctttggtagaagaacccttgaaat

SEQ ID NO: 282273 - DNA, 25 bp, Artificial
  probe
  misc_feature (1)..(25): SEQ ID NO: 1066; WAN024DTM; Start 595; Stop 619
agagcctataaaggacagaaggttg

SEQ ID NO: 282274 - DNA, 25 bp, Artificial
  probe
  misc_feature (1)..(25): SEQ ID NO: 1067; WAN024DLF; Start 517; Stop 541
cagtatggttggataacgacagatt

SEQ ID NO: 282275 - DNA, 25 bp, Artificial
  probe
  misc_feature (1)..(25): SEQ ID NO: 1067; WAN024DLF; Start 313; Stop 337
aatggaagtacagtcgtagaagtag

SEQ ID NO: 282276 - DNA, 25 bp, Artificial
  probe
  misc_feature (1)..(25): SEQ ID NO: 1067; WAN024DLF; Start 312; Stop 336
gaatggaagtacagtcgtagaagta

SEQ ID NO: 282277 - DNA, 25 bp, Artificial
  probe
  misc_feature (1)..(25): SEQ ID NO: 1067; WAN024DLF; Start 310; Stop 334
cagaatggaagtacagtcgtagaag

SEQ ID NO: 282278 - DNA, 25 bp, Artificial
  probe
  misc_feature (1)..(25): SEQ ID NO: 1067; WAN024DLF; Start 311; Stop 335
agaatggaagtacagtcgtagaagt

SEQ ID NO: 282279 - DNA, 25 bp, Artificial
  probe
  misc_feature (1)..(25): SEQ ID NO: 1067; WAN024DLF; Start 389; Stop 413
gtattatcgcacctgtatcagaaga

SEQ ID NO: 282280 - DNA, 25 bp, Artificial
  probe
  misc_feature (1)..(25): SEQ ID NO: 1067; WAN024DLF; Start 388; Stop 412
agtattatcgcacctgtatcagaag

SEQ ID NO: 282281 - DNA, 25 bp, Artificial
  probe
  misc_feature (1)..(25): SEQ ID NO: 1067; WAN024DLF; Start 390; Stop 414
tattatcgcacctgtatcagaagag

SEQ ID NO: 282282 - DNA, 25 bp, Artificial
  probe
  misc_feature (1)..(25): SEQ ID NO: 1067; WAN024DLF; Start 314; Stop 338
atggaagtacagtcgtagaagtagc

SEQ ID NO: 282283 - DNA, 25 bp, Artificial
  probe
  misc_feature (1)..(25): SEQ ID NO: 1067; WAN024DLF; Start 387; Stop 411
tagtattatcgcacctgtatcagaa

SEQ ID NO: 282284 - DNA, 25 bp, Artificial
  probe
  misc_feature (1)..(25): SEQ ID NO: 1067; WAN024DLF; Start 386; Stop 410
ctagtattatcgcacctgtatcaga

SEQ ID NO: 282285 - DNA, 25 bp, Artificial
  probe
  misc_feature (1)..(25): SEQ ID NO: 1067; WAN024DLF; Start 274; Stop 298
tgggcaaatctaacaacctatatct

SEQ ID NO: 282286 - DNA, 25 bp, Artificial
  probe
  misc_feature (1)..(25): SEQ ID NO: 1067; WAN024DLF; Start 273; Stop 297
gtgggcaaatctaacaacctatatc

SEQ ID NO: 282287 - DNA, 25 bp, Artificial
  probe
  misc_feature (1)..(25): SEQ ID NO: 1067; WAN024DLF; Start 317; Stop 341
gaagtacagtcgtagaagtagccac

SEQ ID NO: 282288 - DNA, 25 bp, Artificial
  probe
  misc_feature (1)..(25): SEQ ID NO: 1067; WAN024DLF; Start 516; Stop 540
gcagtatggttggataacgacagat

SEQ ID NO: 282289 - DNA, 25 bp, Artificial
  probe
  misc_feature (1)..(25): SEQ ID NO: 1067; WAN024DLF; Start 391; Stop 415
attatcgcacctgtatcagaagagg

SEQ ID NO: 282290 - DNA, 25 bp, Artificial
  probe
  misc_feature (1)..(25): SEQ ID NO: 1067; WAN024DLF; Start 522; Stop 546
tggttggataacgacagatttcata

SEQ ID NO: 282291 - DNA, 25 bp, Artificial
  probe
  misc_feature (1)..(25): SEQ ID NO: 1067; WAN024DLF; Start 520; Stop 544
tatggttggataacgacagatttca

SEQ ID NO: 282292 - DNA, 25 bp, Artificial
  probe
  misc_feature (1)..(25): SEQ ID NO: 1067; WAN024DLF; Start 519; Stop 543
gtatggttggataacgacagatttc

SEQ ID NO: 282293 - DNA, 25 bp, Artificial
  probe
  misc_feature (1)..(25): SEQ ID NO: 1067; WAN024DLF; Start 518; Stop 542
agtatggttggataacgacagattt

SEQ ID NO: 282294 - DNA, 25 bp, Artificial
  probe
  misc_feature (1)..(25): SEQ ID NO: 1067; WAN024DLF; Start 463; Stop 487
tactatcttgatgttcttgtttccg

SEQ ID NO: 282295 - DNA, 25 bp, Artificial
  probe
  misc_feature (1)..(25): SEQ ID NO: 1067; WAN024DLF; Start 521; Stop 545
atggttggataacgacagatttcat

SEQ ID NO: 282296 - DNA, 25 bp, Artificial
  probe
  misc_feature (1)..(25): SEQ ID NO: 1067; WAN024DLF; Start 282; Stop 306
tctaacaacctatatctttcctcgt

SEQ ID NO: 282297 - DNA, 25 bp, Artificial
  probe
  misc_feature (1)..(25): SEQ ID NO: 1067; WAN024DLF; Start 97; Stop 121
atggttgctttgtctgataatatgt

SEQ ID NO: 282298 - DNA, 25 bp, Artificial
  probe
  misc_feature (1)..(25): SEQ ID NO: 1067; WAN024DLF; Start 523; Stop 547
ggttggataacgacagatttcataa

SEQ ID NO: 282299 - DNA, 25 bp, Artificial
  probe
  misc_feature (1)..(25): SEQ ID NO: 1067; WAN024DLF; Start 465; Stop 489
ctatcttgatgttcttgtttccgct

SEQ ID NO: 282300 - DNA, 25 bp, Artificial
  probe
  misc_feature (1)..(25): SEQ ID NO: 1067; WAN024DLF; Start 275; Stop 299
gggcaaatctaacaacctatatctt

SEQ ID NO: 282301 - DNA, 25 bp, Artificial
  probe
  misc_feature (1)..(25): SEQ ID NO: 1067; WAN024DLF; Start 285; Stop 309
aacaacctatatctttcctcgtacc

SEQ ID NO: 282302 - DNA, 25 bp, Artificial
  probe
  misc_feature (1)..(25): SEQ ID NO: 1067; WAN024DLF; Start 466; Stop 490
tatcttgatgttcttgtttccgctg

SEQ ID NO: 282303 - DNA, 25 bp, Artificial
  probe
  misc_feature (1)..(25): SEQ ID NO: 1067; WAN024DLF; Start 464; Stop 488
actatcttgatgttcttgtttccgc

SEQ ID NO: 282304 - DNA, 25 bp, Artificial
  probe
  misc_feature (1)..(25): SEQ ID NO: 1067; WAN024DLF; Start 526; Stop 550
tggataacgacagatttcataaagt

SEQ ID NO: 282305 - DNA, 25 bp, Artificial
  probe
  misc_feature (1)..(25): SEQ ID NO: 1067; WAN024DLF; Start 98; Stop 122
tggttgctttgtctgataatatgta

SEQ ID NO: 282306 - DNA, 25 bp, Artificial
  probe
  misc_feature (1)..(25): SEQ ID NO: 1067; WAN024DLF; Start 262; Stop 286
ttattgttcgtgtgggcaaatctaa

SEQ ID NO: 282307 - DNA, 25 bp, Artificial
  probe
  misc_feature (1)..(25): SEQ ID NO: 1068; WAN024DF4; Start 680; Stop 704
gttctctgctccgttattatgagtg

SEQ ID NO: 282308 - DNA, 25 bp, Artificial
  probe
  misc_feature (1)..(25): SEQ ID NO: 1068; WAN024DF4; Start 116; Stop 140
atgatgaagactatctcagagagca

SEQ ID NO: 282309 - DNA, 25 bp, Artificial
  probe
  misc_feature (1)..(25): SEQ ID NO: 1068; WAN024DF4; Start 118; Stop 142
gatgaagactatctcagagagcaga

SEQ ID NO: 282310 - DNA, 25 bp, Artificial
  probe
  misc_feature (1)..(25): SEQ ID NO: 1068; WAN024DF4; Start 115; Stop 139
tatgatgaagactatctcagagagc

SEQ ID NO: 282311 - DNA, 25 bp, Artificial
  probe
  misc_feature (1)..(25): SEQ ID NO: 1068; WAN024DF4; Start 117; Stop 141
tgatgaagactatctcagagagcag

SEQ ID NO: 282312 - DNA, 25 bp, Artificial
  probe
  misc_feature (1)..(25): SEQ ID NO: 1068; WAN024DF4; Start 681; Stop 705
ttctctgctccgttattatgagtgg

SEQ ID NO: 282313 - DNA, 25 bp, Artificial
  probe
  misc_feature (1)..(25): SEQ ID NO: 1068; WAN024DF4; Start 679; Stop 703
ggttctctgctccgttattatgagt

SEQ ID NO: 282314 - DNA, 25 bp, Artificial
  probe
  misc_feature (1)..(25): SEQ ID NO: 1068; WAN024DF4; Start 511; Stop 535
ttaggatatgtaggaatggcaagct

SEQ ID NO: 282315 - DNA, 25 bp, Artificial
  probe
  misc_feature (1)..(25): SEQ ID NO: 1068; WAN024DF4; Start 10; Stop 34
atgaagtattacgaagaaacaagcg

SEQ ID NO: 282316 - DNA, 25 bp, Artificial
  probe
  misc_feature (1)..(25): SEQ ID NO: 1068; WAN024DF4; Start 111; Stop 135
tctctatgatgaagactatctcaga

SEQ ID NO: 282317 - DNA, 25 bp, Artificial
  probe
  misc_feature (1)..(25): SEQ ID NO: 1068; WAN024DF4; Start 98; Stop 122
atcttgctggatttctctatgatga

SEQ ID NO: 282318 - DNA, 25 bp, Artificial
  probe
  misc_feature (1)..(25): SEQ ID NO: 1068; WAN024DF4; Start 510; Stop 534
tttaggatatgtaggaatggcaagc

SEQ ID NO: 282319 - DNA, 25 bp, Artificial
  probe
  misc_feature (1)..(25): SEQ ID NO: 1068; WAN024DF4; Start 700; Stop 724
gagtggatgggaatttcaaatgttt

SEQ ID NO: 282320 - DNA, 25 bp, Artificial
  probe
  misc_feature (1)..(25): SEQ ID NO: 1068; WAN024DF4; Start 190; Stop 214
agtgcagaggattatctaggtaaga

SEQ ID NO: 282321 - DNA, 25 bp, Artificial
  probe
  misc_feature (1)..(25): SEQ ID NO: 1068; WAN024DF4; Start 189; Stop 213
gagtgcagaggattatctaggtaag

SEQ ID NO: 282322 - DNA, 25 bp, Artificial
  probe
  misc_feature (1)..(25): SEQ ID NO: 1068; WAN024DF4; Start 187; Stop 211
atgagtgcagaggattatctaggta

SEQ ID NO: 282323 - DNA, 25 bp, Artificial
  probe
  misc_feature (1)..(25): SEQ ID NO: 1068; WAN024DF4; Start 651; Stop 675
cagtatgattattgcccatcttgtg

SEQ ID NO: 282324 - DNA, 25 bp, Artificial
  probe
  misc_feature (1)..(25): SEQ ID NO: 1068; WAN024DF4; Start 607; Stop 631
atcggtatttggaattggaaagaag

SEQ ID NO: 282325 - DNA, 25 bp, Artificial
  probe
  misc_feature (1)..(25): SEQ ID NO: 1068; WAN024DF4; Start 188; Stop 212
tgagtgcagaggattatctaggtaa

SEQ ID NO: 282326 - DNA, 25 bp, Artificial
  probe
  misc_feature (1)..(25): SEQ ID NO: 1068; WAN024DF4; Start 99; Stop 123
tcttgctggatttctctatgatgaa

SEQ ID NO: 282327 - DNA, 25 bp, Artificial
  probe
  misc_feature (1)..(25): SEQ ID NO: 1068; WAN024DF4; Start 191; Stop 215
gtgcagaggattatctaggtaagaa

SEQ ID NO: 282328 - DNA, 25 bp, Artificial
  probe
  misc_feature (1)..(25): SEQ ID NO: 1068; WAN024DF4; Start 100; Stop 124
cttgctggatttctctatgatgaag

SEQ ID NO: 282329 - DNA, 25 bp, Artificial
  probe
  misc_feature (1)..(25): SEQ ID NO: 1068; WAN024DF4; Start 775; Stop 799
ttgttccgtgggtttaagaagataa

SEQ ID NO: 282330 - DNA, 25 bp, Artificial
  probe
  misc_feature (1)..(25): SEQ ID NO: 1068; WAN024DF4; Start 690; Stop 714
ccgttattatgagtggatgggaatt

SEQ ID NO: 282331 - DNA, 25 bp, Artificial
  probe
  misc_feature (1)..(25): SEQ ID NO: 1068; WAN024DF4; Start 103; Stop 127
gctggatttctctatgatgaagact

SEQ ID NO: 282332 - DNA, 25 bp, Artificial
  probe
  misc_feature (1)..(25): SEQ ID NO: 1068; WAN024DF4; Start 101; Stop 125
ttgctggatttctctatgatgaaga

SEQ ID NO: 282333 - DNA, 25 bp, Artificial
  probe
  misc_feature (1)..(25): SEQ ID NO: 1068; WAN024DF4; Start 691; Stop 715
cgttattatgagtggatgggaattt

SEQ ID NO: 282334 - DNA, 25 bp, Artificial
  probe
  misc_feature (1)..(25): SEQ ID NO: 1068; WAN024DF4; Start 102; Stop 126
tgctggatttctctatgatgaagac

SEQ ID NO: 282335 - DNA, 25 bp, Artificial
  probe
  misc_feature (1)..(25): SEQ ID NO: 1068; WAN024DF4; Start 600; Stop 624
gctagttatcggtatttggaattgg

SEQ ID NO: 282336 - DNA, 25 bp, Artificial
  probe
  misc_feature (1)..(25): SEQ ID NO: 1068; WAN024DF4; Start 599; Stop 623
cgctagttatcggtatttggaattg

SEQ ID NO: 282337 - DNA, 25 bp, Artificial
  probe
  misc_feature (1)..(25): SEQ ID NO: 1068; WAN024DF4; Start 598; Stop 622
tcgctagttatcggtatttggaatt

SEQ ID NO: 282338 - DNA, 25 bp, Artificial
  probe
  misc_feature (1)..(25): SEQ ID NO: 1068; WAN024DF4; Start 595; Stop 619
atttcgctagttatcggtatttgga

SEQ ID NO: 282339 - DNA, 25 bp, Artificial
  probe
  misc_feature (1)..(25): SEQ ID NO: 1068; WAN024DF4; Start 774; Stop 798
cttgttccgtgggtttaagaagata

SEQ ID NO: 282340 - DNA, 25 bp, Artificial
  probe
  misc_feature (1)..(25): SEQ ID NO: 1069; WAN024FSV; Start 859; Stop 883
cttcgtattacagcactcattcttc

SEQ ID NO: 282341 - DNA, 25 bp, Artificial
  probe
  misc_feature (1)..(25): SEQ ID NO: 1069; WAN024FSV; Start 719; Stop 743
ctgccaagtatgatgtctatatcgt

SEQ ID NO: 282342 - DNA, 25 bp, Artificial
  probe
  misc_feature (1)..(25): SEQ ID NO: 1069; WAN024FSV; Start 860; Stop 884
ttcgtattacagcactcattcttcc

SEQ ID NO: 282343 - DNA, 25 bp, Artificial
  probe
  misc_feature (1)..(25): SEQ ID NO: 1069; WAN024FSV; Start 858; Stop 882
ccttcgtattacagcactcattctt

SEQ ID NO: 282344 - DNA, 25 bp, Artificial
  probe
  misc_feature (1)..(25): SEQ ID NO: 1069; WAN024FSV; Start 926; Stop 950
tagactacgacagcaacctcattat

SEQ ID NO: 282345 - DNA, 25 bp, Artificial
  probe
  misc_feature (1)..(25): SEQ ID NO: 1069; WAN024FSV; Start 862; Stop 886
cgtattacagcactcattcttccaa

SEQ ID NO: 282346 - DNA, 25 bp, Artificial
  probe
  misc_feature (1)..(25): SEQ ID NO: 1069; WAN024FSV; Start 720; Stop 744
tgccaagtatgatgtctatatcgta

SEQ ID NO: 282347 - DNA, 25 bp, Artificial
  probe
  misc_feature (1)..(25): SEQ ID NO: 1069; WAN024FSV; Start 718; Stop 742
gctgccaagtatgatgtctatatcg

SEQ ID NO: 282348 - DNA, 25 bp, Artificial
  probe
  misc_feature (1)..(25): SEQ ID NO: 1069; WAN024FSV; Start 786; Stop 810
aaccttccactatcttgatacagag

SEQ ID NO: 282349 - DNA, 25 bp, Artificial
  probe
  misc_feature (1)..(25): SEQ ID NO: 1069; WAN024FSV; Start 721; Stop 745
gccaagtatgatgtctatatcgtag

SEQ ID NO: 282350 - DNA, 25 bp, Artificial
  probe
  misc_feature (1)..(25): SEQ ID NO: 1069; WAN024FSV; Start 187; Stop 211
cctcagagtggctactatgtattag

SEQ ID NO: 282351 - DNA, 25 bp, Artificial
  probe
  misc_feature (1)..(25): SEQ ID NO: 1069; WAN024FSV; Start 320; Stop 344
acctcttcaactactatgacaatca

SEQ ID NO: 282352 - DNA, 25 bp, Artificial
  probe
  misc_feature (1)..(25): SEQ ID NO: 1069; WAN024FSV; Start 861; Stop 885
tcgtattacagcactcattcttcca

SEQ ID NO: 282353 - DNA, 25 bp, Artificial
  probe
  misc_feature (1)..(25): SEQ ID NO: 1069; WAN024FSV; Start 156; Stop 180
attacggcacgaacaatacctctat

SEQ ID NO: 282354 - DNA, 25 bp, Artificial
  probe
  misc_feature (1)..(25): SEQ ID NO: 1069; WAN024FSV; Start 188; Stop 212
ctcagagtggctactatgtattaga

SEQ ID NO: 282355 - DNA, 25 bp, Artificial
  probe
  misc_feature (1)..(25): SEQ ID NO: 1069; WAN024FSV; Start 925; Stop 949
ctagactacgacagcaacctcatta

SEQ ID NO: 282356 - DNA, 25 bp, Artificial
  probe
  misc_feature (1)..(25): SEQ ID NO: 1069; WAN024FSV; Start 317; Stop 341
actacctcttcaactactatgacaa

SEQ ID NO: 282357 - DNA, 25 bp, Artificial
  probe
  misc_feature (1)..(25): SEQ ID NO: 1069; WAN024FSV; Start 316; Stop 340
aactacctcttcaactactatgaca

SEQ ID NO: 282358 - DNA, 25 bp, Artificial
  probe
  misc_feature (1)..(25): SEQ ID NO: 1069; WAN024FSV; Start 353; Stop 377
tagaagacctaagacagtccattca

SEQ ID NO: 282359 - DNA, 25 bp, Artificial
  probe
  misc_feature (1)..(25): SEQ ID NO: 1069; WAN024FSV; Start 919; Stop 943
aatatcctagactacgacagcaacc

SEQ ID NO: 282360 - DNA, 25 bp, Artificial
  probe
  misc_feature (1)..(25): SEQ ID NO: 1069; WAN024FSV; Start 352; Stop 376
ttagaagacctaagacagtccattc

SEQ ID NO: 282361 - DNA, 25 bp, Artificial
  probe
  misc_feature (1)..(25): SEQ ID NO: 1069; WAN024FSV; Start 350; Stop 374
gattagaagacctaagacagtccat

SEQ ID NO: 282362 - DNA, 25 bp, Artificial
  probe
  misc_feature (1)..(25): SEQ ID NO: 1069; WAN024FSV; Start 194; Stop 218
gtggctactatgtattagaacaagg

SEQ ID NO: 282363 - DNA, 25 bp, Artificial
  probe
  misc_feature (1)..(25): SEQ ID NO: 1069; WAN024FSV; Start 327; Stop 351
caactactatgacaatcaagaagga

SEQ ID NO: 282364 - DNA, 25 bp, Artificial
  probe
  misc_feature (1)..(25): SEQ ID NO: 1069; WAN024FSV; Start 326; Stop 350
tcaactactatgacaatcaagaagg

SEQ ID NO: 282365 - DNA, 25 bp, Artificial
  probe
  misc_feature (1)..(25): SEQ ID NO: 1069; WAN024FSV; Start 321; Stop 345
cctcttcaactactatgacaatcaa

SEQ ID NO: 282366 - DNA, 25 bp, Artificial
  probe
  misc_feature (1)..(25): SEQ ID NO: 1069; WAN024FSV; Start 190; Stop 214
cagagtggctactatgtattagaac

SEQ ID NO: 282367 - DNA, 25 bp, Artificial
  probe
  misc_feature (1)..(25): SEQ ID NO: 1069; WAN024FSV; Start 189; Stop 213
tcagagtggctactatgtattagaa

SEQ ID NO: 282368 - DNA, 25 bp, Artificial
  probe
  misc_feature (1)..(25): SEQ ID NO: 1069; WAN024FSV; Start 155; Stop 179
aattacggcacgaacaatacctcta

SEQ ID NO: 282369 - DNA, 25 bp, Artificial
  probe
  misc_feature (1)..(25): SEQ ID NO: 1069; WAN024FSV; Start 1102; Stop 1126
ttattgctagacctgagacagtatc

SEQ ID NO: 282370 - DNA, 25 bp, Artificial
  probe
  misc_feature (1)..(25): SEQ ID NO: 1069; WAN024FSV; Start 351; Stop 375
attagaagacctaagacagtccatt

SEQ ID NO: 282371 - DNA, 25 bp, Artificial
  probe
  misc_feature (1)..(25): SEQ ID NO: 1069; WAN024FSV; Start 347; Stop 371
aaggattagaagacctaagacagtc

SEQ ID NO: 282372 - DNA, 25 bp, Artificial
  probe
  misc_feature (1)..(25): SEQ ID NO: 1069; WAN024FSV; Start 346; Stop 370
gaaggattagaagacctaagacagt

SEQ ID NO: 282373 - DNA, 25 bp, Artificial
  probe
  misc_feature (1)..(25): SEQ ID NO: 1070; WAN024GEN; Start 691; Stop 715
tatcctatcttgttagccacctatg

SEQ ID NO: 282374 - DNA, 25 bp, Artificial
  probe
  misc_feature (1)..(25): SEQ ID NO: 1070; WAN024GEN; Start 690; Stop 714
ttatcctatcttgttagccacctat

SEQ ID NO: 282375 - DNA, 25 bp, Artificial
  probe
  misc_feature (1)..(25): SEQ ID NO: 1070; WAN024GEN; Start 495; Stop 519
tggcttatctttctttgctttagtg

SEQ ID NO: 282376 - DNA, 25 bp, Artificial
  probe
  misc_feature (1)..(25): SEQ ID NO: 1070; WAN024GEN; Start 496; Stop 520
ggcttatctttctttgctttagtga

SEQ ID NO: 282377 - DNA, 25 bp, Artificial
  probe
  misc_feature (1)..(25): SEQ ID NO: 1070; WAN024GEN; Start 1691; Stop 1715
aaacagcaactttaatcttaggagc

SEQ ID NO: 282378 - DNA, 25 bp, Artificial
  probe
  misc_feature (1)..(25): SEQ ID NO: 1070; WAN024GEN; Start 799; Stop 823
aaagcattagttcccgttattaagg

SEQ ID NO: 282379 - DNA, 25 bp, Artificial
  probe
  misc_feature (1)..(25): SEQ ID NO: 1070; WAN024GEN; Start 152; Stop 176
aggtatttgaacaggaattggagaa

SEQ ID NO: 282380 - DNA, 25 bp, Artificial
  probe
  misc_feature (1)..(25): SEQ ID NO: 1070; WAN024GEN; Start 494; Stop 518
ttggcttatctttctttgctttagt

SEQ ID NO: 282381 - DNA, 25 bp, Artificial
  probe
  misc_feature (1)..(25): SEQ ID NO: 1070; WAN024GEN; Start 692; Stop 716
atcctatcttgttagccacctatgg

SEQ ID NO: 282382 - DNA, 25 bp, Artificial
  probe
  misc_feature (1)..(25): SEQ ID NO: 1070; WAN024GEN; Start 151; Stop 175
gaggtatttgaacaggaattggaga

SEQ ID NO: 282383 - DNA, 25 bp, Artificial
  probe
  misc_feature (1)..(25): SEQ ID NO: 1070; WAN024GEN; Start 795; Stop 819
ttacaaagcattagttcccgttatt

SEQ ID NO: 282384 - DNA, 25 bp, Artificial
  probe
  misc_feature (1)..(25): SEQ ID NO: 1070; WAN024GEN; Start 534; Stop 558
taaggaaatgagagcagcaggtata

SEQ ID NO: 282385 - DNA, 25 bp, Artificial
  probe
  misc_feature (1)..(25): SEQ ID NO: 1070; WAN024GEN; Start 232; Stop 256
gatgggacgactcactttacttatg

SEQ ID NO: 282386 - DNA, 25 bp, Artificial
  probe
  misc_feature (1)..(25): SEQ ID NO: 1070; WAN024GEN; Start 150; Stop 174
tgaggtatttgaacaggaattggag

SEQ ID NO: 282387 - DNA, 25 bp, Artificial
  probe
  misc_feature (1)..(25): SEQ ID NO: 1070; WAN024GEN; Start 797; Stop 821
acaaagcattagttcccgttattaa

SEQ ID NO: 282388 - DNA, 25 bp, Artificial
  probe
  misc_feature (1)..(25): SEQ ID NO: 1070; WAN024GEN; Start 689; Stop 713
tttatcctatcttgttagccaccta

SEQ ID NO: 282389 - DNA, 25 bp, Artificial
  probe
  misc_feature (1)..(25): SEQ ID NO: 1070; WAN024GEN; Start 923; Stop 947
accaacgattgaaagaacttgaaat

SEQ ID NO: 282390 - DNA, 25 bp, Artificial
  probe
  misc_feature (1)..(25): SEQ ID NO: 1070; WAN024GEN; Start 920; Stop 944
cttaccaacgattgaaagaacttga

SEQ ID NO: 282391 - DNA, 25 bp, Artificial
  probe
  misc_feature (1)..(25): SEQ ID NO: 1070; WAN024GEN; Start 149; Stop 173
gtgaggtatttgaacaggaattgga

SEQ ID NO: 282392 - DNA, 25 bp, Artificial
  probe
  misc_feature (1)..(25): SEQ ID NO: 1070; WAN024GEN; Start 922; Stop 946
taccaacgattgaaagaacttgaaa

SEQ ID NO: 282393 - DNA, 25 bp, Artificial
  probe
  misc_feature (1)..(25): SEQ ID NO: 1070; WAN024GEN; Start 921; Stop 945
ttaccaacgattgaaagaacttgaa

SEQ ID NO: 282394 - DNA, 25 bp, Artificial
  probe
  misc_feature (1)..(25): SEQ ID NO: 1070; WAN024GEN; Start 694; Stop 718
cctatcttgttagccacctatggtt

SEQ ID NO: 282395 - DNA, 25 bp, Artificial
  probe
  misc_feature (1)..(25): SEQ ID NO: 1070; WAN024GEN; Start 1689; Stop 1713
tgaaacagcaactttaatcttagga

SEQ ID NO: 282396 - DNA, 25 bp, Artificial
  probe
  misc_feature (1)..(25): SEQ ID NO: 1070; WAN024GEN; Start 798; Stop 822
caaagcattagttcccgttattaag

SEQ ID NO: 282397 - DNA, 25 bp, Artificial
  probe
  misc_feature (1)..(25): SEQ ID NO: 1070; WAN024GEN; Start 1647; Stop 1671
aggaagaagtgtttatctaactcgt

SEQ ID NO: 282398 - DNA, 25 bp, Artificial
  probe
  misc_feature (1)..(25): SEQ ID NO: 1070; WAN024GEN; Start 323; Stop 347
gtgatccgctaaatagttatctcct

SEQ ID NO: 282399 - DNA, 25 bp, Artificial
  probe
  misc_feature (1)..(25): SEQ ID NO: 1070; WAN024GEN; Start 322; Stop 346
agtgatccgctaaatagttatctcc

SEQ ID NO: 282400 - DNA, 25 bp, Artificial
  probe
  misc_feature (1)..(25): SEQ ID NO: 1070; WAN024GEN; Start 796; Stop 820
tacaaagcattagttcccgttatta

SEQ ID NO: 282401 - DNA, 25 bp, Artificial
  probe
  misc_feature (1)..(25): SEQ ID NO: 1070; WAN024GEN; Start 536; Stop 560
aggaaatgagagcagcaggtataaa

SEQ ID NO: 282402 - DNA, 25 bp, Artificial
  probe
  misc_feature (1)..(25): SEQ ID NO: 1070; WAN024GEN; Start 535; Stop 559
aaggaaatgagagcagcaggtataa

SEQ ID NO: 282403 - DNA, 25 bp, Artificial
  probe
  misc_feature (1)..(25): SEQ ID NO: 1070; WAN024GEN; Start 523; Stop 547
atcactcggattaaggaaatgagag

SEQ ID NO: 282404 - DNA, 25 bp, Artificial
  probe
  misc_feature (1)..(25): SEQ ID NO: 1070; WAN024GEN; Start 493; Stop 517
tttggcttatctttctttgctttag

SEQ ID NO: 282405 - DNA, 25 bp, Artificial
  probe
  misc_feature (1)..(25): SEQ ID NO: 1070; WAN024GEN; Start 924; Stop 948
ccaacgattgaaagaacttgaaatt

SEQ ID NO: 282406 - DNA, 25 bp, Artificial
  probe
  misc_feature (1)..(25): SEQ ID NO: 1071; WAN024AV8; Start 117; Stop 141
gttgaatggaatagtattgggttcg

SEQ ID NO: 282407 - DNA, 25 bp, Artificial
  probe
  misc_feature (1)..(25): SEQ ID NO: 1071; WAN024AV8; Start 116; Stop 140
tgttgaatggaatagtattgggttc

SEQ ID NO: 282408 - DNA, 25 bp, Artificial
  probe
  misc_feature (1)..(25): SEQ ID NO: 1071; WAN024AV8; Start 115; Stop 139
ttgttgaatggaatagtattgggtt

SEQ ID NO: 282409 - DNA, 25 bp, Artificial
  probe
  misc_feature (1)..(25): SEQ ID NO: 1071; WAN024AV8; Start 118; Stop 142
ttgaatggaatagtattgggttcgc

SEQ ID NO: 282410 - DNA, 25 bp, Artificial
  probe
  misc_feature (1)..(25): SEQ ID NO: 1071; WAN024AV8; Start 120; Stop 144
gaatggaatagtattgggttcgctg

SEQ ID NO: 282411 - DNA, 25 bp, Artificial
  probe
  misc_feature (1)..(25): SEQ ID NO: 1071; WAN024AV8; Start 122; Stop 146
atggaatagtattgggttcgctgat

SEQ ID NO: 282412 - DNA, 25 bp, Artificial
  probe
  misc_feature (1)..(25): SEQ ID NO: 1071; WAN024AV8; Start 123; Stop 147
tggaatagtattgggttcgctgatt

SEQ ID NO: 282413 - DNA, 25 bp, Artificial
  probe
  misc_feature (1)..(25): SEQ ID NO: 1071; WAN024AV8; Start 121; Stop 145
aatggaatagtattgggttcgctga

SEQ ID NO: 282414 - DNA, 25 bp, Artificial
  probe
  misc_feature (1)..(25): SEQ ID NO: 1071; WAN024AV8; Start 119; Stop 143
tgaatggaatagtattgggttcgct

SEQ ID NO: 282415 - DNA, 25 bp, Artificial
  probe
  misc_feature (1)..(25): SEQ ID NO: 1071; WAN024AV8; Start 41; Stop 65
cactaggggtgatgattggaatagt

SEQ ID NO: 282416 - DNA, 25 bp, Artificial
  probe
  misc_feature (1)..(25): SEQ ID NO: 1071; WAN024AV8; Start 40; Stop 64
tcactaggggtgatgattggaatag

SEQ ID NO: 282417 - DNA, 25 bp, Artificial
  probe
  misc_feature (1)..(25): SEQ ID NO: 1071; WAN024AV8; Start 39; Stop 63
ctcactaggggtgatgattggaata

SEQ ID NO: 282418 - DNA, 25 bp, Artificial
  probe
  misc_feature (1)..(25): SEQ ID NO: 1071; WAN024AV8; Start 38; Stop 62
cctcactaggggtgatgattggaat

SEQ ID NO: 282419 - DNA, 25 bp, Artificial
  probe
  misc_feature (1)..(25): SEQ ID NO: 1072; WAN024D3Q; Start 95; Stop 119
ttatggagcaatatcaagtgagtcg

SEQ ID NO: 282420 - DNA, 25 bp, Artificial
  probe
  misc_feature (1)..(25): SEQ ID NO: 1072; WAN024D3Q; Start 93; Stop 117
ccttatggagcaatatcaagtgagt

SEQ ID NO: 282421 - DNA, 25 bp, Artificial
  probe
  misc_feature (1)..(25): SEQ ID NO: 1072; WAN024D3Q; Start 92; Stop 116
accttatggagcaatatcaagtgag

SEQ ID NO: 282422 - DNA, 25 bp, Artificial
  probe
  misc_feature (1)..(25): SEQ ID NO: 1072; WAN024D3Q; Start 91; Stop 115
gaccttatggagcaatatcaagtga

SEQ ID NO: 282423 - DNA, 25 bp, Artificial
  probe
  misc_feature (1)..(25): SEQ ID NO: 1072; WAN024D3Q; Start 94; Stop 118
cttatggagcaatatcaagtgagtc

SEQ ID NO: 282424 - DNA, 25 bp, Artificial
  probe
  misc_feature (1)..(25): SEQ ID NO: 1072; WAN024D3Q; Start 96; Stop 120
tatggagcaatatcaagtgagtcgt

SEQ ID NO: 282425 - DNA, 25 bp, Artificial
  probe
  misc_feature (1)..(25): SEQ ID NO: 1072; WAN024D3Q; Start 90; Stop 114
cgaccttatggagcaatatcaagtg

SEQ ID NO: 282426 - DNA, 25 bp, Artificial
  probe
  misc_feature (1)..(25): SEQ ID NO: 1072; WAN024D3Q; Start 88; Stop 112
cacgaccttatggagcaatatcaag

SEQ ID NO: 282427 - DNA, 25 bp, Artificial
  probe
  misc_feature (1)..(25): SEQ ID NO: 1072; WAN024D3Q; Start 89; Stop 113
acgaccttatggagcaatatcaagt

SEQ ID NO: 282428 - DNA, 25 bp, Artificial
  probe
  misc_feature (1)..(25): SEQ ID NO: 1072; WAN024D3Q; Start 289; Stop 313
gtggtcagtctggacaagattatta

SEQ ID NO: 282429 - DNA, 25 bp, Artificial
  probe
  misc_feature (1)..(25): SEQ ID NO: 1072; WAN024D3Q; Start 504; Stop 528
actccttattgattatgctcagaag

SEQ ID NO: 282430 - DNA, 25 bp, Artificial
  probe
  misc_feature (1)..(25): SEQ ID NO: 1072; WAN024D3Q; Start 290; Stop 314
tggtcagtctggacaagattattat

SEQ ID NO: 282431 - DNA, 25 bp, Artificial
  probe
  misc_feature (1)..(25): SEQ ID NO: 1072; WAN024D3Q; Start 503; Stop 527
aactccttattgattatgctcagaa

SEQ ID NO: 282432 - DNA, 25 bp, Artificial
  probe
  misc_feature (1)..(25): SEQ ID NO: 1072; WAN024D3Q; Start 291; Stop 315
ggtcagtctggacaagattattatt

SEQ ID NO: 282433 - DNA, 25 bp, Artificial
  probe
  misc_feature (1)..(25): SEQ ID NO: 1072; WAN024D3Q; Start 515; Stop 539
attatgctcagaaggaaatcaccat

SEQ ID NO: 282434 - DNA, 25 bp, Artificial
  probe
  misc_feature (1)..(25): SEQ ID NO: 1072; WAN024D3Q; Start 232; Stop 256
aacctaaccagctaccaagaactag

SEQ ID NO: 282435 - DNA, 25 bp, Artificial
  probe
  misc_feature (1)..(25): SEQ ID NO: 1072; WAN024D3Q; Start 215; Stop 239
tcaatttccctgtatccaacctaac

SEQ ID NO: 282436 - DNA, 25 bp, Artificial
  probe
  misc_feature (1)..(25): SEQ ID NO: 1072; WAN024D3Q; Start 214; Stop 238
gtcaatttccctgtatccaacctaa

SEQ ID NO: 282437 - DNA, 25 bp, Artificial
  probe
  misc_feature (1)..(25): SEQ ID NO: 1072; WAN024D3Q; Start 25; Stop 49
aagcaaatccaagaaaccattcaaa

SEQ ID NO: 282438 - DNA, 25 bp, Artificial
  probe
  misc_feature (1)..(25): SEQ ID NO: 1072; WAN024D3Q; Start 516; Stop 540
ttatgctcagaaggaaatcaccatt

SEQ ID NO: 282439 - DNA, 25 bp, Artificial
  probe
  misc_feature (1)..(25): SEQ ID NO: 1072; WAN024D3Q; Start 293; Stop 317
tcagtctggacaagattattattga

SEQ ID NO: 282440 - DNA, 25 bp, Artificial
  probe
  misc_feature (1)..(25): SEQ ID NO: 1072; WAN024D3Q; Start 97; Stop 121
atggagcaatatcaagtgagtcgtg

SEQ ID NO: 282441 - DNA, 25 bp, Artificial
  probe
  misc_feature (1)..(25): SEQ ID NO: 1072; WAN024D3Q; Start 24; Stop 48
taagcaaatccaagaaaccattcaa

SEQ ID NO: 282442 - DNA, 25 bp, Artificial
  probe
  misc_feature (1)..(25): SEQ ID NO: 1072; WAN024D3Q; Start 23; Stop 47
ttaagcaaatccaagaaaccattca

SEQ ID NO: 282443 - DNA, 25 bp, Artificial
  probe
  misc_feature (1)..(25): SEQ ID NO: 1072; WAN024D3Q; Start 463; Stop 487
gctgagcagtctatctattcttata

SEQ ID NO: 282444 - DNA, 25 bp, Artificial
  probe
  misc_feature (1)..(25): SEQ ID NO: 1072; WAN024D3Q; Start 231; Stop 255
caacctaaccagctaccaagaacta

SEQ ID NO: 282445 - DNA, 25 bp, Artificial
  probe
  misc_feature (1)..(25): SEQ ID NO: 1072; WAN024D3Q; Start 517; Stop 541
tatgctcagaaggaaatcaccattg

SEQ ID NO: 282446 - DNA, 25 bp, Artificial
  probe
  misc_feature (1)..(25): SEQ ID NO: 1072; WAN024D3Q; Start 216; Stop 240
caatttccctgtatccaacctaacc

SEQ ID NO: 282447 - DNA, 25 bp, Artificial
  probe
  misc_feature (1)..(25): SEQ ID NO: 1072; WAN024D3Q; Start 87; Stop 111
gcacgaccttatggagcaatatcaa

SEQ ID NO: 282448 - DNA, 25 bp, Artificial
  probe
  misc_feature (1)..(25): SEQ ID NO: 1072; WAN024D3Q; Start 292; Stop 316
gtcagtctggacaagattattattg

SEQ ID NO: 282449 - DNA, 25 bp, Artificial
  probe
  misc_feature (1)..(25): SEQ ID NO: 1072; WAN024D3Q; Start 288; Stop 312
cgtggtcagtctggacaagattatt

SEQ ID NO: 282450 - DNA, 25 bp, Artificial
  probe
  misc_feature (1)..(25): SEQ ID NO: 1072; WAN024D3Q; Start 22; Stop 46
tttaagcaaatccaagaaaccattc

SEQ ID NO: 282451 - DNA, 25 bp, Artificial
  probe
  misc_feature (1)..(25): SEQ ID NO: 1072; WAN024D3Q; Start 85; Stop 109
gagcacgaccttatggagcaatatc

SEQ ID NO: 282452 - DNA, 25 bp, Artificial
  probe
  misc_feature (1)..(25): SEQ ID NO: 1073; WAN024DDT; Start 761; Stop 785
ttgctagtaaggaagattgctacaa

SEQ ID NO: 282453 - DNA, 25 bp, Artificial
  probe
  misc_feature (1)..(25): SEQ ID NO: 1073; WAN024DDT; Start 763; Stop 787
gctagtaaggaagattgctacaagt

SEQ ID NO: 282454 - DNA, 25 bp, Artificial
  probe
  misc_feature (1)..(25): SEQ ID NO: 1073; WAN024DDT; Start 762; Stop 786
tgctagtaaggaagattgctacaag

SEQ ID NO: 282455 - DNA, 25 bp, Artificial
  probe
  misc_feature (1)..(25): SEQ ID NO: 1073; WAN024DDT; Start 488; Stop 512
ttgattcacaagataaggaagagtt

SEQ ID NO: 282456 - DNA, 25 bp, Artificial
  probe
  misc_feature (1)..(25): SEQ ID NO: 1073; WAN024DDT; Start 157; Stop 181
aacaaccaggtaagtacagaagagg

SEQ ID NO: 282457 - DNA, 25 bp, Artificial
  probe
  misc_feature (1)..(25): SEQ ID NO: 1073; WAN024DDT; Start 186; Stop 210
atctctcttatcagctcacttggat

SEQ ID NO: 282458 - DNA, 25 bp, Artificial
  probe
  misc_feature (1)..(25): SEQ ID NO: 1073; WAN024DDT; Start 185; Stop 209
aatctctcttatcagctcacttgga

SEQ ID NO: 282459 - DNA, 25 bp, Artificial
  probe
  misc_feature (1)..(25): SEQ ID NO: 1073; WAN024DDT; Start 766; Stop 790
agtaaggaagattgctacaagtatt

SEQ ID NO: 282460 - DNA, 25 bp, Artificial
  probe
  misc_feature (1)..(25): SEQ ID NO: 1073; WAN024DDT; Start 69; Stop 93
tcaacaacaacatgctacttctgag

SEQ ID NO: 282461 - DNA, 25 bp, Artificial
  probe
  misc_feature (1)..(25): SEQ ID NO: 1073; WAN024DDT; Start 299; Stop 323
ttactcacaccgaatacgatgttga

SEQ ID NO: 282462 - DNA, 25 bp, Artificial
  probe
  misc_feature (1)..(25): SEQ ID NO: 1073; WAN024DDT; Start 460; Stop 484
aatgatgcgattgataaaggaaagg

SEQ ID NO: 282463 - DNA, 25 bp, Artificial
  probe
  misc_feature (1)..(25): SEQ ID NO: 1073; WAN024DDT; Start 452; Stop 476
tcctagataatgatgcgattgataa

SEQ ID NO: 282464 - DNA, 25 bp, Artificial
  probe
  misc_feature (1)..(25): SEQ ID NO: 1073; WAN024DDT; Start 451; Stop 475
ttcctagataatgatgcgattgata

SEQ ID NO: 282465 - DNA, 25 bp, Artificial
  probe
  misc_feature (1)..(25): SEQ ID NO: 1073; WAN024DDT; Start 68; Stop 92
gtcaacaacaacatgctacttctga

SEQ ID NO: 282466 - DNA, 25 bp, Artificial
  probe
  misc_feature (1)..(25): SEQ ID NO: 1073; WAN024DDT; Start 187; Stop 211
tctctcttatcagctcacttggatc

SEQ ID NO: 282467 - DNA, 25 bp, Artificial
  probe
  misc_feature (1)..(25): SEQ ID NO: 1073; WAN024DDT; Start 285; Stop 309
agatttcacttcctttactcacacc

SEQ ID NO: 282468 - DNA, 25 bp, Artificial
  probe
  misc_feature (1)..(25): SEQ ID NO: 1073; WAN024DDT; Start 461; Stop 485
atgatgcgattgataaaggaaaggt

SEQ ID NO: 282469 - DNA, 25 bp, Artificial
  probe
  misc_feature (1)..(25): SEQ ID NO: 1073; WAN024DDT; Start 764; Stop 788
ctagtaaggaagattgctacaagta

SEQ ID NO: 282470 - DNA, 25 bp, Artificial
  probe
  misc_feature (1)..(25): SEQ ID NO: 1073; WAN024DDT; Start 70; Stop 94
caacaacaacatgctacttctgagg

SEQ ID NO: 282471 - DNA, 25 bp, Artificial
  probe
  misc_feature (1)..(25): SEQ ID NO: 1073; WAN024DDT; Start 141; Stop 165
ttcatacaccaacctaaacaaccag

SEQ ID NO: 282472 - DNA, 25 bp, Artificial
  probe
  misc_feature (1)..(25): SEQ ID NO: 1073; WAN024DDT; Start 140; Stop 164
cttcatacaccaacctaaacaacca

SEQ ID NO: 282473 - DNA, 25 bp, Artificial
  probe
  misc_feature (1)..(25): SEQ ID NO: 1073; WAN024DDT; Start 463; Stop 487
gatgcgattgataaaggaaaggtct

SEQ ID NO: 282474 - DNA, 25 bp, Artificial
  probe
  misc_feature (1)..(25): SEQ ID NO: 1073; WAN024DDT; Start 464; Stop 488
atgcgattgataaaggaaaggtctt

SEQ ID NO: 282475 - DNA, 25 bp, Artificial
  probe
  misc_feature (1)..(25): SEQ ID NO: 1073; WAN024DDT; Start 760; Stop 784
tttgctagtaaggaagattgctaca

SEQ ID NO: 282476 - DNA, 25 bp, Artificial
  probe
  misc_feature (1)..(25): SEQ ID NO: 1073; WAN024DDT; Start 462; Stop 486
tgatgcgattgataaaggaaaggtc

SEQ ID NO: 282477 - DNA, 25 bp, Artificial
  probe
  misc_feature (1)..(25): SEQ ID NO: 1073; WAN024DDT; Start 67; Stop 91
tgtcaacaacaacatgctacttctg

SEQ ID NO: 282478 - DNA, 25 bp, Artificial
  probe
  misc_feature (1)..(25): SEQ ID NO: 1073; WAN024DDT; Start 699; Stop 723
tgatgacggtttcttatttgtagag

SEQ ID NO: 282479 - DNA, 25 bp, Artificial
  probe
  misc_feature (1)..(25): SEQ ID NO: 1073; WAN024DDT; Start 698; Stop 722
ctgatgacggtttcttatttgtaga

SEQ ID NO: 282480 - DNA, 25 bp, Artificial
  probe
  misc_feature (1)..(25): SEQ ID NO: 1073; WAN024DDT; Start 163; Stop 187
caggtaagtacagaagaggtcaaat

SEQ ID NO: 282481 - DNA, 25 bp, Artificial
  probe
  misc_feature (1)..(25): SEQ ID NO: 1073; WAN024DDT; Start 164; Stop 188
aggtaagtacagaagaggtcaaatc

SEQ ID NO: 282482 - DNA, 25 bp, Artificial
  probe
  misc_feature (1)..(25): SEQ ID NO: 1073; WAN024DDT; Start 156; Stop 180
aaacaaccaggtaagtacagaagag

SEQ ID NO: 282483 - DNA, 25 bp, Artificial
  probe
  misc_feature (1)..(25): SEQ ID NO: 1073; WAN024DDT; Start 765; Stop 789
tagtaaggaagattgctacaagtat

SEQ ID NO: 282484 - DNA, 25 bp, Artificial
  probe
  misc_feature (1)..(25): SEQ ID NO: 1073; WAN024DDT; Start 759; Stop 783
atttgctagtaaggaagattgctac

SEQ ID NO: 282485 - DNA, 25 bp, Artificial
  probe
  misc_feature (1)..(25): SEQ ID NO: 1074; WAN024FZV; Start 889; Stop 913
ctggtattactactgctgattgtct

SEQ ID NO: 282486 - DNA, 25 bp, Artificial
  probe
  misc_feature (1)..(25): SEQ ID NO: 1074; WAN024FZV; Start 888; Stop 912
tctggtattactactgctgattgtc

SEQ ID NO: 282487 - DNA, 25 bp, Artificial
  probe
  misc_feature (1)..(25): SEQ ID NO: 1074; WAN024FZV; Start 887; Stop 911
gtctggtattactactgctgattgt

SEQ ID NO: 282488 - DNA, 25 bp, Artificial
  probe
  misc_feature (1)..(25): SEQ ID NO: 1074; WAN024FZV; Start 900; Stop 924
actgctgattgtctatcttgctaat

SEQ ID NO: 282489 - DNA, 25 bp, Artificial
  probe
  misc_feature (1)..(25): SEQ ID NO: 1074; WAN024FZV; Start 898; Stop 922
ctactgctgattgtctatcttgcta

SEQ ID NO: 282490 - DNA, 25 bp, Artificial
  probe
  misc_feature (1)..(25): SEQ ID NO: 1074; WAN024FZV; Start 896; Stop 920
tactactgctgattgtctatcttgc

SEQ ID NO: 282491 - DNA, 25 bp, Artificial
  probe
  misc_feature (1)..(25): SEQ ID NO: 1074; WAN024FZV; Start 899; Stop 923
tactgctgattgtctatcttgctaa

SEQ ID NO: 282492 - DNA, 25 bp, Artificial
  probe
  misc_feature (1)..(25): SEQ ID NO: 1074; WAN024FZV; Start 418; Stop 442
ttagtggtcttaggtcaatatcgtt

SEQ ID NO: 282493 - DNA, 25 bp, Artificial
  probe
  misc_feature (1)..(25): SEQ ID NO: 1074; WAN024FZV; Start 890; Stop 914
tggtattactactgctgattgtcta

SEQ ID NO: 282494 - DNA, 25 bp, Artificial
  probe
  misc_feature (1)..(25): SEQ ID NO: 1074; WAN024FZV; Start 867; Stop 891
agaaggttccattatgacaagtctg

SEQ ID NO: 282495 - DNA, 25 bp, Artificial
  probe
  misc_feature (1)..(25): SEQ ID NO: 1074; WAN024FZV; Start 886; Stop 910
agtctggtattactactgctgattg

SEQ ID NO: 282496 - DNA, 25 bp, Artificial
  probe
  misc_feature (1)..(25): SEQ ID NO: 1074; WAN024FZV; Start 884; Stop 908
caagtctggtattactactgctgat

SEQ ID NO: 282497 - DNA, 25 bp, Artificial
  probe
  misc_feature (1)..(25): SEQ ID NO: 1074; WAN024FZV; Start 901; Stop 925
ctgctgattgtctatcttgctaata

SEQ ID NO: 282498 - DNA, 25 bp, Artificial
  probe
  misc_feature (1)..(25): SEQ ID NO: 1074; WAN024FZV; Start 897; Stop 921
actactgctgattgtctatcttgct

SEQ ID NO: 282499 - DNA, 25 bp, Artificial
  probe
  misc_feature (1)..(25): SEQ ID NO: 1074; WAN024FZV; Start 880; Stop 904
atgacaagtctggtattactactgc

SEQ ID NO: 282500 - DNA, 25 bp, Artificial
  probe
  misc_feature (1)..(25): SEQ ID NO: 1074; WAN024FZV; Start 866; Stop 890
tagaaggttccattatgacaagtct

SEQ ID NO: 282501 - DNA, 25 bp, Artificial
  probe
  misc_feature (1)..(25): SEQ ID NO: 1074; WAN024FZV; Start 885; Stop 909
aagtctggtattactactgctgatt

SEQ ID NO: 282502 - DNA, 25 bp, Artificial
  probe
  misc_feature (1)..(25): SEQ ID NO: 1074; WAN024FZV; Start 883; Stop 907
acaagtctggtattactactgctga

SEQ ID NO: 282503 - DNA, 25 bp, Artificial
  probe
  misc_feature (1)..(25): SEQ ID NO: 1074; WAN024FZV; Start 882; Stop 906
gacaagtctggtattactactgctg

SEQ ID NO: 282504 - DNA, 25 bp, Artificial
  probe
  misc_feature (1)..(25): SEQ ID NO: 1074; WAN024FZV; Start 881; Stop 905
tgacaagtctggtattactactgct

SEQ ID NO: 282505 - DNA, 25 bp, Artificial
  probe
  misc_feature (1)..(25): SEQ ID NO: 1074; WAN024FZV; Start 895; Stop 919
ttactactgctgattgtctatcttg

SEQ ID NO: 282506 - DNA, 25 bp, Artificial
  probe
  misc_feature (1)..(25): SEQ ID NO: 1074; WAN024FZV; Start 865; Stop 889
atagaaggttccattatgacaagtc

SEQ ID NO: 282507 - DNA, 25 bp, Artificial
  probe
  misc_feature (1)..(25): SEQ ID NO: 1074; WAN024FZV; Start 902; Stop 926
tgctgattgtctatcttgctaataa

SEQ ID NO: 282508 - DNA, 25 bp, Artificial
  probe
  misc_feature (1)..(25): SEQ ID NO: 1074; WAN024FZV; Start 863; Stop 887
gcatagaaggttccattatgacaag

SEQ ID NO: 282509 - DNA, 25 bp, Artificial
  probe
  misc_feature (1)..(25): SEQ ID NO: 1074; WAN024FZV; Start 891; Stop 915
ggtattactactgctgattgtctat

SEQ ID NO: 282510 - DNA, 25 bp, Artificial
  probe
  misc_feature (1)..(25): SEQ ID NO: 1074; WAN024FZV; Start 862; Stop 886
ggcatagaaggttccattatgacaa

SEQ ID NO: 282511 - DNA, 25 bp, Artificial
  probe
  misc_feature (1)..(25): SEQ ID NO: 1074; WAN024FZV; Start 832; Stop 856
aatcaagattggctatcaggtggtt

SEQ ID NO: 282512 - DNA, 25 bp, Artificial
  probe
  misc_feature (1)..(25): SEQ ID NO: 1074; WAN024FZV; Start 455; Stop 479
acttgaatccttattctcttgcctt

SEQ ID NO: 282513 - DNA, 25 bp, Artificial
  probe
  misc_feature (1)..(25): SEQ ID NO: 1074; WAN024FZV; Start 871; Stop 895
ggttccattatgacaagtctggtat

SEQ ID NO: 282514 - DNA, 25 bp, Artificial
  probe
  misc_feature (1)..(25): SEQ ID NO: 1074; WAN024FZV; Start 864; Stop 888
catagaaggttccattatgacaagt

SEQ ID NO: 282515 - DNA, 25 bp, Artificial
  probe
  misc_feature (1)..(25): SEQ ID NO: 1074; WAN024FZV; Start 833; Stop 857
atcaagattggctatcaggtggttc

SEQ ID NO: 282516 - DNA, 25 bp, Artificial
  probe
  misc_feature (1)..(25): SEQ ID NO: 1074; WAN024FZV; Start 860; Stop 884
ttggcatagaaggttccattatgac

SEQ ID NO: 282517 - DNA, 25 bp, Artificial
  probe
  misc_feature (1)..(25): SEQ ID NO: 1074; WAN024FZV; Start 454; Stop 478
cacttgaatccttattctcttgcct

SEQ ID NO: 282518 - DNA, 25 bp, Artificial
  probe
  misc_feature (1)..(25): SEQ ID NO: 1075; WAN024FGC; Start 743; Stop 767
cgtctgttattgtagttcttccatc

SEQ ID NO: 282519 - DNA, 25 bp, Artificial
  probe
  misc_feature (1)..(25): SEQ ID NO: 1075; WAN024FGC; Start 742; Stop 766
gcgtctgttattgtagttcttccat

SEQ ID NO: 282520 - DNA, 25 bp, Artificial
  probe
  misc_feature (1)..(25): SEQ ID NO: 1075; WAN024FGC; Start 744; Stop 768
gtctgttattgtagttcttccatca

SEQ ID NO: 282521 - DNA, 25 bp, Artificial
  probe
  misc_feature (1)..(25): SEQ ID NO: 1075; WAN024FGC; Start 121; Stop 145
gaattaactcagtatccaacacgat

SEQ ID NO: 282522 - DNA, 25 bp, Artificial
  probe
  misc_feature (1)..(25): SEQ ID NO: 1075; WAN024FGC; Start 690; Stop 714
ccttcgttcacttaatggttcagaa

SEQ ID NO: 282523 - DNA, 25 bp, Artificial
  probe
  misc_feature (1)..(25): SEQ ID NO: 1075; WAN024FGC; Start 122; Stop 146
aattaactcagtatccaacacgatt

SEQ ID NO: 282524 - DNA, 25 bp, Artificial
  probe
  misc_feature (1)..(25): SEQ ID NO: 1075; WAN024FGC; Start 741; Stop 765
agcgtctgttattgtagttcttcca

SEQ ID NO: 282525 - DNA, 25 bp, Artificial
  probe
  misc_feature (1)..(25): SEQ ID NO: 1075; WAN024FGC; Start 327; Stop 351
gagactactcgtcattacctacatt

SEQ ID NO: 282526 - DNA, 25 bp, Artificial
  probe
  misc_feature (1)..(25): SEQ ID NO: 1075; WAN024FGC; Start 508; Stop 532
attgaagaagcggctagaattgatg

SEQ ID NO: 282527 - DNA, 25 bp, Artificial
  probe
  misc_feature (1)..(25): SEQ ID NO: 1075; WAN024FGC; Start 507; Stop 531
aattgaagaagcggctagaattgat

SEQ ID NO: 282528 - DNA, 25 bp, Artificial
  probe
  misc_feature (1)..(25): SEQ ID NO: 1075; WAN024FGC; Start 745; Stop 769
tctgttattgtagttcttccatcaa

SEQ ID NO: 282529 - DNA, 25 bp, Artificial
  probe
  misc_feature (1)..(25): SEQ ID NO: 1075; WAN024FGC; Start 120; Stop 144
ggaattaactcagtatccaacacga

SEQ ID NO: 282530 - DNA, 25 bp, Artificial
  probe
  misc_feature (1)..(25): SEQ ID NO: 1075; WAN024FGC; Start 278; Stop 302
cagcctatggtattgttcgattctt

SEQ ID NO: 282531 - DNA, 25 bp, Artificial
  probe
  misc_feature (1)..(25): SEQ ID NO: 1075; WAN024FGC; Start 740; Stop 764
cagcgtctgttattgtagttcttcc

SEQ ID NO: 282532 - DNA, 25 bp, Artificial
  probe
  misc_feature (1)..(25): SEQ ID NO: 1075; WAN024FGC; Start 574; Stop 598
attgtagcaccaggtattgtagcaa

SEQ ID NO: 282533 - DNA, 25 bp, Artificial
  probe
  misc_feature (1)..(25): SEQ ID NO: 1075; WAN024FGC; Start 506; Stop 530
gaattgaagaagcggctagaattga

SEQ ID NO: 282534 - DNA, 25 bp, Artificial
  probe
  misc_feature (1)..(25): SEQ ID NO: 1075; WAN024FGC; Start 254; Stop 278
ttgcgattattatttctgctatggc

SEQ ID NO: 282535 - DNA, 25 bp, Artificial
  probe
  misc_feature (1)..(25): SEQ ID NO: 1075; WAN024FGC; Start 415; Stop 439
agtttatttggcttgatgatggttt

SEQ ID NO: 282536 - DNA, 25 bp, Artificial
  probe
  misc_feature (1)..(25): SEQ ID NO: 1075; WAN024FGC; Start 661; Stop 685
aatacaggaaagatgacagtagcag

SEQ ID NO: 282537 - DNA, 25 bp, Artificial
  probe
  misc_feature (1)..(25): SEQ ID NO: 1075; WAN024FGC; Start 573; Stop 597
gattgtagcaccaggtattgtagca

SEQ ID NO: 282538 - DNA, 25 bp, Artificial
  probe
  misc_feature (1)..(25): SEQ ID NO: 1075; WAN024FGC; Start 660; Stop 684
caatacaggaaagatgacagtagca

SEQ ID NO: 282539 - DNA, 25 bp, Artificial
  probe
  misc_feature (1)..(25): SEQ ID NO: 1075; WAN024FGC; Start 659; Stop 683
acaatacaggaaagatgacagtagc

SEQ ID NO: 282540 - DNA, 25 bp, Artificial
  probe
  misc_feature (1)..(25): SEQ ID NO: 1075; WAN024FGC; Start 423; Stop 447
tggcttgatgatggtttatctatct

SEQ ID NO: 282541 - DNA, 25 bp, Artificial
  probe
  misc_feature (1)..(25): SEQ ID NO: 1075; WAN024FGC; Start 663; Stop 687
tacaggaaagatgacagtagcagta

SEQ ID NO: 282542 - DNA, 25 bp, Artificial
  probe
  misc_feature (1)..(25): SEQ ID NO: 1075; WAN024FGC; Start 732; Stop 756
tatgatggcagcgtctgttattgta

SEQ ID NO: 282543 - DNA, 25 bp, Artificial
  probe
  misc_feature (1)..(25): SEQ ID NO: 1075; WAN024FGC; Start 730; Stop 754
gatatgatggcagcgtctgttattg

SEQ ID NO: 282544 - DNA, 25 bp, Artificial
  probe
  misc_feature (1)..(25): SEQ ID NO: 1075; WAN024FGC; Start 95; Stop 119
tcatatcttctgtcaaagggaaagg

SEQ ID NO: 282545 - DNA, 25 bp, Artificial
  probe
  misc_feature (1)..(25): SEQ ID NO: 1075; WAN024FGC; Start 691; Stop 715
cttcgttcacttaatggttcagaaa

SEQ ID NO: 282546 - DNA, 25 bp, Artificial
  probe
  misc_feature (1)..(25): SEQ ID NO: 1075; WAN024FGC; Start 414; Stop 438
tagtttatttggcttgatgatggtt

SEQ ID NO: 282547 - DNA, 25 bp, Artificial
  probe
  misc_feature (1)..(25): SEQ ID NO: 1075; WAN024FGC; Start 739; Stop 763
gcagcgtctgttattgtagttcttc

SEQ ID NO: 282548 - DNA, 25 bp, Artificial
  probe
  misc_feature (1)..(25): SEQ ID NO: 1075; WAN024FGC; Start 729; Stop 753
agatatgatggcagcgtctgttatt

SEQ ID NO: 282549 - DNA, 25 bp, Artificial
  probe
  misc_feature (1)..(25): SEQ ID NO: 1075; WAN024FGC; Start 503; Stop 527
ttggaattgaagaagcggctagaat

SEQ ID NO: 282550 - DNA, 25 bp, Artificial
  probe
  misc_feature (1)..(25): SEQ ID NO: 1075; WAN024FGC; Start 502; Stop 526
attggaattgaagaagcggctagaa

SEQ ID NO: 282551 - DNA, 25 bp, Artificial
  probe
  misc_feature (1)..(25): SEQ ID NO: 1076; WAN024DYC; Start 1137; Stop 1161
gatagtggtggattatgaggaagag

SEQ ID NO: 282552 - DNA, 25 bp, Artificial
  probe
  misc_feature (1)..(25): SEQ ID NO: 1076; WAN024DYC; Start 1135; Stop 1159
gagatagtggtggattatgaggaag

SEQ ID NO: 282553 - DNA, 25 bp, Artificial
  probe
  misc_feature (1)..(25): SEQ ID NO: 1076; WAN024DYC; Start 1132; Stop 1156
gaagagatagtggtggattatgagg

SEQ ID NO: 282554 - DNA, 25 bp, Artificial
  probe
  misc_feature (1)..(25): SEQ ID NO: 1076; WAN024DYC; Start 1131; Stop 1155
ggaagagatagtggtggattatgag

SEQ ID NO: 282555 - DNA, 25 bp, Artificial
  probe
  misc_feature (1)..(25): SEQ ID NO: 1076; WAN024DYC; Start 1136; Stop 1160
agatagtggtggattatgaggaaga

SEQ ID NO: 282556 - DNA, 25 bp, Artificial
  probe
  misc_feature (1)..(25): SEQ ID NO: 1076; WAN024DYC; Start 1134; Stop 1158
agagatagtggtggattatgaggaa

SEQ ID NO: 282557 - DNA, 25 bp, Artificial
  probe
  misc_feature (1)..(25): SEQ ID NO: 1076; WAN024DYC; Start 1133; Stop 1157
aagagatagtggtggattatgagga

SEQ ID NO: 282558 - DNA, 25 bp, Artificial
  probe
  misc_feature (1)..(25): SEQ ID NO: 1076; WAN024DYC; Start 1138; Stop 1162
atagtggtggattatgaggaagagt

SEQ ID NO: 282559 - DNA, 25 bp, Artificial
  probe
  misc_feature (1)..(25): SEQ ID NO: 1076; WAN024DYC; Start 1139; Stop 1163
tagtggtggattatgaggaagagtt

SEQ ID NO: 282560 - DNA, 25 bp, Artificial
  probe
  misc_feature (1)..(25): SEQ ID NO: 1076; WAN024DYC; Start 945; Stop 969
ggcatccactaggcttaatctatta

SEQ ID NO: 282561 - DNA, 25 bp, Artificial
  probe
  misc_feature (1)..(25): SEQ ID NO: 1076; WAN024DYC; Start 946; Stop 970
gcatccactaggcttaatctattac

SEQ ID NO: 282562 - DNA, 25 bp, Artificial
  probe
  misc_feature (1)..(25): SEQ ID NO: 1076; WAN024DYC; Start 695; Stop 719
actatgagaccatgattcgtgaatt

SEQ ID NO: 282563 - DNA, 25 bp, Artificial
  probe
  misc_feature (1)..(25): SEQ ID NO: 1076; WAN024DYC; Start 694; Stop 718
aactatgagaccatgattcgtgaat

SEQ ID NO: 282564 - DNA, 25 bp, Artificial
  probe
  misc_feature (1)..(25): SEQ ID NO: 1076; WAN024DYC; Start 693; Stop 717
caactatgagaccatgattcgtgaa

SEQ ID NO: 282565 - DNA, 25 bp, Artificial
  probe
  misc_feature (1)..(25): SEQ ID NO: 1076; WAN024DYC; Start 842; Stop 866
ctgtctatgaccaagaattgctcaa

SEQ ID NO: 282566 - DNA, 25 bp, Artificial
  probe
  misc_feature (1)..(25): SEQ ID NO: 1076; WAN024DYC; Start 691; Stop 715
aacaactatgagaccatgattcgtg

SEQ ID NO: 282567 - DNA, 25 bp, Artificial
  probe
  misc_feature (1)..(25): SEQ ID NO: 1076; WAN024DYC; Start 840; Stop 864
gactgtctatgaccaagaattgctc

SEQ ID NO: 282568 - DNA, 25 bp, Artificial
  probe
  misc_feature (1)..(25): SEQ ID NO: 1076; WAN024DYC; Start 692; Stop 716
acaactatgagaccatgattcgtga

SEQ ID NO: 282569 - DNA, 25 bp, Artificial
  probe
  misc_feature (1)..(25): SEQ ID NO: 1076; WAN024DYC; Start 1145; Stop 1169
tggattatgaggaagagtttgaagg

SEQ ID NO: 282570 - DNA, 25 bp, Artificial
  probe
  misc_feature (1)..(25): SEQ ID NO: 1076; WAN024DYC; Start 841; Stop 865
actgtctatgaccaagaattgctca

SEQ ID NO: 282571 - DNA, 25 bp, Artificial
  probe
  misc_feature (1)..(25): SEQ ID NO: 1076; WAN024DYC; Start 1143; Stop 1167
ggtggattatgaggaagagtttgaa

SEQ ID NO: 282572 - DNA, 25 bp, Artificial
  probe
  misc_feature (1)..(25): SEQ ID NO: 1076; WAN024DYC; Start 1144; Stop 1168
gtggattatgaggaagagtttgaag

SEQ ID NO: 282573 - DNA, 25 bp, Artificial
  probe
  misc_feature (1)..(25): SEQ ID NO: 1076; WAN024DYC; Start 947; Stop 971
catccactaggcttaatctattact

SEQ ID NO: 282574 - DNA, 25 bp, Artificial
  probe
  misc_feature (1)..(25): SEQ ID NO: 1076; WAN024DYC; Start 555; Stop 579
gacctatatcgcttatggtacagat

SEQ ID NO: 282575 - DNA, 25 bp, Artificial
  probe
  misc_feature (1)..(25): SEQ ID NO: 1076; WAN024DYC; Start 1146; Stop 1170
ggattatgaggaagagtttgaaggg

SEQ ID NO: 282576 - DNA, 25 bp, Artificial
  probe
  misc_feature (1)..(25): SEQ ID NO: 1076; WAN024DYC; Start 944; Stop 968
tggcatccactaggcttaatctatt

SEQ ID NO: 282577 - DNA, 25 bp, Artificial
  probe
  misc_feature (1)..(25): SEQ ID NO: 1076; WAN024DYC; Start 943; Stop 967
ttggcatccactaggcttaatctat

SEQ ID NO: 282578 - DNA, 25 bp, Artificial
  probe
  misc_feature (1)..(25): SEQ ID NO: 1076; WAN024DYC; Start 942; Stop 966
attggcatccactaggcttaatcta

SEQ ID NO: 282579 - DNA, 25 bp, Artificial
  probe
  misc_feature (1)..(25): SEQ ID NO: 1076; WAN024DYC; Start 1130; Stop 1154
gggaagagatagtggtggattatga

SEQ ID NO: 282580 - DNA, 25 bp, Artificial
  probe
  misc_feature (1)..(25): SEQ ID NO: 1076; WAN024DYC; Start 557; Stop 581
cctatatcgcttatggtacagatac

SEQ ID NO: 282581 - DNA, 25 bp, Artificial
  probe
  misc_feature (1)..(25): SEQ ID NO: 1076; WAN024DYC; Start 1141; Stop 1165
gtggtggattatgaggaagagtttg

SEQ ID NO: 282582 - DNA, 25 bp, Artificial
  probe
  misc_feature (1)..(25): SEQ ID NO: 1076; WAN024DYC; Start 1129; Stop 1153
tgggaagagatagtggtggattatg

SEQ ID NO: 282583 - DNA, 25 bp, Artificial
  probe
  misc_feature (1)..(25): SEQ ID NO: 1076; WAN024DYC; Start 1128; Stop 1152
gtgggaagagatagtggtggattat

SEQ ID NO: 282584 - DNA, 25 bp, Artificial
  probe
  misc_feature (1)..(25): SEQ ID NO: 1077; WAN024ESR; Start 384; Stop 408
ttatgtcagtgtgattacgcctaat

SEQ ID NO: 282585 - DNA, 25 bp, Artificial
  probe
  misc_feature (1)..(25): SEQ ID NO: 1077; WAN024ESR; Start 727; Stop 751
gcagatcagtatggagtaagacaat

SEQ ID NO: 282586 - DNA, 25 bp, Artificial
  probe
  misc_feature (1)..(25): SEQ ID NO: 1077; WAN024ESR; Start 735; Stop 759
gtatggagtaagacaatatgaagca

SEQ ID NO: 282587 - DNA, 25 bp, Artificial
  probe
  misc_feature (1)..(25): SEQ ID NO: 1077; WAN024ESR; Start 383; Stop 407
cttatgtcagtgtgattacgcctaa

SEQ ID NO: 282588 - DNA, 25 bp, Artificial
  probe
  misc_feature (1)..(25): SEQ ID NO: 1077; WAN024ESR; Start 724; Stop 748
caagcagatcagtatggagtaagac

SEQ ID NO: 282589 - DNA, 25 bp, Artificial
  probe
  misc_feature (1)..(25): SEQ ID NO: 1077; WAN024ESR; Start 734; Stop 758
agtatggagtaagacaatatgaagc

SEQ ID NO: 282590 - DNA, 25 bp, Artificial
  probe
  misc_feature (1)..(25): SEQ ID NO: 1077; WAN024ESR; Start 726; Stop 750
agcagatcagtatggagtaagacaa

SEQ ID NO: 282591 - DNA, 25 bp, Artificial
  probe
  misc_feature (1)..(25): SEQ ID NO: 1077; WAN024ESR; Start 725; Stop 749
aagcagatcagtatggagtaagaca

SEQ ID NO: 282592 - DNA, 25 bp, Artificial
  probe
  misc_feature (1)..(25): SEQ ID NO: 1077; WAN024ESR; Start 723; Stop 747
acaagcagatcagtatggagtaaga

SEQ ID NO: 282593 - DNA, 25 bp, Artificial
  probe
  misc_feature (1)..(25): SEQ ID NO: 1077; WAN024ESR; Start 722; Stop 746
cacaagcagatcagtatggagtaag

SEQ ID NO: 282594 - DNA, 25 bp, Artificial
  probe
  misc_feature (1)..(25): SEQ ID NO: 1077; WAN024ESR; Start 736; Stop 760
tatggagtaagacaatatgaagcaa

SEQ ID NO: 282595 - DNA, 25 bp, Artificial
  probe
  misc_feature (1)..(25): SEQ ID NO: 1077; WAN024ESR; Start 382; Stop 406
ccttatgtcagtgtgattacgccta

SEQ ID NO: 282596 - DNA, 25 bp, Artificial
  probe
  misc_feature (1)..(25): SEQ ID NO: 1077; WAN024ESR; Start 65; Stop 89
ctgatttggctacctataccttgaa

SEQ ID NO: 282597 - DNA, 25 bp, Artificial
  probe
  misc_feature (1)..(25): SEQ ID NO: 1077; WAN024ESR; Start 66; Stop 90
tgatttggctacctataccttgaac

SEQ ID NO: 282598 - DNA, 25 bp, Artificial
  probe
  misc_feature (1)..(25): SEQ ID NO: 1077; WAN024ESR; Start 739; Stop 763
ggagtaagacaatatgaagcaaaca

SEQ ID NO: 282599 - DNA, 25 bp, Artificial
  probe
  misc_feature (1)..(25): SEQ ID NO: 1077; WAN024ESR; Start 738; Stop 762
tggagtaagacaatatgaagcaaac

SEQ ID NO: 282600 - DNA, 25 bp, Artificial
  probe
  misc_feature (1)..(25): SEQ ID NO: 1077; WAN024ESR; Start 696; Stop 720
taaggctttcgtttatcgtgctatt

SEQ ID NO: 282601 - DNA, 25 bp, Artificial
  probe
  misc_feature (1)..(25): SEQ ID NO: 1077; WAN024ESR; Start 151; Stop 175
gtctttccaactgatgataccattt

SEQ ID NO: 282602 - DNA, 25 bp, Artificial
  probe
  misc_feature (1)..(25): SEQ ID NO: 1077; WAN024ESR; Start 728; Stop 752
cagatcagtatggagtaagacaata

SEQ ID NO: 282603 - DNA, 25 bp, Artificial
  probe
  misc_feature (1)..(25): SEQ ID NO: 1077; WAN024ESR; Start 721; Stop 745
gcacaagcagatcagtatggagtaa

SEQ ID NO: 282604 - DNA, 25 bp, Artificial
  probe
  misc_feature (1)..(25): SEQ ID NO: 1077; WAN024ESR; Start 408; Stop 432
tctcccagaagcagaattattatcc

SEQ ID NO: 282605 - DNA, 25 bp, Artificial
  probe
  misc_feature (1)..(25): SEQ ID NO: 1077; WAN024ESR; Start 403; Stop 427
cctaatctcccagaagcagaattat

SEQ ID NO: 282606 - DNA, 25 bp, Artificial
  probe
  misc_feature (1)..(25): SEQ ID NO: 1077; WAN024ESR; Start 67; Stop 91
gatttggctacctataccttgaacg

SEQ ID NO: 282607 - DNA, 25 bp, Artificial
  probe
  misc_feature (1)..(25): SEQ ID NO: 1077; WAN024ESR; Start 695; Stop 719
ctaaggctttcgtttatcgtgctat

SEQ ID NO: 282608 - DNA, 25 bp, Artificial
  probe
  misc_feature (1)..(25): SEQ ID NO: 1077; WAN024ESR; Start 409; Stop 433
ctcccagaagcagaattattatccg

SEQ ID NO: 282609 - DNA, 25 bp, Artificial
  probe
  misc_feature (1)..(25): SEQ ID NO: 1077; WAN024ESR; Start 150; Stop 174
agtctttccaactgatgataccatt

SEQ ID NO: 282610 - DNA, 25 bp, Artificial
  probe
  misc_feature (1)..(25): SEQ ID NO: 1077; WAN024ESR; Start 149; Stop 173
aagtctttccaactgatgataccat

SEQ ID NO: 282611 - DNA, 25 bp, Artificial
  probe
  misc_feature (1)..(25): SEQ ID NO: 1077; WAN024ESR; Start 737; Stop 761
atggagtaagacaatatgaagcaaa

SEQ ID NO: 282612 - DNA, 25 bp, Artificial
  probe
  misc_feature (1)..(25): SEQ ID NO: 1077; WAN024ESR; Start 148; Stop 172
gaagtctttccaactgatgatacca

SEQ ID NO: 282613 - DNA, 25 bp, Artificial
  probe
  misc_feature (1)..(25): SEQ ID NO: 1077; WAN024ESR; Start 147; Stop 171
tgaagtctttccaactgatgatacc

SEQ ID NO: 282614 - DNA, 25 bp, Artificial
  probe
  misc_feature (1)..(25): SEQ ID NO: 1077; WAN024ESR; Start 143; Stop 167
gatttgaagtctttccaactgatga

SEQ ID NO: 282615 - DNA, 25 bp, Artificial
  probe
  misc_feature (1)..(25): SEQ ID NO: 1077; WAN024ESR; Start 733; Stop 757
cagtatggagtaagacaatatgaag

SEQ ID NO: 282616 - DNA, 25 bp, Artificial
  probe
  misc_feature (1)..(25): SEQ ID NO: 1077; WAN024ESR; Start 146; Stop 170
ttgaagtctttccaactgatgatac

SEQ ID NO: 282617 - DNA, 25 bp, Artificial
  probe
  misc_feature (1)..(25): SEQ ID NO: 1078; WAN024FTY; Start 375; Stop 399
cctctattctcactatgctcatacc

SEQ ID NO: 282618 - DNA, 25 bp, Artificial
  probe
  misc_feature (1)..(25): SEQ ID NO: 1078; WAN024FTY; Start 379; Stop 403
tattctcactatgctcataccttgg

SEQ ID NO: 282619 - DNA, 25 bp, Artificial
  probe
  misc_feature (1)..(25): SEQ ID NO: 1078; WAN024FTY; Start 381; Stop 405
ttctcactatgctcataccttggat

SEQ ID NO: 282620 - DNA, 25 bp, Artificial
  probe
  misc_feature (1)..(25): SEQ ID NO: 1078; WAN024FTY; Start 380; Stop 404
attctcactatgctcataccttgga

SEQ ID NO: 282621 - DNA, 25 bp, Artificial
  probe
  misc_feature (1)..(25): SEQ ID NO: 1078; WAN024FTY; Start 376; Stop 400
ctctattctcactatgctcatacct

SEQ ID NO: 282622 - DNA, 25 bp, Artificial
  probe
  misc_feature (1)..(25): SEQ ID NO: 1078; WAN024FTY; Start 321; Stop 345
gttagagaactcagaagtcatcgtt

SEQ ID NO: 282623 - DNA, 25 bp, Artificial
  probe
  misc_feature (1)..(25): SEQ ID NO: 1078; WAN024FTY; Start 319; Stop 343
ttgttagagaactcagaagtcatcg

SEQ ID NO: 282624 - DNA, 25 bp, Artificial
  probe
  misc_feature (1)..(25): SEQ ID NO: 1078; WAN024FTY; Start 378; Stop 402
ctattctcactatgctcataccttg

SEQ ID NO: 282625 - DNA, 25 bp, Artificial
  probe
  misc_feature (1)..(25): SEQ ID NO: 1078; WAN024FTY; Start 377; Stop 401
tctattctcactatgctcatacctt

SEQ ID NO: 282626 - DNA, 25 bp, Artificial
  probe
  misc_feature (1)..(25): SEQ ID NO: 1078; WAN024FTY; Start 320; Stop 344
tgttagagaactcagaagtcatcgt

SEQ ID NO: 282627 - DNA, 25 bp, Artificial
  probe
  misc_feature (1)..(25): SEQ ID NO: 1078; WAN024FTY; Start 382; Stop 406
tctcactatgctcataccttggatg

SEQ ID NO: 282628 - DNA, 25 bp, Artificial
  probe
  misc_feature (1)..(25): SEQ ID NO: 1078; WAN024FTY; Start 386; Stop 410
actatgctcataccttggatgctag

SEQ ID NO: 282629 - DNA, 25 bp, Artificial
  probe
  misc_feature (1)..(25): SEQ ID NO: 1078; WAN024FTY; Start 318; Stop 342
attgttagagaactcagaagtcatc

SEQ ID NO: 282630 - DNA, 25 bp, Artificial
  probe
  misc_feature (1)..(25): SEQ ID NO: 1078; WAN024FTY; Start 385; Stop 409
cactatgctcataccttggatgcta

SEQ ID NO: 282631 - DNA, 25 bp, Artificial
  probe
  misc_feature (1)..(25): SEQ ID NO: 1078; WAN024FTY; Start 317; Stop 341
aattgttagagaactcagaagtcat

SEQ ID NO: 282632 - DNA, 25 bp, Artificial
  probe
  misc_feature (1)..(25): SEQ ID NO: 1078; WAN024FTY; Start 372; Stop 396
aaccctctattctcactatgctcat

SEQ ID NO: 282633 - DNA, 25 bp, Artificial
  probe
  misc_feature (1)..(25): SEQ ID NO: 1078; WAN024FTY; Start 374; Stop 398
ccctctattctcactatgctcatac

SEQ ID NO: 282634 - DNA, 25 bp, Artificial
  probe
  misc_feature (1)..(25): SEQ ID NO: 1078; WAN024FTY; Start 373; Stop 397
accctctattctcactatgctcata

SEQ ID NO: 282635 - DNA, 25 bp, Artificial
  probe
  misc_feature (1)..(25): SEQ ID NO: 1078; WAN024FTY; Start 371; Stop 395
aaaccctctattctcactatgctca

SEQ ID NO: 282636 - DNA, 25 bp, Artificial
  probe
  misc_feature (1)..(25): SEQ ID NO: 1078; WAN024FTY; Start 370; Stop 394
gaaaccctctattctcactatgctc

SEQ ID NO: 282637 - DNA, 25 bp, Artificial
  probe
  misc_feature (1)..(25): SEQ ID NO: 1078; WAN024FTY; Start 302; Stop 326
ggtttgaagtggagaaattgttaga

SEQ ID NO: 282638 - DNA, 25 bp, Artificial
  probe
  misc_feature (1)..(25): SEQ ID NO: 1078; WAN024FTY; Start 301; Stop 325
aggtttgaagtggagaaattgttag

SEQ ID NO: 282639 - DNA, 25 bp, Artificial
  probe
  misc_feature (1)..(25): SEQ ID NO: 1078; WAN024FTY; Start 299; Stop 323
ataggtttgaagtggagaaattgtt

SEQ ID NO: 282640 - DNA, 25 bp, Artificial
  probe
  misc_feature (1)..(25): SEQ ID NO: 1078; WAN024FTY; Start 298; Stop 322
aataggtttgaagtggagaaattgt

SEQ ID NO: 282641 - DNA, 25 bp, Artificial
  probe
  misc_feature (1)..(25): SEQ ID NO: 1078; WAN024FTY; Start 199; Stop 223
ttagagtgcgactatttaggtttgg

SEQ ID NO: 282642 - DNA, 25 bp, Artificial
  probe
  misc_feature (1)..(25): SEQ ID NO: 1078; WAN024FTY; Start 306; Stop 330
tgaagtggagaaattgttagagaac

SEQ ID NO: 282643 - DNA, 25 bp, Artificial
  probe
  misc_feature (1)..(25): SEQ ID NO: 1078; WAN024FTY; Start 206; Stop 230
gcgactatttaggtttggtacacta

SEQ ID NO: 282644 - DNA, 25 bp, Artificial
  probe
  misc_feature (1)..(25): SEQ ID NO: 1078; WAN024FTY; Start 218; Stop 242
gtttggtacactatcgtcgttattt

SEQ ID NO: 282645 - DNA, 25 bp, Artificial
  probe
  misc_feature (1)..(25): SEQ ID NO: 1078; WAN024FTY; Start 383; Stop 407
ctcactatgctcataccttggatgc

SEQ ID NO: 282646 - DNA, 25 bp, Artificial
  probe
  misc_feature (1)..(25): SEQ ID NO: 1078; WAN024FTY; Start 212; Stop 236
atttaggtttggtacactatcgtcg

SEQ ID NO: 282647 - DNA, 25 bp, Artificial
  probe
  misc_feature (1)..(25): SEQ ID NO: 1078; WAN024FTY; Start 198; Stop 222
tttagagtgcgactatttaggtttg

SEQ ID NO: 282648 - DNA, 25 bp, Artificial
  probe
  misc_feature (1)..(25): SEQ ID NO: 1078; WAN024FTY; Start 309; Stop 333
agtggagaaattgttagagaactca

SEQ ID NO: 282649 - DNA, 25 bp, Artificial
  probe
  misc_feature (1)..(25): SEQ ID NO: 1078; WAN024FTY; Start 311; Stop 335
tggagaaattgttagagaactcaga

SEQ ID NO: 282650 - DNA, 25 bp, Artificial
  probe
  misc_feature (1)..(25): SEQ ID NO: 1079; WAN024GLC-5; Start 286; Stop 310
aatgaagctgcaactactgaaactg

SEQ ID NO: 282651 - DNA, 25 bp, Artificial
  probe
  misc_feature (1)..(25): SEQ ID NO: 1079; WAN024GLC-5; Start 285; Stop 309
caatgaagctgcaactactgaaact

SEQ ID NO: 282652 - DNA, 25 bp, Artificial
  probe
  misc_feature (1)..(25): SEQ ID NO: 1079; WAN024GLC-5; Start 203; Stop 227
atgaaggggaacatgctagagaaaa

SEQ ID NO: 282653 - DNA, 25 bp, Artificial
  probe
  misc_feature (1)..(25): SEQ ID NO: 1079; WAN024GLC-5; Start 202; Stop 226
aatgaaggggaacatgctagagaaa

SEQ ID NO: 282654 - DNA, 25 bp, Artificial
  probe
  misc_feature (1)..(25): SEQ ID NO: 1079; WAN024GLC-5; Start 206; Stop 230
aaggggaacatgctagagaaaacaa

SEQ ID NO: 282655 - DNA, 25 bp, Artificial
  probe
  misc_feature (1)..(25): SEQ ID NO: 1079; WAN024GLC-5; Start 201; Stop 225
gaatgaaggggaacatgctagagaa

SEQ ID NO: 282656 - DNA, 25 bp, Artificial
  probe
  misc_feature (1)..(25): SEQ ID NO: 1079; WAN024GLC-5; Start 282; Stop 306
aagcaatgaagctgcaactactgaa

SEQ ID NO: 282657 - DNA, 25 bp, Artificial
  probe
  misc_feature (1)..(25): SEQ ID NO: 1079; WAN024GLC-5; Start 207; Stop 231
aggggaacatgctagagaaaacaag

SEQ ID NO: 282658 - DNA, 25 bp, Artificial
  probe
  misc_feature (1)..(25): SEQ ID NO: 1079; WAN024GLC-5; Start 205; Stop 229
gaaggggaacatgctagagaaaaca

SEQ ID NO: 282659 - DNA, 25 bp, Artificial
  probe
  misc_feature (1)..(25): SEQ ID NO: 1079; WAN024GLC-5; Start 204; Stop 228
tgaaggggaacatgctagagaaaac

SEQ ID NO: 282660 - DNA, 25 bp, Artificial
  probe
  misc_feature (1)..(25): SEQ ID NO: 1079; WAN024GLC-5; Start 200; Stop 224
agaatgaaggggaacatgctagaga

SEQ ID NO: 282661 - DNA, 25 bp, Artificial
  probe
  misc_feature (1)..(25): SEQ ID NO: 1079; WAN024GLC-5; Start 199; Stop 223
cagaatgaaggggaacatgctagag

SEQ ID NO: 282662 - DNA, 25 bp, Artificial
  probe
  misc_feature (1)..(25): SEQ ID NO: 1079; WAN024GLC-5; Start 217; Stop 241
gctagagaaaacaagctagaaaagg

SEQ ID NO: 282663 - DNA, 25 bp, Artificial
  probe
  misc_feature (1)..(25): SEQ ID NO: 1079; WAN024GLC-5; Start 213; Stop 237
acatgctagagaaaacaagctagaa

SEQ ID NO: 282664 - DNA, 25 bp, Artificial
  probe
  misc_feature (1)..(25): SEQ ID NO: 1079; WAN024GLC-5; Start 212; Stop 236
aacatgctagagaaaacaagctaga

SEQ ID NO: 282665 - DNA, 25 bp, Artificial
  probe
  misc_feature (1)..(25): SEQ ID NO: 1079; WAN024GLC-5; Start 211; Stop 235
gaacatgctagagaaaacaagctag

SEQ ID NO: 282666 - DNA, 25 bp, Artificial
  probe
  misc_feature (1)..(25): SEQ ID NO: 1079; WAN024GLC-5; Start 214; Stop 238
catgctagagaaaacaagctagaaa

SEQ ID NO: 282667 - DNA, 25 bp, Artificial
  probe
  misc_feature (1)..(25): SEQ ID NO: 1079; WAN024GLC-5; Start 216; Stop 240
tgctagagaaaacaagctagaaaag

SEQ ID NO: 282668 - DNA, 25 bp, Artificial
  probe
  misc_feature (1)..(25): SEQ ID NO: 1079; WAN024GLC-5; Start 281; Stop 305
caagcaatgaagctgcaactactga

SEQ ID NO: 282669 - DNA, 25 bp, Artificial
  probe
  misc_feature (1)..(25): SEQ ID NO: 1079; WAN024GLC-5; Start 210; Stop 234
ggaacatgctagagaaaacaagcta

SEQ ID NO: 282670 - DNA, 25 bp, Artificial
  probe
  misc_feature (1)..(25): SEQ ID NO: 1079; WAN024GLC-5; Start 215; Stop 239
atgctagagaaaacaagctagaaaa

SEQ ID NO: 282671 - DNA, 25 bp, Artificial
  probe
  misc_feature (1)..(25): SEQ ID NO: 1079; WAN024GLC-5; Start 284; Stop 308
gcaatgaagctgcaactactgaaac

SEQ ID NO: 282672 - DNA, 25 bp, Artificial
  probe
  misc_feature (1)..(25): SEQ ID NO: 1079; WAN024GLC-5; Start 283; Stop 307
agcaatgaagctgcaactactgaaa

SEQ ID NO: 282673 - DNA, 25 bp, Artificial
  probe
  misc_feature (1)..(25): SEQ ID NO: 1079; WAN024GLC-5; Start 287; Stop 311
atgaagctgcaactactgaaactgc

SEQ ID NO: 282674 - DNA, 25 bp, Artificial
  probe
  misc_feature (1)..(25): SEQ ID NO: 1079; WAN024GLC-5; Start 209; Stop 233
gggaacatgctagagaaaacaagct

SEQ ID NO: 282675 - DNA, 25 bp, Artificial
  probe
  misc_feature (1)..(25): SEQ ID NO: 1079; WAN024GLC-5; Start 194; Stop 218
ataagcagaatgaaggggaacatgc

SEQ ID NO: 282676 - DNA, 25 bp, Artificial
  probe
  misc_feature (1)..(25): SEQ ID NO: 1079; WAN024GLC-5; Start 208; Stop 232
ggggaacatgctagagaaaacaagc

SEQ ID NO: 282677 - DNA, 25 bp, Artificial
  probe
  misc_feature (1)..(25): SEQ ID NO: 1079; WAN024GLC-5; Start 198; Stop 222
gcagaatgaaggggaacatgctaga

SEQ ID NO: 282678 - DNA, 25 bp, Artificial
  probe
  misc_feature (1)..(25): SEQ ID NO: 1080; WAN024GL9-5; Start 2016; Stop 2040
aggacaattaactatctcggacaat

SEQ ID NO: 282679 - DNA, 25 bp, Artificial
  probe
  misc_feature (1)..(25): SEQ ID NO: 1080; WAN024GL9-5; Start 2015; Stop 2039
taggacaattaactatctcggacaa

SEQ ID NO: 282680 - DNA, 25 bp, Artificial
  probe
  misc_feature (1)..(25): SEQ ID NO: 1080; WAN024GL9-5; Start 2014; Stop 2038
ctaggacaattaactatctcggaca

SEQ ID NO: 282681 - DNA, 25 bp, Artificial
  probe
  misc_feature (1)..(25): SEQ ID NO: 1080; WAN024GL9-5; Start 1411; Stop 1435
tttacaggttatcaaggagacccta

SEQ ID NO: 282682 - DNA, 25 bp, Artificial
  probe
  misc_feature (1)..(25): SEQ ID NO: 1080; WAN024GL9-5; Start 1412; Stop 1436
ttacaggttatcaaggagaccctac

SEQ ID NO: 282683 - DNA, 25 bp, Artificial
  probe
  misc_feature (1)..(25): SEQ ID NO: 1080; WAN024GL9-5; Start 1410; Stop 1434
ctttacaggttatcaaggagaccct

SEQ ID NO: 282684 - DNA, 25 bp, Artificial
  probe
  misc_feature (1)..(25): SEQ ID NO: 1080; WAN024GL9-5; Start 1413; Stop 1437
tacaggttatcaaggagaccctact

SEQ ID NO: 282685 - DNA, 25 bp, Artificial
  probe
  misc_feature (1)..(25): SEQ ID NO: 1080; WAN024GL9-5; Start 72; Stop 96
gatgattggtgctgttttatttgct

SEQ ID NO: 282686 - DNA, 25 bp, Artificial
  probe
  misc_feature (1)..(25): SEQ ID NO: 1080; WAN024GL9-5; Start 2013; Stop 2037
cctaggacaattaactatctcggac

SEQ ID NO: 282687 - DNA, 25 bp, Artificial
  probe
  misc_feature (1)..(25): SEQ ID NO: 1080; WAN024GL9-5; Start 2012; Stop 2036
acctaggacaattaactatctcgga

SEQ ID NO: 282688 - DNA, 25 bp, Artificial
  probe
  misc_feature (1)..(25): SEQ ID NO: 1080; WAN024GL9-5; Start 2011; Stop 2035
aacctaggacaattaactatctcgg

SEQ ID NO: 282689 - DNA, 25 bp, Artificial
  probe
  misc_feature (1)..(25): SEQ ID NO: 1080; WAN024GL9-5; Start 73; Stop 97
atgattggtgctgttttatttgctg

SEQ ID NO: 282690 - DNA, 25 bp, Artificial
  probe
  misc_feature (1)..(25): SEQ ID NO: 1080; WAN024GL9-5; Start 71; Stop 95
tgatgattggtgctgttttatttgc

SEQ ID NO: 282691 - DNA, 25 bp, Artificial
  probe
  misc_feature (1)..(25): SEQ ID NO: 1080; WAN024GL9-5; Start 1998; Stop 2022
agattatcagttcaacctaggacaa

SEQ ID NO: 282692 - DNA, 25 bp, Artificial
  probe
  misc_feature (1)..(25): SEQ ID NO: 1080; WAN024GL9-5; Start 1997; Stop 2021
aagattatcagttcaacctaggaca

SEQ ID NO: 282693 - DNA, 25 bp, Artificial
  probe
  misc_feature (1)..(25): SEQ ID NO: 1080; WAN024GL9-5; Start 2010; Stop 2034
caacctaggacaattaactatctcg

SEQ ID NO: 282694 - DNA, 25 bp, Artificial
  probe
  misc_feature (1)..(25): SEQ ID NO: 1080; WAN024GL9-5; Start 2003; Stop 2027
atcagttcaacctaggacaattaac

SEQ ID NO: 282695 - DNA, 25 bp, Artificial
  probe
  misc_feature (1)..(25): SEQ ID NO: 1080; WAN024GL9-5; Start 1999; Stop 2023
gattatcagttcaacctaggacaat

SEQ ID NO: 282696 - DNA, 25 bp, Artificial
  probe
  misc_feature (1)..(25): SEQ ID NO: 1080; WAN024GL9-5; Start 1414; Stop 1438
acaggttatcaaggagaccctactg

SEQ ID NO: 282697 - DNA, 25 bp, Artificial
  probe
  misc_feature (1)..(25): SEQ ID NO: 1080; WAN024GL9-5; Start 2000; Stop 2024
attatcagttcaacctaggacaatt

SEQ ID NO: 282698 - DNA, 25 bp, Artificial
  probe
  misc_feature (1)..(25): SEQ ID NO: 1080; WAN024GL9-5; Start 2009; Stop 2033
tcaacctaggacaattaactatctc

SEQ ID NO: 282699 - DNA, 25 bp, Artificial
  probe
  misc_feature (1)..(25): SEQ ID NO: 1080; WAN024GL9-5; Start 76; Stop 100
attggtgctgttttatttgctggtc

SEQ ID NO: 282700 - DNA, 25 bp, Artificial
  probe
  misc_feature (1)..(25): SEQ ID NO: 1080; WAN024GL9-5; Start 75; Stop 99
gattggtgctgttttatttgctggt

SEQ ID NO: 282701 - DNA, 25 bp, Artificial
  probe
  misc_feature (1)..(25): SEQ ID NO: 1080; WAN024GL9-5; Start 74; Stop 98
tgattggtgctgttttatttgctgg

SEQ ID NO: 282702 - DNA, 25 bp, Artificial
  probe
  misc_feature (1)..(25): SEQ ID NO: 1080; WAN024GL9-5; Start 2002; Stop 2026
tatcagttcaacctaggacaattaa

SEQ ID NO: 282703 - DNA, 25 bp, Artificial
  probe
  misc_feature (1)..(25): SEQ ID NO: 1080; WAN024GL9-5; Start 2001; Stop 2025
ttatcagttcaacctaggacaatta

SEQ ID NO: 282704 - DNA, 25 bp, Artificial
  probe
  misc_feature (1)..(25): SEQ ID NO: 1080; WAN024GL9-5; Start 1415; Stop 1439
caggttatcaaggagaccctactgg

SEQ ID NO: 282705 - DNA, 25 bp, Artificial
  probe
  misc_feature (1)..(25): SEQ ID NO: 1080; WAN024GL9-5; Start 2008; Stop 2032
ttcaacctaggacaattaactatct

SEQ ID NO: 282706 - DNA, 25 bp, Artificial
  probe
  misc_feature (1)..(25): SEQ ID NO: 1080; WAN024GL9-5; Start 2007; Stop 2031
gttcaacctaggacaattaactatc

SEQ ID NO: 282707 - DNA, 25 bp, Artificial
  probe
  misc_feature (1)..(25): SEQ ID NO: 1080; WAN024GL9-5; Start 2004; Stop 2028
tcagttcaacctaggacaattaact

SEQ ID NO: 282708 - DNA, 25 bp, Artificial
  probe
  misc_feature (1)..(25): SEQ ID NO: 1080; WAN024GL9-5; Start 1416; Stop 1440
aggttatcaaggagaccctactggt

SEQ ID NO: 282709 - DNA, 25 bp, Artificial
  probe
  misc_feature (1)..(25): SEQ ID NO: 1080; WAN024GL9-5; Start 1996; Stop 2020
aaagattatcagttcaacctaggac

SEQ ID NO: 282710 - DNA, 25 bp, Artificial
  probe
  misc_feature (1)..(25): SEQ ID NO: 1080; WAN024GL9-5; Start 2005; Stop 2029
cagttcaacctaggacaattaacta

SEQ ID NO: 282711 - DNA, 25 bp, Artificial
  probe
  misc_feature (1)..(25): SEQ ID NO: 1081; WAN024GLB-5; Start 2039; Stop 2063
tcaacctcggacaattaactatctc

SEQ ID NO: 282712 - DNA, 25 bp, Artificial
  probe
  misc_feature (1)..(25): SEQ ID NO: 1081; WAN024GLB-5; Start 2032; Stop 2056
tatcagttcaacctcggacaattaa

SEQ ID NO: 282713 - DNA, 25 bp, Artificial
  probe
  misc_feature (1)..(25): SEQ ID NO: 1081; WAN024GLB-5; Start 2031; Stop 2055
ttatcagttcaacctcggacaatta

SEQ ID NO: 282714 - DNA, 25 bp, Artificial
  probe
  misc_feature (1)..(25): SEQ ID NO: 1081; WAN024GLB-5; Start 2038; Stop 2062
ttcaacctcggacaattaactatct

SEQ ID NO: 282715 - DNA, 25 bp, Artificial
  probe
  misc_feature (1)..(25): SEQ ID NO: 1081; WAN024GLB-5; Start 2030; Stop 2054
attatcagttcaacctcggacaatt

SEQ ID NO: 282716 - DNA, 25 bp, Artificial
  probe
  misc_feature (1)..(25): SEQ ID NO: 1081; WAN024GLB-5; Start 2029; Stop 2053
gattatcagttcaacctcggacaat

SEQ ID NO: 282717 - DNA, 25 bp, Artificial
  probe
  misc_feature (1)..(25): SEQ ID NO: 1081; WAN024GLB-5; Start 2046; Stop 2070
cggacaattaactatctcggacaat

SEQ ID NO: 282718 - DNA, 25 bp, Artificial
  probe
  misc_feature (1)..(25): SEQ ID NO: 1081; WAN024GLB-5; Start 2037; Stop 2061
gttcaacctcggacaattaactatc

SEQ ID NO: 282719 - DNA, 25 bp, Artificial
  probe
  misc_feature (1)..(25): SEQ ID NO: 1081; WAN024GLB-5; Start 2040; Stop 2064
caacctcggacaattaactatctcg

SEQ ID NO: 282720 - DNA, 25 bp, Artificial
  probe
  misc_feature (1)..(25): SEQ ID NO: 1081; WAN024GLB-5; Start 2028; Stop 2052
agattatcagttcaacctcggacaa

SEQ ID NO: 282721 - DNA, 25 bp, Artificial
  probe
  misc_feature (1)..(25): SEQ ID NO: 1081; WAN024GLB-5; Start 2027; Stop 2051
aagattatcagttcaacctcggaca

SEQ ID NO: 282722 - DNA, 25 bp, Artificial
  probe
  misc_feature (1)..(25): SEQ ID NO: 1081; WAN024GLB-5; Start 2045; Stop 2069
tcggacaattaactatctcggacaa

SEQ ID NO: 282723 - DNA, 25 bp, Artificial
  probe
  misc_feature (1)..(25): SEQ ID NO: 1081; WAN024GLB-5; Start 2033; Stop 2057
atcagttcaacctcggacaattaac

SEQ ID NO: 282724 - DNA, 25 bp, Artificial
  probe
  misc_feature (1)..(25): SEQ ID NO: 1081; WAN024GLB-5; Start 2044; Stop 2068
ctcggacaattaactatctcggaca

SEQ ID NO: 282725 - DNA, 25 bp, Artificial
  probe
  misc_feature (1)..(25): SEQ ID NO: 1081; WAN024GLB-5; Start 2041; Stop 2065
aacctcggacaattaactatctcgg

SEQ ID NO: 282726 - DNA, 25 bp, Artificial
  probe
  misc_feature (1)..(25): SEQ ID NO: 1081; WAN024GLB-5; Start 2043; Stop 2067
cctcggacaattaactatctcggac

SEQ ID NO: 282727 - DNA, 25 bp, Artificial
  probe
  misc_feature (1)..(25): SEQ ID NO: 1081; WAN024GLB-5; Start 1250; Stop 1274
gtcgtaatccctatgatgtatttgc

SEQ ID NO: 282728 - DNA, 25 bp, Artificial
  probe
  misc_feature (1)..(25): SEQ ID NO: 1081; WAN024GLB-5; Start 2042; Stop 2066
acctcggacaattaactatctcgga

SEQ ID NO: 282729 - DNA, 25 bp, Artificial
  probe
  misc_feature (1)..(25): SEQ ID NO: 1081; WAN024GLB-5; Start 1248; Stop 1272
tggtcgtaatccctatgatgtattt

SEQ ID NO: 282730 - DNA, 25 bp, Artificial
  probe
  misc_feature (1)..(25): SEQ ID NO: 1081; WAN024GLB-5; Start 1247; Stop 1271
ttggtcgtaatccctatgatgtatt

SEQ ID NO: 282731 - DNA, 25 bp, Artificial
  probe
  misc_feature (1)..(25): SEQ ID NO: 1081; WAN024GLB-5; Start 2026; Stop 2050
aaagattatcagttcaacctcggac

SEQ ID NO: 282732 - DNA, 25 bp, Artificial
  probe
  misc_feature (1)..(25): SEQ ID NO: 1081; WAN024GLB-5; Start 1249; Stop 1273
ggtcgtaatccctatgatgtatttg

SEQ ID NO: 282733 - DNA, 25 bp, Artificial
  probe
  misc_feature (1)..(25): SEQ ID NO: 1081; WAN024GLB-5; Start 1246; Stop 1270
attggtcgtaatccctatgatgtat

SEQ ID NO: 282734 - DNA, 25 bp, Artificial
  probe
  misc_feature (1)..(25): SEQ ID NO: 1081; WAN024GLB-5; Start 2036; Stop 2060
agttcaacctcggacaattaactat

SEQ ID NO: 282735 - DNA, 25 bp, Artificial
  probe
  misc_feature (1)..(25): SEQ ID NO: 1081; WAN024GLB-5; Start 2035; Stop 2059
cagttcaacctcggacaattaacta

SEQ ID NO: 282736 - DNA, 25 bp, Artificial
  probe
  misc_feature (1)..(25): SEQ ID NO: 1081; WAN024GLB-5; Start 1245; Stop 1269
gattggtcgtaatccctatgatgta

SEQ ID NO: 282737 - DNA, 25 bp, Artificial
  probe
  misc_feature (1)..(25): SEQ ID NO: 1081; WAN024GLB-5; Start 1260; Stop 1284
ctatgatgtatttgcaggtttggaa

SEQ ID NO: 282738 - DNA, 25 bp, Artificial
  probe
  misc_feature (1)..(25): SEQ ID NO: 1081; WAN024GLB-5; Start 1251; Stop 1275
tcgtaatccctatgatgtatttgca

SEQ ID NO: 282739 - DNA, 25 bp, Artificial
  probe
  misc_feature (1)..(25): SEQ ID NO: 1081; WAN024GLB-5; Start 1252; Stop 1276
cgtaatccctatgatgtatttgcag

SEQ ID NO: 282740 - DNA, 25 bp, Artificial
  probe
  misc_feature (1)..(25): SEQ ID NO: 1081; WAN024GLB-5; Start 2034; Stop 2058
tcagttcaacctcggacaattaact

SEQ ID NO: 282741 - DNA, 25 bp, Artificial
  probe
  misc_feature (1)..(25): SEQ ID NO: 1081; WAN024GLB-5; Start 414; Stop 438
agcagcagaagctaataagactgaa

SEQ ID NO: 282742 - DNA, 25 bp, Artificial
  probe
  misc_feature (1)..(25): SEQ ID NO: 1081; WAN024GLB-5; Start 71; Stop 95
tgatgattggtgctgttttatttgt

SEQ ID NO: 282743 - DNA, 25 bp, Artificial
  probe
  misc_feature (1)..(25): SEQ ID NO: 1081; WAN024GLB-5; Start 2442; Stop 2466
tactttccctaagactgaaggtgga

SEQ ID NO: 282744 - DNA, 25 bp, Artificial
  probe
  misc_feature (1)..(25): SEQ ID NO: 1082; WAN024DF2; Start 109; Stop 133
tatgtccaactctttgataccatcg

SEQ ID NO: 282745 - DNA, 25 bp, Artificial
  probe
  misc_feature (1)..(25): SEQ ID NO: 1082; WAN024DF2; Start 106; Stop 130
aactatgtccaactctttgatacca

SEQ ID NO: 282746 - DNA, 25 bp, Artificial
  probe
  misc_feature (1)..(25): SEQ ID NO: 1082; WAN024DF2; Start 107; Stop 131
actatgtccaactctttgataccat

SEQ ID NO: 282747 - DNA, 25 bp, Artificial
  probe
  misc_feature (1)..(25): SEQ ID NO: 1082; WAN024DF2; Start 108; Stop 132
ctatgtccaactctttgataccatc

SEQ ID NO: 282748 - DNA, 25 bp, Artificial
  probe
  misc_feature (1)..(25): SEQ ID NO: 1082; WAN024DF2; Start 105; Stop 129
aaactatgtccaactctttgatacc

SEQ ID NO: 282749 - DNA, 25 bp, Artificial
  probe
  misc_feature (1)..(25): SEQ ID NO: 1082; WAN024DF2; Start 248; Stop 272
gggtagaagtgcatgactaactaat

SEQ ID NO: 282750 - DNA, 25 bp, Artificial
  probe
  misc_feature (1)..(25): SEQ ID NO: 1082; WAN024DF2; Start 158; Stop 182
tgacaccttatttcctaatcaacgt

SEQ ID NO: 282751 - DNA, 25 bp, Artificial
  probe
  misc_feature (1)..(25): SEQ ID NO: 1082; WAN024DF2; Start 247; Stop 271
tgggtagaagtgcatgactaactaa

SEQ ID NO: 282752 - DNA, 25 bp, Artificial
  probe
  misc_feature (1)..(25): SEQ ID NO: 1082; WAN024DF2; Start 246; Stop 270
ttgggtagaagtgcatgactaacta

SEQ ID NO: 282753 - DNA, 25 bp, Artificial
  probe
  misc_feature (1)..(25): SEQ ID NO: 1082; WAN024DF2; Start 110; Stop 134
atgtccaactctttgataccatcga

SEQ ID NO: 282754 - DNA, 25 bp, Artificial
  probe
  misc_feature (1)..(25): SEQ ID NO: 1082; WAN024DF2; Start 244; Stop 268
gattgggtagaagtgcatgactaac

SEQ ID NO: 282755 - DNA, 25 bp, Artificial
  probe
  misc_feature (1)..(25): SEQ ID NO: 1082; WAN024DF2; Start 245; Stop 269
attgggtagaagtgcatgactaact

SEQ ID NO: 282756 - DNA, 25 bp, Artificial
  probe
  misc_feature (1)..(25): SEQ ID NO: 1082; WAN024DF2; Start 111; Stop 135
tgtccaactctttgataccatcgag

SEQ ID NO: 282757 - DNA, 25 bp, Artificial
  probe
  misc_feature (1)..(25): SEQ ID NO: 1082; WAN024DF2; Start 243; Stop 267
ggattgggtagaagtgcatgactaa

SEQ ID NO: 282758 - DNA, 25 bp, Artificial
  probe
  misc_feature (1)..(25): SEQ ID NO: 1082; WAN024DF2; Start 115; Stop 139
caactctttgataccatcgagcaaa

SEQ ID NO: 282759 - DNA, 25 bp, Artificial
  probe
  misc_feature (1)..(25): SEQ ID NO: 1082; WAN024DF2; Start 72; Stop 96
aaaatatgtacgaactggttgggga

SEQ ID NO: 282760 - DNA, 25 bp, Artificial
  probe
  misc_feature (1)..(25): SEQ ID NO: 1082; WAN024DF2; Start 114; Stop 138
ccaactctttgataccatcgagcaa

SEQ ID NO: 282761 - DNA, 25 bp, Artificial
  probe
  misc_feature (1)..(25): SEQ ID NO: 1082; WAN024DF2; Start 73; Stop 97
aaatatgtacgaactggttggggag

SEQ ID NO: 282762 - DNA, 25 bp, Artificial
  probe
  misc_feature (1)..(25): SEQ ID NO: 1082; WAN024DF2; Start 104; Stop 128
aaaactatgtccaactctttgatac

SEQ ID NO: 282763 - DNA, 25 bp, Artificial
  probe
  misc_feature (1)..(25): SEQ ID NO: 1082; WAN024DF2; Start 112; Stop 136
gtccaactctttgataccatcgagc

SEQ ID NO: 282764 - DNA, 25 bp, Artificial
  probe
  misc_feature (1)..(25): SEQ ID NO: 1082; WAN024DF2; Start 103; Stop 127
gaaaactatgtccaactctttgata

SEQ ID NO: 282765 - DNA, 25 bp, Artificial
  probe
  misc_feature (1)..(25): SEQ ID NO: 1082; WAN024DF2; Start 113; Stop 137
tccaactctttgataccatcgagca

SEQ ID NO: 282766 - DNA, 25 bp, Artificial
  probe
  misc_feature (1)..(25): SEQ ID NO: 1082; WAN024DF2; Start 242; Stop 266
cggattgggtagaagtgcatgacta

SEQ ID NO: 282767 - DNA, 25 bp, Artificial
  probe
  misc_feature (1)..(25): SEQ ID NO: 1082; WAN024DF2; Start 118; Stop 142
ctctttgataccatcgagcaaaatg

SEQ ID NO: 282768 - DNA, 25 bp, Artificial
  probe
  misc_feature (1)..(25): SEQ ID NO: 1082; WAN024DF2; Start 117; Stop 141
actctttgataccatcgagcaaaat

SEQ ID NO: 282769 - DNA, 25 bp, Artificial
  probe
  misc_feature (1)..(25): SEQ ID NO: 1082; WAN024DF2; Start 116; Stop 140
aactctttgataccatcgagcaaaa

SEQ ID NO: 282770 - DNA, 25 bp, Artificial
  probe
  misc_feature (1)..(25): SEQ ID NO: 1082; WAN024DF2; Start 74; Stop 98
aatatgtacgaactggttggggagg

SEQ ID NO: 282771 - DNA, 25 bp, Artificial
  probe
  misc_feature (1)..(25): SEQ ID NO: 1082; WAN024DF2; Start 240; Stop 264
aacggattgggtagaagtgcatgac

SEQ ID NO: 282772 - DNA, 25 bp, Artificial
  probe
  misc_feature (1)..(25): SEQ ID NO: 1082; WAN024DF2; Start 232; Stop 256
gttttggcaacggattgggtagaag

SEQ ID NO: 282773 - DNA, 25 bp, Artificial
  probe
  misc_feature (1)..(25): SEQ ID NO: 1082; WAN024DF2; Start 229; Stop 253
gatgttttggcaacggattgggtag

SEQ ID NO: 282774 - DNA, 25 bp, Artificial
  probe
  misc_feature (1)..(25): SEQ ID NO: 1082; WAN024DF2; Start 239; Stop 263
caacggattgggtagaagtgcatga

SEQ ID NO: 282775 - DNA, 25 bp, Artificial
  probe
  misc_feature (1)..(25): SEQ ID NO: 1082; WAN024DF2; Start 233; Stop 257
ttttggcaacggattgggtagaagt

SEQ ID NO: 282776 - DNA, 25 bp, Artificial
  probe
  misc_feature (1)..(25): SEQ ID NO: 1082; WAN024DF2; Start 119; Stop 143
tctttgataccatcgagcaaaatgg

SEQ ID NO: 282777 - DNA, 25 bp, Artificial
  probe
  misc_feature (1)..(25): SEQ ID NO: 1083; WAN024AUC; Start 44; Stop 68
ccattacagatactggcttaacctt

SEQ ID NO: 282778 - DNA, 25 bp, Artificial
  probe
  misc_feature (1)..(25): SEQ ID NO: 1083; WAN024AUC; Start 35; Stop 59
gaatgattgccattacagatactgg

SEQ ID NO: 282779 - DNA, 25 bp, Artificial
  probe
  misc_feature (1)..(25): SEQ ID NO: 1083; WAN024AUC; Start 34; Stop 58
agaatgattgccattacagatactg

SEQ ID NO: 282780 - DNA, 25 bp, Artificial
  probe
  misc_feature (1)..(25): SEQ ID NO: 1083; WAN024AUC; Start 511; Stop 535
attgaccaactgccgaacttatctg

SEQ ID NO: 282781 - DNA, 25 bp, Artificial
  probe
  misc_feature (1)..(25): SEQ ID NO: 1083; WAN024AUC; Start 510; Stop 534
cattgaccaactgccgaacttatct

SEQ ID NO: 282782 - DNA, 25 bp, Artificial
  probe
  misc_feature (1)..(25): SEQ ID NO: 1083; WAN024AUC; Start 33; Stop 57
aagaatgattgccattacagatact

SEQ ID NO: 282783 - DNA, 25 bp, Artificial
  probe
  misc_feature (1)..(25): SEQ ID NO: 1083; WAN024AUC; Start 45; Stop 69
cattacagatactggcttaaccttt

SEQ ID NO: 282784 - DNA, 25 bp, Artificial
  probe
  misc_feature (1)..(25): SEQ ID NO: 1083; WAN024AUC; Start 513; Stop 537
tgaccaactgccgaacttatctgaa

SEQ ID NO: 282785 - DNA, 25 bp, Artificial
  probe
  misc_feature (1)..(25): SEQ ID NO: 1083; WAN024AUC; Start 512; Stop 536
ttgaccaactgccgaacttatctga

SEQ ID NO: 282786 - DNA, 25 bp, Artificial
  probe
  misc_feature (1)..(25): SEQ ID NO: 1083; WAN024AUC; Start 509; Stop 533
ccattgaccaactgccgaacttatc

SEQ ID NO: 282787 - DNA, 25 bp, Artificial
  probe
  misc_feature (1)..(25): SEQ ID NO: 1083; WAN024AUC; Start 514; Stop 538
gaccaactgccgaacttatctgaaa

SEQ ID NO: 282788 - DNA, 25 bp, Artificial
  probe
  misc_feature (1)..(25): SEQ ID NO: 1083; WAN024AUC; Start 46; Stop 70
attacagatactggcttaaccttta

SEQ ID NO: 282789 - DNA, 25 bp, Artificial
  probe
  misc_feature (1)..(25): SEQ ID NO: 1083; WAN024AUC; Start 594; Stop 618
ggggcaatatcttgacctaactaat

SEQ ID NO: 282790 - DNA, 25 bp, Artificial
  probe
  misc_feature (1)..(25): SEQ ID NO: 1083; WAN024AUC; Start 32; Stop 56
aaagaatgattgccattacagatac

SEQ ID NO: 282791 - DNA, 25 bp, Artificial
  probe
  misc_feature (1)..(25): SEQ ID NO: 1083; WAN024AUC; Start 31; Stop 55
caaagaatgattgccattacagata

SEQ ID NO: 282792 - DNA, 25 bp, Artificial
  probe
  misc_feature (1)..(25): SEQ ID NO: 1083; WAN024AUC; Start 260; Stop 284
gacaaggagaggatagttgggcttt

SEQ ID NO: 282793 - DNA, 25 bp, Artificial
  probe
  misc_feature (1)..(25): SEQ ID NO: 1083; WAN024AUC; Start 253; Stop 277
gttaggggacaaggagaggatagtt

SEQ ID NO: 282794 - DNA, 25 bp, Artificial
  probe
  misc_feature (1)..(25): SEQ ID NO: 1083; WAN024AUC; Start 515; Stop 539
accaactgccgaacttatctgaaaa

SEQ ID NO: 282795 - DNA, 25 bp, Artificial
  probe
  misc_feature (1)..(25): SEQ ID NO: 1083; WAN024AUC; Start 261; Stop 285
acaaggagaggatagttgggctttg

SEQ ID NO: 282796 - DNA, 25 bp, Artificial
  probe
  misc_feature (1)..(25): SEQ ID NO: 1083; WAN024AUC; Start 254; Stop 278
ttaggggacaaggagaggatagttg

SEQ ID NO: 282797 - DNA, 25 bp, Artificial
  probe
  misc_feature (1)..(25): SEQ ID NO: 1083; WAN024AUC; Start 59; Stop 83
gcttaacctttacaaaagatccgtt

SEQ ID NO: 282798 - DNA, 25 bp, Artificial
  probe
  misc_feature (1)..(25): SEQ ID NO: 1083; WAN024AUC; Start 8; Stop 32
caagtgattttgtcaagtatttgca

SEQ ID NO: 282799 - DNA, 25 bp, Artificial
  probe
  misc_feature (1)..(25): SEQ ID NO: 1083; WAN024AUC; Start 63; Stop 87
aacctttacaaaagatccgtttgac

SEQ ID NO: 282800 - DNA, 25 bp, Artificial
  probe
  misc_feature (1)..(25): SEQ ID NO: 1083; WAN024AUC; Start 58; Stop 82
ggcttaacctttacaaaagatccgt

SEQ ID NO: 282801 - DNA, 25 bp, Artificial
  probe
  misc_feature (1)..(25): SEQ ID NO: 1083; WAN024AUC; Start 57; Stop 81
tggcttaacctttacaaaagatccg

SEQ ID NO: 282802 - DNA, 25 bp, Artificial
  probe
  misc_feature (1)..(25): SEQ ID NO: 1083; WAN024AUC; Start 62; Stop 86
taacctttacaaaagatccgtttga

SEQ ID NO: 282803 - DNA, 25 bp, Artificial
  probe
  misc_feature (1)..(25): SEQ ID NO: 1083; WAN024AUC; Start 60; Stop 84
cttaacctttacaaaagatccgttt

SEQ ID NO: 282804 - DNA, 25 bp, Artificial
  probe
  misc_feature (1)..(25): SEQ ID NO: 1083; WAN024AUC; Start 64; Stop 88
acctttacaaaagatccgtttgacc

SEQ ID NO: 282805 - DNA, 25 bp, Artificial
  probe
  misc_feature (1)..(25): SEQ ID NO: 1083; WAN024AUC; Start 61; Stop 85
ttaacctttacaaaagatccgtttg

SEQ ID NO: 282806 - DNA, 25 bp, Artificial
  probe
  misc_feature (1)..(25): SEQ ID NO: 1083; WAN024AUC; Start 66; Stop 90
ctttacaaaagatccgtttgaccgt

SEQ ID NO: 282807 - DNA, 25 bp, Artificial
  probe
  misc_feature (1)..(25): SEQ ID NO: 1083; WAN024AUC; Start 67; Stop 91
tttacaaaagatccgtttgaccgtg

SEQ ID NO: 282808 - DNA, 25 bp, Artificial
  probe
  misc_feature (1)..(25): SEQ ID NO: 1083; WAN024AUC; Start 7; Stop 31
acaagtgattttgtcaagtatttgc

SEQ ID NO: 282809 - DNA, 25 bp, Artificial
  probe
  misc_feature (1)..(25): SEQ ID NO: 1083; WAN024AUC; Start 252; Stop 276
ggttaggggacaaggagaggatagt

SEQ ID NO: 282810 - DNA, 25 bp, Artificial
  probe
  misc_feature (1)..(25): SEQ ID NO: 1084; WAN024FV6; Start 719; Stop 743
gttcggtgataatatcttgtatgct

SEQ ID NO: 282811 - DNA, 25 bp, Artificial
  probe
  misc_feature (1)..(25): SEQ ID NO: 1084; WAN024FV6; Start 718; Stop 742
agttcggtgataatatcttgtatgc

SEQ ID NO: 282812 - DNA, 25 bp, Artificial
  probe
  misc_feature (1)..(25): SEQ ID NO: 1084; WAN024FV6; Start 720; Stop 744
ttcggtgataatatcttgtatgctt

SEQ ID NO: 282813 - DNA, 25 bp, Artificial
  probe
  misc_feature (1)..(25): SEQ ID NO: 1084; WAN024FV6; Start 721; Stop 745
tcggtgataatatcttgtatgctta

SEQ ID NO: 282814 - DNA, 25 bp, Artificial
  probe
  misc_feature (1)..(25): SEQ ID NO: 1084; WAN024FV6; Start 717; Stop 741
aagttcggtgataatatcttgtatg

SEQ ID NO: 282815 - DNA, 25 bp, Artificial
  probe
  misc_feature (1)..(25): SEQ ID NO: 1084; WAN024FV6; Start 360; Stop 384
aatttctgctctaattggctcgtta

SEQ ID NO: 282816 - DNA, 25 bp, Artificial
  probe
  misc_feature (1)..(25): SEQ ID NO: 1084; WAN024FV6; Start 722; Stop 746
cggtgataatatcttgtatgcttat

SEQ ID NO: 282817 - DNA, 25 bp, Artificial
  probe
  misc_feature (1)..(25): SEQ ID NO: 1084; WAN024FV6; Start 361; Stop 385
atttctgctctaattggctcgttag

SEQ ID NO: 282818 - DNA, 25 bp, Artificial
  probe
  misc_feature (1)..(25): SEQ ID NO: 1084; WAN024FV6; Start 58; Stop 82
gtttgggcaacatttagtgtgattg

SEQ ID NO: 282819 - DNA, 25 bp, Artificial
  probe
  misc_feature (1)..(25): SEQ ID NO: 1084; WAN024FV6; Start 57; Stop 81
agtttgggcaacatttagtgtgatt

SEQ ID NO: 282820 - DNA, 25 bp, Artificial
  probe
  misc_feature (1)..(25): SEQ ID NO: 1084; WAN024FV6; Start 56; Stop 80
aagtttgggcaacatttagtgtgat

SEQ ID NO: 282821 - DNA, 25 bp, Artificial
  probe
  misc_feature (1)..(25): SEQ ID NO: 1084; WAN024FV6; Start 756; Stop 780
gattaaatatcctcaactctggacg

SEQ ID NO: 282822 - DNA, 25 bp, Artificial
  probe
  misc_feature (1)..(25): SEQ ID NO: 1084; WAN024FV6; Start 755; Stop 779
cgattaaatatcctcaactctggac

SEQ ID NO: 282823 - DNA, 25 bp, Artificial
  probe
  misc_feature (1)..(25): SEQ ID NO: 1084; WAN024FV6; Start 55; Stop 79
aaagtttgggcaacatttagtgtga

SEQ ID NO: 282824 - DNA, 25 bp, Artificial
  probe
  misc_feature (1)..(25): SEQ ID NO: 1084; WAN024FV6; Start 347; Stop 371
tggtattcaatcaaatttctgctct

SEQ ID NO: 282825 - DNA, 25 bp, Artificial
  probe
  misc_feature (1)..(25): SEQ ID NO: 1084; WAN024FV6; Start 65; Stop 89
caacatttagtgtgattgctataca

SEQ ID NO: 282826 - DNA, 25 bp, Artificial
  probe
  misc_feature (1)..(25): SEQ ID NO: 1084; WAN024FV6; Start 753; Stop 777
ttcgattaaatatcctcaactctgg

SEQ ID NO: 282827 - DNA, 25 bp, Artificial
  probe
  misc_feature (1)..(25): SEQ ID NO: 1084; WAN024FV6; Start 475; Stop 499
actgtgatcatactctgttgttcat

SEQ ID NO: 282828 - DNA, 25 bp, Artificial
  probe
  misc_feature (1)..(25): SEQ ID NO: 1084; WAN024FV6; Start 472; Stop 496
ttgactgtgatcatactctgttgtt

SEQ ID NO: 282829 - DNA, 25 bp, Artificial
  probe
  misc_feature (1)..(25): SEQ ID NO: 1084; WAN024FV6; Start 283; Stop 307
ttaacacaaggaaatctaagagttg

SEQ ID NO: 282830 - DNA, 25 bp, Artificial
  probe
  misc_feature (1)..(25): SEQ ID NO: 1084; WAN024FV6; Start 474; Stop 498
gactgtgatcatactctgttgttca

SEQ ID NO: 282831 - DNA, 25 bp, Artificial
  probe
  misc_feature (1)..(25): SEQ ID NO: 1084; WAN024FV6; Start 473; Stop 497
tgactgtgatcatactctgttgttc

SEQ ID NO: 282832 - DNA, 25 bp, Artificial
  probe
  misc_feature (1)..(25): SEQ ID NO: 1084; WAN024FV6; Start 275; Stop 299
ttcttcaattaacacaaggaaatct

SEQ ID NO: 282833 - DNA, 25 bp, Artificial
  probe
  misc_feature (1)..(25): SEQ ID NO: 1084; WAN024FV6; Start 356; Stop 380
atcaaatttctgctctaattggctc

SEQ ID NO: 282834 - DNA, 25 bp, Artificial
  probe
  misc_feature (1)..(25): SEQ ID NO: 1084; WAN024FV6; Start 476; Stop 500
ctgtgatcatactctgttgttcatt

SEQ ID NO: 282835 - DNA, 25 bp, Artificial
  probe
  misc_feature (1)..(25): SEQ ID NO: 1084; WAN024FV6; Start 355; Stop 379
aatcaaatttctgctctaattggct

SEQ ID NO: 282836 - DNA, 25 bp, Artificial
  probe
  misc_feature (1)..(25): SEQ ID NO: 1084; WAN024FV6; Start 346; Stop 370
ttggtattcaatcaaatttctgctc

SEQ ID NO: 282837 - DNA, 25 bp, Artificial
  probe
  misc_feature (1)..(25): SEQ ID NO: 1084; WAN024FV6; Start 569; Stop 593
tttcttttgggatgtattttgctca

SEQ ID NO: 282838 - DNA, 25 bp, Artificial
  probe
  misc_feature (1)..(25): SEQ ID NO: 1084; WAN024FV6; Start 732; Stop 756
atcttgtatgcttatggtcttttcg

SEQ ID NO: 282839 - DNA, 25 bp, Artificial
  probe
  misc_feature (1)..(25): SEQ ID NO: 1084; WAN024FV6; Start 728; Stop 752
taatatcttgtatgcttatggtctt

SEQ ID NO: 282840 - DNA, 25 bp, Artificial
  probe
  misc_feature (1)..(25): SEQ ID NO: 1084; WAN024FV6; Start 754; Stop 778
tcgattaaatatcctcaactctgga

SEQ ID NO: 282841 - DNA, 25 bp, Artificial
  probe
  misc_feature (1)..(25): SEQ ID NO: 1084; WAN024FV6; Start 359; Stop 383
aaatttctgctctaattggctcgtt

SEQ ID NO: 282842 - DNA, 25 bp, Artificial
  probe
  misc_feature (1)..(25): SEQ ID NO: 1084; WAN024FV6; Start 644; Stop 668
ttggaattatgatttcaggatttct

SEQ ID NO: 282843 - DNA, 25 bp, Artificial
  probe
  misc_feature (1)..(25): SEQ ID NO: 1085; WAN024D5B; Start 321; Stop 345
atattgtgtggatacctctgtcaag

SEQ ID NO: 282844 - DNA, 25 bp, Artificial
  probe
  misc_feature (1)..(25): SEQ ID NO: 1085; WAN024D5B; Start 319; Stop 343
gaatattgtgtggatacctctgtca

SEQ ID NO: 282845 - DNA, 25 bp, Artificial
  probe
  misc_feature (1)..(25): SEQ ID NO: 1085; WAN024D5B; Start 318; Stop 342
agaatattgtgtggatacctctgtc

SEQ ID NO: 282846 - DNA, 25 bp, Artificial
  probe
  misc_feature (1)..(25): SEQ ID NO: 1085; WAN024D5B; Start 320; Stop 344
aatattgtgtggatacctctgtcaa

SEQ ID NO: 282847 - DNA, 25 bp, Artificial
  probe
  misc_feature (1)..(25): SEQ ID NO: 1085; WAN024D5B; Start 363; Stop 387
ctatcagcttattgttccagaaggt

SEQ ID NO: 282848 - DNA, 25 bp, Artificial
  probe
  misc_feature (1)..(25): SEQ ID NO: 1085; WAN024D5B; Start 364; Stop 388
tatcagcttattgttccagaaggtg

SEQ ID NO: 282849 - DNA, 25 bp, Artificial
  probe
  misc_feature (1)..(25): SEQ ID NO: 1085; WAN024D5B; Start 313; Stop 337
cagacagaatattgtgtggatacct

SEQ ID NO: 282850 - DNA, 25 bp, Artificial
  probe
  misc_feature (1)..(25): SEQ ID NO: 1085; WAN024D5B; Start 315; Stop 339
gacagaatattgtgtggatacctct

SEQ ID NO: 282851 - DNA, 25 bp, Artificial
  probe
  misc_feature (1)..(25): SEQ ID NO: 1085; WAN024D5B; Start 314; Stop 338
agacagaatattgtgtggatacctc

SEQ ID NO: 282852 - DNA, 25 bp, Artificial
  probe
  misc_feature (1)..(25): SEQ ID NO: 1085; WAN024D5B; Start 322; Stop 346
tattgtgtggatacctctgtcaagg

SEQ ID NO: 282853 - DNA, 25 bp, Artificial
  probe
  misc_feature (1)..(25): SEQ ID NO: 1085; WAN024D5B; Start 162; Stop 186
aacatcagaagattggcagttatct

SEQ ID NO: 282854 - DNA, 25 bp, Artificial
  probe
  misc_feature (1)..(25): SEQ ID NO: 1085; WAN024D5B; Start 161; Stop 185
aaacatcagaagattggcagttatc

SEQ ID NO: 282855 - DNA, 25 bp, Artificial
  probe
  misc_feature (1)..(25): SEQ ID NO: 1085; WAN024D5B; Start 160; Stop 184
caaacatcagaagattggcagttat

SEQ ID NO: 282856 - DNA, 25 bp, Artificial
  probe
  misc_feature (1)..(25): SEQ ID NO: 1085; WAN024D5B; Start 312; Stop 336
gcagacagaatattgtgtggatacc

SEQ ID NO: 282857 - DNA, 25 bp, Artificial
  probe
  misc_feature (1)..(25): SEQ ID NO: 1085; WAN024D5B; Start 410; Stop 434
atgacattccagcagaaacgattaa

SEQ ID NO: 282858 - DNA, 25 bp, Artificial
  probe
  misc_feature (1)..(25): SEQ ID NO: 1085; WAN024D5B; Start 159; Stop 183
tcaaacatcagaagattggcagtta

SEQ ID NO: 282859 - DNA, 25 bp, Artificial
  probe
  misc_feature (1)..(25): SEQ ID NO: 1085; WAN024D5B; Start 310; Stop 334
atgcagacagaatattgtgtggata

SEQ ID NO: 282860 - DNA, 25 bp, Artificial
  probe
  misc_feature (1)..(25): SEQ ID NO: 1085; WAN024D5B; Start 309; Stop 333
tatgcagacagaatattgtgtggat

SEQ ID NO: 282861 - DNA, 25 bp, Artificial
  probe
  misc_feature (1)..(25): SEQ ID NO: 1085; WAN024D5B; Start 303; Stop 327
atgtggtatgcagacagaatattgt

SEQ ID NO: 282862 - DNA, 25 bp, Artificial
  probe
  misc_feature (1)..(25): SEQ ID NO: 1085; WAN024D5B; Start 409; Stop 433
gatgacattccagcagaaacgatta

SEQ ID NO: 282863 - DNA, 25 bp, Artificial
  probe
  misc_feature (1)..(25): SEQ ID NO: 1085; WAN024D5B; Start 311; Stop 335
tgcagacagaatattgtgtggatac

SEQ ID NO: 282864 - DNA, 25 bp, Artificial
  probe
  misc_feature (1)..(25): SEQ ID NO: 1085; WAN024D5B; Start 308; Stop 332
gtatgcagacagaatattgtgtgga

SEQ ID NO: 282865 - DNA, 25 bp, Artificial
  probe
  misc_feature (1)..(25): SEQ ID NO: 1085; WAN024D5B; Start 306; Stop 330
tggtatgcagacagaatattgtgtg

SEQ ID NO: 282866 - DNA, 25 bp, Artificial
  probe
  misc_feature (1)..(25): SEQ ID NO: 1085; WAN024D5B; Start 305; Stop 329
gtggtatgcagacagaatattgtgt

SEQ ID NO: 282867 - DNA, 25 bp, Artificial
  probe
  misc_feature (1)..(25): SEQ ID NO: 1085; WAN024D5B; Start 304; Stop 328
tgtggtatgcagacagaatattgtg

SEQ ID NO: 282868 - DNA, 25 bp, Artificial
  probe
  misc_feature (1)..(25): SEQ ID NO: 1085; WAN024D5B; Start 302; Stop 326
tatgtggtatgcagacagaatattg

SEQ ID NO: 282869 - DNA, 25 bp, Artificial
  probe
  misc_feature (1)..(25): SEQ ID NO: 1085; WAN024D5B; Start 158; Stop 182
ctcaaacatcagaagattggcagtt

SEQ ID NO: 282870 - DNA, 25 bp, Artificial
  probe
  misc_feature (1)..(25): SEQ ID NO: 1085; WAN024D5B; Start 370; Stop 394
cttattgttccagaaggtgctgtca

SEQ ID NO: 282871 - DNA, 25 bp, Artificial
  probe
  misc_feature (1)..(25): SEQ ID NO: 1085; WAN024D5B; Start 417; Stop 441
tccagcagaaacgattaatgaattt

SEQ ID NO: 282872 - DNA, 25 bp, Artificial
  probe
  misc_feature (1)..(25): SEQ ID NO: 1085; WAN024D5B; Start 307; Stop 331
ggtatgcagacagaatattgtgtgg

SEQ ID NO: 282873 - DNA, 25 bp, Artificial
  probe
  misc_feature (1)..(25): SEQ ID NO: 1085; WAN024D5B; Start 99; Stop 123
ccaggctagaagcaagaatattgaa

SEQ ID NO: 282874 - DNA, 25 bp, Artificial
  probe
  misc_feature (1)..(25): SEQ ID NO: 1085; WAN024D5B; Start 416; Stop 440
ttccagcagaaacgattaatgaatt

SEQ ID NO: 282875 - DNA, 25 bp, Artificial
  probe
  misc_feature (1)..(25): SEQ ID NO: 1085; WAN024D5B; Start 357; Stop 381
atatggctatcagcttattgttcca

SEQ ID NO: 282876 - DNA, 25 bp, Artificial
  probe
  misc_feature (1)..(25): SEQ ID NO: 1086; WAN024FSP; Start 146; Stop 170
tgcttcctatactgattgttaatgc

SEQ ID NO: 282877 - DNA, 25 bp, Artificial
  probe
  misc_feature (1)..(25): SEQ ID NO: 1086; WAN024FSP; Start 147; Stop 171
gcttcctatactgattgttaatgct

SEQ ID NO: 282878 - DNA, 25 bp, Artificial
  probe
  misc_feature (1)..(25): SEQ ID NO: 1086; WAN024FSP; Start 945; Stop 969
gccaagtgctgttaagatgtatcta

SEQ ID NO: 282879 - DNA, 25 bp, Artificial
  probe
  misc_feature (1)..(25): SEQ ID NO: 1086; WAN024FSP; Start 946; Stop 970
ccaagtgctgttaagatgtatctag

SEQ ID NO: 282880 - DNA, 25 bp, Artificial
  probe
  misc_feature (1)..(25): SEQ ID NO: 1086; WAN024FSP; Start 821; Stop 845
tgggattaggatttagatactggga

SEQ ID NO: 282881 - DNA, 25 bp, Artificial
  probe
  misc_feature (1)..(25): SEQ ID NO: 1086; WAN024FSP; Start 820; Stop 844
ctgggattaggatttagatactggg

SEQ ID NO: 282882 - DNA, 25 bp, Artificial
  probe
  misc_feature (1)..(25): SEQ ID NO: 1086; WAN024FSP; Start 759; Stop 783
ttatggaggtggattggattatatt

SEQ ID NO: 282883 - DNA, 25 bp, Artificial
  probe
  misc_feature (1)..(25): SEQ ID NO: 1086; WAN024FSP; Start 822; Stop 846
gggattaggatttagatactgggag

SEQ ID NO: 282884 - DNA, 25 bp, Artificial
  probe
  misc_feature (1)..(25): SEQ ID NO: 1086; WAN024FSP; Start 761; Stop 785
atggaggtggattggattatattaa

SEQ ID NO: 282885 - DNA, 25 bp, Artificial
  probe
  misc_feature (1)..(25): SEQ ID NO: 1086; WAN024FSP; Start 756; Stop 780
cgtttatggaggtggattggattat

SEQ ID NO: 282886 - DNA, 25 bp, Artificial
  probe
  misc_feature (1)..(25): SEQ ID NO: 1086; WAN024FSP; Start 989; Stop 1013
agttattcgttcaatttggtgtagc

SEQ ID NO: 282887 - DNA, 25 bp, Artificial
  probe
  misc_feature (1)..(25): SEQ ID NO: 1086; WAN024FSP; Start 746; Stop 770
ttatagcattcgtttatggaggtgg

SEQ ID NO: 282888 - DNA, 25 bp, Artificial
  probe
  misc_feature (1)..(25): SEQ ID NO: 1086; WAN024FSP; Start 51; Stop 75
gatgttatcagtgggaatgtttctt

SEQ ID NO: 282889 - DNA, 25 bp, Artificial
  probe
  misc_feature (1)..(25): SEQ ID NO: 1086; WAN024FSP; Start 145; Stop 169
atgcttcctatactgattgttaatg

SEQ ID NO: 282890 - DNA, 25 bp, Artificial
  probe
  misc_feature (1)..(25): SEQ ID NO: 1086; WAN024FSP; Start 60; Stop 84
agtgggaatgtttcttatgtttacc

SEQ ID NO: 282891 - DNA, 25 bp, Artificial
  probe
  misc_feature (1)..(25): SEQ ID NO: 1086; WAN024FSP; Start 990; Stop 1014
gttattcgttcaatttggtgtagcc

SEQ ID NO: 282892 - DNA, 25 bp, Artificial
  probe
  misc_feature (1)..(25): SEQ ID NO: 1086; WAN024FSP; Start 745; Stop 769
attatagcattcgtttatggaggtg

SEQ ID NO: 282893 - DNA, 25 bp, Artificial
  probe
  misc_feature (1)..(25): SEQ ID NO: 1086; WAN024FSP; Start 64; Stop 88
ggaatgtttcttatgtttaccctca

SEQ ID NO: 282894 - DNA, 25 bp, Artificial
  probe
  misc_feature (1)..(25): SEQ ID NO: 1086; WAN024FSP; Start 57; Stop 81
atcagtgggaatgtttcttatgttt

SEQ ID NO: 282895 - DNA, 25 bp, Artificial
  probe
  misc_feature (1)..(25): SEQ ID NO: 1086; WAN024FSP; Start 755; Stop 779
tcgtttatggaggtggattggatta

SEQ ID NO: 282896 - DNA, 25 bp, Artificial
  probe
  misc_feature (1)..(25): SEQ ID NO: 1086; WAN024FSP; Start 842; Stop 866
gggagttgaaatactatctgggttt

SEQ ID NO: 282897 - DNA, 25 bp, Artificial
  probe
  misc_feature (1)..(25): SEQ ID NO: 1086; WAN024FSP; Start 987; Stop 1011
agagttattcgttcaatttggtgta

SEQ ID NO: 282898 - DNA, 25 bp, Artificial
  probe
  misc_feature (1)..(25): SEQ ID NO: 1086; WAN024FSP; Start 986; Stop 1010
tagagttattcgttcaatttggtgt

SEQ ID NO: 282899 - DNA, 25 bp, Artificial
  probe
  misc_feature (1)..(25): SEQ ID NO: 1086; WAN024FSP; Start 507; Stop 531
ttcagtacgaatagatggaacacca

SEQ ID NO: 282900 - DNA, 25 bp, Artificial
  probe
  misc_feature (1)..(25): SEQ ID NO: 1086; WAN024FSP; Start 747; Stop 771
tatagcattcgtttatggaggtgga

SEQ ID NO: 282901 - DNA, 25 bp, Artificial
  probe
  misc_feature (1)..(25): SEQ ID NO: 1086; WAN024FSP; Start 838; Stop 862
tactgggagttgaaatactatctgg

SEQ ID NO: 282902 - DNA, 25 bp, Artificial
  probe
  misc_feature (1)..(25): SEQ ID NO: 1086; WAN024FSP; Start 819; Stop 843
tctgggattaggatttagatactgg

SEQ ID NO: 282903 - DNA, 25 bp, Artificial
  probe
  misc_feature (1)..(25): SEQ ID NO: 1086; WAN024FSP; Start 808; Stop 832
ggaacatttgatctgggattaggat

SEQ ID NO: 282904 - DNA, 25 bp, Artificial
  probe
  misc_feature (1)..(25): SEQ ID NO: 1086; WAN024FSP; Start 988; Stop 1012
gagttattcgttcaatttggtgtag

SEQ ID NO: 282905 - DNA, 25 bp, Artificial
  probe
  misc_feature (1)..(25): SEQ ID NO: 1086; WAN024FSP; Start 828; Stop 852
aggatttagatactgggagttgaaa

SEQ ID NO: 282906 - DNA, 25 bp, Artificial
  probe
  misc_feature (1)..(25): SEQ ID NO: 1086; WAN024FSP; Start 841; Stop 865
tgggagttgaaatactatctgggtt

SEQ ID NO: 282907 - DNA, 25 bp, Artificial
  probe
  misc_feature (1)..(25): SEQ ID NO: 1086; WAN024FSP; Start 59; Stop 83
cagtgggaatgtttcttatgtttac

SEQ ID NO: 282908 - DNA, 25 bp, Artificial
  probe
  misc_feature (1)..(25): SEQ ID NO: 1086; WAN024FSP; Start 58; Stop 82
tcagtgggaatgtttcttatgttta

SEQ ID NO: 282909 - DNA, 25 bp, Artificial
  probe
  misc_feature (1)..(25): SEQ ID NO: 1087; WAN024BHO; Start 146; Stop 170
tccttatgagaatggagtggttgaa

SEQ ID NO: 282910 - DNA, 25 bp, Artificial
  probe
  misc_feature (1)..(25): SEQ ID NO: 1087; WAN024BHO; Start 145; Stop 169
ttccttatgagaatggagtggttga

SEQ ID NO: 282911 - DNA, 25 bp, Artificial
  probe
  misc_feature (1)..(25): SEQ ID NO: 1087; WAN024BHO; Start 156; Stop 180
aatggagtggttgaaaggagaatat

SEQ ID NO: 282912 - DNA, 25 bp, Artificial
  probe
  misc_feature (1)..(25): SEQ ID NO: 1087; WAN024BHO; Start 157; Stop 181
atggagtggttgaaaggagaatatc

SEQ ID NO: 282913 - DNA, 25 bp, Artificial
  probe
  misc_feature (1)..(25): SEQ ID NO: 1087; WAN024BHO; Start 155; Stop 179
gaatggagtggttgaaaggagaata

SEQ ID NO: 282914 - DNA, 25 bp, Artificial
  probe
  misc_feature (1)..(25): SEQ ID NO: 1087; WAN024BHO; Start 149; Stop 173
ttatgagaatggagtggttgaaagg

SEQ ID NO: 282915 - DNA, 25 bp, Artificial
  probe
  misc_feature (1)..(25): SEQ ID NO: 1087; WAN024BHO; Start 147; Stop 171
ccttatgagaatggagtggttgaaa

SEQ ID NO: 282916 - DNA, 25 bp, Artificial
  probe
  misc_feature (1)..(25): SEQ ID NO: 1087; WAN024BHO; Start 51; Stop 75
gttagtggaaatgtttacaggttgg

SEQ ID NO: 282917 - DNA, 25 bp, Artificial
  probe
  misc_feature (1)..(25): SEQ ID NO: 1087; WAN024BHO; Start 50; Stop 74
ggttagtggaaatgtttacaggttg

SEQ ID NO: 282918 - DNA, 25 bp, Artificial
  probe
  misc_feature (1)..(25): SEQ ID NO: 1087; WAN024BHO; Start 48; Stop 72
atggttagtggaaatgtttacaggt

SEQ ID NO: 282919 - DNA, 25 bp, Artificial
  probe
  misc_feature (1)..(25): SEQ ID NO: 1087; WAN024BHO; Start 53; Stop 77
tagtggaaatgtttacaggttggtt

SEQ ID NO: 282920 - DNA, 25 bp, Artificial
  probe
  misc_feature (1)..(25): SEQ ID NO: 1087; WAN024BHO; Start 52; Stop 76
ttagtggaaatgtttacaggttggt

SEQ ID NO: 282921 - DNA, 25 bp, Artificial
  probe
  misc_feature (1)..(25): SEQ ID NO: 1087; WAN024BHO; Start 49; Stop 73
tggttagtggaaatgtttacaggtt

SEQ ID NO: 282922 - DNA, 25 bp, Artificial
  probe
  misc_feature (1)..(25): SEQ ID NO: 1087; WAN024BHO; Start 148; Stop 172
cttatgagaatggagtggttgaaag

SEQ ID NO: 282923 - DNA, 25 bp, Artificial
  probe
  misc_feature (1)..(25): SEQ ID NO: 1087; WAN024BHO; Start 57; Stop 81
ggaaatgtttacaggttggtttgac

SEQ ID NO: 282924 - DNA, 25 bp, Artificial
  probe
  misc_feature (1)..(25): SEQ ID NO: 1087; WAN024BHO; Start 45; Stop 69
ggtatggttagtggaaatgtttaca

SEQ ID NO: 282925 - DNA, 25 bp, Artificial
  probe
  misc_feature (1)..(25): SEQ ID NO: 1087; WAN024BHO; Start 150; Stop 174
tatgagaatggagtggttgaaagga

SEQ ID NO: 282926 - DNA, 25 bp, Artificial
  probe
  misc_feature (1)..(25): SEQ ID NO: 1087; WAN024BHO; Start 56; Stop 80
tggaaatgtttacaggttggtttga

SEQ ID NO: 282927 - DNA, 25 bp, Artificial
  probe
  misc_feature (1)..(25): SEQ ID NO: 1087; WAN024BHO; Start 55; Stop 79
gtggaaatgtttacaggttggtttg

SEQ ID NO: 282928 - DNA, 25 bp, Artificial
  probe
  misc_feature (1)..(25): SEQ ID NO: 1087; WAN024BHO; Start 54; Stop 78
agtggaaatgtttacaggttggttt

SEQ ID NO: 282929 - DNA, 25 bp, Artificial
  probe
  misc_feature (1)..(25): SEQ ID NO: 1087; WAN024BHO; Start 159; Stop 183
ggagtggttgaaaggagaatatcat

SEQ ID NO: 282930 - DNA, 25 bp, Artificial
  probe
  misc_feature (1)..(25): SEQ ID NO: 1087; WAN024BHO; Start 47; Stop 71
tatggttagtggaaatgtttacagg

SEQ ID NO: 282931 - DNA, 25 bp, Artificial
  probe
  misc_feature (1)..(25): SEQ ID NO: 1087; WAN024BHO; Start 154; Stop 178
agaatggagtggttgaaaggagaat

SEQ ID NO: 282932 - DNA, 25 bp, Artificial
  probe
  misc_feature (1)..(25): SEQ ID NO: 1087; WAN024BHO; Start 158; Stop 182
tggagtggttgaaaggagaatatca

SEQ ID NO: 282933 - DNA, 25 bp, Artificial
  probe
  misc_feature (1)..(25): SEQ ID NO: 1087; WAN024BHO; Start 46; Stop 70
gtatggttagtggaaatgtttacag

SEQ ID NO: 282934 - DNA, 25 bp, Artificial
  probe
  misc_feature (1)..(25): SEQ ID NO: 1087; WAN024BHO; Start 160; Stop 184
gagtggttgaaaggagaatatcatg

SEQ ID NO: 282935 - DNA, 25 bp, Artificial
  probe
  misc_feature (1)..(25): SEQ ID NO: 1087; WAN024BHO; Start 153; Stop 177
gagaatggagtggttgaaaggagaa

SEQ ID NO: 282936 - DNA, 25 bp, Artificial
  probe
  misc_feature (1)..(25): SEQ ID NO: 1087; WAN024BHO; Start 151; Stop 175
atgagaatggagtggttgaaaggag

SEQ ID NO: 282937 - DNA, 25 bp, Artificial
  probe
  misc_feature (1)..(25): SEQ ID NO: 1087; WAN024BHO; Start 144; Stop 168
tttccttatgagaatggagtggttg

SEQ ID NO: 282938 - DNA, 25 bp, Artificial
  probe
  misc_feature (1)..(25): SEQ ID NO: 1087; WAN024BHO; Start 58; Stop 82
gaaatgtttacaggttggtttgacc

SEQ ID NO: 282939 - DNA, 25 bp, Artificial
  probe
  misc_feature (1)..(25): SEQ ID NO: 1087; WAN024BHO; Start 152; Stop 176
tgagaatggagtggttgaaaggaga

SEQ ID NO: 282940 - DNA, 25 bp, Artificial
  probe
  misc_feature (1)..(25): SEQ ID NO: 1087; WAN024BHO; Start 132; Stop 156
gattttcgtcgttttccttatgaga

SEQ ID NO: 282941 - DNA, 25 bp, Artificial
  probe
  misc_feature (1)..(25): SEQ ID NO: 1087; WAN024BHO; Start 131; Stop 155
tgattttcgtcgttttccttatgag

SEQ ID NO: 282942 - DNA, 25 bp, Artificial
  probe
  misc_feature (1)..(25): SEQ ID NO: 1088; WAN024BHN; Start 56; Stop 80
tggaaatgtttactgattggtttga

SEQ ID NO: 282943 - DNA, 25 bp, Artificial
  probe
  misc_feature (1)..(25): SEQ ID NO: 1088; WAN024BHN; Start 55; Stop 79
gtggaaatgtttactgattggtttg

SEQ ID NO: 282944 - DNA, 25 bp, Artificial
  probe
  misc_feature (1)..(25): SEQ ID NO: 1088; WAN024BHN; Start 54; Stop 78
agtggaaatgtttactgattggttt

SEQ ID NO: 282945 - DNA, 25 bp, Artificial
  probe
  misc_feature (1)..(25): SEQ ID NO: 1088; WAN024BHN; Start 57; Stop 81
ggaaatgtttactgattggtttgat

SEQ ID NO: 282946 - DNA, 25 bp, Artificial
  probe
  misc_feature (1)..(25): SEQ ID NO: 1088; WAN024BHN; Start 45; Stop 69
ggtatggttagtggaaatgtttact

SEQ ID NO: 282947 - DNA, 25 bp, Artificial
  probe
  misc_feature (1)..(25): SEQ ID NO: 1088; WAN024BHN; Start 53; Stop 77
tagtggaaatgtttactgattggtt

SEQ ID NO: 282948 - DNA, 25 bp, Artificial
  probe
  misc_feature (1)..(25): SEQ ID NO: 1088; WAN024BHN; Start 52; Stop 76
ttagtggaaatgtttactgattggt

SEQ ID NO: 282949 - DNA, 25 bp, Artificial
  probe
  misc_feature (1)..(25): SEQ ID NO: 1088; WAN024BHN; Start 49; Stop 73
tggttagtggaaatgtttactgatt

SEQ ID NO: 282950 - DNA, 25 bp, Artificial
  probe
  misc_feature (1)..(25): SEQ ID NO: 1088; WAN024BHN; Start 51; Stop 75
gttagtggaaatgtttactgattgg

SEQ ID NO: 282951 - DNA, 25 bp, Artificial
  probe
  misc_feature (1)..(25): SEQ ID NO: 1088; WAN024BHN; Start 50; Stop 74
ggttagtggaaatgtttactgattg

SEQ ID NO: 282952 - DNA, 25 bp, Artificial
  probe
  misc_feature (1)..(25): SEQ ID NO: 1088; WAN024BHN; Start 48; Stop 72
atggttagtggaaatgtttactgat

SEQ ID NO: 282953 - DNA, 25 bp, Artificial
  probe
  misc_feature (1)..(25): SEQ ID NO: 1088; WAN024BHN; Start 47; Stop 71
tatggttagtggaaatgtttactga

SEQ ID NO: 282954 - DNA, 25 bp, Artificial
  probe
  misc_feature (1)..(25): SEQ ID NO: 1088; WAN024BHN; Start 46; Stop 70
gtatggttagtggaaatgtttactg

SEQ ID NO: 282955 - DNA, 25 bp, Artificial
  probe
  misc_feature (1)..(25): SEQ ID NO: 1088; WAN024BHN; Start 58; Stop 82
gaaatgtttactgattggtttgatc

SEQ ID NO: 282956 - DNA, 25 bp, Artificial
  probe
  misc_feature (1)..(25): SEQ ID NO: 1088; WAN024BHN; Start 156; Stop 180
aatggagtggttgaaaggagagtct

SEQ ID NO: 282957 - DNA, 25 bp, Artificial
  probe
  misc_feature (1)..(25): SEQ ID NO: 1088; WAN024BHN; Start 160; Stop 184
gagtggttgaaaggagagtctcatg

SEQ ID NO: 282958 - DNA, 25 bp, Artificial
  probe
  misc_feature (1)..(25): SEQ ID NO: 1088; WAN024BHN; Start 159; Stop 183
ggagtggttgaaaggagagtctcat

SEQ ID NO: 282959 - DNA, 25 bp, Artificial
  probe
  misc_feature (1)..(25): SEQ ID NO: 1088; WAN024BHN; Start 157; Stop 181
atggagtggttgaaaggagagtctc

SEQ ID NO: 282960 - DNA, 25 bp, Artificial
  probe
  misc_feature (1)..(25): SEQ ID NO: 1088; WAN024BHN; Start 161; Stop 185
agtggttgaaaggagagtctcatga

SEQ ID NO: 282961 - DNA, 25 bp, Artificial
  probe
  misc_feature (1)..(25): SEQ ID NO: 1088; WAN024BHN; Start 162; Stop 186
gtggttgaaaggagagtctcatgac

SEQ ID NO: 282962 - DNA, 25 bp, Artificial
  probe
  misc_feature (1)..(25): SEQ ID NO: 1088; WAN024BHN; Start 158; Stop 182
tggagtggttgaaaggagagtctca

SEQ ID NO: 282963 - DNA, 25 bp, Artificial
  probe
  misc_feature (1)..(25): SEQ ID NO: 1088; WAN024BHN; Start 59; Stop 83
aaatgtttactgattggtttgatca

SEQ ID NO: 282964 - DNA, 25 bp, Artificial
  probe
  misc_feature (1)..(25): SEQ ID NO: 1088; WAN024BHN; Start 166; Stop 190
ttgaaaggagagtctcatgacggtg

SEQ ID NO: 282965 - DNA, 25 bp, Artificial
  probe
  misc_feature (1)..(25): SEQ ID NO: 1088; WAN024BHN; Start 165; Stop 189
gttgaaaggagagtctcatgacggt

SEQ ID NO: 282966 - DNA, 25 bp, Artificial
  probe
  misc_feature (1)..(25): SEQ ID NO: 1088; WAN024BHN; Start 163; Stop 187
tggttgaaaggagagtctcatgacg

SEQ ID NO: 282967 - DNA, 25 bp, Artificial
  probe
  misc_feature (1)..(25): SEQ ID NO: 1088; WAN024BHN; Start 164; Stop 188
ggttgaaaggagagtctcatgacgg

SEQ ID NO: 282968 - DNA, 25 bp, Artificial
  probe
  misc_feature (1)..(25): SEQ ID NO: 1089; WAN024F26; Start 23; Stop 47
ggttattagaagaacagtctgctag

SEQ ID NO: 282969 - DNA, 25 bp, Artificial
  probe
  misc_feature (1)..(25): SEQ ID NO: 1089; WAN024F26; Start 24; Stop 48
gttattagaagaacagtctgctagt

SEQ ID NO: 282970 - DNA, 25 bp, Artificial
  probe
  misc_feature (1)..(25): SEQ ID NO: 1089; WAN024F26; Start 220; Stop 244
gtaatcttgaccacttcgctatttc

SEQ ID NO: 282971 - DNA, 25 bp, Artificial
  probe
  misc_feature (1)..(25): SEQ ID NO: 1089; WAN024F26; Start 276; Stop 300
tggatttgggtgtttaactgagata

SEQ ID NO: 282972 - DNA, 25 bp, Artificial
  probe
  misc_feature (1)..(25): SEQ ID NO: 1089; WAN024F26; Start 221; Stop 245
taatcttgaccacttcgctatttcc

SEQ ID NO: 282973 - DNA, 25 bp, Artificial
  probe
  misc_feature (1)..(25): SEQ ID NO: 1089; WAN024F26; Start 12; Stop 36
tgtttcagcagggttattagaagaa

SEQ ID NO: 282974 - DNA, 25 bp, Artificial
  probe
  misc_feature (1)..(25): SEQ ID NO: 1089; WAN024F26; Start 14; Stop 38
tttcagcagggttattagaagaaca

SEQ ID NO: 282975 - DNA, 25 bp, Artificial
  probe
  misc_feature (1)..(25): SEQ ID NO: 1089; WAN024F26; Start 13; Stop 37
gtttcagcagggttattagaagaac

SEQ ID NO: 282976 - DNA, 25 bp, Artificial
  probe
  misc_feature (1)..(25): SEQ ID NO: 1089; WAN024F26; Start 277; Stop 301
ggatttgggtgtttaactgagataa

SEQ ID NO: 282977 - DNA, 25 bp, Artificial
  probe
  misc_feature (1)..(25): SEQ ID NO: 1089; WAN024F26; Start 25; Stop 49
ttattagaagaacagtctgctagtt

SEQ ID NO: 282978 - DNA, 25 bp, Artificial
  probe
  misc_feature (1)..(25): SEQ ID NO: 1089; WAN024F26; Start 15; Stop 39
ttcagcagggttattagaagaacag

SEQ ID NO: 282979 - DNA, 25 bp, Artificial
  probe
  misc_feature (1)..(25): SEQ ID NO: 1089; WAN024F26; Start 275; Stop 299
gtggatttgggtgtttaactgagat

SEQ ID NO: 282980 - DNA, 25 bp, Artificial
  probe
  misc_feature (1)..(25): SEQ ID NO: 1089; WAN024F26; Start 22; Stop 46
gggttattagaagaacagtctgcta

SEQ ID NO: 282981 - DNA, 25 bp, Artificial
  probe
  misc_feature (1)..(25): SEQ ID NO: 1089; WAN024F26; Start 280; Stop 304
tttgggtgtttaactgagataactg

SEQ ID NO: 282982 - DNA, 25 bp, Artificial
  probe
  misc_feature (1)..(25): SEQ ID NO: 1089; WAN024F26; Start 18; Stop 42
agcagggttattagaagaacagtct

SEQ ID NO: 282983 - DNA, 25 bp, Artificial
  probe
  misc_feature (1)..(25): SEQ ID NO: 1089; WAN024F26; Start 17; Stop 41
cagcagggttattagaagaacagtc

SEQ ID NO: 282984 - DNA, 25 bp, Artificial
  probe
  misc_feature (1)..(25): SEQ ID NO: 1089; WAN024F26; Start 28; Stop 52
ttagaagaacagtctgctagtttcc

SEQ ID NO: 282985 - DNA, 25 bp, Artificial
  probe
  misc_feature (1)..(25): SEQ ID NO: 1089; WAN024F26; Start 281; Stop 305
ttgggtgtttaactgagataactgc

SEQ ID NO: 282986 - DNA, 25 bp, Artificial
  probe
  misc_feature (1)..(25): SEQ ID NO: 1089; WAN024F26; Start 21; Stop 45
agggttattagaagaacagtctgct

SEQ ID NO: 282987 - DNA, 25 bp, Artificial
  probe
  misc_feature (1)..(25): SEQ ID NO: 1089; WAN024F26; Start 16; Stop 40
tcagcagggttattagaagaacagt

SEQ ID NO: 282988 - DNA, 25 bp, Artificial
  probe
  misc_feature (1)..(25): SEQ ID NO: 1089; WAN024F26; Start 279; Stop 303
atttgggtgtttaactgagataact

SEQ ID NO: 282989 - DNA, 25 bp, Artificial
  probe
  misc_feature (1)..(25): SEQ ID NO: 1089; WAN024F26; Start 273; Stop 297
ctgtggatttgggtgtttaactgag

SEQ ID NO: 282990 - DNA, 25 bp, Artificial
  probe
  misc_feature (1)..(25): SEQ ID NO: 1089; WAN024F26; Start 11; Stop 35
ctgtttcagcagggttattagaaga

SEQ ID NO: 282991 - DNA, 25 bp, Artificial
  probe
  misc_feature (1)..(25): SEQ ID NO: 1089; WAN024F26; Start 10; Stop 34
tctgtttcagcagggttattagaag

SEQ ID NO: 282992 - DNA, 25 bp, Artificial
  probe
  misc_feature (1)..(25): SEQ ID NO: 1089; WAN024F26; Start 278; Stop 302
gatttgggtgtttaactgagataac

SEQ ID NO: 282993 - DNA, 25 bp, Artificial
  probe
  misc_feature (1)..(25): SEQ ID NO: 1089; WAN024F26; Start 271; Stop 295
aactgtggatttgggtgtttaactg

SEQ ID NO: 282994 - DNA, 25 bp, Artificial
  probe
  misc_feature (1)..(25): SEQ ID NO: 1089; WAN024F26; Start 27; Stop 51
attagaagaacagtctgctagtttc

SEQ ID NO: 282995 - DNA, 25 bp, Artificial
  probe
  misc_feature (1)..(25): SEQ ID NO: 1089; WAN024F26; Start 8; Stop 32
gttctgtttcagcagggttattaga

SEQ ID NO: 282996 - DNA, 25 bp, Artificial
  probe
  misc_feature (1)..(25): SEQ ID NO: 1089; WAN024F26; Start 7; Stop 31
agttctgtttcagcagggttattag

SEQ ID NO: 282997 - DNA, 25 bp, Artificial
  probe
  misc_feature (1)..(25): SEQ ID NO: 1089; WAN024F26; Start 6; Stop 30
gagttctgtttcagcagggttatta

SEQ ID NO: 282998 - DNA, 25 bp, Artificial
  probe
  misc_feature (1)..(25): SEQ ID NO: 1089; WAN024F26; Start 29; Stop 53
tagaagaacagtctgctagtttccc

SEQ ID NO: 282999 - DNA, 25 bp, Artificial
  probe
  misc_feature (1)..(25): SEQ ID NO: 1089; WAN024F26; Start 20; Stop 44
cagggttattagaagaacagtctgc

SEQ ID NO: 283000 - DNA, 25 bp, Artificial
  probe
  misc_feature (1)..(25): SEQ ID NO: 1089; WAN024F26; Start 19; Stop 43
gcagggttattagaagaacagtctg

SEQ ID NO: 283001 - DNA, 25 bp, Artificial
  probe
  misc_feature (1)..(25): SEQ ID NO: 1090; WAN024CMW; Start 19; Stop 43
acattattgaaaatcgttgctgaga

SEQ ID NO: 283002 - DNA, 25 bp, Artificial
  probe
  misc_feature (1)..(25): SEQ ID NO: 1090; WAN024CMW; Start 20; Stop 44
cattattgaaaatcgttgctgagat

SEQ ID NO: 283003 - DNA, 25 bp, Artificial
  probe
  misc_feature (1)..(25): SEQ ID NO: 1090; WAN024CMW; Start 36; Stop 60
tgctgagattattattattttgcca

SEQ ID NO: 283004 - DNA, 25 bp, Artificial
  probe
  misc_feature (1)..(25): SEQ ID NO: 1090; WAN024CMW; Start 24; Stop 48
attgaaaatcgttgctgagattatt

SEQ ID NO: 283005 - DNA, 25 bp, Artificial
  probe
  misc_feature (1)..(25): SEQ ID NO: 1090; WAN024CMW; Start 21; Stop 45
attattgaaaatcgttgctgagatt

SEQ ID NO: 283006 - DNA, 25 bp, Artificial
  probe
  misc_feature (1)..(25): SEQ ID NO: 1090; WAN024CMW; Start 30; Stop 54
aatcgttgctgagattattattatt

SEQ ID NO: 283007 - DNA, 25 bp, Artificial
  probe
  misc_feature (1)..(25): SEQ ID NO: 1090; WAN024CMW; Start 25; Stop 49
ttgaaaatcgttgctgagattatta

SEQ ID NO: 283008 - DNA, 25 bp, Artificial
  probe
  misc_feature (1)..(25): SEQ ID NO: 1090; WAN024CMW; Start 22; Stop 46
ttattgaaaatcgttgctgagatta

SEQ ID NO: 283009 - DNA, 25 bp, Artificial
  probe
  misc_feature (1)..(25): SEQ ID NO: 1090; WAN024CMW; Start 35; Stop 59
ttgctgagattattattattttgcc

SEQ ID NO: 283010 - DNA, 25 bp, Artificial
  probe
  misc_feature (1)..(25): SEQ ID NO: 1090; WAN024CMW; Start 31; Stop 55
atcgttgctgagattattattattt

SEQ ID NO: 283011 - DNA, 25 bp, Artificial
  probe
  misc_feature (1)..(25): SEQ ID NO: 1090; WAN024CMW; Start 26; Stop 50
tgaaaatcgttgctgagattattat

SEQ ID NO: 283012 - DNA, 25 bp, Artificial
  probe
  misc_feature (1)..(25): SEQ ID NO: 1090; WAN024CMW; Start 23; Stop 47
tattgaaaatcgttgctgagattat

SEQ ID NO: 283013 - DNA, 25 bp, Artificial
  probe
  misc_feature (1)..(25): SEQ ID NO: 1090; WAN024CMW; Start 37; Stop 61
gctgagattattattattttgccat

SEQ ID NO: 283014 - DNA, 25 bp, Artificial
  probe
  misc_feature (1)..(25): SEQ ID NO: 1090; WAN024CMW; Start 27; Stop 51
gaaaatcgttgctgagattattatt

SEQ ID NO: 283015 - DNA, 25 bp, Artificial
  probe
  misc_feature (1)..(25): SEQ ID NO: 1090; WAN024CMW; Start 34; Stop 58
gttgctgagattattattattttgc

SEQ ID NO: 283016 - DNA, 25 bp, Artificial
  probe
  misc_feature (1)..(25): SEQ ID NO: 1090; WAN024CMW; Start 29; Stop 53
aaatcgttgctgagattattattat

SEQ ID NO: 283017 - DNA, 25 bp, Artificial
  probe
  misc_feature (1)..(25): SEQ ID NO: 1090; WAN024CMW; Start 33; Stop 57
cgttgctgagattattattattttg

SEQ ID NO: 283018 - DNA, 25 bp, Artificial
  probe
  misc_feature (1)..(25): SEQ ID NO: 1090; WAN024CMW; Start 32; Stop 56
tcgttgctgagattattattatttt

SEQ ID NO: 283019 - DNA, 25 bp, Artificial
  probe
  misc_feature (1)..(25): SEQ ID NO: 1090; WAN024CMW; Start 28; Stop 52
aaaatcgttgctgagattattatta

SEQ ID NO: 283020 - DNA, 25 bp, Artificial
  probe
  misc_feature (1)..(25): SEQ ID NO: 1091; WAN024EXE; Start 420; Stop 444
caatcaagcctatccttctatcgtt

SEQ ID NO: 283021 - DNA, 25 bp, Artificial
  probe
  misc_feature (1)..(25): SEQ ID NO: 1091; WAN024EXE; Start 421; Stop 445
aatcaagcctatccttctatcgtta

SEQ ID NO: 283022 - DNA, 25 bp, Artificial
  probe
  misc_feature (1)..(25): SEQ ID NO: 1091; WAN024EXE; Start 422; Stop 446
atcaagcctatccttctatcgttaa

SEQ ID NO: 283023 - DNA, 25 bp, Artificial
  probe
  misc_feature (1)..(25): SEQ ID NO: 1091; WAN024EXE; Start 419; Stop 443
ccaatcaagcctatccttctatcgt

SEQ ID NO: 283024 - DNA, 25 bp, Artificial
  probe
  misc_feature (1)..(25): SEQ ID NO: 1091; WAN024EXE; Start 581; Stop 605
aaccagtcttagaagaactcagtca

SEQ ID NO: 283025 - DNA, 25 bp, Artificial
  probe
  misc_feature (1)..(25): SEQ ID NO: 1091; WAN024EXE; Start 416; Stop 440
ttgccaatcaagcctatccttctat

SEQ ID NO: 283026 - DNA, 25 bp, Artificial
  probe
  misc_feature (1)..(25): SEQ ID NO: 1091; WAN024EXE; Start 417; Stop 441
tgccaatcaagcctatccttctatc

SEQ ID NO: 283027 - DNA, 25 bp, Artificial
  probe
  misc_feature (1)..(25): SEQ ID NO: 1091; WAN024EXE; Start 582; Stop 606
accagtcttagaagaactcagtcag

SEQ ID NO: 283028 - DNA, 25 bp, Artificial
  probe
  misc_feature (1)..(25): SEQ ID NO: 1091; WAN024EXE; Start 924; Stop 948
aagagaagaattggtcggtgagatg

SEQ ID NO: 283029 - DNA, 25 bp, Artificial
  probe
  misc_feature (1)..(25): SEQ ID NO: 1091; WAN024EXE; Start 583; Stop 607
ccagtcttagaagaactcagtcagg

SEQ ID NO: 283030 - DNA, 25 bp, Artificial
  probe
  misc_feature (1)..(25): SEQ ID NO: 1091; WAN024EXE; Start 764; Stop 788
cttaccgagctgctactcataataa

SEQ ID NO: 283031 - DNA, 25 bp, Artificial
  probe
  misc_feature (1)..(25): SEQ ID NO: 1091; WAN024EXE; Start 424; Stop 448
caagcctatccttctatcgttaaac

SEQ ID NO: 283032 - DNA, 25 bp, Artificial
  probe
  misc_feature (1)..(25): SEQ ID NO: 1091; WAN024EXE; Start 423; Stop 447
tcaagcctatccttctatcgttaaa

SEQ ID NO: 283033 - DNA, 25 bp, Artificial
  probe
  misc_feature (1)..(25): SEQ ID NO: 1091; WAN024EXE; Start 878; Stop 902
gagatggacgctatcaaggtcttag

SEQ ID NO: 283034 - DNA, 25 bp, Artificial
  probe
  misc_feature (1)..(25): SEQ ID NO: 1091; WAN024EXE; Start 1043; Stop 1067
gagaattagcccagattatcgtgtc

SEQ ID NO: 283035 - DNA, 25 bp, Artificial
  probe
  misc_feature (1)..(25): SEQ ID NO: 1091; WAN024EXE; Start 1041; Stop 1065
cagagaattagcccagattatcgtg

SEQ ID NO: 283036 - DNA, 25 bp, Artificial
  probe
  misc_feature (1)..(25): SEQ ID NO: 1091; WAN024EXE; Start 493; Stop 517
gaaccagactttctcgttgtttata

SEQ ID NO: 283037 - DNA, 25 bp, Artificial
  probe
  misc_feature (1)..(25): SEQ ID NO: 1091; WAN024EXE; Start 1042; Stop 1066
agagaattagcccagattatcgtgt

SEQ ID NO: 283038 - DNA, 25 bp, Artificial
  probe
  misc_feature (1)..(25): SEQ ID NO: 1091; WAN024EXE; Start 763; Stop 787
ccttaccgagctgctactcataata

SEQ ID NO: 283039 - DNA, 25 bp, Artificial
  probe
  misc_feature (1)..(25): SEQ ID NO: 1091; WAN024EXE; Start 418; Stop 442
gccaatcaagcctatccttctatcg

SEQ ID NO: 283040 - DNA, 25 bp, Artificial
  probe
  misc_feature (1)..(25): SEQ ID NO: 1091; WAN024EXE; Start 925; Stop 949
agagaagaattggtcggtgagatga

SEQ ID NO: 283041 - DNA, 25 bp, Artificial
  probe
  misc_feature (1)..(25): SEQ ID NO: 1091; WAN024EXE; Start 571; Stop 595
gaagccttgaaaccagtcttagaag

SEQ ID NO: 283042 - DNA, 25 bp, Artificial
  probe
  misc_feature (1)..(25): SEQ ID NO: 1091; WAN024EXE; Start 495; Stop 519
accagactttctcgttgtttatatt

SEQ ID NO: 283043 - DNA, 25 bp, Artificial
  probe
  misc_feature (1)..(25): SEQ ID NO: 1091; WAN024EXE; Start 494; Stop 518
aaccagactttctcgttgtttatat

SEQ ID NO: 283044 - DNA, 25 bp, Artificial
  probe
  misc_feature (1)..(25): SEQ ID NO: 1091; WAN024EXE; Start 913; Stop 937
ctggaccttgaaagagaagaattgg

SEQ ID NO: 283045 - DNA, 25 bp, Artificial
  probe
  misc_feature (1)..(25): SEQ ID NO: 1091; WAN024EXE; Start 580; Stop 604
aaaccagtcttagaagaactcagtc

SEQ ID NO: 283046 - DNA, 25 bp, Artificial
  probe
  misc_feature (1)..(25): SEQ ID NO: 1091; WAN024EXE; Start 579; Stop 603
gaaaccagtcttagaagaactcagt

SEQ ID NO: 283047 - DNA, 25 bp, Artificial
  probe
  misc_feature (1)..(25): SEQ ID NO: 1091; WAN024EXE; Start 578; Stop 602
tgaaaccagtcttagaagaactcag

SEQ ID NO: 283048 - DNA, 25 bp, Artificial
  probe
  misc_feature (1)..(25): SEQ ID NO: 1091; WAN024EXE; Start 577; Stop 601
ttgaaaccagtcttagaagaactca

SEQ ID NO: 283049 - DNA, 25 bp, Artificial
  probe
  misc_feature (1)..(25): SEQ ID NO: 1091; WAN024EXE; Start 575; Stop 599
ccttgaaaccagtcttagaagaact

SEQ ID NO: 283050 - DNA, 25 bp, Artificial
  probe
  misc_feature (1)..(25): SEQ ID NO: 1091; WAN024EXE; Start 76; Stop 100
cttagtcctgagagacaagctagtc

SEQ ID NO: 283051 - DNA, 25 bp, Artificial
  probe
  misc_feature (1)..(25): SEQ ID NO: 1091; WAN024EXE; Start 1040; Stop 1064
ccagagaattagcccagattatcgt

SEQ ID NO: 283052 - DNA, 25 bp, Artificial
  probe
  misc_feature (1)..(25): SEQ ID NO: 1091; WAN024EXE; Start 923; Stop 947
aaagagaagaattggtcggtgagat

SEQ ID NO: 283053 - DNA, 25 bp, Artificial
  probe
  misc_feature (1)..(25): SEQ ID NO: 1093; WAN024ETB; Start 569; Stop 593
atacagttagtggaatcgcttatcg

SEQ ID NO: 283054 - DNA, 25 bp, Artificial
  probe
  misc_feature (1)..(25): SEQ ID NO: 1093; WAN024ETB; Start 1117; Stop 1141
cttctagtcttatcagtggcagtag

SEQ ID NO: 283055 - DNA, 25 bp, Artificial
  probe
  misc_feature (1)..(25): SEQ ID NO: 1093; WAN024ETB; Start 1116; Stop 1140
tcttctagtcttatcagtggcagta

SEQ ID NO: 283056 - DNA, 25 bp, Artificial
  probe
  misc_feature (1)..(25): SEQ ID NO: 1093; WAN024ETB; Start 1113; Stop 1137
tagtcttctagtcttatcagtggca

SEQ ID NO: 283057 - DNA, 25 bp, Artificial
  probe
  misc_feature (1)..(25): SEQ ID NO: 1093; WAN024ETB; Start 1112; Stop 1136
atagtcttctagtcttatcagtggc

SEQ ID NO: 283058 - DNA, 25 bp, Artificial
  probe
  misc_feature (1)..(25): SEQ ID NO: 1093; WAN024ETB; Start 479; Stop 503
gattcgttctcctagttctgattgg

SEQ ID NO: 283059 - DNA, 25 bp, Artificial
  probe
  misc_feature (1)..(25): SEQ ID NO: 1093; WAN024ETB; Start 1114; Stop 1138
agtcttctagtcttatcagtggcag

SEQ ID NO: 283060 - DNA, 25 bp, Artificial
  probe
  misc_feature (1)..(25): SEQ ID NO: 1093; WAN024ETB; Start 568; Stop 592
tatacagttagtggaatcgcttatc

SEQ ID NO: 283061 - DNA, 25 bp, Artificial
  probe
  misc_feature (1)..(25): SEQ ID NO: 1093; WAN024ETB; Start 478; Stop 502
cgattcgttctcctagttctgattg

SEQ ID NO: 283062 - DNA, 25 bp, Artificial
  probe
  misc_feature (1)..(25): SEQ ID NO: 1093; WAN024ETB; Start 1115; Stop 1139
gtcttctagtcttatcagtggcagt

SEQ ID NO: 283063 - DNA, 25 bp, Artificial
  probe
  misc_feature (1)..(25): SEQ ID NO: 1093; WAN024ETB; Start 1118; Stop 1142
ttctagtcttatcagtggcagtagc

SEQ ID NO: 283064 - DNA, 25 bp, Artificial
  probe
  misc_feature (1)..(25): SEQ ID NO: 1093; WAN024ETB; Start 638; Stop 662
ttgtcttgaccactatcagcctaat

SEQ ID NO: 283065 - DNA, 25 bp, Artificial
  probe
  misc_feature (1)..(25): SEQ ID NO: 1093; WAN024ETB; Start 468; Stop 492
taatgattggcgattcgttctccta

SEQ ID NO: 283066 - DNA, 25 bp, Artificial
  probe
  misc_feature (1)..(25): SEQ ID NO: 1093; WAN024ETB; Start 639; Stop 663
tgtcttgaccactatcagcctaatc

SEQ ID NO: 283067 - DNA, 25 bp, Artificial
  probe
  misc_feature (1)..(25): SEQ ID NO: 1093; WAN024ETB; Start 484; Stop 508
gttctcctagttctgattggaagtt

SEQ ID NO: 283068 - DNA, 25 bp, Artificial
  probe
  misc_feature (1)..(25): SEQ ID NO: 1093; WAN024ETB; Start 570; Stop 594
tacagttagtggaatcgcttatcgc

SEQ ID NO: 283069 - DNA, 25 bp, Artificial
  probe
  misc_feature (1)..(25): SEQ ID NO: 1093; WAN024ETB; Start 480; Stop 504
attcgttctcctagttctgattgga

SEQ ID NO: 283070 - DNA, 25 bp, Artificial
  probe
  misc_feature (1)..(25): SEQ ID NO: 1093; WAN024ETB; Start 481; Stop 505
ttcgttctcctagttctgattggaa

SEQ ID NO: 283071 - DNA, 25 bp, Artificial
  probe
  misc_feature (1)..(25): SEQ ID NO: 1093; WAN024ETB; Start 491; Stop 515
tagttctgattggaagtttgggaat

SEQ ID NO: 283072 - DNA, 25 bp, Artificial
  probe
  misc_feature (1)..(25): SEQ ID NO: 1093; WAN024ETB; Start 467; Stop 491
ttaatgattggcgattcgttctcct

SEQ ID NO: 283073 - DNA, 25 bp, Artificial
  probe
  misc_feature (1)..(25): SEQ ID NO: 1093; WAN024ETB; Start 878; Stop 902
ctatcgtgattgaagaatttggctt

SEQ ID NO: 283074 - DNA, 25 bp, Artificial
  probe
  misc_feature (1)..(25): SEQ ID NO: 1093; WAN024ETB; Start 493; Stop 517
gttctgattggaagtttgggaattt

SEQ ID NO: 283075 - DNA, 25 bp, Artificial
  probe
  misc_feature (1)..(25): SEQ ID NO: 1093; WAN024ETB; Start 1032; Stop 1056
ggtatttgtcaatatcggagggatt

SEQ ID NO: 283076 - DNA, 25 bp, Artificial
  probe
  misc_feature (1)..(25): SEQ ID NO: 1093; WAN024ETB; Start 1028; Stop 1052
ttcaggtatttgtcaatatcggagg

SEQ ID NO: 283077 - DNA, 25 bp, Artificial
  probe
  misc_feature (1)..(25): SEQ ID NO: 1093; WAN024ETB; Start 1027; Stop 1051
gttcaggtatttgtcaatatcggag

SEQ ID NO: 283078 - DNA, 25 bp, Artificial
  probe
  misc_feature (1)..(25): SEQ ID NO: 1093; WAN024ETB; Start 477; Stop 501
gcgattcgttctcctagttctgatt

SEQ ID NO: 283079 - DNA, 25 bp, Artificial
  probe
  misc_feature (1)..(25): SEQ ID NO: 1093; WAN024ETB; Start 879; Stop 903
tatcgtgattgaagaatttggcttt

SEQ ID NO: 283080 - DNA, 25 bp, Artificial
  probe
  misc_feature (1)..(25): SEQ ID NO: 1093; WAN024ETB; Start 482; Stop 506
tcgttctcctagttctgattggaag

SEQ ID NO: 283081 - DNA, 25 bp, Artificial
  probe
  misc_feature (1)..(25): SEQ ID NO: 1093; WAN024ETB; Start 1026; Stop 1050
ggttcaggtatttgtcaatatcgga

SEQ ID NO: 283082 - DNA, 25 bp, Artificial
  probe
  misc_feature (1)..(25): SEQ ID NO: 1093; WAN024ETB; Start 1020; Stop 1044
gatgttggttcaggtatttgtcaat

SEQ ID NO: 283083 - DNA, 25 bp, Artificial
  probe
  misc_feature (1)..(25): SEQ ID NO: 1093; WAN024ETB; Start 650; Stop 674
ctatcagcctaatcggtgttgagac

SEQ ID NO: 283084 - DNA, 25 bp, Artificial
  probe
  misc_feature (1)..(25): SEQ ID NO: 1093; WAN024ETB; Start 1035; Stop 1059
atttgtcaatatcggagggatttcg

SEQ ID NO: 283085 - DNA, 25 bp, Artificial
  probe
  misc_feature (1)..(25): SEQ ID NO: 1093; WAN024ETB; Start 1024; Stop 1048
ttggttcaggtatttgtcaatatcg

SEQ ID NO: 283086 - DNA, 25 bp, Artificial
  probe
  misc_feature (1)..(25): SEQ ID NO: 1094; WAN024GO5; Start 396; Stop 420
tctctacaccaagtatgataaggaa

SEQ ID NO: 283087 - DNA, 25 bp, Artificial
  probe
  misc_feature (1)..(25): SEQ ID NO: 1094; WAN024GO5; Start 395; Stop 419
atctctacaccaagtatgataagga

SEQ ID NO: 283088 - DNA, 25 bp, Artificial
  probe
  misc_feature (1)..(25): SEQ ID NO: 1094; WAN024GO5; Start 112; Stop 136
caagatgatagtggcgagattgatg

SEQ ID NO: 283089 - DNA, 25 bp, Artificial
  probe
  misc_feature (1)..(25): SEQ ID NO: 1094; WAN024GO5; Start 900; Stop 924
cgctatggataatcgttccttctat

SEQ ID NO: 283090 - DNA, 25 bp, Artificial
  probe
  misc_feature (1)..(25): SEQ ID NO: 1094; WAN024GO5; Start 397; Stop 421
ctctacaccaagtatgataaggaat

SEQ ID NO: 283091 - DNA, 25 bp, Artificial
  probe
  misc_feature (1)..(25): SEQ ID NO: 1094; WAN024GO5; Start 394; Stop 418
aatctctacaccaagtatgataagg

SEQ ID NO: 283092 - DNA, 25 bp, Artificial
  probe
  misc_feature (1)..(25): SEQ ID NO: 1094; WAN024GO5; Start 113; Stop 137
aagatgatagtggcgagattgatgg

SEQ ID NO: 283093 - DNA, 25 bp, Artificial
  probe
  misc_feature (1)..(25): SEQ ID NO: 1094; WAN024GO5; Start 899; Stop 923
tcgctatggataatcgttccttcta

SEQ ID NO: 283094 - DNA, 25 bp, Artificial
  probe
  misc_feature (1)..(25): SEQ ID NO: 1094; WAN024GO5; Start 390; Stop 414
ccgaaatctctacaccaagtatgat

SEQ ID NO: 283095 - DNA, 25 bp, Artificial
  probe
  misc_feature (1)..(25): SEQ ID NO: 1094; WAN024GO5; Start 700; Stop 724
gatgataccaaggaagaagtcgttt

SEQ ID NO: 283096 - DNA, 25 bp, Artificial
  probe
  misc_feature (1)..(25): SEQ ID NO: 1094; WAN024GO5; Start 398; Stop 422
tctacaccaagtatgataaggaatt

SEQ ID NO: 283097 - DNA, 25 bp, Artificial
  probe
  misc_feature (1)..(25): SEQ ID NO: 1094; WAN024GO5; Start 898; Stop 922
ttcgctatggataatcgttccttct

SEQ ID NO: 283098 - DNA, 25 bp, Artificial
  probe
  misc_feature (1)..(25): SEQ ID NO: 1094; WAN024GO5; Start 660; Stop 684
tgatagcgaaattaccaagacagtt

SEQ ID NO: 283099 - DNA, 25 bp, Artificial
  probe
  misc_feature (1)..(25): SEQ ID NO: 1094; WAN024GO5; Start 98; Stop 122
tagcctttaccttccaagatgatag

SEQ ID NO: 283100 - DNA, 25 bp, Artificial
  probe
  misc_feature (1)..(25): SEQ ID NO: 1094; WAN024GO5; Start 389; Stop 413
tccgaaatctctacaccaagtatga

SEQ ID NO: 283101 - DNA, 25 bp, Artificial
  probe
  misc_feature (1)..(25): SEQ ID NO: 1094; WAN024GO5; Start 388; Stop 412
gtccgaaatctctacaccaagtatg

SEQ ID NO: 283102 - DNA, 25 bp, Artificial
  probe
  misc_feature (1)..(25): SEQ ID NO: 1094; WAN024GO5; Start 663; Stop 687
tagcgaaattaccaagacagttatg

SEQ ID NO: 283103 - DNA, 25 bp, Artificial
  probe
  misc_feature (1)..(25): SEQ ID NO: 1094; WAN024GO5; Start 661; Stop 685
gatagcgaaattaccaagacagtta

SEQ ID NO: 283104 - DNA, 25 bp, Artificial
  probe
  misc_feature (1)..(25): SEQ ID NO: 1094; WAN024GO5; Start 659; Stop 683
ttgatagcgaaattaccaagacagt

SEQ ID NO: 283105 - DNA, 25 bp, Artificial
  probe
  misc_feature (1)..(25): SEQ ID NO: 1094; WAN024GO5; Start 658; Stop 682
attgatagcgaaattaccaagacag

SEQ ID NO: 283106 - DNA, 25 bp, Artificial
  probe
  misc_feature (1)..(25): SEQ ID NO: 1094; WAN024GO5; Start 100; Stop 124
gcctttaccttccaagatgatagtg

SEQ ID NO: 283107 - DNA, 25 bp, Artificial
  probe
  misc_feature (1)..(25): SEQ ID NO: 1094; WAN024GO5; Start 99; Stop 123
agcctttaccttccaagatgatagt

SEQ ID NO: 283108 - DNA, 25 bp, Artificial
  probe
  misc_feature (1)..(25): SEQ ID NO: 1094; WAN024GO5; Start 97; Stop 121
ctagcctttaccttccaagatgata

SEQ ID NO: 283109 - DNA, 25 bp, Artificial
  probe
  misc_feature (1)..(25): SEQ ID NO: 1094; WAN024GO5; Start 233; Stop 257
ctcaagtcaatcaaattactctccg

SEQ ID NO: 283110 - DNA, 25 bp, Artificial
  probe
  misc_feature (1)..(25): SEQ ID NO: 1094; WAN024GO5; Start 232; Stop 256
cctcaagtcaatcaaattactctcc

SEQ ID NO: 283111 - DNA, 25 bp, Artificial
  probe
  misc_feature (1)..(25): SEQ ID NO: 1094; WAN024GO5; Start 231; Stop 255
ccctcaagtcaatcaaattactctc

SEQ ID NO: 283112 - DNA, 25 bp, Artificial
  probe
  misc_feature (1)..(25): SEQ ID NO: 1094; WAN024GO5; Start 662; Stop 686
atagcgaaattaccaagacagttat

SEQ ID NO: 283113 - DNA, 25 bp, Artificial
  probe
  misc_feature (1)..(25): SEQ ID NO: 1094; WAN024GO5; Start 90; Stop 114
aaactacctagcctttaccttccaa

SEQ ID NO: 283114 - DNA, 25 bp, Artificial
  probe
  misc_feature (1)..(25): SEQ ID NO: 1094; WAN024GO5; Start 901; Stop 925
gctatggataatcgttccttctata

SEQ ID NO: 283115 - DNA, 25 bp, Artificial
  probe
  misc_feature (1)..(25): SEQ ID NO: 1094; WAN024GO5; Start 93; Stop 117
ctacctagcctttaccttccaagat

SEQ ID NO: 283116 - DNA, 25 bp, Artificial
  probe
  misc_feature (1)..(25): SEQ ID NO: 1094; WAN024GO5; Start 391; Stop 415
cgaaatctctacaccaagtatgata

SEQ ID NO: 283117 - DNA, 25 bp, Artificial
  probe
  misc_feature (1)..(25): SEQ ID NO: 1094; WAN024GO5; Start 234; Stop 258
tcaagtcaatcaaattactctccgc

SEQ ID NO: 283118 - DNA, 25 bp, Artificial
  probe
  misc_feature (1)..(25): SEQ ID NO: 1094; WAN024GO5; Start 199; Stop 223
atgaaaggacgccgagaagtttata

SEQ ID NO: 283119 - DNA, 25 bp, Artificial
  probe
  misc_feature (1)..(25): SEQ ID NO: 1095; WAN024CIW; Start 203; Stop 227
ctgctggagttgttaatgctaatac

SEQ ID NO: 283120 - DNA, 25 bp, Artificial
  probe
  misc_feature (1)..(25): SEQ ID NO: 1095; WAN024CIW; Start 415; Stop 439
ggtataggaggcagtattattgtca

SEQ ID NO: 283121 - DNA, 25 bp, Artificial
  probe
  misc_feature (1)..(25): SEQ ID NO: 1095; WAN024CIW; Start 413; Stop 437
caggtataggaggcagtattattgt

SEQ ID NO: 283122 - DNA, 25 bp, Artificial
  probe
  misc_feature (1)..(25): SEQ ID NO: 1095; WAN024CIW; Start 412; Stop 436
acaggtataggaggcagtattattg

SEQ ID NO: 283123 - DNA, 25 bp, Artificial
  probe
  misc_feature (1)..(25): SEQ ID NO: 1095; WAN024CIW; Start 414; Stop 438
aggtataggaggcagtattattgtc

SEQ ID NO: 283124 - DNA, 25 bp, Artificial
  probe
  misc_feature (1)..(25): SEQ ID NO: 1095; WAN024CIW; Start 410; Stop 434
gaacaggtataggaggcagtattat

SEQ ID NO: 283125 - DNA, 25 bp, Artificial
  probe
  misc_feature (1)..(25): SEQ ID NO: 1095; WAN024CIW; Start 409; Stop 433
ggaacaggtataggaggcagtatta

SEQ ID NO: 283126 - DNA, 25 bp, Artificial
  probe
  misc_feature (1)..(25): SEQ ID NO: 1095; WAN024CIW; Start 411; Stop 435
aacaggtataggaggcagtattatt

SEQ ID NO: 283127 - DNA, 25 bp, Artificial
  probe
  misc_feature (1)..(25): SEQ ID NO: 1095; WAN024CIW; Start 202; Stop 226
actgctggagttgttaatgctaata

SEQ ID NO: 283128 - DNA, 25 bp, Artificial
  probe
  misc_feature (1)..(25): SEQ ID NO: 1095; WAN024CIW; Start 398; Stop 422
tggttactattggaacaggtatagg

SEQ ID NO: 283129 - DNA, 25 bp, Artificial
  probe
  misc_feature (1)..(25): SEQ ID NO: 1095; WAN024CIW; Start 402; Stop 426
tactattggaacaggtataggaggc

SEQ ID NO: 283130 - DNA, 25 bp, Artificial
  probe
  misc_feature (1)..(25): SEQ ID NO: 1095; WAN024CIW; Start 399; Stop 423
ggttactattggaacaggtatagga

SEQ ID NO: 283131 - DNA, 25 bp, Artificial
  probe
  misc_feature (1)..(25): SEQ ID NO: 1095; WAN024CIW; Start 416; Stop 440
gtataggaggcagtattattgtcaa

SEQ ID NO: 283132 - DNA, 25 bp, Artificial
  probe
  misc_feature (1)..(25): SEQ ID NO: 1095; WAN024CIW; Start 201; Stop 225
cactgctggagttgttaatgctaat

SEQ ID NO: 283133 - DNA, 25 bp, Artificial
  probe
  misc_feature (1)..(25): SEQ ID NO: 1095; WAN024CIW; Start 401; Stop 425
ttactattggaacaggtataggagg

SEQ ID NO: 283134 - DNA, 25 bp, Artificial
  probe
  misc_feature (1)..(25): SEQ ID NO: 1095; WAN024CIW; Start 489; Stop 513
tattcctgtaggtaattcggattgg

SEQ ID NO: 283135 - DNA, 25 bp, Artificial
  probe
  misc_feature (1)..(25): SEQ ID NO: 1095; WAN024CIW; Start 408; Stop 432
tggaacaggtataggaggcagtatt

SEQ ID NO: 283136 - DNA, 25 bp, Artificial
  probe
  misc_feature (1)..(25): SEQ ID NO: 1095; WAN024CIW; Start 407; Stop 431
ttggaacaggtataggaggcagtat

SEQ ID NO: 283137 - DNA, 25 bp, Artificial
  probe
  misc_feature (1)..(25): SEQ ID NO: 1095; WAN024CIW; Start 406; Stop 430
attggaacaggtataggaggcagta

SEQ ID NO: 283138 - DNA, 25 bp, Artificial
  probe
  misc_feature (1)..(25): SEQ ID NO: 1095; WAN024CIW; Start 405; Stop 429
tattggaacaggtataggaggcagt

SEQ ID NO: 283139 - DNA, 25 bp, Artificial
  probe
  misc_feature (1)..(25): SEQ ID NO: 1095; WAN024CIW; Start 461; Stop 485
ttaactatactgctggtgaagtagg

SEQ ID NO: 283140 - DNA, 25 bp, Artificial
  probe
  misc_feature (1)..(25): SEQ ID NO: 1095; WAN024CIW; Start 404; Stop 428
ctattggaacaggtataggaggcag

SEQ ID NO: 283141 - DNA, 25 bp, Artificial
  probe
  misc_feature (1)..(25): SEQ ID NO: 1095; WAN024CIW; Start 400; Stop 424
gttactattggaacaggtataggag

SEQ ID NO: 283142 - DNA, 25 bp, Artificial
  probe
  misc_feature (1)..(25): SEQ ID NO: 1095; WAN024CIW; Start 237; Stop 261
catctatgcaggctatacaatacca

SEQ ID NO: 283143 - DNA, 25 bp, Artificial
  probe
  misc_feature (1)..(25): SEQ ID NO: 1095; WAN024CIW; Start 238; Stop 262
atctatgcaggctatacaataccag

SEQ ID NO: 283144 - DNA, 25 bp, Artificial
  probe
  misc_feature (1)..(25): SEQ ID NO: 1095; WAN024CIW; Start 236; Stop 260
tcatctatgcaggctatacaatacc

SEQ ID NO: 283145 - DNA, 25 bp, Artificial
  probe
  misc_feature (1)..(25): SEQ ID NO: 1095; WAN024CIW; Start 453; Stop 477
taacggatttaactatactgctggt

SEQ ID NO: 283146 - DNA, 25 bp, Artificial
  probe
  misc_feature (1)..(25): SEQ ID NO: 1095; WAN024CIW; Start 27; Stop 51
cggaacaacaattaaggcagattta

SEQ ID NO: 283147 - DNA, 25 bp, Artificial
  probe
  misc_feature (1)..(25): SEQ ID NO: 1095; WAN024CIW; Start 329; Stop 353
atgatgttaattgtgctgcattagg

SEQ ID NO: 283148 - DNA, 25 bp, Artificial
  probe
  misc_feature (1)..(25): SEQ ID NO: 1095; WAN024CIW; Start 259; Stop 283
ccagggtatatcggagtaaacttta

SEQ ID NO: 283149 - DNA, 25 bp, Artificial
  probe
  misc_feature (1)..(25): SEQ ID NO: 1095; WAN024CIW; Start 456; Stop 480
cggatttaactatactgctggtgaa

SEQ ID NO: 283150 - DNA, 25 bp, Artificial
  probe
  misc_feature (1)..(25): SEQ ID NO: 1095; WAN024CIW; Start 140; Stop 164
aggtctgtgatttaattggtgagta

SEQ ID NO: 283151 - DNA, 25 bp, Artificial
  probe
  misc_feature (1)..(25): SEQ ID NO: 1095; WAN024CIW; Start 457; Stop 481
ggatttaactatactgctggtgaag

SEQ ID NO: 283152 - DNA, 25 bp, Artificial
  probe
  misc_feature (1)..(25): SEQ ID NO: 1096; WAN024DMJ; Start 488; Stop 512
aagtgattgagtgtgagttagagat

SEQ ID NO: 283153 - DNA, 25 bp, Artificial
  probe
  misc_feature (1)..(25): SEQ ID NO: 1096; WAN024DMJ; Start 41; Stop 65
gtgagttagaggagcgttcttatat

SEQ ID NO: 283154 - DNA, 25 bp, Artificial
  probe
  misc_feature (1)..(25): SEQ ID NO: 1096; WAN024DMJ; Start 489; Stop 513
agtgattgagtgtgagttagagata

SEQ ID NO: 283155 - DNA, 25 bp, Artificial
  probe
  misc_feature (1)..(25): SEQ ID NO: 1096; WAN024DMJ; Start 487; Stop 511
caagtgattgagtgtgagttagaga

SEQ ID NO: 283156 - DNA, 25 bp, Artificial
  probe
  misc_feature (1)..(25): SEQ ID NO: 1096; WAN024DMJ; Start 486; Stop 510
ccaagtgattgagtgtgagttagag

SEQ ID NO: 283157 - DNA, 25 bp, Artificial
  probe
  misc_feature (1)..(25): SEQ ID NO: 1096; WAN024DMJ; Start 40; Stop 64
cgtgagttagaggagcgttcttata

SEQ ID NO: 283158 - DNA, 25 bp, Artificial
  probe
  misc_feature (1)..(25): SEQ ID NO: 1096; WAN024DMJ; Start 45; Stop 69
gttagaggagcgttcttatatagga

SEQ ID NO: 283159 - DNA, 25 bp, Artificial
  probe
  misc_feature (1)..(25): SEQ ID NO: 1096; WAN024DMJ; Start 44; Stop 68
agttagaggagcgttcttatatagg

SEQ ID NO: 283160 - DNA, 25 bp, Artificial
  probe
  misc_feature (1)..(25): SEQ ID NO: 1096; WAN024DMJ; Start 490; Stop 514
gtgattgagtgtgagttagagatat

SEQ ID NO: 283161 - DNA, 25 bp, Artificial
  probe
  misc_feature (1)..(25): SEQ ID NO: 1096; WAN024DMJ; Start 326; Stop 350
agttgcttcctaatagtcctattca

SEQ ID NO: 283162 - DNA, 25 bp, Artificial
  probe
  misc_feature (1)..(25): SEQ ID NO: 1096; WAN024DMJ; Start 42; Stop 66
tgagttagaggagcgttcttatata

SEQ ID NO: 283163 - DNA, 25 bp, Artificial
  probe
  misc_feature (1)..(25): SEQ ID NO: 1096; WAN024DMJ; Start 325; Stop 349
gagttgcttcctaatagtcctattc

SEQ ID NO: 283164 - DNA, 25 bp, Artificial
  probe
  misc_feature (1)..(25): SEQ ID NO: 1096; WAN024DMJ; Start 47; Stop 71
tagaggagcgttcttatataggatt

SEQ ID NO: 283165 - DNA, 25 bp, Artificial
  probe
  misc_feature (1)..(25): SEQ ID NO: 1096; WAN024DMJ; Start 46; Stop 70
ttagaggagcgttcttatataggat

SEQ ID NO: 283166 - DNA, 25 bp, Artificial
  probe
  misc_feature (1)..(25): SEQ ID NO: 1096; WAN024DMJ; Start 327; Stop 351
gttgcttcctaatagtcctattcaa

SEQ ID NO: 283167 - DNA, 25 bp, Artificial
  probe
  misc_feature (1)..(25): SEQ ID NO: 1096; WAN024DMJ; Start 43; Stop 67
gagttagaggagcgttcttatatag

SEQ ID NO: 283168 - DNA, 25 bp, Artificial
  probe
  misc_feature (1)..(25): SEQ ID NO: 1096; WAN024DMJ; Start 344; Stop 368
ctattcaatatgagacagctacgga

SEQ ID NO: 283169 - DNA, 25 bp, Artificial
  probe
  misc_feature (1)..(25): SEQ ID NO: 1096; WAN024DMJ; Start 342; Stop 366
tcctattcaatatgagacagctacg

SEQ ID NO: 283170 - DNA, 25 bp, Artificial
  probe
  misc_feature (1)..(25): SEQ ID NO: 1096; WAN024DMJ; Start 324; Stop 348
ggagttgcttcctaatagtcctatt

SEQ ID NO: 283171 - DNA, 25 bp, Artificial
  probe
  misc_feature (1)..(25): SEQ ID NO: 1096; WAN024DMJ; Start 345; Stop 369
tattcaatatgagacagctacggaa

SEQ ID NO: 283172 - DNA, 25 bp, Artificial
  probe
  misc_feature (1)..(25): SEQ ID NO: 1096; WAN024DMJ; Start 343; Stop 367
cctattcaatatgagacagctacgg

SEQ ID NO: 283173 - DNA, 25 bp, Artificial
  probe
  misc_feature (1)..(25): SEQ ID NO: 1096; WAN024DMJ; Start 64; Stop 88
ataggatttgggatagatttggcac

SEQ ID NO: 283174 - DNA, 25 bp, Artificial
  probe
  misc_feature (1)..(25): SEQ ID NO: 1096; WAN024DMJ; Start 397; Stop 421
tctaagtatcgagaacatcagactg

SEQ ID NO: 283175 - DNA, 25 bp, Artificial
  probe
  misc_feature (1)..(25): SEQ ID NO: 1096; WAN024DMJ; Start 63; Stop 87
tataggatttgggatagatttggca

SEQ ID NO: 283176 - DNA, 25 bp, Artificial
  probe
  misc_feature (1)..(25): SEQ ID NO: 1096; WAN024DMJ; Start 483; Stop 507
ttgccaagtgattgagtgtgagtta

SEQ ID NO: 283177 - DNA, 25 bp, Artificial
  probe
  misc_feature (1)..(25): SEQ ID NO: 1096; WAN024DMJ; Start 407; Stop 431
gagaacatcagactgtggtagttgt

SEQ ID NO: 283178 - DNA, 25 bp, Artificial
  probe
  misc_feature (1)..(25): SEQ ID NO: 1096; WAN024DMJ; Start 485; Stop 509
gccaagtgattgagtgtgagttaga

SEQ ID NO: 283179 - DNA, 25 bp, Artificial
  probe
  misc_feature (1)..(25): SEQ ID NO: 1096; WAN024DMJ; Start 399; Stop 423
taagtatcgagaacatcagactgtg

SEQ ID NO: 283180 - DNA, 25 bp, Artificial
  probe
  misc_feature (1)..(25): SEQ ID NO: 1096; WAN024DMJ; Start 338; Stop 362
atagtcctattcaatatgagacagc

SEQ ID NO: 283181 - DNA, 25 bp, Artificial
  probe
  misc_feature (1)..(25): SEQ ID NO: 1096; WAN024DMJ; Start 398; Stop 422
ctaagtatcgagaacatcagactgt

SEQ ID NO: 283182 - DNA, 25 bp, Artificial
  probe
  misc_feature (1)..(25): SEQ ID NO: 1096; WAN024DMJ; Start 52; Stop 76
gagcgttcttatataggatttggga

SEQ ID NO: 283183 - DNA, 25 bp, Artificial
  probe
  misc_feature (1)..(25): SEQ ID NO: 1096; WAN024DMJ; Start 50; Stop 74
aggagcgttcttatataggatttgg

SEQ ID NO: 283184 - DNA, 25 bp, Artificial
  probe
  misc_feature (1)..(25): SEQ ID NO: 1096; WAN024DMJ; Start 484; Stop 508
tgccaagtgattgagtgtgagttag

SEQ ID NO: 283185 - DNA, 25 bp, Artificial
  probe
  misc_feature (1)..(25): SEQ ID NO: 1097; WAN024D2M; Start 100; Stop 124
ggcaatataactcacactcagacta

SEQ ID NO: 283186 - DNA, 25 bp, Artificial
  probe
  misc_feature (1)..(25): SEQ ID NO: 1097; WAN024D2M; Start 865; Stop 889
atgattgatggagaatatgaggacg

SEQ ID NO: 283187 - DNA, 25 bp, Artificial
  probe
  misc_feature (1)..(25): SEQ ID NO: 1097; WAN024D2M; Start 97; Stop 121
gatggcaatataactcacactcaga

SEQ ID NO: 283188 - DNA, 25 bp, Artificial
  probe
  misc_feature (1)..(25): SEQ ID NO: 1097; WAN024D2M; Start 98; Stop 122
atggcaatataactcacactcagac

SEQ ID NO: 283189 - DNA, 25 bp, Artificial
  probe
  misc_feature (1)..(25): SEQ ID NO: 1097; WAN024D2M; Start 814; Stop 838
gctgtagatgatggcaatgatatta

SEQ ID NO: 283190 - DNA, 25 bp, Artificial
  probe
  misc_feature (1)..(25): SEQ ID NO: 1097; WAN024D2M; Start 103; Stop 127
aatataactcacactcagactagcg

SEQ ID NO: 283191 - DNA, 25 bp, Artificial
  probe
  misc_feature (1)..(25): SEQ ID NO: 1097; WAN024D2M; Start 868; Stop 892
attgatggagaatatgaggacggaa

SEQ ID NO: 283192 - DNA, 25 bp, Artificial
  probe
  misc_feature (1)..(25): SEQ ID NO: 1097; WAN024D2M; Start 104; Stop 128
atataactcacactcagactagcga

SEQ ID NO: 283193 - DNA, 25 bp, Artificial
  probe
  misc_feature (1)..(25): SEQ ID NO: 1097; WAN024D2M; Start 105; Stop 129
tataactcacactcagactagcgaa

SEQ ID NO: 283194 - DNA, 25 bp, Artificial
  probe
  misc_feature (1)..(25): SEQ ID NO: 1097; WAN024D2M; Start 95; Stop 119
ttgatggcaatataactcacactca

SEQ ID NO: 283195 - DNA, 25 bp, Artificial
  probe
  misc_feature (1)..(25): SEQ ID NO: 1097; WAN024D2M; Start 94; Stop 118
cttgatggcaatataactcacactc

SEQ ID NO: 283196 - DNA, 25 bp, Artificial
  probe
  misc_feature (1)..(25): SEQ ID NO: 1097; WAN024D2M; Start 93; Stop 117
tcttgatggcaatataactcacact

SEQ ID NO: 283197 - DNA, 25 bp, Artificial
  probe
  misc_feature (1)..(25): SEQ ID NO: 1097; WAN024D2M; Start 99; Stop 123
tggcaatataactcacactcagact

SEQ ID NO: 283198 - DNA, 25 bp, Artificial
  probe
  misc_feature (1)..(25): SEQ ID NO: 1097; WAN024D2M; Start 53; Stop 77
tgttcaataattctgttactgctca

SEQ ID NO: 283199 - DNA, 25 bp, Artificial
  probe
  misc_feature (1)..(25): SEQ ID NO: 1097; WAN024D2M; Start 96; Stop 120
tgatggcaatataactcacactcag

SEQ ID NO: 283200 - DNA, 25 bp, Artificial
  probe
  misc_feature (1)..(25): SEQ ID NO: 1097; WAN024D2M; Start 864; Stop 888
aatgattgatggagaatatgaggac

SEQ ID NO: 283201 - DNA, 25 bp, Artificial
  probe
  misc_feature (1)..(25): SEQ ID NO: 1097; WAN024D2M; Start 92; Stop 116
atcttgatggcaatataactcacac

SEQ ID NO: 283202 - DNA, 25 bp, Artificial
  probe
  misc_feature (1)..(25): SEQ ID NO: 1097; WAN024D2M; Start 867; Stop 891
gattgatggagaatatgaggacgga

SEQ ID NO: 283203 - DNA, 25 bp, Artificial
  probe
  misc_feature (1)..(25): SEQ ID NO: 1097; WAN024D2M; Start 102; Stop 126
caatataactcacactcagactagc

SEQ ID NO: 283204 - DNA, 25 bp, Artificial
  probe
  misc_feature (1)..(25): SEQ ID NO: 1097; WAN024D2M; Start 101; Stop 125
gcaatataactcacactcagactag

SEQ ID NO: 283205 - DNA, 25 bp, Artificial
  probe
  misc_feature (1)..(25): SEQ ID NO: 1097; WAN024D2M; Start 661; Stop 685
caagatagattaggtcatggtacgg

SEQ ID NO: 283206 - DNA, 25 bp, Artificial
  probe
  misc_feature (1)..(25): SEQ ID NO: 1097; WAN024D2M; Start 660; Stop 684
tcaagatagattaggtcatggtacg

SEQ ID NO: 283207 - DNA, 25 bp, Artificial
  probe
  misc_feature (1)..(25): SEQ ID NO: 1097; WAN024D2M; Start 866; Stop 890
tgattgatggagaatatgaggacgg

SEQ ID NO: 283208 - DNA, 25 bp, Artificial
  probe
  misc_feature (1)..(25): SEQ ID NO: 1097; WAN024D2M; Start 91; Stop 115
aatcttgatggcaatataactcaca

SEQ ID NO: 283209 - DNA, 25 bp, Artificial
  probe
  misc_feature (1)..(25): SEQ ID NO: 1097; WAN024D2M; Start 871; Stop 895
gatggagaatatgaggacggaacaa

SEQ ID NO: 283210 - DNA, 25 bp, Artificial
  probe
  misc_feature (1)..(25): SEQ ID NO: 1097; WAN024D2M; Start 869; Stop 893
ttgatggagaatatgaggacggaac

SEQ ID NO: 283211 - DNA, 25 bp, Artificial
  probe
  misc_feature (1)..(25): SEQ ID NO: 1097; WAN024D2M; Start 56; Stop 80
tcaataattctgttactgctcaaga

SEQ ID NO: 283212 - DNA, 25 bp, Artificial
  probe
  misc_feature (1)..(25): SEQ ID NO: 1097; WAN024D2M; Start 54; Stop 78
gttcaataattctgttactgctcaa

SEQ ID NO: 283213 - DNA, 25 bp, Artificial
  probe
  misc_feature (1)..(25): SEQ ID NO: 1097; WAN024D2M; Start 52; Stop 76
ttgttcaataattctgttactgctc

SEQ ID NO: 283214 - DNA, 25 bp, Artificial
  probe
  misc_feature (1)..(25): SEQ ID NO: 1097; WAN024D2M; Start 1051; Stop 1075
ccaggattagtagttgatgttccaa

SEQ ID NO: 283215 - DNA, 25 bp, Artificial
  probe
  misc_feature (1)..(25): SEQ ID NO: 1097; WAN024D2M; Start 1049; Stop 1073
aaccaggattagtagttgatgttcc

SEQ ID NO: 283216 - DNA, 25 bp, Artificial
  probe
  misc_feature (1)..(25): SEQ ID NO: 1097; WAN024D2M; Start 1053; Stop 1077
aggattagtagttgatgttccaagt

SEQ ID NO: 283217 - DNA, 25 bp, Artificial
  probe
  misc_feature (1)..(25): SEQ ID NO: 1097; WAN024D2M; Start 662; Stop 686
aagatagattaggtcatggtacggc

SEQ ID NO: 283218 - DNA, 25 bp, Artificial
  probe
  misc_feature (1)..(25): SEQ ID NO: 1098; WAN024FVM; Start 649; Stop 673
tatcgtcaggacttggtaagagaat

SEQ ID NO: 283219 - DNA, 25 bp, Artificial
  probe
  misc_feature (1)..(25): SEQ ID NO: 1098; WAN024FVM; Start 650; Stop 674
atcgtcaggacttggtaagagaatt

SEQ ID NO: 283220 - DNA, 25 bp, Artificial
  probe
  misc_feature (1)..(25): SEQ ID NO: 1098; WAN024FVM; Start 763; Stop 787
catgacaagatgccaacaattaagg

SEQ ID NO: 283221 - DNA, 25 bp, Artificial
  probe
  misc_feature (1)..(25): SEQ ID NO: 1098; WAN024FVM; Start 306; Stop 330
tcaactcaacttatcagaccatgaa

SEQ ID NO: 283222 - DNA, 25 bp, Artificial
  probe
  misc_feature (1)..(25): SEQ ID NO: 1098; WAN024FVM; Start 60; Stop 84
tgtagctgtaaccaagtatcttcaa

SEQ ID NO: 283223 - DNA, 25 bp, Artificial
  probe
  misc_feature (1)..(25): SEQ ID NO: 1098; WAN024FVM; Start 59; Stop 83
gtgtagctgtaaccaagtatcttca

SEQ ID NO: 283224 - DNA, 25 bp, Artificial
  probe
  misc_feature (1)..(25): SEQ ID NO: 1098; WAN024FVM; Start 305; Stop 329
gtcaactcaacttatcagaccatga

SEQ ID NO: 283225 - DNA, 25 bp, Artificial
  probe
  misc_feature (1)..(25): SEQ ID NO: 1098; WAN024FVM; Start 678; Stop 702
gatgattaagcaagtgaccaaagaa

SEQ ID NO: 283226 - DNA, 25 bp, Artificial
  probe
  misc_feature (1)..(25): SEQ ID NO: 1098; WAN024FVM; Start 679; Stop 703
atgattaagcaagtgaccaaagaaa

SEQ ID NO: 283227 - DNA, 25 bp, Artificial
  probe
  misc_feature (1)..(25): SEQ ID NO: 1098; WAN024FVM; Start 1; Stop 25
atgaagattattgtacctgcaacca

SEQ ID NO: 283228 - DNA, 25 bp, Artificial
  probe
  misc_feature (1)..(25): SEQ ID NO: 1098; WAN024FVM; Start 660; Stop 684
cttggtaagagaatttgcgatgatt

SEQ ID NO: 283229 - DNA, 25 bp, Artificial
  probe
  misc_feature (1)..(25): SEQ ID NO: 1098; WAN024FVM; Start 664; Stop 688
gtaagagaatttgcgatgattaagc

SEQ ID NO: 283230 - DNA, 25 bp, Artificial
  probe
  misc_feature (1)..(25): SEQ ID NO: 1098; WAN024FVM; Start 659; Stop 683
acttggtaagagaatttgcgatgat

SEQ ID NO: 283231 - DNA, 25 bp, Artificial
  probe
  misc_feature (1)..(25): SEQ ID NO: 1098; WAN024FVM; Start 662; Stop 686
tggtaagagaatttgcgatgattaa

SEQ ID NO: 283232 - DNA, 25 bp, Artificial
  probe
  misc_feature (1)..(25): SEQ ID NO: 1098; WAN024FVM; Start 661; Stop 685
ttggtaagagaatttgcgatgatta

SEQ ID NO: 283233 - DNA, 25 bp, Artificial
  probe
  misc_feature (1)..(25): SEQ ID NO: 1098; WAN024FVM; Start 741; Stop 765
gacagttatggttctggcttctcat

SEQ ID NO: 283234 - DNA, 25 bp, Artificial
  probe
  misc_feature (1)..(25): SEQ ID NO: 1098; WAN024FVM; Start 677; Stop 701
cgatgattaagcaagtgaccaaaga

SEQ ID NO: 283235 - DNA, 25 bp, Artificial
  probe
  misc_feature (1)..(25): SEQ ID NO: 1098; WAN024FVM; Start 663; Stop 687
ggtaagagaatttgcgatgattaag

SEQ ID NO: 283236 - DNA, 25 bp, Artificial
  probe
  misc_feature (1)..(25): SEQ ID NO: 1098; WAN024FVM; Start 658; Stop 682
gacttggtaagagaatttgcgatga

SEQ ID NO: 283237 - DNA, 25 bp, Artificial
  probe
  misc_feature (1)..(25): SEQ ID NO: 1098; WAN024FVM; Start 64; Stop 88
gctgtaaccaagtatcttcaaattg

SEQ ID NO: 283238 - DNA, 25 bp, Artificial
  probe
  misc_feature (1)..(25): SEQ ID NO: 1098; WAN024FVM; Start 652; Stop 676
cgtcaggacttggtaagagaatttg

SEQ ID NO: 283239 - DNA, 25 bp, Artificial
  probe
  misc_feature (1)..(25): SEQ ID NO: 1098; WAN024FVM; Start 651; Stop 675
tcgtcaggacttggtaagagaattt

SEQ ID NO: 283240 - DNA, 25 bp, Artificial
  probe
  misc_feature (1)..(25): SEQ ID NO: 1098; WAN024FVM; Start 3; Stop 27
gaagattattgtacctgcaaccagt

SEQ ID NO: 283241 - DNA, 25 bp, Artificial
  probe
  misc_feature (1)..(25): SEQ ID NO: 1098; WAN024FVM; Start 2; Stop 26
tgaagattattgtacctgcaaccag

SEQ ID NO: 283242 - DNA, 25 bp, Artificial
  probe
  misc_feature (1)..(25): SEQ ID NO: 1098; WAN024FVM; Start 58; Stop 82
ggtgtagctgtaaccaagtatcttc

SEQ ID NO: 283243 - DNA, 25 bp, Artificial
  probe
  misc_feature (1)..(25): SEQ ID NO: 1098; WAN024FVM; Start 653; Stop 677
gtcaggacttggtaagagaatttgc

SEQ ID NO: 283244 - DNA, 25 bp, Artificial
  probe
  misc_feature (1)..(25): SEQ ID NO: 1098; WAN024FVM; Start 4; Stop 28
aagattattgtacctgcaaccagtg

SEQ ID NO: 283245 - DNA, 25 bp, Artificial
  probe
  misc_feature (1)..(25): SEQ ID NO: 1098; WAN024FVM; Start 307; Stop 331
caactcaacttatcagaccatgaaa

SEQ ID NO: 283246 - DNA, 25 bp, Artificial
  probe
  misc_feature (1)..(25): SEQ ID NO: 1098; WAN024FVM; Start 440; Stop 464
tagcagactttccagagtgtgattt

SEQ ID NO: 283247 - DNA, 25 bp, Artificial
  probe
  misc_feature (1)..(25): SEQ ID NO: 1098; WAN024FVM; Start 97; Stop 121
gaagaacgagatgagtggctgattg

SEQ ID NO: 283248 - DNA, 25 bp, Artificial
  probe
  misc_feature (1)..(25): SEQ ID NO: 1098; WAN024FVM; Start 657; Stop 681
ggacttggtaagagaatttgcgatg

SEQ ID NO: 283249 - DNA, 25 bp, Artificial
  probe
  misc_feature (1)..(25): SEQ ID NO: 1098; WAN024FVM; Start 656; Stop 680
aggacttggtaagagaatttgcgat

SEQ ID NO: 283250 - DNA, 25 bp, Artificial
  probe
  misc_feature (1)..(25): SEQ ID NO: 1098; WAN024FVM; Start 298; Stop 322
caactgggtcaactcaacttatcag

SEQ ID NO: 283251 - DNA, 25 bp, Artificial
  probe
  misc_feature (1)..(25): SEQ ID NO: 1099; WAN024G5K; Start 607; Stop 631
ttgattgaacacttggaagaagaag

SEQ ID NO: 283252 - DNA, 25 bp, Artificial
  probe
  misc_feature (1)..(25): SEQ ID NO: 1099; WAN024G5K; Start 861; Stop 885
tacatctaaggtaagcacttctcag

SEQ ID NO: 283253 - DNA, 25 bp, Artificial
  probe
  misc_feature (1)..(25): SEQ ID NO: 1099; WAN024G5K; Start 606; Stop 630
gttgattgaacacttggaagaagaa

SEQ ID NO: 283254 - DNA, 25 bp, Artificial
  probe
  misc_feature (1)..(25): SEQ ID NO: 1099; WAN024G5K; Start 366; Stop 390
cctcaactgcgatgttcttattaac

SEQ ID NO: 283255 - DNA, 25 bp, Artificial
  probe
  misc_feature (1)..(25): SEQ ID NO: 1099; WAN024G5K; Start 860; Stop 884
atacatctaaggtaagcacttctca

SEQ ID NO: 283256 - DNA, 25 bp, Artificial
  probe
  misc_feature (1)..(25): SEQ ID NO: 1099; WAN024G5K; Start 863; Stop 887
catctaaggtaagcacttctcagtt

SEQ ID NO: 283257 - DNA, 25 bp, Artificial
  probe
  misc_feature (1)..(25): SEQ ID NO: 1099; WAN024G5K; Start 603; Stop 627
ttggttgattgaacacttggaagaa

SEQ ID NO: 283258 - DNA, 25 bp, Artificial
  probe
  misc_feature (1)..(25): SEQ ID NO: 1099; WAN024G5K; Start 592; Stop 616
gttgatacaccttggttgattgaac

SEQ ID NO: 283259 - DNA, 25 bp, Artificial
  probe
  misc_feature (1)..(25): SEQ ID NO: 1099; WAN024G5K; Start 596; Stop 620
atacaccttggttgattgaacactt

SEQ ID NO: 283260 - DNA, 25 bp, Artificial
  probe
  misc_feature (1)..(25): SEQ ID NO: 1099; WAN024G5K; Start 593; Stop 617
ttgatacaccttggttgattgaaca

SEQ ID NO: 283261 - DNA, 25 bp, Artificial
  probe
  misc_feature (1)..(25): SEQ ID NO: 1099; WAN024G5K; Start 843; Stop 867
gccaacttactatgctaatacatct

SEQ ID NO: 283262 - DNA, 25 bp, Artificial
  probe
  misc_feature (1)..(25): SEQ ID NO: 1099; WAN024G5K; Start 605; Stop 629
ggttgattgaacacttggaagaaga

SEQ ID NO: 283263 - DNA, 25 bp, Artificial
  probe
  misc_feature (1)..(25): SEQ ID NO: 1099; WAN024G5K; Start 862; Stop 886
acatctaaggtaagcacttctcagt

SEQ ID NO: 283264 - DNA, 25 bp, Artificial
  probe
  misc_feature (1)..(25): SEQ ID NO: 1099; WAN024G5K; Start 608; Stop 632
tgattgaacacttggaagaagaagc

SEQ ID NO: 283265 - DNA, 25 bp, Artificial
  probe
  misc_feature (1)..(25): SEQ ID NO: 1099; WAN024G5K; Start 604; Stop 628
tggttgattgaacacttggaagaag

SEQ ID NO: 283266 - DNA, 25 bp, Artificial
  probe
  misc_feature (1)..(25): SEQ ID NO: 1099; WAN024G5K; Start 602; Stop 626
cttggttgattgaacacttggaaga

SEQ ID NO: 283267 - DNA, 25 bp, Artificial
  probe
  misc_feature (1)..(25): SEQ ID NO: 1099; WAN024G5K; Start 595; Stop 619
gatacaccttggttgattgaacact

SEQ ID NO: 283268 - DNA, 25 bp, Artificial
  probe
  misc_feature (1)..(25): SEQ ID NO: 1099; WAN024G5K; Start 594; Stop 618
tgatacaccttggttgattgaacac

SEQ ID NO: 283269 - DNA, 25 bp, Artificial
  probe
  misc_feature (1)..(25): SEQ ID NO: 1099; WAN024G5K; Start 859; Stop 883
aatacatctaaggtaagcacttctc

SEQ ID NO: 283270 - DNA, 25 bp, Artificial
  probe
  misc_feature (1)..(25): SEQ ID NO: 1099; WAN024G5K; Start 591; Stop 615
cgttgatacaccttggttgattgaa

SEQ ID NO: 283271 - DNA, 25 bp, Artificial
  probe
  misc_feature (1)..(25): SEQ ID NO: 1099; WAN024G5K; Start 597; Stop 621
tacaccttggttgattgaacacttg

SEQ ID NO: 283272 - DNA, 25 bp, Artificial
  probe
  misc_feature (1)..(25): SEQ ID NO: 1099; WAN024G5K; Start 887; Stop 911
ttgcctctggtagtattattgaagg

SEQ ID NO: 283273 - DNA, 25 bp, Artificial
  probe
  misc_feature (1)..(25): SEQ ID NO: 1099; WAN024G5K; Start 889; Stop 913
gcctctggtagtattattgaaggtc

SEQ ID NO: 283274 - DNA, 25 bp, Artificial
  probe
  misc_feature (1)..(25): SEQ ID NO: 1099; WAN024G5K; Start 890; Stop 914
cctctggtagtattattgaaggtca

SEQ ID NO: 283275 - DNA, 25 bp, Artificial
  probe
  misc_feature (1)..(25): SEQ ID NO: 1099; WAN024G5K; Start 888; Stop 912
tgcctctggtagtattattgaaggt

SEQ ID NO: 283276 - DNA, 25 bp, Artificial
  probe
  misc_feature (1)..(25): SEQ ID NO: 1099; WAN024G5K; Start 610; Stop 634
attgaacacttggaagaagaagcta

SEQ ID NO: 283277 - DNA, 25 bp, Artificial
  probe
  misc_feature (1)..(25): SEQ ID NO: 1099; WAN024G5K; Start 611; Stop 635
ttgaacacttggaagaagaagctaa

SEQ ID NO: 283278 - DNA, 25 bp, Artificial
  probe
  misc_feature (1)..(25): SEQ ID NO: 1099; WAN024G5K; Start 601; Stop 625
ccttggttgattgaacacttggaag

SEQ ID NO: 283279 - DNA, 25 bp, Artificial
  probe
  misc_feature (1)..(25): SEQ ID NO: 1099; WAN024G5K; Start 590; Stop 614
tcgttgatacaccttggttgattga

SEQ ID NO: 283280 - DNA, 25 bp, Artificial
  probe
  misc_feature (1)..(25): SEQ ID NO: 1099; WAN024G5K; Start 589; Stop 613
gtcgttgatacaccttggttgattg

SEQ ID NO: 283281 - DNA, 25 bp, Artificial
  probe
  misc_feature (1)..(25): SEQ ID NO: 1099; WAN024G5K; Start 1104; Stop 1128
gaaaggtgctaaagtaacagaggat

SEQ ID NO: 283282 - DNA, 25 bp, Artificial
  probe
  misc_feature (1)..(25): SEQ ID NO: 1099; WAN024G5K; Start 1105; Stop 1129
aaaggtgctaaagtaacagaggata

SEQ ID NO: 283283 - DNA, 25 bp, Artificial
  probe
  misc_feature (1)..(25): SEQ ID NO: 1099; WAN024G5K; Start 1095; Stop 1119
tgtggttaagaaaggtgctaaagta

SEQ ID NO: 283284 - DNA, 25 bp, Artificial
  probe
  misc_feature (1)..(25): SEQ ID NO: 1100; WAN024F29; Start 351; Stop 375
taagaccttggtaacagatgagatt

SEQ ID NO: 283285 - DNA, 25 bp, Artificial
  probe
  misc_feature (1)..(25): SEQ ID NO: 1100; WAN024F29; Start 350; Stop 374
ttaagaccttggtaacagatgagat

SEQ ID NO: 283286 - DNA, 25 bp, Artificial
  probe
  misc_feature (1)..(25): SEQ ID NO: 1100; WAN024F29; Start 349; Stop 373
attaagaccttggtaacagatgaga

SEQ ID NO: 283287 - DNA, 25 bp, Artificial
  probe
  misc_feature (1)..(25): SEQ ID NO: 1100; WAN024F29; Start 348; Stop 372
cattaagaccttggtaacagatgag

SEQ ID NO: 283288 - DNA, 25 bp, Artificial
  probe
  misc_feature (1)..(25): SEQ ID NO: 1100; WAN024F29; Start 347; Stop 371
gcattaagaccttggtaacagatga

SEQ ID NO: 283289 - DNA, 25 bp, Artificial
  probe
  misc_feature (1)..(25): SEQ ID NO: 1100; WAN024F29; Start 417; Stop 441
tatgaccatgattgatgctacagtt

SEQ ID NO: 283290 - DNA, 25 bp, Artificial
  probe
  misc_feature (1)..(25): SEQ ID NO: 1100; WAN024F29; Start 416; Stop 440
ctatgaccatgattgatgctacagt

SEQ ID NO: 283291 - DNA, 25 bp, Artificial
  probe
  misc_feature (1)..(25): SEQ ID NO: 1100; WAN024F29; Start 469; Stop 493
gagtctagccaccaagatgatagtt

SEQ ID NO: 283292 - DNA, 25 bp, Artificial
  probe
  misc_feature (1)..(25): SEQ ID NO: 1100; WAN024F29; Start 418; Stop 442
atgaccatgattgatgctacagttc

SEQ ID NO: 283293 - DNA, 25 bp, Artificial
  probe
  misc_feature (1)..(25): SEQ ID NO: 1100; WAN024F29; Start 346; Stop 370
cgcattaagaccttggtaacagatg

SEQ ID NO: 283294 - DNA, 25 bp, Artificial
  probe
  misc_feature (1)..(25): SEQ ID NO: 1100; WAN024F29; Start 415; Stop 439
gctatgaccatgattgatgctacag

SEQ ID NO: 283295 - DNA, 25 bp, Artificial
  probe
  misc_feature (1)..(25): SEQ ID NO: 1100; WAN024F29; Start 466; Stop 490
aaggagtctagccaccaagatgata

SEQ ID NO: 283296 - DNA, 25 bp, Artificial
  probe
  misc_feature (1)..(25): SEQ ID NO: 1100; WAN024F29; Start 309; Stop 333
aatctttatctgtgggcactatgag

SEQ ID NO: 283297 - DNA, 25 bp, Artificial
  probe
  misc_feature (1)..(25): SEQ ID NO: 1100; WAN024F29; Start 306; Stop 330
gctaatctttatctgtgggcactat

SEQ ID NO: 283298 - DNA, 25 bp, Artificial
  probe
  misc_feature (1)..(25): SEQ ID NO: 1100; WAN024F29; Start 352; Stop 376
aagaccttggtaacagatgagattt

SEQ ID NO: 283299 - DNA, 25 bp, Artificial
  probe
  misc_feature (1)..(25): SEQ ID NO: 1100; WAN024F29; Start 353; Stop 377
agaccttggtaacagatgagatttc

SEQ ID NO: 283300 - DNA, 25 bp, Artificial
  probe
  misc_feature (1)..(25): SEQ ID NO: 1100; WAN024F29; Start 308; Stop 332
taatctttatctgtgggcactatga

SEQ ID NO: 283301 - DNA, 25 bp, Artificial
  probe
  misc_feature (1)..(25): SEQ ID NO: 1100; WAN024F29; Start 307; Stop 331
ctaatctttatctgtgggcactatg

SEQ ID NO: 283302 - DNA, 25 bp, Artificial
  probe
  misc_feature (1)..(25): SEQ ID NO: 1100; WAN024F29; Start 354; Stop 378
gaccttggtaacagatgagatttcc

SEQ ID NO: 283303 - DNA, 25 bp, Artificial
  probe
  misc_feature (1)..(25): SEQ ID NO: 1100; WAN024F29; Start 467; Stop 491
aggagtctagccaccaagatgatag

SEQ ID NO: 283304 - DNA, 25 bp, Artificial
  probe
  misc_feature (1)..(25): SEQ ID NO: 1100; WAN024F29; Start 452; Stop 476
cagaagtgattggcaaggagtctag

SEQ ID NO: 283305 - DNA, 25 bp, Artificial
  probe
  misc_feature (1)..(25): SEQ ID NO: 1100; WAN024F29; Start 654; Stop 678
tgaacattatcaactgacagtagaa

SEQ ID NO: 283306 - DNA, 25 bp, Artificial
  probe
  misc_feature (1)..(25): SEQ ID NO: 1100; WAN024F29; Start 657; Stop 681
acattatcaactgacagtagaagaa

SEQ ID NO: 283307 - DNA, 25 bp, Artificial
  probe
  misc_feature (1)..(25): SEQ ID NO: 1100; WAN024F29; Start 656; Stop 680
aacattatcaactgacagtagaaga

SEQ ID NO: 283308 - DNA, 25 bp, Artificial
  probe
  misc_feature (1)..(25): SEQ ID NO: 1100; WAN024F29; Start 275; Stop 299
cttatgctgaagatttggctcaaga

SEQ ID NO: 283309 - DNA, 25 bp, Artificial
  probe
  misc_feature (1)..(25): SEQ ID NO: 1100; WAN024F29; Start 470; Stop 494
agtctagccaccaagatgatagttt

SEQ ID NO: 283310 - DNA, 25 bp, Artificial
  probe
  misc_feature (1)..(25): SEQ ID NO: 1100; WAN024F29; Start 356; Stop 380
ccttggtaacagatgagatttccct

SEQ ID NO: 283311 - DNA, 25 bp, Artificial
  probe
  misc_feature (1)..(25): SEQ ID NO: 1100; WAN024F29; Start 276; Stop 300
ttatgctgaagatttggctcaagag

SEQ ID NO: 283312 - DNA, 25 bp, Artificial
  probe
  misc_feature (1)..(25): SEQ ID NO: 1100; WAN024F29; Start 468; Stop 492
ggagtctagccaccaagatgatagt

SEQ ID NO: 283313 - DNA, 25 bp, Artificial
  probe
  misc_feature (1)..(25): SEQ ID NO: 1100; WAN024F29; Start 655; Stop 679
gaacattatcaactgacagtagaag

SEQ ID NO: 283314 - DNA, 25 bp, Artificial
  probe
  misc_feature (1)..(25): SEQ ID NO: 1100; WAN024F29; Start 310; Stop 334
atctttatctgtgggcactatgagg

SEQ ID NO: 283315 - DNA, 25 bp, Artificial
  probe
  misc_feature (1)..(25): SEQ ID NO: 1100; WAN024F29; Start 660; Stop 684
ttatcaactgacagtagaagaagaa

SEQ ID NO: 283316 - DNA, 25 bp, Artificial
  probe
  misc_feature (1)..(25): SEQ ID NO: 1100; WAN024F29; Start 658; Stop 682
cattatcaactgacagtagaagaag

SEQ ID NO: 283317 - DNA, 25 bp, Artificial
  probe
  misc_feature (1)..(25): SEQ ID NO: 1101; WAN024DDA-5; Start 1; Stop 25
atgaagattggatttatcggtttgg

SEQ ID NO: 283318 - DNA, 25 bp, Artificial
  probe
  misc_feature (1)..(25): SEQ ID NO: 1101; WAN024DDA-5; Start 2; Stop 26
tgaagattggatttatcggtttggg

SEQ ID NO: 283319 - DNA, 25 bp, Artificial
  probe
  misc_feature (1)..(25): SEQ ID NO: 1101; WAN024DDA-5; Start 72; Stop 96
gtcagatgagattctccttgccaat

SEQ ID NO: 283320 - DNA, 25 bp, Artificial
  probe
  misc_feature (1)..(25): SEQ ID NO: 1101; WAN024DDA-5; Start 73; Stop 97
tcagatgagattctccttgccaatc

SEQ ID NO: 283321 - DNA, 25 bp, Artificial
  probe
  misc_feature (1)..(25): SEQ ID NO: 1101; WAN024DDA-5; Start 77; Stop 101
atgagattctccttgccaatcgtag

SEQ ID NO: 283322 - DNA, 25 bp, Artificial
  probe
  misc_feature (1)..(25): SEQ ID NO: 1101; WAN024DDA-5; Start 76; Stop 100
gatgagattctccttgccaatcgta

SEQ ID NO: 283323 - DNA, 25 bp, Artificial
  probe
  misc_feature (1)..(25): SEQ ID NO: 1101; WAN024DDA-5; Start 81; Stop 105
gattctccttgccaatcgtagtcaa

SEQ ID NO: 283324 - DNA, 25 bp, Artificial
  probe
  misc_feature (1)..(25): SEQ ID NO: 1101; WAN024DDA-5; Start 79; Stop 103
gagattctccttgccaatcgtagtc

SEQ ID NO: 283325 - DNA, 25 bp, Artificial
  probe
  misc_feature (1)..(25): SEQ ID NO: 1101; WAN024DDA-5; Start 8; Stop 32
ttggatttatcggtttggggaatat

SEQ ID NO: 283326 - DNA, 25 bp, Artificial
  probe
  misc_feature (1)..(25): SEQ ID NO: 1101; WAN024DDA-5; Start 7; Stop 31
attggatttatcggtttggggaata

SEQ ID NO: 283327 - DNA, 25 bp, Artificial
  probe
  misc_feature (1)..(25): SEQ ID NO: 1101; WAN024DDA-5; Start 80; Stop 104
agattctccttgccaatcgtagtca

SEQ ID NO: 283328 - DNA, 25 bp, Artificial
  probe
  misc_feature (1)..(25): SEQ ID NO: 1101; WAN024DDA-5; Start 9; Stop 33
tggatttatcggtttggggaatatg

SEQ ID NO: 283329 - DNA, 25 bp, Artificial
  probe
  misc_feature (1)..(25): SEQ ID NO: 1101; WAN024DDA-5; Start 6; Stop 30
gattggatttatcggtttggggaat

SEQ ID NO: 283330 - DNA, 25 bp, Artificial
  probe
  misc_feature (1)..(25): SEQ ID NO: 1101; WAN024DDA-5; Start 78; Stop 102
tgagattctccttgccaatcgtagt

SEQ ID NO: 283331 - DNA, 25 bp, Artificial
  probe
  misc_feature (1)..(25): SEQ ID NO: 1101; WAN024DDA-5; Start 74; Stop 98
cagatgagattctccttgccaatcg

SEQ ID NO: 283332 - DNA, 25 bp, Artificial
  probe
  misc_feature (1)..(25): SEQ ID NO: 1101; WAN024DDA-5; Start 11; Stop 35
gatttatcggtttggggaatatggg

SEQ ID NO: 283333 - DNA, 25 bp, Artificial
  probe
  misc_feature (1)..(25): SEQ ID NO: 1101; WAN024DDA-5; Start 10; Stop 34
ggatttatcggtttggggaatatgg

SEQ ID NO: 283334 - DNA, 25 bp, Artificial
  probe
  misc_feature (1)..(25): SEQ ID NO: 1101; WAN024DDA-5; Start 3; Stop 27
gaagattggatttatcggtttgggg

SEQ ID NO: 283335 - DNA, 25 bp, Artificial
  probe
  misc_feature (1)..(25): SEQ ID NO: 1101; WAN024DDA-5; Start 12; Stop 36
atttatcggtttggggaatatgggt

SEQ ID NO: 283336 - DNA, 25 bp, Artificial
  probe
  misc_feature (1)..(25): SEQ ID NO: 1101; WAN024DDA-5; Start 75; Stop 99
agatgagattctccttgccaatcgt

SEQ ID NO: 283337 - DNA, 25 bp, Artificial
  probe
  misc_feature (1)..(25): SEQ ID NO: 1101; WAN024DDA-5; Start 5; Stop 29
agattggatttatcggtttggggaa

SEQ ID NO: 283338 - DNA, 25 bp, Artificial
  probe
  misc_feature (1)..(25): SEQ ID NO: 1101; WAN024DDA-5; Start 4; Stop 28
aagattggatttatcggtttgggga

SEQ ID NO: 283339 - DNA, 25 bp, Artificial
  probe
  misc_feature (1)..(25): SEQ ID NO: 1101; WAN024DDA-5; Start 82; Stop 106
attctccttgccaatcgtagtcaag

SEQ ID NO: 283340 - DNA, 25 bp, Artificial
  probe
  misc_feature (1)..(25): SEQ ID NO: 1101; WAN024DDA-5; Start 71; Stop 95
cgtcagatgagattctccttgccaa

SEQ ID NO: 283341 - DNA, 25 bp, Artificial
  probe
  misc_feature (1)..(25): SEQ ID NO: 1101; WAN024DDA-5; Start 13; Stop 37
tttatcggtttggggaatatgggtg

SEQ ID NO: 283342 - DNA, 25 bp, Artificial
  probe
  misc_feature (1)..(25): SEQ ID NO: 1101; WAN024DDA-5; Start 209; Stop 233
agttttctgaactgctttctcaata

SEQ ID NO: 283343 - DNA, 25 bp, Artificial
  probe
  misc_feature (1)..(25): SEQ ID NO: 1101; WAN024DDA-5; Start 14; Stop 38
ttatcggtttggggaatatgggtgc

SEQ ID NO: 283344 - DNA, 25 bp, Artificial
  probe
  misc_feature (1)..(25): SEQ ID NO: 1101; WAN024DDA-5; Start 196; Stop 220
gttaagcctgctcagttttctgaac

SEQ ID NO: 283345 - DNA, 25 bp, Artificial
  probe
  misc_feature (1)..(25): SEQ ID NO: 1101; WAN024DDA-5; Start 197; Stop 221
ttaagcctgctcagttttctgaact

SEQ ID NO: 283346 - DNA, 25 bp, Artificial
  probe
  misc_feature (1)..(25): SEQ ID NO: 1102; WAN024FYH; Start 744; Stop 768
attaacattggtaacatcgcttgga

SEQ ID NO: 283347 - DNA, 25 bp, Artificial
  probe
  misc_feature (1)..(25): SEQ ID NO: 1102; WAN024FYH; Start 745; Stop 769
ttaacattggtaacatcgcttggaa

SEQ ID NO: 283348 - DNA, 25 bp, Artificial
  probe
  misc_feature (1)..(25): SEQ ID NO: 1102; WAN024FYH; Start 797; Stop 821
tattagcaacaggagatcatagagc

SEQ ID NO: 283349 - DNA, 25 bp, Artificial
  probe
  misc_feature (1)..(25): SEQ ID NO: 1102; WAN024FYH; Start 806; Stop 830
caggagatcatagagcagtcaataa

SEQ ID NO: 283350 - DNA, 25 bp, Artificial
  probe
  misc_feature (1)..(25): SEQ ID NO: 1102; WAN024FYH; Start 746; Stop 770
taacattggtaacatcgcttggaag

SEQ ID NO: 283351 - DNA, 25 bp, Artificial
  probe
  misc_feature (1)..(25): SEQ ID NO: 1102; WAN024FYH; Start 808; Stop 832
ggagatcatagagcagtcaataaga

SEQ ID NO: 283352 - DNA, 25 bp, Artificial
  probe
  misc_feature (1)..(25): SEQ ID NO: 1102; WAN024FYH; Start 807; Stop 831
aggagatcatagagcagtcaataag

SEQ ID NO: 283353 - DNA, 25 bp, Artificial
  probe
  misc_feature (1)..(25): SEQ ID NO: 1102; WAN024FYH; Start 805; Stop 829
acaggagatcatagagcagtcaata

SEQ ID NO: 283354 - DNA, 25 bp, Artificial
  probe
  misc_feature (1)..(25): SEQ ID NO: 1102; WAN024FYH; Start 99; Stop 123
ttctcaagagttaggtgattatgga

SEQ ID NO: 283355 - DNA, 25 bp, Artificial
  probe
  misc_feature (1)..(25): SEQ ID NO: 1102; WAN024FYH; Start 98; Stop 122
gttctcaagagttaggtgattatgg

SEQ ID NO: 283356 - DNA, 25 bp, Artificial
  probe
  misc_feature (1)..(25): SEQ ID NO: 1102; WAN024FYH; Start 100; Stop 124
tctcaagagttaggtgattatggat

SEQ ID NO: 283357 - DNA, 25 bp, Artificial
  probe
  misc_feature (1)..(25): SEQ ID NO: 1102; WAN024FYH; Start 804; Stop 828
aacaggagatcatagagcagtcaat

SEQ ID NO: 283358 - DNA, 25 bp, Artificial
  probe
  misc_feature (1)..(25): SEQ ID NO: 1102; WAN024FYH; Start 798; Stop 822
attagcaacaggagatcatagagca

SEQ ID NO: 283359 - DNA, 25 bp, Artificial
  probe
  misc_feature (1)..(25): SEQ ID NO: 1102; WAN024FYH; Start 97; Stop 121
agttctcaagagttaggtgattatg

SEQ ID NO: 283360 - DNA, 25 bp, Artificial
  probe
  misc_feature (1)..(25): SEQ ID NO: 1102; WAN024FYH; Start 799; Stop 823
ttagcaacaggagatcatagagcag

SEQ ID NO: 283361 - DNA, 25 bp, Artificial
  probe
  misc_feature (1)..(25): SEQ ID NO: 1102; WAN024FYH; Start 885; Stop 909
cggaatgttaattgtcaatgatgat

SEQ ID NO: 283362 - DNA, 25 bp, Artificial
  probe
  misc_feature (1)..(25): SEQ ID NO: 1102; WAN024FYH; Start 803; Stop 827
caacaggagatcatagagcagtcaa

SEQ ID NO: 283363 - DNA, 25 bp, Artificial
  probe
  misc_feature (1)..(25): SEQ ID NO: 1102; WAN024FYH; Start 794; Stop 818
acttattagcaacaggagatcatag

SEQ ID NO: 283364 - DNA, 25 bp, Artificial
  probe
  misc_feature (1)..(25): SEQ ID NO: 1102; WAN024FYH; Start 810; Stop 834
agatcatagagcagtcaataagatg

SEQ ID NO: 283365 - DNA, 25 bp, Artificial
  probe
  misc_feature (1)..(25): SEQ ID NO: 1102; WAN024FYH; Start 809; Stop 833
gagatcatagagcagtcaataagat

SEQ ID NO: 283366 - DNA, 25 bp, Artificial
  probe
  misc_feature (1)..(25): SEQ ID NO: 1102; WAN024FYH; Start 1114; Stop 1138
cttggttatatcggagcagctattg

SEQ ID NO: 283367 - DNA, 25 bp, Artificial
  probe
  misc_feature (1)..(25): SEQ ID NO: 1102; WAN024FYH; Start 796; Stop 820
ttattagcaacaggagatcatagag

SEQ ID NO: 283368 - DNA, 25 bp, Artificial
  probe
  misc_feature (1)..(25): SEQ ID NO: 1102; WAN024FYH; Start 795; Stop 819
cttattagcaacaggagatcataga

SEQ ID NO: 283369 - DNA, 25 bp, Artificial
  probe
  misc_feature (1)..(25): SEQ ID NO: 1102; WAN024FYH; Start 475; Stop 499
actaacgacctttacctttatgtgt

SEQ ID NO: 283370 - DNA, 25 bp, Artificial
  probe
  misc_feature (1)..(25): SEQ ID NO: 1102; WAN024FYH; Start 1327; Stop 1351
gtgtttggtggactcatttatcttt

SEQ ID NO: 283371 - DNA, 25 bp, Artificial
  probe
  misc_feature (1)..(25): SEQ ID NO: 1102; WAN024FYH; Start 258; Stop 282
tgctacaatcctttcaatctcctta

SEQ ID NO: 283372 - DNA, 25 bp, Artificial
  probe
  misc_feature (1)..(25): SEQ ID NO: 1102; WAN024FYH; Start 149; Stop 173
ttatattgctcgctactttaggtgt

SEQ ID NO: 283373 - DNA, 25 bp, Artificial
  probe
  misc_feature (1)..(25): SEQ ID NO: 1102; WAN024FYH; Start 479; Stop 503
acgacctttacctttatgtgttctt

SEQ ID NO: 283374 - DNA, 25 bp, Artificial
  probe
  misc_feature (1)..(25): SEQ ID NO: 1102; WAN024FYH; Start 150; Stop 174
tatattgctcgctactttaggtgtc

SEQ ID NO: 283375 - DNA, 25 bp, Artificial
  probe
  misc_feature (1)..(25): SEQ ID NO: 1102; WAN024FYH; Start 1326; Stop 1350
tgtgtttggtggactcatttatctt

SEQ ID NO: 283376 - DNA, 25 bp, Artificial
  probe
  misc_feature (1)..(25): SEQ ID NO: 1102; WAN024FYH; Start 1093; Stop 1117
aacctgctattccttcctaaacttg

SEQ ID NO: 283377 - DNA, 25 bp, Artificial
  probe
  misc_feature (1)..(25): SEQ ID NO: 1102; WAN024FYH; Start 1113; Stop 1137
acttggttatatcggagcagctatt

SEQ ID NO: 283378 - DNA, 25 bp, Artificial
  probe
  misc_feature (1)..(25): SEQ ID NO: 1102; WAN024FYH; Start 467; Stop 491
tcaaatctactaacgacctttacct

SEQ ID NO: 283379 - DNA, 25 bp, Artificial
  probe
  misc_feature (1)..(25): SEQ ID NO: 1103; WAN024E26; Start 201; Stop 225
gcattcggtaaggatgtatgagata

SEQ ID NO: 283380 - DNA, 25 bp, Artificial
  probe
  misc_feature (1)..(25): SEQ ID NO: 1103; WAN024E26; Start 148; Stop 172
caagaggttattgagtatctggtca

SEQ ID NO: 283381 - DNA, 25 bp, Artificial
  probe
  misc_feature (1)..(25): SEQ ID NO: 1103; WAN024E26; Start 203; Stop 227
attcggtaaggatgtatgagataga

SEQ ID NO: 283382 - DNA, 25 bp, Artificial
  probe
  misc_feature (1)..(25): SEQ ID NO: 1103; WAN024E26; Start 204; Stop 228
ttcggtaaggatgtatgagatagaa

SEQ ID NO: 283383 - DNA, 25 bp, Artificial
  probe
  misc_feature (1)..(25): SEQ ID NO: 1103; WAN024E26; Start 149; Stop 173
aagaggttattgagtatctggtcag

SEQ ID NO: 283384 - DNA, 25 bp, Artificial
  probe
  misc_feature (1)..(25): SEQ ID NO: 1103; WAN024E26; Start 65; Stop 89
tagatgtgacttatcaggttccgat

SEQ ID NO: 283385 - DNA, 25 bp, Artificial
  probe
  misc_feature (1)..(25): SEQ ID NO: 1103; WAN024E26; Start 155; Stop 179
ttattgagtatctggtcagcacttg

SEQ ID NO: 283386 - DNA, 25 bp, Artificial
  probe
  misc_feature (1)..(25): SEQ ID NO: 1103; WAN024E26; Start 154; Stop 178
gttattgagtatctggtcagcactt

SEQ ID NO: 283387 - DNA, 25 bp, Artificial
  probe
  misc_feature (1)..(25): SEQ ID NO: 1103; WAN024E26; Start 202; Stop 226
cattcggtaaggatgtatgagatag

SEQ ID NO: 283388 - DNA, 25 bp, Artificial
  probe
  misc_feature (1)..(25): SEQ ID NO: 1103; WAN024E26; Start 66; Stop 90
agatgtgacttatcaggttccgatt

SEQ ID NO: 283389 - DNA, 25 bp, Artificial
  probe
  misc_feature (1)..(25): SEQ ID NO: 1103; WAN024E26; Start 64; Stop 88
gtagatgtgacttatcaggttccga

SEQ ID NO: 283390 - DNA, 25 bp, Artificial
  probe
  misc_feature (1)..(25): SEQ ID NO: 1103; WAN024E26; Start 28; Stop 52
aatgtagagcagacagacttaggtt

SEQ ID NO: 283391 - DNA, 25 bp, Artificial
  probe
  misc_feature (1)..(25): SEQ ID NO: 1103; WAN024E26; Start 150; Stop 174
agaggttattgagtatctggtcagc

SEQ ID NO: 283392 - DNA, 25 bp, Artificial
  probe
  misc_feature (1)..(25): SEQ ID NO: 1103; WAN024E26; Start 151; Stop 175
gaggttattgagtatctggtcagca

SEQ ID NO: 283393 - DNA, 25 bp, Artificial
  probe
  misc_feature (1)..(25): SEQ ID NO: 1103; WAN024E26; Start 140; Stop 164
tagaggaccaagaggttattgagta

SEQ ID NO: 283394 - DNA, 25 bp, Artificial
  probe
  misc_feature (1)..(25): SEQ ID NO: 1103; WAN024E26; Start 138; Stop 162
gatagaggaccaagaggttattgag

SEQ ID NO: 283395 - DNA, 25 bp, Artificial
  probe
  misc_feature (1)..(25): SEQ ID NO: 1103; WAN024E26; Start 142; Stop 166
gaggaccaagaggttattgagtatc

SEQ ID NO: 283396 - DNA, 25 bp, Artificial
  probe
  misc_feature (1)..(25): SEQ ID NO: 1103; WAN024E26; Start 147; Stop 171
ccaagaggttattgagtatctggtc

SEQ ID NO: 283397 - DNA, 25 bp, Artificial
  probe
  misc_feature (1)..(25): SEQ ID NO: 1103; WAN024E26; Start 145; Stop 169
gaccaagaggttattgagtatctgg

SEQ ID NO: 283398 - DNA, 25 bp, Artificial
  probe
  misc_feature (1)..(25): SEQ ID NO: 1103; WAN024E26; Start 144; Stop 168
ggaccaagaggttattgagtatctg

SEQ ID NO: 283399 - DNA, 25 bp, Artificial
  probe
  misc_feature (1)..(25): SEQ ID NO: 1103; WAN024E26; Start 143; Stop 167
aggaccaagaggttattgagtatct

SEQ ID NO: 283400 - DNA, 25 bp, Artificial
  probe
  misc_feature (1)..(25): SEQ ID NO: 1103; WAN024E26; Start 141; Stop 165
agaggaccaagaggttattgagtat

SEQ ID NO: 283401 - DNA, 25 bp, Artificial
  probe
  misc_feature (1)..(25): SEQ ID NO: 1103; WAN024E26; Start 139; Stop 163
atagaggaccaagaggttattgagt

SEQ ID NO: 283402 - DNA, 25 bp, Artificial
  probe
  misc_feature (1)..(25): SEQ ID NO: 1103; WAN024E26; Start 156; Stop 180
tattgagtatctggtcagcacttgg

SEQ ID NO: 283403 - DNA, 25 bp, Artificial
  probe
  misc_feature (1)..(25): SEQ ID NO: 1103; WAN024E26; Start 153; Stop 177
ggttattgagtatctggtcagcact

SEQ ID NO: 283404 - DNA, 25 bp, Artificial
  probe
  misc_feature (1)..(25): SEQ ID NO: 1103; WAN024E26; Start 152; Stop 176
aggttattgagtatctggtcagcac

SEQ ID NO: 283405 - DNA, 25 bp, Artificial
  probe
  misc_feature (1)..(25): SEQ ID NO: 1103; WAN024E26; Start 163; Stop 187
tatctggtcagcacttggaagtatc

SEQ ID NO: 283406 - DNA, 25 bp, Artificial
  probe
  misc_feature (1)..(25): SEQ ID NO: 1103; WAN024E26; Start 122; Stop 146
tacttatggaatgcaggatagagga

SEQ ID NO: 283407 - DNA, 25 bp, Artificial
  probe
  misc_feature (1)..(25): SEQ ID NO: 1103; WAN024E26; Start 121; Stop 145
ttacttatggaatgcaggatagagg

SEQ ID NO: 283408 - DNA, 25 bp, Artificial
  probe
  misc_feature (1)..(25): SEQ ID NO: 1103; WAN024E26; Start 95; Stop 119
agaatgaatacacggtcaagctatt

SEQ ID NO: 283409 - DNA, 25 bp, Artificial
  probe
  misc_feature (1)..(25): SEQ ID NO: 1103; WAN024E26; Start 94; Stop 118
aagaatgaatacacggtcaagctat

SEQ ID NO: 283410 - DNA, 25 bp, Artificial
  probe
  misc_feature (1)..(25): SEQ ID NO: 1103; WAN024E26; Start 137; Stop 161
ggatagaggaccaagaggttattga

SEQ ID NO: 283411 - DNA, 25 bp, Artificial
  probe
  misc_feature (1)..(25): SEQ ID NO: 1103; WAN024E26; Start 136; Stop 160
aggatagaggaccaagaggttattg

SEQ ID NO: 283412 - DNA, 25 bp, Artificial
  probe
  misc_feature (1)..(25): SEQ ID NO: 1104; WAN024FON; Start 584; Stop 608
atccagtaagttcgctaatacaaga

SEQ ID NO: 283413 - DNA, 25 bp, Artificial
  probe
  misc_feature (1)..(25): SEQ ID NO: 1104; WAN024FON; Start 585; Stop 609
tccagtaagttcgctaatacaagaa

SEQ ID NO: 283414 - DNA, 25 bp, Artificial
  probe
  misc_feature (1)..(25): SEQ ID NO: 1104; WAN024FON; Start 586; Stop 610
ccagtaagttcgctaatacaagaat

SEQ ID NO: 283415 - DNA, 25 bp, Artificial
  probe
  misc_feature (1)..(25): SEQ ID NO: 1104; WAN024FON; Start 946; Stop 970
ttgaggattgatcgttcgctatatt

SEQ ID NO: 283416 - DNA, 25 bp, Artificial
  probe
  misc_feature (1)..(25): SEQ ID NO: 1104; WAN024FON; Start 535; Stop 559
atattagaacttggacagcctagaa

SEQ ID NO: 283417 - DNA, 25 bp, Artificial
  probe
  misc_feature (1)..(25): SEQ ID NO: 1104; WAN024FON; Start 583; Stop 607
tatccagtaagttcgctaatacaag

SEQ ID NO: 283418 - DNA, 25 bp, Artificial
  probe
  misc_feature (1)..(25): SEQ ID NO: 1104; WAN024FON; Start 577; Stop 601
gagtcttatccagtaagttcgctaa

SEQ ID NO: 283419 - DNA, 25 bp, Artificial
  probe
  misc_feature (1)..(25): SEQ ID NO: 1104; WAN024FON; Start 573; Stop 597
tgatgagtcttatccagtaagttcg

SEQ ID NO: 283420 - DNA, 25 bp, Artificial
  probe
  misc_feature (1)..(25): SEQ ID NO: 1104; WAN024FON; Start 578; Stop 602
agtcttatccagtaagttcgctaat

SEQ ID NO: 283421 - DNA, 25 bp, Artificial
  probe
  misc_feature (1)..(25): SEQ ID NO: 1104; WAN024FON; Start 534; Stop 558
tatattagaacttggacagcctaga

SEQ ID NO: 283422 - DNA, 25 bp, Artificial
  probe
  misc_feature (1)..(25): SEQ ID NO: 1104; WAN024FON; Start 576; Stop 600
tgagtcttatccagtaagttcgcta

SEQ ID NO: 283423 - DNA, 25 bp, Artificial
  probe
  misc_feature (1)..(25): SEQ ID NO: 1104; WAN024FON; Start 582; Stop 606
ttatccagtaagttcgctaatacaa

SEQ ID NO: 283424 - DNA, 25 bp, Artificial
  probe
  misc_feature (1)..(25): SEQ ID NO: 1104; WAN024FON; Start 574; Stop 598
gatgagtcttatccagtaagttcgc

SEQ ID NO: 283425 - DNA, 25 bp, Artificial
  probe
  misc_feature (1)..(25): SEQ ID NO: 1104; WAN024FON; Start 575; Stop 599
atgagtcttatccagtaagttcgct

SEQ ID NO: 283426 - DNA, 25 bp, Artificial
  probe
  misc_feature (1)..(25): SEQ ID NO: 1104; WAN024FON; Start 887; Stop 911
ttgactacttattgttggatcgacc

SEQ ID NO: 283427 - DNA, 25 bp, Artificial
  probe
  misc_feature (1)..(25): SEQ ID NO: 1104; WAN024FON; Start 581; Stop 605
cttatccagtaagttcgctaataca

SEQ ID NO: 283428 - DNA, 25 bp, Artificial
  probe
  misc_feature (1)..(25): SEQ ID NO: 1104; WAN024FON; Start 886; Stop 910
attgactacttattgttggatcgac

SEQ ID NO: 283429 - DNA, 25 bp, Artificial
  probe
  misc_feature (1)..(25): SEQ ID NO: 1104; WAN024FON; Start 874; Stop 898
tcgagctgctatattgactacttat

SEQ ID NO: 283430 - DNA, 25 bp, Artificial
  probe
  misc_feature (1)..(25): SEQ ID NO: 1104; WAN024FON; Start 587; Stop 611
cagtaagttcgctaatacaagaatt

SEQ ID NO: 283431 - DNA, 25 bp, Artificial
  probe
  misc_feature (1)..(25): SEQ ID NO: 1104; WAN024FON; Start 205; Stop 229
ttacagaagaaacaatatcccgtga

SEQ ID NO: 283432 - DNA, 25 bp, Artificial
  probe
  misc_feature (1)..(25): SEQ ID NO: 1104; WAN024FON; Start 580; Stop 604
tcttatccagtaagttcgctaatac

SEQ ID NO: 283433 - DNA, 25 bp, Artificial
  probe
  misc_feature (1)..(25): SEQ ID NO: 1104; WAN024FON; Start 579; Stop 603
gtcttatccagtaagttcgctaata

SEQ ID NO: 283434 - DNA, 25 bp, Artificial
  probe
  misc_feature (1)..(25): SEQ ID NO: 1104; WAN024FON; Start 210; Stop 234
gaagaaacaatatcccgtgatgatg

SEQ ID NO: 283435 - DNA, 25 bp, Artificial
  probe
  misc_feature (1)..(25): SEQ ID NO: 1104; WAN024FON; Start 209; Stop 233
agaagaaacaatatcccgtgatgat

SEQ ID NO: 283436 - DNA, 25 bp, Artificial
  probe
  misc_feature (1)..(25): SEQ ID NO: 1104; WAN024FON; Start 206; Stop 230
tacagaagaaacaatatcccgtgat

SEQ ID NO: 283437 - DNA, 25 bp, Artificial
  probe
  misc_feature (1)..(25): SEQ ID NO: 1104; WAN024FON; Start 875; Stop 899
cgagctgctatattgactacttatt

SEQ ID NO: 283438 - DNA, 25 bp, Artificial
  probe
  misc_feature (1)..(25): SEQ ID NO: 1104; WAN024FON; Start 819; Stop 843
gaaggtcgatgctcaagaattactc

SEQ ID NO: 283439 - DNA, 25 bp, Artificial
  probe
  misc_feature (1)..(25): SEQ ID NO: 1104; WAN024FON; Start 204; Stop 228
attacagaagaaacaatatcccgtg

SEQ ID NO: 283440 - DNA, 25 bp, Artificial
  probe
  misc_feature (1)..(25): SEQ ID NO: 1104; WAN024FON; Start 572; Stop 596
atgatgagtcttatccagtaagttc

SEQ ID NO: 283441 - DNA, 25 bp, Artificial
  probe
  misc_feature (1)..(25): SEQ ID NO: 1104; WAN024FON; Start 648; Stop 672
tcgcaatgaaggaaagaaacaaatt

SEQ ID NO: 283442 - DNA, 25 bp, Artificial
  probe
  misc_feature (1)..(25): SEQ ID NO: 1104; WAN024FON; Start 208; Stop 232
cagaagaaacaatatcccgtgatga

SEQ ID NO: 283443 - DNA, 25 bp, Artificial
  probe
  misc_feature (1)..(25): SEQ ID NO: 1104; WAN024FON; Start 649; Stop 673
cgcaatgaaggaaagaaacaaattc

SEQ ID NO: 283444 - DNA, 25 bp, Artificial
  probe
  misc_feature (1)..(25): SEQ ID NO: 1104; WAN024FON; Start 211; Stop 235
aagaaacaatatcccgtgatgatgg

SEQ ID NO: 283445 - DNA, 25 bp, Artificial
  probe
  misc_feature (1)..(25): SEQ ID NO: 1105; WAN024ESQ; Start 23; Stop 47
aaatcgcccttgtatccctattaac

SEQ ID NO: 283446 - DNA, 25 bp, Artificial
  probe
  misc_feature (1)..(25): SEQ ID NO: 1105; WAN024ESQ; Start 407; Stop 431
tggtagggatgattgtaggatttat

SEQ ID NO: 283447 - DNA, 25 bp, Artificial
  probe
  misc_feature (1)..(25): SEQ ID NO: 1105; WAN024ESQ; Start 406; Stop 430
atggtagggatgattgtaggattta

SEQ ID NO: 283448 - DNA, 25 bp, Artificial
  probe
  misc_feature (1)..(25): SEQ ID NO: 1105; WAN024ESQ; Start 405; Stop 429
tatggtagggatgattgtaggattt

SEQ ID NO: 283449 - DNA, 25 bp, Artificial
  probe
  misc_feature (1)..(25): SEQ ID NO: 1105; WAN024ESQ; Start 402; Stop 426
aaatatggtagggatgattgtagga

SEQ ID NO: 283450 - DNA, 25 bp, Artificial
  probe
  misc_feature (1)..(25): SEQ ID NO: 1105; WAN024ESQ; Start 404; Stop 428
atatggtagggatgattgtaggatt

SEQ ID NO: 283451 - DNA, 25 bp, Artificial
  probe
  misc_feature (1)..(25): SEQ ID NO: 1105; WAN024ESQ; Start 403; Stop 427
aatatggtagggatgattgtaggat

SEQ ID NO: 283452 - DNA, 25 bp, Artificial
  probe
  misc_feature (1)..(25): SEQ ID NO: 1105; WAN024ESQ; Start 52; Stop 76
ctttctgtggttctaggttatttct

SEQ ID NO: 283453 - DNA, 25 bp, Artificial
  probe
  misc_feature (1)..(25): SEQ ID NO: 1105; WAN024ESQ; Start 86; Stop 110
caacacctacaggaattctaactct

SEQ ID NO: 283454 - DNA, 25 bp, Artificial
  probe
  misc_feature (1)..(25): SEQ ID NO: 1105; WAN024ESQ; Start 189; Stop 213
cttgattgacctcttatcaggctac

SEQ ID NO: 283455 - DNA, 25 bp, Artificial
  probe
  misc_feature (1)..(25): SEQ ID NO: 1105; WAN024ESQ; Start 188; Stop 212
tcttgattgacctcttatcaggcta

SEQ ID NO: 283456 - DNA, 25 bp, Artificial
  probe
  misc_feature (1)..(25): SEQ ID NO: 1105; WAN024ESQ; Start 87; Stop 111
aacacctacaggaattctaactctt

SEQ ID NO: 283457 - DNA, 25 bp, Artificial
  probe
  misc_feature (1)..(25): SEQ ID NO: 1105; WAN024ESQ; Start 85; Stop 109
ccaacacctacaggaattctaactc

SEQ ID NO: 283458 - DNA, 25 bp, Artificial
  probe
  misc_feature (1)..(25): SEQ ID NO: 1105; WAN024ESQ; Start 408; Stop 432
ggtagggatgattgtaggatttatt

SEQ ID NO: 283459 - DNA, 25 bp, Artificial
  probe
  misc_feature (1)..(25): SEQ ID NO: 1105; WAN024ESQ; Start 24; Stop 48
aatcgcccttgtatccctattaacc

SEQ ID NO: 283460 - DNA, 25 bp, Artificial
  probe
  misc_feature (1)..(25): SEQ ID NO: 1105; WAN024ESQ; Start 187; Stop 211
ttcttgattgacctcttatcaggct

SEQ ID NO: 283461 - DNA, 25 bp, Artificial
  probe
  misc_feature (1)..(25): SEQ ID NO: 1105; WAN024ESQ; Start 53; Stop 77
tttctgtggttctaggttatttctt

SEQ ID NO: 283462 - DNA, 25 bp, Artificial
  probe
  misc_feature (1)..(25): SEQ ID NO: 1105; WAN024ESQ; Start 32; Stop 56
ttgtatccctattaaccgccctttc

SEQ ID NO: 283463 - DNA, 25 bp, Artificial
  probe
  misc_feature (1)..(25): SEQ ID NO: 1105; WAN024ESQ; Start 31; Stop 55
cttgtatccctattaaccgcccttt

SEQ ID NO: 283464 - DNA, 25 bp, Artificial
  probe
  misc_feature (1)..(25): SEQ ID NO: 1105; WAN024ESQ; Start 50; Stop 74
ccctttctgtggttctaggttattt

SEQ ID NO: 283465 - DNA, 25 bp, Artificial
  probe
  misc_feature (1)..(25): SEQ ID NO: 1105; WAN024ESQ; Start 51; Stop 75
cctttctgtggttctaggttatttc

SEQ ID NO: 283466 - DNA, 25 bp, Artificial
  probe
  misc_feature (1)..(25): SEQ ID NO: 1105; WAN024ESQ; Start 190; Stop 214
ttgattgacctcttatcaggctacc

SEQ ID NO: 283467 - DNA, 25 bp, Artificial
  probe
  misc_feature (1)..(25): SEQ ID NO: 1105; WAN024ESQ; Start 411; Stop 435
agggatgattgtaggatttattctt

SEQ ID NO: 283468 - DNA, 25 bp, Artificial
  probe
  misc_feature (1)..(25): SEQ ID NO: 1105; WAN024ESQ; Start 210; Stop 234
ctaccctcagtggatgttctttagc

SEQ ID NO: 283469 - DNA, 25 bp, Artificial
  probe
  misc_feature (1)..(25): SEQ ID NO: 1105; WAN024ESQ; Start 209; Stop 233
gctaccctcagtggatgttctttag

SEQ ID NO: 283470 - DNA, 25 bp, Artificial
  probe
  misc_feature (1)..(25): SEQ ID NO: 1105; WAN024ESQ; Start 34; Stop 58
gtatccctattaaccgccctttctg

SEQ ID NO: 283471 - DNA, 25 bp, Artificial
  probe
  misc_feature (1)..(25): SEQ ID NO: 1105; WAN024ESQ; Start 55; Stop 79
tctgtggttctaggttatttcttaa

SEQ ID NO: 283472 - DNA, 25 bp, Artificial
  probe
  misc_feature (1)..(25): SEQ ID NO: 1105; WAN024ESQ; Start 54; Stop 78
ttctgtggttctaggttatttctta

SEQ ID NO: 283473 - DNA, 25 bp, Artificial
  probe
  misc_feature (1)..(25): SEQ ID NO: 1105; WAN024ESQ; Start 35; Stop 59
tatccctattaaccgccctttctgt

SEQ ID NO: 283474 - DNA, 25 bp, Artificial
  probe
  misc_feature (1)..(25): SEQ ID NO: 1105; WAN024ESQ; Start 33; Stop 57
tgtatccctattaaccgccctttct

SEQ ID NO: 283475 - DNA, 25 bp, Artificial
  probe
  misc_feature (1)..(25): SEQ ID NO: 1105; WAN024ESQ; Start 140; Stop 164
tttactttggtagtcgtgaaggagc

SEQ ID NO: 283476 - DNA, 25 bp, Artificial
  probe
  misc_feature (1)..(25): SEQ ID NO: 1105; WAN024ESQ; Start 409; Stop 433
gtagggatgattgtaggatttattc

SEQ ID NO: 283477 - DNA, 25 bp, Artificial
  probe
  misc_feature (1)..(25): SEQ ID NO: 1105; WAN024ESQ; Start 410; Stop 434
tagggatgattgtaggatttattct

SEQ ID NO: 283478 - DNA, 25 bp, Artificial
  probe
  misc_feature (1)..(25): SEQ ID NO: 1106; WAN024D7E; Start 725; Stop 749
gcaacatctacctggatattacact

SEQ ID NO: 283479 - DNA, 25 bp, Artificial
  probe
  misc_feature (1)..(25): SEQ ID NO: 1106; WAN024D7E; Start 724; Stop 748
agcaacatctacctggatattacac

SEQ ID NO: 283480 - DNA, 25 bp, Artificial
  probe
  misc_feature (1)..(25): SEQ ID NO: 1106; WAN024D7E; Start 398; Stop 422
tctatctctacaatactcgcctcag

SEQ ID NO: 283481 - DNA, 25 bp, Artificial
  probe
  misc_feature (1)..(25): SEQ ID NO: 1106; WAN024D7E; Start 397; Stop 421
gtctatctctacaatactcgcctca

SEQ ID NO: 283482 - DNA, 25 bp, Artificial
  probe
  misc_feature (1)..(25): SEQ ID NO: 1106; WAN024D7E; Start 746; Stop 770
cactagagatgaatcctgacttgtc

SEQ ID NO: 283483 - DNA, 25 bp, Artificial
  probe
  misc_feature (1)..(25): SEQ ID NO: 1106; WAN024D7E; Start 723; Stop 747
tagcaacatctacctggatattaca

SEQ ID NO: 283484 - DNA, 25 bp, Artificial
  probe
  misc_feature (1)..(25): SEQ ID NO: 1106; WAN024D7E; Start 744; Stop 768
tacactagagatgaatcctgacttg

SEQ ID NO: 283485 - DNA, 25 bp, Artificial
  probe
  misc_feature (1)..(25): SEQ ID NO: 1106; WAN024D7E; Start 749; Stop 773
tagagatgaatcctgacttgtctgt

SEQ ID NO: 283486 - DNA, 25 bp, Artificial
  probe
  misc_feature (1)..(25): SEQ ID NO: 1106; WAN024D7E; Start 748; Stop 772
ctagagatgaatcctgacttgtctg

SEQ ID NO: 283487 - DNA, 25 bp, Artificial
  probe
  misc_feature (1)..(25): SEQ ID NO: 1106; WAN024D7E; Start 396; Stop 420
ggtctatctctacaatactcgcctc

SEQ ID NO: 283488 - DNA, 25 bp, Artificial
  probe
  misc_feature (1)..(25): SEQ ID NO: 1106; WAN024D7E; Start 747; Stop 771
actagagatgaatcctgacttgtct

SEQ ID NO: 283489 - DNA, 25 bp, Artificial
  probe
  misc_feature (1)..(25): SEQ ID NO: 1106; WAN024D7E; Start 399; Stop 423
ctatctctacaatactcgcctcagt

SEQ ID NO: 283490 - DNA, 25 bp, Artificial
  probe
  misc_feature (1)..(25): SEQ ID NO: 1106; WAN024D7E; Start 743; Stop 767
ttacactagagatgaatcctgactt

SEQ ID NO: 283491 - DNA, 25 bp, Artificial
  probe
  misc_feature (1)..(25): SEQ ID NO: 1106; WAN024D7E; Start 942; Stop 966
ccaactagaagaactcttgactgat

SEQ ID NO: 283492 - DNA, 25 bp, Artificial
  probe
  misc_feature (1)..(25): SEQ ID NO: 1106; WAN024D7E; Start 940; Stop 964
aaccaactagaagaactcttgactg

SEQ ID NO: 283493 - DNA, 25 bp, Artificial
  probe
  misc_feature (1)..(25): SEQ ID NO: 1106; WAN024D7E; Start 291; Stop 315
cgatgttctaagagataccattcaa

SEQ ID NO: 283494 - DNA, 25 bp, Artificial
  probe
  misc_feature (1)..(25): SEQ ID NO: 1106; WAN024D7E; Start 944; Stop 968
aactagaagaactcttgactgatga

SEQ ID NO: 283495 - DNA, 25 bp, Artificial
  probe
  misc_feature (1)..(25): SEQ ID NO: 1106; WAN024D7E; Start 750; Stop 774
agagatgaatcctgacttgtctgtt

SEQ ID NO: 283496 - DNA, 25 bp, Artificial
  probe
  misc_feature (1)..(25): SEQ ID NO: 1106; WAN024D7E; Start 742; Stop 766
attacactagagatgaatcctgact

SEQ ID NO: 283497 - DNA, 25 bp, Artificial
  probe
  misc_feature (1)..(25): SEQ ID NO: 1106; WAN024D7E; Start 943; Stop 967
caactagaagaactcttgactgatg

SEQ ID NO: 283498 - DNA, 25 bp, Artificial
  probe
  misc_feature (1)..(25): SEQ ID NO: 1106; WAN024D7E; Start 945; Stop 969
actagaagaactcttgactgatgat

SEQ ID NO: 283499 - DNA, 25 bp, Artificial
  probe
  misc_feature (1)..(25): SEQ ID NO: 1106; WAN024D7E; Start 941; Stop 965
accaactagaagaactcttgactga

SEQ ID NO: 283500 - DNA, 25 bp, Artificial
  probe
  misc_feature (1)..(25): SEQ ID NO: 1106; WAN024D7E; Start 395; Stop 419
tggtctatctctacaatactcgcct

SEQ ID NO: 283501 - DNA, 25 bp, Artificial
  probe
  misc_feature (1)..(25): SEQ ID NO: 1106; WAN024D7E; Start 394; Stop 418
gtggtctatctctacaatactcgcc

SEQ ID NO: 283502 - DNA, 25 bp, Artificial
  probe
  misc_feature (1)..(25): SEQ ID NO: 1106; WAN024D7E; Start 265; Stop 289
tctatcatcatgttctatgtcggtt

SEQ ID NO: 283503 - DNA, 25 bp, Artificial
  probe
  misc_feature (1)..(25): SEQ ID NO: 1106; WAN024D7E; Start 264; Stop 288
ttctatcatcatgttctatgtcggt

SEQ ID NO: 283504 - DNA, 25 bp, Artificial
  probe
  misc_feature (1)..(25): SEQ ID NO: 1106; WAN024D7E; Start 734; Stop 758
acctggatattacactagagatgaa

SEQ ID NO: 283505 - DNA, 25 bp, Artificial
  probe
  misc_feature (1)..(25): SEQ ID NO: 1106; WAN024D7E; Start 745; Stop 769
acactagagatgaatcctgacttgt

SEQ ID NO: 283506 - DNA, 25 bp, Artificial
  probe
  misc_feature (1)..(25): SEQ ID NO: 1106; WAN024D7E; Start 263; Stop 287
cttctatcatcatgttctatgtcgg

SEQ ID NO: 283507 - DNA, 25 bp, Artificial
  probe
  misc_feature (1)..(25): SEQ ID NO: 1106; WAN024D7E; Start 97; Stop 121
ggtcatctccttcattcatccagtt

SEQ ID NO: 283508 - DNA, 25 bp, Artificial
  probe
  misc_feature (1)..(25): SEQ ID NO: 1106; WAN024D7E; Start 393; Stop 417
tgtggtctatctctacaatactcgc

SEQ ID NO: 283509 - DNA, 25 bp, Artificial
  probe
  misc_feature (1)..(25): SEQ ID NO: 1106; WAN024D7E; Start 946; Stop 970
ctagaagaactcttgactgatgatt

SEQ ID NO: 283510 - DNA, 25 bp, Artificial
  probe
  misc_feature (1)..(25): SEQ ID NO: 1106; WAN024D7E; Start 400; Stop 424
tatctctacaatactcgcctcagta

SEQ ID NO: 283511 - DNA, 25 bp, Artificial
  probe
  misc_feature (1)..(25): SEQ ID NO: 1107; WAN024CFF; Start 126; Stop 150
gctgattatgaatggcaatcgtatt

SEQ ID NO: 283512 - DNA, 25 bp, Artificial
  probe
  misc_feature (1)..(25): SEQ ID NO: 1107; WAN024CFF; Start 33; Stop 57
ttataccctaaccattgaagaagcg

SEQ ID NO: 283513 - DNA, 25 bp, Artificial
  probe
  misc_feature (1)..(25): SEQ ID NO: 1107; WAN024CFF; Start 127; Stop 151
ctgattatgaatggcaatcgtattc

SEQ ID NO: 283514 - DNA, 25 bp, Artificial
  probe
  misc_feature (1)..(25): SEQ ID NO: 1107; WAN024CFF; Start 121; Stop 145
aattggctgattatgaatggcaatc

SEQ ID NO: 283515 - DNA, 25 bp, Artificial
  probe
  misc_feature (1)..(25): SEQ ID NO: 1107; WAN024CFF; Start 125; Stop 149
ggctgattatgaatggcaatcgtat

SEQ ID NO: 283516 - DNA, 25 bp, Artificial
  probe
  misc_feature (1)..(25): SEQ ID NO: 1107; WAN024CFF; Start 1; Stop 25
atgaagcagactgacattcctattt

SEQ ID NO: 283517 - DNA, 25 bp, Artificial
  probe
  misc_feature (1)..(25): SEQ ID NO: 1107; WAN024CFF; Start 34; Stop 58
tataccctaaccattgaagaagcgt

SEQ ID NO: 283518 - DNA, 25 bp, Artificial
  probe
  misc_feature (1)..(25): SEQ ID NO: 1107; WAN024CFF; Start 2; Stop 26
tgaagcagactgacattcctatttg

SEQ ID NO: 283519 - DNA, 25 bp, Artificial
  probe
  misc_feature (1)..(25): SEQ ID NO: 1107; WAN024CFF; Start 119; Stop 143
caaattggctgattatgaatggcaa

SEQ ID NO: 283520 - DNA, 25 bp, Artificial
  probe
  misc_feature (1)..(25): SEQ ID NO: 1107; WAN024CFF; Start 3; Stop 27
gaagcagactgacattcctatttgg

SEQ ID NO: 283521 - DNA, 25 bp, Artificial
  probe
  misc_feature (1)..(25): SEQ ID NO: 1107; WAN024CFF; Start 178; Stop 202
attatagatacattggacgcaatct

SEQ ID NO: 283522 - DNA, 25 bp, Artificial
  probe
  misc_feature (1)..(25): SEQ ID NO: 1107; WAN024CFF; Start 124; Stop 148
tggctgattatgaatggcaatcgta

SEQ ID NO: 283523 - DNA, 25 bp, Artificial
  probe
  misc_feature (1)..(25): SEQ ID NO: 1107; WAN024CFF; Start 32; Stop 56
gttataccctaaccattgaagaagc

SEQ ID NO: 283524 - DNA, 25 bp, Artificial
  probe
  misc_feature (1)..(25): SEQ ID NO: 1107; WAN024CFF; Start 31; Stop 55
cgttataccctaaccattgaagaag

SEQ ID NO: 283525 - DNA, 25 bp, Artificial
  probe
  misc_feature (1)..(25): SEQ ID NO: 1107; WAN024CFF; Start 122; Stop 146
attggctgattatgaatggcaatcg

SEQ ID NO: 283526 - DNA, 25 bp, Artificial
  probe
  misc_feature (1)..(25): SEQ ID NO: 1107; WAN024CFF; Start 35; Stop 59
ataccctaaccattgaagaagcgtc

SEQ ID NO: 283527 - DNA, 25 bp, Artificial
  probe
  misc_feature (1)..(25): SEQ ID NO: 1107; WAN024CFF; Start 177; Stop 201
aattatagatacattggacgcaatc

SEQ ID NO: 283528 - DNA, 25 bp, Artificial
  probe
  misc_feature (1)..(25): SEQ ID NO: 1107; WAN024CFF; Start 116; Stop 140
atgcaaattggctgattatgaatgg

SEQ ID NO: 283529 - DNA, 25 bp, Artificial
  probe
  misc_feature (1)..(25): SEQ ID NO: 1107; WAN024CFF; Start 115; Stop 139
aatgcaaattggctgattatgaatg

SEQ ID NO: 283530 - DNA, 25 bp, Artificial
  probe
  misc_feature (1)..(25): SEQ ID NO: 1107; WAN024CFF; Start 4; Stop 28
aagcagactgacattcctatttggg

SEQ ID NO: 283531 - DNA, 25 bp, Artificial
  probe
  misc_feature (1)..(25): SEQ ID NO: 1107; WAN024CFF; Start 120; Stop 144
aaattggctgattatgaatggcaat

SEQ ID NO: 283532 - DNA, 25 bp, Artificial
  probe
  misc_feature (1)..(25): SEQ ID NO: 1107; WAN024CFF; Start 118; Stop 142
gcaaattggctgattatgaatggca

SEQ ID NO: 283533 - DNA, 25 bp, Artificial
  probe
  misc_feature (1)..(25): SEQ ID NO: 1107; WAN024CFF; Start 114; Stop 138
aaatgcaaattggctgattatgaat

SEQ ID NO: 283534 - DNA, 25 bp, Artificial
  probe
  misc_feature (1)..(25): SEQ ID NO: 1107; WAN024CFF; Start 136; Stop 160
aatggcaatcgtattcagattaaac

SEQ ID NO: 283535 - DNA, 25 bp, Artificial
  probe
  misc_feature (1)..(25): SEQ ID NO: 1107; WAN024CFF; Start 123; Stop 147
ttggctgattatgaatggcaatcgt

SEQ ID NO: 283536 - DNA, 25 bp, Artificial
  probe
  misc_feature (1)..(25): SEQ ID NO: 1107; WAN024CFF; Start 135; Stop 159
gaatggcaatcgtattcagattaaa

SEQ ID NO: 283537 - DNA, 25 bp, Artificial
  probe
  misc_feature (1)..(25): SEQ ID NO: 1107; WAN024CFF; Start 30; Stop 54
acgttataccctaaccattgaagaa

SEQ ID NO: 283538 - DNA, 25 bp, Artificial
  probe
  misc_feature (1)..(25): SEQ ID NO: 1107; WAN024CFF; Start 137; Stop 161
atggcaatcgtattcagattaaacg

SEQ ID NO: 283539 - DNA, 25 bp, Artificial
  probe
  misc_feature (1)..(25): SEQ ID NO: 1107; WAN024CFF; Start 180; Stop 204
tatagatacattggacgcaatctag

SEQ ID NO: 283540 - DNA, 25 bp, Artificial
  probe
  misc_feature (1)..(25): SEQ ID NO: 1107; WAN024CFF; Start 179; Stop 203
ttatagatacattggacgcaatcta

SEQ ID NO: 283541 - DNA, 25 bp, Artificial
  probe
  misc_feature (1)..(25): SEQ ID NO: 1107; WAN024CFF; Start 117; Stop 141
tgcaaattggctgattatgaatggc

SEQ ID NO: 283542 - DNA, 25 bp, Artificial
  probe
  misc_feature (1)..(25): SEQ ID NO: 1107; WAN024CFF; Start 36; Stop 60
taccctaaccattgaagaagcgtca

SEQ ID NO: 283543 - DNA, 25 bp, Artificial
  probe
  misc_feature (1)..(25): SEQ ID NO: 1107; WAN024CFF; Start 5; Stop 29
agcagactgacattcctatttggga

SEQ ID NO: 283544 - DNA, 25 bp, Artificial
  probe
  misc_feature (1)..(25): SEQ ID NO: 1108; WAN024FFE; Start 1114; Stop 1138
gaactagaacgtaagaagcaagaac

SEQ ID NO: 283545 - DNA, 25 bp, Artificial
  probe
  misc_feature (1)..(25): SEQ ID NO: 1108; WAN024FFE; Start 1115; Stop 1139
aactagaacgtaagaagcaagaact

SEQ ID NO: 283546 - DNA, 25 bp, Artificial
  probe
  misc_feature (1)..(25): SEQ ID NO: 1108; WAN024FFE; Start 1131; Stop 1155
gcaagaactattagctcgattagaa

SEQ ID NO: 283547 - DNA, 25 bp, Artificial
  probe
  misc_feature (1)..(25): SEQ ID NO: 1108; WAN024FFE; Start 1121; Stop 1145
aacgtaagaagcaagaactattagc

SEQ ID NO: 283548 - DNA, 25 bp, Artificial
  probe
  misc_feature (1)..(25): SEQ ID NO: 1108; WAN024FFE; Start 1116; Stop 1140
actagaacgtaagaagcaagaacta

SEQ ID NO: 283549 - DNA, 25 bp, Artificial
  probe
  misc_feature (1)..(25): SEQ ID NO: 1108; WAN024FFE; Start 1081; Stop 1105
tataagaatgaaaccagcgaggaaa

SEQ ID NO: 283550 - DNA, 25 bp, Artificial
  probe
  misc_feature (1)..(25): SEQ ID NO: 1108; WAN024FFE; Start 1080; Stop 1104
atataagaatgaaaccagcgaggaa

SEQ ID NO: 283551 - DNA, 25 bp, Artificial
  probe
  misc_feature (1)..(25): SEQ ID NO: 1108; WAN024FFE; Start 1079; Stop 1103
aatataagaatgaaaccagcgagga

SEQ ID NO: 283552 - DNA, 25 bp, Artificial
  probe
  misc_feature (1)..(25): SEQ ID NO: 1108; WAN024FFE; Start 1078; Stop 1102
gaatataagaatgaaaccagcgagg

SEQ ID NO: 283553 - DNA, 25 bp, Artificial
  probe
  misc_feature (1)..(25): SEQ ID NO: 1108; WAN024FFE; Start 1113; Stop 1137
ggaactagaacgtaagaagcaagaa

SEQ ID NO: 283554 - DNA, 25 bp, Artificial
  probe
  misc_feature (1)..(25): SEQ ID NO: 1108; WAN024FFE; Start 560; Stop 584
atgtcttaaacctctttgctattgc

SEQ ID NO: 283555 - DNA, 25 bp, Artificial
  probe
  misc_feature (1)..(25): SEQ ID NO: 1108; WAN024FFE; Start 183; Stop 207
caactttgggatggatagactgata

SEQ ID NO: 283556 - DNA, 25 bp, Artificial
  probe
  misc_feature (1)..(25): SEQ ID NO: 1108; WAN024FFE; Start 184; Stop 208
aactttgggatggatagactgataa

SEQ ID NO: 283557 - DNA, 25 bp, Artificial
  probe
  misc_feature (1)..(25): SEQ ID NO: 1108; WAN024FFE; Start 100; Stop 124
gcactgagcctttatctttatacaa

SEQ ID NO: 283558 - DNA, 25 bp, Artificial
  probe
  misc_feature (1)..(25): SEQ ID NO: 1108; WAN024FFE; Start 1077; Stop 1101
tgaatataagaatgaaaccagcgag

SEQ ID NO: 283559 - DNA, 25 bp, Artificial
  probe
  misc_feature (1)..(25): SEQ ID NO: 1108; WAN024FFE; Start 558; Stop 582
cgatgtcttaaacctctttgctatt

SEQ ID NO: 283560 - DNA, 25 bp, Artificial
  probe
  misc_feature (1)..(25): SEQ ID NO: 1108; WAN024FFE; Start 185; Stop 209
actttgggatggatagactgataaa

SEQ ID NO: 283561 - DNA, 25 bp, Artificial
  probe
  misc_feature (1)..(25): SEQ ID NO: 1108; WAN024FFE; Start 557; Stop 581
ccgatgtcttaaacctctttgctat

SEQ ID NO: 283562 - DNA, 25 bp, Artificial
  probe
  misc_feature (1)..(25): SEQ ID NO: 1108; WAN024FFE; Start 1111; Stop 1135
ctggaactagaacgtaagaagcaag

SEQ ID NO: 283563 - DNA, 25 bp, Artificial
  probe
  misc_feature (1)..(25): SEQ ID NO: 1108; WAN024FFE; Start 1117; Stop 1141
ctagaacgtaagaagcaagaactat

SEQ ID NO: 283564 - DNA, 25 bp, Artificial
  probe
  misc_feature (1)..(25): SEQ ID NO: 1108; WAN024FFE; Start 179; Stop 203
atctcaactttgggatggatagact

SEQ ID NO: 283565 - DNA, 25 bp, Artificial
  probe
  misc_feature (1)..(25): SEQ ID NO: 1108; WAN024FFE; Start 1082; Stop 1106
ataagaatgaaaccagcgaggaaac

SEQ ID NO: 283566 - DNA, 25 bp, Artificial
  probe
  misc_feature (1)..(25): SEQ ID NO: 1108; WAN024FFE; Start 1112; Stop 1136
tggaactagaacgtaagaagcaaga

SEQ ID NO: 283567 - DNA, 25 bp, Artificial
  probe
  misc_feature (1)..(25): SEQ ID NO: 1108; WAN024FFE; Start 561; Stop 585
tgtcttaaacctctttgctattgcc

SEQ ID NO: 283568 - DNA, 25 bp, Artificial
  probe
  misc_feature (1)..(25): SEQ ID NO: 1108; WAN024FFE; Start 556; Stop 580
tccgatgtcttaaacctctttgcta

SEQ ID NO: 283569 - DNA, 25 bp, Artificial
  probe
  misc_feature (1)..(25): SEQ ID NO: 1108; WAN024FFE; Start 1110; Stop 1134
tctggaactagaacgtaagaagcaa

SEQ ID NO: 283570 - DNA, 25 bp, Artificial
  probe
  misc_feature (1)..(25): SEQ ID NO: 1108; WAN024FFE; Start 559; Stop 583
gatgtcttaaacctctttgctattg

SEQ ID NO: 283571 - DNA, 25 bp, Artificial
  probe
  misc_feature (1)..(25): SEQ ID NO: 1108; WAN024FFE; Start 182; Stop 206
tcaactttgggatggatagactgat

SEQ ID NO: 283572 - DNA, 25 bp, Artificial
  probe
  misc_feature (1)..(25): SEQ ID NO: 1108; WAN024FFE; Start 1119; Stop 1143
agaacgtaagaagcaagaactatta

SEQ ID NO: 283573 - DNA, 25 bp, Artificial
  probe
  misc_feature (1)..(25): SEQ ID NO: 1108; WAN024FFE; Start 1118; Stop 1142
tagaacgtaagaagcaagaactatt

SEQ ID NO: 283574 - DNA, 25 bp, Artificial
  probe
  misc_feature (1)..(25): SEQ ID NO: 1108; WAN024FFE; Start 1120; Stop 1144
gaacgtaagaagcaagaactattag

SEQ ID NO: 283575 - DNA, 25 bp, Artificial
  probe
  misc_feature (1)..(25): SEQ ID NO: 1108; WAN024FFE; Start 1075; Stop 1099
cctgaatataagaatgaaaccagcg

SEQ ID NO: 283576 - DNA, 25 bp, Artificial
  probe
  misc_feature (1)..(25): SEQ ID NO: 1108; WAN024FFE; Start 180; Stop 204
tctcaactttgggatggatagactg

SEQ ID NO: 283577 - DNA, 25 bp, Artificial
  probe
  misc_feature (1)..(25): SEQ ID NO: 1109; WAN024FFD; Start 1100; Stop 1124
ctgaggaattagaagagatggaacg

SEQ ID NO: 283578 - DNA, 25 bp, Artificial
  probe
  misc_feature (1)..(25): SEQ ID NO: 1109; WAN024FFD; Start 1099; Stop 1123
gctgaggaattagaagagatggaac

SEQ ID NO: 283579 - DNA, 25 bp, Artificial
  probe
  misc_feature (1)..(25): SEQ ID NO: 1109; WAN024FFD; Start 851; Stop 875
tggacgaagtcatcaatatcattct

SEQ ID NO: 283580 - DNA, 25 bp, Artificial
  probe
  misc_feature (1)..(25): SEQ ID NO: 1109; WAN024FFD; Start 850; Stop 874
ctggacgaagtcatcaatatcattc

SEQ ID NO: 283581 - DNA, 25 bp, Artificial
  probe
  misc_feature (1)..(25): SEQ ID NO: 1109; WAN024FFD; Start 1098; Stop 1122
cgctgaggaattagaagagatggaa

SEQ ID NO: 283582 - DNA, 25 bp, Artificial
  probe
  misc_feature (1)..(25): SEQ ID NO: 1109; WAN024FFD; Start 852; Stop 876
ggacgaagtcatcaatatcattctt

SEQ ID NO: 283583 - DNA, 25 bp, Artificial
  probe
  misc_feature (1)..(25): SEQ ID NO: 1109; WAN024FFD; Start 849; Stop 873
gctggacgaagtcatcaatatcatt

SEQ ID NO: 283584 - DNA, 25 bp, Artificial
  probe
  misc_feature (1)..(25): SEQ ID NO: 1109; WAN024FFD; Start 1101; Stop 1125
tgaggaattagaagagatggaacgc

SEQ ID NO: 283585 - DNA, 25 bp, Artificial
  probe
  misc_feature (1)..(25): SEQ ID NO: 1109; WAN024FFD; Start 848; Stop 872
tgctggacgaagtcatcaatatcat

SEQ ID NO: 283586 - DNA, 25 bp, Artificial
  probe
  misc_feature (1)..(25): SEQ ID NO: 1109; WAN024FFD; Start 1120; Stop 1144
gaacgccaaaccctagaattattag

SEQ ID NO: 283587 - DNA, 25 bp, Artificial
  probe
  misc_feature (1)..(25): SEQ ID NO: 1109; WAN024FFD; Start 847; Stop 871
ttgctggacgaagtcatcaatatca

SEQ ID NO: 283588 - DNA, 25 bp, Artificial
  probe
  misc_feature (1)..(25): SEQ ID NO: 1109; WAN024FFD; Start 1124; Stop 1148
gccaaaccctagaattattagcaaa

SEQ ID NO: 283589 - DNA, 25 bp, Artificial
  probe
  misc_feature (1)..(25): SEQ ID NO: 1109; WAN024FFD; Start 1102; Stop 1126
gaggaattagaagagatggaacgcc

SEQ ID NO: 283590 - DNA, 25 bp, Artificial
  probe
  misc_feature (1)..(25): SEQ ID NO: 1109; WAN024FFD; Start 1095; Stop 1119
atccgctgaggaattagaagagatg

SEQ ID NO: 283591 - DNA, 25 bp, Artificial
  probe
  misc_feature (1)..(25): SEQ ID NO: 1109; WAN024FFD; Start 1094; Stop 1118
catccgctgaggaattagaagagat

SEQ ID NO: 283592 - DNA, 25 bp, Artificial
  probe
  misc_feature (1)..(25): SEQ ID NO: 1109; WAN024FFD; Start 1119; Stop 1143
ggaacgccaaaccctagaattatta

SEQ ID NO: 283593 - DNA, 25 bp, Artificial
  probe
  misc_feature (1)..(25): SEQ ID NO: 1109; WAN024FFD; Start 897; Stop 921
cgattcggcaaatatcaatgagaaa

SEQ ID NO: 283594 - DNA, 25 bp, Artificial
  probe
  misc_feature (1)..(25): SEQ ID NO: 1109; WAN024FFD; Start 1123; Stop 1147
cgccaaaccctagaattattagcaa

SEQ ID NO: 283595 - DNA, 25 bp, Artificial
  probe
  misc_feature (1)..(25): SEQ ID NO: 1109; WAN024FFD; Start 1121; Stop 1145
aacgccaaaccctagaattattagc

SEQ ID NO: 283596 - DNA, 25 bp, Artificial
  probe
  misc_feature (1)..(25): SEQ ID NO: 1109; WAN024FFD; Start 1092; Stop 1116
gtcatccgctgaggaattagaagag

SEQ ID NO: 283597 - DNA, 25 bp, Artificial
  probe
  misc_feature (1)..(25): SEQ ID NO: 1109; WAN024FFD; Start 1097; Stop 1121
ccgctgaggaattagaagagatgga

SEQ ID NO: 283598 - DNA, 25 bp, Artificial
  probe
  misc_feature (1)..(25): SEQ ID NO: 1109; WAN024FFD; Start 1093; Stop 1117
tcatccgctgaggaattagaagaga

SEQ ID NO: 283599 - DNA, 25 bp, Artificial
  probe
  misc_feature (1)..(25): SEQ ID NO: 1109; WAN024FFD; Start 1122; Stop 1146
acgccaaaccctagaattattagca

SEQ ID NO: 283600 - DNA, 25 bp, Artificial
  probe
  misc_feature (1)..(25): SEQ ID NO: 1109; WAN024FFD; Start 1104; Stop 1128
ggaattagaagagatggaacgccaa

SEQ ID NO: 283601 - DNA, 25 bp, Artificial
  probe
  misc_feature (1)..(25): SEQ ID NO: 1109; WAN024FFD; Start 891; Stop 915
taaggtcgattcggcaaatatcaat

SEQ ID NO: 283602 - DNA, 25 bp, Artificial
  probe
  misc_feature (1)..(25): SEQ ID NO: 1109; WAN024FFD; Start 890; Stop 914
ataaggtcgattcggcaaatatcaa

SEQ ID NO: 283603 - DNA, 25 bp, Artificial
  probe
  misc_feature (1)..(25): SEQ ID NO: 1109; WAN024FFD; Start 889; Stop 913
aataaggtcgattcggcaaatatca

SEQ ID NO: 283604 - DNA, 25 bp, Artificial
  probe
  misc_feature (1)..(25): SEQ ID NO: 1109; WAN024FFD; Start 885; Stop 909
ctttaataaggtcgattcggcaaat

SEQ ID NO: 283605 - DNA, 25 bp, Artificial
  probe
  misc_feature (1)..(25): SEQ ID NO: 1109; WAN024FFD; Start 888; Stop 912
taataaggtcgattcggcaaatatc

SEQ ID NO: 283606 - DNA, 25 bp, Artificial
  probe
  misc_feature (1)..(25): SEQ ID NO: 1109; WAN024FFD; Start 886; Stop 910
tttaataaggtcgattcggcaaata

SEQ ID NO: 283607 - DNA, 25 bp, Artificial
  probe
  misc_feature (1)..(25): SEQ ID NO: 1109; WAN024FFD; Start 896; Stop 920
tcgattcggcaaatatcaatgagaa

SEQ ID NO: 283608 - DNA, 25 bp, Artificial
  probe
  misc_feature (1)..(25): SEQ ID NO: 1109; WAN024FFD; Start 887; Stop 911
ttaataaggtcgattcggcaaatat

SEQ ID NO: 283609 - DNA, 25 bp, Artificial
  probe
  misc_feature (1)..(25): SEQ ID NO: 1109; WAN024FFD; Start 1105; Stop 1129
gaattagaagagatggaacgccaaa

SEQ ID NO: 283610 - DNA, 25 bp, Artificial
  probe
  misc_feature (1)..(25): SEQ ID NO: 1110; WAN024C8Y; Start 143; Stop 167
tacgaacgataactgctttaacaac

SEQ ID NO: 283611 - DNA, 25 bp, Artificial
  probe
  misc_feature (1)..(25): SEQ ID NO: 1110; WAN024C8Y; Start 142; Stop 166
gtacgaacgataactgctttaacaa

SEQ ID NO: 283612 - DNA, 25 bp, Artificial
  probe
  misc_feature (1)..(25): SEQ ID NO: 1110; WAN024C8Y; Start 131; Stop 155
cacctgatttagtacgaacgataac

SEQ ID NO: 283613 - DNA, 25 bp, Artificial
  probe
  misc_feature (1)..(25): SEQ ID NO: 1110; WAN024C8Y; Start 253; Stop 277
gaaccaccaagaactttgatagtca

SEQ ID NO: 283614 - DNA, 25 bp, Artificial
  probe
  misc_feature (1)..(25): SEQ ID NO: 1110; WAN024C8Y; Start 252; Stop 276
tgaaccaccaagaactttgatagtc

SEQ ID NO: 283615 - DNA, 25 bp, Artificial
  probe
  misc_feature (1)..(25): SEQ ID NO: 1110; WAN024C8Y; Start 251; Stop 275
ctgaaccaccaagaactttgatagt

SEQ ID NO: 283616 - DNA, 25 bp, Artificial
  probe
  misc_feature (1)..(25): SEQ ID NO: 1110; WAN024C8Y; Start 130; Stop 154
gcacctgatttagtacgaacgataa

SEQ ID NO: 283617 - DNA, 25 bp, Artificial
  probe
  misc_feature (1)..(25): SEQ ID NO: 1110; WAN024C8Y; Start 250; Stop 274
cctgaaccaccaagaactttgatag

SEQ ID NO: 283618 - DNA, 25 bp, Artificial
  probe
  misc_feature (1)..(25): SEQ ID NO: 1110; WAN024C8Y; Start 64; Stop 88
ttgtcttcacggatgataactgctg

SEQ ID NO: 283619 - DNA, 25 bp, Artificial
  probe
  misc_feature (1)..(25): SEQ ID NO: 1110; WAN024C8Y; Start 135; Stop 159
tgatttagtacgaacgataactgct

SEQ ID NO: 283620 - DNA, 25 bp, Artificial
  probe
  misc_feature (1)..(25): SEQ ID NO: 1110; WAN024C8Y; Start 134; Stop 158
ctgatttagtacgaacgataactgc

SEQ ID NO: 283621 - DNA, 25 bp, Artificial
  probe
  misc_feature (1)..(25): SEQ ID NO: 1110; WAN024C8Y; Start 132; Stop 156
acctgatttagtacgaacgataact

SEQ ID NO: 283622 - DNA, 25 bp, Artificial
  probe
  misc_feature (1)..(25): SEQ ID NO: 1110; WAN024C8Y; Start 141; Stop 165
agtacgaacgataactgctttaaca

SEQ ID NO: 283623 - DNA, 25 bp, Artificial
  probe
  misc_feature (1)..(25): SEQ ID NO: 1110; WAN024C8Y; Start 133; Stop 157
cctgatttagtacgaacgataactg

SEQ ID NO: 283624 - DNA, 25 bp, Artificial
  probe
  misc_feature (1)..(25): SEQ ID NO: 1110; WAN024C8Y; Start 136; Stop 160
gatttagtacgaacgataactgctt

SEQ ID NO: 283625 - DNA, 25 bp, Artificial
  probe
  misc_feature (1)..(25): SEQ ID NO: 1110; WAN024C8Y; Start 249; Stop 273
tcctgaaccaccaagaactttgata

SEQ ID NO: 283626 - DNA, 25 bp, Artificial
  probe
  misc_feature (1)..(25): SEQ ID NO: 1110; WAN024C8Y; Start 140; Stop 164
tagtacgaacgataactgctttaac

SEQ ID NO: 283627 - DNA, 25 bp, Artificial
  probe
  misc_feature (1)..(25): SEQ ID NO: 1110; WAN024C8Y; Start 129; Stop 153
agcacctgatttagtacgaacgata

SEQ ID NO: 283628 - DNA, 25 bp, Artificial
  probe
  misc_feature (1)..(25): SEQ ID NO: 1110; WAN024C8Y; Start 137; Stop 161
atttagtacgaacgataactgcttt

SEQ ID NO: 283629 - DNA, 25 bp, Artificial
  probe
  misc_feature (1)..(25): SEQ ID NO: 1110; WAN024C8Y; Start 144; Stop 168
acgaacgataactgctttaacaacg

SEQ ID NO: 283630 - DNA, 25 bp, Artificial
  probe
  misc_feature (1)..(25): SEQ ID NO: 1110; WAN024C8Y; Start 139; Stop 163
ttagtacgaacgataactgctttaa

SEQ ID NO: 283631 - DNA, 25 bp, Artificial
  probe
  misc_feature (1)..(25): SEQ ID NO: 1110; WAN024C8Y; Start 138; Stop 162
tttagtacgaacgataactgcttta

SEQ ID NO: 283632 - DNA, 25 bp, Artificial
  probe
  misc_feature (1)..(25): SEQ ID NO: 1110; WAN024C8Y; Start 63; Stop 87
tttgtcttcacggatgataactgct

SEQ ID NO: 283633 - DNA, 25 bp, Artificial
  probe
  misc_feature (1)..(25): SEQ ID NO: 1110; WAN024C8Y; Start 151; Stop 175
ataactgctttaacaacgtcacctt

SEQ ID NO: 283634 - DNA, 25 bp, Artificial
  probe
  misc_feature (1)..(25): SEQ ID NO: 1110; WAN024C8Y; Start 152; Stop 176
taactgctttaacaacgtcaccttt

SEQ ID NO: 283635 - DNA, 25 bp, Artificial
  probe
  misc_feature (1)..(25): SEQ ID NO: 1110; WAN024C8Y; Start 150; Stop 174
gataactgctttaacaacgtcacct

SEQ ID NO: 283636 - DNA, 25 bp, Artificial
  probe
  misc_feature (1)..(25): SEQ ID NO: 1110; WAN024C8Y; Start 128; Stop 152
gagcacctgatttagtacgaacgat

SEQ ID NO: 283637 - DNA, 25 bp, Artificial
  probe
  misc_feature (1)..(25): SEQ ID NO: 1110; WAN024C8Y; Start 248; Stop 272
gtcctgaaccaccaagaactttgat

SEQ ID NO: 283638 - DNA, 25 bp, Artificial
  probe
  misc_feature (1)..(25): SEQ ID NO: 1110; WAN024C8Y; Start 262; Stop 286
agaactttgatagtcaagatttcgc

SEQ ID NO: 283639 - DNA, 25 bp, Artificial
  probe
  misc_feature (1)..(25): SEQ ID NO: 1110; WAN024C8Y; Start 254; Stop 278
aaccaccaagaactttgatagtcaa

SEQ ID NO: 283640 - DNA, 25 bp, Artificial
  probe
  misc_feature (1)..(25): SEQ ID NO: 1110; WAN024C8Y; Start 256; Stop 280
ccaccaagaactttgatagtcaaga

SEQ ID NO: 283641 - DNA, 25 bp, Artificial
  probe
  misc_feature (1)..(25): SEQ ID NO: 1110; WAN024C8Y; Start 59; Stop 83
gagttttgtcttcacggatgataac

SEQ ID NO: 283642 - DNA, 25 bp, Artificial
  probe
  misc_feature (1)..(25): SEQ ID NO: 1110; WAN024C8Y; Start 255; Stop 279
accaccaagaactttgatagtcaag

SEQ ID NO: 283643 - DNA, 25 bp, Artificial
  probe
  misc_feature (1)..(25): SEQ ID NO: 1111; WAN024BDB; Start 139; Stop 163
gatagaagaacctactccaaccaag

SEQ ID NO: 283644 - DNA, 25 bp, Artificial
  probe
  misc_feature (1)..(25): SEQ ID NO: 1111; WAN024BDB; Start 135; Stop 159
cacagatagaagaacctactccaac

SEQ ID NO: 283645 - DNA, 25 bp, Artificial
  probe
  misc_feature (1)..(25): SEQ ID NO: 1111; WAN024BDB; Start 138; Stop 162
agatagaagaacctactccaaccaa

SEQ ID NO: 283646 - DNA, 25 bp, Artificial
  probe
  misc_feature (1)..(25): SEQ ID NO: 1111; WAN024BDB; Start 137; Stop 161
cagatagaagaacctactccaacca

SEQ ID NO: 283647 - DNA, 25 bp, Artificial
  probe
  misc_feature (1)..(25): SEQ ID NO: 1111; WAN024BDB; Start 136; Stop 160
acagatagaagaacctactccaacc

SEQ ID NO: 283648 - DNA, 25 bp, Artificial
  probe
  misc_feature (1)..(25): SEQ ID NO: 1111; WAN024BDB; Start 134; Stop 158
ccacagatagaagaacctactccaa

SEQ ID NO: 283649 - DNA, 25 bp, Artificial
  probe
  misc_feature (1)..(25): SEQ ID NO: 1111; WAN024BDB; Start 197; Stop 221
tggaagaggtaggcaataatcagag

SEQ ID NO: 283650 - DNA, 25 bp, Artificial
  probe
  misc_feature (1)..(25): SEQ ID NO: 1111; WAN024BDB; Start 201; Stop 225
agaggtaggcaataatcagagctat

SEQ ID NO: 283651 - DNA, 25 bp, Artificial
  probe
  misc_feature (1)..(25): SEQ ID NO: 1111; WAN024BDB; Start 200; Stop 224
aagaggtaggcaataatcagagcta

SEQ ID NO: 283652 - DNA, 25 bp, Artificial
  probe
  misc_feature (1)..(25): SEQ ID NO: 1111; WAN024BDB; Start 196; Stop 220
ctggaagaggtaggcaataatcaga

SEQ ID NO: 283653 - DNA, 25 bp, Artificial
  probe
  misc_feature (1)..(25): SEQ ID NO: 1111; WAN024BDB; Start 202; Stop 226
gaggtaggcaataatcagagctatt

SEQ ID NO: 283654 - DNA, 25 bp, Artificial
  probe
  misc_feature (1)..(25): SEQ ID NO: 1111; WAN024BDB; Start 140; Stop 164
atagaagaacctactccaaccaagg

SEQ ID NO: 283655 - DNA, 25 bp, Artificial
  probe
  misc_feature (1)..(25): SEQ ID NO: 1111; WAN024BDB; Start 198; Stop 222
ggaagaggtaggcaataatcagagc

SEQ ID NO: 283656 - DNA, 25 bp, Artificial
  probe
  misc_feature (1)..(25): SEQ ID NO: 1111; WAN024BDB; Start 199; Stop 223
gaagaggtaggcaataatcagagct

SEQ ID NO: 283657 - DNA, 25 bp, Artificial
  probe
  misc_feature (1)..(25): SEQ ID NO: 1111; WAN024BDB; Start 195; Stop 219
gctggaagaggtaggcaataatcag

SEQ ID NO: 283658 - DNA, 25 bp, Artificial
  probe
  misc_feature (1)..(25): SEQ ID NO: 1111; WAN024BDB; Start 133; Stop 157
cccacagatagaagaacctactcca

SEQ ID NO: 283659 - DNA, 25 bp, Artificial
  probe
  misc_feature (1)..(25): SEQ ID NO: 1111; WAN024BDB; Start 192; Stop 216
aacgctggaagaggtaggcaataat

SEQ ID NO: 283660 - DNA, 25 bp, Artificial
  probe
  misc_feature (1)..(25): SEQ ID NO: 1111; WAN024BDB; Start 194; Stop 218
cgctggaagaggtaggcaataatca

SEQ ID NO: 283661 - DNA, 25 bp, Artificial
  probe
  misc_feature (1)..(25): SEQ ID NO: 1111; WAN024BDB; Start 193; Stop 217
acgctggaagaggtaggcaataatc

SEQ ID NO: 283662 - DNA, 25 bp, Artificial
  probe
  misc_feature (1)..(25): SEQ ID NO: 1111; WAN024BDB; Start 204; Stop 228
ggtaggcaataatcagagctattga

SEQ ID NO: 283663 - DNA, 25 bp, Artificial
  probe
  misc_feature (1)..(25): SEQ ID NO: 1111; WAN024BDB; Start 203; Stop 227
aggtaggcaataatcagagctattg

SEQ ID NO: 283664 - DNA, 25 bp, Artificial
  probe
  misc_feature (1)..(25): SEQ ID NO: 1111; WAN024BDB; Start 191; Stop 215
aaacgctggaagaggtaggcaataa

SEQ ID NO: 283665 - DNA, 25 bp, Artificial
  probe
  misc_feature (1)..(25): SEQ ID NO: 1111; WAN024BDB; Start 156; Stop 180
caaccaaggtagccagttttgtatc

SEQ ID NO: 283666 - DNA, 25 bp, Artificial
  probe
  misc_feature (1)..(25): SEQ ID NO: 1111; WAN024BDB; Start 56; Stop 80
aagataacggaaatggcttgggcta

SEQ ID NO: 283667 - DNA, 25 bp, Artificial
  probe
  misc_feature (1)..(25): SEQ ID NO: 1111; WAN024BDB; Start 190; Stop 214
gaaacgctggaagaggtaggcaata

SEQ ID NO: 283668 - DNA, 25 bp, Artificial
  probe
  misc_feature (1)..(25): SEQ ID NO: 1111; WAN024BDB; Start 59; Stop 83
ataacggaaatggcttgggctactt

SEQ ID NO: 283669 - DNA, 25 bp, Artificial
  probe
  misc_feature (1)..(25): SEQ ID NO: 1111; WAN024BDB; Start 132; Stop 156
ccccacagatagaagaacctactcc

SEQ ID NO: 283670 - DNA, 25 bp, Artificial
  probe
  misc_feature (1)..(25): SEQ ID NO: 1111; WAN024BDB; Start 71; Stop 95
gcttgggctacttccttttccttag

SEQ ID NO: 283671 - DNA, 25 bp, Artificial
  probe
  misc_feature (1)..(25): SEQ ID NO: 1111; WAN024BDB; Start 157; Stop 181
aaccaaggtagccagttttgtatcc

SEQ ID NO: 283672 - DNA, 25 bp, Artificial
  probe
  misc_feature (1)..(25): SEQ ID NO: 1111; WAN024BDB; Start 143; Stop 167
gaagaacctactccaaccaaggtag

SEQ ID NO: 283673 - DNA, 25 bp, Artificial
  probe
  misc_feature (1)..(25): SEQ ID NO: 1111; WAN024BDB; Start 58; Stop 82
gataacggaaatggcttgggctact

SEQ ID NO: 283674 - DNA, 25 bp, Artificial
  probe
  misc_feature (1)..(25): SEQ ID NO: 1111; WAN024BDB; Start 57; Stop 81
agataacggaaatggcttgggctac

SEQ ID NO: 283675 - DNA, 25 bp, Artificial
  probe
  misc_feature (1)..(25): SEQ ID NO: 1111; WAN024BDB; Start 155; Stop 179
ccaaccaaggtagccagttttgtat

SEQ ID NO: 283676 - DNA, 25 bp, Artificial
  probe
  misc_feature (1)..(25): SEQ ID NO: 1112; WAN024C7C; Start 406; Stop 430
aagtatatgaagcgtgacaggtatc

SEQ ID NO: 283677 - DNA, 25 bp, Artificial
  probe
  misc_feature (1)..(25): SEQ ID NO: 1112; WAN024C7C; Start 407; Stop 431
agtatatgaagcgtgacaggtatca

SEQ ID NO: 283678 - DNA, 25 bp, Artificial
  probe
  misc_feature (1)..(25): SEQ ID NO: 1112; WAN024C7C; Start 142; Stop 166
ttagcaagaataccaggaactaagg

SEQ ID NO: 283679 - DNA, 25 bp, Artificial
  probe
  misc_feature (1)..(25): SEQ ID NO: 1112; WAN024C7C; Start 418; Stop 442
cgtgacaggtatcataagcactata

SEQ ID NO: 283680 - DNA, 25 bp, Artificial
  probe
  misc_feature (1)..(25): SEQ ID NO: 1112; WAN024C7C; Start 32; Stop 56
aaccaatgaagctgagaggaatatc

SEQ ID NO: 283681 - DNA, 25 bp, Artificial
  probe
  misc_feature (1)..(25): SEQ ID NO: 1112; WAN024C7C; Start 421; Stop 445
gacaggtatcataagcactataaga

SEQ ID NO: 283682 - DNA, 25 bp, Artificial
  probe
  misc_feature (1)..(25): SEQ ID NO: 1112; WAN024C7C; Start 34; Stop 58
ccaatgaagctgagaggaatatcta

SEQ ID NO: 283683 - DNA, 25 bp, Artificial
  probe
  misc_feature (1)..(25): SEQ ID NO: 1112; WAN024C7C; Start 37; Stop 61
atgaagctgagaggaatatctaagg

SEQ ID NO: 283684 - DNA, 25 bp, Artificial
  probe
  misc_feature (1)..(25): SEQ ID NO: 1112; WAN024C7C; Start 420; Stop 444
tgacaggtatcataagcactataag

SEQ ID NO: 283685 - DNA, 25 bp, Artificial
  probe
  misc_feature (1)..(25): SEQ ID NO: 1112; WAN024C7C; Start 178; Stop 202
tatttctttctttgccctgattgtg

SEQ ID NO: 283686 - DNA, 25 bp, Artificial
  probe
  misc_feature (1)..(25): SEQ ID NO: 1112; WAN024C7C; Start 164; Stop 188
agggtggttatcgttatttctttct

SEQ ID NO: 283687 - DNA, 25 bp, Artificial
  probe
  misc_feature (1)..(25): SEQ ID NO: 1112; WAN024C7C; Start 138; Stop 162
tgatttagcaagaataccaggaact

SEQ ID NO: 283688 - DNA, 25 bp, Artificial
  probe
  misc_feature (1)..(25): SEQ ID NO: 1112; WAN024C7C; Start 405; Stop 429
aaagtatatgaagcgtgacaggtat

SEQ ID NO: 283689 - DNA, 25 bp, Artificial
  probe
  misc_feature (1)..(25): SEQ ID NO: 1112; WAN024C7C; Start 395; Stop 419
ctgaaagaccaaagtatatgaagcg

SEQ ID NO: 283690 - DNA, 25 bp, Artificial
  probe
  misc_feature (1)..(25): SEQ ID NO: 1112; WAN024C7C; Start 175; Stop 199
cgttatttctttctttgccctgatt

SEQ ID NO: 283691 - DNA, 25 bp, Artificial
  probe
  misc_feature (1)..(25): SEQ ID NO: 1112; WAN024C7C; Start 397; Stop 421
gaaagaccaaagtatatgaagcgtg

SEQ ID NO: 283692 - DNA, 25 bp, Artificial
  probe
  misc_feature (1)..(25): SEQ ID NO: 1112; WAN024C7C; Start 394; Stop 418
cctgaaagaccaaagtatatgaagc

SEQ ID NO: 283693 - DNA, 25 bp, Artificial
  probe
  misc_feature (1)..(25): SEQ ID NO: 1112; WAN024C7C; Start 172; Stop 196
tatcgttatttctttctttgccctg

SEQ ID NO: 283694 - DNA, 25 bp, Artificial
  probe
  misc_feature (1)..(25): SEQ ID NO: 1112; WAN024C7C; Start 160; Stop 184
actaagggtggttatcgttatttct

SEQ ID NO: 283695 - DNA, 25 bp, Artificial
  probe
  misc_feature (1)..(25): SEQ ID NO: 1112; WAN024C7C; Start 398; Stop 422
aaagaccaaagtatatgaagcgtga

SEQ ID NO: 283696 - DNA, 25 bp, Artificial
  probe
  misc_feature (1)..(25): SEQ ID NO: 1112; WAN024C7C; Start 396; Stop 420
tgaaagaccaaagtatatgaagcgt

SEQ ID NO: 283697 - DNA, 25 bp, Artificial
  probe
  misc_feature (1)..(25): SEQ ID NO: 1112; WAN024C7C; Start 177; Stop 201
ttatttctttctttgccctgattgt

SEQ ID NO: 283698 - DNA, 25 bp, Artificial
  probe
  misc_feature (1)..(25): SEQ ID NO: 1112; WAN024C7C; Start 51; Stop 75
aatatctaagggtatagccgagttg

SEQ ID NO: 283699 - DNA, 25 bp, Artificial
  probe
  misc_feature (1)..(25): SEQ ID NO: 1112; WAN024C7C; Start 48; Stop 72
aggaatatctaagggtatagccgag

SEQ ID NO: 283700 - DNA, 25 bp, Artificial
  probe
  misc_feature (1)..(25): SEQ ID NO: 1112; WAN024C7C; Start 47; Stop 71
gaggaatatctaagggtatagccga

SEQ ID NO: 283701 - DNA, 25 bp, Artificial
  probe
  misc_feature (1)..(25): SEQ ID NO: 1112; WAN024C7C; Start 392; Stop 416
tccctgaaagaccaaagtatatgaa

SEQ ID NO: 283702 - DNA, 25 bp, Artificial
  probe
  misc_feature (1)..(25): SEQ ID NO: 1112; WAN024C7C; Start 165; Stop 189
gggtggttatcgttatttctttctt

SEQ ID NO: 283703 - DNA, 25 bp, Artificial
  probe
  misc_feature (1)..(25): SEQ ID NO: 1112; WAN024C7C; Start 33; Stop 57
accaatgaagctgagaggaatatct

SEQ ID NO: 283704 - DNA, 25 bp, Artificial
  probe
  misc_feature (1)..(25): SEQ ID NO: 1112; WAN024C7C; Start 404; Stop 428
caaagtatatgaagcgtgacaggta

SEQ ID NO: 283705 - DNA, 25 bp, Artificial
  probe
  misc_feature (1)..(25): SEQ ID NO: 1112; WAN024C7C; Start 176; Stop 200
gttatttctttctttgccctgattg

SEQ ID NO: 283706 - DNA, 25 bp, Artificial
  probe
  misc_feature (1)..(25): SEQ ID NO: 1112; WAN024C7C; Start 50; Stop 74
gaatatctaagggtatagccgagtt

SEQ ID NO: 283707 - DNA, 25 bp, Artificial
  probe
  misc_feature (1)..(25): SEQ ID NO: 1112; WAN024C7C; Start 49; Stop 73
ggaatatctaagggtatagccgagt

SEQ ID NO: 283708 - DNA, 25 bp, Artificial
  probe
  misc_feature (1)..(25): SEQ ID NO: 1112; WAN024C7C; Start 393; Stop 417
ccctgaaagaccaaagtatatgaag

SEQ ID NO: 283709 - DNA, 25 bp, Artificial
  probe
  misc_feature (1)..(25): SEQ ID NO: 1113; WAN024GFJ; Start 87; Stop 111
ctatcaatcaagttcttcagccatt

SEQ ID NO: 283710 - DNA, 25 bp, Artificial
  probe
  misc_feature (1)..(25): SEQ ID NO: 1113; WAN024GFJ; Start 858; Stop 882
atctcttcttgtctgtctctgctta

SEQ ID NO: 283711 - DNA, 25 bp, Artificial
  probe
  misc_feature (1)..(25): SEQ ID NO: 1113; WAN024GFJ; Start 558; Stop 582
aactctggaagcctatctcaatcaa

SEQ ID NO: 283712 - DNA, 25 bp, Artificial
  probe
  misc_feature (1)..(25): SEQ ID NO: 1113; WAN024GFJ; Start 859; Stop 883
tctcttcttgtctgtctctgcttag

SEQ ID NO: 283713 - DNA, 25 bp, Artificial
  probe
  misc_feature (1)..(25): SEQ ID NO: 1113; WAN024GFJ; Start 86; Stop 110
actatcaatcaagttcttcagccat

SEQ ID NO: 283714 - DNA, 25 bp, Artificial
  probe
  misc_feature (1)..(25): SEQ ID NO: 1113; WAN024GFJ; Start 85; Stop 109
tactatcaatcaagttcttcagcca

SEQ ID NO: 283715 - DNA, 25 bp, Artificial
  probe
  misc_feature (1)..(25): SEQ ID NO: 1113; WAN024GFJ; Start 84; Stop 108
ctactatcaatcaagttcttcagcc

SEQ ID NO: 283716 - DNA, 25 bp, Artificial
  probe
  misc_feature (1)..(25): SEQ ID NO: 1113; WAN024GFJ; Start 989; Stop 1013
cctatgaactgagagaagtaactcg

SEQ ID NO: 283717 - DNA, 25 bp, Artificial
  probe
  misc_feature (1)..(25): SEQ ID NO: 1113; WAN024GFJ; Start 860; Stop 884
ctcttcttgtctgtctctgcttagt

SEQ ID NO: 283718 - DNA, 25 bp, Artificial
  probe
  misc_feature (1)..(25): SEQ ID NO: 1113; WAN024GFJ; Start 987; Stop 1011
tgcctatgaactgagagaagtaact

SEQ ID NO: 283719 - DNA, 25 bp, Artificial
  probe
  misc_feature (1)..(25): SEQ ID NO: 1113; WAN024GFJ; Start 986; Stop 1010
gtgcctatgaactgagagaagtaac

SEQ ID NO: 283720 - DNA, 25 bp, Artificial
  probe
  misc_feature (1)..(25): SEQ ID NO: 1113; WAN024GFJ; Start 389; Stop 413
ctgatatgatggctgaggattggta

SEQ ID NO: 283721 - DNA, 25 bp, Artificial
  probe
  misc_feature (1)..(25): SEQ ID NO: 1113; WAN024GFJ; Start 988; Stop 1012
gcctatgaactgagagaagtaactc

SEQ ID NO: 283722 - DNA, 25 bp, Artificial
  probe
  misc_feature (1)..(25): SEQ ID NO: 1113; WAN024GFJ; Start 561; Stop 585
tctggaagcctatctcaatcaactc

SEQ ID NO: 283723 - DNA, 25 bp, Artificial
  probe
  misc_feature (1)..(25): SEQ ID NO: 1113; WAN024GFJ; Start 560; Stop 584
ctctggaagcctatctcaatcaact

SEQ ID NO: 283724 - DNA, 25 bp, Artificial
  probe
  misc_feature (1)..(25): SEQ ID NO: 1113; WAN024GFJ; Start 990; Stop 1014
ctatgaactgagagaagtaactcgc

SEQ ID NO: 283725 - DNA, 25 bp, Artificial
  probe
  misc_feature (1)..(25): SEQ ID NO: 1113; WAN024GFJ; Start 861; Stop 885
tcttcttgtctgtctctgcttagtg

SEQ ID NO: 283726 - DNA, 25 bp, Artificial
  probe
  misc_feature (1)..(25): SEQ ID NO: 1113; WAN024GFJ; Start 559; Stop 583
actctggaagcctatctcaatcaac

SEQ ID NO: 283727 - DNA, 25 bp, Artificial
  probe
  misc_feature (1)..(25): SEQ ID NO: 1113; WAN024GFJ; Start 83; Stop 107
tctactatcaatcaagttcttcagc

SEQ ID NO: 283728 - DNA, 25 bp, Artificial
  probe
  misc_feature (1)..(25): SEQ ID NO: 1113; WAN024GFJ; Start 862; Stop 886
cttcttgtctgtctctgcttagtgt

SEQ ID NO: 283729 - DNA, 25 bp, Artificial
  probe
  misc_feature (1)..(25): SEQ ID NO: 1113; WAN024GFJ; Start 565; Stop 589
gaagcctatctcaatcaactccagt

SEQ ID NO: 283730 - DNA, 25 bp, Artificial
  probe
  misc_feature (1)..(25): SEQ ID NO: 1113; WAN024GFJ; Start 857; Stop 881
catctcttcttgtctgtctctgctt

SEQ ID NO: 283731 - DNA, 25 bp, Artificial
  probe
  misc_feature (1)..(25): SEQ ID NO: 1113; WAN024GFJ; Start 985; Stop 1009
ggtgcctatgaactgagagaagtaa

SEQ ID NO: 283732 - DNA, 25 bp, Artificial
  probe
  misc_feature (1)..(25): SEQ ID NO: 1113; WAN024GFJ; Start 863; Stop 887
ttcttgtctgtctctgcttagtgtg

SEQ ID NO: 283733 - DNA, 25 bp, Artificial
  probe
  misc_feature (1)..(25): SEQ ID NO: 1113; WAN024GFJ; Start 390; Stop 414
tgatatgatggctgaggattggtac

SEQ ID NO: 283734 - DNA, 25 bp, Artificial
  probe
  misc_feature (1)..(25): SEQ ID NO: 1113; WAN024GFJ; Start 854; Stop 878
tcacatctcttcttgtctgtctctg

SEQ ID NO: 283735 - DNA, 25 bp, Artificial
  probe
  misc_feature (1)..(25): SEQ ID NO: 1113; WAN024GFJ; Start 853; Stop 877
gtcacatctcttcttgtctgtctct

SEQ ID NO: 283736 - DNA, 25 bp, Artificial
  probe
  misc_feature (1)..(25): SEQ ID NO: 1113; WAN024GFJ; Start 566; Stop 590
aagcctatctcaatcaactccagtt

SEQ ID NO: 283737 - DNA, 25 bp, Artificial
  probe
  misc_feature (1)..(25): SEQ ID NO: 1113; WAN024GFJ; Start 991; Stop 1015
tatgaactgagagaagtaactcgcc

SEQ ID NO: 283738 - DNA, 25 bp, Artificial
  probe
  misc_feature (1)..(25): SEQ ID NO: 1113; WAN024GFJ; Start 381; Stop 405
aacttcctctgatatgatggctgag

SEQ ID NO: 283739 - DNA, 25 bp, Artificial
  probe
  misc_feature (1)..(25): SEQ ID NO: 1113; WAN024GFJ; Start 875; Stop 899
tctgcttagtgtggttcagtcttaa

SEQ ID NO: 283740 - DNA, 25 bp, Artificial
  probe
  misc_feature (1)..(25): SEQ ID NO: 1113; WAN024GFJ; Start 852; Stop 876
tgtcacatctcttcttgtctgtctc

SEQ ID NO: 283741 - DNA, 25 bp, Artificial
  probe
  misc_feature (1)..(25): SEQ ID NO: 1113; WAN024GFJ; Start 995; Stop 1019
aactgagagaagtaactcgccaatt

SEQ ID NO: 283742 - DNA, 25 bp, Artificial
  probe
  misc_feature (1)..(25): SEQ ID NO: 1114; WAN024BEM; Start 71; Stop 95
ttcacagtctcatcaaccagttaat

SEQ ID NO: 283743 - DNA, 25 bp, Artificial
  probe
  misc_feature (1)..(25): SEQ ID NO: 1114; WAN024BEM; Start 72; Stop 96
tcacagtctcatcaaccagttaatc

SEQ ID NO: 283744 - DNA, 25 bp, Artificial
  probe
  misc_feature (1)..(25): SEQ ID NO: 1114; WAN024BEM; Start 73; Stop 97
cacagtctcatcaaccagttaatcg

SEQ ID NO: 283745 - DNA, 25 bp, Artificial
  probe
  misc_feature (1)..(25): SEQ ID NO: 1114; WAN024BEM; Start 70; Stop 94
tttcacagtctcatcaaccagttaa

SEQ ID NO: 283746 - DNA, 25 bp, Artificial
  probe
  misc_feature (1)..(25): SEQ ID NO: 1114; WAN024BEM; Start 74; Stop 98
acagtctcatcaaccagttaatcga

SEQ ID NO: 283747 - DNA, 25 bp, Artificial
  probe
  misc_feature (1)..(25): SEQ ID NO: 1114; WAN024BEM; Start 75; Stop 99
cagtctcatcaaccagttaatcgat

SEQ ID NO: 283748 - DNA, 25 bp, Artificial
  probe
  misc_feature (1)..(25): SEQ ID NO: 1114; WAN024BEM; Start 69; Stop 93
ttttcacagtctcatcaaccagtta

SEQ ID NO: 283749 - DNA, 25 bp, Artificial
  probe
  misc_feature (1)..(25): SEQ ID NO: 1114; WAN024BEM; Start 68; Stop 92
cttttcacagtctcatcaaccagtt

SEQ ID NO: 283750 - DNA, 25 bp, Artificial
  probe
  misc_feature (1)..(25): SEQ ID NO: 1114; WAN024BEM; Start 66; Stop 90
ctcttttcacagtctcatcaaccag

SEQ ID NO: 283751 - DNA, 25 bp, Artificial
  probe
  misc_feature (1)..(25): SEQ ID NO: 1114; WAN024BEM; Start 67; Stop 91
tcttttcacagtctcatcaaccagt

SEQ ID NO: 283752 - DNA, 25 bp, Artificial
  probe
  misc_feature (1)..(25): SEQ ID NO: 1114; WAN024BEM; Start 65; Stop 89
gctcttttcacagtctcatcaacca

SEQ ID NO: 283753 - DNA, 25 bp, Artificial
  probe
  misc_feature (1)..(25): SEQ ID NO: 1114; WAN024BEM; Start 64; Stop 88
tgctcttttcacagtctcatcaacc

SEQ ID NO: 283754 - DNA, 25 bp, Artificial
  probe
  misc_feature (1)..(25): SEQ ID NO: 1114; WAN024BEM; Start 63; Stop 87
gtgctcttttcacagtctcatcaac

SEQ ID NO: 283755 - DNA, 25 bp, Artificial
  probe
  misc_feature (1)..(25): SEQ ID NO: 1114; WAN024BEM; Start 1; Stop 25
atgaagctgacgtggtttgaagaga

SEQ ID NO: 283756 - DNA, 25 bp, Artificial
  probe
  misc_feature (1)..(25): SEQ ID NO: 1114; WAN024BEM; Start 21; Stop 45
agagattttcgaagagtatgaccag

SEQ ID NO: 283757 - DNA, 25 bp, Artificial
  probe
  misc_feature (1)..(25): SEQ ID NO: 1114; WAN024BEM; Start 20; Stop 44
aagagattttcgaagagtatgacca

SEQ ID NO: 283758 - DNA, 25 bp, Artificial
  probe
  misc_feature (1)..(25): SEQ ID NO: 1114; WAN024BEM; Start 19; Stop 43
gaagagattttcgaagagtatgacc

SEQ ID NO: 283759 - DNA, 25 bp, Artificial
  probe
  misc_feature (1)..(25): SEQ ID NO: 1114; WAN024BEM; Start 24; Stop 48
gattttcgaagagtatgaccagctt

SEQ ID NO: 283760 - DNA, 25 bp, Artificial
  probe
  misc_feature (1)..(25): SEQ ID NO: 1114; WAN024BEM; Start 118; Stop 142
caaaaccttggaaaaggctttcttt

SEQ ID NO: 283761 - DNA, 25 bp, Artificial
  probe
  misc_feature (1)..(25): SEQ ID NO: 1114; WAN024BEM; Start 22; Stop 46
gagattttcgaagagtatgaccagc

SEQ ID NO: 283762 - DNA, 25 bp, Artificial
  probe
  misc_feature (1)..(25): SEQ ID NO: 1114; WAN024BEM; Start 25; Stop 49
attttcgaagagtatgaccagcttg

SEQ ID NO: 283763 - DNA, 25 bp, Artificial
  probe
  misc_feature (1)..(25): SEQ ID NO: 1114; WAN024BEM; Start 23; Stop 47
agattttcgaagagtatgaccagct

SEQ ID NO: 283764 - DNA, 25 bp, Artificial
  probe
  misc_feature (1)..(25): SEQ ID NO: 1114; WAN024BEM; Start 28; Stop 52
ttcgaagagtatgaccagcttgcaa

SEQ ID NO: 283765 - DNA, 25 bp, Artificial
  probe
  misc_feature (1)..(25): SEQ ID NO: 1114; WAN024BEM; Start 127; Stop 151
ggaaaaggctttcttttgctaacta

SEQ ID NO: 283766 - DNA, 25 bp, Artificial
  probe
  misc_feature (1)..(25): SEQ ID NO: 1114; WAN024BEM; Start 119; Stop 143
aaaaccttggaaaaggctttctttt

SEQ ID NO: 283767 - DNA, 25 bp, Artificial
  probe
  misc_feature (1)..(25): SEQ ID NO: 1114; WAN024BEM; Start 124; Stop 148
cttggaaaaggctttcttttgctaa

SEQ ID NO: 283768 - DNA, 25 bp, Artificial
  probe
  misc_feature (1)..(25): SEQ ID NO: 1114; WAN024BEM; Start 125; Stop 149
ttggaaaaggctttcttttgctaac

SEQ ID NO: 283769 - DNA, 25 bp, Artificial
  probe
  misc_feature (1)..(25): SEQ ID NO: 1114; WAN024BEM; Start 120; Stop 144
aaaccttggaaaaggctttcttttg

SEQ ID NO: 283770 - DNA, 25 bp, Artificial
  probe
  misc_feature (1)..(25): SEQ ID NO: 1114; WAN024BEM; Start 128; Stop 152
gaaaaggctttcttttgctaactaa

SEQ ID NO: 283771 - DNA, 25 bp, Artificial
  probe
  misc_feature (1)..(25): SEQ ID NO: 1114; WAN024BEM; Start 126; Stop 150
tggaaaaggctttcttttgctaact

SEQ ID NO: 283772 - DNA, 25 bp, Artificial
  probe
  misc_feature (1)..(25): SEQ ID NO: 1114; WAN024BEM; Start 117; Stop 141
ccaaaaccttggaaaaggctttctt

SEQ ID NO: 283773 - DNA, 25 bp, Artificial
  probe
  misc_feature (1)..(25): SEQ ID NO: 1114; WAN024BEM; Start 27; Stop 51
tttcgaagagtatgaccagcttgca

SEQ ID NO: 283774 - DNA, 25 bp, Artificial
  probe
  misc_feature (1)..(25): SEQ ID NO: 1114; WAN024BEM; Start 60; Stop 84
tttgtgctcttttcacagtctcatc

SEQ ID NO: 283775 - DNA, 25 bp, Artificial
  probe
  misc_feature (1)..(25): SEQ ID NO: 1115; WAN024DPZ; Start 239; Stop 263
aagccaatatcaagacactctactc

SEQ ID NO: 283776 - DNA, 25 bp, Artificial
  probe
  misc_feature (1)..(25): SEQ ID NO: 1115; WAN024DPZ; Start 238; Stop 262
gaagccaatatcaagacactctact

SEQ ID NO: 283777 - DNA, 25 bp, Artificial
  probe
  misc_feature (1)..(25): SEQ ID NO: 1115; WAN024DPZ; Start 242; Stop 266
ccaatatcaagacactctactcaga

SEQ ID NO: 283778 - DNA, 25 bp, Artificial
  probe
  misc_feature (1)..(25): SEQ ID NO: 1115; WAN024DPZ; Start 241; Stop 265
gccaatatcaagacactctactcag

SEQ ID NO: 283779 - DNA, 25 bp, Artificial
  probe
  misc_feature (1)..(25): SEQ ID NO: 1115; WAN024DPZ; Start 240; Stop 264
agccaatatcaagacactctactca

SEQ ID NO: 283780 - DNA, 25 bp, Artificial
  probe
  misc_feature (1)..(25): SEQ ID NO: 1115; WAN024DPZ; Start 237; Stop 261
tgaagccaatatcaagacactctac

SEQ ID NO: 283781 - DNA, 25 bp, Artificial
  probe
  misc_feature (1)..(25): SEQ ID NO: 1115; WAN024DPZ; Start 236; Stop 260
atgaagccaatatcaagacactcta

SEQ ID NO: 283782 - DNA, 25 bp, Artificial
  probe
  misc_feature (1)..(25): SEQ ID NO: 1115; WAN024DPZ; Start 235; Stop 259
gatgaagccaatatcaagacactct

SEQ ID NO: 283783 - DNA, 25 bp, Artificial
  probe
  misc_feature (1)..(25): SEQ ID NO: 1115; WAN024DPZ; Start 6; Stop 30
gcttatcaatacgacaaactcacac

SEQ ID NO: 283784 - DNA, 25 bp, Artificial
  probe
  misc_feature (1)..(25): SEQ ID NO: 1115; WAN024DPZ; Start 136; Stop 160
gaaatcctcatctcaaacaaacacc

SEQ ID NO: 283785 - DNA, 25 bp, Artificial
  probe
  misc_feature (1)..(25): SEQ ID NO: 1115; WAN024DPZ; Start 8; Stop 32
ttatcaatacgacaaactcacactc

SEQ ID NO: 283786 - DNA, 25 bp, Artificial
  probe
  misc_feature (1)..(25): SEQ ID NO: 1115; WAN024DPZ; Start 7; Stop 31
cttatcaatacgacaaactcacact

SEQ ID NO: 283787 - DNA, 25 bp, Artificial
  probe
  misc_feature (1)..(25): SEQ ID NO: 1115; WAN024DPZ; Start 135; Stop 159
tgaaatcctcatctcaaacaaacac

SEQ ID NO: 283788 - DNA, 25 bp, Artificial
  probe
  misc_feature (1)..(25): SEQ ID NO: 1115; WAN024DPZ; Start 137; Stop 161
aaatcctcatctcaaacaaacaccg

SEQ ID NO: 283789 - DNA, 25 bp, Artificial
  probe
  misc_feature (1)..(25): SEQ ID NO: 1115; WAN024DPZ; Start 234; Stop 258
tgatgaagccaatatcaagacactc

SEQ ID NO: 283790 - DNA, 25 bp, Artificial
  probe
  misc_feature (1)..(25): SEQ ID NO: 1115; WAN024DPZ; Start 145; Stop 169
atctcaaacaaacaccgtgctattc

SEQ ID NO: 283791 - DNA, 25 bp, Artificial
  probe
  misc_feature (1)..(25): SEQ ID NO: 1115; WAN024DPZ; Start 278; Stop 302
gaatttcaatcccaatcaagtaact

SEQ ID NO: 283792 - DNA, 25 bp, Artificial
  probe
  misc_feature (1)..(25): SEQ ID NO: 1115; WAN024DPZ; Start 5; Stop 29
agcttatcaatacgacaaactcaca

SEQ ID NO: 283793 - DNA, 25 bp, Artificial
  probe
  misc_feature (1)..(25): SEQ ID NO: 1115; WAN024DPZ; Start 144; Stop 168
catctcaaacaaacaccgtgctatt

SEQ ID NO: 283794 - DNA, 25 bp, Artificial
  probe
  misc_feature (1)..(25): SEQ ID NO: 1115; WAN024DPZ; Start 277; Stop 301
ggaatttcaatcccaatcaagtaac

SEQ ID NO: 283795 - DNA, 25 bp, Artificial
  probe
  misc_feature (1)..(25): SEQ ID NO: 1115; WAN024DPZ; Start 276; Stop 300
tggaatttcaatcccaatcaagtaa

SEQ ID NO: 283796 - DNA, 25 bp, Artificial
  probe
  misc_feature (1)..(25): SEQ ID NO: 1115; WAN024DPZ; Start 138; Stop 162
aatcctcatctcaaacaaacaccgt

SEQ ID NO: 283797 - DNA, 25 bp, Artificial
  probe
  misc_feature (1)..(25): SEQ ID NO: 1115; WAN024DPZ; Start 143; Stop 167
tcatctcaaacaaacaccgtgctat

SEQ ID NO: 283798 - DNA, 25 bp, Artificial
  probe
  misc_feature (1)..(25): SEQ ID NO: 1115; WAN024DPZ; Start 243; Stop 267
caatatcaagacactctactcagag

SEQ ID NO: 283799 - DNA, 25 bp, Artificial
  probe
  misc_feature (1)..(25): SEQ ID NO: 1115; WAN024DPZ; Start 245; Stop 269
atatcaagacactctactcagagaa

SEQ ID NO: 283800 - DNA, 25 bp, Artificial
  probe
  misc_feature (1)..(25): SEQ ID NO: 1115; WAN024DPZ; Start 244; Stop 268
aatatcaagacactctactcagaga

SEQ ID NO: 283801 - DNA, 25 bp, Artificial
  probe
  misc_feature (1)..(25): SEQ ID NO: 1115; WAN024DPZ; Start 9; Stop 33
tatcaatacgacaaactcacactcg

SEQ ID NO: 283802 - DNA, 25 bp, Artificial
  probe
  misc_feature (1)..(25): SEQ ID NO: 1115; WAN024DPZ; Start 281; Stop 305
tttcaatcccaatcaagtaactaat

SEQ ID NO: 283803 - DNA, 25 bp, Artificial
  probe
  misc_feature (1)..(25): SEQ ID NO: 1115; WAN024DPZ; Start 280; Stop 304
atttcaatcccaatcaagtaactaa

SEQ ID NO: 283804 - DNA, 25 bp, Artificial
  probe
  misc_feature (1)..(25): SEQ ID NO: 1115; WAN024DPZ; Start 134; Stop 158
atgaaatcctcatctcaaacaaaca

SEQ ID NO: 283805 - DNA, 25 bp, Artificial
  probe
  misc_feature (1)..(25): SEQ ID NO: 1115; WAN024DPZ; Start 279; Stop 303
aatttcaatcccaatcaagtaacta

SEQ ID NO: 283806 - DNA, 25 bp, Artificial
  probe
  misc_feature (1)..(25): SEQ ID NO: 1115; WAN024DPZ; Start 130; Stop 154
cactatgaaatcctcatctcaaaca

SEQ ID NO: 283807 - DNA, 25 bp, Artificial
  probe
  misc_feature (1)..(25): SEQ ID NO: 1115; WAN024DPZ; Start 126; Stop 150
gcttcactatgaaatcctcatctca

SEQ ID NO: 283808 - DNA, 25 bp, Artificial
  probe
  misc_feature (1)..(25): SEQ ID NO: 1116; WAN024G4Y-5; Start 1170; Stop 1194
tatcagccattacaccattgagatt

SEQ ID NO: 283809 - DNA, 25 bp, Artificial
  probe
  misc_feature (1)..(25): SEQ ID NO: 1116; WAN024G4Y-5; Start 1169; Stop 1193
atatcagccattacaccattgagat

SEQ ID NO: 283810 - DNA, 25 bp, Artificial
  probe
  misc_feature (1)..(25): SEQ ID NO: 1116; WAN024G4Y-5; Start 1624; Stop 1648
gatacaggtgaggaagaagagagtc

SEQ ID NO: 283811 - DNA, 25 bp, Artificial
  probe
  misc_feature (1)..(25): SEQ ID NO: 1116; WAN024G4Y-5; Start 1010; Stop 1034
aactaggacaattatcagaccagat

SEQ ID NO: 283812 - DNA, 25 bp, Artificial
  probe
  misc_feature (1)..(25): SEQ ID NO: 1116; WAN024G4Y-5; Start 609; Stop 633
aatctatgacttcctccaatccacc

SEQ ID NO: 283813 - DNA, 25 bp, Artificial
  probe
  misc_feature (1)..(25): SEQ ID NO: 1116; WAN024G4Y-5; Start 1289; Stop 1313
ggatgctggaattgttgtctaatgg

SEQ ID NO: 283814 - DNA, 25 bp, Artificial
  probe
  misc_feature (1)..(25): SEQ ID NO: 1116; WAN024G4Y-5; Start 407; Stop 431
aacatggttatctgcttgatattgc

SEQ ID NO: 283815 - DNA, 25 bp, Artificial
  probe
  misc_feature (1)..(25): SEQ ID NO: 1116; WAN024G4Y-5; Start 1209; Stop 1233
acaagttcgtgagtcttatcaggag

SEQ ID NO: 283816 - DNA, 25 bp, Artificial
  probe
  misc_feature (1)..(25): SEQ ID NO: 1116; WAN024G4Y-5; Start 1625; Stop 1649
atacaggtgaggaagaagagagtca

SEQ ID NO: 283817 - DNA, 25 bp, Artificial
  probe
  misc_feature (1)..(25): SEQ ID NO: 1116; WAN024G4Y-5; Start 1288; Stop 1312
cggatgctggaattgttgtctaatg

SEQ ID NO: 283818 - DNA, 25 bp, Artificial
  probe
  misc_feature (1)..(25): SEQ ID NO: 1116; WAN024G4Y-5; Start 1272; Stop 1296
caaccatattcaagaacggatgctg

SEQ ID NO: 283819 - DNA, 25 bp, Artificial
  probe
  misc_feature (1)..(25): SEQ ID NO: 1116; WAN024G4Y-5; Start 610; Stop 634
atctatgacttcctccaatccacca

SEQ ID NO: 283820 - DNA, 25 bp, Artificial
  probe
  misc_feature (1)..(25): SEQ ID NO: 1116; WAN024G4Y-5; Start 1277; Stop 1301
atattcaagaacggatgctggaatt

SEQ ID NO: 283821 - DNA, 25 bp, Artificial
  probe
  misc_feature (1)..(25): SEQ ID NO: 1116; WAN024G4Y-5; Start 1626; Stop 1650
tacaggtgaggaagaagagagtcaa

SEQ ID NO: 283822 - DNA, 25 bp, Artificial
  probe
  misc_feature (1)..(25): SEQ ID NO: 1116; WAN024G4Y-5; Start 1011; Stop 1035
actaggacaattatcagaccagata

SEQ ID NO: 283823 - DNA, 25 bp, Artificial
  probe
  misc_feature (1)..(25): SEQ ID NO: 1116; WAN024G4Y-5; Start 221; Stop 245
tctttatctcaacctttaccgtcaa

SEQ ID NO: 283824 - DNA, 25 bp, Artificial
  probe
  misc_feature (1)..(25): SEQ ID NO: 1116; WAN024G4Y-5; Start 218; Stop 242
aactctttatctcaacctttaccgt

SEQ ID NO: 283825 - DNA, 25 bp, Artificial
  probe
  misc_feature (1)..(25): SEQ ID NO: 1116; WAN024G4Y-5; Start 608; Stop 632
aaatctatgacttcctccaatccac

SEQ ID NO: 283826 - DNA, 25 bp, Artificial
  probe
  misc_feature (1)..(25): SEQ ID NO: 1116; WAN024G4Y-5; Start 220; Stop 244
ctctttatctcaacctttaccgtca

SEQ ID NO: 283827 - DNA, 25 bp, Artificial
  probe
  misc_feature (1)..(25): SEQ ID NO: 1116; WAN024G4Y-5; Start 219; Stop 243
actctttatctcaacctttaccgtc

SEQ ID NO: 283828 - DNA, 25 bp, Artificial
  probe
  misc_feature (1)..(25): SEQ ID NO: 1116; WAN024G4Y-5; Start 217; Stop 241
caactctttatctcaacctttaccg

SEQ ID NO: 283829 - DNA, 25 bp, Artificial
  probe
  misc_feature (1)..(25): SEQ ID NO: 1116; WAN024G4Y-5; Start 1633; Stop 1657
gaggaagaagagagtcaaacagaaa

SEQ ID NO: 283830 - DNA, 25 bp, Artificial
  probe
  misc_feature (1)..(25): SEQ ID NO: 1116; WAN024G4Y-5; Start 1290; Stop 1314
gatgctggaattgttgtctaatggc

SEQ ID NO: 283831 - DNA, 25 bp, Artificial
  probe
  misc_feature (1)..(25): SEQ ID NO: 1116; WAN024G4Y-5; Start 1287; Stop 1311
acggatgctggaattgttgtctaat

SEQ ID NO: 283832 - DNA, 25 bp, Artificial
  probe
  misc_feature (1)..(25): SEQ ID NO: 1116; WAN024G4Y-5; Start 613; Stop 637
tatgacttcctccaatccaccagta

SEQ ID NO: 283833 - DNA, 25 bp, Artificial
  probe
  misc_feature (1)..(25): SEQ ID NO: 1116; WAN024G4Y-5; Start 1639; Stop 1663
gaagagagtcaaacagaaacgaaac

SEQ ID NO: 283834 - DNA, 25 bp, Artificial
  probe
  misc_feature (1)..(25): SEQ ID NO: 1116; WAN024G4Y-5; Start 1638; Stop 1662
agaagagagtcaaacagaaacgaaa

SEQ ID NO: 283835 - DNA, 25 bp, Artificial
  probe
  misc_feature (1)..(25): SEQ ID NO: 1116; WAN024G4Y-5; Start 1637; Stop 1661
aagaagagagtcaaacagaaacgaa

SEQ ID NO: 283836 - DNA, 25 bp, Artificial
  probe
  misc_feature (1)..(25): SEQ ID NO: 1116; WAN024G4Y-5; Start 1634; Stop 1658
aggaagaagagagtcaaacagaaac

SEQ ID NO: 283837 - DNA, 25 bp, Artificial
  probe
  misc_feature (1)..(25): SEQ ID NO: 1116; WAN024G4Y-5; Start 1646; Stop 1670
gtcaaacagaaacgaaactaacagg

SEQ ID NO: 283838 - DNA, 25 bp, Artificial
  probe
  misc_feature (1)..(25): SEQ ID NO: 1116; WAN024G4Y-5; Start 1338; Stop 1362
tatcaagcaatccatctatcgtttc

SEQ ID NO: 283839 - DNA, 25 bp, Artificial
  probe
  misc_feature (1)..(25): SEQ ID NO: 1116; WAN024G4Y-5; Start 222; Stop 246
ctttatctcaacctttaccgtcaag

SEQ ID NO: 283840 - DNA, 25 bp, Artificial
  probe
  misc_feature (1)..(25): SEQ ID NO: 1116; WAN024G4Y-5; Start 1636; Stop 1660
gaagaagagagtcaaacagaaacga

SEQ ID NO: 283841 - DNA, 25 bp, Artificial
  probe
  misc_feature (1)..(25): SEQ ID NO: 1117; WAN024FA9; Start 226; Stop 250
atgattcgtgataatggaacttctt

SEQ ID NO: 283842 - DNA, 25 bp, Artificial
  probe
  misc_feature (1)..(25): SEQ ID NO: 1117; WAN024FA9; Start 290; Stop 314
aagcactgaagtatattgattacga

SEQ ID NO: 283843 - DNA, 25 bp, Artificial
  probe
  misc_feature (1)..(25): SEQ ID NO: 1117; WAN024FA9; Start 227; Stop 251
tgattcgtgataatggaacttctta

SEQ ID NO: 283844 - DNA, 25 bp, Artificial
  probe
  misc_feature (1)..(25): SEQ ID NO: 1117; WAN024FA9; Start 291; Stop 315
agcactgaagtatattgattacgat

SEQ ID NO: 283845 - DNA, 25 bp, Artificial
  probe
  misc_feature (1)..(25): SEQ ID NO: 1117; WAN024FA9; Start 225; Stop 249
catgattcgtgataatggaacttct

SEQ ID NO: 283846 - DNA, 25 bp, Artificial
  probe
  misc_feature (1)..(25): SEQ ID NO: 1117; WAN024FA9; Start 229; Stop 253
attcgtgataatggaacttcttact

SEQ ID NO: 283847 - DNA, 25 bp, Artificial
  probe
  misc_feature (1)..(25): SEQ ID NO: 1117; WAN024FA9; Start 228; Stop 252
gattcgtgataatggaacttcttac

SEQ ID NO: 283848 - DNA, 25 bp, Artificial
  probe
  misc_feature (1)..(25): SEQ ID NO: 1117; WAN024FA9; Start 111; Stop 135
cattattggtgtcaacgatcataca

SEQ ID NO: 283849 - DNA, 25 bp, Artificial
  probe
  misc_feature (1)..(25): SEQ ID NO: 1117; WAN024FA9; Start 123; Stop 147
caacgatcatacacttgttaccgaa

SEQ ID NO: 283850 - DNA, 25 bp, Artificial
  probe
  misc_feature (1)..(25): SEQ ID NO: 1117; WAN024FA9; Start 391; Stop 415
atgaattattctgatgacttggact

SEQ ID NO: 283851 - DNA, 25 bp, Artificial
  probe
  misc_feature (1)..(25): SEQ ID NO: 1117; WAN024FA9; Start 120; Stop 144
tgtcaacgatcatacacttgttacc

SEQ ID NO: 283852 - DNA, 25 bp, Artificial
  probe
  misc_feature (1)..(25): SEQ ID NO: 1117; WAN024FA9; Start 230; Stop 254
ttcgtgataatggaacttcttacta

SEQ ID NO: 283853 - DNA, 25 bp, Artificial
  probe
  misc_feature (1)..(25): SEQ ID NO: 1117; WAN024FA9; Start 292; Stop 316
gcactgaagtatattgattacgatt

SEQ ID NO: 283854 - DNA, 25 bp, Artificial
  probe
  misc_feature (1)..(25): SEQ ID NO: 1117; WAN024FA9; Start 231; Stop 255
tcgtgataatggaacttcttactat

SEQ ID NO: 283855 - DNA, 25 bp, Artificial
  probe
  misc_feature (1)..(25): SEQ ID NO: 1117; WAN024FA9; Start 122; Stop 146
tcaacgatcatacacttgttaccga

SEQ ID NO: 283856 - DNA, 25 bp, Artificial
  probe
  misc_feature (1)..(25): SEQ ID NO: 1117; WAN024FA9; Start 121; Stop 145
gtcaacgatcatacacttgttaccg

SEQ ID NO: 283857 - DNA, 25 bp, Artificial
  probe
  misc_feature (1)..(25): SEQ ID NO: 1117; WAN024FA9; Start 110; Stop 134
ccattattggtgtcaacgatcatac

SEQ ID NO: 283858 - DNA, 25 bp, Artificial
  probe
  misc_feature (1)..(25): SEQ ID NO: 1117; WAN024FA9; Start 508; Stop 532
cgctatgtagaactaaagaatcggt

SEQ ID NO: 283859 - DNA, 25 bp, Artificial
  probe
  misc_feature (1)..(25): SEQ ID NO: 1117; WAN024FA9; Start 392; Stop 416
tgaattattctgatgacttggacta

SEQ ID NO: 283860 - DNA, 25 bp, Artificial
  probe
  misc_feature (1)..(25): SEQ ID NO: 1117; WAN024FA9; Start 390; Stop 414
aatgaattattctgatgacttggac

SEQ ID NO: 283861 - DNA, 25 bp, Artificial
  probe
  misc_feature (1)..(25): SEQ ID NO: 1117; WAN024FA9; Start 234; Stop 258
tgataatggaacttcttactattgc

SEQ ID NO: 283862 - DNA, 25 bp, Artificial
  probe
  misc_feature (1)..(25): SEQ ID NO: 1117; WAN024FA9; Start 109; Stop 133
gccattattggtgtcaacgatcata

SEQ ID NO: 283863 - DNA, 25 bp, Artificial
  probe
  misc_feature (1)..(25): SEQ ID NO: 1117; WAN024FA9; Start 15; Stop 39
agaaggcgactttattacaattcaa

SEQ ID NO: 283864 - DNA, 25 bp, Artificial
  probe
  misc_feature (1)..(25): SEQ ID NO: 1117; WAN024FA9; Start 14; Stop 38
aagaaggcgactttattacaattca

SEQ ID NO: 283865 - DNA, 25 bp, Artificial
  probe
  misc_feature (1)..(25): SEQ ID NO: 1117; WAN024FA9; Start 471; Stop 495
tcctttctcagaagcctatgtaaac

SEQ ID NO: 283866 - DNA, 25 bp, Artificial
  probe
  misc_feature (1)..(25): SEQ ID NO: 1117; WAN024FA9; Start 470; Stop 494
gtcctttctcagaagcctatgtaaa

SEQ ID NO: 283867 - DNA, 25 bp, Artificial
  probe
  misc_feature (1)..(25): SEQ ID NO: 1117; WAN024FA9; Start 472; Stop 496
cctttctcagaagcctatgtaaaca

SEQ ID NO: 283868 - DNA, 25 bp, Artificial
  probe
  misc_feature (1)..(25): SEQ ID NO: 1117; WAN024FA9; Start 477; Stop 501
ctcagaagcctatgtaaacatttgg

SEQ ID NO: 283869 - DNA, 25 bp, Artificial
  probe
  misc_feature (1)..(25): SEQ ID NO: 1117; WAN024FA9; Start 232; Stop 256
cgtgataatggaacttcttactatt

SEQ ID NO: 283870 - DNA, 25 bp, Artificial
  probe
  misc_feature (1)..(25): SEQ ID NO: 1117; WAN024FA9; Start 478; Stop 502
tcagaagcctatgtaaacatttggt

SEQ ID NO: 283871 - DNA, 25 bp, Artificial
  probe
  misc_feature (1)..(25): SEQ ID NO: 1117; WAN024FA9; Start 16; Stop 40
gaaggcgactttattacaattcaaa

SEQ ID NO: 283872 - DNA, 25 bp, Artificial
  probe
  misc_feature (1)..(25): SEQ ID NO: 1117; WAN024FA9; Start 509; Stop 533
gctatgtagaactaaagaatcggta

SEQ ID NO: 283873 - DNA, 25 bp, Artificial
  probe
  misc_feature (1)..(25): SEQ ID NO: 1117; WAN024FA9; Start 480; Stop 504
agaagcctatgtaaacatttggtac

SEQ ID NO: 283874 - DNA, 25 bp, Artificial
  probe
  misc_feature (1)..(25): SEQ ID NO: 1118; WAN024D97; Start 482; Stop 506
caagaccttacctagacaagttaca

SEQ ID NO: 283875 - DNA, 25 bp, Artificial
  probe
  misc_feature (1)..(25): SEQ ID NO: 1118; WAN024D97; Start 481; Stop 505
acaagaccttacctagacaagttac

SEQ ID NO: 283876 - DNA, 25 bp, Artificial
  probe
  misc_feature (1)..(25): SEQ ID NO: 1118; WAN024D97; Start 483; Stop 507
aagaccttacctagacaagttacag

SEQ ID NO: 283877 - DNA, 25 bp, Artificial
  probe
  misc_feature (1)..(25): SEQ ID NO: 1118; WAN024D97; Start 480; Stop 504
aacaagaccttacctagacaagtta

SEQ ID NO: 283878 - DNA, 25 bp, Artificial
  probe
  misc_feature (1)..(25): SEQ ID NO: 1118; WAN024D97; Start 304; Stop 328
attggatataatacagatggcaagg

SEQ ID NO: 283879 - DNA, 25 bp, Artificial
  probe
  misc_feature (1)..(25): SEQ ID NO: 1118; WAN024D97; Start 485; Stop 509
gaccttacctagacaagttacagga

SEQ ID NO: 283880 - DNA, 25 bp, Artificial
  probe
  misc_feature (1)..(25): SEQ ID NO: 1118; WAN024D97; Start 484; Stop 508
agaccttacctagacaagttacagg

SEQ ID NO: 283881 - DNA, 25 bp, Artificial
  probe
  misc_feature (1)..(25): SEQ ID NO: 1118; WAN024D97; Start 55; Stop 79
cattctatttctcccttcatccaca

SEQ ID NO: 283882 - DNA, 25 bp, Artificial
  probe
  misc_feature (1)..(25): SEQ ID NO: 1118; WAN024D97; Start 307; Stop 331
ggatataatacagatggcaagggat

SEQ ID NO: 283883 - DNA, 25 bp, Artificial
  probe
  misc_feature (1)..(25): SEQ ID NO: 1118; WAN024D97; Start 57; Stop 81
ttctatttctcccttcatccacaat

SEQ ID NO: 283884 - DNA, 25 bp, Artificial
  probe
  misc_feature (1)..(25): SEQ ID NO: 1118; WAN024D97; Start 56; Stop 80
attctatttctcccttcatccacaa

SEQ ID NO: 283885 - DNA, 25 bp, Artificial
  probe
  misc_feature (1)..(25): SEQ ID NO: 1118; WAN024D97; Start 306; Stop 330
tggatataatacagatggcaaggga

SEQ ID NO: 283886 - DNA, 25 bp, Artificial
  probe
  misc_feature (1)..(25): SEQ ID NO: 1118; WAN024D97; Start 52; Stop 76
aagcattctatttctcccttcatcc

SEQ ID NO: 283887 - DNA, 25 bp, Artificial
  probe
  misc_feature (1)..(25): SEQ ID NO: 1118; WAN024D97; Start 820; Stop 844
gagatttggcagtctttaacagaaa

SEQ ID NO: 283888 - DNA, 25 bp, Artificial
  probe
  misc_feature (1)..(25): SEQ ID NO: 1118; WAN024D97; Start 819; Stop 843
agagatttggcagtctttaacagaa

SEQ ID NO: 283889 - DNA, 25 bp, Artificial
  probe
  misc_feature (1)..(25): SEQ ID NO: 1118; WAN024D97; Start 305; Stop 329
ttggatataatacagatggcaaggg

SEQ ID NO: 283890 - DNA, 25 bp, Artificial
  probe
  misc_feature (1)..(25): SEQ ID NO: 1118; WAN024D97; Start 54; Stop 78
gcattctatttctcccttcatccac

SEQ ID NO: 283891 - DNA, 25 bp, Artificial
  probe
  misc_feature (1)..(25): SEQ ID NO: 1118; WAN024D97; Start 53; Stop 77
agcattctatttctcccttcatcca

SEQ ID NO: 283892 - DNA, 25 bp, Artificial
  probe
  misc_feature (1)..(25): SEQ ID NO: 1118; WAN024D97; Start 60; Stop 84
tatttctcccttcatccacaataga

SEQ ID NO: 283893 - DNA, 25 bp, Artificial
  probe
  misc_feature (1)..(25): SEQ ID NO: 1118; WAN024D97; Start 58; Stop 82
tctatttctcccttcatccacaata

SEQ ID NO: 283894 - DNA, 25 bp, Artificial
  probe
  misc_feature (1)..(25): SEQ ID NO: 1118; WAN024D97; Start 479; Stop 503
aaacaagaccttacctagacaagtt

SEQ ID NO: 283895 - DNA, 25 bp, Artificial
  probe
  misc_feature (1)..(25): SEQ ID NO: 1118; WAN024D97; Start 61; Stop 85
atttctcccttcatccacaatagag

SEQ ID NO: 283896 - DNA, 25 bp, Artificial
  probe
  misc_feature (1)..(25): SEQ ID NO: 1118; WAN024D97; Start 303; Stop 327
aattggatataatacagatggcaag

SEQ ID NO: 283897 - DNA, 25 bp, Artificial
  probe
  misc_feature (1)..(25): SEQ ID NO: 1118; WAN024D97; Start 308; Stop 332
gatataatacagatggcaagggatt

SEQ ID NO: 283898 - DNA, 25 bp, Artificial
  probe
  misc_feature (1)..(25): SEQ ID NO: 1118; WAN024D97; Start 51; Stop 75
taagcattctatttctcccttcatc

SEQ ID NO: 283899 - DNA, 25 bp, Artificial
  probe
  misc_feature (1)..(25): SEQ ID NO: 1118; WAN024D97; Start 69; Stop 93
cttcatccacaatagagcctttgag

SEQ ID NO: 283900 - DNA, 25 bp, Artificial
  probe
  misc_feature (1)..(25): SEQ ID NO: 1118; WAN024D97; Start 46; Stop 70
cctattaagcattctatttctccct

SEQ ID NO: 283901 - DNA, 25 bp, Artificial
  probe
  misc_feature (1)..(25): SEQ ID NO: 1118; WAN024D97; Start 45; Stop 69
tcctattaagcattctatttctccc

SEQ ID NO: 283902 - DNA, 25 bp, Artificial
  probe
  misc_feature (1)..(25): SEQ ID NO: 1118; WAN024D97; Start 35; Stop 59
ttgttgccaatcctattaagcattc

SEQ ID NO: 283903 - DNA, 25 bp, Artificial
  probe
  misc_feature (1)..(25): SEQ ID NO: 1118; WAN024D97; Start 34; Stop 58
gttgttgccaatcctattaagcatt

SEQ ID NO: 283904 - DNA, 25 bp, Artificial
  probe
  misc_feature (1)..(25): SEQ ID NO: 1118; WAN024D97; Start 309; Stop 333
atataatacagatggcaagggattt

SEQ ID NO: 283905 - DNA, 25 bp, Artificial
  probe
  misc_feature (1)..(25): SEQ ID NO: 1118; WAN024D97; Start 50; Stop 74
ttaagcattctatttctcccttcat

SEQ ID NO: 283906 - DNA, 25 bp, Artificial
  probe
  misc_feature (1)..(25): SEQ ID NO: 1118; WAN024D97; Start 49; Stop 73
attaagcattctatttctcccttca

SEQ ID NO: 283907 - DNA, 25 bp, Artificial
  probe
  misc_feature (1)..(25): SEQ ID NO: 1119; WAN024CR7; Start 438; Stop 462
tgaagatcagcgtagttatcatact

SEQ ID NO: 283908 - DNA, 25 bp, Artificial
  probe
  misc_feature (1)..(25): SEQ ID NO: 1119; WAN024CR7; Start 437; Stop 461
ttgaagatcagcgtagttatcatac

SEQ ID NO: 283909 - DNA, 25 bp, Artificial
  probe
  misc_feature (1)..(25): SEQ ID NO: 1119; WAN024CR7; Start 439; Stop 463
gaagatcagcgtagttatcatactt

SEQ ID NO: 283910 - DNA, 25 bp, Artificial
  probe
  misc_feature (1)..(25): SEQ ID NO: 1119; WAN024CR7; Start 226; Stop 250
caatatatacctgctccacacaagg

SEQ ID NO: 283911 - DNA, 25 bp, Artificial
  probe
  misc_feature (1)..(25): SEQ ID NO: 1119; WAN024CR7; Start 151; Stop 175
gaaacctactggagagtgatagatg

SEQ ID NO: 283912 - DNA, 25 bp, Artificial
  probe
  misc_feature (1)..(25): SEQ ID NO: 1119; WAN024CR7; Start 150; Stop 174
agaaacctactggagagtgatagat

SEQ ID NO: 283913 - DNA, 25 bp, Artificial
  probe
  misc_feature (1)..(25): SEQ ID NO: 1119; WAN024CR7; Start 149; Stop 173
aagaaacctactggagagtgataga

SEQ ID NO: 283914 - DNA, 25 bp, Artificial
  probe
  misc_feature (1)..(25): SEQ ID NO: 1119; WAN024CR7; Start 148; Stop 172
aaagaaacctactggagagtgatag

SEQ ID NO: 283915 - DNA, 25 bp, Artificial
  probe
  misc_feature (1)..(25): SEQ ID NO: 1119; WAN024CR7; Start 152; Stop 176
aaacctactggagagtgatagatgg

SEQ ID NO: 283916 - DNA, 25 bp, Artificial
  probe
  misc_feature (1)..(25): SEQ ID NO: 1119; WAN024CR7; Start 210; Stop 234
gatggttgtcggctggcaatatata

SEQ ID NO: 283917 - DNA, 25 bp, Artificial
  probe
  misc_feature (1)..(25): SEQ ID NO: 1119; WAN024CR7; Start 211; Stop 235
atggttgtcggctggcaatatatac

SEQ ID NO: 283918 - DNA, 25 bp, Artificial
  probe
  misc_feature (1)..(25): SEQ ID NO: 1119; WAN024CR7; Start 225; Stop 249
gcaatatatacctgctccacacaag

SEQ ID NO: 283919 - DNA, 25 bp, Artificial
  probe
  misc_feature (1)..(25): SEQ ID NO: 1119; WAN024CR7; Start 155; Stop 179
cctactggagagtgatagatgggaa

SEQ ID NO: 283920 - DNA, 25 bp, Artificial
  probe
  misc_feature (1)..(25): SEQ ID NO: 1119; WAN024CR7; Start 153; Stop 177
aacctactggagagtgatagatggg

SEQ ID NO: 283921 - DNA, 25 bp, Artificial
  probe
  misc_feature (1)..(25): SEQ ID NO: 1119; WAN024CR7; Start 214; Stop 238
gttgtcggctggcaatatatacctg

SEQ ID NO: 283922 - DNA, 25 bp, Artificial
  probe
  misc_feature (1)..(25): SEQ ID NO: 1119; WAN024CR7; Start 440; Stop 464
aagatcagcgtagttatcatacttt

SEQ ID NO: 283923 - DNA, 25 bp, Artificial
  probe
  misc_feature (1)..(25): SEQ ID NO: 1119; WAN024CR7; Start 436; Stop 460
tttgaagatcagcgtagttatcata

SEQ ID NO: 283924 - DNA, 25 bp, Artificial
  probe
  misc_feature (1)..(25): SEQ ID NO: 1119; WAN024CR7; Start 82; Stop 106
gatgattctgaaggatggcagtttg

SEQ ID NO: 283925 - DNA, 25 bp, Artificial
  probe
  misc_feature (1)..(25): SEQ ID NO: 1119; WAN024CR7; Start 81; Stop 105
agatgattctgaaggatggcagttt

SEQ ID NO: 283926 - DNA, 25 bp, Artificial
  probe
  misc_feature (1)..(25): SEQ ID NO: 1119; WAN024CR7; Start 227; Stop 251
aatatatacctgctccacacaaggg

SEQ ID NO: 283927 - DNA, 25 bp, Artificial
  probe
  misc_feature (1)..(25): SEQ ID NO: 1119; WAN024CR7; Start 83; Stop 107
atgattctgaaggatggcagtttgt

SEQ ID NO: 283928 - DNA, 25 bp, Artificial
  probe
  misc_feature (1)..(25): SEQ ID NO: 1119; WAN024CR7; Start 224; Stop 248
ggcaatatatacctgctccacacaa

SEQ ID NO: 283929 - DNA, 25 bp, Artificial
  probe
  misc_feature (1)..(25): SEQ ID NO: 1119; WAN024CR7; Start 441; Stop 465
agatcagcgtagttatcatacttta

SEQ ID NO: 283930 - DNA, 25 bp, Artificial
  probe
  misc_feature (1)..(25): SEQ ID NO: 1119; WAN024CR7; Start 154; Stop 178
acctactggagagtgatagatggga

SEQ ID NO: 283931 - DNA, 25 bp, Artificial
  probe
  misc_feature (1)..(25): SEQ ID NO: 1119; WAN024CR7; Start 145; Stop 169
ctaaaagaaacctactggagagtga

SEQ ID NO: 283932 - DNA, 25 bp, Artificial
  probe
  misc_feature (1)..(25): SEQ ID NO: 1119; WAN024CR7; Start 144; Stop 168
tctaaaagaaacctactggagagtg

SEQ ID NO: 283933 - DNA, 25 bp, Artificial
  probe
  misc_feature (1)..(25): SEQ ID NO: 1119; WAN024CR7; Start 222; Stop 246
ctggcaatatatacctgctccacac

SEQ ID NO: 283934 - DNA, 25 bp, Artificial
  probe
  misc_feature (1)..(25): SEQ ID NO: 1119; WAN024CR7; Start 147; Stop 171
aaaagaaacctactggagagtgata

SEQ ID NO: 283935 - DNA, 25 bp, Artificial
  probe
  misc_feature (1)..(25): SEQ ID NO: 1119; WAN024CR7; Start 146; Stop 170
taaaagaaacctactggagagtgat

SEQ ID NO: 283936 - DNA, 25 bp, Artificial
  probe
  misc_feature (1)..(25): SEQ ID NO: 1119; WAN024CR7; Start 84; Stop 108
tgattctgaaggatggcagtttgtc

SEQ ID NO: 283937 - DNA, 25 bp, Artificial
  probe
  misc_feature (1)..(25): SEQ ID NO: 1119; WAN024CR7; Start 381; Stop 405
caacaaacatcatggggaagaatat

SEQ ID NO: 283938 - DNA, 25 bp, Artificial
  probe
  misc_feature (1)..(25): SEQ ID NO: 1119; WAN024CR7; Start 415; Stop 439
gcagagaaacgagtctattattttg

SEQ ID NO: 283939 - DNA, 25 bp, Artificial
  probe
  misc_feature (1)..(25): SEQ ID NO: 1119; WAN024CR7; Start 414; Stop 438
agcagagaaacgagtctattatttt

SEQ ID NO: 283940 - DNA, 25 bp, Artificial
  probe
  misc_feature (1)..(25): SEQ ID NO: 1120; WAN024GKT; Start 49; Stop 73
agtgttatgaagttgaccgatctat

SEQ ID NO: 283941 - DNA, 25 bp, Artificial
  probe
  misc_feature (1)..(25): SEQ ID NO: 1120; WAN024GKT; Start 48; Stop 72
cagtgttatgaagttgaccgatcta

SEQ ID NO: 283942 - DNA, 25 bp, Artificial
  probe
  misc_feature (1)..(25): SEQ ID NO: 1120; WAN024GKT; Start 50; Stop 74
gtgttatgaagttgaccgatctatc

SEQ ID NO: 283943 - DNA, 25 bp, Artificial
  probe
  misc_feature (1)..(25): SEQ ID NO: 1120; WAN024GKT; Start 194; Stop 218
tctctgaaggttataatatcgctgc

SEQ ID NO: 283944 - DNA, 25 bp, Artificial
  probe
  misc_feature (1)..(25): SEQ ID NO: 1120; WAN024GKT; Start 198; Stop 222
tgaaggttataatatcgctgccatt

SEQ ID NO: 283945 - DNA, 25 bp, Artificial
  probe
  misc_feature (1)..(25): SEQ ID NO: 1120; WAN024GKT; Start 197; Stop 221
ctgaaggttataatatcgctgccat

SEQ ID NO: 283946 - DNA, 25 bp, Artificial
  probe
  misc_feature (1)..(25): SEQ ID NO: 1120; WAN024GKT; Start 195; Stop 219
ctctgaaggttataatatcgctgcc

SEQ ID NO: 283947 - DNA, 25 bp, Artificial
  probe
  misc_feature (1)..(25): SEQ ID NO: 1120; WAN024GKT; Start 202; Stop 226
ggttataatatcgctgccattaaga

SEQ ID NO: 283948 - DNA, 25 bp, Artificial
  probe
  misc_feature (1)..(25): SEQ ID NO: 1120; WAN024GKT; Start 201; Stop 225
aggttataatatcgctgccattaag

SEQ ID NO: 283949 - DNA, 25 bp, Artificial
  probe
  misc_feature (1)..(25): SEQ ID NO: 1120; WAN024GKT; Start 199; Stop 223
gaaggttataatatcgctgccatta

SEQ ID NO: 283950 - DNA, 25 bp, Artificial
  probe
  misc_feature (1)..(25): SEQ ID NO: 1120; WAN024GKT; Start 196; Stop 220
tctgaaggttataatatcgctgcca

SEQ ID NO: 283951 - DNA, 25 bp, Artificial
  probe
  misc_feature (1)..(25): SEQ ID NO: 1120; WAN024GKT; Start 200; Stop 224
aaggttataatatcgctgccattaa

SEQ ID NO: 283952 - DNA, 25 bp, Artificial
  probe
  misc_feature (1)..(25): SEQ ID NO: 1120; WAN024GKT; Start 193; Stop 217
atctctgaaggttataatatcgctg

SEQ ID NO: 283953 - DNA, 25 bp, Artificial
  probe
  misc_feature (1)..(25): SEQ ID NO: 1120; WAN024GKT; Start 148; Stop 172
tattccttgaatgacatggatcgtc

SEQ ID NO: 283954 - DNA, 25 bp, Artificial
  probe
  misc_feature (1)..(25): SEQ ID NO: 1120; WAN024GKT; Start 147; Stop 171
gtattccttgaatgacatggatcgt

SEQ ID NO: 283955 - DNA, 25 bp, Artificial
  probe
  misc_feature (1)..(25): SEQ ID NO: 1120; WAN024GKT; Start 146; Stop 170
tgtattccttgaatgacatggatcg

SEQ ID NO: 283956 - DNA, 25 bp, Artificial
  probe
  misc_feature (1)..(25): SEQ ID NO: 1120; WAN024GKT; Start 203; Stop 227
gttataatatcgctgccattaagaa

SEQ ID NO: 283957 - DNA, 25 bp, Artificial
  probe
  misc_feature (1)..(25): SEQ ID NO: 1120; WAN024GKT; Start 47; Stop 71
gcagtgttatgaagttgaccgatct

SEQ ID NO: 283958 - DNA, 25 bp, Artificial
  probe
  misc_feature (1)..(25): SEQ ID NO: 1120; WAN024GKT; Start 149; Stop 173
attccttgaatgacatggatcgtct

SEQ ID NO: 283959 - DNA, 25 bp, Artificial
  probe
  misc_feature (1)..(25): SEQ ID NO: 1120; WAN024GKT; Start 136; Stop 160
aatcgtcgcatgtattccttgaatg

SEQ ID NO: 283960 - DNA, 25 bp, Artificial
  probe
  misc_feature (1)..(25): SEQ ID NO: 1120; WAN024GKT; Start 51; Stop 75
tgttatgaagttgaccgatctatcg

SEQ ID NO: 283961 - DNA, 25 bp, Artificial
  probe
  misc_feature (1)..(25): SEQ ID NO: 1120; WAN024GKT; Start 165; Stop 189
ggatcgtctgcttgaaatcaaagat

SEQ ID NO: 283962 - DNA, 25 bp, Artificial
  probe
  misc_feature (1)..(25): SEQ ID NO: 1120; WAN024GKT; Start 145; Stop 169
atgtattccttgaatgacatggatc

SEQ ID NO: 283963 - DNA, 25 bp, Artificial
  probe
  misc_feature (1)..(25): SEQ ID NO: 1120; WAN024GKT; Start 192; Stop 216
tatctctgaaggttataatatcgct

SEQ ID NO: 283964 - DNA, 25 bp, Artificial
  probe
  misc_feature (1)..(25): SEQ ID NO: 1120; WAN024GKT; Start 163; Stop 187
atggatcgtctgcttgaaatcaaag

SEQ ID NO: 283965 - DNA, 25 bp, Artificial
  probe
  misc_feature (1)..(25): SEQ ID NO: 1120; WAN024GKT; Start 166; Stop 190
gatcgtctgcttgaaatcaaagatt

SEQ ID NO: 283966 - DNA, 25 bp, Artificial
  probe
  misc_feature (1)..(25): SEQ ID NO: 1120; WAN024GKT; Start 150; Stop 174
ttccttgaatgacatggatcgtctg

SEQ ID NO: 283967 - DNA, 25 bp, Artificial
  probe
  misc_feature (1)..(25): SEQ ID NO: 1120; WAN024GKT; Start 134; Stop 158
gaaatcgtcgcatgtattccttgaa

SEQ ID NO: 283968 - DNA, 25 bp, Artificial
  probe
  misc_feature (1)..(25): SEQ ID NO: 1120; WAN024GKT; Start 137; Stop 161
atcgtcgcatgtattccttgaatga

SEQ ID NO: 283969 - DNA, 25 bp, Artificial
  probe
  misc_feature (1)..(25): SEQ ID NO: 1120; WAN024GKT; Start 140; Stop 164
gtcgcatgtattccttgaatgacat

SEQ ID NO: 283970 - DNA, 25 bp, Artificial
  probe
  misc_feature (1)..(25): SEQ ID NO: 1120; WAN024GKT; Start 168; Stop 192
tcgtctgcttgaaatcaaagattat

SEQ ID NO: 283971 - DNA, 25 bp, Artificial
  probe
  misc_feature (1)..(25): SEQ ID NO: 1120; WAN024GKT; Start 167; Stop 191
atcgtctgcttgaaatcaaagatta

SEQ ID NO: 283972 - DNA, 25 bp, Artificial
  probe
  misc_feature (1)..(25): SEQ ID NO: 1120; WAN024GKT; Start 162; Stop 186
catggatcgtctgcttgaaatcaaa

SEQ ID NO: 283973 - DNA, 25 bp, Artificial
  probe
  misc_feature (1)..(25): SEQ ID NO: 1121; WAN024CWX; Start 699; Stop 723
ttacaccttcatcaactcaatcaac

SEQ ID NO: 283974 - DNA, 25 bp, Artificial
  probe
  misc_feature (1)..(25): SEQ ID NO: 1121; WAN024CWX; Start 700; Stop 724
tacaccttcatcaactcaatcaacg

SEQ ID NO: 283975 - DNA, 25 bp, Artificial
  probe
  misc_feature (1)..(25): SEQ ID NO: 1121; WAN024CWX; Start 698; Stop 722
attacaccttcatcaactcaatcaa

SEQ ID NO: 283976 - DNA, 25 bp, Artificial
  probe
  misc_feature (1)..(25): SEQ ID NO: 1121; WAN024CWX; Start 802; Stop 826
aatatgcttctccaagatgttgcta

SEQ ID NO: 283977 - DNA, 25 bp, Artificial
  probe
  misc_feature (1)..(25): SEQ ID NO: 1121; WAN024CWX; Start 799; Stop 823
ttgaatatgcttctccaagatgttg

SEQ ID NO: 283978 - DNA, 25 bp, Artificial
  probe
  misc_feature (1)..(25): SEQ ID NO: 1121; WAN024CWX; Start 818; Stop 842
atgttgctagtgtgcgtatgattat

SEQ ID NO: 283979 - DNA, 25 bp, Artificial
  probe
  misc_feature (1)..(25): SEQ ID NO: 1121; WAN024CWX; Start 819; Stop 843
tgttgctagtgtgcgtatgattatt

SEQ ID NO: 283980 - DNA, 25 bp, Artificial
  probe
  misc_feature (1)..(25): SEQ ID NO: 1121; WAN024CWX; Start 817; Stop 841
gatgttgctagtgtgcgtatgatta

SEQ ID NO: 283981 - DNA, 25 bp, Artificial
  probe
  misc_feature (1)..(25): SEQ ID NO: 1121; WAN024CWX; Start 803; Stop 827
atatgcttctccaagatgttgctag

SEQ ID NO: 283982 - DNA, 25 bp, Artificial
  probe
  misc_feature (1)..(25): SEQ ID NO: 1121; WAN024CWX; Start 695; Stop 719
aagattacaccttcatcaactcaat

SEQ ID NO: 283983 - DNA, 25 bp, Artificial
  probe
  misc_feature (1)..(25): SEQ ID NO: 1121; WAN024CWX; Start 801; Stop 825
gaatatgcttctccaagatgttgct

SEQ ID NO: 283984 - DNA, 25 bp, Artificial
  probe
  misc_feature (1)..(25): SEQ ID NO: 1121; WAN024CWX; Start 800; Stop 824
tgaatatgcttctccaagatgttgc

SEQ ID NO: 283985 - DNA, 25 bp, Artificial
  probe
  misc_feature (1)..(25): SEQ ID NO: 1121; WAN024CWX; Start 804; Stop 828
tatgcttctccaagatgttgctagt

SEQ ID NO: 283986 - DNA, 25 bp, Artificial
  probe
  misc_feature (1)..(25): SEQ ID NO: 1121; WAN024CWX; Start 697; Stop 721
gattacaccttcatcaactcaatca

SEQ ID NO: 283987 - DNA, 25 bp, Artificial
  probe
  misc_feature (1)..(25): SEQ ID NO: 1121; WAN024CWX; Start 730; Stop 754
attattgttgtatttggtggactcg

SEQ ID NO: 283988 - DNA, 25 bp, Artificial
  probe
  misc_feature (1)..(25): SEQ ID NO: 1121; WAN024CWX; Start 476; Stop 500
tggtttacttctttgtcgtgattac

SEQ ID NO: 283989 - DNA, 25 bp, Artificial
  probe
  misc_feature (1)..(25): SEQ ID NO: 1121; WAN024CWX; Start 474; Stop 498
aatggtttacttctttgtcgtgatt

SEQ ID NO: 283990 - DNA, 25 bp, Artificial
  probe
  misc_feature (1)..(25): SEQ ID NO: 1121; WAN024CWX; Start 453; Stop 477
tcctaactttacaacttggcaaatg

SEQ ID NO: 283991 - DNA, 25 bp, Artificial
  probe
  misc_feature (1)..(25): SEQ ID NO: 1121; WAN024CWX; Start 696; Stop 720
agattacaccttcatcaactcaatc

SEQ ID NO: 283992 - DNA, 25 bp, Artificial
  probe
  misc_feature (1)..(25): SEQ ID NO: 1121; WAN024CWX; Start 473; Stop 497
aaatggtttacttctttgtcgtgat

SEQ ID NO: 283993 - DNA, 25 bp, Artificial
  probe
  misc_feature (1)..(25): SEQ ID NO: 1121; WAN024CWX; Start 455; Stop 479
ctaactttacaacttggcaaatggt

SEQ ID NO: 283994 - DNA, 25 bp, Artificial
  probe
  misc_feature (1)..(25): SEQ ID NO: 1121; WAN024CWX; Start 450; Stop 474
gattcctaactttacaacttggcaa

SEQ ID NO: 283995 - DNA, 25 bp, Artificial
  probe
  misc_feature (1)..(25): SEQ ID NO: 1121; WAN024CWX; Start 393; Stop 417
ccgtatctttatcatcaatggtgga

SEQ ID NO: 283996 - DNA, 25 bp, Artificial
  probe
  misc_feature (1)..(25): SEQ ID NO: 1121; WAN024CWX; Start 392; Stop 416
tccgtatctttatcatcaatggtgg

SEQ ID NO: 283997 - DNA, 25 bp, Artificial
  probe
  misc_feature (1)..(25): SEQ ID NO: 1121; WAN024CWX; Start 816; Stop 840
agatgttgctagtgtgcgtatgatt

SEQ ID NO: 283998 - DNA, 25 bp, Artificial
  probe
  misc_feature (1)..(25): SEQ ID NO: 1121; WAN024CWX; Start 815; Stop 839
aagatgttgctagtgtgcgtatgat

SEQ ID NO: 283999 - DNA, 25 bp, Artificial
  probe
  misc_feature (1)..(25): SEQ ID NO: 1121; WAN024CWX; Start 692; Stop 716
cgaaagattacaccttcatcaactc

SEQ ID NO: 284000 - DNA, 25 bp, Artificial
  probe
  misc_feature (1)..(25): SEQ ID NO: 1121; WAN024CWX; Start 689; Stop 713
taccgaaagattacaccttcatcaa

SEQ ID NO: 284001 - DNA, 25 bp, Artificial
  probe
  misc_feature (1)..(25): SEQ ID NO: 1121; WAN024CWX; Start 452; Stop 476
ttcctaactttacaacttggcaaat

SEQ ID NO: 284002 - DNA, 25 bp, Artificial
  probe
  misc_feature (1)..(25): SEQ ID NO: 1121; WAN024CWX; Start 451; Stop 475
attcctaactttacaacttggcaaa

SEQ ID NO: 284003 - DNA, 25 bp, Artificial
  probe
  misc_feature (1)..(25): SEQ ID NO: 1121; WAN024CWX; Start 454; Stop 478
cctaactttacaacttggcaaatgg

SEQ ID NO: 284004 - DNA, 25 bp, Artificial
  probe
  misc_feature (1)..(25): SEQ ID NO: 1121; WAN024CWX; Start 394; Stop 418
cgtatctttatcatcaatggtggaa

SEQ ID NO: 284005 - DNA, 25 bp, Artificial
  probe
  misc_feature (1)..(25): SEQ ID NO: 1121; WAN024CWX; Start 465; Stop 489
aacttggcaaatggtttacttcttt

SEQ ID NO: 284006 - DNA, 25 bp, Artificial
  probe
  misc_feature (1)..(25): SEQ ID NO: 1122; WAN024GLI; Start 481; Stop 505
ttgattgttatcttggtcgttctgg

SEQ ID NO: 284007 - DNA, 25 bp, Artificial
  probe
  misc_feature (1)..(25): SEQ ID NO: 1122; WAN024GLI; Start 1279; Stop 1303
ggaatcttgctctcattggttctac

SEQ ID NO: 284008 - DNA, 25 bp, Artificial
  probe
  misc_feature (1)..(25): SEQ ID NO: 1122; WAN024GLI; Start 1278; Stop 1302
tggaatcttgctctcattggttcta

SEQ ID NO: 284009 - DNA, 25 bp, Artificial
  probe
  misc_feature (1)..(25): SEQ ID NO: 1122; WAN024GLI; Start 97; Stop 121
ctaggtgctctatctggagaacatt

SEQ ID NO: 284010 - DNA, 25 bp, Artificial
  probe
  misc_feature (1)..(25): SEQ ID NO: 1122; WAN024GLI; Start 1276; Stop 1300
gttggaatcttgctctcattggttc

SEQ ID NO: 284011 - DNA, 25 bp, Artificial
  probe
  misc_feature (1)..(25): SEQ ID NO: 1122; WAN024GLI; Start 1277; Stop 1301
ttggaatcttgctctcattggttct

SEQ ID NO: 284012 - DNA, 25 bp, Artificial
  probe
  misc_feature (1)..(25): SEQ ID NO: 1122; WAN024GLI; Start 986; Stop 1010
ttaccttgattggatttgctattgc

SEQ ID NO: 284013 - DNA, 25 bp, Artificial
  probe
  misc_feature (1)..(25): SEQ ID NO: 1122; WAN024GLI; Start 173; Stop 197
tgacccttattattggaacgctaaa

SEQ ID NO: 284014 - DNA, 25 bp, Artificial
  probe
  misc_feature (1)..(25): SEQ ID NO: 1122; WAN024GLI; Start 172; Stop 196
ttgacccttattattggaacgctaa

SEQ ID NO: 284015 - DNA, 25 bp, Artificial
  probe
  misc_feature (1)..(25): SEQ ID NO: 1122; WAN024GLI; Start 96; Stop 120
tctaggtgctctatctggagaacat

SEQ ID NO: 284016 - DNA, 25 bp, Artificial
  probe
  misc_feature (1)..(25): SEQ ID NO: 1122; WAN024GLI; Start 508; Stop 532
gctatcaaatatggtggaacaagtc

SEQ ID NO: 284017 - DNA, 25 bp, Artificial
  probe
  misc_feature (1)..(25): SEQ ID NO: 1122; WAN024GLI; Start 480; Stop 504
tttgattgttatcttggtcgttctg

SEQ ID NO: 284018 - DNA, 25 bp, Artificial
  probe
  misc_feature (1)..(25): SEQ ID NO: 1122; WAN024GLI; Start 171; Stop 195
cttgacccttattattggaacgcta

SEQ ID NO: 284019 - DNA, 25 bp, Artificial
  probe
  misc_feature (1)..(25): SEQ ID NO: 1122; WAN024GLI; Start 983; Stop 1007
cctttaccttgattggatttgctat

SEQ ID NO: 284020 - DNA, 25 bp, Artificial
  probe
  misc_feature (1)..(25): SEQ ID NO: 1122; WAN024GLI; Start 371; Stop 395
gcttgattgtatttacggttctgta

SEQ ID NO: 284021 - DNA, 25 bp, Artificial
  probe
  misc_feature (1)..(25): SEQ ID NO: 1122; WAN024GLI; Start 367; Stop 391
cttggcttgattgtatttacggttc

SEQ ID NO: 284022 - DNA, 25 bp, Artificial
  probe
  misc_feature (1)..(25): SEQ ID NO: 1122; WAN024GLI; Start 175; Stop 199
acccttattattggaacgctaaatc

SEQ ID NO: 284023 - DNA, 25 bp, Artificial
  probe
  misc_feature (1)..(25): SEQ ID NO: 1122; WAN024GLI; Start 174; Stop 198
gacccttattattggaacgctaaat

SEQ ID NO: 284024 - DNA, 25 bp, Artificial
  probe
  misc_feature (1)..(25): SEQ ID NO: 1122; WAN024GLI; Start 270; Stop 294
ttacttgtcaatcggtccattcttt

SEQ ID NO: 284025 - DNA, 25 bp, Artificial
  probe
  misc_feature (1)..(25): SEQ ID NO: 1122; WAN024GLI; Start 269; Stop 293
tttacttgtcaatcggtccattctt

SEQ ID NO: 284026 - DNA, 25 bp, Artificial
  probe
  misc_feature (1)..(25): SEQ ID NO: 1122; WAN024GLI; Start 266; Stop 290
ttctttacttgtcaatcggtccatt

SEQ ID NO: 284027 - DNA, 25 bp, Artificial
  probe
  misc_feature (1)..(25): SEQ ID NO: 1122; WAN024GLI; Start 1280; Stop 1304
gaatcttgctctcattggttctacc

SEQ ID NO: 284028 - DNA, 25 bp, Artificial
  probe
  misc_feature (1)..(25): SEQ ID NO: 1122; WAN024GLI; Start 368; Stop 392
ttggcttgattgtatttacggttct

SEQ ID NO: 284029 - DNA, 25 bp, Artificial
  probe
  misc_feature (1)..(25): SEQ ID NO: 1122; WAN024GLI; Start 362; Stop 386
aaggacttggcttgattgtatttac

SEQ ID NO: 284030 - DNA, 25 bp, Artificial
  probe
  misc_feature (1)..(25): SEQ ID NO: 1122; WAN024GLI; Start 693; Stop 717
tatttgggttgttggtatcgttgtt

SEQ ID NO: 284031 - DNA, 25 bp, Artificial
  probe
  misc_feature (1)..(25): SEQ ID NO: 1122; WAN024GLI; Start 366; Stop 390
acttggcttgattgtatttacggtt

SEQ ID NO: 284032 - DNA, 25 bp, Artificial
  probe
  misc_feature (1)..(25): SEQ ID NO: 1122; WAN024GLI; Start 268; Stop 292
ctttacttgtcaatcggtccattct

SEQ ID NO: 284033 - DNA, 25 bp, Artificial
  probe
  misc_feature (1)..(25): SEQ ID NO: 1122; WAN024GLI; Start 267; Stop 291
tctttacttgtcaatcggtccattc

SEQ ID NO: 284034 - DNA, 25 bp, Artificial
  probe
  misc_feature (1)..(25): SEQ ID NO: 1122; WAN024GLI; Start 212; Stop 236
tctacgagatttcaacgaagatagc

SEQ ID NO: 284035 - DNA, 25 bp, Artificial
  probe
  misc_feature (1)..(25): SEQ ID NO: 1122; WAN024GLI; Start 363; Stop 387
aggacttggcttgattgtatttacg

SEQ ID NO: 284036 - DNA, 25 bp, Artificial
  probe
  misc_feature (1)..(25): SEQ ID NO: 1122; WAN024GLI; Start 356; Stop 380
caaataaaggacttggcttgattgt

SEQ ID NO: 284037 - DNA, 25 bp, Artificial
  probe
  misc_feature (1)..(25): SEQ ID NO: 1122; WAN024GLI; Start 1214; Stop 1238
caaatcttgttagcgttcttccttt

SEQ ID NO: 284038 - DNA, 25 bp, Artificial
  probe
  misc_feature (1)..(25): SEQ ID NO: 1122; WAN024GLI; Start 690; Stop 714
aactatttgggttgttggtatcgtt

SEQ ID NO: 284039 - DNA, 25 bp, Artificial
  probe
  misc_feature (1)..(25): SEQ ID NO: 1123; WAN024DGM; Start 758; Stop 782
ccgttcttcttgttgttatgatgtt

SEQ ID NO: 284040 - DNA, 25 bp, Artificial
  probe
  misc_feature (1)..(25): SEQ ID NO: 1123; WAN024DGM; Start 752; Stop 776
taggttccgttcttcttgttgttat

SEQ ID NO: 284041 - DNA, 25 bp, Artificial
  probe
  misc_feature (1)..(25): SEQ ID NO: 1123; WAN024DGM; Start 756; Stop 780
ttccgttcttcttgttgttatgatg

SEQ ID NO: 284042 - DNA, 25 bp, Artificial
  probe
  misc_feature (1)..(25): SEQ ID NO: 1123; WAN024DGM; Start 755; Stop 779
gttccgttcttcttgttgttatgat

SEQ ID NO: 284043 - DNA, 25 bp, Artificial
  probe
  misc_feature (1)..(25): SEQ ID NO: 1123; WAN024DGM; Start 751; Stop 775
ttaggttccgttcttcttgttgtta

SEQ ID NO: 284044 - DNA, 25 bp, Artificial
  probe
  misc_feature (1)..(25): SEQ ID NO: 1123; WAN024DGM; Start 757; Stop 781
tccgttcttcttgttgttatgatgt

SEQ ID NO: 284045 - DNA, 25 bp, Artificial
  probe
  misc_feature (1)..(25): SEQ ID NO: 1123; WAN024DGM; Start 754; Stop 778
ggttccgttcttcttgttgttatga

SEQ ID NO: 284046 - DNA, 25 bp, Artificial
  probe
  misc_feature (1)..(25): SEQ ID NO: 1123; WAN024DGM; Start 753; Stop 777
aggttccgttcttcttgttgttatg

SEQ ID NO: 284047 - DNA, 25 bp, Artificial
  probe
  misc_feature (1)..(25): SEQ ID NO: 1123; WAN024DGM; Start 407; Stop 431
atcagatgctaagtctcctagtcag

SEQ ID NO: 284048 - DNA, 25 bp, Artificial
  probe
  misc_feature (1)..(25): SEQ ID NO: 1123; WAN024DGM; Start 409; Stop 433
cagatgctaagtctcctagtcagtt

SEQ ID NO: 284049 - DNA, 25 bp, Artificial
  probe
  misc_feature (1)..(25): SEQ ID NO: 1123; WAN024DGM; Start 406; Stop 430
catcagatgctaagtctcctagtca

SEQ ID NO: 284050 - DNA, 25 bp, Artificial
  probe
  misc_feature (1)..(25): SEQ ID NO: 1123; WAN024DGM; Start 75; Stop 99
ttatcaagcatcagatagtgagttg

SEQ ID NO: 284051 - DNA, 25 bp, Artificial
  probe
  misc_feature (1)..(25): SEQ ID NO: 1123; WAN024DGM; Start 83; Stop 107
catcagatagtgagttgaccagtgt

SEQ ID NO: 284052 - DNA, 25 bp, Artificial
  probe
  misc_feature (1)..(25): SEQ ID NO: 1123; WAN024DGM; Start 408; Stop 432
tcagatgctaagtctcctagtcagt

SEQ ID NO: 284053 - DNA, 25 bp, Artificial
  probe
  misc_feature (1)..(25): SEQ ID NO: 1123; WAN024DGM; Start 405; Stop 429
ccatcagatgctaagtctcctagtc

SEQ ID NO: 284054 - DNA, 25 bp, Artificial
  probe
  misc_feature (1)..(25): SEQ ID NO: 1123; WAN024DGM; Start 84; Stop 108
atcagatagtgagttgaccagtgtc

SEQ ID NO: 284055 - DNA, 25 bp, Artificial
  probe
  misc_feature (1)..(25): SEQ ID NO: 1123; WAN024DGM; Start 80; Stop 104
aagcatcagatagtgagttgaccag

SEQ ID NO: 284056 - DNA, 25 bp, Artificial
  probe
  misc_feature (1)..(25): SEQ ID NO: 1123; WAN024DGM; Start 525; Stop 549
tggcattatctatcaggctttacaa

SEQ ID NO: 284057 - DNA, 25 bp, Artificial
  probe
  misc_feature (1)..(25): SEQ ID NO: 1123; WAN024DGM; Start 492; Stop 516
tttggctttacttgctcattattgg

SEQ ID NO: 284058 - DNA, 25 bp, Artificial
  probe
  misc_feature (1)..(25): SEQ ID NO: 1123; WAN024DGM; Start 524; Stop 548
atggcattatctatcaggctttaca

SEQ ID NO: 284059 - DNA, 25 bp, Artificial
  probe
  misc_feature (1)..(25): SEQ ID NO: 1123; WAN024DGM; Start 74; Stop 98
attatcaagcatcagatagtgagtt

SEQ ID NO: 284060 - DNA, 25 bp, Artificial
  probe
  misc_feature (1)..(25): SEQ ID NO: 1123; WAN024DGM; Start 79; Stop 103
caagcatcagatagtgagttgacca

SEQ ID NO: 284061 - DNA, 25 bp, Artificial
  probe
  misc_feature (1)..(25): SEQ ID NO: 1123; WAN024DGM; Start 523; Stop 547
gatggcattatctatcaggctttac

SEQ ID NO: 284062 - DNA, 25 bp, Artificial
  probe
  misc_feature (1)..(25): SEQ ID NO: 1123; WAN024DGM; Start 493; Stop 517
ttggctttacttgctcattattgga

SEQ ID NO: 284063 - DNA, 25 bp, Artificial
  probe
  misc_feature (1)..(25): SEQ ID NO: 1123; WAN024DGM; Start 750; Stop 774
tttaggttccgttcttcttgttgtt

SEQ ID NO: 284064 - DNA, 25 bp, Artificial
  probe
  misc_feature (1)..(25): SEQ ID NO: 1123; WAN024DGM; Start 527; Stop 551
gcattatctatcaggctttacaagg

SEQ ID NO: 284065 - DNA, 25 bp, Artificial
  probe
  misc_feature (1)..(25): SEQ ID NO: 1123; WAN024DGM; Start 526; Stop 550
ggcattatctatcaggctttacaag

SEQ ID NO: 284066 - DNA, 25 bp, Artificial
  probe
  misc_feature (1)..(25): SEQ ID NO: 1123; WAN024DGM; Start 530; Stop 554
ttatctatcaggctttacaagggtt

SEQ ID NO: 284067 - DNA, 25 bp, Artificial
  probe
  misc_feature (1)..(25): SEQ ID NO: 1123; WAN024DGM; Start 529; Stop 553
attatctatcaggctttacaagggt

SEQ ID NO: 284068 - DNA, 25 bp, Artificial
  probe
  misc_feature (1)..(25): SEQ ID NO: 1123; WAN024DGM; Start 531; Stop 555
tatctatcaggctttacaagggttg

SEQ ID NO: 284069 - DNA, 25 bp, Artificial
  probe
  misc_feature (1)..(25): SEQ ID NO: 1123; WAN024DGM; Start 496; Stop 520
gctttacttgctcattattggacaa

SEQ ID NO: 284070 - DNA, 25 bp, Artificial
  probe
  misc_feature (1)..(25): SEQ ID NO: 1123; WAN024DGM; Start 528; Stop 552
cattatctatcaggctttacaaggg

SEQ ID NO: 284071 - DNA, 25 bp, Artificial
  probe
  misc_feature (1)..(25): SEQ ID NO: 1123; WAN024DGM; Start 759; Stop 783
cgttcttcttgttgttatgatgttt

SEQ ID NO: 284072 - DNA, 25 bp, Artificial
  probe
  misc_feature (1)..(25): SEQ ID NO: 1124; WAN024DAO; Start 164; Stop 188
tgcttgaagaagttaaggtggtaat

SEQ ID NO: 284073 - DNA, 25 bp, Artificial
  probe
  misc_feature (1)..(25): SEQ ID NO: 1124; WAN024DAO; Start 165; Stop 189
gcttgaagaagttaaggtggtaatt

SEQ ID NO: 284074 - DNA, 25 bp, Artificial
  probe
  misc_feature (1)..(25): SEQ ID NO: 1124; WAN024DAO; Start 163; Stop 187
ctgcttgaagaagttaaggtggtaa

SEQ ID NO: 284075 - DNA, 25 bp, Artificial
  probe
  misc_feature (1)..(25): SEQ ID NO: 1124; WAN024DAO; Start 520; Stop 544
ttagttaccaatcctcatcacttga

SEQ ID NO: 284076 - DNA, 25 bp, Artificial
  probe
  misc_feature (1)..(25): SEQ ID NO: 1124; WAN024DAO; Start 156; Stop 180
gacaacactgcttgaagaagttaag

SEQ ID NO: 284077 - DNA, 25 bp, Artificial
  probe
  misc_feature (1)..(25): SEQ ID NO: 1124; WAN024DAO; Start 155; Stop 179
tgacaacactgcttgaagaagttaa

SEQ ID NO: 284078 - DNA, 25 bp, Artificial
  probe
  misc_feature (1)..(25): SEQ ID NO: 1124; WAN024DAO; Start 154; Stop 178
ttgacaacactgcttgaagaagtta

SEQ ID NO: 284079 - DNA, 25 bp, Artificial
  probe
  misc_feature (1)..(25): SEQ ID NO: 1124; WAN024DAO; Start 352; Stop 376
ggagtcttgcttcttaatgcttgtt

SEQ ID NO: 284080 - DNA, 25 bp, Artificial
  probe
  misc_feature (1)..(25): SEQ ID NO: 1124; WAN024DAO; Start 350; Stop 374
aaggagtcttgcttcttaatgcttg

SEQ ID NO: 284081 - DNA, 25 bp, Artificial
  probe
  misc_feature (1)..(25): SEQ ID NO: 1124; WAN024DAO; Start 521; Stop 545
tagttaccaatcctcatcacttgat

SEQ ID NO: 284082 - DNA, 25 bp, Artificial
  probe
  misc_feature (1)..(25): SEQ ID NO: 1124; WAN024DAO; Start 158; Stop 182
caacactgcttgaagaagttaaggt

SEQ ID NO: 284083 - DNA, 25 bp, Artificial
  probe
  misc_feature (1)..(25): SEQ ID NO: 1124; WAN024DAO; Start 157; Stop 181
acaacactgcttgaagaagttaagg

SEQ ID NO: 284084 - DNA, 25 bp, Artificial
  probe
  misc_feature (1)..(25): SEQ ID NO: 1124; WAN024DAO; Start 162; Stop 186
actgcttgaagaagttaaggtggta

SEQ ID NO: 284085 - DNA, 25 bp, Artificial
  probe
  misc_feature (1)..(25): SEQ ID NO: 1124; WAN024DAO; Start 166; Stop 190
cttgaagaagttaaggtggtaattc

SEQ ID NO: 284086 - DNA, 25 bp, Artificial
  probe
  misc_feature (1)..(25): SEQ ID NO: 1124; WAN024DAO; Start 351; Stop 375
aggagtcttgcttcttaatgcttgt

SEQ ID NO: 284087 - DNA, 25 bp, Artificial
  probe
  misc_feature (1)..(25): SEQ ID NO: 1124; WAN024DAO; Start 153; Stop 177
cttgacaacactgcttgaagaagtt

SEQ ID NO: 284088 - DNA, 25 bp, Artificial
  probe
  misc_feature (1)..(25): SEQ ID NO: 1124; WAN024DAO; Start 159; Stop 183
aacactgcttgaagaagttaaggtg

SEQ ID NO: 284089 - DNA, 25 bp, Artificial
  probe
  misc_feature (1)..(25): SEQ ID NO: 1124; WAN024DAO; Start 522; Stop 546
agttaccaatcctcatcacttgatt

SEQ ID NO: 284090 - DNA, 25 bp, Artificial
  probe
  misc_feature (1)..(25): SEQ ID NO: 1124; WAN024DAO; Start 83; Stop 107
atcagtttatggagcaggtctattc

SEQ ID NO: 284091 - DNA, 25 bp, Artificial
  probe
  misc_feature (1)..(25): SEQ ID NO: 1124; WAN024DAO; Start 82; Stop 106
aatcagtttatggagcaggtctatt

SEQ ID NO: 284092 - DNA, 25 bp, Artificial
  probe
  misc_feature (1)..(25): SEQ ID NO: 1124; WAN024DAO; Start 81; Stop 105
caatcagtttatggagcaggtctat

SEQ ID NO: 284093 - DNA, 25 bp, Artificial
  probe
  misc_feature (1)..(25): SEQ ID NO: 1124; WAN024DAO; Start 362; Stop 386
ttcttaatgcttgtttgactgttcc

SEQ ID NO: 284094 - DNA, 25 bp, Artificial
  probe
  misc_feature (1)..(25): SEQ ID NO: 1124; WAN024DAO; Start 353; Stop 377
gagtcttgcttcttaatgcttgttt

SEQ ID NO: 284095 - DNA, 25 bp, Artificial
  probe
  misc_feature (1)..(25): SEQ ID NO: 1124; WAN024DAO; Start 357; Stop 381
cttgcttcttaatgcttgtttgact

SEQ ID NO: 284096 - DNA, 25 bp, Artificial
  probe
  misc_feature (1)..(25): SEQ ID NO: 1124; WAN024DAO; Start 356; Stop 380
tcttgcttcttaatgcttgtttgac

SEQ ID NO: 284097 - DNA, 25 bp, Artificial
  probe
  misc_feature (1)..(25): SEQ ID NO: 1124; WAN024DAO; Start 355; Stop 379
gtcttgcttcttaatgcttgtttga

SEQ ID NO: 284098 - DNA, 25 bp, Artificial
  probe
  misc_feature (1)..(25): SEQ ID NO: 1124; WAN024DAO; Start 354; Stop 378
agtcttgcttcttaatgcttgtttg

SEQ ID NO: 284099 - DNA, 25 bp, Artificial
  probe
  misc_feature (1)..(25): SEQ ID NO: 1124; WAN024DAO; Start 77; Stop 101
aaatcaatcagtttatggagcaggt

SEQ ID NO: 284100 - DNA, 25 bp, Artificial
  probe
  misc_feature (1)..(25): SEQ ID NO: 1124; WAN024DAO; Start 364; Stop 388
cttaatgcttgtttgactgttcctg

SEQ ID NO: 284101 - DNA, 25 bp, Artificial
  probe
  misc_feature (1)..(25): SEQ ID NO: 1124; WAN024DAO; Start 363; Stop 387
tcttaatgcttgtttgactgttcct

SEQ ID NO: 284102 - DNA, 25 bp, Artificial
  probe
  misc_feature (1)..(25): SEQ ID NO: 1124; WAN024DAO; Start 361; Stop 385
cttcttaatgcttgtttgactgttc

SEQ ID NO: 284103 - DNA, 25 bp, Artificial
  probe
  misc_feature (1)..(25): SEQ ID NO: 1124; WAN024DAO; Start 360; Stop 384
gcttcttaatgcttgtttgactgtt

SEQ ID NO: 284104 - DNA, 25 bp, Artificial
  probe
  misc_feature (1)..(25): SEQ ID NO: 1124; WAN024DAO; Start 358; Stop 382
ttgcttcttaatgcttgtttgactg

SEQ ID NO: 284105 - DNA, 25 bp, Artificial
  probe
  misc_feature (1)..(25): SEQ ID NO: 1125; WAN024CEI; Start 2698; Stop 2722
tatgatgatggttctttccttgtgt

SEQ ID NO: 284106 - DNA, 25 bp, Artificial
  probe
  misc_feature (1)..(25): SEQ ID NO: 1125; WAN024CEI; Start 933; Stop 957
ctggatagttggaggaatagtcttt

SEQ ID NO: 284107 - DNA, 25 bp, Artificial
  probe
  misc_feature (1)..(25): SEQ ID NO: 1125; WAN024CEI; Start 934; Stop 958
tggatagttggaggaatagtctttc

SEQ ID NO: 284108 - DNA, 25 bp, Artificial
  probe
  misc_feature (1)..(25): SEQ ID NO: 1125; WAN024CEI; Start 939; Stop 963
agttggaggaatagtctttcttctt

SEQ ID NO: 284109 - DNA, 25 bp, Artificial
  probe
  misc_feature (1)..(25): SEQ ID NO: 1125; WAN024CEI; Start 935; Stop 959
ggatagttggaggaatagtctttct

SEQ ID NO: 284110 - DNA, 25 bp, Artificial
  probe
  misc_feature (1)..(25): SEQ ID NO: 1125; WAN024CEI; Start 2699; Stop 2723
atgatgatggttctttccttgtgtc

SEQ ID NO: 284111 - DNA, 25 bp, Artificial
  probe
  misc_feature (1)..(25): SEQ ID NO: 1125; WAN024CEI; Start 199; Stop 223
aaacaagcaaatgaagactacaatc

SEQ ID NO: 284112 - DNA, 25 bp, Artificial
  probe
  misc_feature (1)..(25): SEQ ID NO: 1125; WAN024CEI; Start 1876; Stop 1900
ttaggaaattggtcggtagagtctt

SEQ ID NO: 284113 - DNA, 25 bp, Artificial
  probe
  misc_feature (1)..(25): SEQ ID NO: 1125; WAN024CEI; Start 1875; Stop 1899
tttaggaaattggtcggtagagtct

SEQ ID NO: 284114 - DNA, 25 bp, Artificial
  probe
  misc_feature (1)..(25): SEQ ID NO: 1125; WAN024CEI; Start 940; Stop 964
gttggaggaatagtctttcttcttt

SEQ ID NO: 284115 - DNA, 25 bp, Artificial
  probe
  misc_feature (1)..(25): SEQ ID NO: 1125; WAN024CEI; Start 200; Stop 224
aacaagcaaatgaagactacaatca

SEQ ID NO: 284116 - DNA, 25 bp, Artificial
  probe
  misc_feature (1)..(25): SEQ ID NO: 1125; WAN024CEI; Start 938; Stop 962
tagttggaggaatagtctttcttct

SEQ ID NO: 284117 - DNA, 25 bp, Artificial
  probe
  misc_feature (1)..(25): SEQ ID NO: 1125; WAN024CEI; Start 2701; Stop 2725
gatgatggttctttccttgtgtctg

SEQ ID NO: 284118 - DNA, 25 bp, Artificial
  probe
  misc_feature (1)..(25): SEQ ID NO: 1125; WAN024CEI; Start 1877; Stop 1901
taggaaattggtcggtagagtcttc

SEQ ID NO: 284119 - DNA, 25 bp, Artificial
  probe
  misc_feature (1)..(25): SEQ ID NO: 1125; WAN024CEI; Start 997; Stop 1021
tctgctagtttgattcaacaagatg

SEQ ID NO: 284120 - DNA, 25 bp, Artificial
  probe
  misc_feature (1)..(25): SEQ ID NO: 1125; WAN024CEI; Start 995; Stop 1019
catctgctagtttgattcaacaaga

SEQ ID NO: 284121 - DNA, 25 bp, Artificial
  probe
  misc_feature (1)..(25): SEQ ID NO: 1125; WAN024CEI; Start 2702; Stop 2726
atgatggttctttccttgtgtctga

SEQ ID NO: 284122 - DNA, 25 bp, Artificial
  probe
  misc_feature (1)..(25): SEQ ID NO: 1125; WAN024CEI; Start 2700; Stop 2724
tgatgatggttctttccttgtgtct

SEQ ID NO: 284123 - DNA, 25 bp, Artificial
  probe
  misc_feature (1)..(25): SEQ ID NO: 1125; WAN024CEI; Start 998; Stop 1022
ctgctagtttgattcaacaagatga

SEQ ID NO: 284124 - DNA, 25 bp, Artificial
  probe
  misc_feature (1)..(25): SEQ ID NO: 1125; WAN024CEI; Start 994; Stop 1018
tcatctgctagtttgattcaacaag

SEQ ID NO: 284125 - DNA, 25 bp, Artificial
  probe
  misc_feature (1)..(25): SEQ ID NO: 1125; WAN024CEI; Start 993; Stop 1017
ttcatctgctagtttgattcaacaa

SEQ ID NO: 284126 - DNA, 25 bp, Artificial
  probe
  misc_feature (1)..(25): SEQ ID NO: 1125; WAN024CEI; Start 992; Stop 1016
tttcatctgctagtttgattcaaca

SEQ ID NO: 284127 - DNA, 25 bp, Artificial
  probe
  misc_feature (1)..(25): SEQ ID NO: 1125; WAN024CEI; Start 937; Stop 961
atagttggaggaatagtctttcttc

SEQ ID NO: 284128 - DNA, 25 bp, Artificial
  probe
  misc_feature (1)..(25): SEQ ID NO: 1125; WAN024CEI; Start 936; Stop 960
gatagttggaggaatagtctttctt

SEQ ID NO: 284129 - DNA, 25 bp, Artificial
  probe
  misc_feature (1)..(25): SEQ ID NO: 1125; WAN024CEI; Start 1880; Stop 1904
gaaattggtcggtagagtcttctat

SEQ ID NO: 284130 - DNA, 25 bp, Artificial
  probe
  misc_feature (1)..(25): SEQ ID NO: 1125; WAN024CEI; Start 2002; Stop 2026
gccatttatagtggtgcttatccta

SEQ ID NO: 284131 - DNA, 25 bp, Artificial
  probe
  misc_feature (1)..(25): SEQ ID NO: 1125; WAN024CEI; Start 2176; Stop 2200
agtccttactatcaaagttggttaa

SEQ ID NO: 284132 - DNA, 25 bp, Artificial
  probe
  misc_feature (1)..(25): SEQ ID NO: 1125; WAN024CEI; Start 1879; Stop 1903
ggaaattggtcggtagagtcttcta

SEQ ID NO: 284133 - DNA, 25 bp, Artificial
  probe
  misc_feature (1)..(25): SEQ ID NO: 1125; WAN024CEI; Start 1217; Stop 1241
ctttgtggcatgatttaaacgatgg

SEQ ID NO: 284134 - DNA, 25 bp, Artificial
  probe
  misc_feature (1)..(25): SEQ ID NO: 1125; WAN024CEI; Start 1661; Stop 1685
atacaggtttgaaagtttcctatca

SEQ ID NO: 284135 - DNA, 25 bp, Artificial
  probe
  misc_feature (1)..(25): SEQ ID NO: 1125; WAN024CEI; Start 1878; Stop 1902
aggaaattggtcggtagagtcttct

SEQ ID NO: 284136 - DNA, 25 bp, Artificial
  probe
  misc_feature (1)..(25): SEQ ID NO: 1125; WAN024CEI; Start 2003; Stop 2027
ccatttatagtggtgcttatcctaa

SEQ ID NO: 284137 - DNA, 25 bp, Artificial
  probe
  misc_feature (1)..(25): SEQ ID NO: 1125; WAN024CEI; Start 730; Stop 754
aagaaaagactgaccaacacaaaag

SEQ ID NO: 284138 - DNA, 25 bp, Artificial
  probe
  misc_feature (1)..(25): SEQ ID NO: 1126; WAN024B8C; Start 316; Stop 340
ggacttccactgattcctgttaatc

SEQ ID NO: 284139 - DNA, 25 bp, Artificial
  probe
  misc_feature (1)..(25): SEQ ID NO: 1126; WAN024B8C; Start 18; Stop 42
tttagcatttgagacatcctgtgat

SEQ ID NO: 284140 - DNA, 25 bp, Artificial
  probe
  misc_feature (1)..(25): SEQ ID NO: 1126; WAN024B8C; Start 315; Stop 339
cggacttccactgattcctgttaat

SEQ ID NO: 284141 - DNA, 25 bp, Artificial
  probe
  misc_feature (1)..(25): SEQ ID NO: 1126; WAN024B8C; Start 98; Stop 122
ctagtcaaattgagagtcacaaacg

SEQ ID NO: 284142 - DNA, 25 bp, Artificial
  probe
  misc_feature (1)..(25): SEQ ID NO: 1126; WAN024B8C; Start 93; Stop 117
cattgctagtcaaattgagagtcac

SEQ ID NO: 284143 - DNA, 25 bp, Artificial
  probe
  misc_feature (1)..(25): SEQ ID NO: 1126; WAN024B8C; Start 92; Stop 116
tcattgctagtcaaattgagagtca

SEQ ID NO: 284144 - DNA, 25 bp, Artificial
  probe
  misc_feature (1)..(25): SEQ ID NO: 1126; WAN024B8C; Start 91; Stop 115
gtcattgctagtcaaattgagagtc

SEQ ID NO: 284145 - DNA, 25 bp, Artificial
  probe
  misc_feature (1)..(25): SEQ ID NO: 1126; WAN024B8C; Start 97; Stop 121
gctagtcaaattgagagtcacaaac

SEQ ID NO: 284146 - DNA, 25 bp, Artificial
  probe
  misc_feature (1)..(25): SEQ ID NO: 1126; WAN024B8C; Start 94; Stop 118
attgctagtcaaattgagagtcaca

SEQ ID NO: 284147 - DNA, 25 bp, Artificial
  probe
  misc_feature (1)..(25): SEQ ID NO: 1126; WAN024B8C; Start 90; Stop 114
tgtcattgctagtcaaattgagagt

SEQ ID NO: 284148 - DNA, 25 bp, Artificial
  probe
  misc_feature (1)..(25): SEQ ID NO: 1126; WAN024B8C; Start 96; Stop 120
tgctagtcaaattgagagtcacaaa

SEQ ID NO: 284149 - DNA, 25 bp, Artificial
  probe
  misc_feature (1)..(25): SEQ ID NO: 1126; WAN024B8C; Start 95; Stop 119
ttgctagtcaaattgagagtcacaa

SEQ ID NO: 284150 - DNA, 25 bp, Artificial
  probe
  misc_feature (1)..(25): SEQ ID NO: 1126; WAN024B8C; Start 89; Stop 113
atgtcattgctagtcaaattgagag

SEQ ID NO: 284151 - DNA, 25 bp, Artificial
  probe
  misc_feature (1)..(25): SEQ ID NO: 1126; WAN024B8C; Start 88; Stop 112
aatgtcattgctagtcaaattgaga

SEQ ID NO: 284152 - DNA, 25 bp, Artificial
  probe
  misc_feature (1)..(25): SEQ ID NO: 1126; WAN024B8C; Start 81; Stop 105
cttgtccaatgtcattgctagtcaa

SEQ ID NO: 284153 - DNA, 25 bp, Artificial
  probe
  misc_feature (1)..(25): SEQ ID NO: 1126; WAN024B8C; Start 99; Stop 123
tagtcaaattgagagtcacaaacgt

SEQ ID NO: 284154 - DNA, 25 bp, Artificial
  probe
  misc_feature (1)..(25): SEQ ID NO: 1126; WAN024B8C; Start 79; Stop 103
ctcttgtccaatgtcattgctagtc

SEQ ID NO: 284155 - DNA, 25 bp, Artificial
  probe
  misc_feature (1)..(25): SEQ ID NO: 1126; WAN024B8C; Start 314; Stop 338
acggacttccactgattcctgttaa

SEQ ID NO: 284156 - DNA, 25 bp, Artificial
  probe
  misc_feature (1)..(25): SEQ ID NO: 1126; WAN024B8C; Start 80; Stop 104
tcttgtccaatgtcattgctagtca

SEQ ID NO: 284157 - DNA, 25 bp, Artificial
  probe
  misc_feature (1)..(25): SEQ ID NO: 1126; WAN024B8C; Start 570; Stop 594
tcaggggcaggatatttatgatttc

SEQ ID NO: 284158 - DNA, 25 bp, Artificial
  probe
  misc_feature (1)..(25): SEQ ID NO: 1126; WAN024B8C; Start 16; Stop 40
attttagcatttgagacatcctgtg

SEQ ID NO: 284159 - DNA, 25 bp, Artificial
  probe
  misc_feature (1)..(25): SEQ ID NO: 1126; WAN024B8C; Start 86; Stop 110
ccaatgtcattgctagtcaaattga

SEQ ID NO: 284160 - DNA, 25 bp, Artificial
  probe
  misc_feature (1)..(25): SEQ ID NO: 1126; WAN024B8C; Start 85; Stop 109
tccaatgtcattgctagtcaaattg

SEQ ID NO: 284161 - DNA, 25 bp, Artificial
  probe
  misc_feature (1)..(25): SEQ ID NO: 1126; WAN024B8C; Start 84; Stop 108
gtccaatgtcattgctagtcaaatt

SEQ ID NO: 284162 - DNA, 25 bp, Artificial
  probe
  misc_feature (1)..(25): SEQ ID NO: 1126; WAN024B8C; Start 17; Stop 41
ttttagcatttgagacatcctgtga

SEQ ID NO: 284163 - DNA, 25 bp, Artificial
  probe
  misc_feature (1)..(25): SEQ ID NO: 1126; WAN024B8C; Start 19; Stop 43
ttagcatttgagacatcctgtgatg

SEQ ID NO: 284164 - DNA, 25 bp, Artificial
  probe
  misc_feature (1)..(25): SEQ ID NO: 1126; WAN024B8C; Start 605; Stop 629
tgattaaggaagataatctggagtt

SEQ ID NO: 284165 - DNA, 25 bp, Artificial
  probe
  misc_feature (1)..(25): SEQ ID NO: 1126; WAN024B8C; Start 313; Stop 337
cacggacttccactgattcctgtta

SEQ ID NO: 284166 - DNA, 25 bp, Artificial
  probe
  misc_feature (1)..(25): SEQ ID NO: 1126; WAN024B8C; Start 87; Stop 111
caatgtcattgctagtcaaattgag

SEQ ID NO: 284167 - DNA, 25 bp, Artificial
  probe
  misc_feature (1)..(25): SEQ ID NO: 1126; WAN024B8C; Start 83; Stop 107
tgtccaatgtcattgctagtcaaat

SEQ ID NO: 284168 - DNA, 25 bp, Artificial
  probe
  misc_feature (1)..(25): SEQ ID NO: 1126; WAN024B8C; Start 23; Stop 47
catttgagacatcctgtgatgagac

SEQ ID NO: 284169 - DNA, 25 bp, Artificial
  probe
  misc_feature (1)..(25): SEQ ID NO: 1126; WAN024B8C; Start 818; Stop 842
cagccaataaaggtctcagagaacg

SEQ ID NO: 284170 - DNA, 25 bp, Artificial
  probe
  misc_feature (1)..(25): SEQ ID NO: 1126; WAN024B8C; Start 82; Stop 106
ttgtccaatgtcattgctagtcaaa

SEQ ID NO: 284171 - DNA, 25 bp, Artificial
  probe
  misc_feature (1)..(25): SEQ ID NO: 1127; WAN024CJE; Start 616; Stop 640
cctagtattgtgagatggattggtc

SEQ ID NO: 284172 - DNA, 25 bp, Artificial
  probe
  misc_feature (1)..(25): SEQ ID NO: 1127; WAN024CJE; Start 622; Stop 646
attgtgagatggattggtcagttaa

SEQ ID NO: 284173 - DNA, 25 bp, Artificial
  probe
  misc_feature (1)..(25): SEQ ID NO: 1127; WAN024CJE; Start 618; Stop 642
tagtattgtgagatggattggtcag

SEQ ID NO: 284174 - DNA, 25 bp, Artificial
  probe
  misc_feature (1)..(25): SEQ ID NO: 1127; WAN024CJE; Start 621; Stop 645
tattgtgagatggattggtcagtta

SEQ ID NO: 284175 - DNA, 25 bp, Artificial
  probe
  misc_feature (1)..(25): SEQ ID NO: 1127; WAN024CJE; Start 620; Stop 644
gtattgtgagatggattggtcagtt

SEQ ID NO: 284176 - DNA, 25 bp, Artificial
  probe
  misc_feature (1)..(25): SEQ ID NO: 1127; WAN024CJE; Start 617; Stop 641
ctagtattgtgagatggattggtca

SEQ ID NO: 284177 - DNA, 25 bp, Artificial
  probe
  misc_feature (1)..(25): SEQ ID NO: 1127; WAN024CJE; Start 604; Stop 628
atagattctgctcctagtattgtga

SEQ ID NO: 284178 - DNA, 25 bp, Artificial
  probe
  misc_feature (1)..(25): SEQ ID NO: 1127; WAN024CJE; Start 608; Stop 632
attctgctcctagtattgtgagatg

SEQ ID NO: 284179 - DNA, 25 bp, Artificial
  probe
  misc_feature (1)..(25): SEQ ID NO: 1127; WAN024CJE; Start 607; Stop 631
gattctgctcctagtattgtgagat

SEQ ID NO: 284180 - DNA, 25 bp, Artificial
  probe
  misc_feature (1)..(25): SEQ ID NO: 1127; WAN024CJE; Start 606; Stop 630
agattctgctcctagtattgtgaga

SEQ ID NO: 284181 - DNA, 25 bp, Artificial
  probe
  misc_feature (1)..(25): SEQ ID NO: 1127; WAN024CJE; Start 619; Stop 643
agtattgtgagatggattggtcagt

SEQ ID NO: 284182 - DNA, 25 bp, Artificial
  probe
  misc_feature (1)..(25): SEQ ID NO: 1127; WAN024CJE; Start 605; Stop 629
tagattctgctcctagtattgtgag

SEQ ID NO: 284183 - DNA, 25 bp, Artificial
  probe
  misc_feature (1)..(25): SEQ ID NO: 1127; WAN024CJE; Start 614; Stop 638
ctcctagtattgtgagatggattgg

SEQ ID NO: 284184 - DNA, 25 bp, Artificial
  probe
  misc_feature (1)..(25): SEQ ID NO: 1127; WAN024CJE; Start 609; Stop 633
ttctgctcctagtattgtgagatgg

SEQ ID NO: 284185 - DNA, 25 bp, Artificial
  probe
  misc_feature (1)..(25): SEQ ID NO: 1127; WAN024CJE; Start 615; Stop 639
tcctagtattgtgagatggattggt

SEQ ID NO: 284186 - DNA, 25 bp, Artificial
  probe
  misc_feature (1)..(25): SEQ ID NO: 1127; WAN024CJE; Start 613; Stop 637
gctcctagtattgtgagatggattg

SEQ ID NO: 284187 - DNA, 25 bp, Artificial
  probe
  misc_feature (1)..(25): SEQ ID NO: 1127; WAN024CJE; Start 603; Stop 627
aatagattctgctcctagtattgtg

SEQ ID NO: 284188 - DNA, 25 bp, Artificial
  probe
  misc_feature (1)..(25): SEQ ID NO: 1127; WAN024CJE; Start 612; Stop 636
tgctcctagtattgtgagatggatt

SEQ ID NO: 284189 - DNA, 25 bp, Artificial
  probe
  misc_feature (1)..(25): SEQ ID NO: 1127; WAN024CJE; Start 611; Stop 635
ctgctcctagtattgtgagatggat

SEQ ID NO: 284190 - DNA, 25 bp, Artificial
  probe
  misc_feature (1)..(25): SEQ ID NO: 1127; WAN024CJE; Start 237; Stop 261
tttattgataatcgggcagatgact

SEQ ID NO: 284191 - DNA, 25 bp, Artificial
  probe
  misc_feature (1)..(25): SEQ ID NO: 1127; WAN024CJE; Start 236; Stop 260
ctttattgataatcgggcagatgac

SEQ ID NO: 284192 - DNA, 25 bp, Artificial
  probe
  misc_feature (1)..(25): SEQ ID NO: 1127; WAN024CJE; Start 238; Stop 262
ttattgataatcgggcagatgactc

SEQ ID NO: 284193 - DNA, 25 bp, Artificial
  probe
  misc_feature (1)..(25): SEQ ID NO: 1127; WAN024CJE; Start 249; Stop 273
cgggcagatgactcaagttatttat

SEQ ID NO: 284194 - DNA, 25 bp, Artificial
  probe
  misc_feature (1)..(25): SEQ ID NO: 1127; WAN024CJE; Start 38; Stop 62
gtttaagaggtctagcgattattgc

SEQ ID NO: 284195 - DNA, 25 bp, Artificial
  probe
  misc_feature (1)..(25): SEQ ID NO: 1127; WAN024CJE; Start 419; Stop 443
cgtttgagataaatatcgcaatgga

SEQ ID NO: 284196 - DNA, 25 bp, Artificial
  probe
  misc_feature (1)..(25): SEQ ID NO: 1127; WAN024CJE; Start 37; Stop 61
ggtttaagaggtctagcgattattg

SEQ ID NO: 284197 - DNA, 25 bp, Artificial
  probe
  misc_feature (1)..(25): SEQ ID NO: 1127; WAN024CJE; Start 36; Stop 60
aggtttaagaggtctagcgattatt

SEQ ID NO: 284198 - DNA, 25 bp, Artificial
  probe
  misc_feature (1)..(25): SEQ ID NO: 1127; WAN024CJE; Start 235; Stop 259
gctttattgataatcgggcagatga

SEQ ID NO: 284199 - DNA, 25 bp, Artificial
  probe
  misc_feature (1)..(25): SEQ ID NO: 1127; WAN024CJE; Start 624; Stop 648
tgtgagatggattggtcagttaaat

SEQ ID NO: 284200 - DNA, 25 bp, Artificial
  probe
  misc_feature (1)..(25): SEQ ID NO: 1127; WAN024CJE; Start 623; Stop 647
ttgtgagatggattggtcagttaaa

SEQ ID NO: 284201 - DNA, 25 bp, Artificial
  probe
  misc_feature (1)..(25): SEQ ID NO: 1127; WAN024CJE; Start 11; Stop 35
atcaattaaggcacaaatcggactt

SEQ ID NO: 284202 - DNA, 25 bp, Artificial
  probe
  misc_feature (1)..(25): SEQ ID NO: 1127; WAN024CJE; Start 250; Stop 274
gggcagatgactcaagttatttata

SEQ ID NO: 284203 - DNA, 25 bp, Artificial
  probe
  misc_feature (1)..(25): SEQ ID NO: 1127; WAN024CJE; Start 208; Stop 232
gcagaatatacaatcattggtgtta

SEQ ID NO: 284204 - DNA, 25 bp, Artificial
  probe
  misc_feature (1)..(25): SEQ ID NO: 1128; WAN024CZV; Start 77; Stop 101
atatttcgtatagggtggatcatcg

SEQ ID NO: 284205 - DNA, 25 bp, Artificial
  probe
  misc_feature (1)..(25): SEQ ID NO: 1128; WAN024CZV; Start 79; Stop 103
atttcgtatagggtggatcatcgta

SEQ ID NO: 284206 - DNA, 25 bp, Artificial
  probe
  misc_feature (1)..(25): SEQ ID NO: 1128; WAN024CZV; Start 78; Stop 102
tatttcgtatagggtggatcatcgt

SEQ ID NO: 284207 - DNA, 25 bp, Artificial
  probe
  misc_feature (1)..(25): SEQ ID NO: 1128; WAN024CZV; Start 76; Stop 100
aatatttcgtatagggtggatcatc

SEQ ID NO: 284208 - DNA, 25 bp, Artificial
  probe
  misc_feature (1)..(25): SEQ ID NO: 1128; WAN024CZV; Start 4; Stop 28
aaggggaaagagtatgaaaacagaa

SEQ ID NO: 284209 - DNA, 25 bp, Artificial
  probe
  misc_feature (1)..(25): SEQ ID NO: 1128; WAN024CZV; Start 1; Stop 25
atgaaggggaaagagtatgaaaaca

SEQ ID NO: 284210 - DNA, 25 bp, Artificial
  probe
  misc_feature (1)..(25): SEQ ID NO: 1128; WAN024CZV; Start 3; Stop 27
gaaggggaaagagtatgaaaacaga

SEQ ID NO: 284211 - DNA, 25 bp, Artificial
  probe
  misc_feature (1)..(25): SEQ ID NO: 1128; WAN024CZV; Start 5; Stop 29
aggggaaagagtatgaaaacagaac

SEQ ID NO: 284212 - DNA, 25 bp, Artificial
  probe
  misc_feature (1)..(25): SEQ ID NO: 1128; WAN024CZV; Start 2; Stop 26
tgaaggggaaagagtatgaaaacag

SEQ ID NO: 284213 - DNA, 25 bp, Artificial
  probe
  misc_feature (1)..(25): SEQ ID NO: 1128; WAN024CZV; Start 167; Stop 191
atggtacaggaaagtcaactttact

SEQ ID NO: 284214 - DNA, 25 bp, Artificial
  probe
  misc_feature (1)..(25): SEQ ID NO: 1128; WAN024CZV; Start 7; Stop 31
gggaaagagtatgaaaacagaactg

SEQ ID NO: 284215 - DNA, 25 bp, Artificial
  probe
  misc_feature (1)..(25): SEQ ID NO: 1128; WAN024CZV; Start 6; Stop 30
ggggaaagagtatgaaaacagaact

SEQ ID NO: 284216 - DNA, 25 bp, Artificial
  probe
  misc_feature (1)..(25): SEQ ID NO: 1128; WAN024CZV; Start 168; Stop 192
tggtacaggaaagtcaactttacta

SEQ ID NO: 284217 - DNA, 25 bp, Artificial
  probe
  misc_feature (1)..(25): SEQ ID NO: 1128; WAN024CZV; Start 166; Stop 190
aatggtacaggaaagtcaactttac

SEQ ID NO: 284218 - DNA, 25 bp, Artificial
  probe
  misc_feature (1)..(25): SEQ ID NO: 1128; WAN024CZV; Start 169; Stop 193
ggtacaggaaagtcaactttactac

SEQ ID NO: 284219 - DNA, 25 bp, Artificial
  probe
  misc_feature (1)..(25): SEQ ID NO: 1128; WAN024CZV; Start 165; Stop 189
aaatggtacaggaaagtcaacttta

SEQ ID NO: 284220 - DNA, 25 bp, Artificial
  probe
  misc_feature (1)..(25): SEQ ID NO: 1128; WAN024CZV; Start 170; Stop 194
gtacaggaaagtcaactttactact

SEQ ID NO: 284221 - DNA, 25 bp, Artificial
  probe
  misc_feature (1)..(25): SEQ ID NO: 1128; WAN024CZV; Start 8; Stop 32
ggaaagagtatgaaaacagaactgt

SEQ ID NO: 284222 - DNA, 25 bp, Artificial
  probe
  misc_feature (1)..(25): SEQ ID NO: 1128; WAN024CZV; Start 28; Stop 52
actgtttcttttgctattagttcaa

SEQ ID NO: 284223 - DNA, 25 bp, Artificial
  probe
  misc_feature (1)..(25): SEQ ID NO: 1128; WAN024CZV; Start 38; Stop 62
ttgctattagttcaaaaggagaaaa

SEQ ID NO: 284224 - DNA, 25 bp, Artificial
  probe
  misc_feature (1)..(25): SEQ ID NO: 1128; WAN024CZV; Start 75; Stop 99
aaatatttcgtatagggtggatcat

SEQ ID NO: 284225 - DNA, 25 bp, Artificial
  probe
  misc_feature (1)..(25): SEQ ID NO: 1128; WAN024CZV; Start 171; Stop 195
tacaggaaagtcaactttactacta

SEQ ID NO: 284226 - DNA, 25 bp, Artificial
  probe
  misc_feature (1)..(25): SEQ ID NO: 1128; WAN024CZV; Start 118; Stop 142
atttcttttgatacttcgagttcag

SEQ ID NO: 284227 - DNA, 25 bp, Artificial
  probe
  misc_feature (1)..(25): SEQ ID NO: 1128; WAN024CZV; Start 164; Stop 188
aaaatggtacaggaaagtcaacttt

SEQ ID NO: 284228 - DNA, 25 bp, Artificial
  probe
  misc_feature (1)..(25): SEQ ID NO: 1128; WAN024CZV; Start 24; Stop 48
cagaactgtttcttttgctattagt

SEQ ID NO: 284229 - DNA, 25 bp, Artificial
  probe
  misc_feature (1)..(25): SEQ ID NO: 1128; WAN024CZV; Start 23; Stop 47
acagaactgtttcttttgctattag

SEQ ID NO: 284230 - DNA, 25 bp, Artificial
  probe
  misc_feature (1)..(25): SEQ ID NO: 1128; WAN024CZV; Start 27; Stop 51
aactgtttcttttgctattagttca

SEQ ID NO: 284231 - DNA, 25 bp, Artificial
  probe
  misc_feature (1)..(25): SEQ ID NO: 1128; WAN024CZV; Start 37; Stop 61
tttgctattagttcaaaaggagaaa

SEQ ID NO: 284232 - DNA, 25 bp, Artificial
  probe
  misc_feature (1)..(25): SEQ ID NO: 1128; WAN024CZV; Start 117; Stop 141
tatttcttttgatacttcgagttca

SEQ ID NO: 284233 - DNA, 25 bp, Artificial
  probe
  misc_feature (1)..(25): SEQ ID NO: 1128; WAN024CZV; Start 74; Stop 98
aaaatatttcgtatagggtggatca

SEQ ID NO: 284234 - DNA, 25 bp, Artificial
  probe
  misc_feature (1)..(25): SEQ ID NO: 1128; WAN024CZV; Start 25; Stop 49
agaactgtttcttttgctattagtt

SEQ ID NO: 284235 - DNA, 25 bp, Artificial
  probe
  misc_feature (1)..(25): SEQ ID NO: 1128; WAN024CZV; Start 29; Stop 53
ctgtttcttttgctattagttcaaa

SEQ ID NO: 284236 - DNA, 25 bp, Artificial
  probe
  misc_feature (1)..(25): SEQ ID NO: 1128; WAN024CZV; Start 9; Stop 33
gaaagagtatgaaaacagaactgtt

SEQ ID NO: 284237 - DNA, 25 bp, Artificial
  probe
  misc_feature (1)..(25): SEQ ID NO: 1129; WAN024DEW; Start 33; Stop 57
ggatttaggtggaactttactggat

SEQ ID NO: 284238 - DNA, 25 bp, Artificial
  probe
  misc_feature (1)..(25): SEQ ID NO: 1129; WAN024DEW; Start 28; Stop 52
atctgggatttaggtggaactttac

SEQ ID NO: 284239 - DNA, 25 bp, Artificial
  probe
  misc_feature (1)..(25): SEQ ID NO: 1129; WAN024DEW; Start 27; Stop 51
catctgggatttaggtggaacttta

SEQ ID NO: 284240 - DNA, 25 bp, Artificial
  probe
  misc_feature (1)..(25): SEQ ID NO: 1129; WAN024DEW; Start 22; Stop 46
gattacatctgggatttaggtggaa

SEQ ID NO: 284241 - DNA, 25 bp, Artificial
  probe
  misc_feature (1)..(25): SEQ ID NO: 1129; WAN024DEW; Start 17; Stop 41
atcacgattacatctgggatttagg

SEQ ID NO: 284242 - DNA, 25 bp, Artificial
  probe
  misc_feature (1)..(25): SEQ ID NO: 1129; WAN024DEW; Start 23; Stop 47
attacatctgggatttaggtggaac

SEQ ID NO: 284243 - DNA, 25 bp, Artificial
  probe
  misc_feature (1)..(25): SEQ ID NO: 1129; WAN024DEW; Start 30; Stop 54
ctgggatttaggtggaactttactg

SEQ ID NO: 284244 - DNA, 25 bp, Artificial
  probe
  misc_feature (1)..(25): SEQ ID NO: 1129; WAN024DEW; Start 29; Stop 53
tctgggatttaggtggaactttact

SEQ ID NO: 284245 - DNA, 25 bp, Artificial
  probe
  misc_feature (1)..(25): SEQ ID NO: 1129; WAN024DEW; Start 400; Stop 424
tttaagagaaagccaaatcccgaat

SEQ ID NO: 284246 - DNA, 25 bp, Artificial
  probe
  misc_feature (1)..(25): SEQ ID NO: 1129; WAN024DEW; Start 93; Stop 117
attggcactgtatggtatcacacaa

SEQ ID NO: 284247 - DNA, 25 bp, Artificial
  probe
  misc_feature (1)..(25): SEQ ID NO: 1129; WAN024DEW; Start 90; Stop 114
aacattggcactgtatggtatcaca

SEQ ID NO: 284248 - DNA, 25 bp, Artificial
  probe
  misc_feature (1)..(25): SEQ ID NO: 1129; WAN024DEW; Start 536; Stop 560
ccagtatcgtgaatttaagacaagt

SEQ ID NO: 284249 - DNA, 25 bp, Artificial
  probe
  misc_feature (1)..(25): SEQ ID NO: 1129; WAN024DEW; Start 535; Stop 559
accagtatcgtgaatttaagacaag

SEQ ID NO: 284250 - DNA, 25 bp, Artificial
  probe
  misc_feature (1)..(25): SEQ ID NO: 1129; WAN024DEW; Start 25; Stop 49
tacatctgggatttaggtggaactt

SEQ ID NO: 284251 - DNA, 25 bp, Artificial
  probe
  misc_feature (1)..(25): SEQ ID NO: 1129; WAN024DEW; Start 24; Stop 48
ttacatctgggatttaggtggaact

SEQ ID NO: 284252 - DNA, 25 bp, Artificial
  probe
  misc_feature (1)..(25): SEQ ID NO: 1129; WAN024DEW; Start 515; Stop 539
gacttgatacccacttgtttaccag

SEQ ID NO: 284253 - DNA, 25 bp, Artificial
  probe
  misc_feature (1)..(25): SEQ ID NO: 1129; WAN024DEW; Start 512; Stop 536
caggacttgatacccacttgtttac

SEQ ID NO: 284254 - DNA, 25 bp, Artificial
  probe
  misc_feature (1)..(25): SEQ ID NO: 1129; WAN024DEW; Start 18; Stop 42
tcacgattacatctgggatttaggt

SEQ ID NO: 284255 - DNA, 25 bp, Artificial
  probe
  misc_feature (1)..(25): SEQ ID NO: 1129; WAN024DEW; Start 401; Stop 425
ttaagagaaagccaaatcccgaatc

SEQ ID NO: 284256 - DNA, 25 bp, Artificial
  probe
  misc_feature (1)..(25): SEQ ID NO: 1129; WAN024DEW; Start 517; Stop 541
cttgatacccacttgtttaccagta

SEQ ID NO: 284257 - DNA, 25 bp, Artificial
  probe
  misc_feature (1)..(25): SEQ ID NO: 1129; WAN024DEW; Start 12; Stop 36
gaaatatcacgattacatctgggat

SEQ ID NO: 284258 - DNA, 25 bp, Artificial
  probe
  misc_feature (1)..(25): SEQ ID NO: 1129; WAN024DEW; Start 11; Stop 35
tgaaatatcacgattacatctggga

SEQ ID NO: 284259 - DNA, 25 bp, Artificial
  probe
  misc_feature (1)..(25): SEQ ID NO: 1129; WAN024DEW; Start 527; Stop 551
acttgtttaccagtatcgtgaattt

SEQ ID NO: 284260 - DNA, 25 bp, Artificial
  probe
  misc_feature (1)..(25): SEQ ID NO: 1129; WAN024DEW; Start 26; Stop 50
acatctgggatttaggtggaacttt

SEQ ID NO: 284261 - DNA, 25 bp, Artificial
  probe
  misc_feature (1)..(25): SEQ ID NO: 1129; WAN024DEW; Start 32; Stop 56
gggatttaggtggaactttactgga

SEQ ID NO: 284262 - DNA, 25 bp, Artificial
  probe
  misc_feature (1)..(25): SEQ ID NO: 1129; WAN024DEW; Start 10; Stop 34
atgaaatatcacgattacatctggg

SEQ ID NO: 284263 - DNA, 25 bp, Artificial
  probe
  misc_feature (1)..(25): SEQ ID NO: 1129; WAN024DEW; Start 21; Stop 45
cgattacatctgggatttaggtgga

SEQ ID NO: 284264 - DNA, 25 bp, Artificial
  probe
  misc_feature (1)..(25): SEQ ID NO: 1129; WAN024DEW; Start 14; Stop 38
aatatcacgattacatctgggattt

SEQ ID NO: 284265 - DNA, 25 bp, Artificial
  probe
  misc_feature (1)..(25): SEQ ID NO: 1129; WAN024DEW; Start 13; Stop 37
aaatatcacgattacatctgggatt

SEQ ID NO: 284266 - DNA, 25 bp, Artificial
  probe
  misc_feature (1)..(25): SEQ ID NO: 1129; WAN024DEW; Start 418; Stop 442
cccgaatccatgctttatttaagag

SEQ ID NO: 284267 - DNA, 25 bp, Artificial
  probe
  misc_feature (1)..(25): SEQ ID NO: 1129; WAN024DEW; Start 34; Stop 58
gatttaggtggaactttactggata

SEQ ID NO: 284268 - DNA, 25 bp, Artificial
  probe
  misc_feature (1)..(25): SEQ ID NO: 1129; WAN024DEW; Start 417; Stop 441
tcccgaatccatgctttatttaaga

SEQ ID NO: 284269 - DNA, 25 bp, Artificial
  probe
  misc_feature (1)..(25): SEQ ID NO: 1129; WAN024DEW; Start 415; Stop 439
aatcccgaatccatgctttatttaa

SEQ ID NO: 284270 - DNA, 25 bp, Artificial
  probe
  misc_feature (1)..(25): SEQ ID NO: 1130; WAN024CV2; Start 27; Stop 51
gaaacaaatgggaaataaaggtggt

SEQ ID NO: 284271 - DNA, 25 bp, Artificial
  probe
  misc_feature (1)..(25): SEQ ID NO: 1130; WAN024CV2; Start 26; Stop 50
tgaaacaaatgggaaataaaggtgg

SEQ ID NO: 284272 - DNA, 25 bp, Artificial
  probe
  misc_feature (1)..(25): SEQ ID NO: 1130; WAN024CV2; Start 143; Stop 167
ttgatgggaaagcagtagaagttac

SEQ ID NO: 284273 - DNA, 25 bp, Artificial
  probe
  misc_feature (1)..(25): SEQ ID NO: 1130; WAN024CV2; Start 28; Stop 52
aaacaaatgggaaataaaggtggtt

SEQ ID NO: 284274 - DNA, 25 bp, Artificial
  probe
  misc_feature (1)..(25): SEQ ID NO: 1130; WAN024CV2; Start 31; Stop 55
caaatgggaaataaaggtggttgta

SEQ ID NO: 284275 - DNA, 25 bp, Artificial
  probe
  misc_feature (1)..(25): SEQ ID NO: 1130; WAN024CV2; Start 29; Stop 53
aacaaatgggaaataaaggtggttg

SEQ ID NO: 284276 - DNA, 25 bp, Artificial
  probe
  misc_feature (1)..(25): SEQ ID NO: 1130; WAN024CV2; Start 32; Stop 56
aaatgggaaataaaggtggttgtac

SEQ ID NO: 284277 - DNA, 25 bp, Artificial
  probe
  misc_feature (1)..(25): SEQ ID NO: 1130; WAN024CV2; Start 161; Stop 185
aagttactcttcgagaaccttattc

SEQ ID NO: 284278 - DNA, 25 bp, Artificial
  probe
  misc_feature (1)..(25): SEQ ID NO: 1130; WAN024CV2; Start 25; Stop 49
ttgaaacaaatgggaaataaaggtg

SEQ ID NO: 284279 - DNA, 25 bp, Artificial
  probe
  misc_feature (1)..(25): SEQ ID NO: 1130; WAN024CV2; Start 243; Stop 267
tcgttataaagaaggaaagctgcta

SEQ ID NO: 284280 - DNA, 25 bp, Artificial
  probe
  misc_feature (1)..(25): SEQ ID NO: 1130; WAN024CV2; Start 242; Stop 266
atcgttataaagaaggaaagctgct

SEQ ID NO: 284281 - DNA, 25 bp, Artificial
  probe
  misc_feature (1)..(25): SEQ ID NO: 1130; WAN024CV2; Start 241; Stop 265
tatcgttataaagaaggaaagctgc

SEQ ID NO: 284282 - DNA, 25 bp, Artificial
  probe
  misc_feature (1)..(25): SEQ ID NO: 1130; WAN024CV2; Start 244; Stop 268
cgttataaagaaggaaagctgctat

SEQ ID NO: 284283 - DNA, 25 bp, Artificial
  probe
  misc_feature (1)..(25): SEQ ID NO: 1130; WAN024CV2; Start 162; Stop 186
agttactcttcgagaaccttattcg

SEQ ID NO: 284284 - DNA, 25 bp, Artificial
  probe
  misc_feature (1)..(25): SEQ ID NO: 1130; WAN024CV2; Start 248; Stop 272
ataaagaaggaaagctgctatttgt

SEQ ID NO: 284285 - DNA, 25 bp, Artificial
  probe
  misc_feature (1)..(25): SEQ ID NO: 1130; WAN024CV2; Start 52; Stop 76
tgtaccatccaattgattcatcact

SEQ ID NO: 284286 - DNA, 25 bp, Artificial
  probe
  misc_feature (1)..(25): SEQ ID NO: 1130; WAN024CV2; Start 145; Stop 169
gatgggaaagcagtagaagttactc

SEQ ID NO: 284287 - DNA, 25 bp, Artificial
  probe
  misc_feature (1)..(25): SEQ ID NO: 1130; WAN024CV2; Start 51; Stop 75
ttgtaccatccaattgattcatcac

SEQ ID NO: 284288 - DNA, 25 bp, Artificial
  probe
  misc_feature (1)..(25): SEQ ID NO: 1130; WAN024CV2; Start 50; Stop 74
gttgtaccatccaattgattcatca

SEQ ID NO: 284289 - DNA, 25 bp, Artificial
  probe
  misc_feature (1)..(25): SEQ ID NO: 1130; WAN024CV2; Start 53; Stop 77
gtaccatccaattgattcatcactt

SEQ ID NO: 284290 - DNA, 25 bp, Artificial
  probe
  misc_feature (1)..(25): SEQ ID NO: 1130; WAN024CV2; Start 146; Stop 170
atgggaaagcagtagaagttactct

SEQ ID NO: 284291 - DNA, 25 bp, Artificial
  probe
  misc_feature (1)..(25): SEQ ID NO: 1130; WAN024CV2; Start 147; Stop 171
tgggaaagcagtagaagttactctt

SEQ ID NO: 284292 - DNA, 25 bp, Artificial
  probe
  misc_feature (1)..(25): SEQ ID NO: 1130; WAN024CV2; Start 223; Stop 247
cgtcagaaattgatagcttatcgtt

SEQ ID NO: 284293 - DNA, 25 bp, Artificial
  probe
  misc_feature (1)..(25): SEQ ID NO: 1130; WAN024CV2; Start 144; Stop 168
tgatgggaaagcagtagaagttact

SEQ ID NO: 284294 - DNA, 25 bp, Artificial
  probe
  misc_feature (1)..(25): SEQ ID NO: 1130; WAN024CV2; Start 33; Stop 57
aatgggaaataaaggtggttgtacc

SEQ ID NO: 284295 - DNA, 25 bp, Artificial
  probe
  misc_feature (1)..(25): SEQ ID NO: 1130; WAN024CV2; Start 157; Stop 181
gtagaagttactcttcgagaacctt

SEQ ID NO: 284296 - DNA, 25 bp, Artificial
  probe
  misc_feature (1)..(25): SEQ ID NO: 1130; WAN024CV2; Start 156; Stop 180
agtagaagttactcttcgagaacct

SEQ ID NO: 284297 - DNA, 25 bp, Artificial
  probe
  misc_feature (1)..(25): SEQ ID NO: 1130; WAN024CV2; Start 155; Stop 179
cagtagaagttactcttcgagaacc

SEQ ID NO: 284298 - DNA, 25 bp, Artificial
  probe
  misc_feature (1)..(25): SEQ ID NO: 1130; WAN024CV2; Start 221; Stop 245
aacgtcagaaattgatagcttatcg

SEQ ID NO: 284299 - DNA, 25 bp, Artificial
  probe
  misc_feature (1)..(25): SEQ ID NO: 1130; WAN024CV2; Start 159; Stop 183
agaagttactcttcgagaaccttat

SEQ ID NO: 284300 - DNA, 25 bp, Artificial
  probe
  misc_feature (1)..(25): SEQ ID NO: 1130; WAN024CV2; Start 154; Stop 178
gcagtagaagttactcttcgagaac

SEQ ID NO: 284301 - DNA, 25 bp, Artificial
  probe
  misc_feature (1)..(25): SEQ ID NO: 1130; WAN024CV2; Start 153; Stop 177
agcagtagaagttactcttcgagaa

SEQ ID NO: 284302 - DNA, 25 bp, Artificial
  probe
  misc_feature (1)..(25): SEQ ID NO: 1130; WAN024CV2; Start 152; Stop 176
aagcagtagaagttactcttcgaga

SEQ ID NO: 284303 - DNA, 25 bp, Artificial
  probe
  misc_feature (1)..(25): SEQ ID NO: 1131; WAN024FYI; Start 171; Stop 195
tattgctaactatggaacgaaggag

SEQ ID NO: 284304 - DNA, 25 bp, Artificial
  probe
  misc_feature (1)..(25): SEQ ID NO: 1131; WAN024FYI; Start 175; Stop 199
gctaactatggaacgaaggagatat

SEQ ID NO: 284305 - DNA, 25 bp, Artificial
  probe
  misc_feature (1)..(25): SEQ ID NO: 1131; WAN024FYI; Start 170; Stop 194
gtattgctaactatggaacgaagga

SEQ ID NO: 284306 - DNA, 25 bp, Artificial
  probe
  misc_feature (1)..(25): SEQ ID NO: 1131; WAN024FYI; Start 609; Stop 633
gccagttatcttgctattcttacca

SEQ ID NO: 284307 - DNA, 25 bp, Artificial
  probe
  misc_feature (1)..(25): SEQ ID NO: 1131; WAN024FYI; Start 610; Stop 634
ccagttatcttgctattcttaccac

SEQ ID NO: 284308 - DNA, 25 bp, Artificial
  probe
  misc_feature (1)..(25): SEQ ID NO: 1131; WAN024FYI; Start 174; Stop 198
tgctaactatggaacgaaggagata

SEQ ID NO: 284309 - DNA, 25 bp, Artificial
  probe
  misc_feature (1)..(25): SEQ ID NO: 1131; WAN024FYI; Start 55; Stop 79
attcttcctatcattacgactcctt

SEQ ID NO: 284310 - DNA, 25 bp, Artificial
  probe
  misc_feature (1)..(25): SEQ ID NO: 1131; WAN024FYI; Start 60; Stop 84
tcctatcattacgactccttatgtg

SEQ ID NO: 284311 - DNA, 25 bp, Artificial
  probe
  misc_feature (1)..(25): SEQ ID NO: 1131; WAN024FYI; Start 169; Stop 193
ggtattgctaactatggaacgaagg

SEQ ID NO: 284312 - DNA, 25 bp, Artificial
  probe
  misc_feature (1)..(25): SEQ ID NO: 1131; WAN024FYI; Start 611; Stop 635
cagttatcttgctattcttaccaca

SEQ ID NO: 284313 - DNA, 25 bp, Artificial
  probe
  misc_feature (1)..(25): SEQ ID NO: 1131; WAN024FYI; Start 173; Stop 197
ttgctaactatggaacgaaggagat

SEQ ID NO: 284314 - DNA, 25 bp, Artificial
  probe
  misc_feature (1)..(25): SEQ ID NO: 1131; WAN024FYI; Start 172; Stop 196
attgctaactatggaacgaaggaga

SEQ ID NO: 284315 - DNA, 25 bp, Artificial
  probe
  misc_feature (1)..(25): SEQ ID NO: 1131; WAN024FYI; Start 63; Stop 87
tatcattacgactccttatgtgacg

SEQ ID NO: 284316 - DNA, 25 bp, Artificial
  probe
  misc_feature (1)..(25): SEQ ID NO: 1131; WAN024FYI; Start 56; Stop 80
ttcttcctatcattacgactcctta

SEQ ID NO: 284317 - DNA, 25 bp, Artificial
  probe
  misc_feature (1)..(25): SEQ ID NO: 1131; WAN024FYI; Start 59; Stop 83
ttcctatcattacgactccttatgt

SEQ ID NO: 284318 - DNA, 25 bp, Artificial
  probe
  misc_feature (1)..(25): SEQ ID NO: 1131; WAN024FYI; Start 61; Stop 85
cctatcattacgactccttatgtga

SEQ ID NO: 284319 - DNA, 25 bp, Artificial
  probe
  misc_feature (1)..(25): SEQ ID NO: 1131; WAN024FYI; Start 57; Stop 81
tcttcctatcattacgactccttat

SEQ ID NO: 284320 - DNA, 25 bp, Artificial
  probe
  misc_feature (1)..(25): SEQ ID NO: 1131; WAN024FYI; Start 54; Stop 78
tattcttcctatcattacgactcct

SEQ ID NO: 284321 - DNA, 25 bp, Artificial
  probe
  misc_feature (1)..(25): SEQ ID NO: 1131; WAN024FYI; Start 58; Stop 82
cttcctatcattacgactccttatg

SEQ ID NO: 284322 - DNA, 25 bp, Artificial
  probe
  misc_feature (1)..(25): SEQ ID NO: 1131; WAN024FYI; Start 961; Stop 985
tccattatgatcttccgtatgttct

SEQ ID NO: 284323 - DNA, 25 bp, Artificial
  probe
  misc_feature (1)..(25): SEQ ID NO: 1131; WAN024FYI; Start 62; Stop 86
ctatcattacgactccttatgtgac

SEQ ID NO: 284324 - DNA, 25 bp, Artificial
  probe
  misc_feature (1)..(25): SEQ ID NO: 1131; WAN024FYI; Start 473; Stop 497
cagcgagtgatctatacttgtatgt

SEQ ID NO: 284325 - DNA, 25 bp, Artificial
  probe
  misc_feature (1)..(25): SEQ ID NO: 1131; WAN024FYI; Start 472; Stop 496
tcagcgagtgatctatacttgtatg

SEQ ID NO: 284326 - DNA, 25 bp, Artificial
  probe
  misc_feature (1)..(25): SEQ ID NO: 1131; WAN024FYI; Start 474; Stop 498
agcgagtgatctatacttgtatgtt

SEQ ID NO: 284327 - DNA, 25 bp, Artificial
  probe
  misc_feature (1)..(25): SEQ ID NO: 1131; WAN024FYI; Start 960; Stop 984
ttccattatgatcttccgtatgttc

SEQ ID NO: 284328 - DNA, 25 bp, Artificial
  probe
  misc_feature (1)..(25): SEQ ID NO: 1131; WAN024FYI; Start 53; Stop 77
ttattcttcctatcattacgactcc

SEQ ID NO: 284329 - DNA, 25 bp, Artificial
  probe
  misc_feature (1)..(25): SEQ ID NO: 1131; WAN024FYI; Start 612; Stop 636
agttatcttgctattcttaccacaa

SEQ ID NO: 284330 - DNA, 25 bp, Artificial
  probe
  misc_feature (1)..(25): SEQ ID NO: 1131; WAN024FYI; Start 886; Stop 910
gggatgttgattgtgaatgatgatt

SEQ ID NO: 284331 - DNA, 25 bp, Artificial
  probe
  misc_feature (1)..(25): SEQ ID NO: 1131; WAN024FYI; Start 639; Stop 663
tgctatctcgctttatgtgacttta

SEQ ID NO: 284332 - DNA, 25 bp, Artificial
  probe
  misc_feature (1)..(25): SEQ ID NO: 1131; WAN024FYI; Start 106; Stop 130
gatttagggacatacggttacttca

SEQ ID NO: 284333 - DNA, 25 bp, Artificial
  probe
  misc_feature (1)..(25): SEQ ID NO: 1131; WAN024FYI; Start 105; Stop 129
tgatttagggacatacggttacttc

SEQ ID NO: 284334 - DNA, 25 bp, Artificial
  probe
  misc_feature (1)..(25): SEQ ID NO: 1131; WAN024FYI; Start 640; Stop 664
gctatctcgctttatgtgactttag

SEQ ID NO: 284335 - DNA, 25 bp, Artificial
  probe
  misc_feature (1)..(25): SEQ ID NO: 1131; WAN024FYI; Start 161; Stop 185
ctactctgggtattgctaactatgg

SEQ ID NO: 284336 - DNA, 25 bp, Artificial
  probe
  misc_feature (1)..(25): SEQ ID NO: 1132; WAN024D6R; Start 232; Stop 256
tactatgatgaaacaccctacacac

SEQ ID NO: 284337 - DNA, 25 bp, Artificial
  probe
  misc_feature (1)..(25): SEQ ID NO: 1132; WAN024D6R; Start 231; Stop 255
ctactatgatgaaacaccctacaca

SEQ ID NO: 284338 - DNA, 25 bp, Artificial
  probe
  misc_feature (1)..(25): SEQ ID NO: 1132; WAN024D6R; Start 230; Stop 254
gctactatgatgaaacaccctacac

SEQ ID NO: 284339 - DNA, 25 bp, Artificial
  probe
  misc_feature (1)..(25): SEQ ID NO: 1132; WAN024D6R; Start 234; Stop 258
ctatgatgaaacaccctacacactg

SEQ ID NO: 284340 - DNA, 25 bp, Artificial
  probe
  misc_feature (1)..(25): SEQ ID NO: 1132; WAN024D6R; Start 308; Stop 332
gtttggatatagacattctgacgga

SEQ ID NO: 284341 - DNA, 25 bp, Artificial
  probe
  misc_feature (1)..(25): SEQ ID NO: 1132; WAN024D6R; Start 310; Stop 334
ttggatatagacattctgacggaaa

SEQ ID NO: 284342 - DNA, 25 bp, Artificial
  probe
  misc_feature (1)..(25): SEQ ID NO: 1132; WAN024D6R; Start 309; Stop 333
tttggatatagacattctgacggaa

SEQ ID NO: 284343 - DNA, 25 bp, Artificial
  probe
  misc_feature (1)..(25): SEQ ID NO: 1132; WAN024D6R; Start 311; Stop 335
tggatatagacattctgacggaaat

SEQ ID NO: 284344 - DNA, 25 bp, Artificial
  probe
  misc_feature (1)..(25): SEQ ID NO: 1132; WAN024D6R; Start 233; Stop 257
actatgatgaaacaccctacacact

SEQ ID NO: 284345 - DNA, 25 bp, Artificial
  probe
  misc_feature (1)..(25): SEQ ID NO: 1132; WAN024D6R; Start 223; Stop 247
caaggacgctactatgatgaaacac

SEQ ID NO: 284346 - DNA, 25 bp, Artificial
  probe
  misc_feature (1)..(25): SEQ ID NO: 1132; WAN024D6R; Start 280; Stop 304
atctggtggctattagaactttctc

SEQ ID NO: 284347 - DNA, 25 bp, Artificial
  probe
  misc_feature (1)..(25): SEQ ID NO: 1132; WAN024D6R; Start 282; Stop 306
ctggtggctattagaactttctcaa

SEQ ID NO: 284348 - DNA, 25 bp, Artificial
  probe
  misc_feature (1)..(25): SEQ ID NO: 1132; WAN024D6R; Start 283; Stop 307
tggtggctattagaactttctcaac

SEQ ID NO: 284349 - DNA, 25 bp, Artificial
  probe
  misc_feature (1)..(25): SEQ ID NO: 1132; WAN024D6R; Start 227; Stop 251
gacgctactatgatgaaacacccta

SEQ ID NO: 284350 - DNA, 25 bp, Artificial
  probe
  misc_feature (1)..(25): SEQ ID NO: 1132; WAN024D6R; Start 279; Stop 303
tatctggtggctattagaactttct

SEQ ID NO: 284351 - DNA, 25 bp, Artificial
  probe
  misc_feature (1)..(25): SEQ ID NO: 1132; WAN024D6R; Start 281; Stop 305
tctggtggctattagaactttctca

SEQ ID NO: 284352 - DNA, 25 bp, Artificial
  probe
  misc_feature (1)..(25): SEQ ID NO: 1132; WAN024D6R; Start 229; Stop 253
cgctactatgatgaaacaccctaca

SEQ ID NO: 284353 - DNA, 25 bp, Artificial
  probe
  misc_feature (1)..(25): SEQ ID NO: 1132; WAN024D6R; Start 228; Stop 252
acgctactatgatgaaacaccctac

SEQ ID NO: 284354 - DNA, 25 bp, Artificial
  probe
  misc_feature (1)..(25): SEQ ID NO: 1132; WAN024D6R; Start 278; Stop 302
atatctggtggctattagaactttc

SEQ ID NO: 284355 - DNA, 25 bp, Artificial
  probe
  misc_feature (1)..(25): SEQ ID NO: 1132; WAN024D6R; Start 235; Stop 259
tatgatgaaacaccctacacactgg

SEQ ID NO: 284356 - DNA, 25 bp, Artificial
  probe
  misc_feature (1)..(25): SEQ ID NO: 1132; WAN024D6R; Start 114; Stop 138
ttatcacgaactggaagttaagcat

SEQ ID NO: 284357 - DNA, 25 bp, Artificial
  probe
  misc_feature (1)..(25): SEQ ID NO: 1132; WAN024D6R; Start 115; Stop 139
tatcacgaactggaagttaagcatc

SEQ ID NO: 284358 - DNA, 25 bp, Artificial
  probe
  misc_feature (1)..(25): SEQ ID NO: 1132; WAN024D6R; Start 284; Stop 308
ggtggctattagaactttctcaacg

SEQ ID NO: 284359 - DNA, 25 bp, Artificial
  probe
  misc_feature (1)..(25): SEQ ID NO: 1132; WAN024D6R; Start 113; Stop 137
cttatcacgaactggaagttaagca

SEQ ID NO: 284360 - DNA, 25 bp, Artificial
  probe
  misc_feature (1)..(25): SEQ ID NO: 1132; WAN024D6R; Start 277; Stop 301
aatatctggtggctattagaacttt

SEQ ID NO: 284361 - DNA, 25 bp, Artificial
  probe
  misc_feature (1)..(25): SEQ ID NO: 1132; WAN024D6R; Start 276; Stop 300
aaatatctggtggctattagaactt

SEQ ID NO: 284362 - DNA, 25 bp, Artificial
  probe
  misc_feature (1)..(25): SEQ ID NO: 1132; WAN024D6R; Start 224; Stop 248
aaggacgctactatgatgaaacacc

SEQ ID NO: 284363 - DNA, 25 bp, Artificial
  probe
  misc_feature (1)..(25): SEQ ID NO: 1132; WAN024D6R; Start 111; Stop 135
agcttatcacgaactggaagttaag

SEQ ID NO: 284364 - DNA, 25 bp, Artificial
  probe
  misc_feature (1)..(25): SEQ ID NO: 1132; WAN024D6R; Start 316; Stop 340
atagacattctgacggaaatggaaa

SEQ ID NO: 284365 - DNA, 25 bp, Artificial
  probe
  misc_feature (1)..(25): SEQ ID NO: 1132; WAN024D6R; Start 315; Stop 339
tatagacattctgacggaaatggaa

SEQ ID NO: 284366 - DNA, 25 bp, Artificial
  probe
  misc_feature (1)..(25): SEQ ID NO: 1132; WAN024D6R; Start 314; Stop 338
atatagacattctgacggaaatgga

SEQ ID NO: 284367 - DNA, 25 bp, Artificial
  probe
  misc_feature (1)..(25): SEQ ID NO: 1132; WAN024D6R; Start 313; Stop 337
gatatagacattctgacggaaatgg

SEQ ID NO: 284368 - DNA, 25 bp, Artificial
  probe
  misc_feature (1)..(25): SEQ ID NO: 1132; WAN024D6R; Start 312; Stop 336
ggatatagacattctgacggaaatg

SEQ ID NO: 284369 - DNA, 25 bp, Artificial
  probe
  misc_feature (1)..(25): SEQ ID NO: 1133; WAN024FP8; Start 229; Stop 253
cagtatgtaacaggtgatgcgatta

SEQ ID NO: 284370 - DNA, 25 bp, Artificial
  probe
  misc_feature (1)..(25): SEQ ID NO: 1133; WAN024FP8; Start 264; Stop 288
ttccgatgattggcttgaattagac

SEQ ID NO: 284371 - DNA, 25 bp, Artificial
  probe
  misc_feature (1)..(25): SEQ ID NO: 1133; WAN024FP8; Start 399; Stop 423
ggtaacagaggaagttctaactcag

SEQ ID NO: 284372 - DNA, 25 bp, Artificial
  probe
  misc_feature (1)..(25): SEQ ID NO: 1133; WAN024FP8; Start 400; Stop 424
gtaacagaggaagttctaactcaga

SEQ ID NO: 284373 - DNA, 25 bp, Artificial
  probe
  misc_feature (1)..(25): SEQ ID NO: 1133; WAN024FP8; Start 232; Stop 256
tatgtaacaggtgatgcgattactt

SEQ ID NO: 284374 - DNA, 25 bp, Artificial
  probe
  misc_feature (1)..(25): SEQ ID NO: 1133; WAN024FP8; Start 691; Stop 715
ttagtaactgaagaagctgaggatt

SEQ ID NO: 284375 - DNA, 25 bp, Artificial
  probe
  misc_feature (1)..(25): SEQ ID NO: 1133; WAN024FP8; Start 231; Stop 255
gtatgtaacaggtgatgcgattact

SEQ ID NO: 284376 - DNA, 25 bp, Artificial
  probe
  misc_feature (1)..(25): SEQ ID NO: 1133; WAN024FP8; Start 230; Stop 254
agtatgtaacaggtgatgcgattac

SEQ ID NO: 284377 - DNA, 25 bp, Artificial
  probe
  misc_feature (1)..(25): SEQ ID NO: 1133; WAN024FP8; Start 268; Stop 292
gatgattggcttgaattagacgcaa

SEQ ID NO: 284378 - DNA, 25 bp, Artificial
  probe
  misc_feature (1)..(25): SEQ ID NO: 1133; WAN024FP8; Start 262; Stop 286
gattccgatgattggcttgaattag

SEQ ID NO: 284379 - DNA, 25 bp, Artificial
  probe
  misc_feature (1)..(25): SEQ ID NO: 1133; WAN024FP8; Start 263; Stop 287
attccgatgattggcttgaattaga

SEQ ID NO: 284380 - DNA, 25 bp, Artificial
  probe
  misc_feature (1)..(25): SEQ ID NO: 1133; WAN024FP8; Start 261; Stop 285
agattccgatgattggcttgaatta

SEQ ID NO: 284381 - DNA, 25 bp, Artificial
  probe
  misc_feature (1)..(25): SEQ ID NO: 1133; WAN024FP8; Start 260; Stop 284
tagattccgatgattggcttgaatt

SEQ ID NO: 284382 - DNA, 25 bp, Artificial
  probe
  misc_feature (1)..(25): SEQ ID NO: 1133; WAN024FP8; Start 398; Stop 422
cggtaacagaggaagttctaactca

SEQ ID NO: 284383 - DNA, 25 bp, Artificial
  probe
  misc_feature (1)..(25): SEQ ID NO: 1133; WAN024FP8; Start 508; Stop 532
gcttgtgaggttaaatatccagttg

SEQ ID NO: 284384 - DNA, 25 bp, Artificial
  probe
  misc_feature (1)..(25): SEQ ID NO: 1133; WAN024FP8; Start 259; Stop 283
gtagattccgatgattggcttgaat

SEQ ID NO: 284385 - DNA, 25 bp, Artificial
  probe
  misc_feature (1)..(25): SEQ ID NO: 1133; WAN024FP8; Start 507; Stop 531
tgcttgtgaggttaaatatccagtt

SEQ ID NO: 284386 - DNA, 25 bp, Artificial
  probe
  misc_feature (1)..(25): SEQ ID NO: 1133; WAN024FP8; Start 506; Stop 530
ttgcttgtgaggttaaatatccagt

SEQ ID NO: 284387 - DNA, 25 bp, Artificial
  probe
  misc_feature (1)..(25): SEQ ID NO: 1133; WAN024FP8; Start 779; Stop 803
tgtgtaggatagcactatcagaaga

SEQ ID NO: 284388 - DNA, 25 bp, Artificial
  probe
  misc_feature (1)..(25): SEQ ID NO: 1133; WAN024FP8; Start 778; Stop 802
ttgtgtaggatagcactatcagaag

SEQ ID NO: 284389 - DNA, 25 bp, Artificial
  probe
  misc_feature (1)..(25): SEQ ID NO: 1133; WAN024FP8; Start 505; Stop 529
attgcttgtgaggttaaatatccag

SEQ ID NO: 284390 - DNA, 25 bp, Artificial
  probe
  misc_feature (1)..(25): SEQ ID NO: 1133; WAN024FP8; Start 683; Stop 707
tttgggatttagtaactgaagaagc

SEQ ID NO: 284391 - DNA, 25 bp, Artificial
  probe
  misc_feature (1)..(25): SEQ ID NO: 1133; WAN024FP8; Start 780; Stop 804
gtgtaggatagcactatcagaagat

SEQ ID NO: 284392 - DNA, 25 bp, Artificial
  probe
  misc_feature (1)..(25): SEQ ID NO: 1133; WAN024FP8; Start 528; Stop 552
agttggtttatttgctgaagatgta

SEQ ID NO: 284393 - DNA, 25 bp, Artificial
  probe
  misc_feature (1)..(25): SEQ ID NO: 1133; WAN024FP8; Start 511; Stop 535
tgtgaggttaaatatccagttggtt

SEQ ID NO: 284394 - DNA, 25 bp, Artificial
  probe
  misc_feature (1)..(25): SEQ ID NO: 1133; WAN024FP8; Start 510; Stop 534
ttgtgaggttaaatatccagttggt

SEQ ID NO: 284395 - DNA, 25 bp, Artificial
  probe
  misc_feature (1)..(25): SEQ ID NO: 1133; WAN024FP8; Start 509; Stop 533
cttgtgaggttaaatatccagttgg

SEQ ID NO: 284396 - DNA, 25 bp, Artificial
  probe
  misc_feature (1)..(25): SEQ ID NO: 1133; WAN024FP8; Start 374; Stop 398
ctagtgaagaaattaagaagtcgcc

SEQ ID NO: 284397 - DNA, 25 bp, Artificial
  probe
  misc_feature (1)..(25): SEQ ID NO: 1133; WAN024FP8; Start 373; Stop 397
cctagtgaagaaattaagaagtcgc

SEQ ID NO: 284398 - DNA, 25 bp, Artificial
  probe
  misc_feature (1)..(25): SEQ ID NO: 1133; WAN024FP8; Start 504; Stop 528
aattgcttgtgaggttaaatatcca

SEQ ID NO: 284399 - DNA, 25 bp, Artificial
  probe
  misc_feature (1)..(25): SEQ ID NO: 1133; WAN024FP8; Start 497; Stop 521
agaaagaaattgcttgtgaggttaa

SEQ ID NO: 284400 - DNA, 25 bp, Artificial
  probe
  misc_feature (1)..(25): SEQ ID NO: 1133; WAN024FP8; Start 496; Stop 520
aagaaagaaattgcttgtgaggtta

SEQ ID NO: 284401 - DNA, 25 bp, Artificial
  probe
  misc_feature (1)..(25): SEQ ID NO: 1133; WAN024FP8; Start 495; Stop 519
taagaaagaaattgcttgtgaggtt

SEQ ID NO: 284402 - DNA, 25 bp, Artificial
  probe
  misc_feature (1)..(25): SEQ ID NO: 1134; WAN024FPK; Start 76; Stop 100
ttgacagaagaaggatatgaggtta

SEQ ID NO: 284403 - DNA, 25 bp, Artificial
  probe
  misc_feature (1)..(25): SEQ ID NO: 1134; WAN024FPK; Start 77; Stop 101
tgacagaagaaggatatgaggttaa

SEQ ID NO: 284404 - DNA, 25 bp, Artificial
  probe
  misc_feature (1)..(25): SEQ ID NO: 1134; WAN024FPK; Start 539; Stop 563
ttcctaatctcactattgttactcc

SEQ ID NO: 284405 - DNA, 25 bp, Artificial
  probe
  misc_feature (1)..(25): SEQ ID NO: 1134; WAN024FPK; Start 1034; Stop 1058
tttatggtctcgtttgtcaggatag

SEQ ID NO: 284406 - DNA, 25 bp, Artificial
  probe
  misc_feature (1)..(25): SEQ ID NO: 1134; WAN024FPK; Start 1033; Stop 1057
ctttatggtctcgtttgtcaggata

SEQ ID NO: 284407 - DNA, 25 bp, Artificial
  probe
  misc_feature (1)..(25): SEQ ID NO: 1134; WAN024FPK; Start 75; Stop 99
tttgacagaagaaggatatgaggtt

SEQ ID NO: 284408 - DNA, 25 bp, Artificial
  probe
  misc_feature (1)..(25): SEQ ID NO: 1134; WAN024FPK; Start 74; Stop 98
ctttgacagaagaaggatatgaggt

SEQ ID NO: 284409 - DNA, 25 bp, Artificial
  probe
  misc_feature (1)..(25): SEQ ID NO: 1134; WAN024FPK; Start 201; Stop 225
attatttgacgaatctggctttgga

SEQ ID NO: 284410 - DNA, 25 bp, Artificial
  probe
  misc_feature (1)..(25): SEQ ID NO: 1134; WAN024FPK; Start 72; Stop 96
tgctttgacagaagaaggatatgag

SEQ ID NO: 284411 - DNA, 25 bp, Artificial
  probe
  misc_feature (1)..(25): SEQ ID NO: 1134; WAN024FPK; Start 645; Stop 669
tactgtctttcaaccgaggctaata

SEQ ID NO: 284412 - DNA, 25 bp, Artificial
  probe
  misc_feature (1)..(25): SEQ ID NO: 1134; WAN024FPK; Start 202; Stop 226
ttatttgacgaatctggctttggaa

SEQ ID NO: 284413 - DNA, 25 bp, Artificial
  probe
  misc_feature (1)..(25): SEQ ID NO: 1134; WAN024FPK; Start 1009; Stop 1033
ggtggtagtgtagaaagtgctaaac

SEQ ID NO: 284414 - DNA, 25 bp, Artificial
  probe
  misc_feature (1)..(25): SEQ ID NO: 1134; WAN024FPK; Start 1008; Stop 1032
aggtggtagtgtagaaagtgctaaa

SEQ ID NO: 284415 - DNA, 25 bp, Artificial
  probe
  misc_feature (1)..(25): SEQ ID NO: 1134; WAN024FPK; Start 32; Stop 56
gtattaggagcactgggagaatttg

SEQ ID NO: 284416 - DNA, 25 bp, Artificial
  probe
  misc_feature (1)..(25): SEQ ID NO: 1134; WAN024FPK; Start 1036; Stop 1060
tatggtctcgtttgtcaggatagaa

SEQ ID NO: 284417 - DNA, 25 bp, Artificial
  probe
  misc_feature (1)..(25): SEQ ID NO: 1134; WAN024FPK; Start 1035; Stop 1059
ttatggtctcgtttgtcaggataga

SEQ ID NO: 284418 - DNA, 25 bp, Artificial
  probe
  misc_feature (1)..(25): SEQ ID NO: 1134; WAN024FPK; Start 73; Stop 97
gctttgacagaagaaggatatgagg

SEQ ID NO: 284419 - DNA, 25 bp, Artificial
  probe
  misc_feature (1)..(25): SEQ ID NO: 1134; WAN024FPK; Start 1010; Stop 1034
gtggtagtgtagaaagtgctaaact

SEQ ID NO: 284420 - DNA, 25 bp, Artificial
  probe
  misc_feature (1)..(25): SEQ ID NO: 1134; WAN024FPK; Start 33; Stop 57
tattaggagcactgggagaatttgt

SEQ ID NO: 284421 - DNA, 25 bp, Artificial
  probe
  misc_feature (1)..(25): SEQ ID NO: 1134; WAN024FPK; Start 203; Stop 227
tatttgacgaatctggctttggaag

SEQ ID NO: 284422 - DNA, 25 bp, Artificial
  probe
  misc_feature (1)..(25): SEQ ID NO: 1134; WAN024FPK; Start 999; Stop 1023
ctatccgacaggtggtagtgtagaa

SEQ ID NO: 284423 - DNA, 25 bp, Artificial
  probe
  misc_feature (1)..(25): SEQ ID NO: 1134; WAN024FPK; Start 1032; Stop 1056
actttatggtctcgtttgtcaggat

SEQ ID NO: 284424 - DNA, 25 bp, Artificial
  probe
  misc_feature (1)..(25): SEQ ID NO: 1134; WAN024FPK; Start 1007; Stop 1031
caggtggtagtgtagaaagtgctaa

SEQ ID NO: 284425 - DNA, 25 bp, Artificial
  probe
  misc_feature (1)..(25): SEQ ID NO: 1134; WAN024FPK; Start 1037; Stop 1061
atggtctcgtttgtcaggatagaaa

SEQ ID NO: 284426 - DNA, 25 bp, Artificial
  probe
  misc_feature (1)..(25): SEQ ID NO: 1134; WAN024FPK; Start 69; Stop 93
aactgctttgacagaagaaggatat

SEQ ID NO: 284427 - DNA, 25 bp, Artificial
  probe
  misc_feature (1)..(25): SEQ ID NO: 1134; WAN024FPK; Start 78; Stop 102
gacagaagaaggatatgaggttaaa

SEQ ID NO: 284428 - DNA, 25 bp, Artificial
  probe
  misc_feature (1)..(25): SEQ ID NO: 1134; WAN024FPK; Start 71; Stop 95
ctgctttgacagaagaaggatatga

SEQ ID NO: 284429 - DNA, 25 bp, Artificial
  probe
  misc_feature (1)..(25): SEQ ID NO: 1134; WAN024FPK; Start 31; Stop 55
ggtattaggagcactgggagaattt

SEQ ID NO: 284430 - DNA, 25 bp, Artificial
  probe
  misc_feature (1)..(25): SEQ ID NO: 1134; WAN024FPK; Start 70; Stop 94
actgctttgacagaagaaggatatg

SEQ ID NO: 284431 - DNA, 25 bp, Artificial
  probe
  misc_feature (1)..(25): SEQ ID NO: 1134; WAN024FPK; Start 68; Stop 92
caactgctttgacagaagaaggata

SEQ ID NO: 284432 - DNA, 25 bp, Artificial
  probe
  misc_feature (1)..(25): SEQ ID NO: 1134; WAN024FPK; Start 646; Stop 670
actgtctttcaaccgaggctaatag

SEQ ID NO: 284433 - DNA, 25 bp, Artificial
  probe
  misc_feature (1)..(25): SEQ ID NO: 1134; WAN024FPK; Start 644; Stop 668
ctactgtctttcaaccgaggctaat

SEQ ID NO: 284434 - DNA, 25 bp, Artificial
  probe
  misc_feature (1)..(25): SEQ ID NO: 1134; WAN024FPK; Start 639; Stop 663
tgatactactgtctttcaaccgagg

SEQ ID NO: 284435 - DNA, 25 bp, Artificial
  probe
  misc_feature (1)..(25): SEQ ID NO: 1135; WAN024FL4; Start 667; Stop 691
attggatatgaacagacagatgaca

SEQ ID NO: 284436 - DNA, 25 bp, Artificial
  probe
  misc_feature (1)..(25): SEQ ID NO: 1135; WAN024FL4; Start 932; Stop 956
tatccaatctgagtgaactacctga

SEQ ID NO: 284437 - DNA, 25 bp, Artificial
  probe
  misc_feature (1)..(25): SEQ ID NO: 1135; WAN024FL4; Start 931; Stop 955
gtatccaatctgagtgaactacctg

SEQ ID NO: 284438 - DNA, 25 bp, Artificial
  probe
  misc_feature (1)..(25): SEQ ID NO: 1135; WAN024FL4; Start 663; Stop 687
tggaattggatatgaacagacagat

SEQ ID NO: 284439 - DNA, 25 bp, Artificial
  probe
  misc_feature (1)..(25): SEQ ID NO: 1135; WAN024FL4; Start 662; Stop 686
atggaattggatatgaacagacaga

SEQ ID NO: 284440 - DNA, 25 bp, Artificial
  probe
  misc_feature (1)..(25): SEQ ID NO: 1135; WAN024FL4; Start 664; Stop 688
ggaattggatatgaacagacagatg

SEQ ID NO: 284441 - DNA, 25 bp, Artificial
  probe
  misc_feature (1)..(25): SEQ ID NO: 1135; WAN024FL4; Start 930; Stop 954
tgtatccaatctgagtgaactacct

SEQ ID NO: 284442 - DNA, 25 bp, Artificial
  probe
  misc_feature (1)..(25): SEQ ID NO: 1135; WAN024FL4; Start 774; Stop 798
tccgtcatcagagtcttgtatagaa

SEQ ID NO: 284443 - DNA, 25 bp, Artificial
  probe
  misc_feature (1)..(25): SEQ ID NO: 1135; WAN024FL4; Start 668; Stop 692
ttggatatgaacagacagatgacaa

SEQ ID NO: 284444 - DNA, 25 bp, Artificial
  probe
  misc_feature (1)..(25): SEQ ID NO: 1135; WAN024FL4; Start 929; Stop 953
ttgtatccaatctgagtgaactacc

SEQ ID NO: 284445 - DNA, 25 bp, Artificial
  probe
  misc_feature (1)..(25): SEQ ID NO: 1135; WAN024FL4; Start 973; Stop 997
accgttgatgaatatgaattgatga

SEQ ID NO: 284446 - DNA, 25 bp, Artificial
  probe
  misc_feature (1)..(25): SEQ ID NO: 1135; WAN024FL4; Start 666; Stop 690
aattggatatgaacagacagatgac

SEQ ID NO: 284447 - DNA, 25 bp, Artificial
  probe
  misc_feature (1)..(25): SEQ ID NO: 1135; WAN024FL4; Start 926; Stop 950
ttcttgtatccaatctgagtgaact

SEQ ID NO: 284448 - DNA, 25 bp, Artificial
  probe
  misc_feature (1)..(25): SEQ ID NO: 1135; WAN024FL4; Start 665; Stop 689
gaattggatatgaacagacagatga

SEQ ID NO: 284449 - DNA, 25 bp, Artificial
  probe
  misc_feature (1)..(25): SEQ ID NO: 1135; WAN024FL4; Start 933; Stop 957
atccaatctgagtgaactacctgag

SEQ ID NO: 284450 - DNA, 25 bp, Artificial
  probe
  misc_feature (1)..(25): SEQ ID NO: 1135; WAN024FL4; Start 922; Stop 946
ggtattcttgtatccaatctgagtg

SEQ ID NO: 284451 - DNA, 25 bp, Artificial
  probe
  misc_feature (1)..(25): SEQ ID NO: 1135; WAN024FL4; Start 773; Stop 797
gtccgtcatcagagtcttgtataga

SEQ ID NO: 284452 - DNA, 25 bp, Artificial
  probe
  misc_feature (1)..(25): SEQ ID NO: 1135; WAN024FL4; Start 928; Stop 952
cttgtatccaatctgagtgaactac

SEQ ID NO: 284453 - DNA, 25 bp, Artificial
  probe
  misc_feature (1)..(25): SEQ ID NO: 1135; WAN024FL4; Start 927; Stop 951
tcttgtatccaatctgagtgaacta

SEQ ID NO: 284454 - DNA, 25 bp, Artificial
  probe
  misc_feature (1)..(25): SEQ ID NO: 1135; WAN024FL4; Start 925; Stop 949
attcttgtatccaatctgagtgaac

SEQ ID NO: 284455 - DNA, 25 bp, Artificial
  probe
  misc_feature (1)..(25): SEQ ID NO: 1135; WAN024FL4; Start 661; Stop 685
tatggaattggatatgaacagacag

SEQ ID NO: 284456 - DNA, 25 bp, Artificial
  probe
  misc_feature (1)..(25): SEQ ID NO: 1135; WAN024FL4; Start 799; Stop 823
acttatggagagtatcttcgtgtaa

SEQ ID NO: 284457 - DNA, 25 bp, Artificial
  probe
  misc_feature (1)..(25): SEQ ID NO: 1135; WAN024FL4; Start 798; Stop 822
aacttatggagagtatcttcgtgta

SEQ ID NO: 284458 - DNA, 25 bp, Artificial
  probe
  misc_feature (1)..(25): SEQ ID NO: 1135; WAN024FL4; Start 772; Stop 796
ggtccgtcatcagagtcttgtatag

SEQ ID NO: 284459 - DNA, 25 bp, Artificial
  probe
  misc_feature (1)..(25): SEQ ID NO: 1135; WAN024FL4; Start 974; Stop 998
ccgttgatgaatatgaattgatgaa

SEQ ID NO: 284460 - DNA, 25 bp, Artificial
  probe
  misc_feature (1)..(25): SEQ ID NO: 1135; WAN024FL4; Start 660; Stop 684
ttatggaattggatatgaacagaca

SEQ ID NO: 284461 - DNA, 25 bp, Artificial
  probe
  misc_feature (1)..(25): SEQ ID NO: 1135; WAN024FL4; Start 923; Stop 947
gtattcttgtatccaatctgagtga

SEQ ID NO: 284462 - DNA, 25 bp, Artificial
  probe
  misc_feature (1)..(25): SEQ ID NO: 1135; WAN024FL4; Start 972; Stop 996
taccgttgatgaatatgaattgatg

SEQ ID NO: 284463 - DNA, 25 bp, Artificial
  probe
  misc_feature (1)..(25): SEQ ID NO: 1135; WAN024FL4; Start 771; Stop 795
tggtccgtcatcagagtcttgtata

SEQ ID NO: 284464 - DNA, 25 bp, Artificial
  probe
  misc_feature (1)..(25): SEQ ID NO: 1135; WAN024FL4; Start 717; Stop 741
tatgccagaagaattaccattcgtt

SEQ ID NO: 284465 - DNA, 25 bp, Artificial
  probe
  misc_feature (1)..(25): SEQ ID NO: 1135; WAN024FL4; Start 716; Stop 740
ttatgccagaagaattaccattcgt

SEQ ID NO: 284466 - DNA, 25 bp, Artificial
  probe
  misc_feature (1)..(25): SEQ ID NO: 1135; WAN024FL4; Start 919; Stop 943
tgtggtattcttgtatccaatctga

SEQ ID NO: 284467 - DNA, 25 bp, Artificial
  probe
  misc_feature (1)..(25): SEQ ID NO: 1135; WAN024FL4; Start 921; Stop 945
tggtattcttgtatccaatctgagt

SEQ ID NO: 284468 - DNA, 25 bp, Artificial
  probe
  misc_feature (1)..(25): SEQ ID NO: 1136; WAN024DQD; Start 40; Stop 64
ccattccatgactctgttgctctag

SEQ ID NO: 284469 - DNA, 25 bp, Artificial
  probe
  misc_feature (1)..(25): SEQ ID NO: 1136; WAN024DQD; Start 39; Stop 63
tccattccatgactctgttgctcta

SEQ ID NO: 284470 - DNA, 25 bp, Artificial
  probe
  misc_feature (1)..(25): SEQ ID NO: 1136; WAN024DQD; Start 13; Stop 37
caacaaggagaaatctcaaccatga

SEQ ID NO: 284471 - DNA, 25 bp, Artificial
  probe
  misc_feature (1)..(25): SEQ ID NO: 1136; WAN024DQD; Start 42; Stop 66
attccatgactctgttgctctagaa

SEQ ID NO: 284472 - DNA, 25 bp, Artificial
  probe
  misc_feature (1)..(25): SEQ ID NO: 1136; WAN024DQD; Start 41; Stop 65
cattccatgactctgttgctctaga

SEQ ID NO: 284473 - DNA, 25 bp, Artificial
  probe
  misc_feature (1)..(25): SEQ ID NO: 1136; WAN024DQD; Start 3; Stop 27
gaagtccaagcaacaaggagaaatc

SEQ ID NO: 284474 - DNA, 25 bp, Artificial
  probe
  misc_feature (1)..(25): SEQ ID NO: 1136; WAN024DQD; Start 9; Stop 33
caagcaacaaggagaaatctcaacc

SEQ ID NO: 284475 - DNA, 25 bp, Artificial
  probe
  misc_feature (1)..(25): SEQ ID NO: 1136; WAN024DQD; Start 8; Stop 32
ccaagcaacaaggagaaatctcaac

SEQ ID NO: 284476 - DNA, 25 bp, Artificial
  probe
  misc_feature (1)..(25): SEQ ID NO: 1136; WAN024DQD; Start 12; Stop 36
gcaacaaggagaaatctcaaccatg

SEQ ID NO: 284477 - DNA, 25 bp, Artificial
  probe
  misc_feature (1)..(25): SEQ ID NO: 1136; WAN024DQD; Start 11; Stop 35
agcaacaaggagaaatctcaaccat

SEQ ID NO: 284478 - DNA, 25 bp, Artificial
  probe
  misc_feature (1)..(25): SEQ ID NO: 1136; WAN024DQD; Start 4; Stop 28
aagtccaagcaacaaggagaaatct

SEQ ID NO: 284479 - DNA, 25 bp, Artificial
  probe
  misc_feature (1)..(25): SEQ ID NO: 1136; WAN024DQD; Start 10; Stop 34
aagcaacaaggagaaatctcaacca

SEQ ID NO: 284480 - DNA, 25 bp, Artificial
  probe
  misc_feature (1)..(25): SEQ ID NO: 1136; WAN024DQD; Start 2; Stop 26
tgaagtccaagcaacaaggagaaat

SEQ ID NO: 284481 - DNA, 25 bp, Artificial
  probe
  misc_feature (1)..(25): SEQ ID NO: 1136; WAN024DQD; Start 1; Stop 25
atgaagtccaagcaacaaggagaaa

SEQ ID NO: 284482 - DNA, 25 bp, Artificial
  probe
  misc_feature (1)..(25): SEQ ID NO: 1136; WAN024DQD; Start 24; Stop 48
aatctcaaccatgagtccattccat

SEQ ID NO: 284483 - DNA, 25 bp, Artificial
  probe
  misc_feature (1)..(25): SEQ ID NO: 1136; WAN024DQD; Start 7; Stop 31
tccaagcaacaaggagaaatctcaa

SEQ ID NO: 284484 - DNA, 25 bp, Artificial
  probe
  misc_feature (1)..(25): SEQ ID NO: 1136; WAN024DQD; Start 43; Stop 67
ttccatgactctgttgctctagaaa

SEQ ID NO: 284485 - DNA, 25 bp, Artificial
  probe
  misc_feature (1)..(25): SEQ ID NO: 1136; WAN024DQD; Start 5; Stop 29
agtccaagcaacaaggagaaatctc

SEQ ID NO: 284486 - DNA, 25 bp, Artificial
  probe
  misc_feature (1)..(25): SEQ ID NO: 1136; WAN024DQD; Start 25; Stop 49
atctcaaccatgagtccattccatg

SEQ ID NO: 284487 - DNA, 25 bp, Artificial
  probe
  misc_feature (1)..(25): SEQ ID NO: 1136; WAN024DQD; Start 6; Stop 30
gtccaagcaacaaggagaaatctca

SEQ ID NO: 284488 - DNA, 25 bp, Artificial
  probe
  misc_feature (1)..(25): SEQ ID NO: 1136; WAN024DQD; Start 21; Stop 45
agaaatctcaaccatgagtccattc

SEQ ID NO: 284489 - DNA, 25 bp, Artificial
  probe
  misc_feature (1)..(25): SEQ ID NO: 1136; WAN024DQD; Start 20; Stop 44
gagaaatctcaaccatgagtccatt

SEQ ID NO: 284490 - DNA, 25 bp, Artificial
  probe
  misc_feature (1)..(25): SEQ ID NO: 1136; WAN024DQD; Start 38; Stop 62
gtccattccatgactctgttgctct

SEQ ID NO: 284491 - DNA, 25 bp, Artificial
  probe
  misc_feature (1)..(25): SEQ ID NO: 1136; WAN024DQD; Start 14; Stop 38
aacaaggagaaatctcaaccatgag

SEQ ID NO: 284492 - DNA, 25 bp, Artificial
  probe
  misc_feature (1)..(25): SEQ ID NO: 1136; WAN024DQD; Start 16; Stop 40
caaggagaaatctcaaccatgagtc

SEQ ID NO: 284493 - DNA, 25 bp, Artificial
  probe
  misc_feature (1)..(25): SEQ ID NO: 1136; WAN024DQD; Start 22; Stop 46
gaaatctcaaccatgagtccattcc

SEQ ID NO: 284494 - DNA, 25 bp, Artificial
  probe
  misc_feature (1)..(25): SEQ ID NO: 1136; WAN024DQD; Start 27; Stop 51
ctcaaccatgagtccattccatgac

SEQ ID NO: 284495 - DNA, 25 bp, Artificial
  probe
  misc_feature (1)..(25): SEQ ID NO: 1136; WAN024DQD; Start 15; Stop 39
acaaggagaaatctcaaccatgagt

SEQ ID NO: 284496 - DNA, 25 bp, Artificial
  probe
  misc_feature (1)..(25): SEQ ID NO: 1136; WAN024DQD; Start 26; Stop 50
tctcaaccatgagtccattccatga

SEQ ID NO: 284497 - DNA, 25 bp, Artificial
  probe
  misc_feature (1)..(25): SEQ ID NO: 1136; WAN024DQD; Start 23; Stop 47
aaatctcaaccatgagtccattcca

SEQ ID NO: 284498 - DNA, 25 bp, Artificial
  probe
  misc_feature (1)..(25): SEQ ID NO: 1136; WAN024DQD; Start 17; Stop 41
aaggagaaatctcaaccatgagtcc

SEQ ID NO: 284499 - DNA, 25 bp, Artificial
  probe
  misc_feature (1)..(25): SEQ ID NO: 1136; WAN024DQD; Start 28; Stop 52
tcaaccatgagtccattccatgact

SEQ ID NO: 284500 - DNA, 25 bp, Artificial
  probe
  misc_feature (1)..(25): SEQ ID NO: 1136; WAN024DQD; Start 19; Stop 43
ggagaaatctcaaccatgagtccat

SEQ ID NO: 284501 - DNA, 25 bp, Artificial
  probe
  misc_feature (1)..(25): SEQ ID NO: 1137; WAN024CXP; Start 199; Stop 223
atcatatccaatccaacagaacaga

SEQ ID NO: 284502 - DNA, 25 bp, Artificial
  probe
  misc_feature (1)..(25): SEQ ID NO: 1137; WAN024CXP; Start 196; Stop 220
gcaatcatatccaatccaacagaac

SEQ ID NO: 284503 - DNA, 25 bp, Artificial
  probe
  misc_feature (1)..(25): SEQ ID NO: 1137; WAN024CXP; Start 200; Stop 224
tcatatccaatccaacagaacagat

SEQ ID NO: 284504 - DNA, 25 bp, Artificial
  probe
  misc_feature (1)..(25): SEQ ID NO: 1137; WAN024CXP; Start 197; Stop 221
caatcatatccaatccaacagaaca

SEQ ID NO: 284505 - DNA, 25 bp, Artificial
  probe
  misc_feature (1)..(25): SEQ ID NO: 1137; WAN024CXP; Start 198; Stop 222
aatcatatccaatccaacagaacag

SEQ ID NO: 284506 - DNA, 25 bp, Artificial
  probe
  misc_feature (1)..(25): SEQ ID NO: 1137; WAN024CXP; Start 195; Stop 219
ggcaatcatatccaatccaacagaa

SEQ ID NO: 284507 - DNA, 25 bp, Artificial
  probe
  misc_feature (1)..(25): SEQ ID NO: 1137; WAN024CXP; Start 203; Stop 227
tatccaatccaacagaacagatagc

SEQ ID NO: 284508 - DNA, 25 bp, Artificial
  probe
  misc_feature (1)..(25): SEQ ID NO: 1137; WAN024CXP; Start 276; Stop 300
agcaatcattccttcatcctcagaa

SEQ ID NO: 284509 - DNA, 25 bp, Artificial
  probe
  misc_feature (1)..(25): SEQ ID NO: 1137; WAN024CXP; Start 201; Stop 225
catatccaatccaacagaacagata

SEQ ID NO: 284510 - DNA, 25 bp, Artificial
  probe
  misc_feature (1)..(25): SEQ ID NO: 1137; WAN024CXP; Start 275; Stop 299
cagcaatcattccttcatcctcaga

SEQ ID NO: 284511 - DNA, 25 bp, Artificial
  probe
  misc_feature (1)..(25): SEQ ID NO: 1137; WAN024CXP; Start 204; Stop 228
atccaatccaacagaacagatagcc

SEQ ID NO: 284512 - DNA, 25 bp, Artificial
  probe
  misc_feature (1)..(25): SEQ ID NO: 1137; WAN024CXP; Start 202; Stop 226
atatccaatccaacagaacagatag

SEQ ID NO: 284513 - DNA, 25 bp, Artificial
  probe
  misc_feature (1)..(25): SEQ ID NO: 1137; WAN024CXP; Start 49; Stop 73
cctaatagaccaccaaactcaatca

SEQ ID NO: 284514 - DNA, 25 bp, Artificial
  probe
  misc_feature (1)..(25): SEQ ID NO: 1137; WAN024CXP; Start 48; Stop 72
tcctaatagaccaccaaactcaatc

SEQ ID NO: 284515 - DNA, 25 bp, Artificial
  probe
  misc_feature (1)..(25): SEQ ID NO: 1137; WAN024CXP; Start 62; Stop 86
caaactcaatcatatcgccttcttt

SEQ ID NO: 284516 - DNA, 25 bp, Artificial
  probe
  misc_feature (1)..(25): SEQ ID NO: 1137; WAN024CXP; Start 47; Stop 71
ttcctaatagaccaccaaactcaat

SEQ ID NO: 284517 - DNA, 25 bp, Artificial
  probe
  misc_feature (1)..(25): SEQ ID NO: 1137; WAN024CXP; Start 54; Stop 78
tagaccaccaaactcaatcatatcg

SEQ ID NO: 284518 - DNA, 25 bp, Artificial
  probe
  misc_feature (1)..(25): SEQ ID NO: 1137; WAN024CXP; Start 279; Stop 303
aatcattccttcatcctcagaaaca

SEQ ID NO: 284519 - DNA, 25 bp, Artificial
  probe
  misc_feature (1)..(25): SEQ ID NO: 1137; WAN024CXP; Start 278; Stop 302
caatcattccttcatcctcagaaac

SEQ ID NO: 284520 - DNA, 25 bp, Artificial
  probe
  misc_feature (1)..(25): SEQ ID NO: 1137; WAN024CXP; Start 182; Stop 206
tatcttctgggatggcaatcatatc

SEQ ID NO: 284521 - DNA, 25 bp, Artificial
  probe
  misc_feature (1)..(25): SEQ ID NO: 1137; WAN024CXP; Start 193; Stop 217
atggcaatcatatccaatccaacag

SEQ ID NO: 284522 - DNA, 25 bp, Artificial
  probe
  misc_feature (1)..(25): SEQ ID NO: 1137; WAN024CXP; Start 192; Stop 216
gatggcaatcatatccaatccaaca

SEQ ID NO: 284523 - DNA, 25 bp, Artificial
  probe
  misc_feature (1)..(25): SEQ ID NO: 1137; WAN024CXP; Start 181; Stop 205
gtatcttctgggatggcaatcatat

SEQ ID NO: 284524 - DNA, 25 bp, Artificial
  probe
  misc_feature (1)..(25): SEQ ID NO: 1137; WAN024CXP; Start 477; Stop 501
caaactcaagtccacaataccaaac

SEQ ID NO: 284525 - DNA, 25 bp, Artificial
  probe
  misc_feature (1)..(25): SEQ ID NO: 1137; WAN024CXP; Start 280; Stop 304
atcattccttcatcctcagaaacag

SEQ ID NO: 284526 - DNA, 25 bp, Artificial
  probe
  misc_feature (1)..(25): SEQ ID NO: 1137; WAN024CXP; Start 211; Stop 235
ccaacagaacagatagccgtcatag

SEQ ID NO: 284527 - DNA, 25 bp, Artificial
  probe
  misc_feature (1)..(25): SEQ ID NO: 1137; WAN024CXP; Start 46; Stop 70
gttcctaatagaccaccaaactcaa

SEQ ID NO: 284528 - DNA, 25 bp, Artificial
  probe
  misc_feature (1)..(25): SEQ ID NO: 1137; WAN024CXP; Start 50; Stop 74
ctaatagaccaccaaactcaatcat

SEQ ID NO: 284529 - DNA, 25 bp, Artificial
  probe
  misc_feature (1)..(25): SEQ ID NO: 1137; WAN024CXP; Start 61; Stop 85
ccaaactcaatcatatcgccttctt

SEQ ID NO: 284530 - DNA, 25 bp, Artificial
  probe
  misc_feature (1)..(25): SEQ ID NO: 1137; WAN024CXP; Start 277; Stop 301
gcaatcattccttcatcctcagaaa

SEQ ID NO: 284531 - DNA, 25 bp, Artificial
  probe
  misc_feature (1)..(25): SEQ ID NO: 1137; WAN024CXP; Start 53; Stop 77
atagaccaccaaactcaatcatatc

SEQ ID NO: 284532 - DNA, 25 bp, Artificial
  probe
  misc_feature (1)..(25): SEQ ID NO: 1137; WAN024CXP; Start 478; Stop 502
aaactcaagtccacaataccaaact

SEQ ID NO: 284533 - DNA, 25 bp, Artificial
  probe
  misc_feature (1)..(25): SEQ ID NO: 1137; WAN024CXP; Start 476; Stop 500
ccaaactcaagtccacaataccaaa

SEQ ID NO: 284534 - DNA, 25 bp, Artificial
  probe
  misc_feature (1)..(25): SEQ ID NO: 1138; WAN024GD7; Start 1038; Stop 1062
ttgttgctatctaccgtaatgttga

SEQ ID NO: 284535 - DNA, 25 bp, Artificial
  probe
  misc_feature (1)..(25): SEQ ID NO: 1138; WAN024GD7; Start 620; Stop 644
gtagttattcttcgttcagcaatcg

SEQ ID NO: 284536 - DNA, 25 bp, Artificial
  probe
  misc_feature (1)..(25): SEQ ID NO: 1138; WAN024GD7; Start 1037; Stop 1061
attgttgctatctaccgtaatgttg

SEQ ID NO: 284537 - DNA, 25 bp, Artificial
  probe
  misc_feature (1)..(25): SEQ ID NO: 1138; WAN024GD7; Start 619; Stop 643
tgtagttattcttcgttcagcaatc

SEQ ID NO: 284538 - DNA, 25 bp, Artificial
  probe
  misc_feature (1)..(25): SEQ ID NO: 1138; WAN024GD7; Start 1040; Stop 1064
gttgctatctaccgtaatgttgatg

SEQ ID NO: 284539 - DNA, 25 bp, Artificial
  probe
  misc_feature (1)..(25): SEQ ID NO: 1138; WAN024GD7; Start 1039; Stop 1063
tgttgctatctaccgtaatgttgat

SEQ ID NO: 284540 - DNA, 25 bp, Artificial
  probe
  misc_feature (1)..(25): SEQ ID NO: 1138; WAN024GD7; Start 1035; Stop 1059
tgattgttgctatctaccgtaatgt

SEQ ID NO: 284541 - DNA, 25 bp, Artificial
  probe
  misc_feature (1)..(25): SEQ ID NO: 1138; WAN024GD7; Start 1034; Stop 1058
gtgattgttgctatctaccgtaatg

SEQ ID NO: 284542 - DNA, 25 bp, Artificial
  probe
  misc_feature (1)..(25): SEQ ID NO: 1138; WAN024GD7; Start 1033; Stop 1057
tgtgattgttgctatctaccgtaat

SEQ ID NO: 284543 - DNA, 25 bp, Artificial
  probe
  misc_feature (1)..(25): SEQ ID NO: 1138; WAN024GD7; Start 1044; Stop 1068
ctatctaccgtaatgttgatgctga

SEQ ID NO: 284544 - DNA, 25 bp, Artificial
  probe
  misc_feature (1)..(25): SEQ ID NO: 1138; WAN024GD7; Start 1045; Stop 1069
tatctaccgtaatgttgatgctgac

SEQ ID NO: 284545 - DNA, 25 bp, Artificial
  probe
  misc_feature (1)..(25): SEQ ID NO: 1138; WAN024GD7; Start 1036; Stop 1060
gattgttgctatctaccgtaatgtt

SEQ ID NO: 284546 - DNA, 25 bp, Artificial
  probe
  misc_feature (1)..(25): SEQ ID NO: 1138; WAN024GD7; Start 1032; Stop 1056
gtgtgattgttgctatctaccgtaa

SEQ ID NO: 284547 - DNA, 25 bp, Artificial
  probe
  misc_feature (1)..(25): SEQ ID NO: 1138; WAN024GD7; Start 172; Stop 196
cggtaagtctatcgtgatgattaac

SEQ ID NO: 284548 - DNA, 25 bp, Artificial
  probe
  misc_feature (1)..(25): SEQ ID NO: 1138; WAN024GD7; Start 171; Stop 195
tcggtaagtctatcgtgatgattaa

SEQ ID NO: 284549 - DNA, 25 bp, Artificial
  probe
  misc_feature (1)..(25): SEQ ID NO: 1138; WAN024GD7; Start 170; Stop 194
atcggtaagtctatcgtgatgatta

SEQ ID NO: 284550 - DNA, 25 bp, Artificial
  probe
  misc_feature (1)..(25): SEQ ID NO: 1138; WAN024GD7; Start 1041; Stop 1065
ttgctatctaccgtaatgttgatgc

SEQ ID NO: 284551 - DNA, 25 bp, Artificial
  probe
  misc_feature (1)..(25): SEQ ID NO: 1138; WAN024GD7; Start 1290; Stop 1314
tcagtgctggtattggtatggatat

SEQ ID NO: 284552 - DNA, 25 bp, Artificial
  probe
  misc_feature (1)..(25): SEQ ID NO: 1138; WAN024GD7; Start 1289; Stop 1313
atcagtgctggtattggtatggata

SEQ ID NO: 284553 - DNA, 25 bp, Artificial
  probe
  misc_feature (1)..(25): SEQ ID NO: 1138; WAN024GD7; Start 618; Stop 642
ttgtagttattcttcgttcagcaat

SEQ ID NO: 284554 - DNA, 25 bp, Artificial
  probe
  misc_feature (1)..(25): SEQ ID NO: 1138; WAN024GD7; Start 1043; Stop 1067
gctatctaccgtaatgttgatgctg

SEQ ID NO: 284555 - DNA, 25 bp, Artificial
  probe
  misc_feature (1)..(25): SEQ ID NO: 1138; WAN024GD7; Start 621; Stop 645
tagttattcttcgttcagcaatcgc

SEQ ID NO: 284556 - DNA, 25 bp, Artificial
  probe
  misc_feature (1)..(25): SEQ ID NO: 1138; WAN024GD7; Start 1540; Stop 1564
atgtatgactcgtcttcgtgtaact

SEQ ID NO: 284557 - DNA, 25 bp, Artificial
  probe
  misc_feature (1)..(25): SEQ ID NO: 1138; WAN024GD7; Start 1042; Stop 1066
tgctatctaccgtaatgttgatgct

SEQ ID NO: 284558 - DNA, 25 bp, Artificial
  probe
  misc_feature (1)..(25): SEQ ID NO: 1138; WAN024GD7; Start 1543; Stop 1567
tatgactcgtcttcgtgtaactgtt

SEQ ID NO: 284559 - DNA, 25 bp, Artificial
  probe
  misc_feature (1)..(25): SEQ ID NO: 1138; WAN024GD7; Start 867; Stop 891
aaggtactcaagtattcggtcaaga

SEQ ID NO: 284560 - DNA, 25 bp, Artificial
  probe
  misc_feature (1)..(25): SEQ ID NO: 1138; WAN024GD7; Start 1976; Stop 2000
gaagcaggtcttgaagtattggttc

SEQ ID NO: 284561 - DNA, 25 bp, Artificial
  probe
  misc_feature (1)..(25): SEQ ID NO: 1138; WAN024GD7; Start 1288; Stop 1312
aatcagtgctggtattggtatggat

SEQ ID NO: 284562 - DNA, 25 bp, Artificial
  probe
  misc_feature (1)..(25): SEQ ID NO: 1138; WAN024GD7; Start 1544; Stop 1568
atgactcgtcttcgtgtaactgtta

SEQ ID NO: 284563 - DNA, 25 bp, Artificial
  probe
  misc_feature (1)..(25): SEQ ID NO: 1138; WAN024GD7; Start 1545; Stop 1569
tgactcgtcttcgtgtaactgttaa

SEQ ID NO: 284564 - DNA, 25 bp, Artificial
  probe
  misc_feature (1)..(25): SEQ ID NO: 1138; WAN024GD7; Start 1160; Stop 1184
ttcatcgcaacacctatgtatcttg

SEQ ID NO: 284565 - DNA, 25 bp, Artificial
  probe
  misc_feature (1)..(25): SEQ ID NO: 1138; WAN024GD7; Start 1159; Stop 1183
gttcatcgcaacacctatgtatctt

SEQ ID NO: 284566 - DNA, 25 bp, Artificial
  probe
  misc_feature (1)..(25): SEQ ID NO: 1138; WAN024GD7; Start 960; Stop 984
acttgttagatacagtacatccagc

SEQ ID NO: 284567 - DNA, 25 bp, Artificial
  probe
  misc_feature (1)..(25): SEQ ID NO: 1139; WAN024CXN; Start 577; Stop 601
actacaggagcaactataaatcgtg

SEQ ID NO: 284568 - DNA, 25 bp, Artificial
  probe
  misc_feature (1)..(25): SEQ ID NO: 1139; WAN024CXN; Start 576; Stop 600
tactacaggagcaactataaatcgt

SEQ ID NO: 284569 - DNA, 25 bp, Artificial
  probe
  misc_feature (1)..(25): SEQ ID NO: 1139; WAN024CXN; Start 595; Stop 619
aatcgtgttaagaaactgttggaag

SEQ ID NO: 284570 - DNA, 25 bp, Artificial
  probe
  misc_feature (1)..(25): SEQ ID NO: 1139; WAN024CXN; Start 594; Stop 618
aaatcgtgttaagaaactgttggaa

SEQ ID NO: 284571 - DNA, 25 bp, Artificial
  probe
  misc_feature (1)..(25): SEQ ID NO: 1139; WAN024CXN; Start 598; Stop 622
cgtgttaagaaactgttggaagaag

SEQ ID NO: 284572 - DNA, 25 bp, Artificial
  probe
  misc_feature (1)..(25): SEQ ID NO: 1139; WAN024CXN; Start 596; Stop 620
atcgtgttaagaaactgttggaaga

SEQ ID NO: 284573 - DNA, 25 bp, Artificial
  probe
  misc_feature (1)..(25): SEQ ID NO: 1139; WAN024CXN; Start 170; Stop 194
gtcaagattgtcaactttggtgtaa

SEQ ID NO: 284574 - DNA, 25 bp, Artificial
  probe
  misc_feature (1)..(25): SEQ ID NO: 1139; WAN024CXN; Start 124; Stop 148
gaagagaactgtccaaattgtatga

SEQ ID NO: 284575 - DNA, 25 bp, Artificial
  probe
  misc_feature (1)..(25): SEQ ID NO: 1139; WAN024CXN; Start 362; Stop 386
ccctaagtcctgatagatatgctaa

SEQ ID NO: 284576 - DNA, 25 bp, Artificial
  probe
  misc_feature (1)..(25): SEQ ID NO: 1139; WAN024CXN; Start 599; Stop 623
gtgttaagaaactgttggaagaagc

SEQ ID NO: 284577 - DNA, 25 bp, Artificial
  probe
  misc_feature (1)..(25): SEQ ID NO: 1139; WAN024CXN; Start 597; Stop 621
tcgtgttaagaaactgttggaagaa

SEQ ID NO: 284578 - DNA, 25 bp, Artificial
  probe
  misc_feature (1)..(25): SEQ ID NO: 1139; WAN024CXN; Start 581; Stop 605
caggagcaactataaatcgtgttaa

SEQ ID NO: 284579 - DNA, 25 bp, Artificial
  probe
  misc_feature (1)..(25): SEQ ID NO: 1139; WAN024CXN; Start 255; Stop 279
tttcagtcggtataagtttgatgga

SEQ ID NO: 284580 - DNA, 25 bp, Artificial
  probe
  misc_feature (1)..(25): SEQ ID NO: 1139; WAN024CXN; Start 171; Stop 195
tcaagattgtcaactttggtgtaaa

SEQ ID NO: 284581 - DNA, 25 bp, Artificial
  probe
  misc_feature (1)..(25): SEQ ID NO: 1139; WAN024CXN; Start 583; Stop 607
ggagcaactataaatcgtgttaaga

SEQ ID NO: 284582 - DNA, 25 bp, Artificial
  probe
  misc_feature (1)..(25): SEQ ID NO: 1139; WAN024CXN; Start 582; Stop 606
aggagcaactataaatcgtgttaag

SEQ ID NO: 284583 - DNA, 25 bp, Artificial
  probe
  misc_feature (1)..(25): SEQ ID NO: 1139; WAN024CXN; Start 256; Stop 280
ttcagtcggtataagtttgatggag

SEQ ID NO: 284584 - DNA, 25 bp, Artificial
  probe
  misc_feature (1)..(25): SEQ ID NO: 1139; WAN024CXN; Start 169; Stop 193
tgtcaagattgtcaactttggtgta

SEQ ID NO: 284585 - DNA, 25 bp, Artificial
  probe
  misc_feature (1)..(25): SEQ ID NO: 1139; WAN024CXN; Start 593; Stop 617
taaatcgtgttaagaaactgttgga

SEQ ID NO: 284586 - DNA, 25 bp, Artificial
  probe
  misc_feature (1)..(25): SEQ ID NO: 1139; WAN024CXN; Start 126; Stop 150
agagaactgtccaaattgtatgaaa

SEQ ID NO: 284587 - DNA, 25 bp, Artificial
  probe
  misc_feature (1)..(25): SEQ ID NO: 1139; WAN024CXN; Start 125; Stop 149
aagagaactgtccaaattgtatgaa

SEQ ID NO: 284588 - DNA, 25 bp, Artificial
  probe
  misc_feature (1)..(25): SEQ ID NO: 1139; WAN024CXN; Start 84; Stop 108
tctttgttcagactgtgattctact

SEQ ID NO: 284589 - DNA, 25 bp, Artificial
  probe
  misc_feature (1)..(25): SEQ ID NO: 1139; WAN024CXN; Start 10; Stop 34
ttgttatgtgggcagactatgaaga

SEQ ID NO: 284590 - DNA, 25 bp, Artificial
  probe
  misc_feature (1)..(25): SEQ ID NO: 1139; WAN024CXN; Start 9; Stop 33
cttgttatgtgggcagactatgaag

SEQ ID NO: 284591 - DNA, 25 bp, Artificial
  probe
  misc_feature (1)..(25): SEQ ID NO: 1139; WAN024CXN; Start 257; Stop 281
tcagtcggtataagtttgatggaga

SEQ ID NO: 284592 - DNA, 25 bp, Artificial
  probe
  misc_feature (1)..(25): SEQ ID NO: 1139; WAN024CXN; Start 580; Stop 604
acaggagcaactataaatcgtgtta

SEQ ID NO: 284593 - DNA, 25 bp, Artificial
  probe
  misc_feature (1)..(25): SEQ ID NO: 1139; WAN024CXN; Start 579; Stop 603
tacaggagcaactataaatcgtgtt

SEQ ID NO: 284594 - DNA, 25 bp, Artificial
  probe
  misc_feature (1)..(25): SEQ ID NO: 1139; WAN024CXN; Start 47; Stop 71
ttagtagtctcttacttctgaggaa

SEQ ID NO: 284595 - DNA, 25 bp, Artificial
  probe
  misc_feature (1)..(25): SEQ ID NO: 1139; WAN024CXN; Start 578; Stop 602
ctacaggagcaactataaatcgtgt

SEQ ID NO: 284596 - DNA, 25 bp, Artificial
  probe
  misc_feature (1)..(25): SEQ ID NO: 1139; WAN024CXN; Start 575; Stop 599
atactacaggagcaactataaatcg

SEQ ID NO: 284597 - DNA, 25 bp, Artificial
  probe
  misc_feature (1)..(25): SEQ ID NO: 1139; WAN024CXN; Start 85; Stop 109
ctttgttcagactgtgattctactt

SEQ ID NO: 284598 - DNA, 25 bp, Artificial
  probe
  misc_feature (1)..(25): SEQ ID NO: 1139; WAN024CXN; Start 567; Stop 591
tgatatctatactacaggagcaact

SEQ ID NO: 284599 - DNA, 25 bp, Artificial
  probe
  misc_feature (1)..(25): SEQ ID NO: 1139; WAN024CXN; Start 48; Stop 72
tagtagtctcttacttctgaggaat

SEQ ID NO: 284600 - DNA, 25 bp, Artificial
  probe
  misc_feature (1)..(25): SEQ ID NO: 1140; WAN024ATL; Start 2015; Stop 2039
catctgtagaagaaggaaccaatct

SEQ ID NO: 284601 - DNA, 25 bp, Artificial
  probe
  misc_feature (1)..(25): SEQ ID NO: 1140; WAN024ATL; Start 2014; Stop 2038
tcatctgtagaagaaggaaccaatc

SEQ ID NO: 284602 - DNA, 25 bp, Artificial
  probe
  misc_feature (1)..(25): SEQ ID NO: 1140; WAN024ATL; Start 2011; Stop 2035
gaatcatctgtagaagaaggaacca

SEQ ID NO: 284603 - DNA, 25 bp, Artificial
  probe
  misc_feature (1)..(25): SEQ ID NO: 1140; WAN024ATL; Start 2010; Stop 2034
agaatcatctgtagaagaaggaacc

SEQ ID NO: 284604 - DNA, 25 bp, Artificial
  probe
  misc_feature (1)..(25): SEQ ID NO: 1140; WAN024ATL; Start 2012; Stop 2036
aatcatctgtagaagaaggaaccaa

SEQ ID NO: 284605 - DNA, 25 bp, Artificial
  probe
  misc_feature (1)..(25): SEQ ID NO: 1140; WAN024ATL; Start 2013; Stop 2037
atcatctgtagaagaaggaaccaat

SEQ ID NO: 284606 - DNA, 25 bp, Artificial
  probe
  misc_feature (1)..(25): SEQ ID NO: 1140; WAN024ATL; Start 389; Stop 413
tggatatggatgaggcttatgtgaa

SEQ ID NO: 284607 - DNA, 25 bp, Artificial
  probe
  misc_feature (1)..(25): SEQ ID NO: 1140; WAN024ATL; Start 388; Stop 412
ttggatatggatgaggcttatgtga

SEQ ID NO: 284608 - DNA, 25 bp, Artificial
  probe
  misc_feature (1)..(25): SEQ ID NO: 1140; WAN024ATL; Start 272; Stop 296
caacttcctataatgtctatgctgt

SEQ ID NO: 284609 - DNA, 25 bp, Artificial
  probe
  misc_feature (1)..(25): SEQ ID NO: 1140; WAN024ATL; Start 859; Stop 883
aagtatatgacggctaccttggtta

SEQ ID NO: 284610 - DNA, 25 bp, Artificial
  probe
  misc_feature (1)..(25): SEQ ID NO: 1140; WAN024ATL; Start 860; Stop 884
agtatatgacggctaccttggttag

SEQ ID NO: 284611 - DNA, 25 bp, Artificial
  probe
  misc_feature (1)..(25): SEQ ID NO: 1140; WAN024ATL; Start 1063; Stop 1087
ggaggagaagtcttcaatagtagtg

SEQ ID NO: 284612 - DNA, 25 bp, Artificial
  probe
  misc_feature (1)..(25): SEQ ID NO: 1140; WAN024ATL; Start 1062; Stop 1086
aggaggagaagtcttcaatagtagt

SEQ ID NO: 284613 - DNA, 25 bp, Artificial
  probe
  misc_feature (1)..(25): SEQ ID NO: 1140; WAN024ATL; Start 1061; Stop 1085
caggaggagaagtcttcaatagtag

SEQ ID NO: 284614 - DNA, 25 bp, Artificial
  probe
  misc_feature (1)..(25): SEQ ID NO: 1140; WAN024ATL; Start 1060; Stop 1084
ccaggaggagaagtcttcaatagta

SEQ ID NO: 284615 - DNA, 25 bp, Artificial
  probe
  misc_feature (1)..(25): SEQ ID NO: 1140; WAN024ATL; Start 2009; Stop 2033
aagaatcatctgtagaagaaggaac

SEQ ID NO: 284616 - DNA, 25 bp, Artificial
  probe
  misc_feature (1)..(25): SEQ ID NO: 1140; WAN024ATL; Start 936; Stop 960
cgatactaaggaaggacttaccaag

SEQ ID NO: 284617 - DNA, 25 bp, Artificial
  probe
  misc_feature (1)..(25): SEQ ID NO: 1140; WAN024ATL; Start 862; Stop 886
tatatgacggctaccttggttagtg

SEQ ID NO: 284618 - DNA, 25 bp, Artificial
  probe
  misc_feature (1)..(25): SEQ ID NO: 1140; WAN024ATL; Start 861; Stop 885
gtatatgacggctaccttggttagt

SEQ ID NO: 284619 - DNA, 25 bp, Artificial
  probe
  misc_feature (1)..(25): SEQ ID NO: 1140; WAN024ATL; Start 268; Stop 292
gacgcaacttcctataatgtctatg

SEQ ID NO: 284620 - DNA, 25 bp, Artificial
  probe
  misc_feature (1)..(25): SEQ ID NO: 1140; WAN024ATL; Start 1064; Stop 1088
gaggagaagtcttcaatagtagtga

SEQ ID NO: 284621 - DNA, 25 bp, Artificial
  probe
  misc_feature (1)..(25): SEQ ID NO: 1140; WAN024ATL; Start 1065; Stop 1089
aggagaagtcttcaatagtagtgag

SEQ ID NO: 284622 - DNA, 25 bp, Artificial
  probe
  misc_feature (1)..(25): SEQ ID NO: 1140; WAN024ATL; Start 935; Stop 959
ccgatactaaggaaggacttaccaa

SEQ ID NO: 284623 - DNA, 25 bp, Artificial
  probe
  misc_feature (1)..(25): SEQ ID NO: 1140; WAN024ATL; Start 267; Stop 291
ggacgcaacttcctataatgtctat

SEQ ID NO: 284624 - DNA, 25 bp, Artificial
  probe
  misc_feature (1)..(25): SEQ ID NO: 1140; WAN024ATL; Start 273; Stop 297
aacttcctataatgtctatgctgtt

SEQ ID NO: 284625 - DNA, 25 bp, Artificial
  probe
  misc_feature (1)..(25): SEQ ID NO: 1140; WAN024ATL; Start 931; Stop 955
gatgccgatactaaggaaggactta

SEQ ID NO: 284626 - DNA, 25 bp, Artificial
  probe
  misc_feature (1)..(25): SEQ ID NO: 1140; WAN024ATL; Start 653; Stop 677
ggatggagagttccttgaatagtat

SEQ ID NO: 284627 - DNA, 25 bp, Artificial
  probe
  misc_feature (1)..(25): SEQ ID NO: 1140; WAN024ATL; Start 932; Stop 956
atgccgatactaaggaaggacttac

SEQ ID NO: 284628 - DNA, 25 bp, Artificial
  probe
  misc_feature (1)..(25): SEQ ID NO: 1140; WAN024ATL; Start 512; Stop 536
aagacgctagtgttgaaggaattga

SEQ ID NO: 284629 - DNA, 25 bp, Artificial
  probe
  misc_feature (1)..(25): SEQ ID NO: 1140; WAN024ATL; Start 17; Stop 41
gaataacccgatttgcgattagaaa

SEQ ID NO: 284630 - DNA, 25 bp, Artificial
  probe
  misc_feature (1)..(25): SEQ ID NO: 1140; WAN024ATL; Start 14; Stop 38
aaagaataacccgatttgcgattag

SEQ ID NO: 284631 - DNA, 25 bp, Artificial
  probe
  misc_feature (1)..(25): SEQ ID NO: 1140; WAN024ATL; Start 18; Stop 42
aataacccgatttgcgattagaaac

SEQ ID NO: 284632 - DNA, 25 bp, Artificial
  probe
  misc_feature (1)..(25): SEQ ID NO: 1140; WAN024ATL; Start 2043; Stop 2067
tcctaaccagcaagttctcctctta

SEQ ID NO: 284633 - DNA, 25 bp, Artificial
  probe
  misc_feature (1)..(25): SEQ ID NO: 1141; WAN024C5I; Start 176; Stop 200
ctaaggaagctaagaaggttcatca

SEQ ID NO: 284634 - DNA, 25 bp, Artificial
  probe
  misc_feature (1)..(25): SEQ ID NO: 1141; WAN024C5I; Start 177; Stop 201
taaggaagctaagaaggttcatcaa

SEQ ID NO: 284635 - DNA, 25 bp, Artificial
  probe
  misc_feature (1)..(25): SEQ ID NO: 1141; WAN024C5I; Start 939; Stop 963
tactaaagaaggaatcactgaggac

SEQ ID NO: 284636 - DNA, 25 bp, Artificial
  probe
  misc_feature (1)..(25): SEQ ID NO: 1141; WAN024C5I; Start 941; Stop 965
ctaaagaaggaatcactgaggactt

SEQ ID NO: 284637 - DNA, 25 bp, Artificial
  probe
  misc_feature (1)..(25): SEQ ID NO: 1141; WAN024C5I; Start 940; Stop 964
actaaagaaggaatcactgaggact

SEQ ID NO: 284638 - DNA, 25 bp, Artificial
  probe
  misc_feature (1)..(25): SEQ ID NO: 1141; WAN024C5I; Start 535; Stop 559
gactttacaactagccctaacagaa

SEQ ID NO: 284639 - DNA, 25 bp, Artificial
  probe
  misc_feature (1)..(25): SEQ ID NO: 1141; WAN024C5I; Start 523; Stop 547
gtggaagggattgactttacaacta

SEQ ID NO: 284640 - DNA, 25 bp, Artificial
  probe
  misc_feature (1)..(25): SEQ ID NO: 1141; WAN024C5I; Start 536; Stop 560
actttacaactagccctaacagaag

SEQ ID NO: 284641 - DNA, 25 bp, Artificial
  probe
  misc_feature (1)..(25): SEQ ID NO: 1141; WAN024C5I; Start 946; Stop 970
gaaggaatcactgaggactttgttt

SEQ ID NO: 284642 - DNA, 25 bp, Artificial
  probe
  misc_feature (1)..(25): SEQ ID NO: 1141; WAN024C5I; Start 938; Stop 962
atactaaagaaggaatcactgagga

SEQ ID NO: 284643 - DNA, 25 bp, Artificial
  probe
  misc_feature (1)..(25): SEQ ID NO: 1141; WAN024C5I; Start 534; Stop 558
tgactttacaactagccctaacaga

SEQ ID NO: 284644 - DNA, 25 bp, Artificial
  probe
  misc_feature (1)..(25): SEQ ID NO: 1141; WAN024C5I; Start 937; Stop 961
gatactaaagaaggaatcactgagg

SEQ ID NO: 284645 - DNA, 25 bp, Artificial
  probe
  misc_feature (1)..(25): SEQ ID NO: 1141; WAN024C5I; Start 532; Stop 556
attgactttacaactagccctaaca

SEQ ID NO: 284646 - DNA, 25 bp, Artificial
  probe
  misc_feature (1)..(25): SEQ ID NO: 1141; WAN024C5I; Start 524; Stop 548
tggaagggattgactttacaactag

SEQ ID NO: 284647 - DNA, 25 bp, Artificial
  probe
  misc_feature (1)..(25): SEQ ID NO: 1141; WAN024C5I; Start 947; Stop 971
aaggaatcactgaggactttgtttg

SEQ ID NO: 284648 - DNA, 25 bp, Artificial
  probe
  misc_feature (1)..(25): SEQ ID NO: 1141; WAN024C5I; Start 533; Stop 557
ttgactttacaactagccctaacag

SEQ ID NO: 284649 - DNA, 25 bp, Artificial
  probe
  misc_feature (1)..(25): SEQ ID NO: 1141; WAN024C5I; Start 537; Stop 561
ctttacaactagccctaacagaagc

SEQ ID NO: 284650 - DNA, 25 bp, Artificial
  probe
  misc_feature (1)..(25): SEQ ID NO: 1141; WAN024C5I; Start 945; Stop 969
agaaggaatcactgaggactttgtt

SEQ ID NO: 284651 - DNA, 25 bp, Artificial
  probe
  misc_feature (1)..(25): SEQ ID NO: 1141; WAN024C5I; Start 944; Stop 968
aagaaggaatcactgaggactttgt

SEQ ID NO: 284652 - DNA, 25 bp, Artificial
  probe
  misc_feature (1)..(25): SEQ ID NO: 1141; WAN024C5I; Start 151; Stop 175
ggaactcgctttggaacagatttag

SEQ ID NO: 284653 - DNA, 25 bp, Artificial
  probe
  misc_feature (1)..(25): SEQ ID NO: 1141; WAN024C5I; Start 526; Stop 550
gaagggattgactttacaactagcc

SEQ ID NO: 284654 - DNA, 25 bp, Artificial
  probe
  misc_feature (1)..(25): SEQ ID NO: 1141; WAN024C5I; Start 525; Stop 549
ggaagggattgactttacaactagc

SEQ ID NO: 284655 - DNA, 25 bp, Artificial
  probe
  misc_feature (1)..(25): SEQ ID NO: 1141; WAN024C5I; Start 934; Stop 958
gcagatactaaagaaggaatcactg

SEQ ID NO: 284656 - DNA, 25 bp, Artificial
  probe
  misc_feature (1)..(25): SEQ ID NO: 1141; WAN024C5I; Start 1935; Stop 1959
tcctggagatttagcagaagaacta

SEQ ID NO: 284657 - DNA, 25 bp, Artificial
  probe
  misc_feature (1)..(25): SEQ ID NO: 1141; WAN024C5I; Start 958; Stop 982
gaggactttgtttggcgtgatattc

SEQ ID NO: 284658 - DNA, 25 bp, Artificial
  probe
  misc_feature (1)..(25): SEQ ID NO: 1141; WAN024C5I; Start 182; Stop 206
aagctaagaaggttcatcaaatcac

SEQ ID NO: 284659 - DNA, 25 bp, Artificial
  probe
  misc_feature (1)..(25): SEQ ID NO: 1141; WAN024C5I; Start 936; Stop 960
agatactaaagaaggaatcactgag

SEQ ID NO: 284660 - DNA, 25 bp, Artificial
  probe
  misc_feature (1)..(25): SEQ ID NO: 1141; WAN024C5I; Start 180; Stop 204
ggaagctaagaaggttcatcaaatc

SEQ ID NO: 284661 - DNA, 25 bp, Artificial
  probe
  misc_feature (1)..(25): SEQ ID NO: 1141; WAN024C5I; Start 179; Stop 203
aggaagctaagaaggttcatcaaat

SEQ ID NO: 284662 - DNA, 25 bp, Artificial
  probe
  misc_feature (1)..(25): SEQ ID NO: 1141; WAN024C5I; Start 181; Stop 205
gaagctaagaaggttcatcaaatca

SEQ ID NO: 284663 - DNA, 25 bp, Artificial
  probe
  misc_feature (1)..(25): SEQ ID NO: 1141; WAN024C5I; Start 175; Stop 199
gctaaggaagctaagaaggttcatc

SEQ ID NO: 284664 - DNA, 25 bp, Artificial
  probe
  misc_feature (1)..(25): SEQ ID NO: 1141; WAN024C5I; Start 933; Stop 957
tgcagatactaaagaaggaatcact

SEQ ID NO: 284665 - DNA, 25 bp, Artificial
  probe
  misc_feature (1)..(25): SEQ ID NO: 1141; WAN024C5I; Start 957; Stop 981
tgaggactttgtttggcgtgatatt

SEQ ID NO: 284666 - DNA, 25 bp, Artificial
  probe
  misc_feature (1)..(25): SEQ ID NO: 1143; WAN024FPW; Start 81; Stop 105
taaggacaatcaatggacagagttc

SEQ ID NO: 284667 - DNA, 25 bp, Artificial
  probe
  misc_feature (1)..(25): SEQ ID NO: 1143; WAN024FPW; Start 84; Stop 108
ggacaatcaatggacagagttctat

SEQ ID NO: 284668 - DNA, 25 bp, Artificial
  probe
  misc_feature (1)..(25): SEQ ID NO: 1143; WAN024FPW; Start 883; Stop 907
caatggatattagaccgcaatcaag

SEQ ID NO: 284669 - DNA, 25 bp, Artificial
  probe
  misc_feature (1)..(25): SEQ ID NO: 1143; WAN024FPW; Start 80; Stop 104
ttaaggacaatcaatggacagagtt

SEQ ID NO: 284670 - DNA, 25 bp, Artificial
  probe
  misc_feature (1)..(25): SEQ ID NO: 1143; WAN024FPW; Start 884; Stop 908
aatggatattagaccgcaatcaagt

SEQ ID NO: 284671 - DNA, 25 bp, Artificial
  probe
  misc_feature (1)..(25): SEQ ID NO: 1143; WAN024FPW; Start 882; Stop 906
tcaatggatattagaccgcaatcaa

SEQ ID NO: 284672 - DNA, 25 bp, Artificial
  probe
  misc_feature (1)..(25): SEQ ID NO: 1143; WAN024FPW; Start 881; Stop 905
ctcaatggatattagaccgcaatca

SEQ ID NO: 284673 - DNA, 25 bp, Artificial
  probe
  misc_feature (1)..(25): SEQ ID NO: 1143; WAN024FPW; Start 83; Stop 107
aggacaatcaatggacagagttcta

SEQ ID NO: 284674 - DNA, 25 bp, Artificial
  probe
  misc_feature (1)..(25): SEQ ID NO: 1143; WAN024FPW; Start 85; Stop 109
gacaatcaatggacagagttctatt

SEQ ID NO: 284675 - DNA, 25 bp, Artificial
  probe
  misc_feature (1)..(25): SEQ ID NO: 1143; WAN024FPW; Start 274; Stop 298
gattatccagacatcactattcgcc

SEQ ID NO: 284676 - DNA, 25 bp, Artificial
  probe
  misc_feature (1)..(25): SEQ ID NO: 1143; WAN024FPW; Start 275; Stop 299
attatccagacatcactattcgcca

SEQ ID NO: 284677 - DNA, 25 bp, Artificial
  probe
  misc_feature (1)..(25): SEQ ID NO: 1143; WAN024FPW; Start 82; Stop 106
aaggacaatcaatggacagagttct

SEQ ID NO: 284678 - DNA, 25 bp, Artificial
  probe
  misc_feature (1)..(25): SEQ ID NO: 1143; WAN024FPW; Start 880; Stop 904
gctcaatggatattagaccgcaatc

SEQ ID NO: 284679 - DNA, 25 bp, Artificial
  probe
  misc_feature (1)..(25): SEQ ID NO: 1143; WAN024FPW; Start 263; Stop 287
tacctgagagtgattatccagacat

SEQ ID NO: 284680 - DNA, 25 bp, Artificial
  probe
  misc_feature (1)..(25): SEQ ID NO: 1143; WAN024FPW; Start 262; Stop 286
ttacctgagagtgattatccagaca

SEQ ID NO: 284681 - DNA, 25 bp, Artificial
  probe
  misc_feature (1)..(25): SEQ ID NO: 1143; WAN024FPW; Start 276; Stop 300
ttatccagacatcactattcgccag

SEQ ID NO: 284682 - DNA, 25 bp, Artificial
  probe
  misc_feature (1)..(25): SEQ ID NO: 1143; WAN024FPW; Start 264; Stop 288
acctgagagtgattatccagacatc

SEQ ID NO: 284683 - DNA, 25 bp, Artificial
  probe
  misc_feature (1)..(25): SEQ ID NO: 1143; WAN024FPW; Start 90; Stop 114
tcaatggacagagttctatttaggc

SEQ ID NO: 284684 - DNA, 25 bp, Artificial
  probe
  misc_feature (1)..(25): SEQ ID NO: 1143; WAN024FPW; Start 79; Stop 103
tttaaggacaatcaatggacagagt

SEQ ID NO: 284685 - DNA, 25 bp, Artificial
  probe
  misc_feature (1)..(25): SEQ ID NO: 1143; WAN024FPW; Start 807; Stop 831
tatcatgtggaatcgtcagaagcaa

SEQ ID NO: 284686 - DNA, 25 bp, Artificial
  probe
  misc_feature (1)..(25): SEQ ID NO: 1143; WAN024FPW; Start 806; Stop 830
ttatcatgtggaatcgtcagaagca

SEQ ID NO: 284687 - DNA, 25 bp, Artificial
  probe
  misc_feature (1)..(25): SEQ ID NO: 1143; WAN024FPW; Start 556; Stop 580
gttccaacagttagaggtgtagagg

SEQ ID NO: 284688 - DNA, 25 bp, Artificial
  probe
  misc_feature (1)..(25): SEQ ID NO: 1143; WAN024FPW; Start 555; Stop 579
tgttccaacagttagaggtgtagag

SEQ ID NO: 284689 - DNA, 25 bp, Artificial
  probe
  misc_feature (1)..(25): SEQ ID NO: 1143; WAN024FPW; Start 410; Stop 434
cctttctttattcggatgtccattt

SEQ ID NO: 284690 - DNA, 25 bp, Artificial
  probe
  misc_feature (1)..(25): SEQ ID NO: 1143; WAN024FPW; Start 212; Stop 236
tcttgtgggaaataggtcaattaga

SEQ ID NO: 284691 - DNA, 25 bp, Artificial
  probe
  misc_feature (1)..(25): SEQ ID NO: 1143; WAN024FPW; Start 86; Stop 110
acaatcaatggacagagttctattt

SEQ ID NO: 284692 - DNA, 25 bp, Artificial
  probe
  misc_feature (1)..(25): SEQ ID NO: 1143; WAN024FPW; Start 879; Stop 903
agctcaatggatattagaccgcaat

SEQ ID NO: 284693 - DNA, 25 bp, Artificial
  probe
  misc_feature (1)..(25): SEQ ID NO: 1143; WAN024FPW; Start 811; Stop 835
atgtggaatcgtcagaagcaagaag

SEQ ID NO: 284694 - DNA, 25 bp, Artificial
  probe
  misc_feature (1)..(25): SEQ ID NO: 1143; WAN024FPW; Start 201; Stop 225
agtttgtaccttcttgtgggaaata

SEQ ID NO: 284695 - DNA, 25 bp, Artificial
  probe
  misc_feature (1)..(25): SEQ ID NO: 1143; WAN024FPW; Start 202; Stop 226
gtttgtaccttcttgtgggaaatag

SEQ ID NO: 284696 - DNA, 25 bp, Artificial
  probe
  misc_feature (1)..(25): SEQ ID NO: 1143; WAN024FPW; Start 801; Stop 825
tacctttatcatgtggaatcgtcag

SEQ ID NO: 284697 - DNA, 25 bp, Artificial
  probe
  misc_feature (1)..(25): SEQ ID NO: 1143; WAN024FPW; Start 759; Stop 783
gaatttggaaggagattggctagac

SEQ ID NO: 284698 - DNA, 25 bp, Artificial
  probe
  misc_feature (1)..(25): SEQ ID NO: 1143; WAN024FPW; Start 751; Stop 775
ttagcatggaatttggaaggagatt

SEQ ID NO: 284699 - DNA, 25 bp, Artificial
  probe
  misc_feature (1)..(25): SEQ ID NO: 1144; WAN024CC7; Start 988; Stop 1012
aatcatattgctccacatcacattg

SEQ ID NO: 284700 - DNA, 25 bp, Artificial
  probe
  misc_feature (1)..(25): SEQ ID NO: 1144; WAN024CC7; Start 375; Stop 399
tggaacagttgaaggaagtattgat

SEQ ID NO: 284701 - DNA, 25 bp, Artificial
  probe
  misc_feature (1)..(25): SEQ ID NO: 1144; WAN024CC7; Start 374; Stop 398
atggaacagttgaaggaagtattga

SEQ ID NO: 284702 - DNA, 25 bp, Artificial
  probe
  misc_feature (1)..(25): SEQ ID NO: 1144; WAN024CC7; Start 373; Stop 397
gatggaacagttgaaggaagtattg

SEQ ID NO: 284703 - DNA, 25 bp, Artificial
  probe
  misc_feature (1)..(25): SEQ ID NO: 1144; WAN024CC7; Start 372; Stop 396
tgatggaacagttgaaggaagtatt

SEQ ID NO: 284704 - DNA, 25 bp, Artificial
  probe
  misc_feature (1)..(25): SEQ ID NO: 1144; WAN024CC7; Start 371; Stop 395
atgatggaacagttgaaggaagtat

SEQ ID NO: 284705 - DNA, 25 bp, Artificial
  probe
  misc_feature (1)..(25): SEQ ID NO: 1144; WAN024CC7; Start 370; Stop 394
gatgatggaacagttgaaggaagta

SEQ ID NO: 284706 - DNA, 25 bp, Artificial
  probe
  misc_feature (1)..(25): SEQ ID NO: 1144; WAN024CC7; Start 542; Stop 566
caggtagtatgttaagtaggttggt

SEQ ID NO: 284707 - DNA, 25 bp, Artificial
  probe
  misc_feature (1)..(25): SEQ ID NO: 1144; WAN024CC7; Start 541; Stop 565
tcaggtagtatgttaagtaggttgg

SEQ ID NO: 284708 - DNA, 25 bp, Artificial
  probe
  misc_feature (1)..(25): SEQ ID NO: 1144; WAN024CC7; Start 538; Stop 562
gcttcaggtagtatgttaagtaggt

SEQ ID NO: 284709 - DNA, 25 bp, Artificial
  probe
  misc_feature (1)..(25): SEQ ID NO: 1144; WAN024CC7; Start 537; Stop 561
tgcttcaggtagtatgttaagtagg

SEQ ID NO: 284710 - DNA, 25 bp, Artificial
  probe
  misc_feature (1)..(25): SEQ ID NO: 1144; WAN024CC7; Start 368; Stop 392
aagatgatggaacagttgaaggaag

SEQ ID NO: 284711 - DNA, 25 bp, Artificial
  probe
  misc_feature (1)..(25): SEQ ID NO: 1144; WAN024CC7; Start 367; Stop 391
gaagatgatggaacagttgaaggaa

SEQ ID NO: 284712 - DNA, 25 bp, Artificial
  probe
  misc_feature (1)..(25): SEQ ID NO: 1144; WAN024CC7; Start 1034; Stop 1058
agcaattaggcaataatgacaactc

SEQ ID NO: 284713 - DNA, 25 bp, Artificial
  probe
  misc_feature (1)..(25): SEQ ID NO: 1144; WAN024CC7; Start 1438; Stop 1462
gataatgagagatacggaggtggtt

SEQ ID NO: 284714 - DNA, 25 bp, Artificial
  probe
  misc_feature (1)..(25): SEQ ID NO: 1144; WAN024CC7; Start 1436; Stop 1460
ttgataatgagagatacggaggtgg

SEQ ID NO: 284715 - DNA, 25 bp, Artificial
  probe
  misc_feature (1)..(25): SEQ ID NO: 1144; WAN024CC7; Start 1033; Stop 1057
aagcaattaggcaataatgacaact

SEQ ID NO: 284716 - DNA, 25 bp, Artificial
  probe
  misc_feature (1)..(25): SEQ ID NO: 1144; WAN024CC7; Start 1253; Stop 1277
cgaagttagtagttctaggtgaagg

SEQ ID NO: 284717 - DNA, 25 bp, Artificial
  probe
  misc_feature (1)..(25): SEQ ID NO: 1144; WAN024CC7; Start 1254; Stop 1278
gaagttagtagttctaggtgaaggc

SEQ ID NO: 284718 - DNA, 25 bp, Artificial
  probe
  misc_feature (1)..(25): SEQ ID NO: 1144; WAN024CC7; Start 376; Stop 400
ggaacagttgaaggaagtattgata

SEQ ID NO: 284719 - DNA, 25 bp, Artificial
  probe
  misc_feature (1)..(25): SEQ ID NO: 1144; WAN024CC7; Start 2022; Stop 2046
taacagtgctgaagaattacttgga

SEQ ID NO: 284720 - DNA, 25 bp, Artificial
  probe
  misc_feature (1)..(25): SEQ ID NO: 1144; WAN024CC7; Start 2026; Stop 2050
agtgctgaagaattacttggagata

SEQ ID NO: 284721 - DNA, 25 bp, Artificial
  probe
  misc_feature (1)..(25): SEQ ID NO: 1144; WAN024CC7; Start 1252; Stop 1276
gcgaagttagtagttctaggtgaag

SEQ ID NO: 284722 - DNA, 25 bp, Artificial
  probe
  misc_feature (1)..(25): SEQ ID NO: 1144; WAN024CC7; Start 2021; Stop 2045
ttaacagtgctgaagaattacttgg

SEQ ID NO: 284723 - DNA, 25 bp, Artificial
  probe
  misc_feature (1)..(25): SEQ ID NO: 1144; WAN024CC7; Start 1439; Stop 1463
ataatgagagatacggaggtggttg

SEQ ID NO: 284724 - DNA, 25 bp, Artificial
  probe
  misc_feature (1)..(25): SEQ ID NO: 1144; WAN024CC7; Start 532; Stop 556
ggtaatgcttcaggtagtatgttaa

SEQ ID NO: 284725 - DNA, 25 bp, Artificial
  probe
  misc_feature (1)..(25): SEQ ID NO: 1144; WAN024CC7; Start 2025; Stop 2049
cagtgctgaagaattacttggagat

SEQ ID NO: 284726 - DNA, 25 bp, Artificial
  probe
  misc_feature (1)..(25): SEQ ID NO: 1144; WAN024CC7; Start 963; Stop 987
tatcctagcaatagaagaaccagaa

SEQ ID NO: 284727 - DNA, 25 bp, Artificial
  probe
  misc_feature (1)..(25): SEQ ID NO: 1144; WAN024CC7; Start 342; Stop 366
acgaatcaggttagaatcttcttgg

SEQ ID NO: 284728 - DNA, 25 bp, Artificial
  probe
  misc_feature (1)..(25): SEQ ID NO: 1144; WAN024CC7; Start 369; Stop 393
agatgatggaacagttgaaggaagt

SEQ ID NO: 284729 - DNA, 25 bp, Artificial
  probe
  misc_feature (1)..(25): SEQ ID NO: 1144; WAN024CC7; Start 1251; Stop 1275
tgcgaagttagtagttctaggtgaa

SEQ ID NO: 284730 - DNA, 25 bp, Artificial
  probe
  misc_feature (1)..(25): SEQ ID NO: 1144; WAN024CC7; Start 1250; Stop 1274
ttgcgaagttagtagttctaggtga

SEQ ID NO: 284731 - DNA, 25 bp, Artificial
  probe
  misc_feature (1)..(25): SEQ ID NO: 1144; WAN024CC7; Start 543; Stop 567
aggtagtatgttaagtaggttggta

SEQ ID NO: 284732 - DNA, 25 bp, Artificial
  probe
  misc_feature (1)..(25): SEQ ID NO: 1145; WAN024DDI; Start 608; Stop 632
gtggtggtcatcatattacaagaga

SEQ ID NO: 284733 - DNA, 25 bp, Artificial
  probe
  misc_feature (1)..(25): SEQ ID NO: 1145; WAN024DDI; Start 609; Stop 633
tggtggtcatcatattacaagagaa

SEQ ID NO: 284734 - DNA, 25 bp, Artificial
  probe
  misc_feature (1)..(25): SEQ ID NO: 1145; WAN024DDI; Start 612; Stop 636
tggtcatcatattacaagagaaggt

SEQ ID NO: 284735 - DNA, 25 bp, Artificial
  probe
  misc_feature (1)..(25): SEQ ID NO: 1145; WAN024DDI; Start 607; Stop 631
ggtggtggtcatcatattacaagag

SEQ ID NO: 284736 - DNA, 25 bp, Artificial
  probe
  misc_feature (1)..(25): SEQ ID NO: 1145; WAN024DDI; Start 611; Stop 635
gtggtcatcatattacaagagaagg

SEQ ID NO: 284737 - DNA, 25 bp, Artificial
  probe
  misc_feature (1)..(25): SEQ ID NO: 1145; WAN024DDI; Start 610; Stop 634
ggtggtcatcatattacaagagaag

SEQ ID NO: 284738 - DNA, 25 bp, Artificial
  probe
  misc_feature (1)..(25): SEQ ID NO: 1145; WAN024DDI; Start 922; Stop 946
ggcgatgtgattggtgattatagtt

SEQ ID NO: 284739 - DNA, 25 bp, Artificial
  probe
  misc_feature (1)..(25): SEQ ID NO: 1145; WAN024DDI; Start 154; Stop 178
attagccagtatctatcaggtacga

SEQ ID NO: 284740 - DNA, 25 bp, Artificial
  probe
  misc_feature (1)..(25): SEQ ID NO: 1145; WAN024DDI; Start 153; Stop 177
gattagccagtatctatcaggtacg

SEQ ID NO: 284741 - DNA, 25 bp, Artificial
  probe
  misc_feature (1)..(25): SEQ ID NO: 1145; WAN024DDI; Start 613; Stop 637
ggtcatcatattacaagagaaggtt

SEQ ID NO: 284742 - DNA, 25 bp, Artificial
  probe
  misc_feature (1)..(25): SEQ ID NO: 1145; WAN024DDI; Start 155; Stop 179
ttagccagtatctatcaggtacgac

SEQ ID NO: 284743 - DNA, 25 bp, Artificial
  probe
  misc_feature (1)..(25): SEQ ID NO: 1145; WAN024DDI; Start 622; Stop 646
attacaagagaaggttacgatgtgg

SEQ ID NO: 284744 - DNA, 25 bp, Artificial
  probe
  misc_feature (1)..(25): SEQ ID NO: 1145; WAN024DDI; Start 1; Stop 25
atgaagttagaacaagtaccaacac

SEQ ID NO: 284745 - DNA, 25 bp, Artificial
  probe
  misc_feature (1)..(25): SEQ ID NO: 1145; WAN024DDI; Start 4; Stop 28
aagttagaacaagtaccaacaccag

SEQ ID NO: 284746 - DNA, 25 bp, Artificial
  probe
  misc_feature (1)..(25): SEQ ID NO: 1145; WAN024DDI; Start 3; Stop 27
gaagttagaacaagtaccaacacca

SEQ ID NO: 284747 - DNA, 25 bp, Artificial
  probe
  misc_feature (1)..(25): SEQ ID NO: 1145; WAN024DDI; Start 2; Stop 26
tgaagttagaacaagtaccaacacc

SEQ ID NO: 284748 - DNA, 25 bp, Artificial
  probe
  misc_feature (1)..(25): SEQ ID NO: 1145; WAN024DDI; Start 624; Stop 648
tacaagagaaggttacgatgtggat

SEQ ID NO: 284749 - DNA, 25 bp, Artificial
  probe
  misc_feature (1)..(25): SEQ ID NO: 1145; WAN024DDI; Start 623; Stop 647
ttacaagagaaggttacgatgtgga

SEQ ID NO: 284750 - DNA, 25 bp, Artificial
  probe
  misc_feature (1)..(25): SEQ ID NO: 1145; WAN024DDI; Start 621; Stop 645
tattacaagagaaggttacgatgtg

SEQ ID NO: 284751 - DNA, 25 bp, Artificial
  probe
  misc_feature (1)..(25): SEQ ID NO: 1145; WAN024DDI; Start 161; Stop 185
agtatctatcaggtacgacagctag

SEQ ID NO: 284752 - DNA, 25 bp, Artificial
  probe
  misc_feature (1)..(25): SEQ ID NO: 1145; WAN024DDI; Start 156; Stop 180
tagccagtatctatcaggtacgaca

SEQ ID NO: 284753 - DNA, 25 bp, Artificial
  probe
  misc_feature (1)..(25): SEQ ID NO: 1145; WAN024DDI; Start 163; Stop 187
tatctatcaggtacgacagctagtg

SEQ ID NO: 284754 - DNA, 25 bp, Artificial
  probe
  misc_feature (1)..(25): SEQ ID NO: 1145; WAN024DDI; Start 162; Stop 186
gtatctatcaggtacgacagctagt

SEQ ID NO: 284755 - DNA, 25 bp, Artificial
  probe
  misc_feature (1)..(25): SEQ ID NO: 1145; WAN024DDI; Start 160; Stop 184
cagtatctatcaggtacgacagcta

SEQ ID NO: 284756 - DNA, 25 bp, Artificial
  probe
  misc_feature (1)..(25): SEQ ID NO: 1145; WAN024DDI; Start 616; Stop 640
catcatattacaagagaaggttacg

SEQ ID NO: 284757 - DNA, 25 bp, Artificial
  probe
  misc_feature (1)..(25): SEQ ID NO: 1145; WAN024DDI; Start 625; Stop 649
acaagagaaggttacgatgtggatt

SEQ ID NO: 284758 - DNA, 25 bp, Artificial
  probe
  misc_feature (1)..(25): SEQ ID NO: 1145; WAN024DDI; Start 618; Stop 642
tcatattacaagagaaggttacgat

SEQ ID NO: 284759 - DNA, 25 bp, Artificial
  probe
  misc_feature (1)..(25): SEQ ID NO: 1145; WAN024DDI; Start 617; Stop 641
atcatattacaagagaaggttacga

SEQ ID NO: 284760 - DNA, 25 bp, Artificial
  probe
  misc_feature (1)..(25): SEQ ID NO: 1145; WAN024DDI; Start 619; Stop 643
catattacaagagaaggttacgatg

SEQ ID NO: 284761 - DNA, 25 bp, Artificial
  probe
  misc_feature (1)..(25): SEQ ID NO: 1145; WAN024DDI; Start 923; Stop 947
gcgatgtgattggtgattatagttt

SEQ ID NO: 284762 - DNA, 25 bp, Artificial
  probe
  misc_feature (1)..(25): SEQ ID NO: 1145; WAN024DDI; Start 523; Stop 547
ggagcagatgatttacaaacaactt

SEQ ID NO: 284763 - DNA, 25 bp, Artificial
  probe
  misc_feature (1)..(25): SEQ ID NO: 1145; WAN024DDI; Start 143; Stop 167
cttatcccttgattagccagtatct

SEQ ID NO: 284764 - DNA, 25 bp, Artificial
  probe
  misc_feature (1)..(25): SEQ ID NO: 1145; WAN024DDI; Start 815; Stop 839
atatgcctgatgtacttgagatgcc

SEQ ID NO: 284765 - DNA, 25 bp, Artificial
  probe
  misc_feature (1)..(25): SEQ ID NO: 1146; WAN024FDP; Start 232; Stop 256
gtgaccacactagtagccttatatt

SEQ ID NO: 284766 - DNA, 25 bp, Artificial
  probe
  misc_feature (1)..(25): SEQ ID NO: 1146; WAN024FDP; Start 231; Stop 255
ggtgaccacactagtagccttatat

SEQ ID NO: 284767 - DNA, 25 bp, Artificial
  probe
  misc_feature (1)..(25): SEQ ID NO: 1146; WAN024FDP; Start 233; Stop 257
tgaccacactagtagccttatattt

SEQ ID NO: 284768 - DNA, 25 bp, Artificial
  probe
  misc_feature (1)..(25): SEQ ID NO: 1146; WAN024FDP; Start 230; Stop 254
tggtgaccacactagtagccttata

SEQ ID NO: 284769 - DNA, 25 bp, Artificial
  probe
  misc_feature (1)..(25): SEQ ID NO: 1146; WAN024FDP; Start 27; Stop 51
agtccttttgatttggaatgtcatc

SEQ ID NO: 284770 - DNA, 25 bp, Artificial
  probe
  misc_feature (1)..(25): SEQ ID NO: 1146; WAN024FDP; Start 229; Stop 253
atggtgaccacactagtagccttat

SEQ ID NO: 284771 - DNA, 25 bp, Artificial
  probe
  misc_feature (1)..(25): SEQ ID NO: 1146; WAN024FDP; Start 25; Stop 49
ctagtccttttgatttggaatgtca

SEQ ID NO: 284772 - DNA, 25 bp, Artificial
  probe
  misc_feature (1)..(25): SEQ ID NO: 1146; WAN024FDP; Start 24; Stop 48
tctagtccttttgatttggaatgtc

SEQ ID NO: 284773 - DNA, 25 bp, Artificial
  probe
  misc_feature (1)..(25): SEQ ID NO: 1146; WAN024FDP; Start 23; Stop 47
ctctagtccttttgatttggaatgt

SEQ ID NO: 284774 - DNA, 25 bp, Artificial
  probe
  misc_feature (1)..(25): SEQ ID NO: 1146; WAN024FDP; Start 22; Stop 46
actctagtccttttgatttggaatg

SEQ ID NO: 284775 - DNA, 25 bp, Artificial
  probe
  misc_feature (1)..(25): SEQ ID NO: 1146; WAN024FDP; Start 184; Stop 208
cacaagactcgaaaatggtacttta

SEQ ID NO: 284776 - DNA, 25 bp, Artificial
  probe
  misc_feature (1)..(25): SEQ ID NO: 1146; WAN024FDP; Start 26; Stop 50
tagtccttttgatttggaatgtcat

SEQ ID NO: 284777 - DNA, 25 bp, Artificial
  probe
  misc_feature (1)..(25): SEQ ID NO: 1146; WAN024FDP; Start 185; Stop 209
acaagactcgaaaatggtactttaa

SEQ ID NO: 284778 - DNA, 25 bp, Artificial
  probe
  misc_feature (1)..(25): SEQ ID NO: 1146; WAN024FDP; Start 228; Stop 252
gatggtgaccacactagtagcctta

SEQ ID NO: 284779 - DNA, 25 bp, Artificial
  probe
  misc_feature (1)..(25): SEQ ID NO: 1146; WAN024FDP; Start 18; Stop 42
aattactctagtccttttgatttgg

SEQ ID NO: 284780 - DNA, 25 bp, Artificial
  probe
  misc_feature (1)..(25): SEQ ID NO: 1146; WAN024FDP; Start 20; Stop 44
ttactctagtccttttgatttggaa

SEQ ID NO: 284781 - DNA, 25 bp, Artificial
  probe
  misc_feature (1)..(25): SEQ ID NO: 1146; WAN024FDP; Start 28; Stop 52
gtccttttgatttggaatgtcatca

SEQ ID NO: 284782 - DNA, 25 bp, Artificial
  probe
  misc_feature (1)..(25): SEQ ID NO: 1146; WAN024FDP; Start 186; Stop 210
caagactcgaaaatggtactttaaa

SEQ ID NO: 284783 - DNA, 25 bp, Artificial
  probe
  misc_feature (1)..(25): SEQ ID NO: 1146; WAN024FDP; Start 29; Stop 53
tccttttgatttggaatgtcatcat

SEQ ID NO: 284784 - DNA, 25 bp, Artificial
  probe
  misc_feature (1)..(25): SEQ ID NO: 1146; WAN024FDP; Start 21; Stop 45
tactctagtccttttgatttggaat

SEQ ID NO: 284785 - DNA, 25 bp, Artificial
  probe
  misc_feature (1)..(25): SEQ ID NO: 1146; WAN024FDP; Start 19; Stop 43
attactctagtccttttgatttgga

SEQ ID NO: 284786 - DNA, 25 bp, Artificial
  probe
  misc_feature (1)..(25): SEQ ID NO: 1146; WAN024FDP; Start 30; Stop 54
ccttttgatttggaatgtcatcatt

SEQ ID NO: 284787 - DNA, 25 bp, Artificial
  probe
  misc_feature (1)..(25): SEQ ID NO: 1146; WAN024FDP; Start 183; Stop 207
ccacaagactcgaaaatggtacttt

SEQ ID NO: 284788 - DNA, 25 bp, Artificial
  probe
  misc_feature (1)..(25): SEQ ID NO: 1146; WAN024FDP; Start 37; Stop 61
atttggaatgtcatcattttcttga

SEQ ID NO: 284789 - DNA, 25 bp, Artificial
  probe
  misc_feature (1)..(25): SEQ ID NO: 1146; WAN024FDP; Start 187; Stop 211
aagactcgaaaatggtactttaaaa

SEQ ID NO: 284790 - DNA, 25 bp, Artificial
  probe
  misc_feature (1)..(25): SEQ ID NO: 1146; WAN024FDP; Start 36; Stop 60
gatttggaatgtcatcattttcttg

SEQ ID NO: 284791 - DNA, 25 bp, Artificial
  probe
  misc_feature (1)..(25): SEQ ID NO: 1146; WAN024FDP; Start 234; Stop 258
gaccacactagtagccttatatttt

SEQ ID NO: 284792 - DNA, 25 bp, Artificial
  probe
  misc_feature (1)..(25): SEQ ID NO: 1146; WAN024FDP; Start 244; Stop 268
gtagccttatattttatttggaggt

SEQ ID NO: 284793 - DNA, 25 bp, Artificial
  probe
  misc_feature (1)..(25): SEQ ID NO: 1146; WAN024FDP; Start 40; Stop 64
tggaatgtcatcattttcttgattt

SEQ ID NO: 284794 - DNA, 25 bp, Artificial
  probe
  misc_feature (1)..(25): SEQ ID NO: 1146; WAN024FDP; Start 39; Stop 63
ttggaatgtcatcattttcttgatt

SEQ ID NO: 284795 - DNA, 25 bp, Artificial
  probe
  misc_feature (1)..(25): SEQ ID NO: 1146; WAN024FDP; Start 38; Stop 62
tttggaatgtcatcattttcttgat

SEQ ID NO: 284796 - DNA, 25 bp, Artificial
  probe
  misc_feature (1)..(25): SEQ ID NO: 1146; WAN024FDP; Start 35; Stop 59
tgatttggaatgtcatcattttctt

SEQ ID NO: 284797 - DNA, 25 bp, Artificial
  probe
  misc_feature (1)..(25): SEQ ID NO: 1146; WAN024FDP; Start 34; Stop 58
ttgatttggaatgtcatcattttct

SEQ ID NO: 284798 - DNA, 25 bp, Artificial
  probe
  misc_feature (1)..(25): SEQ ID NO: 1147; WAN024FPI; Start 755; Stop 779
tctatcctgactactctatctacgc

SEQ ID NO: 284799 - DNA, 25 bp, Artificial
  probe
  misc_feature (1)..(25): SEQ ID NO: 1147; WAN024FPI; Start 756; Stop 780
ctatcctgactactctatctacgcc

SEQ ID NO: 284800 - DNA, 25 bp, Artificial
  probe
  misc_feature (1)..(25): SEQ ID NO: 1147; WAN024FPI; Start 753; Stop 777
gctctatcctgactactctatctac

SEQ ID NO: 284801 - DNA, 25 bp, Artificial
  probe
  misc_feature (1)..(25): SEQ ID NO: 1147; WAN024FPI; Start 754; Stop 778
ctctatcctgactactctatctacg

SEQ ID NO: 284802 - DNA, 25 bp, Artificial
  probe
  misc_feature (1)..(25): SEQ ID NO: 1147; WAN024FPI; Start 412; Stop 436
gctgagagtattgttgtcttgacta

SEQ ID NO: 284803 - DNA, 25 bp, Artificial
  probe
  misc_feature (1)..(25): SEQ ID NO: 1147; WAN024FPI; Start 462; Stop 486
gaatcgtcctaaggctcatattgaa

SEQ ID NO: 284804 - DNA, 25 bp, Artificial
  probe
  misc_feature (1)..(25): SEQ ID NO: 1147; WAN024FPI; Start 463; Stop 487
aatcgtcctaaggctcatattgaac

SEQ ID NO: 284805 - DNA, 25 bp, Artificial
  probe
  misc_feature (1)..(25): SEQ ID NO: 1147; WAN024FPI; Start 410; Stop 434
ttgctgagagtattgttgtcttgac

SEQ ID NO: 284806 - DNA, 25 bp, Artificial
  probe
  misc_feature (1)..(25): SEQ ID NO: 1147; WAN024FPI; Start 461; Stop 485
agaatcgtcctaaggctcatattga

SEQ ID NO: 284807 - DNA, 25 bp, Artificial
  probe
  misc_feature (1)..(25): SEQ ID NO: 1147; WAN024FPI; Start 460; Stop 484
gagaatcgtcctaaggctcatattg

SEQ ID NO: 284808 - DNA, 25 bp, Artificial
  probe
  misc_feature (1)..(25): SEQ ID NO: 1147; WAN024FPI; Start 459; Stop 483
agagaatcgtcctaaggctcatatt

SEQ ID NO: 284809 - DNA, 25 bp, Artificial
  probe
  misc_feature (1)..(25): SEQ ID NO: 1147; WAN024FPI; Start 458; Stop 482
aagagaatcgtcctaaggctcatat

SEQ ID NO: 284810 - DNA, 25 bp, Artificial
  probe
  misc_feature (1)..(25): SEQ ID NO: 1147; WAN024FPI; Start 464; Stop 488
atcgtcctaaggctcatattgaaca

SEQ ID NO: 284811 - DNA, 25 bp, Artificial
  probe
  misc_feature (1)..(25): SEQ ID NO: 1147; WAN024FPI; Start 266; Stop 290
tatcgtcaggaactggtctagtatc

SEQ ID NO: 284812 - DNA, 25 bp, Artificial
  probe
  misc_feature (1)..(25): SEQ ID NO: 1147; WAN024FPI; Start 413; Stop 437
ctgagagtattgttgtcttgactaa

SEQ ID NO: 284813 - DNA, 25 bp, Artificial
  probe
  misc_feature (1)..(25): SEQ ID NO: 1147; WAN024FPI; Start 465; Stop 489
tcgtcctaaggctcatattgaacaa

SEQ ID NO: 284814 - DNA, 25 bp, Artificial
  probe
  misc_feature (1)..(25): SEQ ID NO: 1147; WAN024FPI; Start 411; Stop 435
tgctgagagtattgttgtcttgact

SEQ ID NO: 284815 - DNA, 25 bp, Artificial
  probe
  misc_feature (1)..(25): SEQ ID NO: 1147; WAN024FPI; Start 1001; Stop 1025
ttattccagcagaagaattgtcaac

SEQ ID NO: 284816 - DNA, 25 bp, Artificial
  probe
  misc_feature (1)..(25): SEQ ID NO: 1147; WAN024FPI; Start 1000; Stop 1024
gttattccagcagaagaattgtcaa

SEQ ID NO: 284817 - DNA, 25 bp, Artificial
  probe
  misc_feature (1)..(25): SEQ ID NO: 1147; WAN024FPI; Start 996; Stop 1020
gagtgttattccagcagaagaattg

SEQ ID NO: 284818 - DNA, 25 bp, Artificial
  probe
  misc_feature (1)..(25): SEQ ID NO: 1147; WAN024FPI; Start 998; Stop 1022
gtgttattccagcagaagaattgtc

SEQ ID NO: 284819 - DNA, 25 bp, Artificial
  probe
  misc_feature (1)..(25): SEQ ID NO: 1147; WAN024FPI; Start 997; Stop 1021
agtgttattccagcagaagaattgt

SEQ ID NO: 284820 - DNA, 25 bp, Artificial
  probe
  misc_feature (1)..(25): SEQ ID NO: 1147; WAN024FPI; Start 1002; Stop 1026
tattccagcagaagaattgtcaaca

SEQ ID NO: 284821 - DNA, 25 bp, Artificial
  probe
  misc_feature (1)..(25): SEQ ID NO: 1147; WAN024FPI; Start 999; Stop 1023
tgttattccagcagaagaattgtca

SEQ ID NO: 284822 - DNA, 25 bp, Artificial
  probe
  misc_feature (1)..(25): SEQ ID NO: 1147; WAN024FPI; Start 752; Stop 776
agctctatcctgactactctatcta

SEQ ID NO: 284823 - DNA, 25 bp, Artificial
  probe
  misc_feature (1)..(25): SEQ ID NO: 1147; WAN024FPI; Start 863; Stop 887
actgtggaccctctgatattatttc

SEQ ID NO: 284824 - DNA, 25 bp, Artificial
  probe
  misc_feature (1)..(25): SEQ ID NO: 1147; WAN024FPI; Start 859; Stop 883
tgtaactgtggaccctctgatatta

SEQ ID NO: 284825 - DNA, 25 bp, Artificial
  probe
  misc_feature (1)..(25): SEQ ID NO: 1147; WAN024FPI; Start 848; Stop 872
tttcatttgattgtaactgtggacc

SEQ ID NO: 284826 - DNA, 25 bp, Artificial
  probe
  misc_feature (1)..(25): SEQ ID NO: 1147; WAN024FPI; Start 862; Stop 886
aactgtggaccctctgatattattt

SEQ ID NO: 284827 - DNA, 25 bp, Artificial
  probe
  misc_feature (1)..(25): SEQ ID NO: 1147; WAN024FPI; Start 678; Stop 702
attagaggagaaagtcagggaatac

SEQ ID NO: 284828 - DNA, 25 bp, Artificial
  probe
  misc_feature (1)..(25): SEQ ID NO: 1147; WAN024FPI; Start 860; Stop 884
gtaactgtggaccctctgatattat

SEQ ID NO: 284829 - DNA, 25 bp, Artificial
  probe
  misc_feature (1)..(25): SEQ ID NO: 1147; WAN024FPI; Start 689; Stop 713
aagtcagggaataccaattagaagg

SEQ ID NO: 284830 - DNA, 25 bp, Artificial
  probe
  misc_feature (1)..(25): SEQ ID NO: 1147; WAN024FPI; Start 684; Stop 708
ggagaaagtcagggaataccaatta

SEQ ID NO: 284831 - DNA, 25 bp, Artificial
  probe
  misc_feature (1)..(25): SEQ ID NO: 1148; WAN024FAJ; Start 44; Stop 68
cctatcttcattactgtgtggagtc

SEQ ID NO: 284832 - DNA, 25 bp, Artificial
  probe
  misc_feature (1)..(25): SEQ ID NO: 1148; WAN024FAJ; Start 403; Stop 427
agtatgagttacgattcagtcttgc

SEQ ID NO: 284833 - DNA, 25 bp, Artificial
  probe
  misc_feature (1)..(25): SEQ ID NO: 1148; WAN024FAJ; Start 45; Stop 69
ctatcttcattactgtgtggagtcg

SEQ ID NO: 284834 - DNA, 25 bp, Artificial
  probe
  misc_feature (1)..(25): SEQ ID NO: 1148; WAN024FAJ; Start 402; Stop 426
gagtatgagttacgattcagtcttg

SEQ ID NO: 284835 - DNA, 25 bp, Artificial
  probe
  misc_feature (1)..(25): SEQ ID NO: 1148; WAN024FAJ; Start 401; Stop 425
agagtatgagttacgattcagtctt

SEQ ID NO: 284836 - DNA, 25 bp, Artificial
  probe
  misc_feature (1)..(25): SEQ ID NO: 1148; WAN024FAJ; Start 400; Stop 424
aagagtatgagttacgattcagtct

SEQ ID NO: 284837 - DNA, 25 bp, Artificial
  probe
  misc_feature (1)..(25): SEQ ID NO: 1148; WAN024FAJ; Start 398; Stop 422
agaagagtatgagttacgattcagt

SEQ ID NO: 284838 - DNA, 25 bp, Artificial
  probe
  misc_feature (1)..(25): SEQ ID NO: 1148; WAN024FAJ; Start 42; Stop 66
agcctatcttcattactgtgtggag

SEQ ID NO: 284839 - DNA, 25 bp, Artificial
  probe
  misc_feature (1)..(25): SEQ ID NO: 1148; WAN024FAJ; Start 399; Stop 423
gaagagtatgagttacgattcagtc

SEQ ID NO: 284840 - DNA, 25 bp, Artificial
  probe
  misc_feature (1)..(25): SEQ ID NO: 1148; WAN024FAJ; Start 405; Stop 429
tatgagttacgattcagtcttgcct

SEQ ID NO: 284841 - DNA, 25 bp, Artificial
  probe
  misc_feature (1)..(25): SEQ ID NO: 1148; WAN024FAJ; Start 404; Stop 428
gtatgagttacgattcagtcttgcc

SEQ ID NO: 284842 - DNA, 25 bp, Artificial
  probe
  misc_feature (1)..(25): SEQ ID NO: 1148; WAN024FAJ; Start 158; Stop 182
gcaagtatcctaatatcgttagagc

SEQ ID NO: 284843 - DNA, 25 bp, Artificial
  probe
  misc_feature (1)..(25): SEQ ID NO: 1148; WAN024FAJ; Start 397; Stop 421
aagaagagtatgagttacgattcag

SEQ ID NO: 284844 - DNA, 25 bp, Artificial
  probe
  misc_feature (1)..(25): SEQ ID NO: 1148; WAN024FAJ; Start 170; Stop 194
atatcgttagagccatctatcagga

SEQ ID NO: 284845 - DNA, 25 bp, Artificial
  probe
  misc_feature (1)..(25): SEQ ID NO: 1148; WAN024FAJ; Start 171; Stop 195
tatcgttagagccatctatcaggaa

SEQ ID NO: 284846 - DNA, 25 bp, Artificial
  probe
  misc_feature (1)..(25): SEQ ID NO: 1148; WAN024FAJ; Start 169; Stop 193
aatatcgttagagccatctatcagg

SEQ ID NO: 284847 - DNA, 25 bp, Artificial
  probe
  misc_feature (1)..(25): SEQ ID NO: 1148; WAN024FAJ; Start 160; Stop 184
aagtatcctaatatcgttagagcca

SEQ ID NO: 284848 - DNA, 25 bp, Artificial
  probe
  misc_feature (1)..(25): SEQ ID NO: 1148; WAN024FAJ; Start 159; Stop 183
caagtatcctaatatcgttagagcc

SEQ ID NO: 284849 - DNA, 25 bp, Artificial
  probe
  misc_feature (1)..(25): SEQ ID NO: 1148; WAN024FAJ; Start 43; Stop 67
gcctatcttcattactgtgtggagt

SEQ ID NO: 284850 - DNA, 25 bp, Artificial
  probe
  misc_feature (1)..(25): SEQ ID NO: 1148; WAN024FAJ; Start 161; Stop 185
agtatcctaatatcgttagagccat

SEQ ID NO: 284851 - DNA, 25 bp, Artificial
  probe
  misc_feature (1)..(25): SEQ ID NO: 1148; WAN024FAJ; Start 162; Stop 186
gtatcctaatatcgttagagccatc

SEQ ID NO: 284852 - DNA, 25 bp, Artificial
  probe
  misc_feature (1)..(25): SEQ ID NO: 1148; WAN024FAJ; Start 163; Stop 187
tatcctaatatcgttagagccatct

SEQ ID NO: 284853 - DNA, 25 bp, Artificial
  probe
  misc_feature (1)..(25): SEQ ID NO: 1148; WAN024FAJ; Start 46; Stop 70
tatcttcattactgtgtggagtcgc

SEQ ID NO: 284854 - DNA, 25 bp, Artificial
  probe
  misc_feature (1)..(25): SEQ ID NO: 1148; WAN024FAJ; Start 41; Stop 65
cagcctatcttcattactgtgtgga

SEQ ID NO: 284855 - DNA, 25 bp, Artificial
  probe
  misc_feature (1)..(25): SEQ ID NO: 1148; WAN024FAJ; Start 30; Stop 54
ctataatgcagcagcctatcttcat

SEQ ID NO: 284856 - DNA, 25 bp, Artificial
  probe
  misc_feature (1)..(25): SEQ ID NO: 1148; WAN024FAJ; Start 165; Stop 189
tcctaatatcgttagagccatctat

SEQ ID NO: 284857 - DNA, 25 bp, Artificial
  probe
  misc_feature (1)..(25): SEQ ID NO: 1148; WAN024FAJ; Start 164; Stop 188
atcctaatatcgttagagccatcta

SEQ ID NO: 284858 - DNA, 25 bp, Artificial
  probe
  misc_feature (1)..(25): SEQ ID NO: 1148; WAN024FAJ; Start 166; Stop 190
cctaatatcgttagagccatctatc

SEQ ID NO: 284859 - DNA, 25 bp, Artificial
  probe
  misc_feature (1)..(25): SEQ ID NO: 1148; WAN024FAJ; Start 157; Stop 181
agcaagtatcctaatatcgttagag

SEQ ID NO: 284860 - DNA, 25 bp, Artificial
  probe
  misc_feature (1)..(25): SEQ ID NO: 1148; WAN024FAJ; Start 396; Stop 420
taagaagagtatgagttacgattca

SEQ ID NO: 284861 - DNA, 25 bp, Artificial
  probe
  misc_feature (1)..(25): SEQ ID NO: 1148; WAN024FAJ; Start 39; Stop 63
agcagcctatcttcattactgtgtg

SEQ ID NO: 284862 - DNA, 25 bp, Artificial
  probe
  misc_feature (1)..(25): SEQ ID NO: 1148; WAN024FAJ; Start 38; Stop 62
cagcagcctatcttcattactgtgt

SEQ ID NO: 284863 - DNA, 25 bp, Artificial
  probe
  misc_feature (1)..(25): SEQ ID NO: 1148; WAN024FAJ; Start 49; Stop 73
cttcattactgtgtggagtcgctag

SEQ ID NO: 284864 - DNA, 25 bp, Artificial
  probe
  misc_feature (1)..(25): SEQ ID NO: 1149; WAN024CFB; Start 212; Stop 236
acatacttcttgcgattatacaggt

SEQ ID NO: 284865 - DNA, 25 bp, Artificial
  probe
  misc_feature (1)..(25): SEQ ID NO: 1149; WAN024CFB; Start 23; Stop 47
ttggtggttctggattattcttgat

SEQ ID NO: 284866 - DNA, 25 bp, Artificial
  probe
  misc_feature (1)..(25): SEQ ID NO: 1149; WAN024CFB; Start 22; Stop 46
attggtggttctggattattcttga

SEQ ID NO: 284867 - DNA, 25 bp, Artificial
  probe
  misc_feature (1)..(25): SEQ ID NO: 1149; WAN024CFB; Start 21; Stop 45
gattggtggttctggattattcttg

SEQ ID NO: 284868 - DNA, 25 bp, Artificial
  probe
  misc_feature (1)..(25): SEQ ID NO: 1149; WAN024CFB; Start 20; Stop 44
tgattggtggttctggattattctt

SEQ ID NO: 284869 - DNA, 25 bp, Artificial
  probe
  misc_feature (1)..(25): SEQ ID NO: 1149; WAN024CFB; Start 28; Stop 52
ggttctggattattcttgatggtct

SEQ ID NO: 284870 - DNA, 25 bp, Artificial
  probe
  misc_feature (1)..(25): SEQ ID NO: 1149; WAN024CFB; Start 17; Stop 41
tagtgattggtggttctggattatt

SEQ ID NO: 284871 - DNA, 25 bp, Artificial
  probe
  misc_feature (1)..(25): SEQ ID NO: 1149; WAN024CFB; Start 16; Stop 40
ttagtgattggtggttctggattat

SEQ ID NO: 284872 - DNA, 25 bp, Artificial
  probe
  misc_feature (1)..(25): SEQ ID NO: 1149; WAN024CFB; Start 213; Stop 237
catacttcttgcgattatacaggtg

SEQ ID NO: 284873 - DNA, 25 bp, Artificial
  probe
  misc_feature (1)..(25): SEQ ID NO: 1149; WAN024CFB; Start 386; Stop 410
tagaatcggttatccagtcctacaa

SEQ ID NO: 284874 - DNA, 25 bp, Artificial
  probe
  misc_feature (1)..(25): SEQ ID NO: 1149; WAN024CFB; Start 385; Stop 409
ttagaatcggttatccagtcctaca

SEQ ID NO: 284875 - DNA, 25 bp, Artificial
  probe
  misc_feature (1)..(25): SEQ ID NO: 1149; WAN024CFB; Start 214; Stop 238
atacttcttgcgattatacaggtgg

SEQ ID NO: 284876 - DNA, 25 bp, Artificial
  probe
  misc_feature (1)..(25): SEQ ID NO: 1149; WAN024CFB; Start 27; Stop 51
tggttctggattattcttgatggtc

SEQ ID NO: 284877 - DNA, 25 bp, Artificial
  probe
  misc_feature (1)..(25): SEQ ID NO: 1149; WAN024CFB; Start 318; Stop 342
atccattaagcaaggtgtgaagtat

SEQ ID NO: 284878 - DNA, 25 bp, Artificial
  probe
  misc_feature (1)..(25): SEQ ID NO: 1149; WAN024CFB; Start 309; Stop 333
tacagaagaatccattaagcaaggt

SEQ ID NO: 284879 - DNA, 25 bp, Artificial
  probe
  misc_feature (1)..(25): SEQ ID NO: 1149; WAN024CFB; Start 858; Stop 882
taacgctggctcttatattactcat

SEQ ID NO: 284880 - DNA, 25 bp, Artificial
  probe
  misc_feature (1)..(25): SEQ ID NO: 1149; WAN024CFB; Start 319; Stop 343
tccattaagcaaggtgtgaagtatt

SEQ ID NO: 284881 - DNA, 25 bp, Artificial
  probe
  misc_feature (1)..(25): SEQ ID NO: 1149; WAN024CFB; Start 317; Stop 341
aatccattaagcaaggtgtgaagta

SEQ ID NO: 284882 - DNA, 25 bp, Artificial
  probe
  misc_feature (1)..(25): SEQ ID NO: 1149; WAN024CFB; Start 31; Stop 55
tctggattattcttgatggtcttct

SEQ ID NO: 284883 - DNA, 25 bp, Artificial
  probe
  misc_feature (1)..(25): SEQ ID NO: 1149; WAN024CFB; Start 26; Stop 50
gtggttctggattattcttgatggt

SEQ ID NO: 284884 - DNA, 25 bp, Artificial
  probe
  misc_feature (1)..(25): SEQ ID NO: 1149; WAN024CFB; Start 24; Stop 48
tggtggttctggattattcttgatg

SEQ ID NO: 284885 - DNA, 25 bp, Artificial
  probe
  misc_feature (1)..(25): SEQ ID NO: 1149; WAN024CFB; Start 19; Stop 43
gtgattggtggttctggattattct

SEQ ID NO: 284886 - DNA, 25 bp, Artificial
  probe
  misc_feature (1)..(25): SEQ ID NO: 1149; WAN024CFB; Start 18; Stop 42
agtgattggtggttctggattattc

SEQ ID NO: 284887 - DNA, 25 bp, Artificial
  probe
  misc_feature (1)..(25): SEQ ID NO: 1149; WAN024CFB; Start 391; Stop 415
tcggttatccagtcctacaattatg

SEQ ID NO: 284888 - DNA, 25 bp, Artificial
  probe
  misc_feature (1)..(25): SEQ ID NO: 1149; WAN024CFB; Start 848; Stop 872
attctacctataacgctggctctta

SEQ ID NO: 284889 - DNA, 25 bp, Artificial
  probe
  misc_feature (1)..(25): SEQ ID NO: 1149; WAN024CFB; Start 388; Stop 412
gaatcggttatccagtcctacaatt

SEQ ID NO: 284890 - DNA, 25 bp, Artificial
  probe
  misc_feature (1)..(25): SEQ ID NO: 1149; WAN024CFB; Start 387; Stop 411
agaatcggttatccagtcctacaat

SEQ ID NO: 284891 - DNA, 25 bp, Artificial
  probe
  misc_feature (1)..(25): SEQ ID NO: 1149; WAN024CFB; Start 211; Stop 235
aacatacttcttgcgattatacagg

SEQ ID NO: 284892 - DNA, 25 bp, Artificial
  probe
  misc_feature (1)..(25): SEQ ID NO: 1149; WAN024CFB; Start 32; Stop 56
ctggattattcttgatggtcttctc

SEQ ID NO: 284893 - DNA, 25 bp, Artificial
  probe
  misc_feature (1)..(25): SEQ ID NO: 1149; WAN024CFB; Start 186; Stop 210
agaatatggcgttgaagaatatgtc

SEQ ID NO: 284894 - DNA, 25 bp, Artificial
  probe
  misc_feature (1)..(25): SEQ ID NO: 1149; WAN024CFB; Start 389; Stop 413
aatcggttatccagtcctacaatta

SEQ ID NO: 284895 - DNA, 25 bp, Artificial
  probe
  misc_feature (1)..(25): SEQ ID NO: 1149; WAN024CFB; Start 314; Stop 338
aagaatccattaagcaaggtgtgaa

SEQ ID NO: 284896 - DNA, 25 bp, Artificial
  probe
  misc_feature (1)..(25): SEQ ID NO: 1149; WAN024CFB; Start 29; Stop 53
gttctggattattcttgatggtctt

SEQ ID NO: 284897 - DNA, 25 bp, Artificial
  probe
  misc_feature (1)..(25): SEQ ID NO: 1150; WAN024AUA; Start 360; Stop 384
taaagccaaagttgaacgactacta

SEQ ID NO: 284898 - DNA, 25 bp, Artificial
  probe
  misc_feature (1)..(25): SEQ ID NO: 1150; WAN024AUA; Start 359; Stop 383
ttaaagccaaagttgaacgactact

SEQ ID NO: 284899 - DNA, 25 bp, Artificial
  probe
  misc_feature (1)..(25): SEQ ID NO: 1150; WAN024AUA; Start 514; Stop 538
gaccaactgccgaatttatctgaaa

SEQ ID NO: 284900 - DNA, 25 bp, Artificial
  probe
  misc_feature (1)..(25): SEQ ID NO: 1150; WAN024AUA; Start 478; Stop 502
aatcaagaaatcgctgaccttcaat

SEQ ID NO: 284901 - DNA, 25 bp, Artificial
  probe
  misc_feature (1)..(25): SEQ ID NO: 1150; WAN024AUA; Start 479; Stop 503
atcaagaaatcgctgaccttcaatt

SEQ ID NO: 284902 - DNA, 25 bp, Artificial
  probe
  misc_feature (1)..(25): SEQ ID NO: 1150; WAN024AUA; Start 477; Stop 501
aaatcaagaaatcgctgaccttcaa

SEQ ID NO: 284903 - DNA, 25 bp, Artificial
  probe
  misc_feature (1)..(25): SEQ ID NO: 1150; WAN024AUA; Start 511; Stop 535
attgaccaactgccgaatttatctg

SEQ ID NO: 284904 - DNA, 25 bp, Artificial
  probe
  misc_feature (1)..(25): SEQ ID NO: 1150; WAN024AUA; Start 510; Stop 534
aattgaccaactgccgaatttatct

SEQ ID NO: 284905 - DNA, 25 bp, Artificial
  probe
  misc_feature (1)..(25): SEQ ID NO: 1150; WAN024AUA; Start 361; Stop 385
aaagccaaagttgaacgactactag

SEQ ID NO: 284906 - DNA, 25 bp, Artificial
  probe
  misc_feature (1)..(25): SEQ ID NO: 1150; WAN024AUA; Start 480; Stop 504
tcaagaaatcgctgaccttcaattt

SEQ ID NO: 284907 - DNA, 25 bp, Artificial
  probe
  misc_feature (1)..(25): SEQ ID NO: 1150; WAN024AUA; Start 358; Stop 382
tttaaagccaaagttgaacgactac

SEQ ID NO: 284908 - DNA, 25 bp, Artificial
  probe
  misc_feature (1)..(25): SEQ ID NO: 1150; WAN024AUA; Start 513; Stop 537
tgaccaactgccgaatttatctgaa

SEQ ID NO: 284909 - DNA, 25 bp, Artificial
  probe
  misc_feature (1)..(25): SEQ ID NO: 1150; WAN024AUA; Start 512; Stop 536
ttgaccaactgccgaatttatctga

SEQ ID NO: 284910 - DNA, 25 bp, Artificial
  probe
  misc_feature (1)..(25): SEQ ID NO: 1150; WAN024AUA; Start 367; Stop 391
aaagttgaacgactactagctgttt

SEQ ID NO: 284911 - DNA, 25 bp, Artificial
  probe
  misc_feature (1)..(25): SEQ ID NO: 1150; WAN024AUA; Start 396; Stop 420
taccaatcgtttccaactacagagc

SEQ ID NO: 284912 - DNA, 25 bp, Artificial
  probe
  misc_feature (1)..(25): SEQ ID NO: 1150; WAN024AUA; Start 366; Stop 390
caaagttgaacgactactagctgtt

SEQ ID NO: 284913 - DNA, 25 bp, Artificial
  probe
  misc_feature (1)..(25): SEQ ID NO: 1150; WAN024AUA; Start 217; Stop 241
cgtgcttggatagttgaggatgaaa

SEQ ID NO: 284914 - DNA, 25 bp, Artificial
  probe
  misc_feature (1)..(25): SEQ ID NO: 1150; WAN024AUA; Start 260; Stop 284
gacaaggagagaatgattgggcttt

SEQ ID NO: 284915 - DNA, 25 bp, Artificial
  probe
  misc_feature (1)..(25): SEQ ID NO: 1150; WAN024AUA; Start 261; Stop 285
acaaggagagaatgattgggctttg

SEQ ID NO: 284916 - DNA, 25 bp, Artificial
  probe
  misc_feature (1)..(25): SEQ ID NO: 1150; WAN024AUA; Start 216; Stop 240
ccgtgcttggatagttgaggatgaa

SEQ ID NO: 284917 - DNA, 25 bp, Artificial
  probe
  misc_feature (1)..(25): SEQ ID NO: 1150; WAN024AUA; Start 218; Stop 242
gtgcttggatagttgaggatgaaaa

SEQ ID NO: 284918 - DNA, 25 bp, Artificial
  probe
  misc_feature (1)..(25): SEQ ID NO: 1150; WAN024AUA; Start 470; Stop 494
ttcaagaaaatcaagaaatcgctga

SEQ ID NO: 284919 - DNA, 25 bp, Artificial
  probe
  misc_feature (1)..(25): SEQ ID NO: 1150; WAN024AUA; Start 471; Stop 495
tcaagaaaatcaagaaatcgctgac

SEQ ID NO: 284920 - DNA, 25 bp, Artificial
  probe
  misc_feature (1)..(25): SEQ ID NO: 1150; WAN024AUA; Start 452; Stop 476
agcttctcgatggacaatttcaaga

SEQ ID NO: 284921 - DNA, 25 bp, Artificial
  probe
  misc_feature (1)..(25): SEQ ID NO: 1150; WAN024AUA; Start 398; Stop 422
ccaatcgtttccaactacagagcaa

SEQ ID NO: 284922 - DNA, 25 bp, Artificial
  probe
  misc_feature (1)..(25): SEQ ID NO: 1150; WAN024AUA; Start 362; Stop 386
aagccaaagttgaacgactactagc

SEQ ID NO: 284923 - DNA, 25 bp, Artificial
  probe
  misc_feature (1)..(25): SEQ ID NO: 1150; WAN024AUA; Start 515; Stop 539
accaactgccgaatttatctgaaaa

SEQ ID NO: 284924 - DNA, 25 bp, Artificial
  probe
  misc_feature (1)..(25): SEQ ID NO: 1150; WAN024AUA; Start 253; Stop 277
gttaggggacaaggagagaatgatt

SEQ ID NO: 284925 - DNA, 25 bp, Artificial
  probe
  misc_feature (1)..(25): SEQ ID NO: 1150; WAN024AUA; Start 475; Stop 499
gaaaatcaagaaatcgctgaccttc

SEQ ID NO: 284926 - DNA, 25 bp, Artificial
  probe
  misc_feature (1)..(25): SEQ ID NO: 1150; WAN024AUA; Start 454; Stop 478
cttctcgatggacaatttcaagaaa

SEQ ID NO: 284927 - DNA, 25 bp, Artificial
  probe
  misc_feature (1)..(25): SEQ ID NO: 1150; WAN024AUA; Start 474; Stop 498
agaaaatcaagaaatcgctgacctt

SEQ ID NO: 284928 - DNA, 25 bp, Artificial
  probe
  misc_feature (1)..(25): SEQ ID NO: 1150; WAN024AUA; Start 473; Stop 497
aagaaaatcaagaaatcgctgacct

SEQ ID NO: 284929 - DNA, 25 bp, Artificial
  probe
  misc_feature (1)..(25): SEQ ID NO: 1150; WAN024AUA; Start 472; Stop 496
caagaaaatcaagaaatcgctgacc

SEQ ID NO: 284930 - DNA, 25 bp, Artificial
  probe
  misc_feature (1)..(25): SEQ ID NO: 1151; WAN024C4P; Start 1773; Stop 1797
attctatggctgtatggactggata

SEQ ID NO: 284931 - DNA, 25 bp, Artificial
  probe
  misc_feature (1)..(25): SEQ ID NO: 1151; WAN024C4P; Start 1772; Stop 1796
tattctatggctgtatggactggat

SEQ ID NO: 284932 - DNA, 25 bp, Artificial
  probe
  misc_feature (1)..(25): SEQ ID NO: 1151; WAN024C4P; Start 1900; Stop 1924
ttggacaatgcctgaaggattatat

SEQ ID NO: 284933 - DNA, 25 bp, Artificial
  probe
  misc_feature (1)..(25): SEQ ID NO: 1151; WAN024C4P; Start 1899; Stop 1923
attggacaatgcctgaaggattata

SEQ ID NO: 284934 - DNA, 25 bp, Artificial
  probe
  misc_feature (1)..(25): SEQ ID NO: 1151; WAN024C4P; Start 1771; Stop 1795
gtattctatggctgtatggactgga

SEQ ID NO: 284935 - DNA, 25 bp, Artificial
  probe
  misc_feature (1)..(25): SEQ ID NO: 1151; WAN024C4P; Start 1158; Stop 1182
tctatgactctactgcttctattgt

SEQ ID NO: 284936 - DNA, 25 bp, Artificial
  probe
  misc_feature (1)..(25): SEQ ID NO: 1151; WAN024C4P; Start 1709; Stop 1733
aagtatatcaagaacactggctacg

SEQ ID NO: 284937 - DNA, 25 bp, Artificial
  probe
  misc_feature (1)..(25): SEQ ID NO: 1151; WAN024C4P; Start 1901; Stop 1925
tggacaatgcctgaaggattatata

SEQ ID NO: 284938 - DNA, 25 bp, Artificial
  probe
  misc_feature (1)..(25): SEQ ID NO: 1151; WAN024C4P; Start 1898; Stop 1922
gattggacaatgcctgaaggattat

SEQ ID NO: 284939 - DNA, 25 bp, Artificial
  probe
  misc_feature (1)..(25): SEQ ID NO: 1151; WAN024C4P; Start 1902; Stop 1926
ggacaatgcctgaaggattatatag

SEQ ID NO: 284940 - DNA, 25 bp, Artificial
  probe
  misc_feature (1)..(25): SEQ ID NO: 1151; WAN024C4P; Start 1897; Stop 1921
agattggacaatgcctgaaggatta

SEQ ID NO: 284941 - DNA, 25 bp, Artificial
  probe
  misc_feature (1)..(25): SEQ ID NO: 1151; WAN024C4P; Start 1903; Stop 1927
gacaatgcctgaaggattatataga

SEQ ID NO: 284942 - DNA, 25 bp, Artificial
  probe
  misc_feature (1)..(25): SEQ ID NO: 1151; WAN024C4P; Start 1209; Stop 1233
gcactgatactccactctacaactg

SEQ ID NO: 284943 - DNA, 25 bp, Artificial
  probe
  misc_feature (1)..(25): SEQ ID NO: 1151; WAN024C4P; Start 1157; Stop 1181
gtctatgactctactgcttctattg

SEQ ID NO: 284944 - DNA, 25 bp, Artificial
  probe
  misc_feature (1)..(25): SEQ ID NO: 1151; WAN024C4P; Start 1774; Stop 1798
ttctatggctgtatggactggatac

SEQ ID NO: 284945 - DNA, 25 bp, Artificial
  probe
  misc_feature (1)..(25): SEQ ID NO: 1151; WAN024C4P; Start 1743; Stop 1767
atgaaatgtttgtgggttatactcg

SEQ ID NO: 284946 - DNA, 25 bp, Artificial
  probe
  misc_feature (1)..(25): SEQ ID NO: 1151; WAN024C4P; Start 1159; Stop 1183
ctatgactctactgcttctattgta

SEQ ID NO: 284947 - DNA, 25 bp, Artificial
  probe
  misc_feature (1)..(25): SEQ ID NO: 1151; WAN024C4P; Start 1786; Stop 1810
atggactggatactcaaatcgttta

SEQ ID NO: 284948 - DNA, 25 bp, Artificial
  probe
  misc_feature (1)..(25): SEQ ID NO: 1151; WAN024C4P; Start 1785; Stop 1809
tatggactggatactcaaatcgttt

SEQ ID NO: 284949 - DNA, 25 bp, Artificial
  probe
  misc_feature (1)..(25): SEQ ID NO: 1151; WAN024C4P; Start 1776; Stop 1800
ctatggctgtatggactggatactc

SEQ ID NO: 284950 - DNA, 25 bp, Artificial
  probe
  misc_feature (1)..(25): SEQ ID NO: 1151; WAN024C4P; Start 1744; Stop 1768
tgaaatgtttgtgggttatactcgt

SEQ ID NO: 284951 - DNA, 25 bp, Artificial
  probe
  misc_feature (1)..(25): SEQ ID NO: 1151; WAN024C4P; Start 1787; Stop 1811
tggactggatactcaaatcgtttaa

SEQ ID NO: 284952 - DNA, 25 bp, Artificial
  probe
  misc_feature (1)..(25): SEQ ID NO: 1151; WAN024C4P; Start 1904; Stop 1928
acaatgcctgaaggattatatagaa

SEQ ID NO: 284953 - DNA, 25 bp, Artificial
  probe
  misc_feature (1)..(25): SEQ ID NO: 1151; WAN024C4P; Start 1788; Stop 1812
ggactggatactcaaatcgtttaac

SEQ ID NO: 284954 - DNA, 25 bp, Artificial
  probe
  misc_feature (1)..(25): SEQ ID NO: 1151; WAN024C4P; Start 1747; Stop 1771
aatgtttgtgggttatactcgtaag

SEQ ID NO: 284955 - DNA, 25 bp, Artificial
  probe
  misc_feature (1)..(25): SEQ ID NO: 1151; WAN024C4P; Start 1745; Stop 1769
gaaatgtttgtgggttatactcgta

SEQ ID NO: 284956 - DNA, 25 bp, Artificial
  probe
  misc_feature (1)..(25): SEQ ID NO: 1151; WAN024C4P; Start 1160; Stop 1184
tatgactctactgcttctattgtac

SEQ ID NO: 284957 - DNA, 25 bp, Artificial
  probe
  misc_feature (1)..(25): SEQ ID NO: 1151; WAN024C4P; Start 1043; Stop 1067
cgtcatcaagcaagtaatgtttcat

SEQ ID NO: 284958 - DNA, 25 bp, Artificial
  probe
  misc_feature (1)..(25): SEQ ID NO: 1151; WAN024C4P; Start 1797; Stop 1821
actcaaatcgtttaactccaatcat

SEQ ID NO: 284959 - DNA, 25 bp, Artificial
  probe
  misc_feature (1)..(25): SEQ ID NO: 1151; WAN024C4P; Start 1041; Stop 1065
ctcgtcatcaagcaagtaatgtttc

SEQ ID NO: 284960 - DNA, 25 bp, Artificial
  probe
  misc_feature (1)..(25): SEQ ID NO: 1151; WAN024C4P; Start 1775; Stop 1799
tctatggctgtatggactggatact

SEQ ID NO: 284961 - DNA, 25 bp, Artificial
  probe
  misc_feature (1)..(25): SEQ ID NO: 1151; WAN024C4P; Start 1746; Stop 1770
aaatgtttgtgggttatactcgtaa

SEQ ID NO: 284962 - DNA, 25 bp, Artificial
  probe
  misc_feature (1)..(25): SEQ ID NO: 1151; WAN024C4P; Start 1790; Stop 1814
actggatactcaaatcgtttaactc

SEQ ID NO: 284963 - DNA, 25 bp, Artificial
  probe
  misc_feature (1)..(25): SEQ ID NO: 1152; WAN024F35; Start 551; Stop 575
attatggctttgttgtccgttatct

SEQ ID NO: 284964 - DNA, 25 bp, Artificial
  probe
  misc_feature (1)..(25): SEQ ID NO: 1152; WAN024F35; Start 550; Stop 574
gattatggctttgttgtccgttatc

SEQ ID NO: 284965 - DNA, 25 bp, Artificial
  probe
  misc_feature (1)..(25): SEQ ID NO: 1152; WAN024F35; Start 549; Stop 573
tgattatggctttgttgtccgttat

SEQ ID NO: 284966 - DNA, 25 bp, Artificial
  probe
  misc_feature (1)..(25): SEQ ID NO: 1152; WAN024F35; Start 674; Stop 698
tggaagaatactatggctttgaagg

SEQ ID NO: 284967 - DNA, 25 bp, Artificial
  probe
  misc_feature (1)..(25): SEQ ID NO: 1152; WAN024F35; Start 671; Stop 695
gtttggaagaatactatggctttga

SEQ ID NO: 284968 - DNA, 25 bp, Artificial
  probe
  misc_feature (1)..(25): SEQ ID NO: 1152; WAN024F35; Start 673; Stop 697
ttggaagaatactatggctttgaag

SEQ ID NO: 284969 - DNA, 25 bp, Artificial
  probe
  misc_feature (1)..(25): SEQ ID NO: 1152; WAN024F35; Start 552; Stop 576
ttatggctttgttgtccgttatctc

SEQ ID NO: 284970 - DNA, 25 bp, Artificial
  probe
  misc_feature (1)..(25): SEQ ID NO: 1152; WAN024F35; Start 668; Stop 692
tcagtttggaagaatactatggctt

SEQ ID NO: 284971 - DNA, 25 bp, Artificial
  probe
  misc_feature (1)..(25): SEQ ID NO: 1152; WAN024F35; Start 662; Stop 686
gtggtctcagtttggaagaatacta

SEQ ID NO: 284972 - DNA, 25 bp, Artificial
  probe
  misc_feature (1)..(25): SEQ ID NO: 1152; WAN024F35; Start 667; Stop 691
ctcagtttggaagaatactatggct

SEQ ID NO: 284973 - DNA, 25 bp, Artificial
  probe
  misc_feature (1)..(25): SEQ ID NO: 1152; WAN024F35; Start 666; Stop 690
tctcagtttggaagaatactatggc

SEQ ID NO: 284974 - DNA, 25 bp, Artificial
  probe
  misc_feature (1)..(25): SEQ ID NO: 1152; WAN024F35; Start 171; Stop 195
ggtcaataaaggtgattactacagc

SEQ ID NO: 284975 - DNA, 25 bp, Artificial
  probe
  misc_feature (1)..(25): SEQ ID NO: 1152; WAN024F35; Start 548; Stop 572
ctgattatggctttgttgtccgtta

SEQ ID NO: 284976 - DNA, 25 bp, Artificial
  probe
  misc_feature (1)..(25): SEQ ID NO: 1152; WAN024F35; Start 670; Stop 694
agtttggaagaatactatggctttg

SEQ ID NO: 284977 - DNA, 25 bp, Artificial
  probe
  misc_feature (1)..(25): SEQ ID NO: 1152; WAN024F35; Start 669; Stop 693
cagtttggaagaatactatggcttt

SEQ ID NO: 284978 - DNA, 25 bp, Artificial
  probe
  misc_feature (1)..(25): SEQ ID NO: 1152; WAN024F35; Start 672; Stop 696
tttggaagaatactatggctttgaa

SEQ ID NO: 284979 - DNA, 25 bp, Artificial
  probe
  misc_feature (1)..(25): SEQ ID NO: 1152; WAN024F35; Start 160; Stop 184
aaagcagaagtggtcaataaaggtg

SEQ ID NO: 284980 - DNA, 25 bp, Artificial
  probe
  misc_feature (1)..(25): SEQ ID NO: 1152; WAN024F35; Start 663; Stop 687
tggtctcagtttggaagaatactat

SEQ ID NO: 284981 - DNA, 25 bp, Artificial
  probe
  misc_feature (1)..(25): SEQ ID NO: 1152; WAN024F35; Start 665; Stop 689
gtctcagtttggaagaatactatgg

SEQ ID NO: 284982 - DNA, 25 bp, Artificial
  probe
  misc_feature (1)..(25): SEQ ID NO: 1152; WAN024F35; Start 664; Stop 688
ggtctcagtttggaagaatactatg

SEQ ID NO: 284983 - DNA, 25 bp, Artificial
  probe
  misc_feature (1)..(25): SEQ ID NO: 1152; WAN024F35; Start 172; Stop 196
gtcaataaaggtgattactacagca

SEQ ID NO: 284984 - DNA, 25 bp, Artificial
  probe
  misc_feature (1)..(25): SEQ ID NO: 1152; WAN024F35; Start 166; Stop 190
gaagtggtcaataaaggtgattact

SEQ ID NO: 284985 - DNA, 25 bp, Artificial
  probe
  misc_feature (1)..(25): SEQ ID NO: 1152; WAN024F35; Start 165; Stop 189
agaagtggtcaataaaggtgattac

SEQ ID NO: 284986 - DNA, 25 bp, Artificial
  probe
  misc_feature (1)..(25): SEQ ID NO: 1152; WAN024F35; Start 164; Stop 188
cagaagtggtcaataaaggtgatta

SEQ ID NO: 284987 - DNA, 25 bp, Artificial
  probe
  misc_feature (1)..(25): SEQ ID NO: 1152; WAN024F35; Start 675; Stop 699
ggaagaatactatggctttgaaggc

SEQ ID NO: 284988 - DNA, 25 bp, Artificial
  probe
  misc_feature (1)..(25): SEQ ID NO: 1152; WAN024F35; Start 661; Stop 685
agtggtctcagtttggaagaatact

SEQ ID NO: 284989 - DNA, 25 bp, Artificial
  probe
  misc_feature (1)..(25): SEQ ID NO: 1152; WAN024F35; Start 169; Stop 193
gtggtcaataaaggtgattactaca

SEQ ID NO: 284990 - DNA, 25 bp, Artificial
  probe
  misc_feature (1)..(25): SEQ ID NO: 1152; WAN024F35; Start 163; Stop 187
gcagaagtggtcaataaaggtgatt

SEQ ID NO: 284991 - DNA, 25 bp, Artificial
  probe
  misc_feature (1)..(25): SEQ ID NO: 1152; WAN024F35; Start 553; Stop 577
tatggctttgttgtccgttatctca

SEQ ID NO: 284992 - DNA, 25 bp, Artificial
  probe
  misc_feature (1)..(25): SEQ ID NO: 1152; WAN024F35; Start 676; Stop 700
gaagaatactatggctttgaaggcg

SEQ ID NO: 284993 - DNA, 25 bp, Artificial
  probe
  misc_feature (1)..(25): SEQ ID NO: 1152; WAN024F35; Start 170; Stop 194
tggtcaataaaggtgattactacag

SEQ ID NO: 284994 - DNA, 25 bp, Artificial
  probe
  misc_feature (1)..(25): SEQ ID NO: 1152; WAN024F35; Start 168; Stop 192
agtggtcaataaaggtgattactac

SEQ ID NO: 284995 - DNA, 25 bp, Artificial
  probe
  misc_feature (1)..(25): SEQ ID NO: 1152; WAN024F35; Start 479; Stop 503
atgtgattgggactgatggtgattt

SEQ ID NO: 284996 - DNA, 25 bp, Artificial
  probe
  misc_feature (1)..(25): SEQ ID NO: 1153; WAN024D9B; Start 21; Stop 45
tcaatatcagacatcagagcgttat

SEQ ID NO: 284997 - DNA, 25 bp, Artificial
  probe
  misc_feature (1)..(25): SEQ ID NO: 1153; WAN024D9B; Start 20; Stop 44
atcaatatcagacatcagagcgtta

SEQ ID NO: 284998 - DNA, 25 bp, Artificial
  probe
  misc_feature (1)..(25): SEQ ID NO: 1153; WAN024D9B; Start 18; Stop 42
taatcaatatcagacatcagagcgt

SEQ ID NO: 284999 - DNA, 25 bp, Artificial
  probe
  misc_feature (1)..(25): SEQ ID NO: 1153; WAN024D9B; Start 14; Stop 38
ccgctaatcaatatcagacatcaga

SEQ ID NO: 285000 - DNA, 25 bp, Artificial
  probe
  misc_feature (1)..(25): SEQ ID NO: 1153; WAN024D9B; Start 19; Stop 43
aatcaatatcagacatcagagcgtt

SEQ ID NO: 285001 - DNA, 25 bp, Artificial
  probe
  misc_feature (1)..(25): SEQ ID NO: 1153; WAN024D9B; Start 13; Stop 37
accgctaatcaatatcagacatcag

SEQ ID NO: 285002 - DNA, 25 bp, Artificial
  probe
  misc_feature (1)..(25): SEQ ID NO: 1153; WAN024D9B; Start 12; Stop 36
taccgctaatcaatatcagacatca

SEQ ID NO: 285003 - DNA, 25 bp, Artificial
  probe
  misc_feature (1)..(25): SEQ ID NO: 1153; WAN024D9B; Start 17; Stop 41
ctaatcaatatcagacatcagagcg

SEQ ID NO: 285004 - DNA, 25 bp, Artificial
  probe
  misc_feature (1)..(25): SEQ ID NO: 1153; WAN024D9B; Start 15; Stop 39
cgctaatcaatatcagacatcagag

SEQ ID NO: 285005 - DNA, 25 bp, Artificial
  probe
  misc_feature (1)..(25): SEQ ID NO: 1153; WAN024D9B; Start 22; Stop 46
caatatcagacatcagagcgttatt

SEQ ID NO: 285006 - DNA, 25 bp, Artificial
  probe
  misc_feature (1)..(25): SEQ ID NO: 1153; WAN024D9B; Start 11; Stop 35
ttaccgctaatcaatatcagacatc

SEQ ID NO: 285007 - DNA, 25 bp, Artificial
  probe
  misc_feature (1)..(25): SEQ ID NO: 1153; WAN024D9B; Start 28; Stop 52
cagacatcagagcgttattataagc

SEQ ID NO: 285008 - DNA, 25 bp, Artificial
  probe
  misc_feature (1)..(25): SEQ ID NO: 1153; WAN024D9B; Start 69; Stop 93
tgagagtgaacggtataagaatatg

SEQ ID NO: 285009 - DNA, 25 bp, Artificial
  probe
  misc_feature (1)..(25): SEQ ID NO: 1153; WAN024D9B; Start 70; Stop 94
gagagtgaacggtataagaatatga

SEQ ID NO: 285010 - DNA, 25 bp, Artificial
  probe
  misc_feature (1)..(25): SEQ ID NO: 1153; WAN024D9B; Start 10; Stop 34
attaccgctaatcaatatcagacat

SEQ ID NO: 285011 - DNA, 25 bp, Artificial
  probe
  misc_feature (1)..(25): SEQ ID NO: 1153; WAN024D9B; Start 24; Stop 48
atatcagacatcagagcgttattat

SEQ ID NO: 285012 - DNA, 25 bp, Artificial
  probe
  misc_feature (1)..(25): SEQ ID NO: 1153; WAN024D9B; Start 23; Stop 47
aatatcagacatcagagcgttatta

SEQ ID NO: 285013 - DNA, 25 bp, Artificial
  probe
  misc_feature (1)..(25): SEQ ID NO: 1153; WAN024D9B; Start 27; Stop 51
tcagacatcagagcgttattataag

SEQ ID NO: 285014 - DNA, 25 bp, Artificial
  probe
  misc_feature (1)..(25): SEQ ID NO: 1153; WAN024D9B; Start 71; Stop 95
agagtgaacggtataagaatatgaa

SEQ ID NO: 285015 - DNA, 25 bp, Artificial
  probe
  misc_feature (1)..(25): SEQ ID NO: 1153; WAN024D9B; Start 68; Stop 92
ttgagagtgaacggtataagaatat

SEQ ID NO: 285016 - DNA, 25 bp, Artificial
  probe
  misc_feature (1)..(25): SEQ ID NO: 1153; WAN024D9B; Start 25; Stop 49
tatcagacatcagagcgttattata

SEQ ID NO: 285017 - DNA, 25 bp, Artificial
  probe
  misc_feature (1)..(25): SEQ ID NO: 1153; WAN024D9B; Start 26; Stop 50
atcagacatcagagcgttattataa

SEQ ID NO: 285018 - DNA, 25 bp, Artificial
  probe
  misc_feature (1)..(25): SEQ ID NO: 1153; WAN024D9B; Start 88; Stop 112
aatatgaaactggaggttaaggtgg

SEQ ID NO: 285019 - DNA, 25 bp, Artificial
  probe
  misc_feature (1)..(25): SEQ ID NO: 1153; WAN024D9B; Start 79; Stop 103
cggtataagaatatgaaactggagg

SEQ ID NO: 285020 - DNA, 25 bp, Artificial
  probe
  misc_feature (1)..(25): SEQ ID NO: 1153; WAN024D9B; Start 87; Stop 111
gaatatgaaactggaggttaaggtg

SEQ ID NO: 285021 - DNA, 25 bp, Artificial
  probe
  misc_feature (1)..(25): SEQ ID NO: 1153; WAN024D9B; Start 86; Stop 110
agaatatgaaactggaggttaaggt

SEQ ID NO: 285022 - DNA, 25 bp, Artificial
  probe
  misc_feature (1)..(25): SEQ ID NO: 1153; WAN024D9B; Start 16; Stop 40
gctaatcaatatcagacatcagagc

SEQ ID NO: 285023 - DNA, 25 bp, Artificial
  probe
  misc_feature (1)..(25): SEQ ID NO: 1153; WAN024D9B; Start 89; Stop 113
atatgaaactggaggttaaggtggt

SEQ ID NO: 285024 - DNA, 25 bp, Artificial
  probe
  misc_feature (1)..(25): SEQ ID NO: 1153; WAN024D9B; Start 100; Stop 124
gaggttaaggtggtttactcagttt

SEQ ID NO: 285025 - DNA, 25 bp, Artificial
  probe
  misc_feature (1)..(25): SEQ ID NO: 1153; WAN024D9B; Start 78; Stop 102
acggtataagaatatgaaactggag

SEQ ID NO: 285026 - DNA, 25 bp, Artificial
  probe
  misc_feature (1)..(25): SEQ ID NO: 1153; WAN024D9B; Start 90; Stop 114
tatgaaactggaggttaaggtggtt

SEQ ID NO: 285027 - DNA, 25 bp, Artificial
  probe
  misc_feature (1)..(25): SEQ ID NO: 1153; WAN024D9B; Start 85; Stop 109
aagaatatgaaactggaggttaagg

SEQ ID NO: 285028 - DNA, 25 bp, Artificial
  probe
  misc_feature (1)..(25): SEQ ID NO: 1153; WAN024D9B; Start 66; Stop 90
atttgagagtgaacggtataagaat

SEQ ID NO: 285029 - DNA, 25 bp, Artificial
  probe
  misc_feature (1)..(25): SEQ ID NO: 1154; WAN024CR6; Start 398; Stop 422
gtgaacaatatcctctatctgctga

SEQ ID NO: 285030 - DNA, 25 bp, Artificial
  probe
  misc_feature (1)..(25): SEQ ID NO: 1154; WAN024CR6; Start 394; Stop 418
tacggtgaacaatatcctctatctg

SEQ ID NO: 285031 - DNA, 25 bp, Artificial
  probe
  misc_feature (1)..(25): SEQ ID NO: 1154; WAN024CR6; Start 399; Stop 423
tgaacaatatcctctatctgctgaa

SEQ ID NO: 285032 - DNA, 25 bp, Artificial
  probe
  misc_feature (1)..(25): SEQ ID NO: 1154; WAN024CR6; Start 397; Stop 421
ggtgaacaatatcctctatctgctg

SEQ ID NO: 285033 - DNA, 25 bp, Artificial
  probe
  misc_feature (1)..(25): SEQ ID NO: 1154; WAN024CR6; Start 831; Stop 855
tatggtaactggctggtatcaagat

SEQ ID NO: 285034 - DNA, 25 bp, Artificial
  probe
  misc_feature (1)..(25): SEQ ID NO: 1154; WAN024CR6; Start 393; Stop 417
atacggtgaacaatatcctctatct

SEQ ID NO: 285035 - DNA, 25 bp, Artificial
  probe
  misc_feature (1)..(25): SEQ ID NO: 1154; WAN024CR6; Start 830; Stop 854
ctatggtaactggctggtatcaaga

SEQ ID NO: 285036 - DNA, 25 bp, Artificial
  probe
  misc_feature (1)..(25): SEQ ID NO: 1154; WAN024CR6; Start 188; Stop 212
ttggtgatattggagagatggttgt

SEQ ID NO: 285037 - DNA, 25 bp, Artificial
  probe
  misc_feature (1)..(25): SEQ ID NO: 1154; WAN024CR6; Start 396; Stop 420
cggtgaacaatatcctctatctgct

SEQ ID NO: 285038 - DNA, 25 bp, Artificial
  probe
  misc_feature (1)..(25): SEQ ID NO: 1154; WAN024CR6; Start 189; Stop 213
tggtgatattggagagatggttgtc

SEQ ID NO: 285039 - DNA, 25 bp, Artificial
  probe
  misc_feature (1)..(25): SEQ ID NO: 1154; WAN024CR6; Start 631; Stop 655
ctagatgcttcaggtaagatgctta

SEQ ID NO: 285040 - DNA, 25 bp, Artificial
  probe
  misc_feature (1)..(25): SEQ ID NO: 1154; WAN024CR6; Start 395; Stop 419
acggtgaacaatatcctctatctgc

SEQ ID NO: 285041 - DNA, 25 bp, Artificial
  probe
  misc_feature (1)..(25): SEQ ID NO: 1154; WAN024CR6; Start 832; Stop 856
atggtaactggctggtatcaagatg

SEQ ID NO: 285042 - DNA, 25 bp, Artificial
  probe
  misc_feature (1)..(25): SEQ ID NO: 1154; WAN024CR6; Start 193; Stop 217
gatattggagagatggttgtcggtt

SEQ ID NO: 285043 - DNA, 25 bp, Artificial
  probe
  misc_feature (1)..(25): SEQ ID NO: 1154; WAN024CR6; Start 836; Stop 860
taactggctggtatcaagatggttc

SEQ ID NO: 285044 - DNA, 25 bp, Artificial
  probe
  misc_feature (1)..(25): SEQ ID NO: 1154; WAN024CR6; Start 194; Stop 218
atattggagagatggttgtcggttg

SEQ ID NO: 285045 - DNA, 25 bp, Artificial
  probe
  misc_feature (1)..(25): SEQ ID NO: 1154; WAN024CR6; Start 392; Stop 416
tatacggtgaacaatatcctctatc

SEQ ID NO: 285046 - DNA, 25 bp, Artificial
  probe
  misc_feature (1)..(25): SEQ ID NO: 1154; WAN024CR6; Start 835; Stop 859
gtaactggctggtatcaagatggtt

SEQ ID NO: 285047 - DNA, 25 bp, Artificial
  probe
  misc_feature (1)..(25): SEQ ID NO: 1154; WAN024CR6; Start 732; Stop 756
acgaggcaaatggtattacttagat

SEQ ID NO: 285048 - DNA, 25 bp, Artificial
  probe
  misc_feature (1)..(25): SEQ ID NO: 1154; WAN024CR6; Start 829; Stop 853
gctatggtaactggctggtatcaag

SEQ ID NO: 285049 - DNA, 25 bp, Artificial
  probe
  misc_feature (1)..(25): SEQ ID NO: 1154; WAN024CR6; Start 731; Stop 755
tacgaggcaaatggtattacttaga

SEQ ID NO: 285050 - DNA, 25 bp, Artificial
  probe
  misc_feature (1)..(25): SEQ ID NO: 1154; WAN024CR6; Start 215; Stop 239
gttggcaatacttagaaattcctgg

SEQ ID NO: 285051 - DNA, 25 bp, Artificial
  probe
  misc_feature (1)..(25): SEQ ID NO: 1154; WAN024CR6; Start 214; Stop 238
ggttggcaatacttagaaattcctg

SEQ ID NO: 285052 - DNA, 25 bp, Artificial
  probe
  misc_feature (1)..(25): SEQ ID NO: 1154; WAN024CR6; Start 187; Stop 211
tttggtgatattggagagatggttg

SEQ ID NO: 285053 - DNA, 25 bp, Artificial
  probe
  misc_feature (1)..(25): SEQ ID NO: 1154; WAN024CR6; Start 523; Stop 547
gatgattcttacaatccactaccaa

SEQ ID NO: 285054 - DNA, 25 bp, Artificial
  probe
  misc_feature (1)..(25): SEQ ID NO: 1154; WAN024CR6; Start 211; Stop 235
gtcggttggcaatacttagaaattc

SEQ ID NO: 285055 - DNA, 25 bp, Artificial
  probe
  misc_feature (1)..(25): SEQ ID NO: 1154; WAN024CR6; Start 216; Stop 240
ttggcaatacttagaaattcctgga

SEQ ID NO: 285056 - DNA, 25 bp, Artificial
  probe
  misc_feature (1)..(25): SEQ ID NO: 1154; WAN024CR6; Start 191; Stop 215
gtgatattggagagatggttgtcgg

SEQ ID NO: 285057 - DNA, 25 bp, Artificial
  probe
  misc_feature (1)..(25): SEQ ID NO: 1154; WAN024CR6; Start 190; Stop 214
ggtgatattggagagatggttgtcg

SEQ ID NO: 285058 - DNA, 25 bp, Artificial
  probe
  misc_feature (1)..(25): SEQ ID NO: 1154; WAN024CR6; Start 389; Stop 413
aagtatacggtgaacaatatcctct

SEQ ID NO: 285059 - DNA, 25 bp, Artificial
  probe
  misc_feature (1)..(25): SEQ ID NO: 1154; WAN024CR6; Start 592; Stop 616
attgacattgatagaagcaaacctg

SEQ ID NO: 285060 - DNA, 25 bp, Artificial
  probe
  misc_feature (1)..(25): SEQ ID NO: 1154; WAN024CR6; Start 210; Stop 234
tgtcggttggcaatacttagaaatt

SEQ ID NO: 285061 - DNA, 25 bp, Artificial
  probe
  misc_feature (1)..(25): SEQ ID NO: 1154; WAN024CR6; Start 841; Stop 865
ggctggtatcaagatggttcaactt

SEQ ID NO: 285062 - DNA, 25 bp, Artificial
  probe
  misc_feature (1)..(25): SEQ ID NO: 1155; WAN024CR5; Start 480; Stop 504
tttagagacaggttggctttatgat

SEQ ID NO: 285063 - DNA, 25 bp, Artificial
  probe
  misc_feature (1)..(25): SEQ ID NO: 1155; WAN024CR5; Start 479; Stop 503
ctttagagacaggttggctttatga

SEQ ID NO: 285064 - DNA, 25 bp, Artificial
  probe
  misc_feature (1)..(25): SEQ ID NO: 1155; WAN024CR5; Start 230; Stop 254
atatcccgtttccatctaaaggtag

SEQ ID NO: 285065 - DNA, 25 bp, Artificial
  probe
  misc_feature (1)..(25): SEQ ID NO: 1155; WAN024CR5; Start 302; Stop 326
agtcagagtggtactacttcgataa

SEQ ID NO: 285066 - DNA, 25 bp, Artificial
  probe
  misc_feature (1)..(25): SEQ ID NO: 1155; WAN024CR5; Start 232; Stop 256
atcccgtttccatctaaaggtagta

SEQ ID NO: 285067 - DNA, 25 bp, Artificial
  probe
  misc_feature (1)..(25): SEQ ID NO: 1155; WAN024CR5; Start 231; Stop 255
tatcccgtttccatctaaaggtagt

SEQ ID NO: 285068 - DNA, 25 bp, Artificial
  probe
  misc_feature (1)..(25): SEQ ID NO: 1155; WAN024CR5; Start 477; Stop 501
ttctttagagacaggttggctttat

SEQ ID NO: 285069 - DNA, 25 bp, Artificial
  probe
  misc_feature (1)..(25): SEQ ID NO: 1155; WAN024CR5; Start 476; Stop 500
attctttagagacaggttggcttta

SEQ ID NO: 285070 - DNA, 25 bp, Artificial
  probe
  misc_feature (1)..(25): SEQ ID NO: 1155; WAN024CR5; Start 270; Stop 294
cccaaatggtatcagattagaaggt

SEQ ID NO: 285071 - DNA, 25 bp, Artificial
  probe
  misc_feature (1)..(25): SEQ ID NO: 1155; WAN024CR5; Start 478; Stop 502
tctttagagacaggttggctttatg

SEQ ID NO: 285072 - DNA, 25 bp, Artificial
  probe
  misc_feature (1)..(25): SEQ ID NO: 1155; WAN024CR5; Start 472; Stop 496
aatcattctttagagacaggttggc

SEQ ID NO: 285073 - DNA, 25 bp, Artificial
  probe
  misc_feature (1)..(25): SEQ ID NO: 1155; WAN024CR5; Start 471; Stop 495
aaatcattctttagagacaggttgg

SEQ ID NO: 285074 - DNA, 25 bp, Artificial
  probe
  misc_feature (1)..(25): SEQ ID NO: 1155; WAN024CR5; Start 377; Stop 401
ctaaagacagtgttggaagaaagta

SEQ ID NO: 285075 - DNA, 25 bp, Artificial
  probe
  misc_feature (1)..(25): SEQ ID NO: 1155; WAN024CR5; Start 229; Stop 253
tatatcccgtttccatctaaaggta

SEQ ID NO: 285076 - DNA, 25 bp, Artificial
  probe
  misc_feature (1)..(25): SEQ ID NO: 1155; WAN024CR5; Start 376; Stop 400
actaaagacagtgttggaagaaagt

SEQ ID NO: 285077 - DNA, 25 bp, Artificial
  probe
  misc_feature (1)..(25): SEQ ID NO: 1155; WAN024CR5; Start 481; Stop 505
ttagagacaggttggctttatgatc

SEQ ID NO: 285078 - DNA, 25 bp, Artificial
  probe
  misc_feature (1)..(25): SEQ ID NO: 1155; WAN024CR5; Start 235; Stop 259
ccgtttccatctaaaggtagtacaa

SEQ ID NO: 285079 - DNA, 25 bp, Artificial
  probe
  misc_feature (1)..(25): SEQ ID NO: 1155; WAN024CR5; Start 475; Stop 499
cattctttagagacaggttggcttt

SEQ ID NO: 285080 - DNA, 25 bp, Artificial
  probe
  misc_feature (1)..(25): SEQ ID NO: 1155; WAN024CR5; Start 375; Stop 399
aactaaagacagtgttggaagaaag

SEQ ID NO: 285081 - DNA, 25 bp, Artificial
  probe
  misc_feature (1)..(25): SEQ ID NO: 1155; WAN024CR5; Start 224; Stop 248
ggcaatatatcccgtttccatctaa

SEQ ID NO: 285082 - DNA, 25 bp, Artificial
  probe
  misc_feature (1)..(25): SEQ ID NO: 1155; WAN024CR5; Start 374; Stop 398
aaactaaagacagtgttggaagaaa

SEQ ID NO: 285083 - DNA, 25 bp, Artificial
  probe
  misc_feature (1)..(25): SEQ ID NO: 1155; WAN024CR5; Start 156; Stop 180
ctactggcgagtgattgatggtaag

SEQ ID NO: 285084 - DNA, 25 bp, Artificial
  probe
  misc_feature (1)..(25): SEQ ID NO: 1155; WAN024CR5; Start 271; Stop 295
ccaaatggtatcagattagaaggtt

SEQ ID NO: 285085 - DNA, 25 bp, Artificial
  probe
  misc_feature (1)..(25): SEQ ID NO: 1155; WAN024CR5; Start 378; Stop 402
taaagacagtgttggaagaaagtac

SEQ ID NO: 285086 - DNA, 25 bp, Artificial
  probe
  misc_feature (1)..(25): SEQ ID NO: 1155; WAN024CR5; Start 228; Stop 252
atatatcccgtttccatctaaaggt

SEQ ID NO: 285087 - DNA, 25 bp, Artificial
  probe
  misc_feature (1)..(25): SEQ ID NO: 1155; WAN024CR5; Start 225; Stop 249
gcaatatatcccgtttccatctaaa

SEQ ID NO: 285088 - DNA, 25 bp, Artificial
  probe
  misc_feature (1)..(25): SEQ ID NO: 1155; WAN024CR5; Start 473; Stop 497
atcattctttagagacaggttggct

SEQ ID NO: 285089 - DNA, 25 bp, Artificial
  probe
  misc_feature (1)..(25): SEQ ID NO: 1155; WAN024CR5; Start 379; Stop 403
aaagacagtgttggaagaaagtacg

SEQ ID NO: 285090 - DNA, 25 bp, Artificial
  probe
  misc_feature (1)..(25): SEQ ID NO: 1155; WAN024CR5; Start 236; Stop 260
cgtttccatctaaaggtagtacaat

SEQ ID NO: 285091 - DNA, 25 bp, Artificial
  probe
  misc_feature (1)..(25): SEQ ID NO: 1155; WAN024CR5; Start 233; Stop 257
tcccgtttccatctaaaggtagtac

SEQ ID NO: 285092 - DNA, 25 bp, Artificial
  probe
  misc_feature (1)..(25): SEQ ID NO: 1155; WAN024CR5; Start 474; Stop 498
tcattctttagagacaggttggctt

SEQ ID NO: 285093 - DNA, 25 bp, Artificial
  probe
  misc_feature (1)..(25): SEQ ID NO: 1155; WAN024CR5; Start 159; Stop 183
ctggcgagtgattgatggtaagtac

SEQ ID NO: 285094 - DNA, 25 bp, Artificial
  probe
  misc_feature (1)..(25): SEQ ID NO: 1155; WAN024CR5; Start 526; Stop 550
gctaagacggaaattaatggagaaa

SEQ ID NO: 285095 - DNA, 25 bp, Artificial
  probe
  misc_feature (1)..(25): SEQ ID NO: 1156; WAN024F8E; Start 230; Stop 254
ggattgtcattgctcgttattatgg

SEQ ID NO: 285096 - DNA, 25 bp, Artificial
  probe
  misc_feature (1)..(25): SEQ ID NO: 1156; WAN024F8E; Start 756; Stop 780
aattgtatctatcggcagtgtgatt

SEQ ID NO: 285097 - DNA, 25 bp, Artificial
  probe
  misc_feature (1)..(25): SEQ ID NO: 1156; WAN024F8E; Start 531; Stop 555
ggttaatgtggttctggatctctat

SEQ ID NO: 285098 - DNA, 25 bp, Artificial
  probe
  misc_feature (1)..(25): SEQ ID NO: 1156; WAN024F8E; Start 530; Stop 554
tggttaatgtggttctggatctcta

SEQ ID NO: 285099 - DNA, 25 bp, Artificial
  probe
  misc_feature (1)..(25): SEQ ID NO: 1156; WAN024F8E; Start 100; Stop 124
ctctataacactgctgatgtcttga

SEQ ID NO: 285100 - DNA, 25 bp, Artificial
  probe
  misc_feature (1)..(25): SEQ ID NO: 1156; WAN024F8E; Start 101; Stop 125
tctataacactgctgatgtcttgat

SEQ ID NO: 285101 - DNA, 25 bp, Artificial
  probe
  misc_feature (1)..(25): SEQ ID NO: 1156; WAN024F8E; Start 104; Stop 128
ataacactgctgatgtcttgattgt

SEQ ID NO: 285102 - DNA, 25 bp, Artificial
  probe
  misc_feature (1)..(25): SEQ ID NO: 1156; WAN024F8E; Start 103; Stop 127
tataacactgctgatgtcttgattg

SEQ ID NO: 285103 - DNA, 25 bp, Artificial
  probe
  misc_feature (1)..(25): SEQ ID NO: 1156; WAN024F8E; Start 528; Stop 552
cttggttaatgtggttctggatctc

SEQ ID NO: 285104 - DNA, 25 bp, Artificial
  probe
  misc_feature (1)..(25): SEQ ID NO: 1156; WAN024F8E; Start 102; Stop 126
ctataacactgctgatgtcttgatt

SEQ ID NO: 285105 - DNA, 25 bp, Artificial
  probe
  misc_feature (1)..(25): SEQ ID NO: 1156; WAN024F8E; Start 529; Stop 553
ttggttaatgtggttctggatctct

SEQ ID NO: 285106 - DNA, 25 bp, Artificial
  probe
  misc_feature (1)..(25): SEQ ID NO: 1156; WAN024F8E; Start 532; Stop 556
gttaatgtggttctggatctctatt

SEQ ID NO: 285107 - DNA, 25 bp, Artificial
  probe
  misc_feature (1)..(25): SEQ ID NO: 1156; WAN024F8E; Start 99; Stop 123
gctctataacactgctgatgtcttg

SEQ ID NO: 285108 - DNA, 25 bp, Artificial
  probe
  misc_feature (1)..(25): SEQ ID NO: 1156; WAN024F8E; Start 1043; Stop 1067
gttcgacagatggttacttgataga

SEQ ID NO: 285109 - DNA, 25 bp, Artificial
  probe
  misc_feature (1)..(25): SEQ ID NO: 1156; WAN024F8E; Start 113; Stop 137
ctgatgtcttgattgttggacgatt

SEQ ID NO: 285110 - DNA, 25 bp, Artificial
  probe
  misc_feature (1)..(25): SEQ ID NO: 1156; WAN024F8E; Start 1044; Stop 1068
ttcgacagatggttacttgatagaa

SEQ ID NO: 285111 - DNA, 25 bp, Artificial
  probe
  misc_feature (1)..(25): SEQ ID NO: 1156; WAN024F8E; Start 1042; Stop 1066
agttcgacagatggttacttgatag

SEQ ID NO: 285112 - DNA, 25 bp, Artificial
  probe
  misc_feature (1)..(25): SEQ ID NO: 1156; WAN024F8E; Start 1040; Stop 1064
ctagttcgacagatggttacttgat

SEQ ID NO: 285113 - DNA, 25 bp, Artificial
  probe
  misc_feature (1)..(25): SEQ ID NO: 1156; WAN024F8E; Start 953; Stop 977
gaatcggcagtcgtttaagtatatc

SEQ ID NO: 285114 - DNA, 25 bp, Artificial
  probe
  misc_feature (1)..(25): SEQ ID NO: 1156; WAN024F8E; Start 757; Stop 781
attgtatctatcggcagtgtgattt

SEQ ID NO: 285115 - DNA, 25 bp, Artificial
  probe
  misc_feature (1)..(25): SEQ ID NO: 1156; WAN024F8E; Start 527; Stop 551
ccttggttaatgtggttctggatct

SEQ ID NO: 285116 - DNA, 25 bp, Artificial
  probe
  misc_feature (1)..(25): SEQ ID NO: 1156; WAN024F8E; Start 954; Stop 978
aatcggcagtcgtttaagtatatcc

SEQ ID NO: 285117 - DNA, 25 bp, Artificial
  probe
  misc_feature (1)..(25): SEQ ID NO: 1156; WAN024F8E; Start 859; Stop 883
cttcttcctatgaccgctatttctg

SEQ ID NO: 285118 - DNA, 25 bp, Artificial
  probe
  misc_feature (1)..(25): SEQ ID NO: 1156; WAN024F8E; Start 231; Stop 255
gattgtcattgctcgttattatggg

SEQ ID NO: 285119 - DNA, 25 bp, Artificial
  probe
  misc_feature (1)..(25): SEQ ID NO: 1156; WAN024F8E; Start 229; Stop 253
gggattgtcattgctcgttattatg

SEQ ID NO: 285120 - DNA, 25 bp, Artificial
  probe
  misc_feature (1)..(25): SEQ ID NO: 1156; WAN024F8E; Start 1041; Stop 1065
tagttcgacagatggttacttgata

SEQ ID NO: 285121 - DNA, 25 bp, Artificial
  probe
  misc_feature (1)..(25): SEQ ID NO: 1156; WAN024F8E; Start 602; Stop 626
ccattatttcgcaaggtttatcagc

SEQ ID NO: 285122 - DNA, 25 bp, Artificial
  probe
  misc_feature (1)..(25): SEQ ID NO: 1156; WAN024F8E; Start 964; Stop 988
cgtttaagtatatcctgggcagttt

SEQ ID NO: 285123 - DNA, 25 bp, Artificial
  probe
  misc_feature (1)..(25): SEQ ID NO: 1156; WAN024F8E; Start 845; Stop 869
ttatgacctttgcccttcttcctat

SEQ ID NO: 285124 - DNA, 25 bp, Artificial
  probe
  misc_feature (1)..(25): SEQ ID NO: 1156; WAN024F8E; Start 844; Stop 868
attatgacctttgcccttcttccta

SEQ ID NO: 285125 - DNA, 25 bp, Artificial
  probe
  misc_feature (1)..(25): SEQ ID NO: 1156; WAN024F8E; Start 415; Stop 439
atttctatgattgtgacctgtgtag

SEQ ID NO: 285126 - DNA, 25 bp, Artificial
  probe
  misc_feature (1)..(25): SEQ ID NO: 1156; WAN024F8E; Start 342; Stop 366
ctttcttggcttgtatcctctcttg

SEQ ID NO: 285127 - DNA, 25 bp, Artificial
  probe
  misc_feature (1)..(25): SEQ ID NO: 1156; WAN024F8E; Start 955; Stop 979
atcggcagtcgtttaagtatatcct

SEQ ID NO: 285128 - DNA, 25 bp, Artificial
  probe
  misc_feature (1)..(25): SEQ ID NO: 1157; WAN024CDA; Start 308; Stop 332
atagtatctgttatgccttcttgcc

SEQ ID NO: 285129 - DNA, 25 bp, Artificial
  probe
  misc_feature (1)..(25): SEQ ID NO: 1157; WAN024CDA; Start 608; Stop 632
cttatgacaatctgcctgaattagc

SEQ ID NO: 285130 - DNA, 25 bp, Artificial
  probe
  misc_feature (1)..(25): SEQ ID NO: 1157; WAN024CDA; Start 514; Stop 538
caacatccaaccagtgaattagaac

SEQ ID NO: 285131 - DNA, 25 bp, Artificial
  probe
  misc_feature (1)..(25): SEQ ID NO: 1157; WAN024CDA; Start 510; Stop 534
ttaccaacatccaaccagtgaatta

SEQ ID NO: 285132 - DNA, 25 bp, Artificial
  probe
  misc_feature (1)..(25): SEQ ID NO: 1157; WAN024CDA; Start 511; Stop 535
taccaacatccaaccagtgaattag

SEQ ID NO: 285133 - DNA, 25 bp, Artificial
  probe
  misc_feature (1)..(25): SEQ ID NO: 1157; WAN024CDA; Start 1177; Stop 1201
aacaatatccgtggaacttacaatg

SEQ ID NO: 285134 - DNA, 25 bp, Artificial
  probe
  misc_feature (1)..(25): SEQ ID NO: 1157; WAN024CDA; Start 292; Stop 316
agcagtgtcttgtcatatagtatct

SEQ ID NO: 285135 - DNA, 25 bp, Artificial
  probe
  misc_feature (1)..(25): SEQ ID NO: 1157; WAN024CDA; Start 609; Stop 633
ttatgacaatctgcctgaattagcc

SEQ ID NO: 285136 - DNA, 25 bp, Artificial
  probe
  misc_feature (1)..(25): SEQ ID NO: 1157; WAN024CDA; Start 513; Stop 537
ccaacatccaaccagtgaattagaa

SEQ ID NO: 285137 - DNA, 25 bp, Artificial
  probe
  misc_feature (1)..(25): SEQ ID NO: 1157; WAN024CDA; Start 309; Stop 333
tagtatctgttatgccttcttgcca

SEQ ID NO: 285138 - DNA, 25 bp, Artificial
  probe
  misc_feature (1)..(25): SEQ ID NO: 1157; WAN024CDA; Start 1180; Stop 1204
aatatccgtggaacttacaatgttg

SEQ ID NO: 285139 - DNA, 25 bp, Artificial
  probe
  misc_feature (1)..(25): SEQ ID NO: 1157; WAN024CDA; Start 1179; Stop 1203
caatatccgtggaacttacaatgtt

SEQ ID NO: 285140 - DNA, 25 bp, Artificial
  probe
  misc_feature (1)..(25): SEQ ID NO: 1157; WAN024CDA; Start 607; Stop 631
tcttatgacaatctgcctgaattag

SEQ ID NO: 285141 - DNA, 25 bp, Artificial
  probe
  misc_feature (1)..(25): SEQ ID NO: 1157; WAN024CDA; Start 606; Stop 630
ctcttatgacaatctgcctgaatta

SEQ ID NO: 285142 - DNA, 25 bp, Artificial
  probe
  misc_feature (1)..(25): SEQ ID NO: 1157; WAN024CDA; Start 1028; Stop 1052
ggattgattatgtacctgtgattgc

SEQ ID NO: 285143 - DNA, 25 bp, Artificial
  probe
  misc_feature (1)..(25): SEQ ID NO: 1157; WAN024CDA; Start 732; Stop 756
atgttacaagatgcctaaggttgaa

SEQ ID NO: 285144 - DNA, 25 bp, Artificial
  probe
  misc_feature (1)..(25): SEQ ID NO: 1157; WAN024CDA; Start 731; Stop 755
aatgttacaagatgcctaaggttga

SEQ ID NO: 285145 - DNA, 25 bp, Artificial
  probe
  misc_feature (1)..(25): SEQ ID NO: 1157; WAN024CDA; Start 515; Stop 539
aacatccaaccagtgaattagaact

SEQ ID NO: 285146 - DNA, 25 bp, Artificial
  probe
  misc_feature (1)..(25): SEQ ID NO: 1157; WAN024CDA; Start 1029; Stop 1053
gattgattatgtacctgtgattgcg

SEQ ID NO: 285147 - DNA, 25 bp, Artificial
  probe
  misc_feature (1)..(25): SEQ ID NO: 1157; WAN024CDA; Start 605; Stop 629
gctcttatgacaatctgcctgaatt

SEQ ID NO: 285148 - DNA, 25 bp, Artificial
  probe
  misc_feature (1)..(25): SEQ ID NO: 1157; WAN024CDA; Start 1004; Stop 1028
atgaattgattcgtaagttccaagg

SEQ ID NO: 285149 - DNA, 25 bp, Artificial
  probe
  misc_feature (1)..(25): SEQ ID NO: 1157; WAN024CDA; Start 307; Stop 331
tatagtatctgttatgccttcttgc

SEQ ID NO: 285150 - DNA, 25 bp, Artificial
  probe
  misc_feature (1)..(25): SEQ ID NO: 1157; WAN024CDA; Start 505; Stop 529
gatagttaccaacatccaaccagtg

SEQ ID NO: 285151 - DNA, 25 bp, Artificial
  probe
  misc_feature (1)..(25): SEQ ID NO: 1157; WAN024CDA; Start 1658; Stop 1682
aactctacgaagaactcttggtatc

SEQ ID NO: 285152 - DNA, 25 bp, Artificial
  probe
  misc_feature (1)..(25): SEQ ID NO: 1157; WAN024CDA; Start 1661; Stop 1685
tctacgaagaactcttggtatcaac

SEQ ID NO: 285153 - DNA, 25 bp, Artificial
  probe
  misc_feature (1)..(25): SEQ ID NO: 1157; WAN024CDA; Start 1660; Stop 1684
ctctacgaagaactcttggtatcaa

SEQ ID NO: 285154 - DNA, 25 bp, Artificial
  probe
  misc_feature (1)..(25): SEQ ID NO: 1157; WAN024CDA; Start 1659; Stop 1683
actctacgaagaactcttggtatca

SEQ ID NO: 285155 - DNA, 25 bp, Artificial
  probe
  misc_feature (1)..(25): SEQ ID NO: 1157; WAN024CDA; Start 1047; Stop 1071
gattgcggacattcaagactatgat

SEQ ID NO: 285156 - DNA, 25 bp, Artificial
  probe
  misc_feature (1)..(25): SEQ ID NO: 1157; WAN024CDA; Start 506; Stop 530
atagttaccaacatccaaccagtga

SEQ ID NO: 285157 - DNA, 25 bp, Artificial
  probe
  misc_feature (1)..(25): SEQ ID NO: 1157; WAN024CDA; Start 150; Stop 174
agcacctgttgactacattatctat

SEQ ID NO: 285158 - DNA, 25 bp, Artificial
  probe
  misc_feature (1)..(25): SEQ ID NO: 1157; WAN024CDA; Start 1178; Stop 1202
acaatatccgtggaacttacaatgt

SEQ ID NO: 285159 - DNA, 25 bp, Artificial
  probe
  misc_feature (1)..(25): SEQ ID NO: 1157; WAN024CDA; Start 149; Stop 173
cagcacctgttgactacattatcta

SEQ ID NO: 285160 - DNA, 25 bp, Artificial
  probe
  misc_feature (1)..(25): SEQ ID NO: 1157; WAN024CDA; Start 680; Stop 704
atccgtcagaatatgagcgtatctt

SEQ ID NO: 285161 - DNA, 25 bp, Artificial
  probe
  misc_feature (1)..(25): SEQ ID NO: 1158; WAN024DAD; Start 239; Stop 263
aatcggctgaattgatggataagat

SEQ ID NO: 285162 - DNA, 25 bp, Artificial
  probe
  misc_feature (1)..(25): SEQ ID NO: 1158; WAN024DAD; Start 242; Stop 266
cggctgaattgatggataagatgat

SEQ ID NO: 285163 - DNA, 25 bp, Artificial
  probe
  misc_feature (1)..(25): SEQ ID NO: 1158; WAN024DAD; Start 240; Stop 264
atcggctgaattgatggataagatg

SEQ ID NO: 285164 - DNA, 25 bp, Artificial
  probe
  misc_feature (1)..(25): SEQ ID NO: 1158; WAN024DAD; Start 238; Stop 262
gaatcggctgaattgatggataaga

SEQ ID NO: 285165 - DNA, 25 bp, Artificial
  probe
  misc_feature (1)..(25): SEQ ID NO: 1158; WAN024DAD; Start 243; Stop 267
ggctgaattgatggataagatgatc

SEQ ID NO: 285166 - DNA, 25 bp, Artificial
  probe
  misc_feature (1)..(25): SEQ ID NO: 1158; WAN024DAD; Start 241; Stop 265
tcggctgaattgatggataagatga

SEQ ID NO: 285167 - DNA, 25 bp, Artificial
  probe
  misc_feature (1)..(25): SEQ ID NO: 1158; WAN024DAD; Start 237; Stop 261
cgaatcggctgaattgatggataag

SEQ ID NO: 285168 - DNA, 25 bp, Artificial
  probe
  misc_feature (1)..(25): SEQ ID NO: 1158; WAN024DAD; Start 227; Stop 251
aagacaatatcgaatcggctgaatt

SEQ ID NO: 285169 - DNA, 25 bp, Artificial
  probe
  misc_feature (1)..(25): SEQ ID NO: 1158; WAN024DAD; Start 264; Stop 288
gatcaatctccaagttattccagga

SEQ ID NO: 285170 - DNA, 25 bp, Artificial
  probe
  misc_feature (1)..(25): SEQ ID NO: 1158; WAN024DAD; Start 218; Stop 242
aactggctgaagacaatatcgaatc

SEQ ID NO: 285171 - DNA, 25 bp, Artificial
  probe
  misc_feature (1)..(25): SEQ ID NO: 1158; WAN024DAD; Start 226; Stop 250
gaagacaatatcgaatcggctgaat

SEQ ID NO: 285172 - DNA, 25 bp, Artificial
  probe
  misc_feature (1)..(25): SEQ ID NO: 1158; WAN024DAD; Start 78; Stop 102
agaacatttgaaagaagcaggtatc

SEQ ID NO: 285173 - DNA, 25 bp, Artificial
  probe
  misc_feature (1)..(25): SEQ ID NO: 1158; WAN024DAD; Start 217; Stop 241
caactggctgaagacaatatcgaat

SEQ ID NO: 285174 - DNA, 25 bp, Artificial
  probe
  misc_feature (1)..(25): SEQ ID NO: 1158; WAN024DAD; Start 76; Stop 100
gtagaacatttgaaagaagcaggta

SEQ ID NO: 285175 - DNA, 25 bp, Artificial
  probe
  misc_feature (1)..(25): SEQ ID NO: 1158; WAN024DAD; Start 30; Stop 54
tagaagattggtgacagattatcaa

SEQ ID NO: 285176 - DNA, 25 bp, Artificial
  probe
  misc_feature (1)..(25): SEQ ID NO: 1158; WAN024DAD; Start 29; Stop 53
ttagaagattggtgacagattatca

SEQ ID NO: 285177 - DNA, 25 bp, Artificial
  probe
  misc_feature (1)..(25): SEQ ID NO: 1158; WAN024DAD; Start 265; Stop 289
atcaatctccaagttattccaggaa

SEQ ID NO: 285178 - DNA, 25 bp, Artificial
  probe
  misc_feature (1)..(25): SEQ ID NO: 1158; WAN024DAD; Start 232; Stop 256
aatatcgaatcggctgaattgatgg

SEQ ID NO: 285179 - DNA, 25 bp, Artificial
  probe
  misc_feature (1)..(25): SEQ ID NO: 1158; WAN024DAD; Start 397; Stop 421
gcagaggaaatctttgaacaagtaa

SEQ ID NO: 285180 - DNA, 25 bp, Artificial
  probe
  misc_feature (1)..(25): SEQ ID NO: 1158; WAN024DAD; Start 396; Stop 420
agcagaggaaatctttgaacaagta

SEQ ID NO: 285181 - DNA, 25 bp, Artificial
  probe
  misc_feature (1)..(25): SEQ ID NO: 1158; WAN024DAD; Start 395; Stop 419
tagcagaggaaatctttgaacaagt

SEQ ID NO: 285182 - DNA, 25 bp, Artificial
  probe
  misc_feature (1)..(25): SEQ ID NO: 1158; WAN024DAD; Start 157; Stop 181
attcctttgagagacaacacctatg

SEQ ID NO: 285183 - DNA, 25 bp, Artificial
  probe
  misc_feature (1)..(25): SEQ ID NO: 1158; WAN024DAD; Start 156; Stop 180
aattcctttgagagacaacacctat

SEQ ID NO: 285184 - DNA, 25 bp, Artificial
  probe
  misc_feature (1)..(25): SEQ ID NO: 1158; WAN024DAD; Start 155; Stop 179
aaattcctttgagagacaacaccta

SEQ ID NO: 285185 - DNA, 25 bp, Artificial
  probe
  misc_feature (1)..(25): SEQ ID NO: 1158; WAN024DAD; Start 80; Stop 104
aacatttgaaagaagcaggtatcac

SEQ ID NO: 285186 - DNA, 25 bp, Artificial
  probe
  misc_feature (1)..(25): SEQ ID NO: 1158; WAN024DAD; Start 79; Stop 103
gaacatttgaaagaagcaggtatca

SEQ ID NO: 285187 - DNA, 25 bp, Artificial
  probe
  misc_feature (1)..(25): SEQ ID NO: 1158; WAN024DAD; Start 394; Stop 418
ctagcagaggaaatctttgaacaag

SEQ ID NO: 285188 - DNA, 25 bp, Artificial
  probe
  misc_feature (1)..(25): SEQ ID NO: 1158; WAN024DAD; Start 393; Stop 417
tctagcagaggaaatctttgaacaa

SEQ ID NO: 285189 - DNA, 25 bp, Artificial
  probe
  misc_feature (1)..(25): SEQ ID NO: 1158; WAN024DAD; Start 390; Stop 414
aagtctagcagaggaaatctttgaa

SEQ ID NO: 285190 - DNA, 25 bp, Artificial
  probe
  misc_feature (1)..(25): SEQ ID NO: 1158; WAN024DAD; Start 77; Stop 101
tagaacatttgaaagaagcaggtat

SEQ ID NO: 285191 - DNA, 25 bp, Artificial
  probe
  misc_feature (1)..(25): SEQ ID NO: 1158; WAN024DAD; Start 389; Stop 413
gaagtctagcagaggaaatctttga

SEQ ID NO: 285192 - DNA, 25 bp, Artificial
  probe
  misc_feature (1)..(25): SEQ ID NO: 1158; WAN024DAD; Start 81; Stop 105
acatttgaaagaagcaggtatcact

SEQ ID NO: 285193 - DNA, 25 bp, Artificial
  probe
  misc_feature (1)..(25): SEQ ID NO: 1158; WAN024DAD; Start 391; Stop 415
agtctagcagaggaaatctttgaac

SEQ ID NO: 285194 - DNA, 25 bp, Artificial
  probe
  misc_feature (1)..(25): SEQ ID NO: 1159; WAN024FX5; Start 172; Stop 196
ggacagtttgatgagttggtaagta

SEQ ID NO: 285195 - DNA, 25 bp, Artificial
  probe
  misc_feature (1)..(25): SEQ ID NO: 1159; WAN024FX5; Start 169; Stop 193
aaaggacagtttgatgagttggtaa

SEQ ID NO: 285196 - DNA, 25 bp, Artificial
  probe
  misc_feature (1)..(25): SEQ ID NO: 1159; WAN024FX5; Start 170; Stop 194
aaggacagtttgatgagttggtaag

SEQ ID NO: 285197 - DNA, 25 bp, Artificial
  probe
  misc_feature (1)..(25): SEQ ID NO: 1159; WAN024FX5; Start 173; Stop 197
gacagtttgatgagttggtaagtaa

SEQ ID NO: 285198 - DNA, 25 bp, Artificial
  probe
  misc_feature (1)..(25): SEQ ID NO: 1159; WAN024FX5; Start 337; Stop 361
agtgtagtggagataactgactatt

SEQ ID NO: 285199 - DNA, 25 bp, Artificial
  probe
  misc_feature (1)..(25): SEQ ID NO: 1159; WAN024FX5; Start 336; Stop 360
aagtgtagtggagataactgactat

SEQ ID NO: 285200 - DNA, 25 bp, Artificial
  probe
  misc_feature (1)..(25): SEQ ID NO: 1159; WAN024FX5; Start 220; Stop 244
caattagacttgttgcagcagtata

SEQ ID NO: 285201 - DNA, 25 bp, Artificial
  probe
  misc_feature (1)..(25): SEQ ID NO: 1159; WAN024FX5; Start 365; Stop 389
ttgaatggcaagacaatttagaagc

SEQ ID NO: 285202 - DNA, 25 bp, Artificial
  probe
  misc_feature (1)..(25): SEQ ID NO: 1159; WAN024FX5; Start 174; Stop 198
acagtttgatgagttggtaagtaat

SEQ ID NO: 285203 - DNA, 25 bp, Artificial
  probe
  misc_feature (1)..(25): SEQ ID NO: 1159; WAN024FX5; Start 382; Stop 406
ttagaagctggagcggagaattatc

SEQ ID NO: 285204 - DNA, 25 bp, Artificial
  probe
  misc_feature (1)..(25): SEQ ID NO: 1159; WAN024FX5; Start 221; Stop 245
aattagacttgttgcagcagtataa

SEQ ID NO: 285205 - DNA, 25 bp, Artificial
  probe
  misc_feature (1)..(25): SEQ ID NO: 1159; WAN024FX5; Start 171; Stop 195
aggacagtttgatgagttggtaagt

SEQ ID NO: 285206 - DNA, 25 bp, Artificial
  probe
  misc_feature (1)..(25): SEQ ID NO: 1159; WAN024FX5; Start 364; Stop 388
tttgaatggcaagacaatttagaag

SEQ ID NO: 285207 - DNA, 25 bp, Artificial
  probe
  misc_feature (1)..(25): SEQ ID NO: 1159; WAN024FX5; Start 419; Stop 443
gttgggatagaaatattgctcactg

SEQ ID NO: 285208 - DNA, 25 bp, Artificial
  probe
  misc_feature (1)..(25): SEQ ID NO: 1159; WAN024FX5; Start 416; Stop 440
atggttgggatagaaatattgctca

SEQ ID NO: 285209 - DNA, 25 bp, Artificial
  probe
  misc_feature (1)..(25): SEQ ID NO: 1159; WAN024FX5; Start 423; Stop 447
ggatagaaatattgctcactggaca

SEQ ID NO: 285210 - DNA, 25 bp, Artificial
  probe
  misc_feature (1)..(25): SEQ ID NO: 1159; WAN024FX5; Start 420; Stop 444
ttgggatagaaatattgctcactgg

SEQ ID NO: 285211 - DNA, 25 bp, Artificial
  probe
  misc_feature (1)..(25): SEQ ID NO: 1159; WAN024FX5; Start 418; Stop 442
ggttgggatagaaatattgctcact

SEQ ID NO: 285212 - DNA, 25 bp, Artificial
  probe
  misc_feature (1)..(25): SEQ ID NO: 1159; WAN024FX5; Start 417; Stop 441
tggttgggatagaaatattgctcac

SEQ ID NO: 285213 - DNA, 25 bp, Artificial
  probe
  misc_feature (1)..(25): SEQ ID NO: 1159; WAN024FX5; Start 422; Stop 446
gggatagaaatattgctcactggac

SEQ ID NO: 285214 - DNA, 25 bp, Artificial
  probe
  misc_feature (1)..(25): SEQ ID NO: 1159; WAN024FX5; Start 421; Stop 445
tgggatagaaatattgctcactgga

SEQ ID NO: 285215 - DNA, 25 bp, Artificial
  probe
  misc_feature (1)..(25): SEQ ID NO: 1159; WAN024FX5; Start 355; Stop 379
gactatttatttgaatggcaagaca

SEQ ID NO: 285216 - DNA, 25 bp, Artificial
  probe
  misc_feature (1)..(25): SEQ ID NO: 1159; WAN024FX5; Start 354; Stop 378
tgactatttatttgaatggcaagac

SEQ ID NO: 285217 - DNA, 25 bp, Artificial
  probe
  misc_feature (1)..(25): SEQ ID NO: 1159; WAN024FX5; Start 352; Stop 376
actgactatttatttgaatggcaag

SEQ ID NO: 285218 - DNA, 25 bp, Artificial
  probe
  misc_feature (1)..(25): SEQ ID NO: 1159; WAN024FX5; Start 363; Stop 387
atttgaatggcaagacaatttagaa

SEQ ID NO: 285219 - DNA, 25 bp, Artificial
  probe
  misc_feature (1)..(25): SEQ ID NO: 1159; WAN024FX5; Start 388; Stop 412
gctggagcggagaattatcttgtac

SEQ ID NO: 285220 - DNA, 25 bp, Artificial
  probe
  misc_feature (1)..(25): SEQ ID NO: 1159; WAN024FX5; Start 367; Stop 391
gaatggcaagacaatttagaagctg

SEQ ID NO: 285221 - DNA, 25 bp, Artificial
  probe
  misc_feature (1)..(25): SEQ ID NO: 1159; WAN024FX5; Start 383; Stop 407
tagaagctggagcggagaattatct

SEQ ID NO: 285222 - DNA, 25 bp, Artificial
  probe
  misc_feature (1)..(25): SEQ ID NO: 1159; WAN024FX5; Start 175; Stop 199
cagtttgatgagttggtaagtaatt

SEQ ID NO: 285223 - DNA, 25 bp, Artificial
  probe
  misc_feature (1)..(25): SEQ ID NO: 1159; WAN024FX5; Start 424; Stop 448
gatagaaatattgctcactggacaa

SEQ ID NO: 285224 - DNA, 25 bp, Artificial
  probe
  misc_feature (1)..(25): SEQ ID NO: 1159; WAN024FX5; Start 415; Stop 439
tatggttgggatagaaatattgctc

SEQ ID NO: 285225 - DNA, 25 bp, Artificial
  probe
  misc_feature (1)..(25): SEQ ID NO: 1159; WAN024FX5; Start 366; Stop 390
tgaatggcaagacaatttagaagct

SEQ ID NO: 285226 - DNA, 25 bp, Artificial
  probe
  misc_feature (1)..(25): SEQ ID NO: 1159; WAN024FX5; Start 353; Stop 377
ctgactatttatttgaatggcaaga

SEQ ID NO: 285227 - DNA, 25 bp, Artificial
  probe
  misc_feature (1)..(25): SEQ ID NO: 1160; WAN024DAU; Start 335; Stop 359
gcttatctatctcgctgacttatga

SEQ ID NO: 285228 - DNA, 25 bp, Artificial
  probe
  misc_feature (1)..(25): SEQ ID NO: 1160; WAN024DAU; Start 974; Stop 998
taactccaactgctaatctaacacc

SEQ ID NO: 285229 - DNA, 25 bp, Artificial
  probe
  misc_feature (1)..(25): SEQ ID NO: 1160; WAN024DAU; Start 973; Stop 997
gtaactccaactgctaatctaacac

SEQ ID NO: 285230 - DNA, 25 bp, Artificial
  probe
  misc_feature (1)..(25): SEQ ID NO: 1160; WAN024DAU; Start 334; Stop 358
ggcttatctatctcgctgacttatg

SEQ ID NO: 285231 - DNA, 25 bp, Artificial
  probe
  misc_feature (1)..(25): SEQ ID NO: 1160; WAN024DAU; Start 799; Stop 823
aatctgccttacgatattgatggag

SEQ ID NO: 285232 - DNA, 25 bp, Artificial
  probe
  misc_feature (1)..(25): SEQ ID NO: 1160; WAN024DAU; Start 333; Stop 357
tggcttatctatctcgctgacttat

SEQ ID NO: 285233 - DNA, 25 bp, Artificial
  probe
  misc_feature (1)..(25): SEQ ID NO: 1160; WAN024DAU; Start 332; Stop 356
atggcttatctatctcgctgactta

SEQ ID NO: 285234 - DNA, 25 bp, Artificial
  probe
  misc_feature (1)..(25): SEQ ID NO: 1160; WAN024DAU; Start 1286; Stop 1310
ttgcttctcgtgatgctatgaatat

SEQ ID NO: 285235 - DNA, 25 bp, Artificial
  probe
  misc_feature (1)..(25): SEQ ID NO: 1160; WAN024DAU; Start 800; Stop 824
atctgccttacgatattgatggagt

SEQ ID NO: 285236 - DNA, 25 bp, Artificial
  probe
  misc_feature (1)..(25): SEQ ID NO: 1160; WAN024DAU; Start 1093; Stop 1117
gtatataaggctggtgacatcatcc

SEQ ID NO: 285237 - DNA, 25 bp, Artificial
  probe
  misc_feature (1)..(25): SEQ ID NO: 1160; WAN024DAU; Start 1582; Stop 1606
gattcagaggaagtggctagtattg

SEQ ID NO: 285238 - DNA, 25 bp, Artificial
  probe
  misc_feature (1)..(25): SEQ ID NO: 1160; WAN024DAU; Start 1581; Stop 1605
agattcagaggaagtggctagtatt

SEQ ID NO: 285239 - DNA, 25 bp, Artificial
  probe
  misc_feature (1)..(25): SEQ ID NO: 1160; WAN024DAU; Start 971; Stop 995
ttgtaactccaactgctaatctaac

SEQ ID NO: 285240 - DNA, 25 bp, Artificial
  probe
  misc_feature (1)..(25): SEQ ID NO: 1160; WAN024DAU; Start 1317; Stop 1341
ccttggtccatctattgttgagaag

SEQ ID NO: 285241 - DNA, 25 bp, Artificial
  probe
  misc_feature (1)..(25): SEQ ID NO: 1160; WAN024DAU; Start 1083; Stop 1107
tacggtcattgtatataaggctggt

SEQ ID NO: 285242 - DNA, 25 bp, Artificial
  probe
  misc_feature (1)..(25): SEQ ID NO: 1160; WAN024DAU; Start 972; Stop 996
tgtaactccaactgctaatctaaca

SEQ ID NO: 285243 - DNA, 25 bp, Artificial
  probe
  misc_feature (1)..(25): SEQ ID NO: 1160; WAN024DAU; Start 975; Stop 999
aactccaactgctaatctaacacca

SEQ ID NO: 285244 - DNA, 25 bp, Artificial
  probe
  misc_feature (1)..(25): SEQ ID NO: 1160; WAN024DAU; Start 1580; Stop 1604
cagattcagaggaagtggctagtat

SEQ ID NO: 285245 - DNA, 25 bp, Artificial
  probe
  misc_feature (1)..(25): SEQ ID NO: 1160; WAN024DAU; Start 804; Stop 828
gccttacgatattgatggagtggta

SEQ ID NO: 285246 - DNA, 25 bp, Artificial
  probe
  misc_feature (1)..(25): SEQ ID NO: 1160; WAN024DAU; Start 984; Stop 1008
tgctaatctaacaccagtacaactt

SEQ ID NO: 285247 - DNA, 25 bp, Artificial
  probe
  misc_feature (1)..(25): SEQ ID NO: 1160; WAN024DAU; Start 1583; Stop 1607
attcagaggaagtggctagtattga

SEQ ID NO: 285248 - DNA, 25 bp, Artificial
  probe
  misc_feature (1)..(25): SEQ ID NO: 1160; WAN024DAU; Start 331; Stop 355
gatggcttatctatctcgctgactt

SEQ ID NO: 285249 - DNA, 25 bp, Artificial
  probe
  misc_feature (1)..(25): SEQ ID NO: 1160; WAN024DAU; Start 986; Stop 1010
ctaatctaacaccagtacaacttgc

SEQ ID NO: 285250 - DNA, 25 bp, Artificial
  probe
  misc_feature (1)..(25): SEQ ID NO: 1160; WAN024DAU; Start 985; Stop 1009
gctaatctaacaccagtacaacttg

SEQ ID NO: 285251 - DNA, 25 bp, Artificial
  probe
  misc_feature (1)..(25): SEQ ID NO: 1160; WAN024DAU; Start 336; Stop 360
cttatctatctcgctgacttatgaa

SEQ ID NO: 285252 - DNA, 25 bp, Artificial
  probe
  misc_feature (1)..(25): SEQ ID NO: 1160; WAN024DAU; Start 1318; Stop 1342
cttggtccatctattgttgagaagc

SEQ ID NO: 285253 - DNA, 25 bp, Artificial
  probe
  misc_feature (1)..(25): SEQ ID NO: 1160; WAN024DAU; Start 987; Stop 1011
taatctaacaccagtacaacttgcc

SEQ ID NO: 285254 - DNA, 25 bp, Artificial
  probe
  misc_feature (1)..(25): SEQ ID NO: 1160; WAN024DAU; Start 801; Stop 825
tctgccttacgatattgatggagtg

SEQ ID NO: 285255 - DNA, 25 bp, Artificial
  probe
  misc_feature (1)..(25): SEQ ID NO: 1160; WAN024DAU; Start 1092; Stop 1116
tgtatataaggctggtgacatcatc

SEQ ID NO: 285256 - DNA, 25 bp, Artificial
  probe
  misc_feature (1)..(25): SEQ ID NO: 1160; WAN024DAU; Start 1091; Stop 1115
ttgtatataaggctggtgacatcat

SEQ ID NO: 285257 - DNA, 25 bp, Artificial
  probe
  misc_feature (1)..(25): SEQ ID NO: 1160; WAN024DAU; Start 1090; Stop 1114
attgtatataaggctggtgacatca

SEQ ID NO: 285258 - DNA, 25 bp, Artificial
  probe
  misc_feature (1)..(25): SEQ ID NO: 1160; WAN024DAU; Start 1088; Stop 1112
tcattgtatataaggctggtgacat

SEQ ID NO: 285259 - DNA, 25 bp, Artificial
  probe
  misc_feature (1)..(25): SEQ ID NO: 1160; WAN024DAU; Start 1293; Stop 1317
tcgtgatgctatgaatattacaggc

SEQ ID NO: 285260 - DNA, 25 bp, Artificial
  probe
  misc_feature (1)..(25): SEQ ID NO: 1161; WAN024FMM; Start 1024; Stop 1048
aacatggacgaagtaatgaagaatc

SEQ ID NO: 285261 - DNA, 25 bp, Artificial
  probe
  misc_feature (1)..(25): SEQ ID NO: 1161; WAN024FMM; Start 1025; Stop 1049
acatggacgaagtaatgaagaatca

SEQ ID NO: 285262 - DNA, 25 bp, Artificial
  probe
  misc_feature (1)..(25): SEQ ID NO: 1161; WAN024FMM; Start 1021; Stop 1045
actaacatggacgaagtaatgaaga

SEQ ID NO: 285263 - DNA, 25 bp, Artificial
  probe
  misc_feature (1)..(25): SEQ ID NO: 1161; WAN024FMM; Start 1022; Stop 1046
ctaacatggacgaagtaatgaagaa

SEQ ID NO: 285264 - DNA, 25 bp, Artificial
  probe
  misc_feature (1)..(25): SEQ ID NO: 1161; WAN024FMM; Start 1023; Stop 1047
taacatggacgaagtaatgaagaat

SEQ ID NO: 285265 - DNA, 25 bp, Artificial
  probe
  misc_feature (1)..(25): SEQ ID NO: 1161; WAN024FMM; Start 354; Stop 378
tggagcgtataaagatagtgacaat

SEQ ID NO: 285266 - DNA, 25 bp, Artificial
  probe
  misc_feature (1)..(25): SEQ ID NO: 1161; WAN024FMM; Start 353; Stop 377
gtggagcgtataaagatagtgacaa

SEQ ID NO: 285267 - DNA, 25 bp, Artificial
  probe
  misc_feature (1)..(25): SEQ ID NO: 1161; WAN024FMM; Start 355; Stop 379
ggagcgtataaagatagtgacaatc

SEQ ID NO: 285268 - DNA, 25 bp, Artificial
  probe
  misc_feature (1)..(25): SEQ ID NO: 1161; WAN024FMM; Start 974; Stop 998
ttaagactaatgaggagttgattca

SEQ ID NO: 285269 - DNA, 25 bp, Artificial
  probe
  misc_feature (1)..(25): SEQ ID NO: 1161; WAN024FMM; Start 616; Stop 640
atagtaatctatgctccaacatggc

SEQ ID NO: 285270 - DNA, 25 bp, Artificial
  probe
  misc_feature (1)..(25): SEQ ID NO: 1161; WAN024FMM; Start 523; Stop 547
acgccgagaaatgattatctaattc

SEQ ID NO: 285271 - DNA, 25 bp, Artificial
  probe
  misc_feature (1)..(25): SEQ ID NO: 1161; WAN024FMM; Start 524; Stop 548
cgccgagaaatgattatctaattca

SEQ ID NO: 285272 - DNA, 25 bp, Artificial
  probe
  misc_feature (1)..(25): SEQ ID NO: 1161; WAN024FMM; Start 65; Stop 89
aaatgttgaaggtaagggaagaacg

SEQ ID NO: 285273 - DNA, 25 bp, Artificial
  probe
  misc_feature (1)..(25): SEQ ID NO: 1161; WAN024FMM; Start 27; Stop 51
tgttggattagtaatgaagattgtt

SEQ ID NO: 285274 - DNA, 25 bp, Artificial
  probe
  misc_feature (1)..(25): SEQ ID NO: 1161; WAN024FMM; Start 1020; Stop 1044
tactaacatggacgaagtaatgaag

SEQ ID NO: 285275 - DNA, 25 bp, Artificial
  probe
  misc_feature (1)..(25): SEQ ID NO: 1161; WAN024FMM; Start 352; Stop 376
ggtggagcgtataaagatagtgaca

SEQ ID NO: 285276 - DNA, 25 bp, Artificial
  probe
  misc_feature (1)..(25): SEQ ID NO: 1161; WAN024FMM; Start 520; Stop 544
ggtacgccgagaaatgattatctaa

SEQ ID NO: 285277 - DNA, 25 bp, Artificial
  probe
  misc_feature (1)..(25): SEQ ID NO: 1161; WAN024FMM; Start 861; Stop 885
ttgggatatgattcatggaggtaag

SEQ ID NO: 285278 - DNA, 25 bp, Artificial
  probe
  misc_feature (1)..(25): SEQ ID NO: 1161; WAN024FMM; Start 858; Stop 882
aatttgggatatgattcatggaggt

SEQ ID NO: 285279 - DNA, 25 bp, Artificial
  probe
  misc_feature (1)..(25): SEQ ID NO: 1161; WAN024FMM; Start 642; Stop 666
tgatgacgcttctactatagaggat

SEQ ID NO: 285280 - DNA, 25 bp, Artificial
  probe
  misc_feature (1)..(25): SEQ ID NO: 1161; WAN024FMM; Start 857; Stop 881
caatttgggatatgattcatggagg

SEQ ID NO: 285281 - DNA, 25 bp, Artificial
  probe
  misc_feature (1)..(25): SEQ ID NO: 1161; WAN024FMM; Start 679; Stop 703
agtttgctagagtgtttaagagaaa

SEQ ID NO: 285282 - DNA, 25 bp, Artificial
  probe
  misc_feature (1)..(25): SEQ ID NO: 1161; WAN024FMM; Start 863; Stop 887
gggatatgattcatggaggtaagaa

SEQ ID NO: 285283 - DNA, 25 bp, Artificial
  probe
  misc_feature (1)..(25): SEQ ID NO: 1161; WAN024FMM; Start 862; Stop 886
tgggatatgattcatggaggtaaga

SEQ ID NO: 285284 - DNA, 25 bp, Artificial
  probe
  misc_feature (1)..(25): SEQ ID NO: 1161; WAN024FMM; Start 1010; Stop 1034
caaatggatttactaacatggacga

SEQ ID NO: 285285 - DNA, 25 bp, Artificial
  probe
  misc_feature (1)..(25): SEQ ID NO: 1161; WAN024FMM; Start 1009; Stop 1033
tcaaatggatttactaacatggacg

SEQ ID NO: 285286 - DNA, 25 bp, Artificial
  probe
  misc_feature (1)..(25): SEQ ID NO: 1161; WAN024FMM; Start 860; Stop 884
tttgggatatgattcatggaggtaa

SEQ ID NO: 285287 - DNA, 25 bp, Artificial
  probe
  misc_feature (1)..(25): SEQ ID NO: 1161; WAN024FMM; Start 643; Stop 667
gatgacgcttctactatagaggatt

SEQ ID NO: 285288 - DNA, 25 bp, Artificial
  probe
  misc_feature (1)..(25): SEQ ID NO: 1161; WAN024FMM; Start 522; Stop 546
tacgccgagaaatgattatctaatt

SEQ ID NO: 285289 - DNA, 25 bp, Artificial
  probe
  misc_feature (1)..(25): SEQ ID NO: 1161; WAN024FMM; Start 1012; Stop 1036
aatggatttactaacatggacgaag

SEQ ID NO: 285290 - DNA, 25 bp, Artificial
  probe
  misc_feature (1)..(25): SEQ ID NO: 1161; WAN024FMM; Start 859; Stop 883
atttgggatatgattcatggaggta

SEQ ID NO: 285291 - DNA, 25 bp, Artificial
  probe
  misc_feature (1)..(25): SEQ ID NO: 1161; WAN024FMM; Start 521; Stop 545
gtacgccgagaaatgattatctaat

SEQ ID NO: 285292 - DNA, 25 bp, Artificial
  probe
  misc_feature (1)..(25): SEQ ID NO: 1161; WAN024FMM; Start 26; Stop 50
atgttggattagtaatgaagattgt

SEQ ID NO: 285293 - DNA, 25 bp, Artificial
  probe
  misc_feature (1)..(25): SEQ ID NO: 1162; WAN024EZT; Start 1636; Stop 1660
gaactgagagatggtgtgattagaa

SEQ ID NO: 285294 - DNA, 25 bp, Artificial
  probe
  misc_feature (1)..(25): SEQ ID NO: 1162; WAN024EZT; Start 964; Stop 988
agtgcttcattcatagattcatcca

SEQ ID NO: 285295 - DNA, 25 bp, Artificial
  probe
  misc_feature (1)..(25): SEQ ID NO: 1162; WAN024EZT; Start 1945; Stop 1969
tatggttatgcctattctgcgatta

SEQ ID NO: 285296 - DNA, 25 bp, Artificial
  probe
  misc_feature (1)..(25): SEQ ID NO: 1162; WAN024EZT; Start 1637; Stop 1661
aactgagagatggtgtgattagaac

SEQ ID NO: 285297 - DNA, 25 bp, Artificial
  probe
  misc_feature (1)..(25): SEQ ID NO: 1162; WAN024EZT; Start 1634; Stop 1658
ttgaactgagagatggtgtgattag

SEQ ID NO: 285298 - DNA, 25 bp, Artificial
  probe
  misc_feature (1)..(25): SEQ ID NO: 1162; WAN024EZT; Start 1389; Stop 1413
tagtcagaatagaggagagagttgg

SEQ ID NO: 285299 - DNA, 25 bp, Artificial
  probe
  misc_feature (1)..(25): SEQ ID NO: 1162; WAN024EZT; Start 1633; Stop 1657
gttgaactgagagatggtgtgatta

SEQ ID NO: 285300 - DNA, 25 bp, Artificial
  probe
  misc_feature (1)..(25): SEQ ID NO: 1162; WAN024EZT; Start 965; Stop 989
gtgcttcattcatagattcatccat

SEQ ID NO: 285301 - DNA, 25 bp, Artificial
  probe
  misc_feature (1)..(25): SEQ ID NO: 1162; WAN024EZT; Start 1635; Stop 1659
tgaactgagagatggtgtgattaga

SEQ ID NO: 285302 - DNA, 25 bp, Artificial
  probe
  misc_feature (1)..(25): SEQ ID NO: 1162; WAN024EZT; Start 963; Stop 987
aagtgcttcattcatagattcatcc

SEQ ID NO: 285303 - DNA, 25 bp, Artificial
  probe
  misc_feature (1)..(25): SEQ ID NO: 1162; WAN024EZT; Start 1946; Stop 1970
atggttatgcctattctgcgattac

SEQ ID NO: 285304 - DNA, 25 bp, Artificial
  probe
  misc_feature (1)..(25): SEQ ID NO: 1162; WAN024EZT; Start 1944; Stop 1968
gtatggttatgcctattctgcgatt

SEQ ID NO: 285305 - DNA, 25 bp, Artificial
  probe
  misc_feature (1)..(25): SEQ ID NO: 1162; WAN024EZT; Start 1939; Stop 1963
ccttcgtatggttatgcctattctg

SEQ ID NO: 285306 - DNA, 25 bp, Artificial
  probe
  misc_feature (1)..(25): SEQ ID NO: 1162; WAN024EZT; Start 544; Stop 568
ggtatagataaggcaacactaggag

SEQ ID NO: 285307 - DNA, 25 bp, Artificial
  probe
  misc_feature (1)..(25): SEQ ID NO: 1162; WAN024EZT; Start 543; Stop 567
tggtatagataaggcaacactagga

SEQ ID NO: 285308 - DNA, 25 bp, Artificial
  probe
  misc_feature (1)..(25): SEQ ID NO: 1162; WAN024EZT; Start 320; Stop 344
gagattctggtgagataggtgtaga

SEQ ID NO: 285309 - DNA, 25 bp, Artificial
  probe
  misc_feature (1)..(25): SEQ ID NO: 1162; WAN024EZT; Start 319; Stop 343
agagattctggtgagataggtgtag

SEQ ID NO: 285310 - DNA, 25 bp, Artificial
  probe
  misc_feature (1)..(25): SEQ ID NO: 1162; WAN024EZT; Start 318; Stop 342
gagagattctggtgagataggtgta

SEQ ID NO: 285311 - DNA, 25 bp, Artificial
  probe
  misc_feature (1)..(25): SEQ ID NO: 1162; WAN024EZT; Start 545; Stop 569
gtatagataaggcaacactaggagc

SEQ ID NO: 285312 - DNA, 25 bp, Artificial
  probe
  misc_feature (1)..(25): SEQ ID NO: 1162; WAN024EZT; Start 571; Stop 595
gttaatcgtgaaggtaaggaacatt

SEQ ID NO: 285313 - DNA, 25 bp, Artificial
  probe
  misc_feature (1)..(25): SEQ ID NO: 1162; WAN024EZT; Start 542; Stop 566
atggtatagataaggcaacactagg

SEQ ID NO: 285314 - DNA, 25 bp, Artificial
  probe
  misc_feature (1)..(25): SEQ ID NO: 1162; WAN024EZT; Start 966; Stop 990
tgcttcattcatagattcatccatt

SEQ ID NO: 285315 - DNA, 25 bp, Artificial
  probe
  misc_feature (1)..(25): SEQ ID NO: 1162; WAN024EZT; Start 1388; Stop 1412
ctagtcagaatagaggagagagttg

SEQ ID NO: 285316 - DNA, 25 bp, Artificial
  probe
  misc_feature (1)..(25): SEQ ID NO: 1162; WAN024EZT; Start 316; Stop 340
atgagagattctggtgagataggtg

SEQ ID NO: 285317 - DNA, 25 bp, Artificial
  probe
  misc_feature (1)..(25): SEQ ID NO: 1162; WAN024EZT; Start 1940; Stop 1964
cttcgtatggttatgcctattctgc

SEQ ID NO: 285318 - DNA, 25 bp, Artificial
  probe
  misc_feature (1)..(25): SEQ ID NO: 1162; WAN024EZT; Start 967; Stop 991
gcttcattcatagattcatccattg

SEQ ID NO: 285319 - DNA, 25 bp, Artificial
  probe
  misc_feature (1)..(25): SEQ ID NO: 1162; WAN024EZT; Start 959; Stop 983
gtggaagtgcttcattcatagattc

SEQ ID NO: 285320 - DNA, 25 bp, Artificial
  probe
  misc_feature (1)..(25): SEQ ID NO: 1162; WAN024EZT; Start 1639; Stop 1663
ctgagagatggtgtgattagaacat

SEQ ID NO: 285321 - DNA, 25 bp, Artificial
  probe
  misc_feature (1)..(25): SEQ ID NO: 1162; WAN024EZT; Start 960; Stop 984
tggaagtgcttcattcatagattca

SEQ ID NO: 285322 - DNA, 25 bp, Artificial
  probe
  misc_feature (1)..(25): SEQ ID NO: 1162; WAN024EZT; Start 958; Stop 982
agtggaagtgcttcattcatagatt

SEQ ID NO: 285323 - DNA, 25 bp, Artificial
  probe
  misc_feature (1)..(25): SEQ ID NO: 1162; WAN024EZT; Start 1640; Stop 1664
tgagagatggtgtgattagaacatt

SEQ ID NO: 285324 - DNA, 25 bp, Artificial
  probe
  misc_feature (1)..(25): SEQ ID NO: 1162; WAN024EZT; Start 956; Stop 980
ttagtggaagtgcttcattcataga

SEQ ID NO: 285325 - DNA, 25 bp, Artificial
  probe
  misc_feature (1)..(25): SEQ ID NO: 1162; WAN024EZT; Start 957; Stop 981
tagtggaagtgcttcattcatagat

SEQ ID NO: 285326 - DNA, 25 bp, Artificial
  probe
  misc_feature (1)..(25): SEQ ID NO: 1163; WAN024CYB; Start 952; Stop 976
ggatatggagatattaccaactggc

SEQ ID NO: 285327 - DNA, 25 bp, Artificial
  probe
  misc_feature (1)..(25): SEQ ID NO: 1163; WAN024CYB; Start 951; Stop 975
tggatatggagatattaccaactgg

SEQ ID NO: 285328 - DNA, 25 bp, Artificial
  probe
  misc_feature (1)..(25): SEQ ID NO: 1163; WAN024CYB; Start 131; Stop 155
ccatagggattctcgtattgttagg

SEQ ID NO: 285329 - DNA, 25 bp, Artificial
  probe
  misc_feature (1)..(25): SEQ ID NO: 1163; WAN024CYB; Start 130; Stop 154
accatagggattctcgtattgttag

SEQ ID NO: 285330 - DNA, 25 bp, Artificial
  probe
  misc_feature (1)..(25): SEQ ID NO: 1163; WAN024CYB; Start 129; Stop 153
gaccatagggattctcgtattgtta

SEQ ID NO: 285331 - DNA, 25 bp, Artificial
  probe
  misc_feature (1)..(25): SEQ ID NO: 1163; WAN024CYB; Start 925; Stop 949
tccaacatcattacaacaactggtt

SEQ ID NO: 285332 - DNA, 25 bp, Artificial
  probe
  misc_feature (1)..(25): SEQ ID NO: 1163; WAN024CYB; Start 924; Stop 948
ttccaacatcattacaacaactggt

SEQ ID NO: 285333 - DNA, 25 bp, Artificial
  probe
  misc_feature (1)..(25): SEQ ID NO: 1163; WAN024CYB; Start 139; Stop 163
attctcgtattgttaggcggttcag

SEQ ID NO: 285334 - DNA, 25 bp, Artificial
  probe
  misc_feature (1)..(25): SEQ ID NO: 1163; WAN024CYB; Start 138; Stop 162
gattctcgtattgttaggcggttca

SEQ ID NO: 285335 - DNA, 25 bp, Artificial
  probe
  misc_feature (1)..(25): SEQ ID NO: 1163; WAN024CYB; Start 132; Stop 156
catagggattctcgtattgttaggc

SEQ ID NO: 285336 - DNA, 25 bp, Artificial
  probe
  misc_feature (1)..(25): SEQ ID NO: 1163; WAN024CYB; Start 921; Stop 945
ggtttccaacatcattacaacaact

SEQ ID NO: 285337 - DNA, 25 bp, Artificial
  probe
  misc_feature (1)..(25): SEQ ID NO: 1163; WAN024CYB; Start 920; Stop 944
aggtttccaacatcattacaacaac

SEQ ID NO: 285338 - DNA, 25 bp, Artificial
  probe
  misc_feature (1)..(25): SEQ ID NO: 1163; WAN024CYB; Start 919; Stop 943
caggtttccaacatcattacaacaa

SEQ ID NO: 285339 - DNA, 25 bp, Artificial
  probe
  misc_feature (1)..(25): SEQ ID NO: 1163; WAN024CYB; Start 913; Stop 937
ttcttccaggtttccaacatcatta

SEQ ID NO: 285340 - DNA, 25 bp, Artificial
  probe
  misc_feature (1)..(25): SEQ ID NO: 1163; WAN024CYB; Start 922; Stop 946
gtttccaacatcattacaacaactg

SEQ ID NO: 285341 - DNA, 25 bp, Artificial
  probe
  misc_feature (1)..(25): SEQ ID NO: 1163; WAN024CYB; Start 916; Stop 940
ttccaggtttccaacatcattacaa

SEQ ID NO: 285342 - DNA, 25 bp, Artificial
  probe
  misc_feature (1)..(25): SEQ ID NO: 1163; WAN024CYB; Start 914; Stop 938
tcttccaggtttccaacatcattac

SEQ ID NO: 285343 - DNA, 25 bp, Artificial
  probe
  misc_feature (1)..(25): SEQ ID NO: 1163; WAN024CYB; Start 437; Stop 461
cacttgctattatggacaatgccaa

SEQ ID NO: 285344 - DNA, 25 bp, Artificial
  probe
  misc_feature (1)..(25): SEQ ID NO: 1163; WAN024CYB; Start 10; Stop 34
agtatgattcgttacctcctttcaa

SEQ ID NO: 285345 - DNA, 25 bp, Artificial
  probe
  misc_feature (1)..(25): SEQ ID NO: 1163; WAN024CYB; Start 9; Stop 33
aagtatgattcgttacctcctttca

SEQ ID NO: 285346 - DNA, 25 bp, Artificial
  probe
  misc_feature (1)..(25): SEQ ID NO: 1163; WAN024CYB; Start 915; Stop 939
cttccaggtttccaacatcattaca

SEQ ID NO: 285347 - DNA, 25 bp, Artificial
  probe
  misc_feature (1)..(25): SEQ ID NO: 1163; WAN024CYB; Start 11; Stop 35
gtatgattcgttacctcctttcaaa

SEQ ID NO: 285348 - DNA, 25 bp, Artificial
  probe
  misc_feature (1)..(25): SEQ ID NO: 1163; WAN024CYB; Start 917; Stop 941
tccaggtttccaacatcattacaac

SEQ ID NO: 285349 - DNA, 25 bp, Artificial
  probe
  misc_feature (1)..(25): SEQ ID NO: 1163; WAN024CYB; Start 912; Stop 936
cttcttccaggtttccaacatcatt

SEQ ID NO: 285350 - DNA, 25 bp, Artificial
  probe
  misc_feature (1)..(25): SEQ ID NO: 1163; WAN024CYB; Start 1309; Stop 1333
ggaaccacttctagtttctcaatct

SEQ ID NO: 285351 - DNA, 25 bp, Artificial
  probe
  misc_feature (1)..(25): SEQ ID NO: 1163; WAN024CYB; Start 1308; Stop 1332
aggaaccacttctagtttctcaatc

SEQ ID NO: 285352 - DNA, 25 bp, Artificial
  probe
  misc_feature (1)..(25): SEQ ID NO: 1163; WAN024CYB; Start 133; Stop 157
atagggattctcgtattgttaggcg

SEQ ID NO: 285353 - DNA, 25 bp, Artificial
  probe
  misc_feature (1)..(25): SEQ ID NO: 1163; WAN024CYB; Start 1307; Stop 1331
taggaaccacttctagtttctcaat

SEQ ID NO: 285354 - DNA, 25 bp, Artificial
  probe
  misc_feature (1)..(25): SEQ ID NO: 1163; WAN024CYB; Start 918; Stop 942
ccaggtttccaacatcattacaaca

SEQ ID NO: 285355 - DNA, 25 bp, Artificial
  probe
  misc_feature (1)..(25): SEQ ID NO: 1163; WAN024CYB; Start 137; Stop 161
ggattctcgtattgttaggcggttc

SEQ ID NO: 285356 - DNA, 25 bp, Artificial
  probe
  misc_feature (1)..(25): SEQ ID NO: 1163; WAN024CYB; Start 1420; Stop 1444
agaacttggtctaagagataactaa

SEQ ID NO: 285357 - DNA, 25 bp, Artificial
  probe
  misc_feature (1)..(25): SEQ ID NO: 1163; WAN024CYB; Start 1310; Stop 1334
gaaccacttctagtttctcaatctt

SEQ ID NO: 285358 - DNA, 25 bp, Artificial
  probe
  misc_feature (1)..(25): SEQ ID NO: 1163; WAN024CYB; Start 578; Stop 602
ccctctttgtcatcatctattatct

SEQ ID NO: 285359 - DNA, 25 bp, Artificial
  probe
  misc_feature (1)..(25): SEQ ID NO: 1164; WAN024F39; Start 195; Stop 219
taatgctgatgatggaggtgttata

SEQ ID NO: 285360 - DNA, 25 bp, Artificial
  probe
  misc_feature (1)..(25): SEQ ID NO: 1164; WAN024F39; Start 194; Stop 218
gtaatgctgatgatggaggtgttat

SEQ ID NO: 285361 - DNA, 25 bp, Artificial
  probe
  misc_feature (1)..(25): SEQ ID NO: 1164; WAN024F39; Start 193; Stop 217
agtaatgctgatgatggaggtgtta

SEQ ID NO: 285362 - DNA, 25 bp, Artificial
  probe
  misc_feature (1)..(25): SEQ ID NO: 1164; WAN024F39; Start 362; Stop 386
cattagatgttgctgagagtaacgg

SEQ ID NO: 285363 - DNA, 25 bp, Artificial
  probe
  misc_feature (1)..(25): SEQ ID NO: 1164; WAN024F39; Start 196; Stop 220
aatgctgatgatggaggtgttataa

SEQ ID NO: 285364 - DNA, 25 bp, Artificial
  probe
  misc_feature (1)..(25): SEQ ID NO: 1164; WAN024F39; Start 192; Stop 216
aagtaatgctgatgatggaggtgtt

SEQ ID NO: 285365 - DNA, 25 bp, Artificial
  probe
  misc_feature (1)..(25): SEQ ID NO: 1164; WAN024F39; Start 551; Stop 575
aaacaacggattatcaagaaagagc

SEQ ID NO: 285366 - DNA, 25 bp, Artificial
  probe
  misc_feature (1)..(25): SEQ ID NO: 1164; WAN024F39; Start 435; Stop 459
aggacagatattacaccaagtttca

SEQ ID NO: 285367 - DNA, 25 bp, Artificial
  probe
  misc_feature (1)..(25): SEQ ID NO: 1164; WAN024F39; Start 378; Stop 402
gagtaacggctctgataatgtgtca

SEQ ID NO: 285368 - DNA, 25 bp, Artificial
  probe
  misc_feature (1)..(25): SEQ ID NO: 1164; WAN024F39; Start 28; Stop 52
gtgcgaaatcataactctaagactt

SEQ ID NO: 285369 - DNA, 25 bp, Artificial
  probe
  misc_feature (1)..(25): SEQ ID NO: 1164; WAN024F39; Start 436; Stop 460
ggacagatattacaccaagtttcaa

SEQ ID NO: 285370 - DNA, 25 bp, Artificial
  probe
  misc_feature (1)..(25): SEQ ID NO: 1164; WAN024F39; Start 363; Stop 387
attagatgttgctgagagtaacggc

SEQ ID NO: 285371 - DNA, 25 bp, Artificial
  probe
  misc_feature (1)..(25): SEQ ID NO: 1164; WAN024F39; Start 29; Stop 53
tgcgaaatcataactctaagacttt

SEQ ID NO: 285372 - DNA, 25 bp, Artificial
  probe
  misc_feature (1)..(25): SEQ ID NO: 1164; WAN024F39; Start 27; Stop 51
agtgcgaaatcataactctaagact

SEQ ID NO: 285373 - DNA, 25 bp, Artificial
  probe
  misc_feature (1)..(25): SEQ ID NO: 1164; WAN024F39; Start 167; Stop 191
tgtttaagaaaggaattgataggca

SEQ ID NO: 285374 - DNA, 25 bp, Artificial
  probe
  misc_feature (1)..(25): SEQ ID NO: 1164; WAN024F39; Start 157; Stop 181
tcagaagagttgtttaagaaaggaa

SEQ ID NO: 285375 - DNA, 25 bp, Artificial
  probe
  misc_feature (1)..(25): SEQ ID NO: 1164; WAN024F39; Start 190; Stop 214
caaagtaatgctgatgatggaggtg

SEQ ID NO: 285376 - DNA, 25 bp, Artificial
  probe
  misc_feature (1)..(25): SEQ ID NO: 1164; WAN024F39; Start 447; Stop 471
acaccaagtttcaattaccaattca

SEQ ID NO: 285377 - DNA, 25 bp, Artificial
  probe
  misc_feature (1)..(25): SEQ ID NO: 1164; WAN024F39; Start 476; Stop 500
aagatattgcagaggctcagttgat

SEQ ID NO: 285378 - DNA, 25 bp, Artificial
  probe
  misc_feature (1)..(25): SEQ ID NO: 1164; WAN024F39; Start 449; Stop 473
accaagtttcaattaccaattcact

SEQ ID NO: 285379 - DNA, 25 bp, Artificial
  probe
  misc_feature (1)..(25): SEQ ID NO: 1164; WAN024F39; Start 448; Stop 472
caccaagtttcaattaccaattcac

SEQ ID NO: 285380 - DNA, 25 bp, Artificial
  probe
  misc_feature (1)..(25): SEQ ID NO: 1164; WAN024F39; Start 156; Stop 180
ttcagaagagttgtttaagaaagga

SEQ ID NO: 285381 - DNA, 25 bp, Artificial
  probe
  misc_feature (1)..(25): SEQ ID NO: 1164; WAN024F39; Start 197; Stop 221
atgctgatgatggaggtgttataaa

SEQ ID NO: 285382 - DNA, 25 bp, Artificial
  probe
  misc_feature (1)..(25): SEQ ID NO: 1164; WAN024F39; Start 173; Stop 197
agaaaggaattgataggcaaagtaa

SEQ ID NO: 285383 - DNA, 25 bp, Artificial
  probe
  misc_feature (1)..(25): SEQ ID NO: 1164; WAN024F39; Start 172; Stop 196
aagaaaggaattgataggcaaagta

SEQ ID NO: 285384 - DNA, 25 bp, Artificial
  probe
  misc_feature (1)..(25): SEQ ID NO: 1164; WAN024F39; Start 171; Stop 195
taagaaaggaattgataggcaaagt

SEQ ID NO: 285385 - DNA, 25 bp, Artificial
  probe
  misc_feature (1)..(25): SEQ ID NO: 1164; WAN024F39; Start 450; Stop 474
ccaagtttcaattaccaattcactc

SEQ ID NO: 285386 - DNA, 25 bp, Artificial
  probe
  misc_feature (1)..(25): SEQ ID NO: 1164; WAN024F39; Start 191; Stop 215
aaagtaatgctgatgatggaggtgt

SEQ ID NO: 285387 - DNA, 25 bp, Artificial
  probe
  misc_feature (1)..(25): SEQ ID NO: 1164; WAN024F39; Start 516; Stop 540
aattgaagatgtacttgaagggaaa

SEQ ID NO: 285388 - DNA, 25 bp, Artificial
  probe
  misc_feature (1)..(25): SEQ ID NO: 1164; WAN024F39; Start 515; Stop 539
aaattgaagatgtacttgaagggaa

SEQ ID NO: 285389 - DNA, 25 bp, Artificial
  probe
  misc_feature (1)..(25): SEQ ID NO: 1164; WAN024F39; Start 108; Stop 132
atctttcaggacacctttcaattca

SEQ ID NO: 285390 - DNA, 25 bp, Artificial
  probe
  misc_feature (1)..(25): SEQ ID NO: 1164; WAN024F39; Start 361; Stop 385
acattagatgttgctgagagtaacg

SEQ ID NO: 285391 - DNA, 25 bp, Artificial
  probe
  misc_feature (1)..(25): SEQ ID NO: 1164; WAN024F39; Start 166; Stop 190
ttgtttaagaaaggaattgataggc

SEQ ID NO: 285392 - DNA, 25 bp, Artificial
  probe
  misc_feature (1)..(25): SEQ ID NO: 1165; WAN024DEH; Start 124; Stop 148
aatttccgagtcagttatgtgatgg

SEQ ID NO: 285393 - DNA, 25 bp, Artificial
  probe
  misc_feature (1)..(25): SEQ ID NO: 1165; WAN024DEH; Start 125; Stop 149
atttccgagtcagttatgtgatggg

SEQ ID NO: 285394 - DNA, 25 bp, Artificial
  probe
  misc_feature (1)..(25): SEQ ID NO: 1165; WAN024DEH; Start 123; Stop 147
aaatttccgagtcagttatgtgatg

SEQ ID NO: 285395 - DNA, 25 bp, Artificial
  probe
  misc_feature (1)..(25): SEQ ID NO: 1165; WAN024DEH; Start 69; Stop 93
ctggatgactggccgctatattatg

SEQ ID NO: 285396 - DNA, 25 bp, Artificial
  probe
  misc_feature (1)..(25): SEQ ID NO: 1165; WAN024DEH; Start 168; Stop 192
cgatcagcattttaataggaaagac

SEQ ID NO: 285397 - DNA, 25 bp, Artificial
  probe
  misc_feature (1)..(25): SEQ ID NO: 1165; WAN024DEH; Start 101; Stop 125
tttgggcaattttactctttagaaa

SEQ ID NO: 285398 - DNA, 25 bp, Artificial
  probe
  misc_feature (1)..(25): SEQ ID NO: 1165; WAN024DEH; Start 68; Stop 92
cctggatgactggccgctatattat

SEQ ID NO: 285399 - DNA, 25 bp, Artificial
  probe
  misc_feature (1)..(25): SEQ ID NO: 1165; WAN024DEH; Start 167; Stop 191
tcgatcagcattttaataggaaaga

SEQ ID NO: 285400 - DNA, 25 bp, Artificial
  probe
  misc_feature (1)..(25): SEQ ID NO: 1165; WAN024DEH; Start 70; Stop 94
tggatgactggccgctatattatgg

SEQ ID NO: 285401 - DNA, 25 bp, Artificial
  probe
  misc_feature (1)..(25): SEQ ID NO: 1165; WAN024DEH; Start 102; Stop 126
ttgggcaattttactctttagaaat

SEQ ID NO: 285402 - DNA, 25 bp, Artificial
  probe
  misc_feature (1)..(25): SEQ ID NO: 1165; WAN024DEH; Start 169; Stop 193
gatcagcattttaataggaaagact

SEQ ID NO: 285403 - DNA, 25 bp, Artificial
  probe
  misc_feature (1)..(25): SEQ ID NO: 1165; WAN024DEH; Start 8; Stop 32
aacaacaatttattattatggcgct

SEQ ID NO: 285404 - DNA, 25 bp, Artificial
  probe
  misc_feature (1)..(25): SEQ ID NO: 1165; WAN024DEH; Start 7; Stop 31
aaacaacaatttattattatggcgc

SEQ ID NO: 285405 - DNA, 25 bp, Artificial
  probe
  misc_feature (1)..(25): SEQ ID NO: 1165; WAN024DEH; Start 56; Stop 80
ttttcaatgaagcctggatgactgg

SEQ ID NO: 285406 - DNA, 25 bp, Artificial
  probe
  misc_feature (1)..(25): SEQ ID NO: 1165; WAN024DEH; Start 170; Stop 194
atcagcattttaataggaaagacta

SEQ ID NO: 285407 - DNA, 25 bp, Artificial
  probe
  misc_feature (1)..(25): SEQ ID NO: 1165; WAN024DEH; Start 162; Stop 186
tgtcatcgatcagcattttaatagg

SEQ ID NO: 285408 - DNA, 25 bp, Artificial
  probe
  misc_feature (1)..(25): SEQ ID NO: 1165; WAN024DEH; Start 163; Stop 187
gtcatcgatcagcattttaatagga

SEQ ID NO: 285409 - DNA, 25 bp, Artificial
  probe
  misc_feature (1)..(25): SEQ ID NO: 1165; WAN024DEH; Start 164; Stop 188
tcatcgatcagcattttaataggaa

SEQ ID NO: 285410 - DNA, 25 bp, Artificial
  probe
  misc_feature (1)..(25): SEQ ID NO: 1165; WAN024DEH; Start 165; Stop 189
catcgatcagcattttaataggaaa

SEQ ID NO: 285411 - DNA, 25 bp, Artificial
  probe
  misc_feature (1)..(25): SEQ ID NO: 1165; WAN024DEH; Start 103; Stop 127
tgggcaattttactctttagaaatt

SEQ ID NO: 285412 - DNA, 25 bp, Artificial
  probe
  misc_feature (1)..(25): SEQ ID NO: 1165; WAN024DEH; Start 166; Stop 190
atcgatcagcattttaataggaaag

SEQ ID NO: 285413 - DNA, 25 bp, Artificial
  probe
  misc_feature (1)..(25): SEQ ID NO: 1165; WAN024DEH; Start 161; Stop 185
atgtcatcgatcagcattttaatag

SEQ ID NO: 285414 - DNA, 25 bp, Artificial
  probe
  misc_feature (1)..(25): SEQ ID NO: 1165; WAN024DEH; Start 160; Stop 184
gatgtcatcgatcagcattttaata

SEQ ID NO: 285415 - DNA, 25 bp, Artificial
  probe
  misc_feature (1)..(25): SEQ ID NO: 1165; WAN024DEH; Start 155; Stop 179
tcgttgatgtcatcgatcagcattt

SEQ ID NO: 285416 - DNA, 25 bp, Artificial
  probe
  misc_feature (1)..(25): SEQ ID NO: 1165; WAN024DEH; Start 157; Stop 181
gttgatgtcatcgatcagcatttta

SEQ ID NO: 285417 - DNA, 25 bp, Artificial
  probe
  misc_feature (1)..(25): SEQ ID NO: 1165; WAN024DEH; Start 158; Stop 182
ttgatgtcatcgatcagcattttaa

SEQ ID NO: 285418 - DNA, 25 bp, Artificial
  probe
  misc_feature (1)..(25): SEQ ID NO: 1165; WAN024DEH; Start 159; Stop 183
tgatgtcatcgatcagcattttaat

SEQ ID NO: 285419 - DNA, 25 bp, Artificial
  probe
  misc_feature (1)..(25): SEQ ID NO: 1165; WAN024DEH; Start 154; Stop 178
atcgttgatgtcatcgatcagcatt

SEQ ID NO: 285420 - DNA, 25 bp, Artificial
  probe
  misc_feature (1)..(25): SEQ ID NO: 1165; WAN024DEH; Start 153; Stop 177
aatcgttgatgtcatcgatcagcat

SEQ ID NO: 285421 - DNA, 25 bp, Artificial
  probe
  misc_feature (1)..(25): SEQ ID NO: 1165; WAN024DEH; Start 73; Stop 97
atgactggccgctatattatggcag

SEQ ID NO: 285422 - DNA, 25 bp, Artificial
  probe
  misc_feature (1)..(25): SEQ ID NO: 1165; WAN024DEH; Start 72; Stop 96
gatgactggccgctatattatggca

SEQ ID NO: 285423 - DNA, 25 bp, Artificial
  probe
  misc_feature (1)..(25): SEQ ID NO: 1165; WAN024DEH; Start 104; Stop 128
gggcaattttactctttagaaattt

SEQ ID NO: 285424 - DNA, 25 bp, Artificial
  probe
  misc_feature (1)..(25): SEQ ID NO: 1165; WAN024DEH; Start 156; Stop 180
cgttgatgtcatcgatcagcatttt

SEQ ID NO: 285425 - DNA, 25 bp, Artificial
  probe
  misc_feature (1)..(25): SEQ ID NO: 1166; WAN024C9X; Start 149; Stop 173
tagtgacagactctcgctatatcat

SEQ ID NO: 285426 - DNA, 25 bp, Artificial
  probe
  misc_feature (1)..(25): SEQ ID NO: 1166; WAN024C9X; Start 150; Stop 174
agtgacagactctcgctatatcatc

SEQ ID NO: 285427 - DNA, 25 bp, Artificial
  probe
  misc_feature (1)..(25): SEQ ID NO: 1166; WAN024C9X; Start 374; Stop 398
gtatgattaaggatgaggcagagat

SEQ ID NO: 285428 - DNA, 25 bp, Artificial
  probe
  misc_feature (1)..(25): SEQ ID NO: 1166; WAN024C9X; Start 376; Stop 400
atgattaaggatgaggcagagattg

SEQ ID NO: 285429 - DNA, 25 bp, Artificial
  probe
  misc_feature (1)..(25): SEQ ID NO: 1166; WAN024C9X; Start 366; Stop 390
aggtcttcgtatgattaaggatgag

SEQ ID NO: 285430 - DNA, 25 bp, Artificial
  probe
  misc_feature (1)..(25): SEQ ID NO: 1166; WAN024C9X; Start 375; Stop 399
tatgattaaggatgaggcagagatt

SEQ ID NO: 285431 - DNA, 25 bp, Artificial
  probe
  misc_feature (1)..(25): SEQ ID NO: 1166; WAN024C9X; Start 367; Stop 391
ggtcttcgtatgattaaggatgagg

SEQ ID NO: 285432 - DNA, 25 bp, Artificial
  probe
  misc_feature (1)..(25): SEQ ID NO: 1166; WAN024C9X; Start 365; Stop 389
aaggtcttcgtatgattaaggatga

SEQ ID NO: 285433 - DNA, 25 bp, Artificial
  probe
  misc_feature (1)..(25): SEQ ID NO: 1166; WAN024C9X; Start 371; Stop 395
ttcgtatgattaaggatgaggcaga

SEQ ID NO: 285434 - DNA, 25 bp, Artificial
  probe
  misc_feature (1)..(25): SEQ ID NO: 1166; WAN024C9X; Start 370; Stop 394
cttcgtatgattaaggatgaggcag

SEQ ID NO: 285435 - DNA, 25 bp, Artificial
  probe
  misc_feature (1)..(25): SEQ ID NO: 1166; WAN024C9X; Start 368; Stop 392
gtcttcgtatgattaaggatgaggc

SEQ ID NO: 285436 - DNA, 25 bp, Artificial
  probe
  misc_feature (1)..(25): SEQ ID NO: 1166; WAN024C9X; Start 147; Stop 171
cttagtgacagactctcgctatatc

SEQ ID NO: 285437 - DNA, 25 bp, Artificial
  probe
  misc_feature (1)..(25): SEQ ID NO: 1166; WAN024C9X; Start 146; Stop 170
tcttagtgacagactctcgctatat

SEQ ID NO: 285438 - DNA, 25 bp, Artificial
  probe
  misc_feature (1)..(25): SEQ ID NO: 1166; WAN024C9X; Start 148; Stop 172
ttagtgacagactctcgctatatca

SEQ ID NO: 285439 - DNA, 25 bp, Artificial
  probe
  misc_feature (1)..(25): SEQ ID NO: 1166; WAN024C9X; Start 369; Stop 393
tcttcgtatgattaaggatgaggca

SEQ ID NO: 285440 - DNA, 25 bp, Artificial
  probe
  misc_feature (1)..(25): SEQ ID NO: 1166; WAN024C9X; Start 373; Stop 397
cgtatgattaaggatgaggcagaga

SEQ ID NO: 285441 - DNA, 25 bp, Artificial
  probe
  misc_feature (1)..(25): SEQ ID NO: 1166; WAN024C9X; Start 372; Stop 396
tcgtatgattaaggatgaggcagag

SEQ ID NO: 285442 - DNA, 25 bp, Artificial
  probe
  misc_feature (1)..(25): SEQ ID NO: 1166; WAN024C9X; Start 151; Stop 175
gtgacagactctcgctatatcatcg

SEQ ID NO: 285443 - DNA, 25 bp, Artificial
  probe
  misc_feature (1)..(25): SEQ ID NO: 1166; WAN024C9X; Start 809; Stop 833
atattatcattgaggcaggttatgg

SEQ ID NO: 285444 - DNA, 25 bp, Artificial
  probe
  misc_feature (1)..(25): SEQ ID NO: 1166; WAN024C9X; Start 359; Stop 383
ttgtggaaggtcttcgtatgattaa

SEQ ID NO: 285445 - DNA, 25 bp, Artificial
  probe
  misc_feature (1)..(25): SEQ ID NO: 1166; WAN024C9X; Start 1007; Stop 1031
cagagacaggttgtgaattattgac

SEQ ID NO: 285446 - DNA, 25 bp, Artificial
  probe
  misc_feature (1)..(25): SEQ ID NO: 1166; WAN024C9X; Start 1006; Stop 1030
acagagacaggttgtgaattattga

SEQ ID NO: 285447 - DNA, 25 bp, Artificial
  probe
  misc_feature (1)..(25): SEQ ID NO: 1166; WAN024C9X; Start 1001; Stop 1025
tgattacagagacaggttgtgaatt

SEQ ID NO: 285448 - DNA, 25 bp, Artificial
  probe
  misc_feature (1)..(25): SEQ ID NO: 1166; WAN024C9X; Start 363; Stop 387
ggaaggtcttcgtatgattaaggat

SEQ ID NO: 285449 - DNA, 25 bp, Artificial
  probe
  misc_feature (1)..(25): SEQ ID NO: 1166; WAN024C9X; Start 360; Stop 384
tgtggaaggtcttcgtatgattaag

SEQ ID NO: 285450 - DNA, 25 bp, Artificial
  probe
  misc_feature (1)..(25): SEQ ID NO: 1166; WAN024C9X; Start 364; Stop 388
gaaggtcttcgtatgattaaggatg

SEQ ID NO: 285451 - DNA, 25 bp, Artificial
  probe
  misc_feature (1)..(25): SEQ ID NO: 1166; WAN024C9X; Start 1000; Stop 1024
ctgattacagagacaggttgtgaat

SEQ ID NO: 285452 - DNA, 25 bp, Artificial
  probe
  misc_feature (1)..(25): SEQ ID NO: 1166; WAN024C9X; Start 362; Stop 386
tggaaggtcttcgtatgattaagga

SEQ ID NO: 285453 - DNA, 25 bp, Artificial
  probe
  misc_feature (1)..(25): SEQ ID NO: 1166; WAN024C9X; Start 361; Stop 385
gtggaaggtcttcgtatgattaagg

SEQ ID NO: 285454 - DNA, 25 bp, Artificial
  probe
  misc_feature (1)..(25): SEQ ID NO: 1166; WAN024C9X; Start 1005; Stop 1029
tacagagacaggttgtgaattattg

SEQ ID NO: 285455 - DNA, 25 bp, Artificial
  probe
  misc_feature (1)..(25): SEQ ID NO: 1166; WAN024C9X; Start 291; Stop 315
ttcagtgtcttattaccaccgtatg

SEQ ID NO: 285456 - DNA, 25 bp, Artificial
  probe
  misc_feature (1)..(25): SEQ ID NO: 1166; WAN024C9X; Start 1002; Stop 1026
gattacagagacaggttgtgaatta

SEQ ID NO: 285457 - DNA, 25 bp, Artificial
  probe
  misc_feature (1)..(25): SEQ ID NO: 1166; WAN024C9X; Start 165; Stop 189
ctatatcatcgcagctaagcaagaa

SEQ ID NO: 285458 - DNA, 25 bp, Artificial
  probe
  misc_feature (1)..(25): SEQ ID NO: 1167; WAN024DQO; Start 156; Stop 180
ttattctgccaagttagaccgtgat

SEQ ID NO: 285459 - DNA, 25 bp, Artificial
  probe
  misc_feature (1)..(25): SEQ ID NO: 1167; WAN024DQO; Start 256; Stop 280
atcaacacaagttcagcaacaacaa

SEQ ID NO: 285460 - DNA, 25 bp, Artificial
  probe
  misc_feature (1)..(25): SEQ ID NO: 1167; WAN024DQO; Start 255; Stop 279
aatcaacacaagttcagcaacaaca

SEQ ID NO: 285461 - DNA, 25 bp, Artificial
  probe
  misc_feature (1)..(25): SEQ ID NO: 1167; WAN024DQO; Start 817; Stop 841
gcaagtacagcttcttctagtaatg

SEQ ID NO: 285462 - DNA, 25 bp, Artificial
  probe
  misc_feature (1)..(25): SEQ ID NO: 1167; WAN024DQO; Start 514; Stop 538
ggtgagtgggtttatgattcttctt

SEQ ID NO: 285463 - DNA, 25 bp, Artificial
  probe
  misc_feature (1)..(25): SEQ ID NO: 1167; WAN024DQO; Start 257; Stop 281
tcaacacaagttcagcaacaacaag

SEQ ID NO: 285464 - DNA, 25 bp, Artificial
  probe
  misc_feature (1)..(25): SEQ ID NO: 1167; WAN024DQO; Start 155; Stop 179
gttattctgccaagttagaccgtga

SEQ ID NO: 285465 - DNA, 25 bp, Artificial
  probe
  misc_feature (1)..(25): SEQ ID NO: 1167; WAN024DQO; Start 512; Stop 536
aaggtgagtgggtttatgattcttc

SEQ ID NO: 285466 - DNA, 25 bp, Artificial
  probe
  misc_feature (1)..(25): SEQ ID NO: 1167; WAN024DQO; Start 249; Stop 273
tattcaaatcaacacaagttcagca

SEQ ID NO: 285467 - DNA, 25 bp, Artificial
  probe
  misc_feature (1)..(25): SEQ ID NO: 1167; WAN024DQO; Start 246; Stop 270
ggctattcaaatcaacacaagttca

SEQ ID NO: 285468 - DNA, 25 bp, Artificial
  probe
  misc_feature (1)..(25): SEQ ID NO: 1167; WAN024DQO; Start 250; Stop 274
attcaaatcaacacaagttcagcaa

SEQ ID NO: 285469 - DNA, 25 bp, Artificial
  probe
  misc_feature (1)..(25): SEQ ID NO: 1167; WAN024DQO; Start 157; Stop 181
tattctgccaagttagaccgtgatc

SEQ ID NO: 285470 - DNA, 25 bp, Artificial
  probe
  misc_feature (1)..(25): SEQ ID NO: 1167; WAN024DQO; Start 511; Stop 535
caaggtgagtgggtttatgattctt

SEQ ID NO: 285471 - DNA, 25 bp, Artificial
  probe
  misc_feature (1)..(25): SEQ ID NO: 1167; WAN024DQO; Start 525; Stop 549
ttatgattcttcttaccaagcatgg

SEQ ID NO: 285472 - DNA, 25 bp, Artificial
  probe
  misc_feature (1)..(25): SEQ ID NO: 1167; WAN024DQO; Start 248; Stop 272
ctattcaaatcaacacaagttcagc

SEQ ID NO: 285473 - DNA, 25 bp, Artificial
  probe
  misc_feature (1)..(25): SEQ ID NO: 1167; WAN024DQO; Start 247; Stop 271
gctattcaaatcaacacaagttcag

SEQ ID NO: 285474 - DNA, 25 bp, Artificial
  probe
  misc_feature (1)..(25): SEQ ID NO: 1167; WAN024DQO; Start 513; Stop 537
aggtgagtgggtttatgattcttct

SEQ ID NO: 285475 - DNA, 25 bp, Artificial
  probe
  misc_feature (1)..(25): SEQ ID NO: 1167; WAN024DQO; Start 242; Stop 266
caacggctattcaaatcaacacaag

SEQ ID NO: 285476 - DNA, 25 bp, Artificial
  probe
  misc_feature (1)..(25): SEQ ID NO: 1167; WAN024DQO; Start 236; Stop 260
aacagtcaacggctattcaaatcaa

SEQ ID NO: 285477 - DNA, 25 bp, Artificial
  probe
  misc_feature (1)..(25): SEQ ID NO: 1167; WAN024DQO; Start 235; Stop 259
aaacagtcaacggctattcaaatca

SEQ ID NO: 285478 - DNA, 25 bp, Artificial
  probe
  misc_feature (1)..(25): SEQ ID NO: 1167; WAN024DQO; Start 624; Stop 648
aatggctaaaggtgaatgggtttat

SEQ ID NO: 285479 - DNA, 25 bp, Artificial
  probe
  misc_feature (1)..(25): SEQ ID NO: 1167; WAN024DQO; Start 516; Stop 540
tgagtgggtttatgattcttcttac

SEQ ID NO: 285480 - DNA, 25 bp, Artificial
  probe
  misc_feature (1)..(25): SEQ ID NO: 1167; WAN024DQO; Start 515; Stop 539
gtgagtgggtttatgattcttctta

SEQ ID NO: 285481 - DNA, 25 bp, Artificial
  probe
  misc_feature (1)..(25): SEQ ID NO: 1167; WAN024DQO; Start 818; Stop 842
caagtacagcttcttctagtaatga

SEQ ID NO: 285482 - DNA, 25 bp, Artificial
  probe
  misc_feature (1)..(25): SEQ ID NO: 1167; WAN024DQO; Start 623; Stop 647
aaatggctaaaggtgaatgggttta

SEQ ID NO: 285483 - DNA, 25 bp, Artificial
  probe
  misc_feature (1)..(25): SEQ ID NO: 1167; WAN024DQO; Start 258; Stop 282
caacacaagttcagcaacaacaagt

SEQ ID NO: 285484 - DNA, 25 bp, Artificial
  probe
  misc_feature (1)..(25): SEQ ID NO: 1167; WAN024DQO; Start 307; Stop 331
tggtactactttgatggaaatggaa

SEQ ID NO: 285485 - DNA, 25 bp, Artificial
  probe
  misc_feature (1)..(25): SEQ ID NO: 1167; WAN024DQO; Start 306; Stop 330
ttggtactactttgatggaaatgga

SEQ ID NO: 285486 - DNA, 25 bp, Artificial
  probe
  misc_feature (1)..(25): SEQ ID NO: 1167; WAN024DQO; Start 304; Stop 328
gcttggtactactttgatggaaatg

SEQ ID NO: 285487 - DNA, 25 bp, Artificial
  probe
  misc_feature (1)..(25): SEQ ID NO: 1167; WAN024DQO; Start 305; Stop 329
cttggtactactttgatggaaatgg

SEQ ID NO: 285488 - DNA, 25 bp, Artificial
  probe
  misc_feature (1)..(25): SEQ ID NO: 1167; WAN024DQO; Start 251; Stop 275
ttcaaatcaacacaagttcagcaac

SEQ ID NO: 285489 - DNA, 25 bp, Artificial
  probe
  misc_feature (1)..(25): SEQ ID NO: 1167; WAN024DQO; Start 245; Stop 269
cggctattcaaatcaacacaagttc

SEQ ID NO: 285490 - DNA, 25 bp, Artificial
  probe
  misc_feature (1)..(25): SEQ ID NO: 1167; WAN024DQO; Start 311; Stop 335
actactttgatggaaatggaaatct

SEQ ID NO: 285491 - DNA, 25 bp, Artificial
  probe
  misc_feature (1)..(25): SEQ ID NO: 1168; WAN024DVW-5; Start 157; Stop 181
tatggcaatgataatggtaacggat

SEQ ID NO: 285492 - DNA, 25 bp, Artificial
  probe
  misc_feature (1)..(25): SEQ ID NO: 1168; WAN024DVW-5; Start 1042; Stop 1066
tggaatggagaaggtaggattagtt

SEQ ID NO: 285493 - DNA, 25 bp, Artificial
  probe
  misc_feature (1)..(25): SEQ ID NO: 1168; WAN024DVW-5; Start 1041; Stop 1065
ttggaatggagaaggtaggattagt

SEQ ID NO: 285494 - DNA, 25 bp, Artificial
  probe
  misc_feature (1)..(25): SEQ ID NO: 1168; WAN024DVW-5; Start 158; Stop 182
atggcaatgataatggtaacggatt

SEQ ID NO: 285495 - DNA, 25 bp, Artificial
  probe
  misc_feature (1)..(25): SEQ ID NO: 1168; WAN024DVW-5; Start 1043; Stop 1067
ggaatggagaaggtaggattagttc

SEQ ID NO: 285496 - DNA, 25 bp, Artificial
  probe
  misc_feature (1)..(25): SEQ ID NO: 1168; WAN024DVW-5; Start 156; Stop 180
gtatggcaatgataatggtaacgga

SEQ ID NO: 285497 - DNA, 25 bp, Artificial
  probe
  misc_feature (1)..(25): SEQ ID NO: 1168; WAN024DVW-5; Start 1044; Stop 1068
gaatggagaaggtaggattagttca

SEQ ID NO: 285498 - DNA, 25 bp, Artificial
  probe
  misc_feature (1)..(25): SEQ ID NO: 1168; WAN024DVW-5; Start 159; Stop 183
tggcaatgataatggtaacggatta

SEQ ID NO: 285499 - DNA, 25 bp, Artificial
  probe
  misc_feature (1)..(25): SEQ ID NO: 1168; WAN024DVW-5; Start 155; Stop 179
tgtatggcaatgataatggtaacgg

SEQ ID NO: 285500 - DNA, 25 bp, Artificial
  probe
  misc_feature (1)..(25): SEQ ID NO: 1168; WAN024DVW-5; Start 154; Stop 178
ttgtatggcaatgataatggtaacg

SEQ ID NO: 285501 - DNA, 25 bp, Artificial
  probe
  misc_feature (1)..(25): SEQ ID NO: 1168; WAN024DVW-5; Start 152; Stop 176
cgttgtatggcaatgataatggtaa

SEQ ID NO: 285502 - DNA, 25 bp, Artificial
  probe
  misc_feature (1)..(25): SEQ ID NO: 1168; WAN024DVW-5; Start 315; Stop 339
gagagaatggtatgtcaagatgttg

SEQ ID NO: 285503 - DNA, 25 bp, Artificial
  probe
  misc_feature (1)..(25): SEQ ID NO: 1168; WAN024DVW-5; Start 1046; Stop 1070
atggagaaggtaggattagttcatt

SEQ ID NO: 285504 - DNA, 25 bp, Artificial
  probe
  misc_feature (1)..(25): SEQ ID NO: 1168; WAN024DVW-5; Start 1045; Stop 1069
aatggagaaggtaggattagttcat

SEQ ID NO: 285505 - DNA, 25 bp, Artificial
  probe
  misc_feature (1)..(25): SEQ ID NO: 1168; WAN024DVW-5; Start 318; Stop 342
agaatggtatgtcaagatgttggag

SEQ ID NO: 285506 - DNA, 25 bp, Artificial
  probe
  misc_feature (1)..(25): SEQ ID NO: 1168; WAN024DVW-5; Start 317; Stop 341
gagaatggtatgtcaagatgttgga

SEQ ID NO: 285507 - DNA, 25 bp, Artificial
  probe
  misc_feature (1)..(25): SEQ ID NO: 1168; WAN024DVW-5; Start 316; Stop 340
agagaatggtatgtcaagatgttgg

SEQ ID NO: 285508 - DNA, 25 bp, Artificial
  probe
  misc_feature (1)..(25): SEQ ID NO: 1168; WAN024DVW-5; Start 147; Stop 171
ttctccgttgtatggcaatgataat

SEQ ID NO: 285509 - DNA, 25 bp, Artificial
  probe
  misc_feature (1)..(25): SEQ ID NO: 1168; WAN024DVW-5; Start 314; Stop 338
tgagagaatggtatgtcaagatgtt

SEQ ID NO: 285510 - DNA, 25 bp, Artificial
  probe
  misc_feature (1)..(25): SEQ ID NO: 1168; WAN024DVW-5; Start 84; Stop 108
agttaaggctgataatcgtgttcaa

SEQ ID NO: 285511 - DNA, 25 bp, Artificial
  probe
  misc_feature (1)..(25): SEQ ID NO: 1168; WAN024DVW-5; Start 82; Stop 106
ggagttaaggctgataatcgtgttc

SEQ ID NO: 285512 - DNA, 25 bp, Artificial
  probe
  misc_feature (1)..(25): SEQ ID NO: 1168; WAN024DVW-5; Start 711; Stop 735
ttggttgagtggcttatgtgataac

SEQ ID NO: 285513 - DNA, 25 bp, Artificial
  probe
  misc_feature (1)..(25): SEQ ID NO: 1168; WAN024DVW-5; Start 685; Stop 709
ggtacagattctatcgttagtggat

SEQ ID NO: 285514 - DNA, 25 bp, Artificial
  probe
  misc_feature (1)..(25): SEQ ID NO: 1168; WAN024DVW-5; Start 83; Stop 107
gagttaaggctgataatcgtgttca

SEQ ID NO: 285515 - DNA, 25 bp, Artificial
  probe
  misc_feature (1)..(25): SEQ ID NO: 1168; WAN024DVW-5; Start 151; Stop 175
ccgttgtatggcaatgataatggta

SEQ ID NO: 285516 - DNA, 25 bp, Artificial
  probe
  misc_feature (1)..(25): SEQ ID NO: 1168; WAN024DVW-5; Start 148; Stop 172
tctccgttgtatggcaatgataatg

SEQ ID NO: 285517 - DNA, 25 bp, Artificial
  probe
  misc_feature (1)..(25): SEQ ID NO: 1168; WAN024DVW-5; Start 1047; Stop 1071
tggagaaggtaggattagttcatta

SEQ ID NO: 285518 - DNA, 25 bp, Artificial
  probe
  misc_feature (1)..(25): SEQ ID NO: 1168; WAN024DVW-5; Start 81; Stop 105
aggagttaaggctgataatcgtgtt

SEQ ID NO: 285519 - DNA, 25 bp, Artificial
  probe
  misc_feature (1)..(25): SEQ ID NO: 1168; WAN024DVW-5; Start 319; Stop 343
gaatggtatgtcaagatgttggagg

SEQ ID NO: 285520 - DNA, 25 bp, Artificial
  probe
  misc_feature (1)..(25): SEQ ID NO: 1168; WAN024DVW-5; Start 153; Stop 177
gttgtatggcaatgataatggtaac

SEQ ID NO: 285521 - DNA, 25 bp, Artificial
  probe
  misc_feature (1)..(25): SEQ ID NO: 1168; WAN024DVW-5; Start 321; Stop 345
atggtatgtcaagatgttggaggaa

SEQ ID NO: 285522 - DNA, 25 bp, Artificial
  probe
  misc_feature (1)..(25): SEQ ID NO: 1168; WAN024DVW-5; Start 320; Stop 344
aatggtatgtcaagatgttggagga

SEQ ID NO: 285523 - DNA, 25 bp, Artificial
  probe
  misc_feature (1)..(25): SEQ ID NO: 1168; WAN024DVW-5; Start 1299; Stop 1323
gcgtgtaggtaattcctggtatatt

SEQ ID NO: 285524 - DNA, 25 bp, Artificial
  probe
  misc_feature (1)..(25): SEQ ID NO: 1169; WAN024FRE; Start 428; Stop 452
atgcttgtacctatgaccttatgag

SEQ ID NO: 285525 - DNA, 25 bp, Artificial
  probe
  misc_feature (1)..(25): SEQ ID NO: 1169; WAN024FRE; Start 427; Stop 451
gatgcttgtacctatgaccttatga

SEQ ID NO: 285526 - DNA, 25 bp, Artificial
  probe
  misc_feature (1)..(25): SEQ ID NO: 1169; WAN024FRE; Start 426; Stop 450
tgatgcttgtacctatgaccttatg

SEQ ID NO: 285527 - DNA, 25 bp, Artificial
  probe
  misc_feature (1)..(25): SEQ ID NO: 1169; WAN024FRE; Start 430; Stop 454
gcttgtacctatgaccttatgagag

SEQ ID NO: 285528 - DNA, 25 bp, Artificial
  probe
  misc_feature (1)..(25): SEQ ID NO: 1169; WAN024FRE; Start 424; Stop 448
aatgatgcttgtacctatgacctta

SEQ ID NO: 285529 - DNA, 25 bp, Artificial
  probe
  misc_feature (1)..(25): SEQ ID NO: 1169; WAN024FRE; Start 429; Stop 453
tgcttgtacctatgaccttatgaga

SEQ ID NO: 285530 - DNA, 25 bp, Artificial
  probe
  misc_feature (1)..(25): SEQ ID NO: 1169; WAN024FRE; Start 425; Stop 449
atgatgcttgtacctatgaccttat

SEQ ID NO: 285531 - DNA, 25 bp, Artificial
  probe
  misc_feature (1)..(25): SEQ ID NO: 1169; WAN024FRE; Start 431; Stop 455
cttgtacctatgaccttatgagaga

SEQ ID NO: 285532 - DNA, 25 bp, Artificial
  probe
  misc_feature (1)..(25): SEQ ID NO: 1169; WAN024FRE; Start 410; Stop 434
ttaagttcaatgacaatgatgcttg

SEQ ID NO: 285533 - DNA, 25 bp, Artificial
  probe
  misc_feature (1)..(25): SEQ ID NO: 1169; WAN024FRE; Start 595; Stop 619
gatgttgtaaggtggctgaatgaag

SEQ ID NO: 285534 - DNA, 25 bp, Artificial
  probe
  misc_feature (1)..(25): SEQ ID NO: 1169; WAN024FRE; Start 423; Stop 447
caatgatgcttgtacctatgacctt

SEQ ID NO: 285535 - DNA, 25 bp, Artificial
  probe
  misc_feature (1)..(25): SEQ ID NO: 1169; WAN024FRE; Start 432; Stop 456
ttgtacctatgaccttatgagagaa

SEQ ID NO: 285536 - DNA, 25 bp, Artificial
  probe
  misc_feature (1)..(25): SEQ ID NO: 1169; WAN024FRE; Start 433; Stop 457
tgtacctatgaccttatgagagaat

SEQ ID NO: 285537 - DNA, 25 bp, Artificial
  probe
  misc_feature (1)..(25): SEQ ID NO: 1169; WAN024FRE; Start 99; Stop 123
tatttgtgataattgttgggctgga

SEQ ID NO: 285538 - DNA, 25 bp, Artificial
  probe
  misc_feature (1)..(25): SEQ ID NO: 1169; WAN024FRE; Start 434; Stop 458
gtacctatgaccttatgagagaatt

SEQ ID NO: 285539 - DNA, 25 bp, Artificial
  probe
  misc_feature (1)..(25): SEQ ID NO: 1169; WAN024FRE; Start 98; Stop 122
ttatttgtgataattgttgggctgg

SEQ ID NO: 285540 - DNA, 25 bp, Artificial
  probe
  misc_feature (1)..(25): SEQ ID NO: 1169; WAN024FRE; Start 596; Stop 620
atgttgtaaggtggctgaatgaagg

SEQ ID NO: 285541 - DNA, 25 bp, Artificial
  probe
  misc_feature (1)..(25): SEQ ID NO: 1169; WAN024FRE; Start 100; Stop 124
atttgtgataattgttgggctggaa

SEQ ID NO: 285542 - DNA, 25 bp, Artificial
  probe
  misc_feature (1)..(25): SEQ ID NO: 1169; WAN024FRE; Start 101; Stop 125
tttgtgataattgttgggctggaaa

SEQ ID NO: 285543 - DNA, 25 bp, Artificial
  probe
  misc_feature (1)..(25): SEQ ID NO: 1169; WAN024FRE; Start 550; Stop 574
gattgtagtgttggaattgatctta

SEQ ID NO: 285544 - DNA, 25 bp, Artificial
  probe
  misc_feature (1)..(25): SEQ ID NO: 1169; WAN024FRE; Start 186; Stop 210
gcctgattatatcaagatgctcaag

SEQ ID NO: 285545 - DNA, 25 bp, Artificial
  probe
  misc_feature (1)..(25): SEQ ID NO: 1169; WAN024FRE; Start 226; Stop 250
ttgagcggaaatatctcgttgaaat

SEQ ID NO: 285546 - DNA, 25 bp, Artificial
  probe
  misc_feature (1)..(25): SEQ ID NO: 1169; WAN024FRE; Start 183; Stop 207
ttcgcctgattatatcaagatgctc

SEQ ID NO: 285547 - DNA, 25 bp, Artificial
  probe
  misc_feature (1)..(25): SEQ ID NO: 1169; WAN024FRE; Start 227; Stop 251
tgagcggaaatatctcgttgaaatt

SEQ ID NO: 285548 - DNA, 25 bp, Artificial
  probe
  misc_feature (1)..(25): SEQ ID NO: 1169; WAN024FRE; Start 436; Stop 460
acctatgaccttatgagagaatttg

SEQ ID NO: 285549 - DNA, 25 bp, Artificial
  probe
  misc_feature (1)..(25): SEQ ID NO: 1169; WAN024FRE; Start 549; Stop 573
agattgtagtgttggaattgatctt

SEQ ID NO: 285550 - DNA, 25 bp, Artificial
  probe
  misc_feature (1)..(25): SEQ ID NO: 1169; WAN024FRE; Start 548; Stop 572
aagattgtagtgttggaattgatct

SEQ ID NO: 285551 - DNA, 25 bp, Artificial
  probe
  misc_feature (1)..(25): SEQ ID NO: 1169; WAN024FRE; Start 594; Stop 618
cgatgttgtaaggtggctgaatgaa

SEQ ID NO: 285552 - DNA, 25 bp, Artificial
  probe
  misc_feature (1)..(25): SEQ ID NO: 1169; WAN024FRE; Start 225; Stop 249
tttgagcggaaatatctcgttgaaa

SEQ ID NO: 285553 - DNA, 25 bp, Artificial
  probe
  misc_feature (1)..(25): SEQ ID NO: 1169; WAN024FRE; Start 185; Stop 209
cgcctgattatatcaagatgctcaa

SEQ ID NO: 285554 - DNA, 25 bp, Artificial
  probe
  misc_feature (1)..(25): SEQ ID NO: 1169; WAN024FRE; Start 224; Stop 248
atttgagcggaaatatctcgttgaa

SEQ ID NO: 285555 - DNA, 25 bp, Artificial
  probe
  misc_feature (1)..(25): SEQ ID NO: 1169; WAN024FRE; Start 437; Stop 461
cctatgaccttatgagagaatttga

SEQ ID NO: 285556 - DNA, 25 bp, Artificial
  probe
  misc_feature (1)..(25): SEQ ID NO: 1169; WAN024FRE; Start 551; Stop 575
attgtagtgttggaattgatcttaa

SEQ ID NO: 285557 - DNA, 25 bp, Artificial
  probe
  misc_feature (1)..(25): SEQ ID NO: 1170; WAN024FL8; Start 781; Stop 805
tatgatgatgttgtggatgtctctc

SEQ ID NO: 285558 - DNA, 25 bp, Artificial
  probe
  misc_feature (1)..(25): SEQ ID NO: 1170; WAN024FL8; Start 780; Stop 804
ttatgatgatgttgtggatgtctct

SEQ ID NO: 285559 - DNA, 25 bp, Artificial
  probe
  misc_feature (1)..(25): SEQ ID NO: 1170; WAN024FL8; Start 778; Stop 802
tcttatgatgatgttgtggatgtct

SEQ ID NO: 285560 - DNA, 25 bp, Artificial
  probe
  misc_feature (1)..(25): SEQ ID NO: 1170; WAN024FL8; Start 788; Stop 812
atgttgtggatgtctctcagtatag

SEQ ID NO: 285561 - DNA, 25 bp, Artificial
  probe
  misc_feature (1)..(25): SEQ ID NO: 1170; WAN024FL8; Start 787; Stop 811
gatgttgtggatgtctctcagtata

SEQ ID NO: 285562 - DNA, 25 bp, Artificial
  probe
  misc_feature (1)..(25): SEQ ID NO: 1170; WAN024FL8; Start 790; Stop 814
gttgtggatgtctctcagtatagtg

SEQ ID NO: 285563 - DNA, 25 bp, Artificial
  probe
  misc_feature (1)..(25): SEQ ID NO: 1170; WAN024FL8; Start 779; Stop 803
cttatgatgatgttgtggatgtctc

SEQ ID NO: 285564 - DNA, 25 bp, Artificial
  probe
  misc_feature (1)..(25): SEQ ID NO: 1170; WAN024FL8; Start 789; Stop 813
tgttgtggatgtctctcagtatagt

SEQ ID NO: 285565 - DNA, 25 bp, Artificial
  probe
  misc_feature (1)..(25): SEQ ID NO: 1170; WAN024FL8; Start 796; Stop 820
gatgtctctcagtatagtgatatgc

SEQ ID NO: 285566 - DNA, 25 bp, Artificial
  probe
  misc_feature (1)..(25): SEQ ID NO: 1170; WAN024FL8; Start 777; Stop 801
atcttatgatgatgttgtggatgtc

SEQ ID NO: 285567 - DNA, 25 bp, Artificial
  probe
  misc_feature (1)..(25): SEQ ID NO: 1170; WAN024FL8; Start 792; Stop 816
tgtggatgtctctcagtatagtgat

SEQ ID NO: 285568 - DNA, 25 bp, Artificial
  probe
  misc_feature (1)..(25): SEQ ID NO: 1170; WAN024FL8; Start 791; Stop 815
ttgtggatgtctctcagtatagtga

SEQ ID NO: 285569 - DNA, 25 bp, Artificial
  probe
  misc_feature (1)..(25): SEQ ID NO: 1170; WAN024FL8; Start 776; Stop 800
aatcttatgatgatgttgtggatgt

SEQ ID NO: 285570 - DNA, 25 bp, Artificial
  probe
  misc_feature (1)..(25): SEQ ID NO: 1170; WAN024FL8; Start 786; Stop 810
tgatgttgtggatgtctctcagtat

SEQ ID NO: 285571 - DNA, 25 bp, Artificial
  probe
  misc_feature (1)..(25): SEQ ID NO: 1170; WAN024FL8; Start 785; Stop 809
atgatgttgtggatgtctctcagta

SEQ ID NO: 285572 - DNA, 25 bp, Artificial
  probe
  misc_feature (1)..(25): SEQ ID NO: 1170; WAN024FL8; Start 793; Stop 817
gtggatgtctctcagtatagtgata

SEQ ID NO: 285573 - DNA, 25 bp, Artificial
  probe
  misc_feature (1)..(25): SEQ ID NO: 1170; WAN024FL8; Start 852; Stop 876
tactgactattcttcgtctatgtgg

SEQ ID NO: 285574 - DNA, 25 bp, Artificial
  probe
  misc_feature (1)..(25): SEQ ID NO: 1170; WAN024FL8; Start 775; Stop 799
caatcttatgatgatgttgtggatg

SEQ ID NO: 285575 - DNA, 25 bp, Artificial
  probe
  misc_feature (1)..(25): SEQ ID NO: 1170; WAN024FL8; Start 1113; Stop 1137
ggcgaagattgctgaatattgtaat

SEQ ID NO: 285576 - DNA, 25 bp, Artificial
  probe
  misc_feature (1)..(25): SEQ ID NO: 1170; WAN024FL8; Start 846; Stop 870
actgattactgactattcttcgtct

SEQ ID NO: 285577 - DNA, 25 bp, Artificial
  probe
  misc_feature (1)..(25): SEQ ID NO: 1170; WAN024FL8; Start 782; Stop 806
atgatgatgttgtggatgtctctca

SEQ ID NO: 285578 - DNA, 25 bp, Artificial
  probe
  misc_feature (1)..(25): SEQ ID NO: 1170; WAN024FL8; Start 774; Stop 798
tcaatcttatgatgatgttgtggat

SEQ ID NO: 285579 - DNA, 25 bp, Artificial
  probe
  misc_feature (1)..(25): SEQ ID NO: 1170; WAN024FL8; Start 1112; Stop 1136
tggcgaagattgctgaatattgtaa

SEQ ID NO: 285580 - DNA, 25 bp, Artificial
  probe
  misc_feature (1)..(25): SEQ ID NO: 1170; WAN024FL8; Start 797; Stop 821
atgtctctcagtatagtgatatgca

SEQ ID NO: 285581 - DNA, 25 bp, Artificial
  probe
  misc_feature (1)..(25): SEQ ID NO: 1170; WAN024FL8; Start 1114; Stop 1138
gcgaagattgctgaatattgtaatt

SEQ ID NO: 285582 - DNA, 25 bp, Artificial
  probe
  misc_feature (1)..(25): SEQ ID NO: 1170; WAN024FL8; Start 794; Stop 818
tggatgtctctcagtatagtgatat

SEQ ID NO: 285583 - DNA, 25 bp, Artificial
  probe
  misc_feature (1)..(25): SEQ ID NO: 1170; WAN024FL8; Start 795; Stop 819
ggatgtctctcagtatagtgatatg

SEQ ID NO: 285584 - DNA, 25 bp, Artificial
  probe
  misc_feature (1)..(25): SEQ ID NO: 1170; WAN024FL8; Start 784; Stop 808
gatgatgttgtggatgtctctcagt

SEQ ID NO: 285585 - DNA, 25 bp, Artificial
  probe
  misc_feature (1)..(25): SEQ ID NO: 1170; WAN024FL8; Start 783; Stop 807
tgatgatgttgtggatgtctctcag

SEQ ID NO: 285586 - DNA, 25 bp, Artificial
  probe
  misc_feature (1)..(25): SEQ ID NO: 1170; WAN024FL8; Start 1111; Stop 1135
gtggcgaagattgctgaatattgta

SEQ ID NO: 285587 - DNA, 25 bp, Artificial
  probe
  misc_feature (1)..(25): SEQ ID NO: 1170; WAN024FL8; Start 236; Stop 260
agattgtgacttgtcgttaccgtag

SEQ ID NO: 285588 - DNA, 25 bp, Artificial
  probe
  misc_feature (1)..(25): SEQ ID NO: 1170; WAN024FL8; Start 235; Stop 259
gagattgtgacttgtcgttaccgta

SEQ ID NO: 285589 - DNA, 25 bp, Artificial
  probe
  misc_feature (1)..(25): SEQ ID NO: 1170; WAN024FL8; Start 868; Stop 892
tctatgtgggatttctctctctctt

SEQ ID NO: 285590 - DNA, 25 bp, Artificial
  probe
  misc_feature (1)..(25): SEQ ID NO: 1171; WAN024GFZ; Start 71; Stop 95
tgttccacttctatcattgccatat

SEQ ID NO: 285591 - DNA, 25 bp, Artificial
  probe
  misc_feature (1)..(25): SEQ ID NO: 1171; WAN024GFZ; Start 72; Stop 96
gttccacttctatcattgccatatc

SEQ ID NO: 285592 - DNA, 25 bp, Artificial
  probe
  misc_feature (1)..(25): SEQ ID NO: 1171; WAN024GFZ; Start 73; Stop 97
ttccacttctatcattgccatatct

SEQ ID NO: 285593 - DNA, 25 bp, Artificial
  probe
  misc_feature (1)..(25): SEQ ID NO: 1171; WAN024GFZ; Start 70; Stop 94
atgttccacttctatcattgccata

SEQ ID NO: 285594 - DNA, 25 bp, Artificial
  probe
  misc_feature (1)..(25): SEQ ID NO: 1171; WAN024GFZ; Start 105; Stop 129
tatcgtaaggaatagcaacattgtg

SEQ ID NO: 285595 - DNA, 25 bp, Artificial
  probe
  misc_feature (1)..(25): SEQ ID NO: 1171; WAN024GFZ; Start 74; Stop 98
tccacttctatcattgccatatcta

SEQ ID NO: 285596 - DNA, 25 bp, Artificial
  probe
  misc_feature (1)..(25): SEQ ID NO: 1171; WAN024GFZ; Start 69; Stop 93
gatgttccacttctatcattgccat

SEQ ID NO: 285597 - DNA, 25 bp, Artificial
  probe
  misc_feature (1)..(25): SEQ ID NO: 1171; WAN024GFZ; Start 67; Stop 91
aagatgttccacttctatcattgcc

SEQ ID NO: 285598 - DNA, 25 bp, Artificial
  probe
  misc_feature (1)..(25): SEQ ID NO: 1171; WAN024GFZ; Start 106; Stop 130
atcgtaaggaatagcaacattgtgt

SEQ ID NO: 285599 - DNA, 25 bp, Artificial
  probe
  misc_feature (1)..(25): SEQ ID NO: 1171; WAN024GFZ; Start 75; Stop 99
ccacttctatcattgccatatctat

SEQ ID NO: 285600 - DNA, 25 bp, Artificial
  probe
  misc_feature (1)..(25): SEQ ID NO: 1171; WAN024GFZ; Start 104; Stop 128
ctatcgtaaggaatagcaacattgt

SEQ ID NO: 285601 - DNA, 25 bp, Artificial
  probe
  misc_feature (1)..(25): SEQ ID NO: 1171; WAN024GFZ; Start 103; Stop 127
cctatcgtaaggaatagcaacattg

SEQ ID NO: 285602 - DNA, 25 bp, Artificial
  probe
  misc_feature (1)..(25): SEQ ID NO: 1171; WAN024GFZ; Start 68; Stop 92
agatgttccacttctatcattgcca

SEQ ID NO: 285603 - DNA, 25 bp, Artificial
  probe
  misc_feature (1)..(25): SEQ ID NO: 1171; WAN024GFZ; Start 79; Stop 103
ttctatcattgccatatctatctcc

SEQ ID NO: 285604 - DNA, 25 bp, Artificial
  probe
  misc_feature (1)..(25): SEQ ID NO: 1171; WAN024GFZ; Start 88; Stop 112
tgccatatctatctccctatcgtaa

SEQ ID NO: 285605 - DNA, 25 bp, Artificial
  probe
  misc_feature (1)..(25): SEQ ID NO: 1171; WAN024GFZ; Start 87; Stop 111
ttgccatatctatctccctatcgta

SEQ ID NO: 285606 - DNA, 25 bp, Artificial
  probe
  misc_feature (1)..(25): SEQ ID NO: 1171; WAN024GFZ; Start 85; Stop 109
cattgccatatctatctccctatcg

SEQ ID NO: 285607 - DNA, 25 bp, Artificial
  probe
  misc_feature (1)..(25): SEQ ID NO: 1171; WAN024GFZ; Start 89; Stop 113
gccatatctatctccctatcgtaag

SEQ ID NO: 285608 - DNA, 25 bp, Artificial
  probe
  misc_feature (1)..(25): SEQ ID NO: 1171; WAN024GFZ; Start 86; Stop 110
attgccatatctatctccctatcgt

SEQ ID NO: 285609 - DNA, 25 bp, Artificial
  probe
  misc_feature (1)..(25): SEQ ID NO: 1171; WAN024GFZ; Start 84; Stop 108
tcattgccatatctatctccctatc

SEQ ID NO: 285610 - DNA, 25 bp, Artificial
  probe
  misc_feature (1)..(25): SEQ ID NO: 1171; WAN024GFZ; Start 81; Stop 105
ctatcattgccatatctatctccct

SEQ ID NO: 285611 - DNA, 25 bp, Artificial
  probe
  misc_feature (1)..(25): SEQ ID NO: 1171; WAN024GFZ; Start 80; Stop 104
tctatcattgccatatctatctccc

SEQ ID NO: 285612 - DNA, 25 bp, Artificial
  probe
  misc_feature (1)..(25): SEQ ID NO: 1171; WAN024GFZ; Start 76; Stop 100
cacttctatcattgccatatctatc

SEQ ID NO: 285613 - DNA, 25 bp, Artificial
  probe
  misc_feature (1)..(25): SEQ ID NO: 1171; WAN024GFZ; Start 77; Stop 101
acttctatcattgccatatctatct

SEQ ID NO: 285614 - DNA, 25 bp, Artificial
  probe
  misc_feature (1)..(25): SEQ ID NO: 1171; WAN024GFZ; Start 83; Stop 107
atcattgccatatctatctccctat

SEQ ID NO: 285615 - DNA, 25 bp, Artificial
  probe
  misc_feature (1)..(25): SEQ ID NO: 1171; WAN024GFZ; Start 82; Stop 106
tatcattgccatatctatctcccta

SEQ ID NO: 285616 - DNA, 25 bp, Artificial
  probe
  misc_feature (1)..(25): SEQ ID NO: 1171; WAN024GFZ; Start 78; Stop 102
cttctatcattgccatatctatctc

SEQ ID NO: 285617 - DNA, 25 bp, Artificial
  probe
  misc_feature (1)..(25): SEQ ID NO: 1171; WAN024GFZ; Start 102; Stop 126
ccctatcgtaaggaatagcaacatt

SEQ ID NO: 285618 - DNA, 25 bp, Artificial
  probe
  misc_feature (1)..(25): SEQ ID NO: 1171; WAN024GFZ; Start 97; Stop 121
tatctccctatcgtaaggaatagca

SEQ ID NO: 285619 - DNA, 25 bp, Artificial
  probe
  misc_feature (1)..(25): SEQ ID NO: 1171; WAN024GFZ; Start 66; Stop 90
gaagatgttccacttctatcattgc

SEQ ID NO: 285620 - DNA, 25 bp, Artificial
  probe
  misc_feature (1)..(25): SEQ ID NO: 1171; WAN024GFZ; Start 98; Stop 122
atctccctatcgtaaggaatagcaa

SEQ ID NO: 285621 - DNA, 25 bp, Artificial
  probe
  misc_feature (1)..(25): SEQ ID NO: 1171; WAN024GFZ; Start 96; Stop 120
ctatctccctatcgtaaggaatagc

SEQ ID NO: 285622 - DNA, 25 bp, Artificial
  probe
  misc_feature (1)..(25): SEQ ID NO: 1171; WAN024GFZ; Start 90; Stop 114
ccatatctatctccctatcgtaagg

SEQ ID NO: 285623 - DNA, 25 bp, Artificial
  probe
  misc_feature (1)..(25): SEQ ID NO: 1172; WAN024CWN-5; Start 252; Stop 276
tggacctaagacagaagaagaacta

SEQ ID NO: 285624 - DNA, 25 bp, Artificial
  probe
  misc_feature (1)..(25): SEQ ID NO: 1172; WAN024CWN-5; Start 55; Stop 79
ttaggtgttgcttctgttatgattg

SEQ ID NO: 285625 - DNA, 25 bp, Artificial
  probe
  misc_feature (1)..(25): SEQ ID NO: 1172; WAN024CWN-5; Start 250; Stop 274
gatggacctaagacagaagaagaac

SEQ ID NO: 285626 - DNA, 25 bp, Artificial
  probe
  misc_feature (1)..(25): SEQ ID NO: 1172; WAN024CWN-5; Start 249; Stop 273
agatggacctaagacagaagaagaa

SEQ ID NO: 285627 - DNA, 25 bp, Artificial
  probe
  misc_feature (1)..(25): SEQ ID NO: 1172; WAN024CWN-5; Start 253; Stop 277
ggacctaagacagaagaagaactat

SEQ ID NO: 285628 - DNA, 25 bp, Artificial
  probe
  misc_feature (1)..(25): SEQ ID NO: 1172; WAN024CWN-5; Start 260; Stop 284
agacagaagaagaactattagcact

SEQ ID NO: 285629 - DNA, 25 bp, Artificial
  probe
  misc_feature (1)..(25): SEQ ID NO: 1172; WAN024CWN-5; Start 251; Stop 275
atggacctaagacagaagaagaact

SEQ ID NO: 285630 - DNA, 25 bp, Artificial
  probe
  misc_feature (1)..(25): SEQ ID NO: 1172; WAN024CWN-5; Start 1707; Stop 1731
tgctaaggttgttatcactgaagat

SEQ ID NO: 285631 - DNA, 25 bp, Artificial
  probe
  misc_feature (1)..(25): SEQ ID NO: 1172; WAN024CWN-5; Start 1709; Stop 1733
ctaaggttgttatcactgaagatgc

SEQ ID NO: 285632 - DNA, 25 bp, Artificial
  probe
  misc_feature (1)..(25): SEQ ID NO: 1172; WAN024CWN-5; Start 1708; Stop 1732
gctaaggttgttatcactgaagatg

SEQ ID NO: 285633 - DNA, 25 bp, Artificial
  probe
  misc_feature (1)..(25): SEQ ID NO: 1172; WAN024CWN-5; Start 56; Stop 80
taggtgttgcttctgttatgattgg

SEQ ID NO: 285634 - DNA, 25 bp, Artificial
  probe
  misc_feature (1)..(25): SEQ ID NO: 1172; WAN024CWN-5; Start 51; Stop 75
ttcattaggtgttgcttctgttatg

SEQ ID NO: 285635 - DNA, 25 bp, Artificial
  probe
  misc_feature (1)..(25): SEQ ID NO: 1172; WAN024CWN-5; Start 53; Stop 77
cattaggtgttgcttctgttatgat

SEQ ID NO: 285636 - DNA, 25 bp, Artificial
  probe
  misc_feature (1)..(25): SEQ ID NO: 1172; WAN024CWN-5; Start 1710; Stop 1734
taaggttgttatcactgaagatgcc

SEQ ID NO: 285637 - DNA, 25 bp, Artificial
  probe
  misc_feature (1)..(25): SEQ ID NO: 1172; WAN024CWN-5; Start 248; Stop 272
cagatggacctaagacagaagaaga

SEQ ID NO: 285638 - DNA, 25 bp, Artificial
  probe
  misc_feature (1)..(25): SEQ ID NO: 1172; WAN024CWN-5; Start 54; Stop 78
attaggtgttgcttctgttatgatt

SEQ ID NO: 285639 - DNA, 25 bp, Artificial
  probe
  misc_feature (1)..(25): SEQ ID NO: 1172; WAN024CWN-5; Start 259; Stop 283
aagacagaagaagaactattagcac

SEQ ID NO: 285640 - DNA, 25 bp, Artificial
  probe
  misc_feature (1)..(25): SEQ ID NO: 1172; WAN024CWN-5; Start 247; Stop 271
acagatggacctaagacagaagaag

SEQ ID NO: 285641 - DNA, 25 bp, Artificial
  probe
  misc_feature (1)..(25): SEQ ID NO: 1172; WAN024CWN-5; Start 1714; Stop 1738
gttgttatcactgaagatgccaatg

SEQ ID NO: 285642 - DNA, 25 bp, Artificial
  probe
  misc_feature (1)..(25): SEQ ID NO: 1172; WAN024CWN-5; Start 262; Stop 286
acagaagaagaactattagcacttg

SEQ ID NO: 285643 - DNA, 25 bp, Artificial
  probe
  misc_feature (1)..(25): SEQ ID NO: 1172; WAN024CWN-5; Start 263; Stop 287
cagaagaagaactattagcacttga

SEQ ID NO: 285644 - DNA, 25 bp, Artificial
  probe
  misc_feature (1)..(25): SEQ ID NO: 1172; WAN024CWN-5; Start 261; Stop 285
gacagaagaagaactattagcactt

SEQ ID NO: 285645 - DNA, 25 bp, Artificial
  probe
  misc_feature (1)..(25): SEQ ID NO: 1172; WAN024CWN-5; Start 1155; Stop 1179
aatcaatgagacaacagcagagtac

SEQ ID NO: 285646 - DNA, 25 bp, Artificial
  probe
  misc_feature (1)..(25): SEQ ID NO: 1172; WAN024CWN-5; Start 1713; Stop 1737
ggttgttatcactgaagatgccaat

SEQ ID NO: 285647 - DNA, 25 bp, Artificial
  probe
  misc_feature (1)..(25): SEQ ID NO: 1172; WAN024CWN-5; Start 58; Stop 82
ggtgttgcttctgttatgattggag

SEQ ID NO: 285648 - DNA, 25 bp, Artificial
  probe
  misc_feature (1)..(25): SEQ ID NO: 1172; WAN024CWN-5; Start 254; Stop 278
gacctaagacagaagaagaactatt

SEQ ID NO: 285649 - DNA, 25 bp, Artificial
  probe
  misc_feature (1)..(25): SEQ ID NO: 1172; WAN024CWN-5; Start 264; Stop 288
agaagaagaactattagcacttgaa

SEQ ID NO: 285650 - DNA, 25 bp, Artificial
  probe
  misc_feature (1)..(25): SEQ ID NO: 1172; WAN024CWN-5; Start 1706; Stop 1730
gtgctaaggttgttatcactgaaga

SEQ ID NO: 285651 - DNA, 25 bp, Artificial
  probe
  misc_feature (1)..(25): SEQ ID NO: 1172; WAN024CWN-5; Start 57; Stop 81
aggtgttgcttctgttatgattgga

SEQ ID NO: 285652 - DNA, 25 bp, Artificial
  probe
  misc_feature (1)..(25): SEQ ID NO: 1172; WAN024CWN-5; Start 1715; Stop 1739
ttgttatcactgaagatgccaatgc

SEQ ID NO: 285653 - DNA, 25 bp, Artificial
  probe
  misc_feature (1)..(25): SEQ ID NO: 1172; WAN024CWN-5; Start 1711; Stop 1735
aaggttgttatcactgaagatgcca

SEQ ID NO: 285654 - DNA, 25 bp, Artificial
  probe
  misc_feature (1)..(25): SEQ ID NO: 1172; WAN024CWN-5; Start 1712; Stop 1736
aggttgttatcactgaagatgccaa

SEQ ID NO: 285655 - DNA, 25 bp, Artificial
  probe
  misc_feature (1)..(25): SEQ ID NO: 1172; WAN024CWN-5; Start 1335; Stop 1359
ttcttctattagtttcctcggcaat

SEQ ID NO: 285656 - DNA, 25 bp, Artificial
  probe
  misc_feature (1)..(25): SEQ ID NO: 1173; WAN024FH2; Start 673; Stop 697
gttggagacttgattagtgtgagaa

SEQ ID NO: 285657 - DNA, 25 bp, Artificial
  probe
  misc_feature (1)..(25): SEQ ID NO: 1173; WAN024FH2; Start 658; Stop 682
gattacactgttcaagttggagact

SEQ ID NO: 285658 - DNA, 25 bp, Artificial
  probe
  misc_feature (1)..(25): SEQ ID NO: 1173; WAN024FH2; Start 657; Stop 681
agattacactgttcaagttggagac

SEQ ID NO: 285659 - DNA, 25 bp, Artificial
  probe
  misc_feature (1)..(25): SEQ ID NO: 1173; WAN024FH2; Start 672; Stop 696
agttggagacttgattagtgtgaga

SEQ ID NO: 285660 - DNA, 25 bp, Artificial
  probe
  misc_feature (1)..(25): SEQ ID NO: 1173; WAN024FH2; Start 654; Stop 678
atcagattacactgttcaagttgga

SEQ ID NO: 285661 - DNA, 25 bp, Artificial
  probe
  misc_feature (1)..(25): SEQ ID NO: 1173; WAN024FH2; Start 656; Stop 680
cagattacactgttcaagttggaga

SEQ ID NO: 285662 - DNA, 25 bp, Artificial
  probe
  misc_feature (1)..(25): SEQ ID NO: 1173; WAN024FH2; Start 655; Stop 679
tcagattacactgttcaagttggag

SEQ ID NO: 285663 - DNA, 25 bp, Artificial
  probe
  misc_feature (1)..(25): SEQ ID NO: 1173; WAN024FH2; Start 653; Stop 677
aatcagattacactgttcaagttgg

SEQ ID NO: 285664 - DNA, 25 bp, Artificial
  probe
  misc_feature (1)..(25): SEQ ID NO: 1173; WAN024FH2; Start 222; Stop 246
atacccagattatttccaaccagag

SEQ ID NO: 285665 - DNA, 25 bp, Artificial
  probe
  misc_feature (1)..(25): SEQ ID NO: 1173; WAN024FH2; Start 57; Stop 81
gggaatggaatggataaagaaggta

SEQ ID NO: 285666 - DNA, 25 bp, Artificial
  probe
  misc_feature (1)..(25): SEQ ID NO: 1173; WAN024FH2; Start 53; Stop 77
acaagggaatggaatggataaagaa

SEQ ID NO: 285667 - DNA, 25 bp, Artificial
  probe
  misc_feature (1)..(25): SEQ ID NO: 1173; WAN024FH2; Start 410; Stop 434
atcagcagtttcttcttctctttca

SEQ ID NO: 285668 - DNA, 25 bp, Artificial
  probe
  misc_feature (1)..(25): SEQ ID NO: 1173; WAN024FH2; Start 54; Stop 78
caagggaatggaatggataaagaag

SEQ ID NO: 285669 - DNA, 25 bp, Artificial
  probe
  misc_feature (1)..(25): SEQ ID NO: 1173; WAN024FH2; Start 409; Stop 433
aatcagcagtttcttcttctctttc

SEQ ID NO: 285670 - DNA, 25 bp, Artificial
  probe
  misc_feature (1)..(25): SEQ ID NO: 1173; WAN024FH2; Start 55; Stop 79
aagggaatggaatggataaagaagg

SEQ ID NO: 285671 - DNA, 25 bp, Artificial
  probe
  misc_feature (1)..(25): SEQ ID NO: 1173; WAN024FH2; Start 52; Stop 76
gacaagggaatggaatggataaaga

SEQ ID NO: 285672 - DNA, 25 bp, Artificial
  probe
  misc_feature (1)..(25): SEQ ID NO: 1173; WAN024FH2; Start 411; Stop 435
tcagcagtttcttcttctctttcaa

SEQ ID NO: 285673 - DNA, 25 bp, Artificial
  probe
  misc_feature (1)..(25): SEQ ID NO: 1173; WAN024FH2; Start 51; Stop 75
tgacaagggaatggaatggataaag

SEQ ID NO: 285674 - DNA, 25 bp, Artificial
  probe
  misc_feature (1)..(25): SEQ ID NO: 1173; WAN024FH2; Start 50; Stop 74
ttgacaagggaatggaatggataaa

SEQ ID NO: 285675 - DNA, 25 bp, Artificial
  probe
  misc_feature (1)..(25): SEQ ID NO: 1173; WAN024FH2; Start 716; Stop 740
tacttcaagataagggacaaacgaa

SEQ ID NO: 285676 - DNA, 25 bp, Artificial
  probe
  misc_feature (1)..(25): SEQ ID NO: 1173; WAN024FH2; Start 715; Stop 739
ttacttcaagataagggacaaacga

SEQ ID NO: 285677 - DNA, 25 bp, Artificial
  probe
  misc_feature (1)..(25): SEQ ID NO: 1173; WAN024FH2; Start 323; Stop 347
tagggacagtcatcaatcaattagg

SEQ ID NO: 285678 - DNA, 25 bp, Artificial
  probe
  misc_feature (1)..(25): SEQ ID NO: 1173; WAN024FH2; Start 412; Stop 436
cagcagtttcttcttctctttcaag

SEQ ID NO: 285679 - DNA, 25 bp, Artificial
  probe
  misc_feature (1)..(25): SEQ ID NO: 1173; WAN024FH2; Start 326; Stop 350
ggacagtcatcaatcaattagggat

SEQ ID NO: 285680 - DNA, 25 bp, Artificial
  probe
  misc_feature (1)..(25): SEQ ID NO: 1173; WAN024FH2; Start 223; Stop 247
tacccagattatttccaaccagagt

SEQ ID NO: 285681 - DNA, 25 bp, Artificial
  probe
  misc_feature (1)..(25): SEQ ID NO: 1173; WAN024FH2; Start 221; Stop 245
tatacccagattatttccaaccaga

SEQ ID NO: 285682 - DNA, 25 bp, Artificial
  probe
  misc_feature (1)..(25): SEQ ID NO: 1173; WAN024FH2; Start 62; Stop 86
tggaatggataaagaaggtagaaga

SEQ ID NO: 285683 - DNA, 25 bp, Artificial
  probe
  misc_feature (1)..(25): SEQ ID NO: 1173; WAN024FH2; Start 58; Stop 82
ggaatggaatggataaagaaggtag

SEQ ID NO: 285684 - DNA, 25 bp, Artificial
  probe
  misc_feature (1)..(25): SEQ ID NO: 1173; WAN024FH2; Start 717; Stop 741
acttcaagataagggacaaacgaaa

SEQ ID NO: 285685 - DNA, 25 bp, Artificial
  probe
  misc_feature (1)..(25): SEQ ID NO: 1173; WAN024FH2; Start 503; Stop 527
ataagctagaacagtatcgagaact

SEQ ID NO: 285686 - DNA, 25 bp, Artificial
  probe
  misc_feature (1)..(25): SEQ ID NO: 1173; WAN024FH2; Start 584; Stop 608
tatctaggaatcaagcaaaccagtt

SEQ ID NO: 285687 - DNA, 25 bp, Artificial
  probe
  misc_feature (1)..(25): SEQ ID NO: 1173; WAN024FH2; Start 581; Stop 605
aactatctaggaatcaagcaaacca

SEQ ID NO: 285688 - DNA, 25 bp, Artificial
  probe
  misc_feature (1)..(25): SEQ ID NO: 1173; WAN024FH2; Start 714; Stop 738
attacttcaagataagggacaaacg

SEQ ID NO: 285689 - DNA, 25 bp, Artificial
  probe
  misc_feature (1)..(25): SEQ ID NO: 1174; WAN024C4O; Start 126; Stop 150
atcagatagtaagttagttgcgaca

SEQ ID NO: 285690 - DNA, 25 bp, Artificial
  probe
  misc_feature (1)..(25): SEQ ID NO: 1174; WAN024C4O; Start 165; Stop 189
ttacgacaacaataacgaactcatt

SEQ ID NO: 285691 - DNA, 25 bp, Artificial
  probe
  misc_feature (1)..(25): SEQ ID NO: 1174; WAN024C4O; Start 1772; Stop 1796
attctatggctgtatggactggtta

SEQ ID NO: 285692 - DNA, 25 bp, Artificial
  probe
  misc_feature (1)..(25): SEQ ID NO: 1174; WAN024C4O; Start 1771; Stop 1795
tattctatggctgtatggactggtt

SEQ ID NO: 285693 - DNA, 25 bp, Artificial
  probe
  misc_feature (1)..(25): SEQ ID NO: 1174; WAN024C4O; Start 1575; Stop 1599
aactactgcctatatgatgaccgaa

SEQ ID NO: 285694 - DNA, 25 bp, Artificial
  probe
  misc_feature (1)..(25): SEQ ID NO: 1174; WAN024C4O; Start 653; Stop 677
cttactctcatccagaatcagcatt

SEQ ID NO: 285695 - DNA, 25 bp, Artificial
  probe
  misc_feature (1)..(25): SEQ ID NO: 1174; WAN024C4O; Start 654; Stop 678
ttactctcatccagaatcagcattg

SEQ ID NO: 285696 - DNA, 25 bp, Artificial
  probe
  misc_feature (1)..(25): SEQ ID NO: 1174; WAN024C4O; Start 127; Stop 151
tcagatagtaagttagttgcgacaa

SEQ ID NO: 285697 - DNA, 25 bp, Artificial
  probe
  misc_feature (1)..(25): SEQ ID NO: 1174; WAN024C4O; Start 1770; Stop 1794
gtattctatggctgtatggactggt

SEQ ID NO: 285698 - DNA, 25 bp, Artificial
  probe
  misc_feature (1)..(25): SEQ ID NO: 1174; WAN024C4O; Start 640; Stop 664
aaccaatacgatccttactctcatc

SEQ ID NO: 285699 - DNA, 25 bp, Artificial
  probe
  misc_feature (1)..(25): SEQ ID NO: 1174; WAN024C4O; Start 643; Stop 667
caatacgatccttactctcatccag

SEQ ID NO: 285700 - DNA, 25 bp, Artificial
  probe
  misc_feature (1)..(25): SEQ ID NO: 1174; WAN024C4O; Start 1773; Stop 1797
ttctatggctgtatggactggttac

SEQ ID NO: 285701 - DNA, 25 bp, Artificial
  probe
  misc_feature (1)..(25): SEQ ID NO: 1174; WAN024C4O; Start 649; Stop 673
gatccttactctcatccagaatcag

SEQ ID NO: 285702 - DNA, 25 bp, Artificial
  probe
  misc_feature (1)..(25): SEQ ID NO: 1174; WAN024C4O; Start 646; Stop 670
tacgatccttactctcatccagaat

SEQ ID NO: 285703 - DNA, 25 bp, Artificial
  probe
  misc_feature (1)..(25): SEQ ID NO: 1174; WAN024C4O; Start 645; Stop 669
atacgatccttactctcatccagaa

SEQ ID NO: 285704 - DNA, 25 bp, Artificial
  probe
  misc_feature (1)..(25): SEQ ID NO: 1174; WAN024C4O; Start 644; Stop 668
aatacgatccttactctcatccaga

SEQ ID NO: 285705 - DNA, 25 bp, Artificial
  probe
  misc_feature (1)..(25): SEQ ID NO: 1174; WAN024C4O; Start 2137; Stop 2161
aatcctcaaccagcactaaccataa

SEQ ID NO: 285706 - DNA, 25 bp, Artificial
  probe
  misc_feature (1)..(25): SEQ ID NO: 1174; WAN024C4O; Start 2131; Stop 2155
aatcagaatcctcaaccagcactaa

SEQ ID NO: 285707 - DNA, 25 bp, Artificial
  probe
  misc_feature (1)..(25): SEQ ID NO: 1174; WAN024C4O; Start 650; Stop 674
atccttactctcatccagaatcagc

SEQ ID NO: 285708 - DNA, 25 bp, Artificial
  probe
  misc_feature (1)..(25): SEQ ID NO: 1174; WAN024C4O; Start 125; Stop 149
tatcagatagtaagttagttgcgac

SEQ ID NO: 285709 - DNA, 25 bp, Artificial
  probe
  misc_feature (1)..(25): SEQ ID NO: 1174; WAN024C4O; Start 642; Stop 666
ccaatacgatccttactctcatcca

SEQ ID NO: 285710 - DNA, 25 bp, Artificial
  probe
  misc_feature (1)..(25): SEQ ID NO: 1174; WAN024C4O; Start 641; Stop 665
accaatacgatccttactctcatcc

SEQ ID NO: 285711 - DNA, 25 bp, Artificial
  probe
  misc_feature (1)..(25): SEQ ID NO: 1174; WAN024C4O; Start 652; Stop 676
ccttactctcatccagaatcagcat

SEQ ID NO: 285712 - DNA, 25 bp, Artificial
  probe
  misc_feature (1)..(25): SEQ ID NO: 1174; WAN024C4O; Start 1775; Stop 1799
ctatggctgtatggactggttactc

SEQ ID NO: 285713 - DNA, 25 bp, Artificial
  probe
  misc_feature (1)..(25): SEQ ID NO: 1174; WAN024C4O; Start 2136; Stop 2160
gaatcctcaaccagcactaaccata

SEQ ID NO: 285714 - DNA, 25 bp, Artificial
  probe
  misc_feature (1)..(25): SEQ ID NO: 1174; WAN024C4O; Start 648; Stop 672
cgatccttactctcatccagaatca

SEQ ID NO: 285715 - DNA, 25 bp, Artificial
  probe
  misc_feature (1)..(25): SEQ ID NO: 1174; WAN024C4O; Start 647; Stop 671
acgatccttactctcatccagaatc

SEQ ID NO: 285716 - DNA, 25 bp, Artificial
  probe
  misc_feature (1)..(25): SEQ ID NO: 1174; WAN024C4O; Start 2132; Stop 2156
atcagaatcctcaaccagcactaac

SEQ ID NO: 285717 - DNA, 25 bp, Artificial
  probe
  misc_feature (1)..(25): SEQ ID NO: 1174; WAN024C4O; Start 1675; Stop 1699
ggtacttctaactatactgatgacg

SEQ ID NO: 285718 - DNA, 25 bp, Artificial
  probe
  misc_feature (1)..(25): SEQ ID NO: 1174; WAN024C4O; Start 1774; Stop 1798
tctatggctgtatggactggttact

SEQ ID NO: 285719 - DNA, 25 bp, Artificial
  probe
  misc_feature (1)..(25): SEQ ID NO: 1174; WAN024C4O; Start 1776; Stop 1800
tatggctgtatggactggttactca

SEQ ID NO: 285720 - DNA, 25 bp, Artificial
  probe
  misc_feature (1)..(25): SEQ ID NO: 1174; WAN024C4O; Start 1709; Stop 1733
aacatatcaagaatactggctacgt

SEQ ID NO: 285721 - DNA, 25 bp, Artificial
  probe
  misc_feature (1)..(25): SEQ ID NO: 1174; WAN024C4O; Start 1737; Stop 1761
tccagatgaaatgtttgtaggctat

SEQ ID NO: 285722 - DNA, 25 bp, Artificial
  probe
  misc_feature (1)..(25): SEQ ID NO: 1175; WAN024CGV; Start 72; Stop 96
aacacacagattggagaacttagaa

SEQ ID NO: 285723 - DNA, 25 bp, Artificial
  probe
  misc_feature (1)..(25): SEQ ID NO: 1175; WAN024CGV; Start 71; Stop 95
gaacacacagattggagaacttaga

SEQ ID NO: 285724 - DNA, 25 bp, Artificial
  probe
  misc_feature (1)..(25): SEQ ID NO: 1175; WAN024CGV; Start 70; Stop 94
cgaacacacagattggagaacttag

SEQ ID NO: 285725 - DNA, 25 bp, Artificial
  probe
  misc_feature (1)..(25): SEQ ID NO: 1175; WAN024CGV; Start 69; Stop 93
acgaacacacagattggagaactta

SEQ ID NO: 285726 - DNA, 25 bp, Artificial
  probe
  misc_feature (1)..(25): SEQ ID NO: 1175; WAN024CGV; Start 73; Stop 97
acacacagattggagaacttagaaa

SEQ ID NO: 285727 - DNA, 25 bp, Artificial
  probe
  misc_feature (1)..(25): SEQ ID NO: 1175; WAN024CGV; Start 68; Stop 92
aacgaacacacagattggagaactt

SEQ ID NO: 285728 - DNA, 25 bp, Artificial
  probe
  misc_feature (1)..(25): SEQ ID NO: 1175; WAN024CGV; Start 13; Stop 37
atgttgaccaatatcgcacttaaag

SEQ ID NO: 285729 - DNA, 25 bp, Artificial
  probe
  misc_feature (1)..(25): SEQ ID NO: 1175; WAN024CGV; Start 22; Stop 46
aatatcgcacttaaagcaattcagg

SEQ ID NO: 285730 - DNA, 25 bp, Artificial
  probe
  misc_feature (1)..(25): SEQ ID NO: 1175; WAN024CGV; Start 20; Stop 44
ccaatatcgcacttaaagcaattca

SEQ ID NO: 285731 - DNA, 25 bp, Artificial
  probe
  misc_feature (1)..(25): SEQ ID NO: 1175; WAN024CGV; Start 19; Stop 43
accaatatcgcacttaaagcaattc

SEQ ID NO: 285732 - DNA, 25 bp, Artificial
  probe
  misc_feature (1)..(25): SEQ ID NO: 1175; WAN024CGV; Start 18; Stop 42
gaccaatatcgcacttaaagcaatt

SEQ ID NO: 285733 - DNA, 25 bp, Artificial
  probe
  misc_feature (1)..(25): SEQ ID NO: 1175; WAN024CGV; Start 21; Stop 45
caatatcgcacttaaagcaattcag

SEQ ID NO: 285734 - DNA, 25 bp, Artificial
  probe
  misc_feature (1)..(25): SEQ ID NO: 1175; WAN024CGV; Start 23; Stop 47
atatcgcacttaaagcaattcagga

SEQ ID NO: 285735 - DNA, 25 bp, Artificial
  probe
  misc_feature (1)..(25): SEQ ID NO: 1175; WAN024CGV; Start 17; Stop 41
tgaccaatatcgcacttaaagcaat

SEQ ID NO: 285736 - DNA, 25 bp, Artificial
  probe
  misc_feature (1)..(25): SEQ ID NO: 1175; WAN024CGV; Start 24; Stop 48
tatcgcacttaaagcaattcaggag

SEQ ID NO: 285737 - DNA, 25 bp, Artificial
  probe
  misc_feature (1)..(25): SEQ ID NO: 1175; WAN024CGV; Start 12; Stop 36
catgttgaccaatatcgcacttaaa

SEQ ID NO: 285738 - DNA, 25 bp, Artificial
  probe
  misc_feature (1)..(25): SEQ ID NO: 1175; WAN024CGV; Start 16; Stop 40
ttgaccaatatcgcacttaaagcaa

SEQ ID NO: 285739 - DNA, 25 bp, Artificial
  probe
  misc_feature (1)..(25): SEQ ID NO: 1175; WAN024CGV; Start 15; Stop 39
gttgaccaatatcgcacttaaagca

SEQ ID NO: 285740 - DNA, 25 bp, Artificial
  probe
  misc_feature (1)..(25): SEQ ID NO: 1175; WAN024CGV; Start 14; Stop 38
tgttgaccaatatcgcacttaaagc

SEQ ID NO: 285741 - DNA, 25 bp, Artificial
  probe
  misc_feature (1)..(25): SEQ ID NO: 1175; WAN024CGV; Start 67; Stop 91
aaacgaacacacagattggagaact

SEQ ID NO: 285742 - DNA, 25 bp, Artificial
  probe
  misc_feature (1)..(25): SEQ ID NO: 1175; WAN024CGV; Start 11; Stop 35
acatgttgaccaatatcgcacttaa

SEQ ID NO: 285743 - DNA, 25 bp, Artificial
  probe
  misc_feature (1)..(25): SEQ ID NO: 1175; WAN024CGV; Start 89; Stop 113
acttagaaaatgaacacagaacagc

SEQ ID NO: 285744 - DNA, 25 bp, Artificial
  probe
  misc_feature (1)..(25): SEQ ID NO: 1175; WAN024CGV; Start 61; Stop 85
aatagaaaacgaacacacagattgg

SEQ ID NO: 285745 - DNA, 25 bp, Artificial
  probe
  misc_feature (1)..(25): SEQ ID NO: 1175; WAN024CGV; Start 57; Stop 81
tgaaaatagaaaacgaacacacaga

SEQ ID NO: 285746 - DNA, 25 bp, Artificial
  probe
  misc_feature (1)..(25): SEQ ID NO: 1175; WAN024CGV; Start 62; Stop 86
atagaaaacgaacacacagattgga

SEQ ID NO: 285747 - DNA, 25 bp, Artificial
  probe
  misc_feature (1)..(25): SEQ ID NO: 1175; WAN024CGV; Start 83; Stop 107
tggagaacttagaaaatgaacacag

SEQ ID NO: 285748 - DNA, 25 bp, Artificial
  probe
  misc_feature (1)..(25): SEQ ID NO: 1175; WAN024CGV; Start 74; Stop 98
cacacagattggagaacttagaaaa

SEQ ID NO: 285749 - DNA, 25 bp, Artificial
  probe
  misc_feature (1)..(25): SEQ ID NO: 1175; WAN024CGV; Start 84; Stop 108
ggagaacttagaaaatgaacacaga

SEQ ID NO: 285750 - DNA, 25 bp, Artificial
  probe
  misc_feature (1)..(25): SEQ ID NO: 1175; WAN024CGV; Start 51; Stop 75
tgctcttgaaaatagaaaacgaaca

SEQ ID NO: 285751 - DNA, 25 bp, Artificial
  probe
  misc_feature (1)..(25): SEQ ID NO: 1175; WAN024CGV; Start 82; Stop 106
ttggagaacttagaaaatgaacaca

SEQ ID NO: 285752 - DNA, 25 bp, Artificial
  probe
  misc_feature (1)..(25): SEQ ID NO: 1175; WAN024CGV; Start 56; Stop 80
ttgaaaatagaaaacgaacacacag

SEQ ID NO: 285753 - DNA, 25 bp, Artificial
  probe
  misc_feature (1)..(25): SEQ ID NO: 1175; WAN024CGV; Start 55; Stop 79
cttgaaaatagaaaacgaacacaca

SEQ ID NO: 285754 - DNA, 25 bp, Artificial
  probe
  misc_feature (1)..(25): SEQ ID NO: 1175; WAN024CGV; Start 52; Stop 76
gctcttgaaaatagaaaacgaacac

SEQ ID NO: 285755 - DNA, 25 bp, Artificial
  probe
  misc_feature (1)..(25): SEQ ID NO: 1176; WAN024BEJ; Start 138; Stop 162
gctctcttctgaagtaggtacatga

SEQ ID NO: 285756 - DNA, 25 bp, Artificial
  probe
  misc_feature (1)..(25): SEQ ID NO: 1176; WAN024BEJ; Start 135; Stop 159
taagctctcttctgaagtaggtaca

SEQ ID NO: 285757 - DNA, 25 bp, Artificial
  probe
  misc_feature (1)..(25): SEQ ID NO: 1176; WAN024BEJ; Start 134; Stop 158
ctaagctctcttctgaagtaggtac

SEQ ID NO: 285758 - DNA, 25 bp, Artificial
  probe
  misc_feature (1)..(25): SEQ ID NO: 1176; WAN024BEJ; Start 129; Stop 153
caatcctaagctctcttctgaagta

SEQ ID NO: 285759 - DNA, 25 bp, Artificial
  probe
  misc_feature (1)..(25): SEQ ID NO: 1176; WAN024BEJ; Start 136; Stop 160
aagctctcttctgaagtaggtacat

SEQ ID NO: 285760 - DNA, 25 bp, Artificial
  probe
  misc_feature (1)..(25): SEQ ID NO: 1176; WAN024BEJ; Start 130; Stop 154
aatcctaagctctcttctgaagtag

SEQ ID NO: 285761 - DNA, 25 bp, Artificial
  probe
  misc_feature (1)..(25): SEQ ID NO: 1176; WAN024BEJ; Start 127; Stop 151
atcaatcctaagctctcttctgaag

SEQ ID NO: 285762 - DNA, 25 bp, Artificial
  probe
  misc_feature (1)..(25): SEQ ID NO: 1176; WAN024BEJ; Start 125; Stop 149
gaatcaatcctaagctctcttctga

SEQ ID NO: 285763 - DNA, 25 bp, Artificial
  probe
  misc_feature (1)..(25): SEQ ID NO: 1176; WAN024BEJ; Start 126; Stop 150
aatcaatcctaagctctcttctgaa

SEQ ID NO: 285764 - DNA, 25 bp, Artificial
  probe
  misc_feature (1)..(25): SEQ ID NO: 1176; WAN024BEJ; Start 68; Stop 92
ccaaactcaatcaactatgctcttt

SEQ ID NO: 285765 - DNA, 25 bp, Artificial
  probe
  misc_feature (1)..(25): SEQ ID NO: 1176; WAN024BEJ; Start 67; Stop 91
tccaaactcaatcaactatgctctt

SEQ ID NO: 285766 - DNA, 25 bp, Artificial
  probe
  misc_feature (1)..(25): SEQ ID NO: 1176; WAN024BEJ; Start 66; Stop 90
ttccaaactcaatcaactatgctct

SEQ ID NO: 285767 - DNA, 25 bp, Artificial
  probe
  misc_feature (1)..(25): SEQ ID NO: 1176; WAN024BEJ; Start 65; Stop 89
attccaaactcaatcaactatgctc

SEQ ID NO: 285768 - DNA, 25 bp, Artificial
  probe
  misc_feature (1)..(25): SEQ ID NO: 1176; WAN024BEJ; Start 137; Stop 161
agctctcttctgaagtaggtacatg

SEQ ID NO: 285769 - DNA, 25 bp, Artificial
  probe
  misc_feature (1)..(25): SEQ ID NO: 1176; WAN024BEJ; Start 128; Stop 152
tcaatcctaagctctcttctgaagt

SEQ ID NO: 285770 - DNA, 25 bp, Artificial
  probe
  misc_feature (1)..(25): SEQ ID NO: 1176; WAN024BEJ; Start 64; Stop 88
tattccaaactcaatcaactatgct

SEQ ID NO: 285771 - DNA, 25 bp, Artificial
  probe
  misc_feature (1)..(25): SEQ ID NO: 1176; WAN024BEJ; Start 63; Stop 87
ctattccaaactcaatcaactatgc

SEQ ID NO: 285772 - DNA, 25 bp, Artificial
  probe
  misc_feature (1)..(25): SEQ ID NO: 1176; WAN024BEJ; Start 124; Stop 148
ggaatcaatcctaagctctcttctg

SEQ ID NO: 285773 - DNA, 25 bp, Artificial
  probe
  misc_feature (1)..(25): SEQ ID NO: 1176; WAN024BEJ; Start 133; Stop 157
cctaagctctcttctgaagtaggta

SEQ ID NO: 285774 - DNA, 25 bp, Artificial
  probe
  misc_feature (1)..(25): SEQ ID NO: 1176; WAN024BEJ; Start 62; Stop 86
actattccaaactcaatcaactatg

SEQ ID NO: 285775 - DNA, 25 bp, Artificial
  probe
  misc_feature (1)..(25): SEQ ID NO: 1176; WAN024BEJ; Start 131; Stop 155
atcctaagctctcttctgaagtagg

SEQ ID NO: 285776 - DNA, 25 bp, Artificial
  probe
  misc_feature (1)..(25): SEQ ID NO: 1176; WAN024BEJ; Start 132; Stop 156
tcctaagctctcttctgaagtaggt

SEQ ID NO: 285777 - DNA, 25 bp, Artificial
  probe
  misc_feature (1)..(25): SEQ ID NO: 1176; WAN024BEJ; Start 69; Stop 93
caaactcaatcaactatgctctttg

SEQ ID NO: 285778 - DNA, 25 bp, Artificial
  probe
  misc_feature (1)..(25): SEQ ID NO: 1176; WAN024BEJ; Start 70; Stop 94
aaactcaatcaactatgctctttga

SEQ ID NO: 285779 - DNA, 25 bp, Artificial
  probe
  misc_feature (1)..(25): SEQ ID NO: 1176; WAN024BEJ; Start 123; Stop 147
aggaatcaatcctaagctctcttct

SEQ ID NO: 285780 - DNA, 25 bp, Artificial
  probe
  misc_feature (1)..(25): SEQ ID NO: 1176; WAN024BEJ; Start 82; Stop 106
ctatgctctttgattttcattgagt

SEQ ID NO: 285781 - DNA, 25 bp, Artificial
  probe
  misc_feature (1)..(25): SEQ ID NO: 1176; WAN024BEJ; Start 81; Stop 105
actatgctctttgattttcattgag

SEQ ID NO: 285782 - DNA, 25 bp, Artificial
  probe
  misc_feature (1)..(25): SEQ ID NO: 1176; WAN024BEJ; Start 79; Stop 103
caactatgctctttgattttcattg

SEQ ID NO: 285783 - DNA, 25 bp, Artificial
  probe
  misc_feature (1)..(25): SEQ ID NO: 1176; WAN024BEJ; Start 80; Stop 104
aactatgctctttgattttcattga

SEQ ID NO: 285784 - DNA, 25 bp, Artificial
  probe
  misc_feature (1)..(25): SEQ ID NO: 1176; WAN024BEJ; Start 84; Stop 108
atgctctttgattttcattgagtat

SEQ ID NO: 285785 - DNA, 25 bp, Artificial
  probe
  misc_feature (1)..(25): SEQ ID NO: 1176; WAN024BEJ; Start 83; Stop 107
tatgctctttgattttcattgagta

SEQ ID NO: 285786 - DNA, 25 bp, Artificial
  probe
  misc_feature (1)..(25): SEQ ID NO: 1176; WAN024BEJ; Start 78; Stop 102
tcaactatgctctttgattttcatt

SEQ ID NO: 285787 - DNA, 25 bp, Artificial
  probe
  misc_feature (1)..(25): SEQ ID NO: 1176; WAN024BEJ; Start 71; Stop 95
aactcaatcaactatgctctttgat

SEQ ID NO: 285788 - DNA, 25 bp, Artificial
  probe
  misc_feature (1)..(25): SEQ ID NO: 1176; WAN024BEJ; Start 77; Stop 101
atcaactatgctctttgattttcat

SEQ ID NO: 285789 - DNA, 25 bp, Artificial
  probe
  misc_feature (1)..(25): SEQ ID NO: 1177; WAN024DSB; Start 946; Stop 970
gattctgaagatgatactgctgctc

SEQ ID NO: 285790 - DNA, 25 bp, Artificial
  probe
  misc_feature (1)..(25): SEQ ID NO: 1177; WAN024DSB; Start 944; Stop 968
ctgattctgaagatgatactgctgc

SEQ ID NO: 285791 - DNA, 25 bp, Artificial
  probe
  misc_feature (1)..(25): SEQ ID NO: 1177; WAN024DSB; Start 943; Stop 967
gctgattctgaagatgatactgctg

SEQ ID NO: 285792 - DNA, 25 bp, Artificial
  probe
  misc_feature (1)..(25): SEQ ID NO: 1177; WAN024DSB; Start 945; Stop 969
tgattctgaagatgatactgctgct

SEQ ID NO: 285793 - DNA, 25 bp, Artificial
  probe
  misc_feature (1)..(25): SEQ ID NO: 1177; WAN024DSB; Start 947; Stop 971
attctgaagatgatactgctgctct

SEQ ID NO: 285794 - DNA, 25 bp, Artificial
  probe
  misc_feature (1)..(25): SEQ ID NO: 1177; WAN024DSB; Start 439; Stop 463
gtagttcctgaaccaagtgagttag

SEQ ID NO: 285795 - DNA, 25 bp, Artificial
  probe
  misc_feature (1)..(25): SEQ ID NO: 1177; WAN024DSB; Start 435; Stop 459
aattgtagttcctgaaccaagtgag

SEQ ID NO: 285796 - DNA, 25 bp, Artificial
  probe
  misc_feature (1)..(25): SEQ ID NO: 1177; WAN024DSB; Start 942; Stop 966
ggctgattctgaagatgatactgct

SEQ ID NO: 285797 - DNA, 25 bp, Artificial
  probe
  misc_feature (1)..(25): SEQ ID NO: 1177; WAN024DSB; Start 438; Stop 462
tgtagttcctgaaccaagtgagtta

SEQ ID NO: 285798 - DNA, 25 bp, Artificial
  probe
  misc_feature (1)..(25): SEQ ID NO: 1177; WAN024DSB; Start 436; Stop 460
attgtagttcctgaaccaagtgagt

SEQ ID NO: 285799 - DNA, 25 bp, Artificial
  probe
  misc_feature (1)..(25): SEQ ID NO: 1177; WAN024DSB; Start 437; Stop 461
ttgtagttcctgaaccaagtgagtt

SEQ ID NO: 285800 - DNA, 25 bp, Artificial
  probe
  misc_feature (1)..(25): SEQ ID NO: 1177; WAN024DSB; Start 452; Stop 476
caagtgagttagctgagactaagaa

SEQ ID NO: 285801 - DNA, 25 bp, Artificial
  probe
  misc_feature (1)..(25): SEQ ID NO: 1177; WAN024DSB; Start 440; Stop 464
tagttcctgaaccaagtgagttagc

SEQ ID NO: 285802 - DNA, 25 bp, Artificial
  probe
  misc_feature (1)..(25): SEQ ID NO: 1177; WAN024DSB; Start 448; Stop 472
gaaccaagtgagttagctgagacta

SEQ ID NO: 285803 - DNA, 25 bp, Artificial
  probe
  misc_feature (1)..(25): SEQ ID NO: 1177; WAN024DSB; Start 449; Stop 473
aaccaagtgagttagctgagactaa

SEQ ID NO: 285804 - DNA, 25 bp, Artificial
  probe
  misc_feature (1)..(25): SEQ ID NO: 1177; WAN024DSB; Start 451; Stop 475
ccaagtgagttagctgagactaaga

SEQ ID NO: 285805 - DNA, 25 bp, Artificial
  probe
  misc_feature (1)..(25): SEQ ID NO: 1177; WAN024DSB; Start 298; Stop 322
aaagaagttcaacaagcgtacctag

SEQ ID NO: 285806 - DNA, 25 bp, Artificial
  probe
  misc_feature (1)..(25): SEQ ID NO: 1177; WAN024DSB; Start 450; Stop 474
accaagtgagttagctgagactaag

SEQ ID NO: 285807 - DNA, 25 bp, Artificial
  probe
  misc_feature (1)..(25): SEQ ID NO: 1177; WAN024DSB; Start 948; Stop 972
ttctgaagatgatactgctgctctt

SEQ ID NO: 285808 - DNA, 25 bp, Artificial
  probe
  misc_feature (1)..(25): SEQ ID NO: 1177; WAN024DSB; Start 823; Stop 847
caggatgaattagataaagaagcag

SEQ ID NO: 285809 - DNA, 25 bp, Artificial
  probe
  misc_feature (1)..(25): SEQ ID NO: 1177; WAN024DSB; Start 824; Stop 848
aggatgaattagataaagaagcaga

SEQ ID NO: 285810 - DNA, 25 bp, Artificial
  probe
  misc_feature (1)..(25): SEQ ID NO: 1177; WAN024DSB; Start 154; Stop 178
aaatctgaagctgctaagaaacatt

SEQ ID NO: 285811 - DNA, 25 bp, Artificial
  probe
  misc_feature (1)..(25): SEQ ID NO: 1177; WAN024DSB; Start 822; Stop 846
tcaggatgaattagataaagaagca

SEQ ID NO: 285812 - DNA, 25 bp, Artificial
  probe
  misc_feature (1)..(25): SEQ ID NO: 1177; WAN024DSB; Start 830; Stop 854
aattagataaagaagcagaagaagc

SEQ ID NO: 285813 - DNA, 25 bp, Artificial
  probe
  misc_feature (1)..(25): SEQ ID NO: 1177; WAN024DSB; Start 446; Stop 470
ctgaaccaagtgagttagctgagac

SEQ ID NO: 285814 - DNA, 25 bp, Artificial
  probe
  misc_feature (1)..(25): SEQ ID NO: 1177; WAN024DSB; Start 155; Stop 179
aatctgaagctgctaagaaacatta

SEQ ID NO: 285815 - DNA, 25 bp, Artificial
  probe
  misc_feature (1)..(25): SEQ ID NO: 1177; WAN024DSB; Start 434; Stop 458
caattgtagttcctgaaccaagtga

SEQ ID NO: 285816 - DNA, 25 bp, Artificial
  probe
  misc_feature (1)..(25): SEQ ID NO: 1177; WAN024DSB; Start 453; Stop 477
aagtgagttagctgagactaagaaa

SEQ ID NO: 285817 - DNA, 25 bp, Artificial
  probe
  misc_feature (1)..(25): SEQ ID NO: 1177; WAN024DSB; Start 825; Stop 849
ggatgaattagataaagaagcagaa

SEQ ID NO: 285818 - DNA, 25 bp, Artificial
  probe
  misc_feature (1)..(25): SEQ ID NO: 1177; WAN024DSB; Start 941; Stop 965
gggctgattctgaagatgatactgc

SEQ ID NO: 285819 - DNA, 25 bp, Artificial
  probe
  misc_feature (1)..(25): SEQ ID NO: 1177; WAN024DSB; Start 447; Stop 471
tgaaccaagtgagttagctgagact

SEQ ID NO: 285820 - DNA, 25 bp, Artificial
  probe
  misc_feature (1)..(25): SEQ ID NO: 1177; WAN024DSB; Start 842; Stop 866
aagcagaagaagctgagttggataa

SEQ ID NO: 285821 - DNA, 25 bp, Artificial
  probe
  misc_feature (1)..(25): SEQ ID NO: 1177; WAN024DSB; Start 349; Stop 373
cagagaaaagaggcagataagaaga

SEQ ID NO: 285822 - DNA, 25 bp, Artificial
  probe
  misc_feature (1)..(25): SEQ ID NO: 1178; WAN024DSL; Start 412; Stop 436
attagacgagagatagtggttccta

SEQ ID NO: 285823 - DNA, 25 bp, Artificial
  probe
  misc_feature (1)..(25): SEQ ID NO: 1178; WAN024DSL; Start 409; Stop 433
aagattagacgagagatagtggttc

SEQ ID NO: 285824 - DNA, 25 bp, Artificial
  probe
  misc_feature (1)..(25): SEQ ID NO: 1178; WAN024DSL; Start 206; Stop 230
aatatgccgattatcagaggagaat

SEQ ID NO: 285825 - DNA, 25 bp, Artificial
  probe
  misc_feature (1)..(25): SEQ ID NO: 1178; WAN024DSL; Start 411; Stop 435
gattagacgagagatagtggttcct

SEQ ID NO: 285826 - DNA, 25 bp, Artificial
  probe
  misc_feature (1)..(25): SEQ ID NO: 1178; WAN024DSL; Start 410; Stop 434
agattagacgagagatagtggttcc

SEQ ID NO: 285827 - DNA, 25 bp, Artificial
  probe
  misc_feature (1)..(25): SEQ ID NO: 1178; WAN024DSL; Start 208; Stop 232
tatgccgattatcagaggagaattg

SEQ ID NO: 285828 - DNA, 25 bp, Artificial
  probe
  misc_feature (1)..(25): SEQ ID NO: 1178; WAN024DSL; Start 207; Stop 231
atatgccgattatcagaggagaatt

SEQ ID NO: 285829 - DNA, 25 bp, Artificial
  probe
  misc_feature (1)..(25): SEQ ID NO: 1178; WAN024DSL; Start 414; Stop 438
tagacgagagatagtggttcctaac

SEQ ID NO: 285830 - DNA, 25 bp, Artificial
  probe
  misc_feature (1)..(25): SEQ ID NO: 1178; WAN024DSL; Start 213; Stop 237
cgattatcagaggagaattgaggag

SEQ ID NO: 285831 - DNA, 25 bp, Artificial
  probe
  misc_feature (1)..(25): SEQ ID NO: 1178; WAN024DSL; Start 408; Stop 432
taagattagacgagagatagtggtt

SEQ ID NO: 285832 - DNA, 25 bp, Artificial
  probe
  misc_feature (1)..(25): SEQ ID NO: 1178; WAN024DSL; Start 214; Stop 238
gattatcagaggagaattgaggaga

SEQ ID NO: 285833 - DNA, 25 bp, Artificial
  probe
  misc_feature (1)..(25): SEQ ID NO: 1178; WAN024DSL; Start 407; Stop 431
ataagattagacgagagatagtggt

SEQ ID NO: 285834 - DNA, 25 bp, Artificial
  probe
  misc_feature (1)..(25): SEQ ID NO: 1178; WAN024DSL; Start 215; Stop 239
attatcagaggagaattgaggagaa

SEQ ID NO: 285835 - DNA, 25 bp, Artificial
  probe
  misc_feature (1)..(25): SEQ ID NO: 1178; WAN024DSL; Start 413; Stop 437
ttagacgagagatagtggttcctaa

SEQ ID NO: 285836 - DNA, 25 bp, Artificial
  probe
  misc_feature (1)..(25): SEQ ID NO: 1178; WAN024DSL; Start 212; Stop 236
ccgattatcagaggagaattgagga

SEQ ID NO: 285837 - DNA, 25 bp, Artificial
  probe
  misc_feature (1)..(25): SEQ ID NO: 1178; WAN024DSL; Start 311; Stop 335
aatatcttgacggaaggaacctctc

SEQ ID NO: 285838 - DNA, 25 bp, Artificial
  probe
  misc_feature (1)..(25): SEQ ID NO: 1178; WAN024DSL; Start 209; Stop 233
atgccgattatcagaggagaattga

SEQ ID NO: 285839 - DNA, 25 bp, Artificial
  probe
  misc_feature (1)..(25): SEQ ID NO: 1178; WAN024DSL; Start 406; Stop 430
aataagattagacgagagatagtgg

SEQ ID NO: 285840 - DNA, 25 bp, Artificial
  probe
  misc_feature (1)..(25): SEQ ID NO: 1178; WAN024DSL; Start 210; Stop 234
tgccgattatcagaggagaattgag

SEQ ID NO: 285841 - DNA, 25 bp, Artificial
  probe
  misc_feature (1)..(25): SEQ ID NO: 1178; WAN024DSL; Start 270; Stop 294
gcaacaagaagcaaataaggactat

SEQ ID NO: 285842 - DNA, 25 bp, Artificial
  probe
  misc_feature (1)..(25): SEQ ID NO: 1178; WAN024DSL; Start 266; Stop 290
tagagcaacaagaagcaaataagga

SEQ ID NO: 285843 - DNA, 25 bp, Artificial
  probe
  misc_feature (1)..(25): SEQ ID NO: 1178; WAN024DSL; Start 205; Stop 229
aaatatgccgattatcagaggagaa

SEQ ID NO: 285844 - DNA, 25 bp, Artificial
  probe
  misc_feature (1)..(25): SEQ ID NO: 1178; WAN024DSL; Start 347; Stop 371
tgttaaagaaagaaatggaggaagc

SEQ ID NO: 285845 - DNA, 25 bp, Artificial
  probe
  misc_feature (1)..(25): SEQ ID NO: 1178; WAN024DSL; Start 269; Stop 293
agcaacaagaagcaaataaggacta

SEQ ID NO: 285846 - DNA, 25 bp, Artificial
  probe
  misc_feature (1)..(25): SEQ ID NO: 1178; WAN024DSL; Start 344; Stop 368
ctgtgttaaagaaagaaatggagga

SEQ ID NO: 285847 - DNA, 25 bp, Artificial
  probe
  misc_feature (1)..(25): SEQ ID NO: 1178; WAN024DSL; Start 668; Stop 692
attatgttaaagaaggtttccgtgc

SEQ ID NO: 285848 - DNA, 25 bp, Artificial
  probe
  misc_feature (1)..(25): SEQ ID NO: 1178; WAN024DSL; Start 443; Stop 467
aagagttagaaatggctagacgaaa

SEQ ID NO: 285849 - DNA, 25 bp, Artificial
  probe
  misc_feature (1)..(25): SEQ ID NO: 1178; WAN024DSL; Start 265; Stop 289
ctagagcaacaagaagcaaataagg

SEQ ID NO: 285850 - DNA, 25 bp, Artificial
  probe
  misc_feature (1)..(25): SEQ ID NO: 1178; WAN024DSL; Start 669; Stop 693
ttatgttaaagaaggtttccgtgct

SEQ ID NO: 285851 - DNA, 25 bp, Artificial
  probe
  misc_feature (1)..(25): SEQ ID NO: 1178; WAN024DSL; Start 345; Stop 369
tgtgttaaagaaagaaatggaggaa

SEQ ID NO: 285852 - DNA, 25 bp, Artificial
  probe
  misc_feature (1)..(25): SEQ ID NO: 1178; WAN024DSL; Start 442; Stop 466
caagagttagaaatggctagacgaa

SEQ ID NO: 285853 - DNA, 25 bp, Artificial
  probe
  misc_feature (1)..(25): SEQ ID NO: 1178; WAN024DSL; Start 343; Stop 367
tctgtgttaaagaaagaaatggagg

SEQ ID NO: 285854 - DNA, 25 bp, Artificial
  probe
  misc_feature (1)..(25): SEQ ID NO: 1178; WAN024DSL; Start 312; Stop 336
atatcttgacggaaggaacctctca

SEQ ID NO: 285855 - DNA, 25 bp, Artificial
  probe
  misc_feature (1)..(25): SEQ ID NO: 1179; WAN024DSA; Start 455; Stop 479
atgaagtaagagcagttgtagttcc

SEQ ID NO: 285856 - DNA, 25 bp, Artificial
  probe
  misc_feature (1)..(25): SEQ ID NO: 1179; WAN024DSA; Start 454; Stop 478
aatgaagtaagagcagttgtagttc

SEQ ID NO: 285857 - DNA, 25 bp, Artificial
  probe
  misc_feature (1)..(25): SEQ ID NO: 1179; WAN024DSA; Start 456; Stop 480
tgaagtaagagcagttgtagttcct

SEQ ID NO: 285858 - DNA, 25 bp, Artificial
  probe
  misc_feature (1)..(25): SEQ ID NO: 1179; WAN024DSA; Start 453; Stop 477
taatgaagtaagagcagttgtagtt

SEQ ID NO: 285859 - DNA, 25 bp, Artificial
  probe
  misc_feature (1)..(25): SEQ ID NO: 1179; WAN024DSA; Start 452; Stop 476
ttaatgaagtaagagcagttgtagt

SEQ ID NO: 285860 - DNA, 25 bp, Artificial
  probe
  misc_feature (1)..(25): SEQ ID NO: 1179; WAN024DSA; Start 457; Stop 481
gaagtaagagcagttgtagttcctg

SEQ ID NO: 285861 - DNA, 25 bp, Artificial
  probe
  misc_feature (1)..(25): SEQ ID NO: 1179; WAN024DSA; Start 459; Stop 483
agtaagagcagttgtagttcctgaa

SEQ ID NO: 285862 - DNA, 25 bp, Artificial
  probe
  misc_feature (1)..(25): SEQ ID NO: 1179; WAN024DSA; Start 458; Stop 482
aagtaagagcagttgtagttcctga

SEQ ID NO: 285863 - DNA, 25 bp, Artificial
  probe
  misc_feature (1)..(25): SEQ ID NO: 1179; WAN024DSA; Start 571; Stop 595
ctaaaggtagcactagcgaagaaag

SEQ ID NO: 285864 - DNA, 25 bp, Artificial
  probe
  misc_feature (1)..(25): SEQ ID NO: 1179; WAN024DSA; Start 316; Stop 340
gcatataaagagtaccgagaagttc

SEQ ID NO: 285865 - DNA, 25 bp, Artificial
  probe
  misc_feature (1)..(25): SEQ ID NO: 1179; WAN024DSA; Start 572; Stop 596
taaaggtagcactagcgaagaaaga

SEQ ID NO: 285866 - DNA, 25 bp, Artificial
  probe
  misc_feature (1)..(25): SEQ ID NO: 1179; WAN024DSA; Start 577; Stop 601
gtagcactagcgaagaaagaagtag

SEQ ID NO: 285867 - DNA, 25 bp, Artificial
  probe
  misc_feature (1)..(25): SEQ ID NO: 1179; WAN024DSA; Start 570; Stop 594
tctaaaggtagcactagcgaagaaa

SEQ ID NO: 285868 - DNA, 25 bp, Artificial
  probe
  misc_feature (1)..(25): SEQ ID NO: 1179; WAN024DSA; Start 567; Stop 591
aactctaaaggtagcactagcgaag

SEQ ID NO: 285869 - DNA, 25 bp, Artificial
  probe
  misc_feature (1)..(25): SEQ ID NO: 1179; WAN024DSA; Start 569; Stop 593
ctctaaaggtagcactagcgaagaa

SEQ ID NO: 285870 - DNA, 25 bp, Artificial
  probe
  misc_feature (1)..(25): SEQ ID NO: 1179; WAN024DSA; Start 573; Stop 597
aaaggtagcactagcgaagaaagaa

SEQ ID NO: 285871 - DNA, 25 bp, Artificial
  probe
  misc_feature (1)..(25): SEQ ID NO: 1179; WAN024DSA; Start 317; Stop 341
catataaagagtaccgagaagttca

SEQ ID NO: 285872 - DNA, 25 bp, Artificial
  probe
  misc_feature (1)..(25): SEQ ID NO: 1179; WAN024DSA; Start 566; Stop 590
caactctaaaggtagcactagcgaa

SEQ ID NO: 285873 - DNA, 25 bp, Artificial
  probe
  misc_feature (1)..(25): SEQ ID NO: 1179; WAN024DSA; Start 315; Stop 339
tgcatataaagagtaccgagaagtt

SEQ ID NO: 285874 - DNA, 25 bp, Artificial
  probe
  misc_feature (1)..(25): SEQ ID NO: 1179; WAN024DSA; Start 576; Stop 600
ggtagcactagcgaagaaagaagta

SEQ ID NO: 285875 - DNA, 25 bp, Artificial
  probe
  misc_feature (1)..(25): SEQ ID NO: 1179; WAN024DSA; Start 574; Stop 598
aaggtagcactagcgaagaaagaag

SEQ ID NO: 285876 - DNA, 25 bp, Artificial
  probe
  misc_feature (1)..(25): SEQ ID NO: 1179; WAN024DSA; Start 557; Stop 581
atgattatgcaactctaaaggtagc

SEQ ID NO: 285877 - DNA, 25 bp, Artificial
  probe
  misc_feature (1)..(25): SEQ ID NO: 1179; WAN024DSA; Start 449; Stop 473
aatttaatgaagtaagagcagttgt

SEQ ID NO: 285878 - DNA, 25 bp, Artificial
  probe
  misc_feature (1)..(25): SEQ ID NO: 1179; WAN024DSA; Start 451; Stop 475
tttaatgaagtaagagcagttgtag

SEQ ID NO: 285879 - DNA, 25 bp, Artificial
  probe
  misc_feature (1)..(25): SEQ ID NO: 1179; WAN024DSA; Start 319; Stop 343
tataaagagtaccgagaagttcaaa

SEQ ID NO: 285880 - DNA, 25 bp, Artificial
  probe
  misc_feature (1)..(25): SEQ ID NO: 1179; WAN024DSA; Start 318; Stop 342
atataaagagtaccgagaagttcaa

SEQ ID NO: 285881 - DNA, 25 bp, Artificial
  probe
  misc_feature (1)..(25): SEQ ID NO: 1179; WAN024DSA; Start 568; Stop 592
actctaaaggtagcactagcgaaga

SEQ ID NO: 285882 - DNA, 25 bp, Artificial
  probe
  misc_feature (1)..(25): SEQ ID NO: 1179; WAN024DSA; Start 408; Stop 432
aatagagaaggctaggaaagagcaa

SEQ ID NO: 285883 - DNA, 25 bp, Artificial
  probe
  misc_feature (1)..(25): SEQ ID NO: 1179; WAN024DSA; Start 407; Stop 431
aaatagagaaggctaggaaagagca

SEQ ID NO: 285884 - DNA, 25 bp, Artificial
  probe
  misc_feature (1)..(25): SEQ ID NO: 1179; WAN024DSA; Start 350; Stop 374
gtagtaaatataaatctgacgctga

SEQ ID NO: 285885 - DNA, 25 bp, Artificial
  probe
  misc_feature (1)..(25): SEQ ID NO: 1179; WAN024DSA; Start 352; Stop 376
agtaaatataaatctgacgctgaat

SEQ ID NO: 285886 - DNA, 25 bp, Artificial
  probe
  misc_feature (1)..(25): SEQ ID NO: 1179; WAN024DSA; Start 260; Stop 284
gaaaagaagcagaagcatctcaaaa

SEQ ID NO: 285887 - DNA, 25 bp, Artificial
  probe
  misc_feature (1)..(25): SEQ ID NO: 1179; WAN024DSA; Start 450; Stop 474
atttaatgaagtaagagcagttgta

SEQ ID NO: 285888 - DNA, 25 bp, Artificial
  probe
  misc_feature (1)..(25): SEQ ID NO: 1180; WAN024DSI; Start 277; Stop 301
gctaagaaagtagacgatgctagtt

SEQ ID NO: 285889 - DNA, 25 bp, Artificial
  probe
  misc_feature (1)..(25): SEQ ID NO: 1180; WAN024DSI; Start 1055; Stop 1079
tagatgcagctcttaatgagttagg

SEQ ID NO: 285890 - DNA, 25 bp, Artificial
  probe
  misc_feature (1)..(25): SEQ ID NO: 1180; WAN024DSI; Start 275; Stop 299
ctgctaagaaagtagacgatgctag

SEQ ID NO: 285891 - DNA, 25 bp, Artificial
  probe
  misc_feature (1)..(25): SEQ ID NO: 1180; WAN024DSI; Start 1051; Stop 1075
gaattagatgcagctcttaatgagt

SEQ ID NO: 285892 - DNA, 25 bp, Artificial
  probe
  misc_feature (1)..(25): SEQ ID NO: 1180; WAN024DSI; Start 276; Stop 300
tgctaagaaagtagacgatgctagt

SEQ ID NO: 285893 - DNA, 25 bp, Artificial
  probe
  misc_feature (1)..(25): SEQ ID NO: 1180; WAN024DSI; Start 1050; Stop 1074
agaattagatgcagctcttaatgag

SEQ ID NO: 285894 - DNA, 25 bp, Artificial
  probe
  misc_feature (1)..(25): SEQ ID NO: 1180; WAN024DSI; Start 280; Stop 304
aagaaagtagacgatgctagtttag

SEQ ID NO: 285895 - DNA, 25 bp, Artificial
  probe
  misc_feature (1)..(25): SEQ ID NO: 1180; WAN024DSI; Start 278; Stop 302
ctaagaaagtagacgatgctagttt

SEQ ID NO: 285896 - DNA, 25 bp, Artificial
  probe
  misc_feature (1)..(25): SEQ ID NO: 1180; WAN024DSI; Start 1052; Stop 1076
aattagatgcagctcttaatgagtt

SEQ ID NO: 285897 - DNA, 25 bp, Artificial
  probe
  misc_feature (1)..(25): SEQ ID NO: 1180; WAN024DSI; Start 1054; Stop 1078
ttagatgcagctcttaatgagttag

SEQ ID NO: 285898 - DNA, 25 bp, Artificial
  probe
  misc_feature (1)..(25): SEQ ID NO: 1180; WAN024DSI; Start 76; Stop 100
cctactgttgtaagagcagaagacg

SEQ ID NO: 285899 - DNA, 25 bp, Artificial
  probe
  misc_feature (1)..(25): SEQ ID NO: 1180; WAN024DSI; Start 518; Stop 542
aagaagctaaagcagaagaagtagt

SEQ ID NO: 285900 - DNA, 25 bp, Artificial
  probe
  misc_feature (1)..(25): SEQ ID NO: 1180; WAN024DSI; Start 516; Stop 540
agaagaagctaaagcagaagaagta

SEQ ID NO: 285901 - DNA, 25 bp, Artificial
  probe
  misc_feature (1)..(25): SEQ ID NO: 1180; WAN024DSI; Start 267; Stop 291
gaaagaagctgctaagaaagtagac

SEQ ID NO: 285902 - DNA, 25 bp, Artificial
  probe
  misc_feature (1)..(25): SEQ ID NO: 1180; WAN024DSI; Start 266; Stop 290
agaaagaagctgctaagaaagtaga

SEQ ID NO: 285903 - DNA, 25 bp, Artificial
  probe
  misc_feature (1)..(25): SEQ ID NO: 1180; WAN024DSI; Start 264; Stop 288
agagaaagaagctgctaagaaagta

SEQ ID NO: 285904 - DNA, 25 bp, Artificial
  probe
  misc_feature (1)..(25): SEQ ID NO: 1180; WAN024DSI; Start 263; Stop 287
aagagaaagaagctgctaagaaagt

SEQ ID NO: 285905 - DNA, 25 bp, Artificial
  probe
  misc_feature (1)..(25): SEQ ID NO: 1180; WAN024DSI; Start 75; Stop 99
gcctactgttgtaagagcagaagac

SEQ ID NO: 285906 - DNA, 25 bp, Artificial
  probe
  misc_feature (1)..(25): SEQ ID NO: 1180; WAN024DSI; Start 517; Stop 541
gaagaagctaaagcagaagaagtag

SEQ ID NO: 285907 - DNA, 25 bp, Artificial
  probe
  misc_feature (1)..(25): SEQ ID NO: 1180; WAN024DSI; Start 265; Stop 289
gagaaagaagctgctaagaaagtag

SEQ ID NO: 285908 - DNA, 25 bp, Artificial
  probe
  misc_feature (1)..(25): SEQ ID NO: 1180; WAN024DSI; Start 262; Stop 286
aaagagaaagaagctgctaagaaag

SEQ ID NO: 285909 - DNA, 25 bp, Artificial
  probe
  misc_feature (1)..(25): SEQ ID NO: 1180; WAN024DSI; Start 274; Stop 298
gctgctaagaaagtagacgatgcta

SEQ ID NO: 285910 - DNA, 25 bp, Artificial
  probe
  misc_feature (1)..(25): SEQ ID NO: 1180; WAN024DSI; Start 1053; Stop 1077
attagatgcagctcttaatgagtta

SEQ ID NO: 285911 - DNA, 25 bp, Artificial
  probe
  misc_feature (1)..(25): SEQ ID NO: 1180; WAN024DSI; Start 519; Stop 543
agaagctaaagcagaagaagtagta

SEQ ID NO: 285912 - DNA, 25 bp, Artificial
  probe
  misc_feature (1)..(25): SEQ ID NO: 1180; WAN024DSI; Start 855; Stop 879
ggatgaattagataaagaagctgct

SEQ ID NO: 285913 - DNA, 25 bp, Artificial
  probe
  misc_feature (1)..(25): SEQ ID NO: 1180; WAN024DSI; Start 854; Stop 878
aggatgaattagataaagaagctgc

SEQ ID NO: 285914 - DNA, 25 bp, Artificial
  probe
  misc_feature (1)..(25): SEQ ID NO: 1180; WAN024DSI; Start 520; Stop 544
gaagctaaagcagaagaagtagtag

SEQ ID NO: 285915 - DNA, 25 bp, Artificial
  probe
  misc_feature (1)..(25): SEQ ID NO: 1180; WAN024DSI; Start 515; Stop 539
cagaagaagctaaagcagaagaagt

SEQ ID NO: 285916 - DNA, 25 bp, Artificial
  probe
  misc_feature (1)..(25): SEQ ID NO: 1180; WAN024DSI; Start 268; Stop 292
aaagaagctgctaagaaagtagacg

SEQ ID NO: 285917 - DNA, 25 bp, Artificial
  probe
  misc_feature (1)..(25): SEQ ID NO: 1180; WAN024DSI; Start 432; Stop 456
aaccgcagctaataatgagtttaaa

SEQ ID NO: 285918 - DNA, 25 bp, Artificial
  probe
  misc_feature (1)..(25): SEQ ID NO: 1180; WAN024DSI; Start 430; Stop 454
ctaaccgcagctaataatgagttta

SEQ ID NO: 285919 - DNA, 25 bp, Artificial
  probe
  misc_feature (1)..(25): SEQ ID NO: 1180; WAN024DSI; Start 429; Stop 453
actaaccgcagctaataatgagttt

SEQ ID NO: 285920 - DNA, 25 bp, Artificial
  probe
  misc_feature (1)..(25): SEQ ID NO: 1180; WAN024DSI; Start 427; Stop 451
aaactaaccgcagctaataatgagt

SEQ ID NO: 285921 - DNA, 25 bp, Artificial
  probe
  misc_feature (1)..(25): SEQ ID NO: 1181; WAN024DSJ; Start 482; Stop 506
aagtagttcctgaagcagataagtt

SEQ ID NO: 285922 - DNA, 25 bp, Artificial
  probe
  misc_feature (1)..(25): SEQ ID NO: 1181; WAN024DSJ; Start 483; Stop 507
agtagttcctgaagcagataagtta

SEQ ID NO: 285923 - DNA, 25 bp, Artificial
  probe
  misc_feature (1)..(25): SEQ ID NO: 1181; WAN024DSJ; Start 163; Stop 187
gctgctaagaaagaatacgaagaag

SEQ ID NO: 285924 - DNA, 25 bp, Artificial
  probe
  misc_feature (1)..(25): SEQ ID NO: 1181; WAN024DSJ; Start 128; Stop 152
agagagactatgatgcagcaatgaa

SEQ ID NO: 285925 - DNA, 25 bp, Artificial
  probe
  misc_feature (1)..(25): SEQ ID NO: 1181; WAN024DSJ; Start 127; Stop 151
gagagagactatgatgcagcaatga

SEQ ID NO: 285926 - DNA, 25 bp, Artificial
  probe
  misc_feature (1)..(25): SEQ ID NO: 1181; WAN024DSJ; Start 126; Stop 150
tgagagagactatgatgcagcaatg

SEQ ID NO: 285927 - DNA, 25 bp, Artificial
  probe
  misc_feature (1)..(25): SEQ ID NO: 1181; WAN024DSJ; Start 160; Stop 184
gaagctgctaagaaagaatacgaag

SEQ ID NO: 285928 - DNA, 25 bp, Artificial
  probe
  misc_feature (1)..(25): SEQ ID NO: 1181; WAN024DSJ; Start 162; Stop 186
agctgctaagaaagaatacgaagaa

SEQ ID NO: 285929 - DNA, 25 bp, Artificial
  probe
  misc_feature (1)..(25): SEQ ID NO: 1181; WAN024DSJ; Start 161; Stop 185
aagctgctaagaaagaatacgaaga

SEQ ID NO: 285930 - DNA, 25 bp, Artificial
  probe
  misc_feature (1)..(25): SEQ ID NO: 1181; WAN024DSJ; Start 159; Stop 183
tgaagctgctaagaaagaatacgaa

SEQ ID NO: 285931 - DNA, 25 bp, Artificial
  probe
  misc_feature (1)..(25): SEQ ID NO: 1181; WAN024DSJ; Start 158; Stop 182
ctgaagctgctaagaaagaatacga

SEQ ID NO: 285932 - DNA, 25 bp, Artificial
  probe
  misc_feature (1)..(25): SEQ ID NO: 1181; WAN024DSJ; Start 157; Stop 181
tctgaagctgctaagaaagaatacg

SEQ ID NO: 285933 - DNA, 25 bp, Artificial
  probe
  misc_feature (1)..(25): SEQ ID NO: 1181; WAN024DSJ; Start 154; Stop 178
aaatctgaagctgctaagaaagaat

SEQ ID NO: 285934 - DNA, 25 bp, Artificial
  probe
  misc_feature (1)..(25): SEQ ID NO: 1181; WAN024DSJ; Start 125; Stop 149
ctgagagagactatgatgcagcaat

SEQ ID NO: 285935 - DNA, 25 bp, Artificial
  probe
  misc_feature (1)..(25): SEQ ID NO: 1181; WAN024DSJ; Start 156; Stop 180
atctgaagctgctaagaaagaatac

SEQ ID NO: 285936 - DNA, 25 bp, Artificial
  probe
  misc_feature (1)..(25): SEQ ID NO: 1181; WAN024DSJ; Start 155; Stop 179
aatctgaagctgctaagaaagaata

SEQ ID NO: 285937 - DNA, 25 bp, Artificial
  probe
  misc_feature (1)..(25): SEQ ID NO: 1181; WAN024DSJ; Start 173; Stop 197
aagaatacgaagaagctaagaaaga

SEQ ID NO: 285938 - DNA, 25 bp, Artificial
  probe
  misc_feature (1)..(25): SEQ ID NO: 1181; WAN024DSJ; Start 170; Stop 194
agaaagaatacgaagaagctaagaa

SEQ ID NO: 285939 - DNA, 25 bp, Artificial
  probe
  misc_feature (1)..(25): SEQ ID NO: 1181; WAN024DSJ; Start 169; Stop 193
aagaaagaatacgaagaagctaaga

SEQ ID NO: 285940 - DNA, 25 bp, Artificial
  probe
  misc_feature (1)..(25): SEQ ID NO: 1181; WAN024DSJ; Start 164; Stop 188
ctgctaagaaagaatacgaagaagc

SEQ ID NO: 285941 - DNA, 25 bp, Artificial
  probe
  misc_feature (1)..(25): SEQ ID NO: 1181; WAN024DSJ; Start 121; Stop 145
caagctgagagagactatgatgcag

SEQ ID NO: 285942 - DNA, 25 bp, Artificial
  probe
  misc_feature (1)..(25): SEQ ID NO: 1181; WAN024DSJ; Start 120; Stop 144
tcaagctgagagagactatgatgca

SEQ ID NO: 285943 - DNA, 25 bp, Artificial
  probe
  misc_feature (1)..(25): SEQ ID NO: 1181; WAN024DSJ; Start 174; Stop 198
agaatacgaagaagctaagaaagat

SEQ ID NO: 285944 - DNA, 25 bp, Artificial
  probe
  misc_feature (1)..(25): SEQ ID NO: 1181; WAN024DSJ; Start 244; Stop 268
aagaaaactgaagagaaagcaaagc

SEQ ID NO: 285945 - DNA, 25 bp, Artificial
  probe
  misc_feature (1)..(25): SEQ ID NO: 1181; WAN024DSJ; Start 975; Stop 999
tgaccttaagaaagcagttgatgag

SEQ ID NO: 285946 - DNA, 25 bp, Artificial
  probe
  misc_feature (1)..(25): SEQ ID NO: 1181; WAN024DSJ; Start 241; Stop 265
caaaagaaaactgaagagaaagcaa

SEQ ID NO: 285947 - DNA, 25 bp, Artificial
  probe
  misc_feature (1)..(25): SEQ ID NO: 1181; WAN024DSJ; Start 243; Stop 267
aaagaaaactgaagagaaagcaaag

SEQ ID NO: 285948 - DNA, 25 bp, Artificial
  probe
  misc_feature (1)..(25): SEQ ID NO: 1181; WAN024DSJ; Start 172; Stop 196
aaagaatacgaagaagctaagaaag

SEQ ID NO: 285949 - DNA, 25 bp, Artificial
  probe
  misc_feature (1)..(25): SEQ ID NO: 1181; WAN024DSJ; Start 171; Stop 195
gaaagaatacgaagaagctaagaaa

SEQ ID NO: 285950 - DNA, 25 bp, Artificial
  probe
  misc_feature (1)..(25): SEQ ID NO: 1181; WAN024DSJ; Start 175; Stop 199
gaatacgaagaagctaagaaagatt

SEQ ID NO: 285951 - DNA, 25 bp, Artificial
  probe
  misc_feature (1)..(25): SEQ ID NO: 1181; WAN024DSJ; Start 179; Stop 203
acgaagaagctaagaaagatttaga

SEQ ID NO: 285952 - DNA, 25 bp, Artificial
  probe
  misc_feature (1)..(25): SEQ ID NO: 1181; WAN024DSJ; Start 386; Stop 410
ccgctcaacagaaattaaaagatgc

SEQ ID NO: 285953 - DNA, 25 bp, Artificial
  probe
  misc_feature (1)..(25): SEQ ID NO: 1181; WAN024DSJ; Start 385; Stop 409
gccgctcaacagaaattaaaagatg

SEQ ID NO: 285954 - DNA, 25 bp, Artificial
  probe
  misc_feature (1)..(25): SEQ ID NO: 1182; WAN024DSH; Start 466; Stop 490
gtaagagcagttgtagttcctgaag

SEQ ID NO: 285955 - DNA, 25 bp, Artificial
  probe
  misc_feature (1)..(25): SEQ ID NO: 1182; WAN024DSH; Start 561; Stop 585
atatgataaggcagctcaagaggta

SEQ ID NO: 285956 - DNA, 25 bp, Artificial
  probe
  misc_feature (1)..(25): SEQ ID NO: 1182; WAN024DSH; Start 551; Stop 575
ctaaggagaaatatgataaggcagc

SEQ ID NO: 285957 - DNA, 25 bp, Artificial
  probe
  misc_feature (1)..(25): SEQ ID NO: 1182; WAN024DSH; Start 550; Stop 574
gctaaggagaaatatgataaggcag

SEQ ID NO: 285958 - DNA, 25 bp, Artificial
  probe
  misc_feature (1)..(25): SEQ ID NO: 1182; WAN024DSH; Start 562; Stop 586
tatgataaggcagctcaagaggtag

SEQ ID NO: 285959 - DNA, 25 bp, Artificial
  probe
  misc_feature (1)..(25): SEQ ID NO: 1182; WAN024DSH; Start 560; Stop 584
aatatgataaggcagctcaagaggt

SEQ ID NO: 285960 - DNA, 25 bp, Artificial
  probe
  misc_feature (1)..(25): SEQ ID NO: 1182; WAN024DSH; Start 467; Stop 491
taagagcagttgtagttcctgaagc

SEQ ID NO: 285961 - DNA, 25 bp, Artificial
  probe
  misc_feature (1)..(25): SEQ ID NO: 1182; WAN024DSH; Start 552; Stop 576
taaggagaaatatgataaggcagct

SEQ ID NO: 285962 - DNA, 25 bp, Artificial
  probe
  misc_feature (1)..(25): SEQ ID NO: 1182; WAN024DSH; Start 549; Stop 573
agctaaggagaaatatgataaggca

SEQ ID NO: 285963 - DNA, 25 bp, Artificial
  probe
  misc_feature (1)..(25): SEQ ID NO: 1182; WAN024DSH; Start 563; Stop 587
atgataaggcagctcaagaggtaga

SEQ ID NO: 285964 - DNA, 25 bp, Artificial
  probe
  misc_feature (1)..(25): SEQ ID NO: 1182; WAN024DSH; Start 557; Stop 581
agaaatatgataaggcagctcaaga

SEQ ID NO: 285965 - DNA, 25 bp, Artificial
  probe
  misc_feature (1)..(25): SEQ ID NO: 1182; WAN024DSH; Start 558; Stop 582
gaaatatgataaggcagctcaagag

SEQ ID NO: 285966 - DNA, 25 bp, Artificial
  probe
  misc_feature (1)..(25): SEQ ID NO: 1182; WAN024DSH; Start 559; Stop 583
aaatatgataaggcagctcaagagg

SEQ ID NO: 285967 - DNA, 25 bp, Artificial
  probe
  misc_feature (1)..(25): SEQ ID NO: 1182; WAN024DSH; Start 556; Stop 580
gagaaatatgataaggcagctcaag

SEQ ID NO: 285968 - DNA, 25 bp, Artificial
  probe
  misc_feature (1)..(25): SEQ ID NO: 1182; WAN024DSH; Start 553; Stop 577
aaggagaaatatgataaggcagctc

SEQ ID NO: 285969 - DNA, 25 bp, Artificial
  probe
  misc_feature (1)..(25): SEQ ID NO: 1182; WAN024DSH; Start 555; Stop 579
ggagaaatatgataaggcagctcaa

SEQ ID NO: 285970 - DNA, 25 bp, Artificial
  probe
  misc_feature (1)..(25): SEQ ID NO: 1182; WAN024DSH; Start 490; Stop 514
gcaaaggagttagctgttactaaac

SEQ ID NO: 285971 - DNA, 25 bp, Artificial
  probe
  misc_feature (1)..(25): SEQ ID NO: 1182; WAN024DSH; Start 554; Stop 578
aggagaaatatgataaggcagctca

SEQ ID NO: 285972 - DNA, 25 bp, Artificial
  probe
  misc_feature (1)..(25): SEQ ID NO: 1182; WAN024DSH; Start 242; Stop 266
ctgaagagaaagccgaaaatgaaaa

SEQ ID NO: 285973 - DNA, 25 bp, Artificial
  probe
  misc_feature (1)..(25): SEQ ID NO: 1182; WAN024DSH; Start 237; Stop 261
gaaaactgaagagaaagccgaaaat

SEQ ID NO: 285974 - DNA, 25 bp, Artificial
  probe
  misc_feature (1)..(25): SEQ ID NO: 1182; WAN024DSH; Start 238; Stop 262
aaaactgaagagaaagccgaaaatg

SEQ ID NO: 285975 - DNA, 25 bp, Artificial
  probe
  misc_feature (1)..(25): SEQ ID NO: 1182; WAN024DSH; Start 333; Stop 357
aattcaacgagcaaaagattcaaaa

SEQ ID NO: 285976 - DNA, 25 bp, Artificial
  probe
  misc_feature (1)..(25): SEQ ID NO: 1182; WAN024DSH; Start 332; Stop 356
aaattcaacgagcaaaagattcaaa

SEQ ID NO: 285977 - DNA, 25 bp, Artificial
  probe
  misc_feature (1)..(25): SEQ ID NO: 1182; WAN024DSH; Start 236; Stop 260
agaaaactgaagagaaagccgaaaa

SEQ ID NO: 285978 - DNA, 25 bp, Artificial
  probe
  misc_feature (1)..(25): SEQ ID NO: 1182; WAN024DSH; Start 235; Stop 259
aagaaaactgaagagaaagccgaaa

SEQ ID NO: 285979 - DNA, 25 bp, Artificial
  probe
  misc_feature (1)..(25): SEQ ID NO: 1182; WAN024DSH; Start 331; Stop 355
gaaattcaacgagcaaaagattcaa

SEQ ID NO: 285980 - DNA, 25 bp, Artificial
  probe
  misc_feature (1)..(25): SEQ ID NO: 1182; WAN024DSH; Start 542; Stop 566
ccgaagtagctaaggagaaatatga

SEQ ID NO: 285981 - DNA, 25 bp, Artificial
  probe
  misc_feature (1)..(25): SEQ ID NO: 1182; WAN024DSH; Start 241; Stop 265
actgaagagaaagccgaaaatgaaa

SEQ ID NO: 285982 - DNA, 25 bp, Artificial
  probe
  misc_feature (1)..(25): SEQ ID NO: 1182; WAN024DSH; Start 240; Stop 264
aactgaagagaaagccgaaaatgaa

SEQ ID NO: 285983 - DNA, 25 bp, Artificial
  probe
  misc_feature (1)..(25): SEQ ID NO: 1182; WAN024DSH; Start 239; Stop 263
aaactgaagagaaagccgaaaatga

SEQ ID NO: 285984 - DNA, 25 bp, Artificial
  probe
  misc_feature (1)..(25): SEQ ID NO: 1182; WAN024DSH; Start 463; Stop 487
gctgtaagagcagttgtagttcctg

SEQ ID NO: 285985 - DNA, 25 bp, Artificial
  probe
  misc_feature (1)..(25): SEQ ID NO: 1182; WAN024DSH; Start 469; Stop 493
agagcagttgtagttcctgaagcaa

SEQ ID NO: 285986 - DNA, 25 bp, Artificial
  probe
  misc_feature (1)..(25): SEQ ID NO: 1182; WAN024DSH; Start 468; Stop 492
aagagcagttgtagttcctgaagca

SEQ ID NO: 285987 - DNA, 25 bp, Artificial
  probe
  misc_feature (1)..(25): SEQ ID NO: 1183; WAN024DSG; Start 311; Stop 335
aatctcagcaagcattagttgaatt

SEQ ID NO: 285988 - DNA, 25 bp, Artificial
  probe
  misc_feature (1)..(25): SEQ ID NO: 1183; WAN024DSG; Start 467; Stop 491
caactgagttagctgagactaagaa

SEQ ID NO: 285989 - DNA, 25 bp, Artificial
  probe
  misc_feature (1)..(25): SEQ ID NO: 1183; WAN024DSG; Start 310; Stop 334
aaatctcagcaagcattagttgaat

SEQ ID NO: 285990 - DNA, 25 bp, Artificial
  probe
  misc_feature (1)..(25): SEQ ID NO: 1183; WAN024DSG; Start 306; Stop 330
tcttaaatctcagcaagcattagtt

SEQ ID NO: 285991 - DNA, 25 bp, Artificial
  probe
  misc_feature (1)..(25): SEQ ID NO: 1183; WAN024DSG; Start 290; Stop 314
aacatcaggcggctaatcttaaatc

SEQ ID NO: 285992 - DNA, 25 bp, Artificial
  probe
  misc_feature (1)..(25): SEQ ID NO: 1183; WAN024DSG; Start 289; Stop 313
gaacatcaggcggctaatcttaaat

SEQ ID NO: 285993 - DNA, 25 bp, Artificial
  probe
  misc_feature (1)..(25): SEQ ID NO: 1183; WAN024DSG; Start 382; Stop 406
caagccaagttagaagaagcagaaa

SEQ ID NO: 285994 - DNA, 25 bp, Artificial
  probe
  misc_feature (1)..(25): SEQ ID NO: 1183; WAN024DSG; Start 292; Stop 316
catcaggcggctaatcttaaatctc

SEQ ID NO: 285995 - DNA, 25 bp, Artificial
  probe
  misc_feature (1)..(25): SEQ ID NO: 1183; WAN024DSG; Start 305; Stop 329
atcttaaatctcagcaagcattagt

SEQ ID NO: 285996 - DNA, 25 bp, Artificial
  probe
  misc_feature (1)..(25): SEQ ID NO: 1183; WAN024DSG; Start 307; Stop 331
cttaaatctcagcaagcattagttg

SEQ ID NO: 285997 - DNA, 25 bp, Artificial
  probe
  misc_feature (1)..(25): SEQ ID NO: 1183; WAN024DSG; Start 309; Stop 333
taaatctcagcaagcattagttgaa

SEQ ID NO: 285998 - DNA, 25 bp, Artificial
  probe
  misc_feature (1)..(25): SEQ ID NO: 1183; WAN024DSG; Start 308; Stop 332
ttaaatctcagcaagcattagttga

SEQ ID NO: 285999 - DNA, 25 bp, Artificial
  probe
  misc_feature (1)..(25): SEQ ID NO: 1183; WAN024DSG; Start 426; Stop 450
aaaggaatttgataaagcacaggca

SEQ ID NO: 286000 - DNA, 25 bp, Artificial
  probe
  misc_feature (1)..(25): SEQ ID NO: 1183; WAN024DSG; Start 293; Stop 317
atcaggcggctaatcttaaatctca

SEQ ID NO: 286001 - DNA, 25 bp, Artificial
  probe
  misc_feature (1)..(25): SEQ ID NO: 1183; WAN024DSG; Start 427; Stop 451
aaggaatttgataaagcacaggcag

SEQ ID NO: 286002 - DNA, 25 bp, Artificial
  probe
  misc_feature (1)..(25): SEQ ID NO: 1183; WAN024DSG; Start 291; Stop 315
acatcaggcggctaatcttaaatct

SEQ ID NO: 286003 - DNA, 25 bp, Artificial
  probe
  misc_feature (1)..(25): SEQ ID NO: 1183; WAN024DSG; Start 341; Stop 365
ctgctcaaagagaaggtaatcctaa

SEQ ID NO: 286004 - DNA, 25 bp, Artificial
  probe
  misc_feature (1)..(25): SEQ ID NO: 1183; WAN024DSG; Start 342; Stop 366
tgctcaaagagaaggtaatcctaaa

SEQ ID NO: 286005 - DNA, 25 bp, Artificial
  probe
  misc_feature (1)..(25): SEQ ID NO: 1183; WAN024DSG; Start 317; Stop 341
agcaagcattagttgaattcttagc

SEQ ID NO: 286006 - DNA, 25 bp, Artificial
  probe
  misc_feature (1)..(25): SEQ ID NO: 1183; WAN024DSG; Start 466; Stop 490
gcaactgagttagctgagactaaga

SEQ ID NO: 286007 - DNA, 25 bp, Artificial
  probe
  misc_feature (1)..(25): SEQ ID NO: 1183; WAN024DSG; Start 314; Stop 338
ctcagcaagcattagttgaattctt

SEQ ID NO: 286008 - DNA, 25 bp, Artificial
  probe
  misc_feature (1)..(25): SEQ ID NO: 1183; WAN024DSG; Start 312; Stop 336
atctcagcaagcattagttgaattc

SEQ ID NO: 286009 - DNA, 25 bp, Artificial
  probe
  misc_feature (1)..(25): SEQ ID NO: 1183; WAN024DSG; Start 381; Stop 405
gcaagccaagttagaagaagcagaa

SEQ ID NO: 286010 - DNA, 25 bp, Artificial
  probe
  misc_feature (1)..(25): SEQ ID NO: 1183; WAN024DSG; Start 454; Stop 478
gtagttcctgaagcaactgagttag

SEQ ID NO: 286011 - DNA, 25 bp, Artificial
  probe
  misc_feature (1)..(25): SEQ ID NO: 1183; WAN024DSG; Start 323; Stop 347
cattagttgaattcttagctgctca

SEQ ID NO: 286012 - DNA, 25 bp, Artificial
  probe
  misc_feature (1)..(25): SEQ ID NO: 1183; WAN024DSG; Start 313; Stop 337
tctcagcaagcattagttgaattct

SEQ ID NO: 286013 - DNA, 25 bp, Artificial
  probe
  misc_feature (1)..(25): SEQ ID NO: 1183; WAN024DSG; Start 294; Stop 318
tcaggcggctaatcttaaatctcag

SEQ ID NO: 286014 - DNA, 25 bp, Artificial
  probe
  misc_feature (1)..(25): SEQ ID NO: 1183; WAN024DSG; Start 304; Stop 328
aatcttaaatctcagcaagcattag

SEQ ID NO: 286015 - DNA, 25 bp, Artificial
  probe
  misc_feature (1)..(25): SEQ ID NO: 1183; WAN024DSG; Start 302; Stop 326
ctaatcttaaatctcagcaagcatt

SEQ ID NO: 286016 - DNA, 25 bp, Artificial
  probe
  misc_feature (1)..(25): SEQ ID NO: 1183; WAN024DSG; Start 288; Stop 312
agaacatcaggcggctaatcttaaa

SEQ ID NO: 286017 - DNA, 25 bp, Artificial
  probe
  misc_feature (1)..(25): SEQ ID NO: 1183; WAN024DSG; Start 316; Stop 340
cagcaagcattagttgaattcttag

SEQ ID NO: 286018 - DNA, 25 bp, Artificial
  probe
  misc_feature (1)..(25): SEQ ID NO: 1183; WAN024DSG; Start 315; Stop 339
tcagcaagcattagttgaattctta

SEQ ID NO: 286019 - DNA, 25 bp, Artificial
  probe
  misc_feature (1)..(25): SEQ ID NO: 1183; WAN024DSG; Start 287; Stop 311
aagaacatcaggcggctaatcttaa

SEQ ID NO: 286020 - DNA, 25 bp, Artificial
  probe
  misc_feature (1)..(25): SEQ ID NO: 1184; WAN024GNW; Start 1113; Stop 1137
tattggagatgagcagtctattgag

SEQ ID NO: 286021 - DNA, 25 bp, Artificial
  probe
  misc_feature (1)..(25): SEQ ID NO: 1184; WAN024GNW; Start 1982; Stop 2006
tgattaagatgaccttggaagagaa

SEQ ID NO: 286022 - DNA, 25 bp, Artificial
  probe
  misc_feature (1)..(25): SEQ ID NO: 1184; WAN024GNW; Start 1981; Stop 2005
ttgattaagatgaccttggaagaga

SEQ ID NO: 286023 - DNA, 25 bp, Artificial
  probe
  misc_feature (1)..(25): SEQ ID NO: 1184; WAN024GNW; Start 1973; Stop 1997
aagttggcttgattaagatgacctt

SEQ ID NO: 286024 - DNA, 25 bp, Artificial
  probe
  misc_feature (1)..(25): SEQ ID NO: 1184; WAN024GNW; Start 1980; Stop 2004
cttgattaagatgaccttggaagag

SEQ ID NO: 286025 - DNA, 25 bp, Artificial
  probe
  misc_feature (1)..(25): SEQ ID NO: 1184; WAN024GNW; Start 1979; Stop 2003
gcttgattaagatgaccttggaaga

SEQ ID NO: 286026 - DNA, 25 bp, Artificial
  probe
  misc_feature (1)..(25): SEQ ID NO: 1184; WAN024GNW; Start 2170; Stop 2194
ttgcttaacaatatggctcaagttg

SEQ ID NO: 286027 - DNA, 25 bp, Artificial
  probe
  misc_feature (1)..(25): SEQ ID NO: 1184; WAN024GNW; Start 1901; Stop 1925
atatcgtggttctcagttatggtca

SEQ ID NO: 286028 - DNA, 25 bp, Artificial
  probe
  misc_feature (1)..(25): SEQ ID NO: 1184; WAN024GNW; Start 1112; Stop 1136
atattggagatgagcagtctattga

SEQ ID NO: 286029 - DNA, 25 bp, Artificial
  probe
  misc_feature (1)..(25): SEQ ID NO: 1184; WAN024GNW; Start 1110; Stop 1134
tgatattggagatgagcagtctatt

SEQ ID NO: 286030 - DNA, 25 bp, Artificial
  probe
  misc_feature (1)..(25): SEQ ID NO: 1184; WAN024GNW; Start 1111; Stop 1135
gatattggagatgagcagtctattg

SEQ ID NO: 286031 - DNA, 25 bp, Artificial
  probe
  misc_feature (1)..(25): SEQ ID NO: 1184; WAN024GNW; Start 1974; Stop 1998
agttggcttgattaagatgaccttg

SEQ ID NO: 286032 - DNA, 25 bp, Artificial
  probe
  misc_feature (1)..(25): SEQ ID NO: 1184; WAN024GNW; Start 1194; Stop 1218
ggtcaaccaacattcactcttactt

SEQ ID NO: 286033 - DNA, 25 bp, Artificial
  probe
  misc_feature (1)..(25): SEQ ID NO: 1184; WAN024GNW; Start 1192; Stop 1216
aaggtcaaccaacattcactcttac

SEQ ID NO: 286034 - DNA, 25 bp, Artificial
  probe
  misc_feature (1)..(25): SEQ ID NO: 1184; WAN024GNW; Start 1978; Stop 2002
ggcttgattaagatgaccttggaag

SEQ ID NO: 286035 - DNA, 25 bp, Artificial
  probe
  misc_feature (1)..(25): SEQ ID NO: 1184; WAN024GNW; Start 1902; Stop 1926
tatcgtggttctcagttatggtcag

SEQ ID NO: 286036 - DNA, 25 bp, Artificial
  probe
  misc_feature (1)..(25): SEQ ID NO: 1184; WAN024GNW; Start 2172; Stop 2196
gcttaacaatatggctcaagttgat

SEQ ID NO: 286037 - DNA, 25 bp, Artificial
  probe
  misc_feature (1)..(25): SEQ ID NO: 1184; WAN024GNW; Start 1109; Stop 1133
ctgatattggagatgagcagtctat

SEQ ID NO: 286038 - DNA, 25 bp, Artificial
  probe
  misc_feature (1)..(25): SEQ ID NO: 1184; WAN024GNW; Start 799; Stop 823
attatcggtcatctggacttgattc

SEQ ID NO: 286039 - DNA, 25 bp, Artificial
  probe
  misc_feature (1)..(25): SEQ ID NO: 1184; WAN024GNW; Start 798; Stop 822
gattatcggtcatctggacttgatt

SEQ ID NO: 286040 - DNA, 25 bp, Artificial
  probe
  misc_feature (1)..(25): SEQ ID NO: 1184; WAN024GNW; Start 1193; Stop 1217
aggtcaaccaacattcactcttact

SEQ ID NO: 286041 - DNA, 25 bp, Artificial
  probe
  misc_feature (1)..(25): SEQ ID NO: 1184; WAN024GNW; Start 2171; Stop 2195
tgcttaacaatatggctcaagttga

SEQ ID NO: 286042 - DNA, 25 bp, Artificial
  probe
  misc_feature (1)..(25): SEQ ID NO: 1184; WAN024GNW; Start 1977; Stop 2001
tggcttgattaagatgaccttggaa

SEQ ID NO: 286043 - DNA, 25 bp, Artificial
  probe
  misc_feature (1)..(25): SEQ ID NO: 1184; WAN024GNW; Start 1976; Stop 2000
ttggcttgattaagatgaccttgga

SEQ ID NO: 286044 - DNA, 25 bp, Artificial
  probe
  misc_feature (1)..(25): SEQ ID NO: 1184; WAN024GNW; Start 1975; Stop 1999
gttggcttgattaagatgaccttgg

SEQ ID NO: 286045 - DNA, 25 bp, Artificial
  probe
  misc_feature (1)..(25): SEQ ID NO: 1184; WAN024GNW; Start 471; Stop 495
aatacatgatagcgagagtcaggta

SEQ ID NO: 286046 - DNA, 25 bp, Artificial
  probe
  misc_feature (1)..(25): SEQ ID NO: 1184; WAN024GNW; Start 22; Stop 46
acattagagttcgataaggtcaagg

SEQ ID NO: 286047 - DNA, 25 bp, Artificial
  probe
  misc_feature (1)..(25): SEQ ID NO: 1184; WAN024GNW; Start 1483; Stop 1507
gaagttatcgtaggagatgccagtc

SEQ ID NO: 286048 - DNA, 25 bp, Artificial
  probe
  misc_feature (1)..(25): SEQ ID NO: 1184; WAN024GNW; Start 472; Stop 496
atacatgatagcgagagtcaggtac

SEQ ID NO: 286049 - DNA, 25 bp, Artificial
  probe
  misc_feature (1)..(25): SEQ ID NO: 1184; WAN024GNW; Start 1114; Stop 1138
attggagatgagcagtctattgagc

SEQ ID NO: 286050 - DNA, 25 bp, Artificial
  probe
  misc_feature (1)..(25): SEQ ID NO: 1184; WAN024GNW; Start 1118; Stop 1142
gagatgagcagtctattgagcagag

SEQ ID NO: 286051 - DNA, 25 bp, Artificial
  probe
  misc_feature (1)..(25): SEQ ID NO: 1184; WAN024GNW; Start 797; Stop 821
ggattatcggtcatctggacttgat

SEQ ID NO: 286052 - DNA, 25 bp, Artificial
  probe
  misc_feature (1)..(25): SEQ ID NO: 1184; WAN024GNW; Start 1195; Stop 1219
gtcaaccaacattcactcttacttt

SEQ ID NO: 286053 - DNA, 25 bp, Artificial
  probe
  misc_feature (1)..(25): SEQ ID NO: 1185; WAN024FL9; Start 424; Stop 448
acaggaagagaattgatgatgacag

SEQ ID NO: 286054 - DNA, 25 bp, Artificial
  probe
  misc_feature (1)..(25): SEQ ID NO: 1185; WAN024FL9; Start 423; Stop 447
gacaggaagagaattgatgatgaca

SEQ ID NO: 286055 - DNA, 25 bp, Artificial
  probe
  misc_feature (1)..(25): SEQ ID NO: 1185; WAN024FL9; Start 429; Stop 453
aagagaattgatgatgacagcagag

SEQ ID NO: 286056 - DNA, 25 bp, Artificial
  probe
  misc_feature (1)..(25): SEQ ID NO: 1185; WAN024FL9; Start 428; Stop 452
gaagagaattgatgatgacagcaga

SEQ ID NO: 286057 - DNA, 25 bp, Artificial
  probe
  misc_feature (1)..(25): SEQ ID NO: 1185; WAN024FL9; Start 284; Stop 308
cattcgttgattcagatgactatgt

SEQ ID NO: 286058 - DNA, 25 bp, Artificial
  probe
  misc_feature (1)..(25): SEQ ID NO: 1185; WAN024FL9; Start 283; Stop 307
acattcgttgattcagatgactatg

SEQ ID NO: 286059 - DNA, 25 bp, Artificial
  probe
  misc_feature (1)..(25): SEQ ID NO: 1185; WAN024FL9; Start 288; Stop 312
cgttgattcagatgactatgttaca

SEQ ID NO: 286060 - DNA, 25 bp, Artificial
  probe
  misc_feature (1)..(25): SEQ ID NO: 1185; WAN024FL9; Start 287; Stop 311
tcgttgattcagatgactatgttac

SEQ ID NO: 286061 - DNA, 25 bp, Artificial
  probe
  misc_feature (1)..(25): SEQ ID NO: 1185; WAN024FL9; Start 422; Stop 446
ggacaggaagagaattgatgatgac

SEQ ID NO: 286062 - DNA, 25 bp, Artificial
  probe
  misc_feature (1)..(25): SEQ ID NO: 1185; WAN024FL9; Start 285; Stop 309
attcgttgattcagatgactatgtt

SEQ ID NO: 286063 - DNA, 25 bp, Artificial
  probe
  misc_feature (1)..(25): SEQ ID NO: 1185; WAN024FL9; Start 282; Stop 306
aacattcgttgattcagatgactat

SEQ ID NO: 286064 - DNA, 25 bp, Artificial
  probe
  misc_feature (1)..(25): SEQ ID NO: 1185; WAN024FL9; Start 280; Stop 304
ataacattcgttgattcagatgact

SEQ ID NO: 286065 - DNA, 25 bp, Artificial
  probe
  misc_feature (1)..(25): SEQ ID NO: 1185; WAN024FL9; Start 427; Stop 451
ggaagagaattgatgatgacagcag

SEQ ID NO: 286066 - DNA, 25 bp, Artificial
  probe
  misc_feature (1)..(25): SEQ ID NO: 1185; WAN024FL9; Start 425; Stop 449
caggaagagaattgatgatgacagc

SEQ ID NO: 286067 - DNA, 25 bp, Artificial
  probe
  misc_feature (1)..(25): SEQ ID NO: 1185; WAN024FL9; Start 286; Stop 310
ttcgttgattcagatgactatgtta

SEQ ID NO: 286068 - DNA, 25 bp, Artificial
  probe
  misc_feature (1)..(25): SEQ ID NO: 1185; WAN024FL9; Start 426; Stop 450
aggaagagaattgatgatgacagca

SEQ ID NO: 286069 - DNA, 25 bp, Artificial
  probe
  misc_feature (1)..(25): SEQ ID NO: 1185; WAN024FL9; Start 281; Stop 305
taacattcgttgattcagatgacta

SEQ ID NO: 286070 - DNA, 25 bp, Artificial
  probe
  misc_feature (1)..(25): SEQ ID NO: 1185; WAN024FL9; Start 289; Stop 313
gttgattcagatgactatgttacag

SEQ ID NO: 286071 - DNA, 25 bp, Artificial
  probe
  misc_feature (1)..(25): SEQ ID NO: 1185; WAN024FL9; Start 290; Stop 314
ttgattcagatgactatgttacaga

SEQ ID NO: 286072 - DNA, 25 bp, Artificial
  probe
  misc_feature (1)..(25): SEQ ID NO: 1185; WAN024FL9; Start 291; Stop 315
tgattcagatgactatgttacagat

SEQ ID NO: 286073 - DNA, 25 bp, Artificial
  probe
  misc_feature (1)..(25): SEQ ID NO: 1185; WAN024FL9; Start 412; Stop 436
atcaataatgggacaggaagagaat

SEQ ID NO: 286074 - DNA, 25 bp, Artificial
  probe
  misc_feature (1)..(25): SEQ ID NO: 1185; WAN024FL9; Start 292; Stop 316
gattcagatgactatgttacagatg

SEQ ID NO: 286075 - DNA, 25 bp, Artificial
  probe
  misc_feature (1)..(25): SEQ ID NO: 1185; WAN024FL9; Start 417; Stop 441
taatgggacaggaagagaattgatg

SEQ ID NO: 286076 - DNA, 25 bp, Artificial
  probe
  misc_feature (1)..(25): SEQ ID NO: 1185; WAN024FL9; Start 415; Stop 439
aataatgggacaggaagagaattga

SEQ ID NO: 286077 - DNA, 25 bp, Artificial
  probe
  misc_feature (1)..(25): SEQ ID NO: 1185; WAN024FL9; Start 413; Stop 437
tcaataatgggacaggaagagaatt

SEQ ID NO: 286078 - DNA, 25 bp, Artificial
  probe
  misc_feature (1)..(25): SEQ ID NO: 1185; WAN024FL9; Start 279; Stop 303
tataacattcgttgattcagatgac

SEQ ID NO: 286079 - DNA, 25 bp, Artificial
  probe
  misc_feature (1)..(25): SEQ ID NO: 1185; WAN024FL9; Start 416; Stop 440
ataatgggacaggaagagaattgat

SEQ ID NO: 286080 - DNA, 25 bp, Artificial
  probe
  misc_feature (1)..(25): SEQ ID NO: 1185; WAN024FL9; Start 430; Stop 454
agagaattgatgatgacagcagagc

SEQ ID NO: 286081 - DNA, 25 bp, Artificial
  probe
  misc_feature (1)..(25): SEQ ID NO: 1185; WAN024FL9; Start 295; Stop 319
tcagatgactatgttacagatgatt

SEQ ID NO: 286082 - DNA, 25 bp, Artificial
  probe
  misc_feature (1)..(25): SEQ ID NO: 1185; WAN024FL9; Start 294; Stop 318
ttcagatgactatgttacagatgat

SEQ ID NO: 286083 - DNA, 25 bp, Artificial
  probe
  misc_feature (1)..(25): SEQ ID NO: 1185; WAN024FL9; Start 293; Stop 317
attcagatgactatgttacagatga

SEQ ID NO: 286084 - DNA, 25 bp, Artificial
  probe
  misc_feature (1)..(25): SEQ ID NO: 1185; WAN024FL9; Start 221; Stop 245
ctaatggaggtttgtctgatgctag

SEQ ID NO: 286085 - DNA, 25 bp, Artificial
  probe
  misc_feature (1)..(25): SEQ ID NO: 1185; WAN024FL9; Start 411; Stop 435
gatcaataatgggacaggaagagaa

SEQ ID NO: 286086 - DNA, 25 bp, Artificial
  probe
  misc_feature (1)..(25): SEQ ID NO: 1186; WAN024DKW; Start 36; Stop 60
ggaacttagtcaaggtcgtatcatt

SEQ ID NO: 286087 - DNA, 25 bp, Artificial
  probe
  misc_feature (1)..(25): SEQ ID NO: 1186; WAN024DKW; Start 37; Stop 61
gaacttagtcaaggtcgtatcattg

SEQ ID NO: 286088 - DNA, 25 bp, Artificial
  probe
  misc_feature (1)..(25): SEQ ID NO: 1186; WAN024DKW; Start 35; Stop 59
aggaacttagtcaaggtcgtatcat

SEQ ID NO: 286089 - DNA, 25 bp, Artificial
  probe
  misc_feature (1)..(25): SEQ ID NO: 1186; WAN024DKW; Start 34; Stop 58
gaggaacttagtcaaggtcgtatca

SEQ ID NO: 286090 - DNA, 25 bp, Artificial
  probe
  misc_feature (1)..(25): SEQ ID NO: 1186; WAN024DKW; Start 46; Stop 70
caaggtcgtatcattgactacaagg

SEQ ID NO: 286091 - DNA, 25 bp, Artificial
  probe
  misc_feature (1)..(25): SEQ ID NO: 1186; WAN024DKW; Start 564; Stop 588
aagctatgaacaggtgaagagagaa

SEQ ID NO: 286092 - DNA, 25 bp, Artificial
  probe
  misc_feature (1)..(25): SEQ ID NO: 1186; WAN024DKW; Start 359; Stop 383
cttgggaagaaatgatgttggaaac

SEQ ID NO: 286093 - DNA, 25 bp, Artificial
  probe
  misc_feature (1)..(25): SEQ ID NO: 1186; WAN024DKW; Start 358; Stop 382
acttgggaagaaatgatgttggaaa

SEQ ID NO: 286094 - DNA, 25 bp, Artificial
  probe
  misc_feature (1)..(25): SEQ ID NO: 1186; WAN024DKW; Start 360; Stop 384
ttgggaagaaatgatgttggaaact

SEQ ID NO: 286095 - DNA, 25 bp, Artificial
  probe
  misc_feature (1)..(25): SEQ ID NO: 1186; WAN024DKW; Start 47; Stop 71
aaggtcgtatcattgactacaaggc

SEQ ID NO: 286096 - DNA, 25 bp, Artificial
  probe
  misc_feature (1)..(25): SEQ ID NO: 1186; WAN024DKW; Start 361; Stop 385
tgggaagaaatgatgttggaaactc

SEQ ID NO: 286097 - DNA, 25 bp, Artificial
  probe
  misc_feature (1)..(25): SEQ ID NO: 1186; WAN024DKW; Start 354; Stop 378
ctacacttgggaagaaatgatgttg

SEQ ID NO: 286098 - DNA, 25 bp, Artificial
  probe
  misc_feature (1)..(25): SEQ ID NO: 1186; WAN024DKW; Start 357; Stop 381
cacttgggaagaaatgatgttggaa

SEQ ID NO: 286099 - DNA, 25 bp, Artificial
  probe
  misc_feature (1)..(25): SEQ ID NO: 1186; WAN024DKW; Start 38; Stop 62
aacttagtcaaggtcgtatcattga

SEQ ID NO: 286100 - DNA, 25 bp, Artificial
  probe
  misc_feature (1)..(25): SEQ ID NO: 1186; WAN024DKW; Start 355; Stop 379
tacacttgggaagaaatgatgttgg

SEQ ID NO: 286101 - DNA, 25 bp, Artificial
  probe
  misc_feature (1)..(25): SEQ ID NO: 1186; WAN024DKW; Start 45; Stop 69
tcaaggtcgtatcattgactacaag

SEQ ID NO: 286102 - DNA, 25 bp, Artificial
  probe
  misc_feature (1)..(25): SEQ ID NO: 1186; WAN024DKW; Start 353; Stop 377
gctacacttgggaagaaatgatgtt

SEQ ID NO: 286103 - DNA, 25 bp, Artificial
  probe
  misc_feature (1)..(25): SEQ ID NO: 1186; WAN024DKW; Start 559; Stop 583
aaagaaagctatgaacaggtgaaga

SEQ ID NO: 286104 - DNA, 25 bp, Artificial
  probe
  misc_feature (1)..(25): SEQ ID NO: 1186; WAN024DKW; Start 560; Stop 584
aagaaagctatgaacaggtgaagag

SEQ ID NO: 286105 - DNA, 25 bp, Artificial
  probe
  misc_feature (1)..(25): SEQ ID NO: 1186; WAN024DKW; Start 562; Stop 586
gaaagctatgaacaggtgaagagag

SEQ ID NO: 286106 - DNA, 25 bp, Artificial
  probe
  misc_feature (1)..(25): SEQ ID NO: 1186; WAN024DKW; Start 563; Stop 587
aaagctatgaacaggtgaagagaga

SEQ ID NO: 286107 - DNA, 25 bp, Artificial
  probe
  misc_feature (1)..(25): SEQ ID NO: 1186; WAN024DKW; Start 561; Stop 585
agaaagctatgaacaggtgaagaga

SEQ ID NO: 286108 - DNA, 25 bp, Artificial
  probe
  misc_feature (1)..(25): SEQ ID NO: 1186; WAN024DKW; Start 33; Stop 57
cgaggaacttagtcaaggtcgtatc

SEQ ID NO: 286109 - DNA, 25 bp, Artificial
  probe
  misc_feature (1)..(25): SEQ ID NO: 1186; WAN024DKW; Start 356; Stop 380
acacttgggaagaaatgatgttgga

SEQ ID NO: 286110 - DNA, 25 bp, Artificial
  probe
  misc_feature (1)..(25): SEQ ID NO: 1186; WAN024DKW; Start 362; Stop 386
gggaagaaatgatgttggaaactcc

SEQ ID NO: 286111 - DNA, 25 bp, Artificial
  probe
  misc_feature (1)..(25): SEQ ID NO: 1186; WAN024DKW; Start 529; Stop 553
gtagtgatttgggacaagctcaatg

SEQ ID NO: 286112 - DNA, 25 bp, Artificial
  probe
  misc_feature (1)..(25): SEQ ID NO: 1186; WAN024DKW; Start 528; Stop 552
agtagtgatttgggacaagctcaat

SEQ ID NO: 286113 - DNA, 25 bp, Artificial
  probe
  misc_feature (1)..(25): SEQ ID NO: 1186; WAN024DKW; Start 530; Stop 554
tagtgatttgggacaagctcaatga

SEQ ID NO: 286114 - DNA, 25 bp, Artificial
  probe
  misc_feature (1)..(25): SEQ ID NO: 1186; WAN024DKW; Start 352; Stop 376
ggctacacttgggaagaaatgatgt

SEQ ID NO: 286115 - DNA, 25 bp, Artificial
  probe
  misc_feature (1)..(25): SEQ ID NO: 1186; WAN024DKW; Start 527; Stop 551
aagtagtgatttgggacaagctcaa

SEQ ID NO: 286116 - DNA, 25 bp, Artificial
  probe
  misc_feature (1)..(25): SEQ ID NO: 1186; WAN024DKW; Start 20; Stop 44
aagaatggaaaagcgaggaacttag

SEQ ID NO: 286117 - DNA, 25 bp, Artificial
  probe
  misc_feature (1)..(25): SEQ ID NO: 1186; WAN024DKW; Start 2; Stop 26
tgaataatccaaaaccacaagaatg

SEQ ID NO: 286118 - DNA, 25 bp, Artificial
  probe
  misc_feature (1)..(25): SEQ ID NO: 1186; WAN024DKW; Start 19; Stop 43
caagaatggaaaagcgaggaactta

SEQ ID NO: 286119 - DNA, 25 bp, Artificial
  probe
  misc_feature (1)..(25): SEQ ID NO: 1187; WAN024DDB; Start 902; Stop 926
gtcttctcttatctggtatcgttga

SEQ ID NO: 286120 - DNA, 25 bp, Artificial
  probe
  misc_feature (1)..(25): SEQ ID NO: 1187; WAN024DDB; Start 901; Stop 925
agtcttctcttatctggtatcgttg

SEQ ID NO: 286121 - DNA, 25 bp, Artificial
  probe
  misc_feature (1)..(25): SEQ ID NO: 1187; WAN024DDB; Start 607; Stop 631
gagattattgatatggctggtggag

SEQ ID NO: 286122 - DNA, 25 bp, Artificial
  probe
  misc_feature (1)..(25): SEQ ID NO: 1187; WAN024DDB; Start 905; Stop 929
ttctcttatctggtatcgttgaagc

SEQ ID NO: 286123 - DNA, 25 bp, Artificial
  probe
  misc_feature (1)..(25): SEQ ID NO: 1187; WAN024DDB; Start 831; Stop 855
ctatgctcagagtcaaggttctatt

SEQ ID NO: 286124 - DNA, 25 bp, Artificial
  probe
  misc_feature (1)..(25): SEQ ID NO: 1187; WAN024DDB; Start 606; Stop 630
tgagattattgatatggctggtgga

SEQ ID NO: 286125 - DNA, 25 bp, Artificial
  probe
  misc_feature (1)..(25): SEQ ID NO: 1187; WAN024DDB; Start 605; Stop 629
gtgagattattgatatggctggtgg

SEQ ID NO: 286126 - DNA, 25 bp, Artificial
  probe
  misc_feature (1)..(25): SEQ ID NO: 1187; WAN024DDB; Start 830; Stop 854
tctatgctcagagtcaaggttctat

SEQ ID NO: 286127 - DNA, 25 bp, Artificial
  probe
  misc_feature (1)..(25): SEQ ID NO: 1187; WAN024DDB; Start 903; Stop 927
tcttctcttatctggtatcgttgaa

SEQ ID NO: 286128 - DNA, 25 bp, Artificial
  probe
  misc_feature (1)..(25): SEQ ID NO: 1187; WAN024DDB; Start 829; Stop 853
ttctatgctcagagtcaaggttcta

SEQ ID NO: 286129 - DNA, 25 bp, Artificial
  probe
  misc_feature (1)..(25): SEQ ID NO: 1187; WAN024DDB; Start 906; Stop 930
tctcttatctggtatcgttgaagca

SEQ ID NO: 286130 - DNA, 25 bp, Artificial
  probe
  misc_feature (1)..(25): SEQ ID NO: 1187; WAN024DDB; Start 2; Stop 26
tgaataatcggagtgagactatgaa

SEQ ID NO: 286131 - DNA, 25 bp, Artificial
  probe
  misc_feature (1)..(25): SEQ ID NO: 1187; WAN024DDB; Start 900; Stop 924
gagtcttctcttatctggtatcgtt

SEQ ID NO: 286132 - DNA, 25 bp, Artificial
  probe
  misc_feature (1)..(25): SEQ ID NO: 1187; WAN024DDB; Start 1; Stop 25
atgaataatcggagtgagactatga

SEQ ID NO: 286133 - DNA, 25 bp, Artificial
  probe
  misc_feature (1)..(25): SEQ ID NO: 1187; WAN024DDB; Start 422; Stop 446
agaatgatagtgtcgttattgatga

SEQ ID NO: 286134 - DNA, 25 bp, Artificial
  probe
  misc_feature (1)..(25): SEQ ID NO: 1187; WAN024DDB; Start 420; Stop 444
tgagaatgatagtgtcgttattgat

SEQ ID NO: 286135 - DNA, 25 bp, Artificial
  probe
  misc_feature (1)..(25): SEQ ID NO: 1187; WAN024DDB; Start 419; Stop 443
atgagaatgatagtgtcgttattga

SEQ ID NO: 286136 - DNA, 25 bp, Artificial
  probe
  misc_feature (1)..(25): SEQ ID NO: 1187; WAN024DDB; Start 828; Stop 852
cttctatgctcagagtcaaggttct

SEQ ID NO: 286137 - DNA, 25 bp, Artificial
  probe
  misc_feature (1)..(25): SEQ ID NO: 1187; WAN024DDB; Start 551; Stop 575
atcctaattcagatccaagagccaa

SEQ ID NO: 286138 - DNA, 25 bp, Artificial
  probe
  misc_feature (1)..(25): SEQ ID NO: 1187; WAN024DDB; Start 550; Stop 574
aatcctaattcagatccaagagcca

SEQ ID NO: 286139 - DNA, 25 bp, Artificial
  probe
  misc_feature (1)..(25): SEQ ID NO: 1187; WAN024DDB; Start 423; Stop 447
gaatgatagtgtcgttattgatgag

SEQ ID NO: 286140 - DNA, 25 bp, Artificial
  probe
  misc_feature (1)..(25): SEQ ID NO: 1187; WAN024DDB; Start 421; Stop 445
gagaatgatagtgtcgttattgatg

SEQ ID NO: 286141 - DNA, 25 bp, Artificial
  probe
  misc_feature (1)..(25): SEQ ID NO: 1187; WAN024DDB; Start 907; Stop 931
ctcttatctggtatcgttgaagcag

SEQ ID NO: 286142 - DNA, 25 bp, Artificial
  probe
  misc_feature (1)..(25): SEQ ID NO: 1187; WAN024DDB; Start 416; Stop 440
tcaatgagaatgatagtgtcgttat

SEQ ID NO: 286143 - DNA, 25 bp, Artificial
  probe
  misc_feature (1)..(25): SEQ ID NO: 1187; WAN024DDB; Start 418; Stop 442
aatgagaatgatagtgtcgttattg

SEQ ID NO: 286144 - DNA, 25 bp, Artificial
  probe
  misc_feature (1)..(25): SEQ ID NO: 1187; WAN024DDB; Start 417; Stop 441
caatgagaatgatagtgtcgttatt

SEQ ID NO: 286145 - DNA, 25 bp, Artificial
  probe
  misc_feature (1)..(25): SEQ ID NO: 1187; WAN024DDB; Start 1091; Stop 1115
ccattactcctgaaatccaactact

SEQ ID NO: 286146 - DNA, 25 bp, Artificial
  probe
  misc_feature (1)..(25): SEQ ID NO: 1187; WAN024DDB; Start 1090; Stop 1114
tccattactcctgaaatccaactac

SEQ ID NO: 286147 - DNA, 25 bp, Artificial
  probe
  misc_feature (1)..(25): SEQ ID NO: 1187; WAN024DDB; Start 63; Stop 87
tctgacaaatgaggatggaagttta

SEQ ID NO: 286148 - DNA, 25 bp, Artificial
  probe
  misc_feature (1)..(25): SEQ ID NO: 1187; WAN024DDB; Start 705; Stop 729
tcctgtttatatctgctcatccttg

SEQ ID NO: 286149 - DNA, 25 bp, Artificial
  probe
  misc_feature (1)..(25): SEQ ID NO: 1187; WAN024DDB; Start 703; Stop 727
gttcctgtttatatctgctcatcct

SEQ ID NO: 286150 - DNA, 25 bp, Artificial
  probe
  misc_feature (1)..(25): SEQ ID NO: 1187; WAN024DDB; Start 702; Stop 726
agttcctgtttatatctgctcatcc

SEQ ID NO: 286151 - DNA, 25 bp, Artificial
  probe
  misc_feature (1)..(25): SEQ ID NO: 1187; WAN024DDB; Start 846; Stop 870
aggttctatttgggttgataaaggg

SEQ ID NO: 286152 - DNA, 25 bp, Artificial
  probe
  misc_feature (1)..(25): SEQ ID NO: 1188; WAN024FNA; Start 38; Stop 62
tattgaatgtcttatggcttcgtaa

SEQ ID NO: 286153 - DNA, 25 bp, Artificial
  probe
  misc_feature (1)..(25): SEQ ID NO: 1188; WAN024FNA; Start 37; Stop 61
ttattgaatgtcttatggcttcgta

SEQ ID NO: 286154 - DNA, 25 bp, Artificial
  probe
  misc_feature (1)..(25): SEQ ID NO: 1188; WAN024FNA; Start 450; Stop 474
aactcaagttacagatgtcaccact

SEQ ID NO: 286155 - DNA, 25 bp, Artificial
  probe
  misc_feature (1)..(25): SEQ ID NO: 1188; WAN024FNA; Start 403; Stop 427
atagcaaatgggataaggaaggtag

SEQ ID NO: 286156 - DNA, 25 bp, Artificial
  probe
  misc_feature (1)..(25): SEQ ID NO: 1188; WAN024FNA; Start 44; Stop 68
atgtcttatggcttcgtaaatggat

SEQ ID NO: 286157 - DNA, 25 bp, Artificial
  probe
  misc_feature (1)..(25): SEQ ID NO: 1188; WAN024FNA; Start 213; Stop 237
aggaagtgctctaacaaaggattac

SEQ ID NO: 286158 - DNA, 25 bp, Artificial
  probe
  misc_feature (1)..(25): SEQ ID NO: 1188; WAN024FNA; Start 212; Stop 236
caggaagtgctctaacaaaggatta

SEQ ID NO: 286159 - DNA, 25 bp, Artificial
  probe
  misc_feature (1)..(25): SEQ ID NO: 1188; WAN024FNA; Start 43; Stop 67
aatgtcttatggcttcgtaaatgga

SEQ ID NO: 286160 - DNA, 25 bp, Artificial
  probe
  misc_feature (1)..(25): SEQ ID NO: 1188; WAN024FNA; Start 402; Stop 426
aatagcaaatgggataaggaaggta

SEQ ID NO: 286161 - DNA, 25 bp, Artificial
  probe
  misc_feature (1)..(25): SEQ ID NO: 1188; WAN024FNA; Start 401; Stop 425
gaatagcaaatgggataaggaaggt

SEQ ID NO: 286162 - DNA, 25 bp, Artificial
  probe
  misc_feature (1)..(25): SEQ ID NO: 1188; WAN024FNA; Start 148; Stop 172
gatactcgtatatatgtggtaagca

SEQ ID NO: 286163 - DNA, 25 bp, Artificial
  probe
  misc_feature (1)..(25): SEQ ID NO: 1188; WAN024FNA; Start 147; Stop 171
tgatactcgtatatatgtggtaagc

SEQ ID NO: 286164 - DNA, 25 bp, Artificial
  probe
  misc_feature (1)..(25): SEQ ID NO: 1188; WAN024FNA; Start 545; Stop 569
ttcttggtgcattcttaacagtctt

SEQ ID NO: 286165 - DNA, 25 bp, Artificial
  probe
  misc_feature (1)..(25): SEQ ID NO: 1188; WAN024FNA; Start 217; Stop 241
agtgctctaacaaaggattacaaag

SEQ ID NO: 286166 - DNA, 25 bp, Artificial
  probe
  misc_feature (1)..(25): SEQ ID NO: 1188; WAN024FNA; Start 215; Stop 239
gaagtgctctaacaaaggattacaa

SEQ ID NO: 286167 - DNA, 25 bp, Artificial
  probe
  misc_feature (1)..(25): SEQ ID NO: 1188; WAN024FNA; Start 214; Stop 238
ggaagtgctctaacaaaggattaca

SEQ ID NO: 286168 - DNA, 25 bp, Artificial
  probe
  misc_feature (1)..(25): SEQ ID NO: 1188; WAN024FNA; Start 371; Stop 395
ttacaaatacgaactcagatgaagc

SEQ ID NO: 286169 - DNA, 25 bp, Artificial
  probe
  misc_feature (1)..(25): SEQ ID NO: 1188; WAN024FNA; Start 42; Stop 66
gaatgtcttatggcttcgtaaatgg

SEQ ID NO: 286170 - DNA, 25 bp, Artificial
  probe
  misc_feature (1)..(25): SEQ ID NO: 1188; WAN024FNA; Start 41; Stop 65
tgaatgtcttatggcttcgtaaatg

SEQ ID NO: 286171 - DNA, 25 bp, Artificial
  probe
  misc_feature (1)..(25): SEQ ID NO: 1188; WAN024FNA; Start 216; Stop 240
aagtgctctaacaaaggattacaaa

SEQ ID NO: 286172 - DNA, 25 bp, Artificial
  probe
  misc_feature (1)..(25): SEQ ID NO: 1188; WAN024FNA; Start 449; Stop 473
taactcaagttacagatgtcaccac

SEQ ID NO: 286173 - DNA, 25 bp, Artificial
  probe
  misc_feature (1)..(25): SEQ ID NO: 1188; WAN024FNA; Start 143; Stop 167
caagtgatactcgtatatatgtggt

SEQ ID NO: 286174 - DNA, 25 bp, Artificial
  probe
  misc_feature (1)..(25): SEQ ID NO: 1188; WAN024FNA; Start 40; Stop 64
ttgaatgtcttatggcttcgtaaat

SEQ ID NO: 286175 - DNA, 25 bp, Artificial
  probe
  misc_feature (1)..(25): SEQ ID NO: 1188; WAN024FNA; Start 39; Stop 63
attgaatgtcttatggcttcgtaaa

SEQ ID NO: 286176 - DNA, 25 bp, Artificial
  probe
  misc_feature (1)..(25): SEQ ID NO: 1188; WAN024FNA; Start 36; Stop 60
tttattgaatgtcttatggcttcgt

SEQ ID NO: 286177 - DNA, 25 bp, Artificial
  probe
  misc_feature (1)..(25): SEQ ID NO: 1188; WAN024FNA; Start 218; Stop 242
gtgctctaacaaaggattacaaaga

SEQ ID NO: 286178 - DNA, 25 bp, Artificial
  probe
  misc_feature (1)..(25): SEQ ID NO: 1188; WAN024FNA; Start 400; Stop 424
cgaatagcaaatgggataaggaagg

SEQ ID NO: 286179 - DNA, 25 bp, Artificial
  probe
  misc_feature (1)..(25): SEQ ID NO: 1188; WAN024FNA; Start 368; Stop 392
gtgttacaaatacgaactcagatga

SEQ ID NO: 286180 - DNA, 25 bp, Artificial
  probe
  misc_feature (1)..(25): SEQ ID NO: 1188; WAN024FNA; Start 142; Stop 166
acaagtgatactcgtatatatgtgg

SEQ ID NO: 286181 - DNA, 25 bp, Artificial
  probe
  misc_feature (1)..(25): SEQ ID NO: 1188; WAN024FNA; Start 560; Stop 584
taacagtctttctagtagttgccaa

SEQ ID NO: 286182 - DNA, 25 bp, Artificial
  probe
  misc_feature (1)..(25): SEQ ID NO: 1188; WAN024FNA; Start 559; Stop 583
ttaacagtctttctagtagttgcca

SEQ ID NO: 286183 - DNA, 25 bp, Artificial
  probe
  misc_feature (1)..(25): SEQ ID NO: 1188; WAN024FNA; Start 153; Stop 177
tcgtatatatgtggtaagcaaaggg

SEQ ID NO: 286184 - DNA, 25 bp, Artificial
  probe
  misc_feature (1)..(25): SEQ ID NO: 1188; WAN024FNA; Start 149; Stop 173
atactcgtatatatgtggtaagcaa

SEQ ID NO: 286185 - DNA, 25 bp, Artificial
  probe
  misc_feature (1)..(25): SEQ ID NO: 1189; WAN024ERD; Start 259; Stop 283
atccagtgtgttgaccttattatcg

SEQ ID NO: 286186 - DNA, 25 bp, Artificial
  probe
  misc_feature (1)..(25): SEQ ID NO: 1189; WAN024ERD; Start 121; Stop 145
cttctatattaccgtgagagacagg

SEQ ID NO: 286187 - DNA, 25 bp, Artificial
  probe
  misc_feature (1)..(25): SEQ ID NO: 1189; WAN024ERD; Start 120; Stop 144
gcttctatattaccgtgagagacag

SEQ ID NO: 286188 - DNA, 25 bp, Artificial
  probe
  misc_feature (1)..(25): SEQ ID NO: 1189; WAN024ERD; Start 324; Stop 348
aacattgatgagaagactagcagat

SEQ ID NO: 286189 - DNA, 25 bp, Artificial
  probe
  misc_feature (1)..(25): SEQ ID NO: 1189; WAN024ERD; Start 329; Stop 353
tgatgagaagactagcagatgaatc

SEQ ID NO: 286190 - DNA, 25 bp, Artificial
  probe
  misc_feature (1)..(25): SEQ ID NO: 1189; WAN024ERD; Start 328; Stop 352
ttgatgagaagactagcagatgaat

SEQ ID NO: 286191 - DNA, 25 bp, Artificial
  probe
  misc_feature (1)..(25): SEQ ID NO: 1189; WAN024ERD; Start 327; Stop 351
attgatgagaagactagcagatgaa

SEQ ID NO: 286192 - DNA, 25 bp, Artificial
  probe
  misc_feature (1)..(25): SEQ ID NO: 1189; WAN024ERD; Start 326; Stop 350
cattgatgagaagactagcagatga

SEQ ID NO: 286193 - DNA, 25 bp, Artificial
  probe
  misc_feature (1)..(25): SEQ ID NO: 1189; WAN024ERD; Start 325; Stop 349
acattgatgagaagactagcagatg

SEQ ID NO: 286194 - DNA, 25 bp, Artificial
  probe
  misc_feature (1)..(25): SEQ ID NO: 1189; WAN024ERD; Start 330; Stop 354
gatgagaagactagcagatgaatca

SEQ ID NO: 286195 - DNA, 25 bp, Artificial
  probe
  misc_feature (1)..(25): SEQ ID NO: 1189; WAN024ERD; Start 258; Stop 282
tatccagtgtgttgaccttattatc

SEQ ID NO: 286196 - DNA, 25 bp, Artificial
  probe
  misc_feature (1)..(25): SEQ ID NO: 1189; WAN024ERD; Start 333; Stop 357
gagaagactagcagatgaatcattc

SEQ ID NO: 286197 - DNA, 25 bp, Artificial
  probe
  misc_feature (1)..(25): SEQ ID NO: 1189; WAN024ERD; Start 332; Stop 356
tgagaagactagcagatgaatcatt

SEQ ID NO: 286198 - DNA, 25 bp, Artificial
  probe
  misc_feature (1)..(25): SEQ ID NO: 1189; WAN024ERD; Start 260; Stop 284
tccagtgtgttgaccttattatcgg

SEQ ID NO: 286199 - DNA, 25 bp, Artificial
  probe
  misc_feature (1)..(25): SEQ ID NO: 1189; WAN024ERD; Start 296; Stop 320
cagtatcacaggacaagtcatgtat

SEQ ID NO: 286200 - DNA, 25 bp, Artificial
  probe
  misc_feature (1)..(25): SEQ ID NO: 1189; WAN024ERD; Start 297; Stop 321
agtatcacaggacaagtcatgtatt

SEQ ID NO: 286201 - DNA, 25 bp, Artificial
  probe
  misc_feature (1)..(25): SEQ ID NO: 1189; WAN024ERD; Start 257; Stop 281
atatccagtgtgttgaccttattat

SEQ ID NO: 286202 - DNA, 25 bp, Artificial
  probe
  misc_feature (1)..(25): SEQ ID NO: 1189; WAN024ERD; Start 118; Stop 142
gagcttctatattaccgtgagagac

SEQ ID NO: 286203 - DNA, 25 bp, Artificial
  probe
  misc_feature (1)..(25): SEQ ID NO: 1189; WAN024ERD; Start 117; Stop 141
agagcttctatattaccgtgagaga

SEQ ID NO: 286204 - DNA, 25 bp, Artificial
  probe
  misc_feature (1)..(25): SEQ ID NO: 1189; WAN024ERD; Start 116; Stop 140
aagagcttctatattaccgtgagag

SEQ ID NO: 286205 - DNA, 25 bp, Artificial
  probe
  misc_feature (1)..(25): SEQ ID NO: 1189; WAN024ERD; Start 115; Stop 139
gaagagcttctatattaccgtgaga

SEQ ID NO: 286206 - DNA, 25 bp, Artificial
  probe
  misc_feature (1)..(25): SEQ ID NO: 1189; WAN024ERD; Start 119; Stop 143
agcttctatattaccgtgagagaca

SEQ ID NO: 286207 - DNA, 25 bp, Artificial
  probe
  misc_feature (1)..(25): SEQ ID NO: 1189; WAN024ERD; Start 148; Stop 172
agtatagaggttgctaaaggtgttc

SEQ ID NO: 286208 - DNA, 25 bp, Artificial
  probe
  misc_feature (1)..(25): SEQ ID NO: 1189; WAN024ERD; Start 146; Stop 170
gaagtatagaggttgctaaaggtgt

SEQ ID NO: 286209 - DNA, 25 bp, Artificial
  probe
  misc_feature (1)..(25): SEQ ID NO: 1189; WAN024ERD; Start 262; Stop 286
cagtgtgttgaccttattatcggtt

SEQ ID NO: 286210 - DNA, 25 bp, Artificial
  probe
  misc_feature (1)..(25): SEQ ID NO: 1189; WAN024ERD; Start 147; Stop 171
aagtatagaggttgctaaaggtgtt

SEQ ID NO: 286211 - DNA, 25 bp, Artificial
  probe
  misc_feature (1)..(25): SEQ ID NO: 1189; WAN024ERD; Start 142; Stop 166
cagggaagtatagaggttgctaaag

SEQ ID NO: 286212 - DNA, 25 bp, Artificial
  probe
  misc_feature (1)..(25): SEQ ID NO: 1189; WAN024ERD; Start 66; Stop 90
attagcaaatcaaatcagccttctt

SEQ ID NO: 286213 - DNA, 25 bp, Artificial
  probe
  misc_feature (1)..(25): SEQ ID NO: 1189; WAN024ERD; Start 145; Stop 169
ggaagtatagaggttgctaaaggtg

SEQ ID NO: 286214 - DNA, 25 bp, Artificial
  probe
  misc_feature (1)..(25): SEQ ID NO: 1189; WAN024ERD; Start 43; Stop 67
aatcgtcaagaagcctacaaagaat

SEQ ID NO: 286215 - DNA, 25 bp, Artificial
  probe
  misc_feature (1)..(25): SEQ ID NO: 1189; WAN024ERD; Start 49; Stop 73
caagaagcctacaaagaattagcaa

SEQ ID NO: 286216 - DNA, 25 bp, Artificial
  probe
  misc_feature (1)..(25): SEQ ID NO: 1189; WAN024ERD; Start 47; Stop 71
gtcaagaagcctacaaagaattagc

SEQ ID NO: 286217 - DNA, 25 bp, Artificial
  probe
  misc_feature (1)..(25): SEQ ID NO: 1189; WAN024ERD; Start 46; Stop 70
cgtcaagaagcctacaaagaattag

SEQ ID NO: 286218 - DNA, 25 bp, Artificial
  probe
  misc_feature (1)..(25): SEQ ID NO: 1190; WAN024DA9; Start 233; Stop 257
tagaagttggtcatcggagagatat

SEQ ID NO: 286219 - DNA, 25 bp, Artificial
  probe
  misc_feature (1)..(25): SEQ ID NO: 1190; WAN024DA9; Start 234; Stop 258
agaagttggtcatcggagagatatt

SEQ ID NO: 286220 - DNA, 25 bp, Artificial
  probe
  misc_feature (1)..(25): SEQ ID NO: 1190; WAN024DA9; Start 232; Stop 256
ctagaagttggtcatcggagagata

SEQ ID NO: 286221 - DNA, 25 bp, Artificial
  probe
  misc_feature (1)..(25): SEQ ID NO: 1190; WAN024DA9; Start 235; Stop 259
gaagttggtcatcggagagatattt

SEQ ID NO: 286222 - DNA, 25 bp, Artificial
  probe
  misc_feature (1)..(25): SEQ ID NO: 1190; WAN024DA9; Start 236; Stop 260
aagttggtcatcggagagatattta

SEQ ID NO: 286223 - DNA, 25 bp, Artificial
  probe
  misc_feature (1)..(25): SEQ ID NO: 1190; WAN024DA9; Start 237; Stop 261
agttggtcatcggagagatatttat

SEQ ID NO: 286224 - DNA, 25 bp, Artificial
  probe
  misc_feature (1)..(25): SEQ ID NO: 1190; WAN024DA9; Start 223; Stop 247
gttgctactctagaagttggtcatc

SEQ ID NO: 286225 - DNA, 25 bp, Artificial
  probe
  misc_feature (1)..(25): SEQ ID NO: 1190; WAN024DA9; Start 70; Stop 94
acgcagaagctaattacaaactatt

SEQ ID NO: 286226 - DNA, 25 bp, Artificial
  probe
  misc_feature (1)..(25): SEQ ID NO: 1190; WAN024DA9; Start 64; Stop 88
cgttatacgcagaagctaattacaa

SEQ ID NO: 286227 - DNA, 25 bp, Artificial
  probe
  misc_feature (1)..(25): SEQ ID NO: 1190; WAN024DA9; Start 69; Stop 93
tacgcagaagctaattacaaactat

SEQ ID NO: 286228 - DNA, 25 bp, Artificial
  probe
  misc_feature (1)..(25): SEQ ID NO: 1190; WAN024DA9; Start 68; Stop 92
atacgcagaagctaattacaaacta

SEQ ID NO: 286229 - DNA, 25 bp, Artificial
  probe
  misc_feature (1)..(25): SEQ ID NO: 1190; WAN024DA9; Start 67; Stop 91
tatacgcagaagctaattacaaact

SEQ ID NO: 286230 - DNA, 25 bp, Artificial
  probe
  misc_feature (1)..(25): SEQ ID NO: 1190; WAN024DA9; Start 71; Stop 95
cgcagaagctaattacaaactattt

SEQ ID NO: 286231 - DNA, 25 bp, Artificial
  probe
  misc_feature (1)..(25): SEQ ID NO: 1190; WAN024DA9; Start 61; Stop 85
gaccgttatacgcagaagctaatta

SEQ ID NO: 286232 - DNA, 25 bp, Artificial
  probe
  misc_feature (1)..(25): SEQ ID NO: 1190; WAN024DA9; Start 166; Stop 190
cgctatagaattggtaattatcgag

SEQ ID NO: 286233 - DNA, 25 bp, Artificial
  probe
  misc_feature (1)..(25): SEQ ID NO: 1190; WAN024DA9; Start 227; Stop 251
ctactctagaagttggtcatcggag

SEQ ID NO: 286234 - DNA, 25 bp, Artificial
  probe
  misc_feature (1)..(25): SEQ ID NO: 1190; WAN024DA9; Start 63; Stop 87
ccgttatacgcagaagctaattaca

SEQ ID NO: 286235 - DNA, 25 bp, Artificial
  probe
  misc_feature (1)..(25): SEQ ID NO: 1190; WAN024DA9; Start 62; Stop 86
accgttatacgcagaagctaattac

SEQ ID NO: 286236 - DNA, 25 bp, Artificial
  probe
  misc_feature (1)..(25): SEQ ID NO: 1190; WAN024DA9; Start 228; Stop 252
tactctagaagttggtcatcggaga

SEQ ID NO: 286237 - DNA, 25 bp, Artificial
  probe
  misc_feature (1)..(25): SEQ ID NO: 1190; WAN024DA9; Start 224; Stop 248
ttgctactctagaagttggtcatcg

SEQ ID NO: 286238 - DNA, 25 bp, Artificial
  probe
  misc_feature (1)..(25): SEQ ID NO: 1190; WAN024DA9; Start 231; Stop 255
tctagaagttggtcatcggagagat

SEQ ID NO: 286239 - DNA, 25 bp, Artificial
  probe
  misc_feature (1)..(25): SEQ ID NO: 1190; WAN024DA9; Start 11; Stop 35
tgtataaattagttccaacaagacg

SEQ ID NO: 286240 - DNA, 25 bp, Artificial
  probe
  misc_feature (1)..(25): SEQ ID NO: 1190; WAN024DA9; Start 66; Stop 90
ttatacgcagaagctaattacaaac

SEQ ID NO: 286241 - DNA, 25 bp, Artificial
  probe
  misc_feature (1)..(25): SEQ ID NO: 1190; WAN024DA9; Start 65; Stop 89
gttatacgcagaagctaattacaaa

SEQ ID NO: 286242 - DNA, 25 bp, Artificial
  probe
  misc_feature (1)..(25): SEQ ID NO: 1190; WAN024DA9; Start 164; Stop 188
ggcgctatagaattggtaattatcg

SEQ ID NO: 286243 - DNA, 25 bp, Artificial
  probe
  misc_feature (1)..(25): SEQ ID NO: 1190; WAN024DA9; Start 165; Stop 189
gcgctatagaattggtaattatcga

SEQ ID NO: 286244 - DNA, 25 bp, Artificial
  probe
  misc_feature (1)..(25): SEQ ID NO: 1190; WAN024DA9; Start 163; Stop 187
tggcgctatagaattggtaattatc

SEQ ID NO: 286245 - DNA, 25 bp, Artificial
  probe
  misc_feature (1)..(25): SEQ ID NO: 1190; WAN024DA9; Start 12; Stop 36
gtataaattagttccaacaagacgt

SEQ ID NO: 286246 - DNA, 25 bp, Artificial
  probe
  misc_feature (1)..(25): SEQ ID NO: 1190; WAN024DA9; Start 14; Stop 38
ataaattagttccaacaagacgttt

SEQ ID NO: 286247 - DNA, 25 bp, Artificial
  probe
  misc_feature (1)..(25): SEQ ID NO: 1190; WAN024DA9; Start 167; Stop 191
gctatagaattggtaattatcgagt

SEQ ID NO: 286248 - DNA, 25 bp, Artificial
  probe
  misc_feature (1)..(25): SEQ ID NO: 1190; WAN024DA9; Start 161; Stop 185
aatggcgctatagaattggtaatta

SEQ ID NO: 286249 - DNA, 25 bp, Artificial
  probe
  misc_feature (1)..(25): SEQ ID NO: 1190; WAN024DA9; Start 162; Stop 186
atggcgctatagaattggtaattat

SEQ ID NO: 286250 - DNA, 25 bp, Artificial
  probe
  misc_feature (1)..(25): SEQ ID NO: 1190; WAN024DA9; Start 226; Stop 250
gctactctagaagttggtcatcgga

SEQ ID NO: 286251 - DNA, 25 bp, Artificial
  probe
  misc_feature (1)..(25): SEQ ID NO: 1191; WAN024GL3; Start 54; Stop 78
aatagttagtggaggaagaggcaat

SEQ ID NO: 286252 - DNA, 25 bp, Artificial
  probe
  misc_feature (1)..(25): SEQ ID NO: 1191; WAN024GL3; Start 55; Stop 79
atagttagtggaggaagaggcaatt

SEQ ID NO: 286253 - DNA, 25 bp, Artificial
  probe
  misc_feature (1)..(25): SEQ ID NO: 1191; WAN024GL3; Start 28; Stop 52
tctgttatggataatgaagaactcg

SEQ ID NO: 286254 - DNA, 25 bp, Artificial
  probe
  misc_feature (1)..(25): SEQ ID NO: 1191; WAN024GL3; Start 165; Stop 189
ttgtgtaggttcaggaattatgtcc

SEQ ID NO: 286255 - DNA, 25 bp, Artificial
  probe
  misc_feature (1)..(25): SEQ ID NO: 1191; WAN024GL3; Start 29; Stop 53
ctgttatggataatgaagaactcga

SEQ ID NO: 286256 - DNA, 25 bp, Artificial
  probe
  misc_feature (1)..(25): SEQ ID NO: 1191; WAN024GL3; Start 164; Stop 188
tttgtgtaggttcaggaattatgtc

SEQ ID NO: 286257 - DNA, 25 bp, Artificial
  probe
  misc_feature (1)..(25): SEQ ID NO: 1191; WAN024GL3; Start 58; Stop 82
gttagtggaggaagaggcaatttag

SEQ ID NO: 286258 - DNA, 25 bp, Artificial
  probe
  misc_feature (1)..(25): SEQ ID NO: 1191; WAN024GL3; Start 53; Stop 77
aaatagttagtggaggaagaggcaa

SEQ ID NO: 286259 - DNA, 25 bp, Artificial
  probe
  misc_feature (1)..(25): SEQ ID NO: 1191; WAN024GL3; Start 57; Stop 81
agttagtggaggaagaggcaattta

SEQ ID NO: 286260 - DNA, 25 bp, Artificial
  probe
  misc_feature (1)..(25): SEQ ID NO: 1191; WAN024GL3; Start 56; Stop 80
tagttagtggaggaagaggcaattt

SEQ ID NO: 286261 - DNA, 25 bp, Artificial
  probe
  misc_feature (1)..(25): SEQ ID NO: 1191; WAN024GL3; Start 30; Stop 54
tgttatggataatgaagaactcgaa

SEQ ID NO: 286262 - DNA, 25 bp, Artificial
  probe
  misc_feature (1)..(25): SEQ ID NO: 1191; WAN024GL3; Start 163; Stop 187
atttgtgtaggttcaggaattatgt

SEQ ID NO: 286263 - DNA, 25 bp, Artificial
  probe
  misc_feature (1)..(25): SEQ ID NO: 1191; WAN024GL3; Start 52; Stop 76
gaaatagttagtggaggaagaggca

SEQ ID NO: 286264 - DNA, 25 bp, Artificial
  probe
  misc_feature (1)..(25): SEQ ID NO: 1191; WAN024GL3; Start 159; Stop 183
acttatttgtgtaggttcaggaatt

SEQ ID NO: 286265 - DNA, 25 bp, Artificial
  probe
  misc_feature (1)..(25): SEQ ID NO: 1191; WAN024GL3; Start 59; Stop 83
ttagtggaggaagaggcaatttagg

SEQ ID NO: 286266 - DNA, 25 bp, Artificial
  probe
  misc_feature (1)..(25): SEQ ID NO: 1191; WAN024GL3; Start 95; Stop 119
gtggttgtattggagcagtactatt

SEQ ID NO: 286267 - DNA, 25 bp, Artificial
  probe
  misc_feature (1)..(25): SEQ ID NO: 1191; WAN024GL3; Start 98; Stop 122
gttgtattggagcagtactattagc

SEQ ID NO: 286268 - DNA, 25 bp, Artificial
  probe
  misc_feature (1)..(25): SEQ ID NO: 1191; WAN024GL3; Start 96; Stop 120
tggttgtattggagcagtactatta

SEQ ID NO: 286269 - DNA, 25 bp, Artificial
  probe
  misc_feature (1)..(25): SEQ ID NO: 1191; WAN024GL3; Start 158; Stop 182
cacttatttgtgtaggttcaggaat

SEQ ID NO: 286270 - DNA, 25 bp, Artificial
  probe
  misc_feature (1)..(25): SEQ ID NO: 1191; WAN024GL3; Start 97; Stop 121
ggttgtattggagcagtactattag

SEQ ID NO: 286271 - DNA, 25 bp, Artificial
  probe
  misc_feature (1)..(25): SEQ ID NO: 1191; WAN024GL3; Start 51; Stop 75
cgaaatagttagtggaggaagaggc

SEQ ID NO: 286272 - DNA, 25 bp, Artificial
  probe
  misc_feature (1)..(25): SEQ ID NO: 1191; WAN024GL3; Start 60; Stop 84
tagtggaggaagaggcaatttagga

SEQ ID NO: 286273 - DNA, 25 bp, Artificial
  probe
  misc_feature (1)..(25): SEQ ID NO: 1191; WAN024GL3; Start 50; Stop 74
tcgaaatagttagtggaggaagagg

SEQ ID NO: 286274 - DNA, 25 bp, Artificial
  probe
  misc_feature (1)..(25): SEQ ID NO: 1191; WAN024GL3; Start 90; Stop 114
aatcggtggttgtattggagcagta

SEQ ID NO: 286275 - DNA, 25 bp, Artificial
  probe
  misc_feature (1)..(25): SEQ ID NO: 1191; WAN024GL3; Start 49; Stop 73
ctcgaaatagttagtggaggaagag

SEQ ID NO: 286276 - DNA, 25 bp, Artificial
  probe
  misc_feature (1)..(25): SEQ ID NO: 1191; WAN024GL3; Start 48; Stop 72
actcgaaatagttagtggaggaaga

SEQ ID NO: 286277 - DNA, 25 bp, Artificial
  probe
  misc_feature (1)..(25): SEQ ID NO: 1191; WAN024GL3; Start 94; Stop 118
ggtggttgtattggagcagtactat

SEQ ID NO: 286278 - DNA, 25 bp, Artificial
  probe
  misc_feature (1)..(25): SEQ ID NO: 1191; WAN024GL3; Start 64; Stop 88
ggaggaagaggcaatttaggatctg

SEQ ID NO: 286279 - DNA, 25 bp, Artificial
  probe
  misc_feature (1)..(25): SEQ ID NO: 1191; WAN024GL3; Start 162; Stop 186
tatttgtgtaggttcaggaattatg

SEQ ID NO: 286280 - DNA, 25 bp, Artificial
  probe
  misc_feature (1)..(25): SEQ ID NO: 1191; WAN024GL3; Start 160; Stop 184
cttatttgtgtaggttcaggaatta

SEQ ID NO: 286281 - DNA, 25 bp, Artificial
  probe
  misc_feature (1)..(25): SEQ ID NO: 1191; WAN024GL3; Start 62; Stop 86
gtggaggaagaggcaatttaggatc

SEQ ID NO: 286282 - DNA, 25 bp, Artificial
  probe
  misc_feature (1)..(25): SEQ ID NO: 1191; WAN024GL3; Start 61; Stop 85
agtggaggaagaggcaatttaggat

SEQ ID NO: 286283 - DNA, 25 bp, Artificial
  probe
  misc_feature (1)..(25): SEQ ID NO: 1191; WAN024GL3; Start 63; Stop 87
tggaggaagaggcaatttaggatct

SEQ ID NO: 286284 - DNA, 25 bp, Artificial
  probe
  misc_feature (1)..(25): SEQ ID NO: 1192; WAN024GKX; Start 41; Stop 65
atgaaatgcttgataggatagaggg

SEQ ID NO: 286285 - DNA, 25 bp, Artificial
  probe
  misc_feature (1)..(25): SEQ ID NO: 1192; WAN024GKX; Start 43; Stop 67
gaaatgcttgataggatagagggag

SEQ ID NO: 286286 - DNA, 25 bp, Artificial
  probe
  misc_feature (1)..(25): SEQ ID NO: 1192; WAN024GKX; Start 48; Stop 72
gcttgataggatagagggaggaata

SEQ ID NO: 286287 - DNA, 25 bp, Artificial
  probe
  misc_feature (1)..(25): SEQ ID NO: 1192; WAN024GKX; Start 42; Stop 66
tgaaatgcttgataggatagaggga

SEQ ID NO: 286288 - DNA, 25 bp, Artificial
  probe
  misc_feature (1)..(25): SEQ ID NO: 1192; WAN024GKX; Start 70; Stop 94
atatttggagttgacgatgctttgt

SEQ ID NO: 286289 - DNA, 25 bp, Artificial
  probe
  misc_feature (1)..(25): SEQ ID NO: 1192; WAN024GKX; Start 71; Stop 95
tatttggagttgacgatgctttgtt

SEQ ID NO: 286290 - DNA, 25 bp, Artificial
  probe
  misc_feature (1)..(25): SEQ ID NO: 1192; WAN024GKX; Start 44; Stop 68
aaatgcttgataggatagagggagg

SEQ ID NO: 286291 - DNA, 25 bp, Artificial
  probe
  misc_feature (1)..(25): SEQ ID NO: 1192; WAN024GKX; Start 120; Stop 144
aggtagcattgttgatacagcaatt

SEQ ID NO: 286292 - DNA, 25 bp, Artificial
  probe
  misc_feature (1)..(25): SEQ ID NO: 1192; WAN024GKX; Start 40; Stop 64
aatgaaatgcttgataggatagagg

SEQ ID NO: 286293 - DNA, 25 bp, Artificial
  probe
  misc_feature (1)..(25): SEQ ID NO: 1192; WAN024GKX; Start 119; Stop 143
caggtagcattgttgatacagcaat

SEQ ID NO: 286294 - DNA, 25 bp, Artificial
  probe
  misc_feature (1)..(25): SEQ ID NO: 1192; WAN024GKX; Start 35; Stop 59
tggataatgaaatgcttgataggat

SEQ ID NO: 286295 - DNA, 25 bp, Artificial
  probe
  misc_feature (1)..(25): SEQ ID NO: 1192; WAN024GKX; Start 34; Stop 58
atggataatgaaatgcttgatagga

SEQ ID NO: 286296 - DNA, 25 bp, Artificial
  probe
  misc_feature (1)..(25): SEQ ID NO: 1192; WAN024GKX; Start 172; Stop 196
aatcctcatcagtggttctgtgttc

SEQ ID NO: 286297 - DNA, 25 bp, Artificial
  probe
  misc_feature (1)..(25): SEQ ID NO: 1192; WAN024GKX; Start 49; Stop 73
cttgataggatagagggaggaatat

SEQ ID NO: 286298 - DNA, 25 bp, Artificial
  probe
  misc_feature (1)..(25): SEQ ID NO: 1192; WAN024GKX; Start 47; Stop 71
tgcttgataggatagagggaggaat

SEQ ID NO: 286299 - DNA, 25 bp, Artificial
  probe
  misc_feature (1)..(25): SEQ ID NO: 1192; WAN024GKX; Start 46; Stop 70
atgcttgataggatagagggaggaa

SEQ ID NO: 286300 - DNA, 25 bp, Artificial
  probe
  misc_feature (1)..(25): SEQ ID NO: 1192; WAN024GKX; Start 45; Stop 69
aatgcttgataggatagagggagga

SEQ ID NO: 286301 - DNA, 25 bp, Artificial
  probe
  misc_feature (1)..(25): SEQ ID NO: 1192; WAN024GKX; Start 72; Stop 96
atttggagttgacgatgctttgttt

SEQ ID NO: 286302 - DNA, 25 bp, Artificial
  probe
  misc_feature (1)..(25): SEQ ID NO: 1192; WAN024GKX; Start 68; Stop 92
gaatatttggagttgacgatgcttt

SEQ ID NO: 286303 - DNA, 25 bp, Artificial
  probe
  misc_feature (1)..(25): SEQ ID NO: 1192; WAN024GKX; Start 69; Stop 93
aatatttggagttgacgatgctttg

SEQ ID NO: 286304 - DNA, 25 bp, Artificial
  probe
  misc_feature (1)..(25): SEQ ID NO: 1192; WAN024GKX; Start 59; Stop 83
tagagggaggaatatttggagttga

SEQ ID NO: 286305 - DNA, 25 bp, Artificial
  probe
  misc_feature (1)..(25): SEQ ID NO: 1192; WAN024GKX; Start 58; Stop 82
atagagggaggaatatttggagttg

SEQ ID NO: 286306 - DNA, 25 bp, Artificial
  probe
  misc_feature (1)..(25): SEQ ID NO: 1192; WAN024GKX; Start 55; Stop 79
aggatagagggaggaatatttggag

SEQ ID NO: 286307 - DNA, 25 bp, Artificial
  probe
  misc_feature (1)..(25): SEQ ID NO: 1192; WAN024GKX; Start 54; Stop 78
taggatagagggaggaatatttgga

SEQ ID NO: 286308 - DNA, 25 bp, Artificial
  probe
  misc_feature (1)..(25): SEQ ID NO: 1192; WAN024GKX; Start 57; Stop 81
gatagagggaggaatatttggagtt

SEQ ID NO: 286309 - DNA, 25 bp, Artificial
  probe
  misc_feature (1)..(25): SEQ ID NO: 1192; WAN024GKX; Start 56; Stop 80
ggatagagggaggaatatttggagt

SEQ ID NO: 286310 - DNA, 25 bp, Artificial
  probe
  misc_feature (1)..(25): SEQ ID NO: 1192; WAN024GKX; Start 29; Stop 53
ctgttatggataatgaaatgcttga

SEQ ID NO: 286311 - DNA, 25 bp, Artificial
  probe
  misc_feature (1)..(25): SEQ ID NO: 1192; WAN024GKX; Start 53; Stop 77
ataggatagagggaggaatatttgg

SEQ ID NO: 286312 - DNA, 25 bp, Artificial
  probe
  misc_feature (1)..(25): SEQ ID NO: 1192; WAN024GKX; Start 64; Stop 88
ggaggaatatttggagttgacgatg

SEQ ID NO: 286313 - DNA, 25 bp, Artificial
  probe
  misc_feature (1)..(25): SEQ ID NO: 1192; WAN024GKX; Start 67; Stop 91
ggaatatttggagttgacgatgctt

SEQ ID NO: 286314 - DNA, 25 bp, Artificial
  probe
  misc_feature (1)..(25): SEQ ID NO: 1192; WAN024GKX; Start 60; Stop 84
agagggaggaatatttggagttgac

SEQ ID NO: 286315 - DNA, 25 bp, Artificial
  probe
  misc_feature (1)..(25): SEQ ID NO: 1192; WAN024GKX; Start 30; Stop 54
tgttatggataatgaaatgcttgat

SEQ ID NO: 286316 - DNA, 25 bp, Artificial
  probe
  misc_feature (1)..(25): SEQ ID NO: 1192; WAN024GKX; Start 65; Stop 89
gaggaatatttggagttgacgatgc

SEQ ID NO: 286317 - DNA, 25 bp, Artificial
  probe
  misc_feature (1)..(25): SEQ ID NO: 1193; WAN024GKZ; Start 15; Stop 39
gttgtcacagttagaggttatggat

SEQ ID NO: 286318 - DNA, 25 bp, Artificial
  probe
  misc_feature (1)..(25): SEQ ID NO: 1193; WAN024GKZ; Start 17; Stop 41
tgtcacagttagaggttatggatac

SEQ ID NO: 286319 - DNA, 25 bp, Artificial
  probe
  misc_feature (1)..(25): SEQ ID NO: 1193; WAN024GKZ; Start 16; Stop 40
ttgtcacagttagaggttatggata

SEQ ID NO: 286320 - DNA, 25 bp, Artificial
  probe
  misc_feature (1)..(25): SEQ ID NO: 1193; WAN024GKZ; Start 18; Stop 42
gtcacagttagaggttatggatact

SEQ ID NO: 286321 - DNA, 25 bp, Artificial
  probe
  misc_feature (1)..(25): SEQ ID NO: 1193; WAN024GKZ; Start 227; Stop 251
gcttaggaggtatggttggtgataa

SEQ ID NO: 286322 - DNA, 25 bp, Artificial
  probe
  misc_feature (1)..(25): SEQ ID NO: 1193; WAN024GKZ; Start 215; Stop 239
gtggattaacatgcttaggaggtat

SEQ ID NO: 286323 - DNA, 25 bp, Artificial
  probe
  misc_feature (1)..(25): SEQ ID NO: 1193; WAN024GKZ; Start 13; Stop 37
atgttgtcacagttagaggttatgg

SEQ ID NO: 286324 - DNA, 25 bp, Artificial
  probe
  misc_feature (1)..(25): SEQ ID NO: 1193; WAN024GKZ; Start 218; Stop 242
gattaacatgcttaggaggtatggt

SEQ ID NO: 286325 - DNA, 25 bp, Artificial
  probe
  misc_feature (1)..(25): SEQ ID NO: 1193; WAN024GKZ; Start 216; Stop 240
tggattaacatgcttaggaggtatg

SEQ ID NO: 286326 - DNA, 25 bp, Artificial
  probe
  misc_feature (1)..(25): SEQ ID NO: 1193; WAN024GKZ; Start 219; Stop 243
attaacatgcttaggaggtatggtt

SEQ ID NO: 286327 - DNA, 25 bp, Artificial
  probe
  misc_feature (1)..(25): SEQ ID NO: 1193; WAN024GKZ; Start 12; Stop 36
aatgttgtcacagttagaggttatg

SEQ ID NO: 286328 - DNA, 25 bp, Artificial
  probe
  misc_feature (1)..(25): SEQ ID NO: 1193; WAN024GKZ; Start 217; Stop 241
ggattaacatgcttaggaggtatgg

SEQ ID NO: 286329 - DNA, 25 bp, Artificial
  probe
  misc_feature (1)..(25): SEQ ID NO: 1193; WAN024GKZ; Start 220; Stop 244
ttaacatgcttaggaggtatggttg

SEQ ID NO: 286330 - DNA, 25 bp, Artificial
  probe
  misc_feature (1)..(25): SEQ ID NO: 1193; WAN024GKZ; Start 118; Stop 142
ggaattataactggtggaactggag

SEQ ID NO: 286331 - DNA, 25 bp, Artificial
  probe
  misc_feature (1)..(25): SEQ ID NO: 1193; WAN024GKZ; Start 14; Stop 38
tgttgtcacagttagaggttatgga

SEQ ID NO: 286332 - DNA, 25 bp, Artificial
  probe
  misc_feature (1)..(25): SEQ ID NO: 1193; WAN024GKZ; Start 119; Stop 143
gaattataactggtggaactggagc

SEQ ID NO: 286333 - DNA, 25 bp, Artificial
  probe
  misc_feature (1)..(25): SEQ ID NO: 1193; WAN024GKZ; Start 214; Stop 238
ggtggattaacatgcttaggaggta

SEQ ID NO: 286334 - DNA, 25 bp, Artificial
  probe
  misc_feature (1)..(25): SEQ ID NO: 1193; WAN024GKZ; Start 226; Stop 250
tgcttaggaggtatggttggtgata

SEQ ID NO: 286335 - DNA, 25 bp, Artificial
  probe
  misc_feature (1)..(25): SEQ ID NO: 1193; WAN024GKZ; Start 120; Stop 144
aattataactggtggaactggagca

SEQ ID NO: 286336 - DNA, 25 bp, Artificial
  probe
  misc_feature (1)..(25): SEQ ID NO: 1193; WAN024GKZ; Start 28; Stop 52
gaggttatggatactgaaatgcttg

SEQ ID NO: 286337 - DNA, 25 bp, Artificial
  probe
  misc_feature (1)..(25): SEQ ID NO: 1193; WAN024GKZ; Start 228; Stop 252
cttaggaggtatggttggtgataaa

SEQ ID NO: 286338 - DNA, 25 bp, Artificial
  probe
  misc_feature (1)..(25): SEQ ID NO: 1193; WAN024GKZ; Start 27; Stop 51
agaggttatggatactgaaatgctt

SEQ ID NO: 286339 - DNA, 25 bp, Artificial
  probe
  misc_feature (1)..(25): SEQ ID NO: 1193; WAN024GKZ; Start 221; Stop 245
taacatgcttaggaggtatggttgg

SEQ ID NO: 286340 - DNA, 25 bp, Artificial
  probe
  misc_feature (1)..(25): SEQ ID NO: 1193; WAN024GKZ; Start 238; Stop 262
atggttggtgataaattgggactaa

SEQ ID NO: 286341 - DNA, 25 bp, Artificial
  probe
  misc_feature (1)..(25): SEQ ID NO: 1193; WAN024GKZ; Start 102; Stop 126
tacaggagtcactacgggaattata

SEQ ID NO: 286342 - DNA, 25 bp, Artificial
  probe
  misc_feature (1)..(25): SEQ ID NO: 1193; WAN024GKZ; Start 246; Stop 270
tgataaattgggactaagttggcta

SEQ ID NO: 286343 - DNA, 25 bp, Artificial
  probe
  misc_feature (1)..(25): SEQ ID NO: 1193; WAN024GKZ; Start 229; Stop 253
ttaggaggtatggttggtgataaat

SEQ ID NO: 286344 - DNA, 25 bp, Artificial
  probe
  misc_feature (1)..(25): SEQ ID NO: 1193; WAN024GKZ; Start 231; Stop 255
aggaggtatggttggtgataaattg

SEQ ID NO: 286345 - DNA, 25 bp, Artificial
  probe
  misc_feature (1)..(25): SEQ ID NO: 1193; WAN024GKZ; Start 237; Stop 261
tatggttggtgataaattgggacta

SEQ ID NO: 286346 - DNA, 25 bp, Artificial
  probe
  misc_feature (1)..(25): SEQ ID NO: 1193; WAN024GKZ; Start 26; Stop 50
tagaggttatggatactgaaatgct

SEQ ID NO: 286347 - DNA, 25 bp, Artificial
  probe
  misc_feature (1)..(25): SEQ ID NO: 1193; WAN024GKZ; Start 243; Stop 267
tggtgataaattgggactaagttgg

SEQ ID NO: 286348 - DNA, 25 bp, Artificial
  probe
  misc_feature (1)..(25): SEQ ID NO: 1193; WAN024GKZ; Start 240; Stop 264
ggttggtgataaattgggactaagt

SEQ ID NO: 286349 - DNA, 25 bp, Artificial
  probe
  misc_feature (1)..(25): SEQ ID NO: 1193; WAN024GKZ; Start 239; Stop 263
tggttggtgataaattgggactaag

SEQ ID NO: 286350 - DNA, 25 bp, Artificial
  probe
  misc_feature (1)..(25): SEQ ID NO: 1194; WAN024DYX; Start 767; Stop 791
aagccttctacaatgataagatgga

SEQ ID NO: 286351 - DNA, 25 bp, Artificial
  probe
  misc_feature (1)..(25): SEQ ID NO: 1194; WAN024DYX; Start 770; Stop 794
ccttctacaatgataagatggatgc

SEQ ID NO: 286352 - DNA, 25 bp, Artificial
  probe
  misc_feature (1)..(25): SEQ ID NO: 1194; WAN024DYX; Start 769; Stop 793
gccttctacaatgataagatggatg

SEQ ID NO: 286353 - DNA, 25 bp, Artificial
  probe
  misc_feature (1)..(25): SEQ ID NO: 1194; WAN024DYX; Start 768; Stop 792
agccttctacaatgataagatggat

SEQ ID NO: 286354 - DNA, 25 bp, Artificial
  probe
  misc_feature (1)..(25): SEQ ID NO: 1194; WAN024DYX; Start 766; Stop 790
gaagccttctacaatgataagatgg

SEQ ID NO: 286355 - DNA, 25 bp, Artificial
  probe
  misc_feature (1)..(25): SEQ ID NO: 1194; WAN024DYX; Start 1360; Stop 1384
tacgctcgtatccaatctatcttac

SEQ ID NO: 286356 - DNA, 25 bp, Artificial
  probe
  misc_feature (1)..(25): SEQ ID NO: 1194; WAN024DYX; Start 1359; Stop 1383
ctacgctcgtatccaatctatctta

SEQ ID NO: 286357 - DNA, 25 bp, Artificial
  probe
  misc_feature (1)..(25): SEQ ID NO: 1194; WAN024DYX; Start 1131; Stop 1155
gaatgtcatcttgctagagcctact

SEQ ID NO: 286358 - DNA, 25 bp, Artificial
  probe
  misc_feature (1)..(25): SEQ ID NO: 1194; WAN024DYX; Start 1358; Stop 1382
cctacgctcgtatccaatctatctt

SEQ ID NO: 286359 - DNA, 25 bp, Artificial
  probe
  misc_feature (1)..(25): SEQ ID NO: 1194; WAN024DYX; Start 1132; Stop 1156
aatgtcatcttgctagagcctactg

SEQ ID NO: 286360 - DNA, 25 bp, Artificial
  probe
  misc_feature (1)..(25): SEQ ID NO: 1194; WAN024DYX; Start 781; Stop 805
gataagatggatgcagttgtagaca

SEQ ID NO: 286361 - DNA, 25 bp, Artificial
  probe
  misc_feature (1)..(25): SEQ ID NO: 1194; WAN024DYX; Start 780; Stop 804
tgataagatggatgcagttgtagac

SEQ ID NO: 286362 - DNA, 25 bp, Artificial
  probe
  misc_feature (1)..(25): SEQ ID NO: 1194; WAN024DYX; Start 779; Stop 803
atgataagatggatgcagttgtaga

SEQ ID NO: 286363 - DNA, 25 bp, Artificial
  probe
  misc_feature (1)..(25): SEQ ID NO: 1194; WAN024DYX; Start 1561; Stop 1585
tactatgcacatacacgtatcttgg

SEQ ID NO: 286364 - DNA, 25 bp, Artificial
  probe
  misc_feature (1)..(25): SEQ ID NO: 1194; WAN024DYX; Start 1563; Stop 1587
ctatgcacatacacgtatcttggat

SEQ ID NO: 286365 - DNA, 25 bp, Artificial
  probe
  misc_feature (1)..(25): SEQ ID NO: 1194; WAN024DYX; Start 560; Stop 584
atgaactccttaaactctatgtccg

SEQ ID NO: 286366 - DNA, 25 bp, Artificial
  probe
  misc_feature (1)..(25): SEQ ID NO: 1194; WAN024DYX; Start 1116; Stop 1140
ctctactcgtaaagggaatgtcatc

SEQ ID NO: 286367 - DNA, 25 bp, Artificial
  probe
  misc_feature (1)..(25): SEQ ID NO: 1194; WAN024DYX; Start 783; Stop 807
taagatggatgcagttgtagacatt

SEQ ID NO: 286368 - DNA, 25 bp, Artificial
  probe
  misc_feature (1)..(25): SEQ ID NO: 1194; WAN024DYX; Start 782; Stop 806
ataagatggatgcagttgtagacat

SEQ ID NO: 286369 - DNA, 25 bp, Artificial
  probe
  misc_feature (1)..(25): SEQ ID NO: 1194; WAN024DYX; Start 1413; Stop 1437
tggcaactatagcttgaatgatact

SEQ ID NO: 286370 - DNA, 25 bp, Artificial
  probe
  misc_feature (1)..(25): SEQ ID NO: 1194; WAN024DYX; Start 778; Stop 802
aatgataagatggatgcagttgtag

SEQ ID NO: 286371 - DNA, 25 bp, Artificial
  probe
  misc_feature (1)..(25): SEQ ID NO: 1194; WAN024DYX; Start 774; Stop 798
ctacaatgataagatggatgcagtt

SEQ ID NO: 286372 - DNA, 25 bp, Artificial
  probe
  misc_feature (1)..(25): SEQ ID NO: 1194; WAN024DYX; Start 705; Stop 729
tttagtggaatttaaccgcctttac

SEQ ID NO: 286373 - DNA, 25 bp, Artificial
  probe
  misc_feature (1)..(25): SEQ ID NO: 1194; WAN024DYX; Start 1414; Stop 1438
ggcaactatagcttgaatgatactg

SEQ ID NO: 286374 - DNA, 25 bp, Artificial
  probe
  misc_feature (1)..(25): SEQ ID NO: 1194; WAN024DYX; Start 1412; Stop 1436
ctggcaactatagcttgaatgatac

SEQ ID NO: 286375 - DNA, 25 bp, Artificial
  probe
  misc_feature (1)..(25): SEQ ID NO: 1194; WAN024DYX; Start 1117; Stop 1141
tctactcgtaaagggaatgtcatct

SEQ ID NO: 286376 - DNA, 25 bp, Artificial
  probe
  misc_feature (1)..(25): SEQ ID NO: 1194; WAN024DYX; Start 1115; Stop 1139
tctctactcgtaaagggaatgtcat

SEQ ID NO: 286377 - DNA, 25 bp, Artificial
  probe
  misc_feature (1)..(25): SEQ ID NO: 1194; WAN024DYX; Start 711; Stop 735
ggaatttaaccgcctttacaatgaa

SEQ ID NO: 286378 - DNA, 25 bp, Artificial
  probe
  misc_feature (1)..(25): SEQ ID NO: 1194; WAN024DYX; Start 406; Stop 430
gttatcggagatagcttgtcacata

SEQ ID NO: 286379 - DNA, 25 bp, Artificial
  probe
  misc_feature (1)..(25): SEQ ID NO: 1194; WAN024DYX; Start 1367; Stop 1391
gtatccaatctatcttacgcaaagc

SEQ ID NO: 286380 - DNA, 25 bp, Artificial
  probe
  misc_feature (1)..(25): SEQ ID NO: 1194; WAN024DYX; Start 1118; Stop 1142
ctactcgtaaagggaatgtcatctt

SEQ ID NO: 286381 - DNA, 25 bp, Artificial
  probe
  misc_feature (1)..(25): SEQ ID NO: 1194; WAN024DYX; Start 1453; Stop 1477
attaaactcattcaagacttcccac

SEQ ID NO: 286382 - DNA, 25 bp, Artificial
  probe
  misc_feature (1)..(25): SEQ ID NO: 1194; WAN024DYX; Start 773; Stop 797
tctacaatgataagatggatgcagt

SEQ ID NO: 286383 - DNA, 25 bp, Artificial
  probe
  misc_feature (1)..(25): SEQ ID NO: 1195; WAN024CZ4; Start 708; Stop 732
taagactatcacagcagaacaactc

SEQ ID NO: 286384 - DNA, 25 bp, Artificial
  probe
  misc_feature (1)..(25): SEQ ID NO: 1195; WAN024CZ4; Start 707; Stop 731
ctaagactatcacagcagaacaact

SEQ ID NO: 286385 - DNA, 25 bp, Artificial
  probe
  misc_feature (1)..(25): SEQ ID NO: 1195; WAN024CZ4; Start 705; Stop 729
gactaagactatcacagcagaacaa

SEQ ID NO: 286386 - DNA, 25 bp, Artificial
  probe
  misc_feature (1)..(25): SEQ ID NO: 1195; WAN024CZ4; Start 706; Stop 730
actaagactatcacagcagaacaac

SEQ ID NO: 286387 - DNA, 25 bp, Artificial
  probe
  misc_feature (1)..(25): SEQ ID NO: 1195; WAN024CZ4; Start 307; Stop 331
ggttgtggtgaaggattctattctc

SEQ ID NO: 286388 - DNA, 25 bp, Artificial
  probe
  misc_feature (1)..(25): SEQ ID NO: 1195; WAN024CZ4; Start 693; Stop 717
aactgcctctctgactaagactatc

SEQ ID NO: 286389 - DNA, 25 bp, Artificial
  probe
  misc_feature (1)..(25): SEQ ID NO: 1195; WAN024CZ4; Start 303; Stop 327
tatcggttgtggtgaaggattctat

SEQ ID NO: 286390 - DNA, 25 bp, Artificial
  probe
  misc_feature (1)..(25): SEQ ID NO: 1195; WAN024CZ4; Start 302; Stop 326
atatcggttgtggtgaaggattcta

SEQ ID NO: 286391 - DNA, 25 bp, Artificial
  probe
  misc_feature (1)..(25): SEQ ID NO: 1195; WAN024CZ4; Start 308; Stop 332
gttgtggtgaaggattctattctcg

SEQ ID NO: 286392 - DNA, 25 bp, Artificial
  probe
  misc_feature (1)..(25): SEQ ID NO: 1195; WAN024CZ4; Start 704; Stop 728
tgactaagactatcacagcagaaca

SEQ ID NO: 286393 - DNA, 25 bp, Artificial
  probe
  misc_feature (1)..(25): SEQ ID NO: 1195; WAN024CZ4; Start 740; Stop 764
tactcagtatgactcctctcctctt

SEQ ID NO: 286394 - DNA, 25 bp, Artificial
  probe
  misc_feature (1)..(25): SEQ ID NO: 1195; WAN024CZ4; Start 703; Stop 727
ctgactaagactatcacagcagaac

SEQ ID NO: 286395 - DNA, 25 bp, Artificial
  probe
  misc_feature (1)..(25): SEQ ID NO: 1195; WAN024CZ4; Start 304; Stop 328
atcggttgtggtgaaggattctatt

SEQ ID NO: 286396 - DNA, 25 bp, Artificial
  probe
  misc_feature (1)..(25): SEQ ID NO: 1195; WAN024CZ4; Start 695; Stop 719
ctgcctctctgactaagactatcac

SEQ ID NO: 286397 - DNA, 25 bp, Artificial
  probe
  misc_feature (1)..(25): SEQ ID NO: 1195; WAN024CZ4; Start 700; Stop 724
tctctgactaagactatcacagcag

SEQ ID NO: 286398 - DNA, 25 bp, Artificial
  probe
  misc_feature (1)..(25): SEQ ID NO: 1195; WAN024CZ4; Start 699; Stop 723
ctctctgactaagactatcacagca

SEQ ID NO: 286399 - DNA, 25 bp, Artificial
  probe
  misc_feature (1)..(25): SEQ ID NO: 1195; WAN024CZ4; Start 739; Stop 763
ctactcagtatgactcctctcctct

SEQ ID NO: 286400 - DNA, 25 bp, Artificial
  probe
  misc_feature (1)..(25): SEQ ID NO: 1195; WAN024CZ4; Start 709; Stop 733
aagactatcacagcagaacaactcc

SEQ ID NO: 286401 - DNA, 25 bp, Artificial
  probe
  misc_feature (1)..(25): SEQ ID NO: 1195; WAN024CZ4; Start 694; Stop 718
actgcctctctgactaagactatca

SEQ ID NO: 286402 - DNA, 25 bp, Artificial
  probe
  misc_feature (1)..(25): SEQ ID NO: 1195; WAN024CZ4; Start 696; Stop 720
tgcctctctgactaagactatcaca

SEQ ID NO: 286403 - DNA, 25 bp, Artificial
  probe
  misc_feature (1)..(25): SEQ ID NO: 1195; WAN024CZ4; Start 698; Stop 722
cctctctgactaagactatcacagc

SEQ ID NO: 286404 - DNA, 25 bp, Artificial
  probe
  misc_feature (1)..(25): SEQ ID NO: 1195; WAN024CZ4; Start 697; Stop 721
gcctctctgactaagactatcacag

SEQ ID NO: 286405 - DNA, 25 bp, Artificial
  probe
  misc_feature (1)..(25): SEQ ID NO: 1195; WAN024CZ4; Start 306; Stop 330
cggttgtggtgaaggattctattct

SEQ ID NO: 286406 - DNA, 25 bp, Artificial
  probe
  misc_feature (1)..(25): SEQ ID NO: 1195; WAN024CZ4; Start 305; Stop 329
tcggttgtggtgaaggattctattc

SEQ ID NO: 286407 - DNA, 25 bp, Artificial
  probe
  misc_feature (1)..(25): SEQ ID NO: 1195; WAN024CZ4; Start 712; Stop 736
actatcacagcagaacaactccaag

SEQ ID NO: 286408 - DNA, 25 bp, Artificial
  probe
  misc_feature (1)..(25): SEQ ID NO: 1195; WAN024CZ4; Start 711; Stop 735
gactatcacagcagaacaactccaa

SEQ ID NO: 286409 - DNA, 25 bp, Artificial
  probe
  misc_feature (1)..(25): SEQ ID NO: 1195; WAN024CZ4; Start 620; Stop 644
tgacaaacaaggagtattctaacca

SEQ ID NO: 286410 - DNA, 25 bp, Artificial
  probe
  misc_feature (1)..(25): SEQ ID NO: 1195; WAN024CZ4; Start 618; Stop 642
gctgacaaacaaggagtattctaac

SEQ ID NO: 286411 - DNA, 25 bp, Artificial
  probe
  misc_feature (1)..(25): SEQ ID NO: 1195; WAN024CZ4; Start 319; Stop 343
ggattctattctcgcaaactacaag

SEQ ID NO: 286412 - DNA, 25 bp, Artificial
  probe
  misc_feature (1)..(25): SEQ ID NO: 1195; WAN024CZ4; Start 318; Stop 342
aggattctattctcgcaaactacaa

SEQ ID NO: 286413 - DNA, 25 bp, Artificial
  probe
  misc_feature (1)..(25): SEQ ID NO: 1195; WAN024CZ4; Start 317; Stop 341
aaggattctattctcgcaaactaca

SEQ ID NO: 286414 - DNA, 25 bp, Artificial
  probe
  misc_feature (1)..(25): SEQ ID NO: 1195; WAN024CZ4; Start 619; Stop 643
ctgacaaacaaggagtattctaacc

SEQ ID NO: 286415 - DNA, 25 bp, Artificial
  probe
  misc_feature (1)..(25): SEQ ID NO: 1195; WAN024CZ4; Start 311; Stop 335
gtggtgaaggattctattctcgcaa

SEQ ID NO: 286416 - DNA, 25 bp, Artificial
  probe
  misc_feature (1)..(25): SEQ ID NO: 1196; WAN024GNE; Start 258; Stop 282
ttccttgttgttcatctattgcttg

SEQ ID NO: 286417 - DNA, 25 bp, Artificial
  probe
  misc_feature (1)..(25): SEQ ID NO: 1196; WAN024GNE; Start 112; Stop 136
gttattatgacaggttccattgctt

SEQ ID NO: 286418 - DNA, 25 bp, Artificial
  probe
  misc_feature (1)..(25): SEQ ID NO: 1196; WAN024GNE; Start 632; Stop 656
cgttcacttctatcattccaggatt

SEQ ID NO: 286419 - DNA, 25 bp, Artificial
  probe
  misc_feature (1)..(25): SEQ ID NO: 1196; WAN024GNE; Start 259; Stop 283
tccttgttgttcatctattgcttgg

SEQ ID NO: 286420 - DNA, 25 bp, Artificial
  probe
  misc_feature (1)..(25): SEQ ID NO: 1196; WAN024GNE; Start 626; Stop 650
ctaagccgttcacttctatcattcc

SEQ ID NO: 286421 - DNA, 25 bp, Artificial
  probe
  misc_feature (1)..(25): SEQ ID NO: 1196; WAN024GNE; Start 111; Stop 135
tgttattatgacaggttccattgct

SEQ ID NO: 286422 - DNA, 25 bp, Artificial
  probe
  misc_feature (1)..(25): SEQ ID NO: 1196; WAN024GNE; Start 205; Stop 229
cagtggcttgttgacatcaataatt

SEQ ID NO: 286423 - DNA, 25 bp, Artificial
  probe
  misc_feature (1)..(25): SEQ ID NO: 1196; WAN024GNE; Start 627; Stop 651
taagccgttcacttctatcattcca

SEQ ID NO: 286424 - DNA, 25 bp, Artificial
  probe
  misc_feature (1)..(25): SEQ ID NO: 1196; WAN024GNE; Start 204; Stop 228
tcagtggcttgttgacatcaataat

SEQ ID NO: 286425 - DNA, 25 bp, Artificial
  probe
  misc_feature (1)..(25): SEQ ID NO: 1196; WAN024GNE; Start 203; Stop 227
ttcagtggcttgttgacatcaataa

SEQ ID NO: 286426 - DNA, 25 bp, Artificial
  probe
  misc_feature (1)..(25): SEQ ID NO: 1196; WAN024GNE; Start 631; Stop 655
ccgttcacttctatcattccaggat

SEQ ID NO: 286427 - DNA, 25 bp, Artificial
  probe
  misc_feature (1)..(25): SEQ ID NO: 1196; WAN024GNE; Start 625; Stop 649
gctaagccgttcacttctatcattc

SEQ ID NO: 286428 - DNA, 25 bp, Artificial
  probe
  misc_feature (1)..(25): SEQ ID NO: 1196; WAN024GNE; Start 621; Stop 645
gattgctaagccgttcacttctatc

SEQ ID NO: 286429 - DNA, 25 bp, Artificial
  probe
  misc_feature (1)..(25): SEQ ID NO: 1196; WAN024GNE; Start 912; Stop 936
aggtgaaccgattccttatatatgg

SEQ ID NO: 286430 - DNA, 25 bp, Artificial
  probe
  misc_feature (1)..(25): SEQ ID NO: 1196; WAN024GNE; Start 913; Stop 937
ggtgaaccgattccttatatatgga

SEQ ID NO: 286431 - DNA, 25 bp, Artificial
  probe
  misc_feature (1)..(25): SEQ ID NO: 1196; WAN024GNE; Start 1267; Stop 1291
gccatcatcttatcagttgtttgtt

SEQ ID NO: 286432 - DNA, 25 bp, Artificial
  probe
  misc_feature (1)..(25): SEQ ID NO: 1196; WAN024GNE; Start 1094; Stop 1118
cagttgtcttgaatcctttgctatt

SEQ ID NO: 286433 - DNA, 25 bp, Artificial
  probe
  misc_feature (1)..(25): SEQ ID NO: 1196; WAN024GNE; Start 256; Stop 280
gtttccttgttgttcatctattgct

SEQ ID NO: 286434 - DNA, 25 bp, Artificial
  probe
  misc_feature (1)..(25): SEQ ID NO: 1196; WAN024GNE; Start 1089; Stop 1113
tttaccagttgtcttgaatcctttg

SEQ ID NO: 286435 - DNA, 25 bp, Artificial
  probe
  misc_feature (1)..(25): SEQ ID NO: 1196; WAN024GNE; Start 1088; Stop 1112
gtttaccagttgtcttgaatccttt

SEQ ID NO: 286436 - DNA, 25 bp, Artificial
  probe
  misc_feature (1)..(25): SEQ ID NO: 1196; WAN024GNE; Start 467; Stop 491
tgatggtaactattgggaatgtgat

SEQ ID NO: 286437 - DNA, 25 bp, Artificial
  probe
  misc_feature (1)..(25): SEQ ID NO: 1196; WAN024GNE; Start 466; Stop 490
ctgatggtaactattgggaatgtga

SEQ ID NO: 286438 - DNA, 25 bp, Artificial
  probe
  misc_feature (1)..(25): SEQ ID NO: 1196; WAN024GNE; Start 465; Stop 489
tctgatggtaactattgggaatgtg

SEQ ID NO: 286439 - DNA, 25 bp, Artificial
  probe
  misc_feature (1)..(25): SEQ ID NO: 1196; WAN024GNE; Start 255; Stop 279
tgtttccttgttgttcatctattgc

SEQ ID NO: 286440 - DNA, 25 bp, Artificial
  probe
  misc_feature (1)..(25): SEQ ID NO: 1196; WAN024GNE; Start 1239; Stop 1263
tttcttctctacagcatttgattgg

SEQ ID NO: 286441 - DNA, 25 bp, Artificial
  probe
  misc_feature (1)..(25): SEQ ID NO: 1196; WAN024GNE; Start 1237; Stop 1261
ggtttcttctctacagcatttgatt

SEQ ID NO: 286442 - DNA, 25 bp, Artificial
  probe
  misc_feature (1)..(25): SEQ ID NO: 1196; WAN024GNE; Start 1236; Stop 1260
tggtttcttctctacagcatttgat

SEQ ID NO: 286443 - DNA, 25 bp, Artificial
  probe
  misc_feature (1)..(25): SEQ ID NO: 1196; WAN024GNE; Start 961; Stop 985
gtctggtttggaggattaggattag

SEQ ID NO: 286444 - DNA, 25 bp, Artificial
  probe
  misc_feature (1)..(25): SEQ ID NO: 1196; WAN024GNE; Start 624; Stop 648
tgctaagccgttcacttctatcatt

SEQ ID NO: 286445 - DNA, 25 bp, Artificial
  probe
  misc_feature (1)..(25): SEQ ID NO: 1196; WAN024GNE; Start 623; Stop 647
ttgctaagccgttcacttctatcat

SEQ ID NO: 286446 - DNA, 25 bp, Artificial
  probe
  misc_feature (1)..(25): SEQ ID NO: 1196; WAN024GNE; Start 622; Stop 646
attgctaagccgttcacttctatca

SEQ ID NO: 286447 - DNA, 25 bp, Artificial
  probe
  misc_feature (1)..(25): SEQ ID NO: 1196; WAN024GNE; Start 962; Stop 986
tctggtttggaggattaggattagt

SEQ ID NO: 286448 - DNA, 25 bp, Artificial
  probe
  misc_feature (1)..(25): SEQ ID NO: 1196; WAN024GNE; Start 464; Stop 488
atctgatggtaactattgggaatgt

SEQ ID NO: 286449 - DNA, 25 bp, Artificial
  probe
  misc_feature (1)..(25): SEQ ID NO: 1197; WAN024CEH; Start 140; Stop 164
aatttggagattggtttgtttacgg

SEQ ID NO: 286450 - DNA, 25 bp, Artificial
  probe
  misc_feature (1)..(25): SEQ ID NO: 1197; WAN024CEH; Start 141; Stop 165
atttggagattggtttgtttacggt

SEQ ID NO: 286451 - DNA, 25 bp, Artificial
  probe
  misc_feature (1)..(25): SEQ ID NO: 1197; WAN024CEH; Start 143; Stop 167
ttggagattggtttgtttacggttt

SEQ ID NO: 286452 - DNA, 25 bp, Artificial
  probe
  misc_feature (1)..(25): SEQ ID NO: 1197; WAN024CEH; Start 142; Stop 166
tttggagattggtttgtttacggtt

SEQ ID NO: 286453 - DNA, 25 bp, Artificial
  probe
  misc_feature (1)..(25): SEQ ID NO: 1197; WAN024CEH; Start 138; Stop 162
gcaatttggagattggtttgtttac

SEQ ID NO: 286454 - DNA, 25 bp, Artificial
  probe
  misc_feature (1)..(25): SEQ ID NO: 1197; WAN024CEH; Start 139; Stop 163
caatttggagattggtttgtttacg

SEQ ID NO: 286455 - DNA, 25 bp, Artificial
  probe
  misc_feature (1)..(25): SEQ ID NO: 1197; WAN024CEH; Start 137; Stop 161
ggcaatttggagattggtttgttta

SEQ ID NO: 286456 - DNA, 25 bp, Artificial
  probe
  misc_feature (1)..(25): SEQ ID NO: 1197; WAN024CEH; Start 231; Stop 255
tgaacattatttgaaataccgtctt

SEQ ID NO: 286457 - DNA, 25 bp, Artificial
  probe
  misc_feature (1)..(25): SEQ ID NO: 1197; WAN024CEH; Start 230; Stop 254
ttgaacattatttgaaataccgtct

SEQ ID NO: 286458 - DNA, 25 bp, Artificial
  probe
  misc_feature (1)..(25): SEQ ID NO: 1197; WAN024CEH; Start 109; Stop 133
attgttttgggcttgaatctctttt

SEQ ID NO: 286459 - DNA, 25 bp, Artificial
  probe
  misc_feature (1)..(25): SEQ ID NO: 1197; WAN024CEH; Start 108; Stop 132
tattgttttgggcttgaatctcttt

SEQ ID NO: 286460 - DNA, 25 bp, Artificial
  probe
  misc_feature (1)..(25): SEQ ID NO: 1197; WAN024CEH; Start 107; Stop 131
ttattgttttgggcttgaatctctt

SEQ ID NO: 286461 - DNA, 25 bp, Artificial
  probe
  misc_feature (1)..(25): SEQ ID NO: 1197; WAN024CEH; Start 146; Stop 170
gagattggtttgtttacggttttgt

SEQ ID NO: 286462 - DNA, 25 bp, Artificial
  probe
  misc_feature (1)..(25): SEQ ID NO: 1197; WAN024CEH; Start 20; Stop 44
aagacatctcaaaataccaacacag

SEQ ID NO: 286463 - DNA, 25 bp, Artificial
  probe
  misc_feature (1)..(25): SEQ ID NO: 1197; WAN024CEH; Start 149; Stop 173
attggtttgtttacggttttgtgtt

SEQ ID NO: 286464 - DNA, 25 bp, Artificial
  probe
  misc_feature (1)..(25): SEQ ID NO: 1197; WAN024CEH; Start 106; Stop 130
attattgttttgggcttgaatctct

SEQ ID NO: 286465 - DNA, 25 bp, Artificial
  probe
  misc_feature (1)..(25): SEQ ID NO: 1197; WAN024CEH; Start 147; Stop 171
agattggtttgtttacggttttgtg

SEQ ID NO: 286466 - DNA, 25 bp, Artificial
  probe
  misc_feature (1)..(25): SEQ ID NO: 1197; WAN024CEH; Start 150; Stop 174
ttggtttgtttacggttttgtgttt

SEQ ID NO: 286467 - DNA, 25 bp, Artificial
  probe
  misc_feature (1)..(25): SEQ ID NO: 1197; WAN024CEH; Start 19; Stop 43
aaagacatctcaaaataccaacaca

SEQ ID NO: 286468 - DNA, 25 bp, Artificial
  probe
  misc_feature (1)..(25): SEQ ID NO: 1197; WAN024CEH; Start 132; Stop 156
tttctggcaatttggagattggttt

SEQ ID NO: 286469 - DNA, 25 bp, Artificial
  probe
  misc_feature (1)..(25): SEQ ID NO: 1197; WAN024CEH; Start 21; Stop 45
agacatctcaaaataccaacacagg

SEQ ID NO: 286470 - DNA, 25 bp, Artificial
  probe
  misc_feature (1)..(25): SEQ ID NO: 1197; WAN024CEH; Start 148; Stop 172
gattggtttgtttacggttttgtgt

SEQ ID NO: 286471 - DNA, 25 bp, Artificial
  probe
  misc_feature (1)..(25): SEQ ID NO: 1197; WAN024CEH; Start 232; Stop 256
gaacattatttgaaataccgtcttc

SEQ ID NO: 286472 - DNA, 25 bp, Artificial
  probe
  misc_feature (1)..(25): SEQ ID NO: 1197; WAN024CEH; Start 145; Stop 169
ggagattggtttgtttacggttttg

SEQ ID NO: 286473 - DNA, 25 bp, Artificial
  probe
  misc_feature (1)..(25): SEQ ID NO: 1197; WAN024CEH; Start 144; Stop 168
tggagattggtttgtttacggtttt

SEQ ID NO: 286474 - DNA, 25 bp, Artificial
  probe
  misc_feature (1)..(25): SEQ ID NO: 1197; WAN024CEH; Start 151; Stop 175
tggtttgtttacggttttgtgtttg

SEQ ID NO: 286475 - DNA, 25 bp, Artificial
  probe
  misc_feature (1)..(25): SEQ ID NO: 1197; WAN024CEH; Start 201; Stop 225
tggagtctataaacccaatgattta

SEQ ID NO: 286476 - DNA, 25 bp, Artificial
  probe
  misc_feature (1)..(25): SEQ ID NO: 1197; WAN024CEH; Start 105; Stop 129
aattattgttttgggcttgaatctc

SEQ ID NO: 286477 - DNA, 25 bp, Artificial
  probe
  misc_feature (1)..(25): SEQ ID NO: 1197; WAN024CEH; Start 229; Stop 253
tttgaacattatttgaaataccgtc

SEQ ID NO: 286478 - DNA, 25 bp, Artificial
  probe
  misc_feature (1)..(25): SEQ ID NO: 1197; WAN024CEH; Start 87; Stop 111
accagcctttattgtcacaattatt

SEQ ID NO: 286479 - DNA, 25 bp, Artificial
  probe
  misc_feature (1)..(25): SEQ ID NO: 1197; WAN024CEH; Start 136; Stop 160
tggcaatttggagattggtttgttt

SEQ ID NO: 286480 - DNA, 25 bp, Artificial
  probe
  misc_feature (1)..(25): SEQ ID NO: 1197; WAN024CEH; Start 22; Stop 46
gacatctcaaaataccaacacaggg

SEQ ID NO: 286481 - DNA, 25 bp, Artificial
  probe
  misc_feature (1)..(25): SEQ ID NO: 1197; WAN024CEH; Start 88; Stop 112
ccagcctttattgtcacaattattg

SEQ ID NO: 286482 - DNA, 25 bp, Artificial
  probe
  misc_feature (1)..(25): SEQ ID NO: 1198; WAN024D2V; Start 777; Stop 801
agaagcaagagagttatgtaagatt

SEQ ID NO: 286483 - DNA, 25 bp, Artificial
  probe
  misc_feature (1)..(25): SEQ ID NO: 1198; WAN024D2V; Start 495; Stop 519
tgaacaagaatatgaggcaaactac

SEQ ID NO: 286484 - DNA, 25 bp, Artificial
  probe
  misc_feature (1)..(25): SEQ ID NO: 1198; WAN024D2V; Start 494; Stop 518
gtgaacaagaatatgaggcaaacta

SEQ ID NO: 286485 - DNA, 25 bp, Artificial
  probe
  misc_feature (1)..(25): SEQ ID NO: 1198; WAN024D2V; Start 484; Stop 508
ttagtgggtcgtgaacaagaatatg

SEQ ID NO: 286486 - DNA, 25 bp, Artificial
  probe
  misc_feature (1)..(25): SEQ ID NO: 1198; WAN024D2V; Start 711; Stop 735
acttattcttgtaggaaatgctgga

SEQ ID NO: 286487 - DNA, 25 bp, Artificial
  probe
  misc_feature (1)..(25): SEQ ID NO: 1198; WAN024D2V; Start 496; Stop 520
gaacaagaatatgaggcaaactact

SEQ ID NO: 286488 - DNA, 25 bp, Artificial
  probe
  misc_feature (1)..(25): SEQ ID NO: 1198; WAN024D2V; Start 472; Stop 496
aatttctattccttagtgggtcgtg

SEQ ID NO: 286489 - DNA, 25 bp, Artificial
  probe
  misc_feature (1)..(25): SEQ ID NO: 1198; WAN024D2V; Start 712; Stop 736
cttattcttgtaggaaatgctggag

SEQ ID NO: 286490 - DNA, 25 bp, Artificial
  probe
  misc_feature (1)..(25): SEQ ID NO: 1198; WAN024D2V; Start 776; Stop 800
tagaagcaagagagttatgtaagat

SEQ ID NO: 286491 - DNA, 25 bp, Artificial
  probe
  misc_feature (1)..(25): SEQ ID NO: 1198; WAN024D2V; Start 775; Stop 799
atagaagcaagagagttatgtaaga

SEQ ID NO: 286492 - DNA, 25 bp, Artificial
  probe
  misc_feature (1)..(25): SEQ ID NO: 1198; WAN024D2V; Start 483; Stop 507
cttagtgggtcgtgaacaagaatat

SEQ ID NO: 286493 - DNA, 25 bp, Artificial
  probe
  misc_feature (1)..(25): SEQ ID NO: 1198; WAN024D2V; Start 471; Stop 495
taatttctattccttagtgggtcgt

SEQ ID NO: 286494 - DNA, 25 bp, Artificial
  probe
  misc_feature (1)..(25): SEQ ID NO: 1198; WAN024D2V; Start 473; Stop 497
atttctattccttagtgggtcgtga

SEQ ID NO: 286495 - DNA, 25 bp, Artificial
  probe
  misc_feature (1)..(25): SEQ ID NO: 1198; WAN024D2V; Start 661; Stop 685
acgattgaactctgtaaacaaagac

SEQ ID NO: 286496 - DNA, 25 bp, Artificial
  probe
  misc_feature (1)..(25): SEQ ID NO: 1198; WAN024D2V; Start 485; Stop 509
tagtgggtcgtgaacaagaatatga

SEQ ID NO: 286497 - DNA, 25 bp, Artificial
  probe
  misc_feature (1)..(25): SEQ ID NO: 1198; WAN024D2V; Start 710; Stop 734
tacttattcttgtaggaaatgctgg

SEQ ID NO: 286498 - DNA, 25 bp, Artificial
  probe
  misc_feature (1)..(25): SEQ ID NO: 1198; WAN024D2V; Start 498; Stop 522
acaagaatatgaggcaaactactct

SEQ ID NO: 286499 - DNA, 25 bp, Artificial
  probe
  misc_feature (1)..(25): SEQ ID NO: 1198; WAN024D2V; Start 474; Stop 498
tttctattccttagtgggtcgtgaa

SEQ ID NO: 286500 - DNA, 25 bp, Artificial
  probe
  misc_feature (1)..(25): SEQ ID NO: 1198; WAN024D2V; Start 5; Stop 29
atacactcgcagagaaattcagatt

SEQ ID NO: 286501 - DNA, 25 bp, Artificial
  probe
  misc_feature (1)..(25): SEQ ID NO: 1198; WAN024D2V; Start 4; Stop 28
aatacactcgcagagaaattcagat

SEQ ID NO: 286502 - DNA, 25 bp, Artificial
  probe
  misc_feature (1)..(25): SEQ ID NO: 1198; WAN024D2V; Start 490; Stop 514
ggtcgtgaacaagaatatgaggcaa

SEQ ID NO: 286503 - DNA, 25 bp, Artificial
  probe
  misc_feature (1)..(25): SEQ ID NO: 1198; WAN024D2V; Start 499; Stop 523
caagaatatgaggcaaactactctc

SEQ ID NO: 286504 - DNA, 25 bp, Artificial
  probe
  misc_feature (1)..(25): SEQ ID NO: 1198; WAN024D2V; Start 493; Stop 517
cgtgaacaagaatatgaggcaaact

SEQ ID NO: 286505 - DNA, 25 bp, Artificial
  probe
  misc_feature (1)..(25): SEQ ID NO: 1198; WAN024D2V; Start 492; Stop 516
tcgtgaacaagaatatgaggcaaac

SEQ ID NO: 286506 - DNA, 25 bp, Artificial
  probe
  misc_feature (1)..(25): SEQ ID NO: 1198; WAN024D2V; Start 491; Stop 515
gtcgtgaacaagaatatgaggcaaa

SEQ ID NO: 286507 - DNA, 25 bp, Artificial
  probe
  misc_feature (1)..(25): SEQ ID NO: 1198; WAN024D2V; Start 662; Stop 686
cgattgaactctgtaaacaaagaca

SEQ ID NO: 286508 - DNA, 25 bp, Artificial
  probe
  misc_feature (1)..(25): SEQ ID NO: 1198; WAN024D2V; Start 497; Stop 521
aacaagaatatgaggcaaactactc

SEQ ID NO: 286509 - DNA, 25 bp, Artificial
  probe
  misc_feature (1)..(25): SEQ ID NO: 1198; WAN024D2V; Start 713; Stop 737
ttattcttgtaggaaatgctggagc

SEQ ID NO: 286510 - DNA, 25 bp, Artificial
  probe
  misc_feature (1)..(25): SEQ ID NO: 1198; WAN024D2V; Start 6; Stop 30
tacactcgcagagaaattcagattg

SEQ ID NO: 286511 - DNA, 25 bp, Artificial
  probe
  misc_feature (1)..(25): SEQ ID NO: 1198; WAN024D2V; Start 475; Stop 499
ttctattccttagtgggtcgtgaac

SEQ ID NO: 286512 - DNA, 25 bp, Artificial
  probe
  misc_feature (1)..(25): SEQ ID NO: 1198; WAN024D2V; Start 470; Stop 494
ctaatttctattccttagtgggtcg

SEQ ID NO: 286513 - DNA, 25 bp, Artificial
  probe
  misc_feature (1)..(25): SEQ ID NO: 1198; WAN024D2V; Start 482; Stop 506
ccttagtgggtcgtgaacaagaata

SEQ ID NO: 286514 - DNA, 25 bp, Artificial
  probe
  misc_feature (1)..(25): SEQ ID NO: 1198; WAN024D2V; Start 478; Stop 502
tattccttagtgggtcgtgaacaag

SEQ ID NO: 286515 - DNA, 25 bp, Artificial
  probe
  misc_feature (1)..(25): SEQ ID NO: 1199; WAN024EUA; Start 344; Stop 368
atgctatgagtaagtatccagaacg

SEQ ID NO: 286516 - DNA, 25 bp, Artificial
  probe
  misc_feature (1)..(25): SEQ ID NO: 1199; WAN024EUA; Start 347; Stop 371
ctatgagtaagtatccagaacggtg

SEQ ID NO: 286517 - DNA, 25 bp, Artificial
  probe
  misc_feature (1)..(25): SEQ ID NO: 1199; WAN024EUA; Start 327; Stop 351
ctataccagttctcgtgatgctatg

SEQ ID NO: 286518 - DNA, 25 bp, Artificial
  probe
  misc_feature (1)..(25): SEQ ID NO: 1199; WAN024EUA; Start 341; Stop 365
gtgatgctatgagtaagtatccaga

SEQ ID NO: 286519 - DNA, 25 bp, Artificial
  probe
  misc_feature (1)..(25): SEQ ID NO: 1199; WAN024EUA; Start 349; Stop 373
atgagtaagtatccagaacggtgta

SEQ ID NO: 286520 - DNA, 25 bp, Artificial
  probe
  misc_feature (1)..(25): SEQ ID NO: 1199; WAN024EUA; Start 348; Stop 372
tatgagtaagtatccagaacggtgt

SEQ ID NO: 286521 - DNA, 25 bp, Artificial
  probe
  misc_feature (1)..(25): SEQ ID NO: 1199; WAN024EUA; Start 340; Stop 364
cgtgatgctatgagtaagtatccag

SEQ ID NO: 286522 - DNA, 25 bp, Artificial
  probe
  misc_feature (1)..(25): SEQ ID NO: 1199; WAN024EUA; Start 328; Stop 352
tataccagttctcgtgatgctatga

SEQ ID NO: 286523 - DNA, 25 bp, Artificial
  probe
  misc_feature (1)..(25): SEQ ID NO: 1199; WAN024EUA; Start 339; Stop 363
tcgtgatgctatgagtaagtatcca

SEQ ID NO: 286524 - DNA, 25 bp, Artificial
  probe
  misc_feature (1)..(25): SEQ ID NO: 1199; WAN024EUA; Start 484; Stop 508
aatgaagaccgaatggaactctatc

SEQ ID NO: 286525 - DNA, 25 bp, Artificial
  probe
  misc_feature (1)..(25): SEQ ID NO: 1199; WAN024EUA; Start 342; Stop 366
tgatgctatgagtaagtatccagaa

SEQ ID NO: 286526 - DNA, 25 bp, Artificial
  probe
  misc_feature (1)..(25): SEQ ID NO: 1199; WAN024EUA; Start 343; Stop 367
gatgctatgagtaagtatccagaac

SEQ ID NO: 286527 - DNA, 25 bp, Artificial
  probe
  misc_feature (1)..(25): SEQ ID NO: 1199; WAN024EUA; Start 335; Stop 359
gttctcgtgatgctatgagtaagta

SEQ ID NO: 286528 - DNA, 25 bp, Artificial
  probe
  misc_feature (1)..(25): SEQ ID NO: 1199; WAN024EUA; Start 346; Stop 370
gctatgagtaagtatccagaacggt

SEQ ID NO: 286529 - DNA, 25 bp, Artificial
  probe
  misc_feature (1)..(25): SEQ ID NO: 1199; WAN024EUA; Start 345; Stop 369
tgctatgagtaagtatccagaacgg

SEQ ID NO: 286530 - DNA, 25 bp, Artificial
  probe
  misc_feature (1)..(25): SEQ ID NO: 1199; WAN024EUA; Start 338; Stop 362
ctcgtgatgctatgagtaagtatcc

SEQ ID NO: 286531 - DNA, 25 bp, Artificial
  probe
  misc_feature (1)..(25): SEQ ID NO: 1199; WAN024EUA; Start 337; Stop 361
tctcgtgatgctatgagtaagtatc

SEQ ID NO: 286532 - DNA, 25 bp, Artificial
  probe
  misc_feature (1)..(25): SEQ ID NO: 1199; WAN024EUA; Start 336; Stop 360
ttctcgtgatgctatgagtaagtat

SEQ ID NO: 286533 - DNA, 25 bp, Artificial
  probe
  misc_feature (1)..(25): SEQ ID NO: 1199; WAN024EUA; Start 485; Stop 509
atgaagaccgaatggaactctatca

SEQ ID NO: 286534 - DNA, 25 bp, Artificial
  probe
  misc_feature (1)..(25): SEQ ID NO: 1199; WAN024EUA; Start 333; Stop 357
cagttctcgtgatgctatgagtaag

SEQ ID NO: 286535 - DNA, 25 bp, Artificial
  probe
  misc_feature (1)..(25): SEQ ID NO: 1199; WAN024EUA; Start 486; Stop 510
tgaagaccgaatggaactctatcaa

SEQ ID NO: 286536 - DNA, 25 bp, Artificial
  probe
  misc_feature (1)..(25): SEQ ID NO: 1199; WAN024EUA; Start 334; Stop 358
agttctcgtgatgctatgagtaagt

SEQ ID NO: 286537 - DNA, 25 bp, Artificial
  probe
  misc_feature (1)..(25): SEQ ID NO: 1199; WAN024EUA; Start 350; Stop 374
tgagtaagtatccagaacggtgtac

SEQ ID NO: 286538 - DNA, 25 bp, Artificial
  probe
  misc_feature (1)..(25): SEQ ID NO: 1199; WAN024EUA; Start 329; Stop 353
ataccagttctcgtgatgctatgag

SEQ ID NO: 286539 - DNA, 25 bp, Artificial
  probe
  misc_feature (1)..(25): SEQ ID NO: 1199; WAN024EUA; Start 332; Stop 356
ccagttctcgtgatgctatgagtaa

SEQ ID NO: 286540 - DNA, 25 bp, Artificial
  probe
  misc_feature (1)..(25): SEQ ID NO: 1199; WAN024EUA; Start 351; Stop 375
gagtaagtatccagaacggtgtacg

SEQ ID NO: 286541 - DNA, 25 bp, Artificial
  probe
  misc_feature (1)..(25): SEQ ID NO: 1199; WAN024EUA; Start 483; Stop 507
aaatgaagaccgaatggaactctat

SEQ ID NO: 286542 - DNA, 25 bp, Artificial
  probe
  misc_feature (1)..(25): SEQ ID NO: 1199; WAN024EUA; Start 487; Stop 511
gaagaccgaatggaactctatcaaa

SEQ ID NO: 286543 - DNA, 25 bp, Artificial
  probe
  misc_feature (1)..(25): SEQ ID NO: 1199; WAN024EUA; Start 488; Stop 512
aagaccgaatggaactctatcaaac

SEQ ID NO: 286544 - DNA, 25 bp, Artificial
  probe
  misc_feature (1)..(25): SEQ ID NO: 1199; WAN024EUA; Start 458; Stop 482
ttcgtccaactcctcatttcttaga

SEQ ID NO: 286545 - DNA, 25 bp, Artificial
  probe
  misc_feature (1)..(25): SEQ ID NO: 1199; WAN024EUA; Start 490; Stop 514
gaccgaatggaactctatcaaacac

SEQ ID NO: 286546 - DNA, 25 bp, Artificial
  probe
  misc_feature (1)..(25): SEQ ID NO: 1199; WAN024EUA; Start 457; Stop 481
gttcgtccaactcctcatttcttag

SEQ ID NO: 286547 - DNA, 25 bp, Artificial
  probe
  misc_feature (1)..(25): SEQ ID NO: 1199; WAN024EUA; Start 331; Stop 355
accagttctcgtgatgctatgagta

SEQ ID NO: 286548 - DNA, 25 bp, Artificial
  probe
  misc_feature (1)..(25): SEQ ID NO: 1200; WAN024C9S; Start 823; Stop 847
gttgttggcgttattgataccttat

SEQ ID NO: 286549 - DNA, 25 bp, Artificial
  probe
  misc_feature (1)..(25): SEQ ID NO: 1200; WAN024C9S; Start 822; Stop 846
agttgttggcgttattgatacctta

SEQ ID NO: 286550 - DNA, 25 bp, Artificial
  probe
  misc_feature (1)..(25): SEQ ID NO: 1200; WAN024C9S; Start 824; Stop 848
ttgttggcgttattgataccttatt

SEQ ID NO: 286551 - DNA, 25 bp, Artificial
  probe
  misc_feature (1)..(25): SEQ ID NO: 1200; WAN024C9S; Start 1270; Stop 1294
gctcctgctgattcacttaattcta

SEQ ID NO: 286552 - DNA, 25 bp, Artificial
  probe
  misc_feature (1)..(25): SEQ ID NO: 1200; WAN024C9S; Start 1377; Stop 1401
agatgtgtcatattatggaggagga

SEQ ID NO: 286553 - DNA, 25 bp, Artificial
  probe
  misc_feature (1)..(25): SEQ ID NO: 1200; WAN024C9S; Start 1376; Stop 1400
cagatgtgtcatattatggaggagg

SEQ ID NO: 286554 - DNA, 25 bp, Artificial
  probe
  misc_feature (1)..(25): SEQ ID NO: 1200; WAN024C9S; Start 1378; Stop 1402
gatgtgtcatattatggaggaggaa

SEQ ID NO: 286555 - DNA, 25 bp, Artificial
  probe
  misc_feature (1)..(25): SEQ ID NO: 1200; WAN024C9S; Start 1950; Stop 1974
taatgtcaagcatattggagagtcg

SEQ ID NO: 286556 - DNA, 25 bp, Artificial
  probe
  misc_feature (1)..(25): SEQ ID NO: 1200; WAN024C9S; Start 1947; Stop 1971
ggataatgtcaagcatattggagag

SEQ ID NO: 286557 - DNA, 25 bp, Artificial
  probe
  misc_feature (1)..(25): SEQ ID NO: 1200; WAN024C9S; Start 796; Stop 820
aatcttccatctccaatgaacgaac

SEQ ID NO: 286558 - DNA, 25 bp, Artificial
  probe
  misc_feature (1)..(25): SEQ ID NO: 1200; WAN024C9S; Start 1271; Stop 1295
ctcctgctgattcacttaattctat

SEQ ID NO: 286559 - DNA, 25 bp, Artificial
  probe
  misc_feature (1)..(25): SEQ ID NO: 1200; WAN024C9S; Start 821; Stop 845
cagttgttggcgttattgatacctt

SEQ ID NO: 286560 - DNA, 25 bp, Artificial
  probe
  misc_feature (1)..(25): SEQ ID NO: 1200; WAN024C9S; Start 1949; Stop 1973
ataatgtcaagcatattggagagtc

SEQ ID NO: 286561 - DNA, 25 bp, Artificial
  probe
  misc_feature (1)..(25): SEQ ID NO: 1200; WAN024C9S; Start 1948; Stop 1972
gataatgtcaagcatattggagagt

SEQ ID NO: 286562 - DNA, 25 bp, Artificial
  probe
  misc_feature (1)..(25): SEQ ID NO: 1200; WAN024C9S; Start 1322; Stop 1346
atcaatcagtgtcatattcacgaga

SEQ ID NO: 286563 - DNA, 25 bp, Artificial
  probe
  misc_feature (1)..(25): SEQ ID NO: 1200; WAN024C9S; Start 1323; Stop 1347
tcaatcagtgtcatattcacgagag

SEQ ID NO: 286564 - DNA, 25 bp, Artificial
  probe
  misc_feature (1)..(25): SEQ ID NO: 1200; WAN024C9S; Start 1321; Stop 1345
aatcaatcagtgtcatattcacgag

SEQ ID NO: 286565 - DNA, 25 bp, Artificial
  probe
  misc_feature (1)..(25): SEQ ID NO: 1200; WAN024C9S; Start 1269; Stop 1293
tgctcctgctgattcacttaattct

SEQ ID NO: 286566 - DNA, 25 bp, Artificial
  probe
  misc_feature (1)..(25): SEQ ID NO: 1200; WAN024C9S; Start 982; Stop 1006
cctaatctggatgatggttgtggaa

SEQ ID NO: 286567 - DNA, 25 bp, Artificial
  probe
  misc_feature (1)..(25): SEQ ID NO: 1200; WAN024C9S; Start 1324; Stop 1348
caatcagtgtcatattcacgagagg

SEQ ID NO: 286568 - DNA, 25 bp, Artificial
  probe
  misc_feature (1)..(25): SEQ ID NO: 1200; WAN024C9S; Start 1373; Stop 1397
aaccagatgtgtcatattatggagg

SEQ ID NO: 286569 - DNA, 25 bp, Artificial
  probe
  misc_feature (1)..(25): SEQ ID NO: 1200; WAN024C9S; Start 1375; Stop 1399
ccagatgtgtcatattatggaggag

SEQ ID NO: 286570 - DNA, 25 bp, Artificial
  probe
  misc_feature (1)..(25): SEQ ID NO: 1200; WAN024C9S; Start 1952; Stop 1976
atgtcaagcatattggagagtcgtt

SEQ ID NO: 286571 - DNA, 25 bp, Artificial
  probe
  misc_feature (1)..(25): SEQ ID NO: 1200; WAN024C9S; Start 1951; Stop 1975
aatgtcaagcatattggagagtcgt

SEQ ID NO: 286572 - DNA, 25 bp, Artificial
  probe
  misc_feature (1)..(25): SEQ ID NO: 1200; WAN024C9S; Start 2186; Stop 2210
aagtagaagctcaagtagacctctt

SEQ ID NO: 286573 - DNA, 25 bp, Artificial
  probe
  misc_feature (1)..(25): SEQ ID NO: 1200; WAN024C9S; Start 1374; Stop 1398
accagatgtgtcatattatggagga

SEQ ID NO: 286574 - DNA, 25 bp, Artificial
  probe
  misc_feature (1)..(25): SEQ ID NO: 1200; WAN024C9S; Start 1937; Stop 1961
ttaggaaatgggataatgtcaagca

SEQ ID NO: 286575 - DNA, 25 bp, Artificial
  probe
  misc_feature (1)..(25): SEQ ID NO: 1200; WAN024C9S; Start 1554; Stop 1578
agcaataccctggaatgataagaaa

SEQ ID NO: 286576 - DNA, 25 bp, Artificial
  probe
  misc_feature (1)..(25): SEQ ID NO: 1200; WAN024C9S; Start 1386; Stop 1410
atattatggaggaggaaatggtgac

SEQ ID NO: 286577 - DNA, 25 bp, Artificial
  probe
  misc_feature (1)..(25): SEQ ID NO: 1200; WAN024C9S; Start 912; Stop 936
caaagatagccaagattacaagcat

SEQ ID NO: 286578 - DNA, 25 bp, Artificial
  probe
  misc_feature (1)..(25): SEQ ID NO: 1200; WAN024C9S; Start 229; Stop 253
aatggctatttcaatgtaggaggag

SEQ ID NO: 286579 - DNA, 25 bp, Artificial
  probe
  misc_feature (1)..(25): SEQ ID NO: 1200; WAN024C9S; Start 1333; Stop 1357
tcatattcacgagagggtattgttt

SEQ ID NO: 286580 - DNA, 25 bp, Artificial
  probe
  misc_feature (1)..(25): SEQ ID NO: 1200; WAN024C9S; Start 1272; Stop 1296
tcctgctgattcacttaattctata

SEQ ID NO: 286581 - DNA, 25 bp, Artificial
  probe
  misc_feature (1)..(25): SEQ ID NO: 1201; WAN024CCX; Start 278; Stop 302
tcttaatgctaatctcgctggtatt

SEQ ID NO: 286582 - DNA, 25 bp, Artificial
  probe
  misc_feature (1)..(25): SEQ ID NO: 1201; WAN024CCX; Start 277; Stop 301
ttcttaatgctaatctcgctggtat

SEQ ID NO: 286583 - DNA, 25 bp, Artificial
  probe
  misc_feature (1)..(25): SEQ ID NO: 1201; WAN024CCX; Start 694; Stop 718
atgattataggcattgttcgtatgg

SEQ ID NO: 286584 - DNA, 25 bp, Artificial
  probe
  misc_feature (1)..(25): SEQ ID NO: 1201; WAN024CCX; Start 279; Stop 303
cttaatgctaatctcgctggtatta

SEQ ID NO: 286585 - DNA, 25 bp, Artificial
  probe
  misc_feature (1)..(25): SEQ ID NO: 1201; WAN024CCX; Start 891; Stop 915
gatgttggttatgttcgcaatcttg

SEQ ID NO: 286586 - DNA, 25 bp, Artificial
  probe
  misc_feature (1)..(25): SEQ ID NO: 1201; WAN024CCX; Start 890; Stop 914
tgatgttggttatgttcgcaatctt

SEQ ID NO: 286587 - DNA, 25 bp, Artificial
  probe
  misc_feature (1)..(25): SEQ ID NO: 1201; WAN024CCX; Start 889; Stop 913
ttgatgttggttatgttcgcaatct

SEQ ID NO: 286588 - DNA, 25 bp, Artificial
  probe
  misc_feature (1)..(25): SEQ ID NO: 1201; WAN024CCX; Start 689; Stop 713
gtagcatgattataggcattgttcg

SEQ ID NO: 286589 - DNA, 25 bp, Artificial
  probe
  misc_feature (1)..(25): SEQ ID NO: 1201; WAN024CCX; Start 692; Stop 716
gcatgattataggcattgttcgtat

SEQ ID NO: 286590 - DNA, 25 bp, Artificial
  probe
  misc_feature (1)..(25): SEQ ID NO: 1201; WAN024CCX; Start 691; Stop 715
agcatgattataggcattgttcgta

SEQ ID NO: 286591 - DNA, 25 bp, Artificial
  probe
  misc_feature (1)..(25): SEQ ID NO: 1201; WAN024CCX; Start 690; Stop 714
tagcatgattataggcattgttcgt

SEQ ID NO: 286592 - DNA, 25 bp, Artificial
  probe
  misc_feature (1)..(25): SEQ ID NO: 1201; WAN024CCX; Start 686; Stop 710
cgagtagcatgattataggcattgt

SEQ ID NO: 286593 - DNA, 25 bp, Artificial
  probe
  misc_feature (1)..(25): SEQ ID NO: 1201; WAN024CCX; Start 688; Stop 712
agtagcatgattataggcattgttc

SEQ ID NO: 286594 - DNA, 25 bp, Artificial
  probe
  misc_feature (1)..(25): SEQ ID NO: 1201; WAN024CCX; Start 687; Stop 711
gagtagcatgattataggcattgtt

SEQ ID NO: 286595 - DNA, 25 bp, Artificial
  probe
  misc_feature (1)..(25): SEQ ID NO: 1201; WAN024CCX; Start 281; Stop 305
taatgctaatctcgctggtattatt

SEQ ID NO: 286596 - DNA, 25 bp, Artificial
  probe
  misc_feature (1)..(25): SEQ ID NO: 1201; WAN024CCX; Start 280; Stop 304
ttaatgctaatctcgctggtattat

SEQ ID NO: 286597 - DNA, 25 bp, Artificial
  probe
  misc_feature (1)..(25): SEQ ID NO: 1201; WAN024CCX; Start 639; Stop 663
ccttgataatatccgtgttggaatc

SEQ ID NO: 286598 - DNA, 25 bp, Artificial
  probe
  misc_feature (1)..(25): SEQ ID NO: 1201; WAN024CCX; Start 693; Stop 717
catgattataggcattgttcgtatg

SEQ ID NO: 286599 - DNA, 25 bp, Artificial
  probe
  misc_feature (1)..(25): SEQ ID NO: 1201; WAN024CCX; Start 880; Stop 904
agaaatgctttgatgttggttatgt

SEQ ID NO: 286600 - DNA, 25 bp, Artificial
  probe
  misc_feature (1)..(25): SEQ ID NO: 1201; WAN024CCX; Start 831; Stop 855
gataaagcgaacaaagactgagaat

SEQ ID NO: 286601 - DNA, 25 bp, Artificial
  probe
  misc_feature (1)..(25): SEQ ID NO: 1201; WAN024CCX; Start 685; Stop 709
gcgagtagcatgattataggcattg

SEQ ID NO: 286602 - DNA, 25 bp, Artificial
  probe
  misc_feature (1)..(25): SEQ ID NO: 1201; WAN024CCX; Start 1287; Stop 1311
ttcttcaagttggtatctctctatt

SEQ ID NO: 286603 - DNA, 25 bp, Artificial
  probe
  misc_feature (1)..(25): SEQ ID NO: 1201; WAN024CCX; Start 276; Stop 300
tttcttaatgctaatctcgctggta

SEQ ID NO: 286604 - DNA, 25 bp, Artificial
  probe
  misc_feature (1)..(25): SEQ ID NO: 1201; WAN024CCX; Start 830; Stop 854
tgataaagcgaacaaagactgagaa

SEQ ID NO: 286605 - DNA, 25 bp, Artificial
  probe
  misc_feature (1)..(25): SEQ ID NO: 1201; WAN024CCX; Start 1295; Stop 1319
gttggtatctctctatttggattgc

SEQ ID NO: 286606 - DNA, 25 bp, Artificial
  probe
  misc_feature (1)..(25): SEQ ID NO: 1201; WAN024CCX; Start 835; Stop 859
aagcgaacaaagactgagaatttac

SEQ ID NO: 286607 - DNA, 25 bp, Artificial
  probe
  misc_feature (1)..(25): SEQ ID NO: 1201; WAN024CCX; Start 883; Stop 907
aatgctttgatgttggttatgttcg

SEQ ID NO: 286608 - DNA, 25 bp, Artificial
  probe
  misc_feature (1)..(25): SEQ ID NO: 1201; WAN024CCX; Start 882; Stop 906
aaatgctttgatgttggttatgttc

SEQ ID NO: 286609 - DNA, 25 bp, Artificial
  probe
  misc_feature (1)..(25): SEQ ID NO: 1201; WAN024CCX; Start 881; Stop 905
gaaatgctttgatgttggttatgtt

SEQ ID NO: 286610 - DNA, 25 bp, Artificial
  probe
  misc_feature (1)..(25): SEQ ID NO: 1201; WAN024CCX; Start 698; Stop 722
ttataggcattgttcgtatgggaat

SEQ ID NO: 286611 - DNA, 25 bp, Artificial
  probe
  misc_feature (1)..(25): SEQ ID NO: 1201; WAN024CCX; Start 697; Stop 721
attataggcattgttcgtatgggaa

SEQ ID NO: 286612 - DNA, 25 bp, Artificial
  probe
  misc_feature (1)..(25): SEQ ID NO: 1201; WAN024CCX; Start 834; Stop 858
aaagcgaacaaagactgagaattta

SEQ ID NO: 286613 - DNA, 25 bp, Artificial
  probe
  misc_feature (1)..(25): SEQ ID NO: 1201; WAN024CCX; Start 833; Stop 857
taaagcgaacaaagactgagaattt

SEQ ID NO: 286614 - DNA, 25 bp, Artificial
  probe
  misc_feature (1)..(25): SEQ ID NO: 1202; WAN024GKY; Start 185; Stop 209
cctataccgctacatcactaactaa

SEQ ID NO: 286615 - DNA, 25 bp, Artificial
  probe
  misc_feature (1)..(25): SEQ ID NO: 1202; WAN024GKY; Start 184; Stop 208
gcctataccgctacatcactaacta

SEQ ID NO: 286616 - DNA, 25 bp, Artificial
  probe
  misc_feature (1)..(25): SEQ ID NO: 1202; WAN024GKY; Start 186; Stop 210
ctataccgctacatcactaactaat

SEQ ID NO: 286617 - DNA, 25 bp, Artificial
  probe
  misc_feature (1)..(25): SEQ ID NO: 1202; WAN024GKY; Start 19; Stop 43
ataaatgaaacaatgctgagtgagg

SEQ ID NO: 286618 - DNA, 25 bp, Artificial
  probe
  misc_feature (1)..(25): SEQ ID NO: 1202; WAN024GKY; Start 35; Stop 59
tgagtgaggtttatggaggtaattc

SEQ ID NO: 286619 - DNA, 25 bp, Artificial
  probe
  misc_feature (1)..(25): SEQ ID NO: 1202; WAN024GKY; Start 34; Stop 58
ctgagtgaggtttatggaggtaatt

SEQ ID NO: 286620 - DNA, 25 bp, Artificial
  probe
  misc_feature (1)..(25): SEQ ID NO: 1202; WAN024GKY; Start 20; Stop 44
taaatgaaacaatgctgagtgaggt

SEQ ID NO: 286621 - DNA, 25 bp, Artificial
  probe
  misc_feature (1)..(25): SEQ ID NO: 1202; WAN024GKY; Start 106; Stop 130
gtgaaatatgggagacttctaggac

SEQ ID NO: 286622 - DNA, 25 bp, Artificial
  probe
  misc_feature (1)..(25): SEQ ID NO: 1202; WAN024GKY; Start 102; Stop 126
tggagtgaaatatgggagacttcta

SEQ ID NO: 286623 - DNA, 25 bp, Artificial
  probe
  misc_feature (1)..(25): SEQ ID NO: 1202; WAN024GKY; Start 107; Stop 131
tgaaatatgggagacttctaggacc

SEQ ID NO: 286624 - DNA, 25 bp, Artificial
  probe
  misc_feature (1)..(25): SEQ ID NO: 1202; WAN024GKY; Start 105; Stop 129
agtgaaatatgggagacttctagga

SEQ ID NO: 286625 - DNA, 25 bp, Artificial
  probe
  misc_feature (1)..(25): SEQ ID NO: 1202; WAN024GKY; Start 104; Stop 128
gagtgaaatatgggagacttctagg

SEQ ID NO: 286626 - DNA, 25 bp, Artificial
  probe
  misc_feature (1)..(25): SEQ ID NO: 1202; WAN024GKY; Start 103; Stop 127
ggagtgaaatatgggagacttctag

SEQ ID NO: 286627 - DNA, 25 bp, Artificial
  probe
  misc_feature (1)..(25): SEQ ID NO: 1202; WAN024GKY; Start 21; Stop 45
aaatgaaacaatgctgagtgaggtt

SEQ ID NO: 286628 - DNA, 25 bp, Artificial
  probe
  misc_feature (1)..(25): SEQ ID NO: 1202; WAN024GKY; Start 33; Stop 57
gctgagtgaggtttatggaggtaat

SEQ ID NO: 286629 - DNA, 25 bp, Artificial
  probe
  misc_feature (1)..(25): SEQ ID NO: 1202; WAN024GKY; Start 101; Stop 125
gtggagtgaaatatgggagacttct

SEQ ID NO: 286630 - DNA, 25 bp, Artificial
  probe
  misc_feature (1)..(25): SEQ ID NO: 1202; WAN024GKY; Start 18; Stop 42
tataaatgaaacaatgctgagtgag

SEQ ID NO: 286631 - DNA, 25 bp, Artificial
  probe
  misc_feature (1)..(25): SEQ ID NO: 1202; WAN024GKY; Start 36; Stop 60
gagtgaggtttatggaggtaattcc

SEQ ID NO: 286632 - DNA, 25 bp, Artificial
  probe
  misc_feature (1)..(25): SEQ ID NO: 1202; WAN024GKY; Start 27; Stop 51
aacaatgctgagtgaggtttatgga

SEQ ID NO: 286633 - DNA, 25 bp, Artificial
  probe
  misc_feature (1)..(25): SEQ ID NO: 1202; WAN024GKY; Start 28; Stop 52
acaatgctgagtgaggtttatggag

SEQ ID NO: 286634 - DNA, 25 bp, Artificial
  probe
  misc_feature (1)..(25): SEQ ID NO: 1202; WAN024GKY; Start 108; Stop 132
gaaatatgggagacttctaggacca

SEQ ID NO: 286635 - DNA, 25 bp, Artificial
  probe
  misc_feature (1)..(25): SEQ ID NO: 1202; WAN024GKY; Start 31; Stop 55
atgctgagtgaggtttatggaggta

SEQ ID NO: 286636 - DNA, 25 bp, Artificial
  probe
  misc_feature (1)..(25): SEQ ID NO: 1202; WAN024GKY; Start 17; Stop 41
atataaatgaaacaatgctgagtga

SEQ ID NO: 286637 - DNA, 25 bp, Artificial
  probe
  misc_feature (1)..(25): SEQ ID NO: 1202; WAN024GKY; Start 183; Stop 207
agcctataccgctacatcactaact

SEQ ID NO: 286638 - DNA, 25 bp, Artificial
  probe
  misc_feature (1)..(25): SEQ ID NO: 1202; WAN024GKY; Start 100; Stop 124
ggtggagtgaaatatgggagacttc

SEQ ID NO: 286639 - DNA, 25 bp, Artificial
  probe
  misc_feature (1)..(25): SEQ ID NO: 1202; WAN024GKY; Start 32; Stop 56
tgctgagtgaggtttatggaggtaa

SEQ ID NO: 286640 - DNA, 25 bp, Artificial
  probe
  misc_feature (1)..(25): SEQ ID NO: 1202; WAN024GKY; Start 37; Stop 61
agtgaggtttatggaggtaattccg

SEQ ID NO: 286641 - DNA, 25 bp, Artificial
  probe
  misc_feature (1)..(25): SEQ ID NO: 1202; WAN024GKY; Start 25; Stop 49
gaaacaatgctgagtgaggtttatg

SEQ ID NO: 286642 - DNA, 25 bp, Artificial
  probe
  misc_feature (1)..(25): SEQ ID NO: 1202; WAN024GKY; Start 29; Stop 53
caatgctgagtgaggtttatggagg

SEQ ID NO: 286643 - DNA, 25 bp, Artificial
  probe
  misc_feature (1)..(25): SEQ ID NO: 1202; WAN024GKY; Start 24; Stop 48
tgaaacaatgctgagtgaggtttat

SEQ ID NO: 286644 - DNA, 25 bp, Artificial
  probe
  misc_feature (1)..(25): SEQ ID NO: 1202; WAN024GKY; Start 23; Stop 47
atgaaacaatgctgagtgaggttta

SEQ ID NO: 286645 - DNA, 25 bp, Artificial
  probe
  misc_feature (1)..(25): SEQ ID NO: 1202; WAN024GKY; Start 16; Stop 40
aatataaatgaaacaatgctgagtg

SEQ ID NO: 286646 - DNA, 25 bp, Artificial
  probe
  misc_feature (1)..(25): SEQ ID NO: 1202; WAN024GKY; Start 22; Stop 46
aatgaaacaatgctgagtgaggttt

SEQ ID NO: 286647 - DNA, 25 bp, Artificial
  probe
  misc_feature (1)..(25): SEQ ID NO: 1203; WAN024G7C; Start 1210; Stop 1234
ttacgaggaattaagaagacagacc

SEQ ID NO: 286648 - DNA, 25 bp, Artificial
  probe
  misc_feature (1)..(25): SEQ ID NO: 1203; WAN024G7C; Start 1214; Stop 1238
gaggaattaagaagacagaccagtt

SEQ ID NO: 286649 - DNA, 25 bp, Artificial
  probe
  misc_feature (1)..(25): SEQ ID NO: 1203; WAN024G7C; Start 1219; Stop 1243
attaagaagacagaccagttcatcg

SEQ ID NO: 286650 - DNA, 25 bp, Artificial
  probe
  misc_feature (1)..(25): SEQ ID NO: 1203; WAN024G7C; Start 1215; Stop 1239
aggaattaagaagacagaccagttc

SEQ ID NO: 286651 - DNA, 25 bp, Artificial
  probe
  misc_feature (1)..(25): SEQ ID NO: 1203; WAN024G7C; Start 1211; Stop 1235
tacgaggaattaagaagacagacca

SEQ ID NO: 286652 - DNA, 25 bp, Artificial
  probe
  misc_feature (1)..(25): SEQ ID NO: 1203; WAN024G7C; Start 1216; Stop 1240
ggaattaagaagacagaccagttca

SEQ ID NO: 286653 - DNA, 25 bp, Artificial
  probe
  misc_feature (1)..(25): SEQ ID NO: 1203; WAN024G7C; Start 950; Stop 974
ccaatccagaggtcaagaattatct

SEQ ID NO: 286654 - DNA, 25 bp, Artificial
  probe
  misc_feature (1)..(25): SEQ ID NO: 1203; WAN024G7C; Start 1489; Stop 1513
tcaagtgacaatgatatgctgaact

SEQ ID NO: 286655 - DNA, 25 bp, Artificial
  probe
  misc_feature (1)..(25): SEQ ID NO: 1203; WAN024G7C; Start 1036; Stop 1060
gctaatgagattgaccatcagttct

SEQ ID NO: 286656 - DNA, 25 bp, Artificial
  probe
  misc_feature (1)..(25): SEQ ID NO: 1203; WAN024G7C; Start 636; Stop 660
tacaagcaatcacaagtacaatacg

SEQ ID NO: 286657 - DNA, 25 bp, Artificial
  probe
  misc_feature (1)..(25): SEQ ID NO: 1203; WAN024G7C; Start 1218; Stop 1242
aattaagaagacagaccagttcatc

SEQ ID NO: 286658 - DNA, 25 bp, Artificial
  probe
  misc_feature (1)..(25): SEQ ID NO: 1203; WAN024G7C; Start 1217; Stop 1241
gaattaagaagacagaccagttcat

SEQ ID NO: 286659 - DNA, 25 bp, Artificial
  probe
  misc_feature (1)..(25): SEQ ID NO: 1203; WAN024G7C; Start 949; Stop 973
gccaatccagaggtcaagaattatc

SEQ ID NO: 286660 - DNA, 25 bp, Artificial
  probe
  misc_feature (1)..(25): SEQ ID NO: 1203; WAN024G7C; Start 631; Stop 655
gaatctacaagcaatcacaagtaca

SEQ ID NO: 286661 - DNA, 25 bp, Artificial
  probe
  misc_feature (1)..(25): SEQ ID NO: 1203; WAN024G7C; Start 983; Stop 1007
ttgcgacttattggattgaagagtt

SEQ ID NO: 286662 - DNA, 25 bp, Artificial
  probe
  misc_feature (1)..(25): SEQ ID NO: 1203; WAN024G7C; Start 1037; Stop 1061
ctaatgagattgaccatcagttctg

SEQ ID NO: 286663 - DNA, 25 bp, Artificial
  probe
  misc_feature (1)..(25): SEQ ID NO: 1203; WAN024G7C; Start 638; Stop 662
caagcaatcacaagtacaatacgac

SEQ ID NO: 286664 - DNA, 25 bp, Artificial
  probe
  misc_feature (1)..(25): SEQ ID NO: 1203; WAN024G7C; Start 642; Stop 666
caatcacaagtacaatacgacagat

SEQ ID NO: 286665 - DNA, 25 bp, Artificial
  probe
  misc_feature (1)..(25): SEQ ID NO: 1203; WAN024G7C; Start 948; Stop 972
agccaatccagaggtcaagaattat

SEQ ID NO: 286666 - DNA, 25 bp, Artificial
  probe
  misc_feature (1)..(25): SEQ ID NO: 1203; WAN024G7C; Start 639; Stop 663
aagcaatcacaagtacaatacgaca

SEQ ID NO: 286667 - DNA, 25 bp, Artificial
  probe
  misc_feature (1)..(25): SEQ ID NO: 1203; WAN024G7C; Start 637; Stop 661
acaagcaatcacaagtacaatacga

SEQ ID NO: 286668 - DNA, 25 bp, Artificial
  probe
  misc_feature (1)..(25): SEQ ID NO: 1203; WAN024G7C; Start 632; Stop 656
aatctacaagcaatcacaagtacaa

SEQ ID NO: 286669 - DNA, 25 bp, Artificial
  probe
  misc_feature (1)..(25): SEQ ID NO: 1203; WAN024G7C; Start 629; Stop 653
ttgaatctacaagcaatcacaagta

SEQ ID NO: 286670 - DNA, 25 bp, Artificial
  probe
  misc_feature (1)..(25): SEQ ID NO: 1203; WAN024G7C; Start 633; Stop 657
atctacaagcaatcacaagtacaat

SEQ ID NO: 286671 - DNA, 25 bp, Artificial
  probe
  misc_feature (1)..(25): SEQ ID NO: 1203; WAN024G7C; Start 979; Stop 1003
aaggttgcgacttattggattgaag

SEQ ID NO: 286672 - DNA, 25 bp, Artificial
  probe
  misc_feature (1)..(25): SEQ ID NO: 1203; WAN024G7C; Start 645; Stop 669
tcacaagtacaatacgacagattac

SEQ ID NO: 286673 - DNA, 25 bp, Artificial
  probe
  misc_feature (1)..(25): SEQ ID NO: 1203; WAN024G7C; Start 1035; Stop 1059
ggctaatgagattgaccatcagttc

SEQ ID NO: 286674 - DNA, 25 bp, Artificial
  probe
  misc_feature (1)..(25): SEQ ID NO: 1203; WAN024G7C; Start 1258; Stop 1282
gagtctatgtattacaagcagcaga

SEQ ID NO: 286675 - DNA, 25 bp, Artificial
  probe
  misc_feature (1)..(25): SEQ ID NO: 1203; WAN024G7C; Start 1257; Stop 1281
agagtctatgtattacaagcagcag

SEQ ID NO: 286676 - DNA, 25 bp, Artificial
  probe
  misc_feature (1)..(25): SEQ ID NO: 1203; WAN024G7C; Start 1256; Stop 1280
gagagtctatgtattacaagcagca

SEQ ID NO: 286677 - DNA, 25 bp, Artificial
  probe
  misc_feature (1)..(25): SEQ ID NO: 1203; WAN024G7C; Start 641; Stop 665
gcaatcacaagtacaatacgacaga

SEQ ID NO: 286678 - DNA, 25 bp, Artificial
  probe
  misc_feature (1)..(25): SEQ ID NO: 1203; WAN024G7C; Start 640; Stop 664
agcaatcacaagtacaatacgacag

SEQ ID NO: 286679 - DNA, 25 bp, Artificial
  probe
  misc_feature (1)..(25): SEQ ID NO: 1203; WAN024G7C; Start 1213; Stop 1237
cgaggaattaagaagacagaccagt

SEQ ID NO: 286680 - DNA, 25 bp, Artificial
  probe
  misc_feature (1)..(25): SEQ ID NO: 1204; WAN024DAG; Start 7; Stop 31
agagaagaagtaacattgttaggtt

SEQ ID NO: 286681 - DNA, 25 bp, Artificial
  probe
  misc_feature (1)..(25): SEQ ID NO: 1204; WAN024DAG; Start 1; Stop 25
atgaatagagaagaagtaacattgt

SEQ ID NO: 286682 - DNA, 25 bp, Artificial
  probe
  misc_feature (1)..(25): SEQ ID NO: 1204; WAN024DAG; Start 6; Stop 30
tagagaagaagtaacattgttaggt

SEQ ID NO: 286683 - DNA, 25 bp, Artificial
  probe
  misc_feature (1)..(25): SEQ ID NO: 1204; WAN024DAG; Start 2; Stop 26
tgaatagagaagaagtaacattgtt

SEQ ID NO: 286684 - DNA, 25 bp, Artificial
  probe
  misc_feature (1)..(25): SEQ ID NO: 1204; WAN024DAG; Start 21; Stop 45
attgttaggttttgaaatcgtagcc

SEQ ID NO: 286685 - DNA, 25 bp, Artificial
  probe
  misc_feature (1)..(25): SEQ ID NO: 1204; WAN024DAG; Start 20; Stop 44
cattgttaggttttgaaatcgtagc

SEQ ID NO: 286686 - DNA, 25 bp, Artificial
  probe
  misc_feature (1)..(25): SEQ ID NO: 1204; WAN024DAG; Start 171; Stop 195
aacaagtctattgactaaggaagct

SEQ ID NO: 286687 - DNA, 25 bp, Artificial
  probe
  misc_feature (1)..(25): SEQ ID NO: 1204; WAN024DAG; Start 55; Stop 79
gatgctcgttcaaaactattggaag

SEQ ID NO: 286688 - DNA, 25 bp, Artificial
  probe
  misc_feature (1)..(25): SEQ ID NO: 1204; WAN024DAG; Start 19; Stop 43
acattgttaggttttgaaatcgtag

SEQ ID NO: 286689 - DNA, 25 bp, Artificial
  probe
  misc_feature (1)..(25): SEQ ID NO: 1204; WAN024DAG; Start 59; Stop 83
ctcgttcaaaactattggaagcctt

SEQ ID NO: 286690 - DNA, 25 bp, Artificial
  probe
  misc_feature (1)..(25): SEQ ID NO: 1204; WAN024DAG; Start 60; Stop 84
tcgttcaaaactattggaagccttg

SEQ ID NO: 286691 - DNA, 25 bp, Artificial
  probe
  misc_feature (1)..(25): SEQ ID NO: 1204; WAN024DAG; Start 22; Stop 46
ttgttaggttttgaaatcgtagcct

SEQ ID NO: 286692 - DNA, 25 bp, Artificial
  probe
  misc_feature (1)..(25): SEQ ID NO: 1204; WAN024DAG; Start 5; Stop 29
atagagaagaagtaacattgttagg

SEQ ID NO: 286693 - DNA, 25 bp, Artificial
  probe
  misc_feature (1)..(25): SEQ ID NO: 1204; WAN024DAG; Start 8; Stop 32
gagaagaagtaacattgttaggttt

SEQ ID NO: 286694 - DNA, 25 bp, Artificial
  probe
  misc_feature (1)..(25): SEQ ID NO: 1204; WAN024DAG; Start 168; Stop 192
gcaaacaagtctattgactaaggaa

SEQ ID NO: 286695 - DNA, 25 bp, Artificial
  probe
  misc_feature (1)..(25): SEQ ID NO: 1204; WAN024DAG; Start 170; Stop 194
aaacaagtctattgactaaggaagc

SEQ ID NO: 286696 - DNA, 25 bp, Artificial
  probe
  misc_feature (1)..(25): SEQ ID NO: 1204; WAN024DAG; Start 167; Stop 191
cgcaaacaagtctattgactaagga

SEQ ID NO: 286697 - DNA, 25 bp, Artificial
  probe
  misc_feature (1)..(25): SEQ ID NO: 1204; WAN024DAG; Start 18; Stop 42
aacattgttaggttttgaaatcgta

SEQ ID NO: 286698 - DNA, 25 bp, Artificial
  probe
  misc_feature (1)..(25): SEQ ID NO: 1204; WAN024DAG; Start 23; Stop 47
tgttaggttttgaaatcgtagccta

SEQ ID NO: 286699 - DNA, 25 bp, Artificial
  probe
  misc_feature (1)..(25): SEQ ID NO: 1204; WAN024DAG; Start 169; Stop 193
caaacaagtctattgactaaggaag

SEQ ID NO: 286700 - DNA, 25 bp, Artificial
  probe
  misc_feature (1)..(25): SEQ ID NO: 1204; WAN024DAG; Start 89; Stop 113
ctgctgaagctggtgattttgaaaa

SEQ ID NO: 286701 - DNA, 25 bp, Artificial
  probe
  misc_feature (1)..(25): SEQ ID NO: 1204; WAN024DAG; Start 25; Stop 49
ttaggttttgaaatcgtagcctatg

SEQ ID NO: 286702 - DNA, 25 bp, Artificial
  probe
  misc_feature (1)..(25): SEQ ID NO: 1204; WAN024DAG; Start 24; Stop 48
gttaggttttgaaatcgtagcctat

SEQ ID NO: 286703 - DNA, 25 bp, Artificial
  probe
  misc_feature (1)..(25): SEQ ID NO: 1204; WAN024DAG; Start 26; Stop 50
taggttttgaaatcgtagcctatgc

SEQ ID NO: 286704 - DNA, 25 bp, Artificial
  probe
  misc_feature (1)..(25): SEQ ID NO: 1204; WAN024DAG; Start 172; Stop 196
acaagtctattgactaaggaagctt

SEQ ID NO: 286705 - DNA, 25 bp, Artificial
  probe
  misc_feature (1)..(25): SEQ ID NO: 1204; WAN024DAG; Start 54; Stop 78
cgatgctcgttcaaaactattggaa

SEQ ID NO: 286706 - DNA, 25 bp, Artificial
  probe
  misc_feature (1)..(25): SEQ ID NO: 1204; WAN024DAG; Start 17; Stop 41
taacattgttaggttttgaaatcgt

SEQ ID NO: 286707 - DNA, 25 bp, Artificial
  probe
  misc_feature (1)..(25): SEQ ID NO: 1204; WAN024DAG; Start 56; Stop 80
atgctcgttcaaaactattggaagc

SEQ ID NO: 286708 - DNA, 25 bp, Artificial
  probe
  misc_feature (1)..(25): SEQ ID NO: 1204; WAN024DAG; Start 64; Stop 88
tcaaaactattggaagccttgaagg

SEQ ID NO: 286709 - DNA, 25 bp, Artificial
  probe
  misc_feature (1)..(25): SEQ ID NO: 1204; WAN024DAG; Start 16; Stop 40
gtaacattgttaggttttgaaatcg

SEQ ID NO: 286710 - DNA, 25 bp, Artificial
  probe
  misc_feature (1)..(25): SEQ ID NO: 1204; WAN024DAG; Start 127; Stop 151
gtagaggaagctggtagctgtattg

SEQ ID NO: 286711 - DNA, 25 bp, Artificial
  probe
  misc_feature (1)..(25): SEQ ID NO: 1204; WAN024DAG; Start 29; Stop 53
gttttgaaatcgtagcctatgctgg

SEQ ID NO: 286712 - DNA, 25 bp, Artificial
  probe
  misc_feature (1)..(25): SEQ ID NO: 1204; WAN024DAG; Start 28; Stop 52
ggttttgaaatcgtagcctatgctg

SEQ ID NO: 286713 - DNA, 25 bp, Artificial
  probe
  misc_feature (1)..(25): SEQ ID NO: 1205; WAN024GDU; Start 8; Stop 32
gagaagcacttagactatatctggt

SEQ ID NO: 286714 - DNA, 25 bp, Artificial
  probe
  misc_feature (1)..(25): SEQ ID NO: 1205; WAN024GDU; Start 7; Stop 31
agagaagcacttagactatatctgg

SEQ ID NO: 286715 - DNA, 25 bp, Artificial
  probe
  misc_feature (1)..(25): SEQ ID NO: 1205; WAN024GDU; Start 12; Stop 36
agcacttagactatatctggtaacc

SEQ ID NO: 286716 - DNA, 25 bp, Artificial
  probe
  misc_feature (1)..(25): SEQ ID NO: 1205; WAN024GDU; Start 9; Stop 33
agaagcacttagactatatctggta

SEQ ID NO: 286717 - DNA, 25 bp, Artificial
  probe
  misc_feature (1)..(25): SEQ ID NO: 1205; WAN024GDU; Start 11; Stop 35
aagcacttagactatatctggtaac

SEQ ID NO: 286718 - DNA, 25 bp, Artificial
  probe
  misc_feature (1)..(25): SEQ ID NO: 1205; WAN024GDU; Start 161; Stop 185
aacaagtcaaggaaataacagatgc

SEQ ID NO: 286719 - DNA, 25 bp, Artificial
  probe
  misc_feature (1)..(25): SEQ ID NO: 1205; WAN024GDU; Start 10; Stop 34
gaagcacttagactatatctggtaa

SEQ ID NO: 286720 - DNA, 25 bp, Artificial
  probe
  misc_feature (1)..(25): SEQ ID NO: 1205; WAN024GDU; Start 162; Stop 186
acaagtcaaggaaataacagatgct

SEQ ID NO: 286721 - DNA, 25 bp, Artificial
  probe
  misc_feature (1)..(25): SEQ ID NO: 1205; WAN024GDU; Start 163; Stop 187
caagtcaaggaaataacagatgctt

SEQ ID NO: 286722 - DNA, 25 bp, Artificial
  probe
  misc_feature (1)..(25): SEQ ID NO: 1205; WAN024GDU; Start 30; Stop 54
ggtaaccaatcgctatcaagattcc

SEQ ID NO: 286723 - DNA, 25 bp, Artificial
  probe
  misc_feature (1)..(25): SEQ ID NO: 1205; WAN024GDU; Start 170; Stop 194
aggaaataacagatgcttatcaggt

SEQ ID NO: 286724 - DNA, 25 bp, Artificial
  probe
  misc_feature (1)..(25): SEQ ID NO: 1205; WAN024GDU; Start 169; Stop 193
aaggaaataacagatgcttatcagg

SEQ ID NO: 286725 - DNA, 25 bp, Artificial
  probe
  misc_feature (1)..(25): SEQ ID NO: 1205; WAN024GDU; Start 31; Stop 55
gtaaccaatcgctatcaagattccg

SEQ ID NO: 286726 - DNA, 25 bp, Artificial
  probe
  misc_feature (1)..(25): SEQ ID NO: 1205; WAN024GDU; Start 562; Stop 586
ttgatgcaagcagaagatattgagg

SEQ ID NO: 286727 - DNA, 25 bp, Artificial
  probe
  misc_feature (1)..(25): SEQ ID NO: 1205; WAN024GDU; Start 25; Stop 49
tatctggtaaccaatcgctatcaag

SEQ ID NO: 286728 - DNA, 25 bp, Artificial
  probe
  misc_feature (1)..(25): SEQ ID NO: 1205; WAN024GDU; Start 24; Stop 48
atatctggtaaccaatcgctatcaa

SEQ ID NO: 286729 - DNA, 25 bp, Artificial
  probe
  misc_feature (1)..(25): SEQ ID NO: 1205; WAN024GDU; Start 136; Stop 160
accaatcaatattatcaactggcaa

SEQ ID NO: 286730 - DNA, 25 bp, Artificial
  probe
  misc_feature (1)..(25): SEQ ID NO: 1205; WAN024GDU; Start 135; Stop 159
aaccaatcaatattatcaactggca

SEQ ID NO: 286731 - DNA, 25 bp, Artificial
  probe
  misc_feature (1)..(25): SEQ ID NO: 1205; WAN024GDU; Start 20; Stop 44
gactatatctggtaaccaatcgcta

SEQ ID NO: 286732 - DNA, 25 bp, Artificial
  probe
  misc_feature (1)..(25): SEQ ID NO: 1205; WAN024GDU; Start 18; Stop 42
tagactatatctggtaaccaatcgc

SEQ ID NO: 286733 - DNA, 25 bp, Artificial
  probe
  misc_feature (1)..(25): SEQ ID NO: 1205; WAN024GDU; Start 164; Stop 188
aagtcaaggaaataacagatgctta

SEQ ID NO: 286734 - DNA, 25 bp, Artificial
  probe
  misc_feature (1)..(25): SEQ ID NO: 1205; WAN024GDU; Start 32; Stop 56
taaccaatcgctatcaagattccgt

SEQ ID NO: 286735 - DNA, 25 bp, Artificial
  probe
  misc_feature (1)..(25): SEQ ID NO: 1205; WAN024GDU; Start 13; Stop 37
gcacttagactatatctggtaacca

SEQ ID NO: 286736 - DNA, 25 bp, Artificial
  probe
  misc_feature (1)..(25): SEQ ID NO: 1205; WAN024GDU; Start 171; Stop 195
ggaaataacagatgcttatcaggta

SEQ ID NO: 286737 - DNA, 25 bp, Artificial
  probe
  misc_feature (1)..(25): SEQ ID NO: 1205; WAN024GDU; Start 134; Stop 158
caaccaatcaatattatcaactggc

SEQ ID NO: 286738 - DNA, 25 bp, Artificial
  probe
  misc_feature (1)..(25): SEQ ID NO: 1205; WAN024GDU; Start 29; Stop 53
tggtaaccaatcgctatcaagattc

SEQ ID NO: 286739 - DNA, 25 bp, Artificial
  probe
  misc_feature (1)..(25): SEQ ID NO: 1205; WAN024GDU; Start 28; Stop 52
ctggtaaccaatcgctatcaagatt

SEQ ID NO: 286740 - DNA, 25 bp, Artificial
  probe
  misc_feature (1)..(25): SEQ ID NO: 1205; WAN024GDU; Start 19; Stop 43
agactatatctggtaaccaatcgct

SEQ ID NO: 286741 - DNA, 25 bp, Artificial
  probe
  misc_feature (1)..(25): SEQ ID NO: 1205; WAN024GDU; Start 160; Stop 184
aaacaagtcaaggaaataacagatg

SEQ ID NO: 286742 - DNA, 25 bp, Artificial
  probe
  misc_feature (1)..(25): SEQ ID NO: 1205; WAN024GDU; Start 167; Stop 191
tcaaggaaataacagatgcttatca

SEQ ID NO: 286743 - DNA, 25 bp, Artificial
  probe
  misc_feature (1)..(25): SEQ ID NO: 1205; WAN024GDU; Start 23; Stop 47
tatatctggtaaccaatcgctatca

SEQ ID NO: 286744 - DNA, 25 bp, Artificial
  probe
  misc_feature (1)..(25): SEQ ID NO: 1205; WAN024GDU; Start 21; Stop 45
actatatctggtaaccaatcgctat

SEQ ID NO: 286745 - DNA, 25 bp, Artificial
  probe
  misc_feature (1)..(25): SEQ ID NO: 1205; WAN024GDU; Start 6; Stop 30
tagagaagcacttagactatatctg

SEQ ID NO: 286746 - DNA, 25 bp, Artificial
  probe
  misc_feature (1)..(25): SEQ ID NO: 1206; WAN024CO7; Start 381; Stop 405
agtcgttgttattgtcggtatgatt

SEQ ID NO: 286747 - DNA, 25 bp, Artificial
  probe
  misc_feature (1)..(25): SEQ ID NO: 1206; WAN024CO7; Start 374; Stop 398
ttatctcagtcgttgttattgtcgg

SEQ ID NO: 286748 - DNA, 25 bp, Artificial
  probe
  misc_feature (1)..(25): SEQ ID NO: 1206; WAN024CO7; Start 694; Stop 718
ggtggaattatgaatgtcggatatg

SEQ ID NO: 286749 - DNA, 25 bp, Artificial
  probe
  misc_feature (1)..(25): SEQ ID NO: 1206; WAN024CO7; Start 693; Stop 717
aggtggaattatgaatgtcggatat

SEQ ID NO: 286750 - DNA, 25 bp, Artificial
  probe
  misc_feature (1)..(25): SEQ ID NO: 1206; WAN024CO7; Start 692; Stop 716
caggtggaattatgaatgtcggata

SEQ ID NO: 286751 - DNA, 25 bp, Artificial
  probe
  misc_feature (1)..(25): SEQ ID NO: 1206; WAN024CO7; Start 380; Stop 404
cagtcgttgttattgtcggtatgat

SEQ ID NO: 286752 - DNA, 25 bp, Artificial
  probe
  misc_feature (1)..(25): SEQ ID NO: 1206; WAN024CO7; Start 695; Stop 719
gtggaattatgaatgtcggatatga

SEQ ID NO: 286753 - DNA, 25 bp, Artificial
  probe
  misc_feature (1)..(25): SEQ ID NO: 1206; WAN024CO7; Start 378; Stop 402
ctcagtcgttgttattgtcggtatg

SEQ ID NO: 286754 - DNA, 25 bp, Artificial
  probe
  misc_feature (1)..(25): SEQ ID NO: 1206; WAN024CO7; Start 377; Stop 401
tctcagtcgttgttattgtcggtat

SEQ ID NO: 286755 - DNA, 25 bp, Artificial
  probe
  misc_feature (1)..(25): SEQ ID NO: 1206; WAN024CO7; Start 376; Stop 400
atctcagtcgttgttattgtcggta

SEQ ID NO: 286756 - DNA, 25 bp, Artificial
  probe
  misc_feature (1)..(25): SEQ ID NO: 1206; WAN024CO7; Start 375; Stop 399
tatctcagtcgttgttattgtcggt

SEQ ID NO: 286757 - DNA, 25 bp, Artificial
  probe
  misc_feature (1)..(25): SEQ ID NO: 1206; WAN024CO7; Start 803; Stop 827
caggagactattcttactcaacagc

SEQ ID NO: 286758 - DNA, 25 bp, Artificial
  probe
  misc_feature (1)..(25): SEQ ID NO: 1206; WAN024CO7; Start 802; Stop 826
tcaggagactattcttactcaacag

SEQ ID NO: 286759 - DNA, 25 bp, Artificial
  probe
  misc_feature (1)..(25): SEQ ID NO: 1206; WAN024CO7; Start 571; Stop 595
aatgtagatccagccttagtagaag

SEQ ID NO: 286760 - DNA, 25 bp, Artificial
  probe
  misc_feature (1)..(25): SEQ ID NO: 1206; WAN024CO7; Start 807; Stop 831
agactattcttactcaacagcggtt

SEQ ID NO: 286761 - DNA, 25 bp, Artificial
  probe
  misc_feature (1)..(25): SEQ ID NO: 1206; WAN024CO7; Start 611; Stop 635
gagccaatatcttccaacgaatctg

SEQ ID NO: 286762 - DNA, 25 bp, Artificial
  probe
  misc_feature (1)..(25): SEQ ID NO: 1206; WAN024CO7; Start 696; Stop 720
tggaattatgaatgtcggatatgaa

SEQ ID NO: 286763 - DNA, 25 bp, Artificial
  probe
  misc_feature (1)..(25): SEQ ID NO: 1206; WAN024CO7; Start 801; Stop 825
atcaggagactattcttactcaaca

SEQ ID NO: 286764 - DNA, 25 bp, Artificial
  probe
  misc_feature (1)..(25): SEQ ID NO: 1206; WAN024CO7; Start 572; Stop 596
atgtagatccagccttagtagaagc

SEQ ID NO: 286765 - DNA, 25 bp, Artificial
  probe
  misc_feature (1)..(25): SEQ ID NO: 1206; WAN024CO7; Start 891; Stop 915
acgcatgaataatggtgaaggaatt

SEQ ID NO: 286766 - DNA, 25 bp, Artificial
  probe
  misc_feature (1)..(25): SEQ ID NO: 1206; WAN024CO7; Start 890; Stop 914
aacgcatgaataatggtgaaggaat

SEQ ID NO: 286767 - DNA, 25 bp, Artificial
  probe
  misc_feature (1)..(25): SEQ ID NO: 1206; WAN024CO7; Start 379; Stop 403
tcagtcgttgttattgtcggtatga

SEQ ID NO: 286768 - DNA, 25 bp, Artificial
  probe
  misc_feature (1)..(25): SEQ ID NO: 1206; WAN024CO7; Start 804; Stop 828
aggagactattcttactcaacagcg

SEQ ID NO: 286769 - DNA, 25 bp, Artificial
  probe
  misc_feature (1)..(25): SEQ ID NO: 1206; WAN024CO7; Start 798; Stop 822
tgtatcaggagactattcttactca

SEQ ID NO: 286770 - DNA, 25 bp, Artificial
  probe
  misc_feature (1)..(25): SEQ ID NO: 1206; WAN024CO7; Start 635; Stop 659
ggcacattgatattccagctcttaa

SEQ ID NO: 286771 - DNA, 25 bp, Artificial
  probe
  misc_feature (1)..(25): SEQ ID NO: 1206; WAN024CO7; Start 574; Stop 598
gtagatccagccttagtagaagcag

SEQ ID NO: 286772 - DNA, 25 bp, Artificial
  probe
  misc_feature (1)..(25): SEQ ID NO: 1206; WAN024CO7; Start 806; Stop 830
gagactattcttactcaacagcggt

SEQ ID NO: 286773 - DNA, 25 bp, Artificial
  probe
  misc_feature (1)..(25): SEQ ID NO: 1206; WAN024CO7; Start 625; Stop 649
caacgaatctggcacattgatattc

SEQ ID NO: 286774 - DNA, 25 bp, Artificial
  probe
  misc_feature (1)..(25): SEQ ID NO: 1206; WAN024CO7; Start 845; Stop 869
cagtgattaacgtagtattgcttgt

SEQ ID NO: 286775 - DNA, 25 bp, Artificial
  probe
  misc_feature (1)..(25): SEQ ID NO: 1206; WAN024CO7; Start 382; Stop 406
gtcgttgttattgtcggtatgattt

SEQ ID NO: 286776 - DNA, 25 bp, Artificial
  probe
  misc_feature (1)..(25): SEQ ID NO: 1206; WAN024CO7; Start 256; Stop 280
agtatctatggtttattgcttggct

SEQ ID NO: 286777 - DNA, 25 bp, Artificial
  probe
  misc_feature (1)..(25): SEQ ID NO: 1206; WAN024CO7; Start 373; Stop 397
tttatctcagtcgttgttattgtcg

SEQ ID NO: 286778 - DNA, 25 bp, Artificial
  probe
  misc_feature (1)..(25): SEQ ID NO: 1206; WAN024CO7; Start 257; Stop 281
gtatctatggtttattgcttggctt

SEQ ID NO: 286779 - DNA, 25 bp, Artificial
  probe
  misc_feature (1)..(25): SEQ ID NO: 1207; WAN024DHX; Start 227; Stop 251
aattgataggagcaggttcttgttc

SEQ ID NO: 286780 - DNA, 25 bp, Artificial
  probe
  misc_feature (1)..(25): SEQ ID NO: 1207; WAN024DHX; Start 226; Stop 250
gaattgataggagcaggttcttgtt

SEQ ID NO: 286781 - DNA, 25 bp, Artificial
  probe
  misc_feature (1)..(25): SEQ ID NO: 1207; WAN024DHX; Start 225; Stop 249
ggaattgataggagcaggttcttgt

SEQ ID NO: 286782 - DNA, 25 bp, Artificial
  probe
  misc_feature (1)..(25): SEQ ID NO: 1207; WAN024DHX; Start 370; Stop 394
ggtcttgttgtttgtatgagtttgt

SEQ ID NO: 286783 - DNA, 25 bp, Artificial
  probe
  misc_feature (1)..(25): SEQ ID NO: 1207; WAN024DHX; Start 369; Stop 393
tggtcttgttgtttgtatgagtttg

SEQ ID NO: 286784 - DNA, 25 bp, Artificial
  probe
  misc_feature (1)..(25): SEQ ID NO: 1207; WAN024DHX; Start 368; Stop 392
gtggtcttgttgtttgtatgagttt

SEQ ID NO: 286785 - DNA, 25 bp, Artificial
  probe
  misc_feature (1)..(25): SEQ ID NO: 1207; WAN024DHX; Start 228; Stop 252
attgataggagcaggttcttgttcg

SEQ ID NO: 286786 - DNA, 25 bp, Artificial
  probe
  misc_feature (1)..(25): SEQ ID NO: 1207; WAN024DHX; Start 75; Stop 99
gcatttgaaaggttggaggtataga

SEQ ID NO: 286787 - DNA, 25 bp, Artificial
  probe
  misc_feature (1)..(25): SEQ ID NO: 1207; WAN024DHX; Start 214; Stop 238
gatagaggttgggaattgataggag

SEQ ID NO: 286788 - DNA, 25 bp, Artificial
  probe
  misc_feature (1)..(25): SEQ ID NO: 1207; WAN024DHX; Start 213; Stop 237
agatagaggttgggaattgatagga

SEQ ID NO: 286789 - DNA, 25 bp, Artificial
  probe
  misc_feature (1)..(25): SEQ ID NO: 1207; WAN024DHX; Start 212; Stop 236
gagatagaggttgggaattgatagg

SEQ ID NO: 286790 - DNA, 25 bp, Artificial
  probe
  misc_feature (1)..(25): SEQ ID NO: 1207; WAN024DHX; Start 211; Stop 235
agagatagaggttgggaattgatag

SEQ ID NO: 286791 - DNA, 25 bp, Artificial
  probe
  misc_feature (1)..(25): SEQ ID NO: 1207; WAN024DHX; Start 2; Stop 26
tgaatagcagagtagaatttcggat

SEQ ID NO: 286792 - DNA, 25 bp, Artificial
  probe
  misc_feature (1)..(25): SEQ ID NO: 1207; WAN024DHX; Start 1; Stop 25
atgaatagcagagtagaatttcgga

SEQ ID NO: 286793 - DNA, 25 bp, Artificial
  probe
  misc_feature (1)..(25): SEQ ID NO: 1207; WAN024DHX; Start 371; Stop 395
gtcttgttgtttgtatgagtttgtt

SEQ ID NO: 286794 - DNA, 25 bp, Artificial
  probe
  misc_feature (1)..(25): SEQ ID NO: 1207; WAN024DHX; Start 76; Stop 100
catttgaaaggttggaggtatagaa

SEQ ID NO: 286795 - DNA, 25 bp, Artificial
  probe
  misc_feature (1)..(25): SEQ ID NO: 1207; WAN024DHX; Start 208; Stop 232
tttagagatagaggttgggaattga

SEQ ID NO: 286796 - DNA, 25 bp, Artificial
  probe
  misc_feature (1)..(25): SEQ ID NO: 1207; WAN024DHX; Start 209; Stop 233
ttagagatagaggttgggaattgat

SEQ ID NO: 286797 - DNA, 25 bp, Artificial
  probe
  misc_feature (1)..(25): SEQ ID NO: 1207; WAN024DHX; Start 367; Stop 391
ggtggtcttgttgtttgtatgagtt

SEQ ID NO: 286798 - DNA, 25 bp, Artificial
  probe
  misc_feature (1)..(25): SEQ ID NO: 1207; WAN024DHX; Start 3; Stop 27
gaatagcagagtagaatttcggatt

SEQ ID NO: 286799 - DNA, 25 bp, Artificial
  probe
  misc_feature (1)..(25): SEQ ID NO: 1207; WAN024DHX; Start 77; Stop 101
atttgaaaggttggaggtatagaac

SEQ ID NO: 286800 - DNA, 25 bp, Artificial
  probe
  misc_feature (1)..(25): SEQ ID NO: 1207; WAN024DHX; Start 314; Stop 338
tcaaatgggaagttatgcgatctag

SEQ ID NO: 286801 - DNA, 25 bp, Artificial
  probe
  misc_feature (1)..(25): SEQ ID NO: 1207; WAN024DHX; Start 313; Stop 337
ctcaaatgggaagttatgcgatcta

SEQ ID NO: 286802 - DNA, 25 bp, Artificial
  probe
  misc_feature (1)..(25): SEQ ID NO: 1207; WAN024DHX; Start 215; Stop 239
atagaggttgggaattgataggagc

SEQ ID NO: 286803 - DNA, 25 bp, Artificial
  probe
  misc_feature (1)..(25): SEQ ID NO: 1207; WAN024DHX; Start 372; Stop 396
tcttgttgtttgtatgagtttgttt

SEQ ID NO: 286804 - DNA, 25 bp, Artificial
  probe
  misc_feature (1)..(25): SEQ ID NO: 1207; WAN024DHX; Start 4; Stop 28
aatagcagagtagaatttcggattt

SEQ ID NO: 286805 - DNA, 25 bp, Artificial
  probe
  misc_feature (1)..(25): SEQ ID NO: 1207; WAN024DHX; Start 379; Stop 403
gtttgtatgagtttgtttagagagg

SEQ ID NO: 286806 - DNA, 25 bp, Artificial
  probe
  misc_feature (1)..(25): SEQ ID NO: 1207; WAN024DHX; Start 210; Stop 234
tagagatagaggttgggaattgata

SEQ ID NO: 286807 - DNA, 25 bp, Artificial
  probe
  misc_feature (1)..(25): SEQ ID NO: 1207; WAN024DHX; Start 380; Stop 404
tttgtatgagtttgtttagagagga

SEQ ID NO: 286808 - DNA, 25 bp, Artificial
  probe
  misc_feature (1)..(25): SEQ ID NO: 1207; WAN024DHX; Start 232; Stop 256
ataggagcaggttcttgttcgattc

SEQ ID NO: 286809 - DNA, 25 bp, Artificial
  probe
  misc_feature (1)..(25): SEQ ID NO: 1207; WAN024DHX; Start 231; Stop 255
gataggagcaggttcttgttcgatt

SEQ ID NO: 286810 - DNA, 25 bp, Artificial
  probe
  misc_feature (1)..(25): SEQ ID NO: 1207; WAN024DHX; Start 366; Stop 390
aggtggtcttgttgtttgtatgagt

SEQ ID NO: 286811 - DNA, 25 bp, Artificial
  probe
  misc_feature (1)..(25): SEQ ID NO: 1207; WAN024DHX; Start 386; Stop 410
tgagtttgtttagagaggatctttc

SEQ ID NO: 286812 - DNA, 25 bp, Artificial
  probe
  misc_feature (1)..(25): SEQ ID NO: 1208; WAN024G98; Start 66; Stop 90
catccttaccactacgaagaacaac

SEQ ID NO: 286813 - DNA, 25 bp, Artificial
  probe
  misc_feature (1)..(25): SEQ ID NO: 1208; WAN024G98; Start 67; Stop 91
atccttaccactacgaagaacaacc

SEQ ID NO: 286814 - DNA, 25 bp, Artificial
  probe
  misc_feature (1)..(25): SEQ ID NO: 1208; WAN024G98; Start 138; Stop 162
ttggacggctttcatagataatacc

SEQ ID NO: 286815 - DNA, 25 bp, Artificial
  probe
  misc_feature (1)..(25): SEQ ID NO: 1208; WAN024G98; Start 135; Stop 159
catttggacggctttcatagataat

SEQ ID NO: 286816 - DNA, 25 bp, Artificial
  probe
  misc_feature (1)..(25): SEQ ID NO: 1208; WAN024G98; Start 134; Stop 158
acatttggacggctttcatagataa

SEQ ID NO: 286817 - DNA, 25 bp, Artificial
  probe
  misc_feature (1)..(25): SEQ ID NO: 1208; WAN024G98; Start 65; Stop 89
gcatccttaccactacgaagaacaa

SEQ ID NO: 286818 - DNA, 25 bp, Artificial
  probe
  misc_feature (1)..(25): SEQ ID NO: 1208; WAN024G98; Start 150; Stop 174
catagataataccgatgacacccat

SEQ ID NO: 286819 - DNA, 25 bp, Artificial
  probe
  misc_feature (1)..(25): SEQ ID NO: 1208; WAN024G98; Start 137; Stop 161
tttggacggctttcatagataatac

SEQ ID NO: 286820 - DNA, 25 bp, Artificial
  probe
  misc_feature (1)..(25): SEQ ID NO: 1208; WAN024G98; Start 133; Stop 157
cacatttggacggctttcatagata

SEQ ID NO: 286821 - DNA, 25 bp, Artificial
  probe
  misc_feature (1)..(25): SEQ ID NO: 1208; WAN024G98; Start 152; Stop 176
tagataataccgatgacacccatag

SEQ ID NO: 286822 - DNA, 25 bp, Artificial
  probe
  misc_feature (1)..(25): SEQ ID NO: 1208; WAN024G98; Start 60; Stop 84
gataggcatccttaccactacgaag

SEQ ID NO: 286823 - DNA, 25 bp, Artificial
  probe
  misc_feature (1)..(25): SEQ ID NO: 1208; WAN024G98; Start 151; Stop 175
atagataataccgatgacacccata

SEQ ID NO: 286824 - DNA, 25 bp, Artificial
  probe
  misc_feature (1)..(25): SEQ ID NO: 1208; WAN024G98; Start 61; Stop 85
ataggcatccttaccactacgaaga

SEQ ID NO: 286825 - DNA, 25 bp, Artificial
  probe
  misc_feature (1)..(25): SEQ ID NO: 1208; WAN024G98; Start 136; Stop 160
atttggacggctttcatagataata

SEQ ID NO: 286826 - DNA, 25 bp, Artificial
  probe
  misc_feature (1)..(25): SEQ ID NO: 1208; WAN024G98; Start 153; Stop 177
agataataccgatgacacccatagc

SEQ ID NO: 286827 - DNA, 25 bp, Artificial
  probe
  misc_feature (1)..(25): SEQ ID NO: 1208; WAN024G98; Start 62; Stop 86
taggcatccttaccactacgaagaa

SEQ ID NO: 286828 - DNA, 25 bp, Artificial
  probe
  misc_feature (1)..(25): SEQ ID NO: 1208; WAN024G98; Start 59; Stop 83
tgataggcatccttaccactacgaa

SEQ ID NO: 286829 - DNA, 25 bp, Artificial
  probe
  misc_feature (1)..(25): SEQ ID NO: 1208; WAN024G98; Start 58; Stop 82
ttgataggcatccttaccactacga

SEQ ID NO: 286830 - DNA, 25 bp, Artificial
  probe
  misc_feature (1)..(25): SEQ ID NO: 1208; WAN024G98; Start 56; Stop 80
gtttgataggcatccttaccactac

SEQ ID NO: 286831 - DNA, 25 bp, Artificial
  probe
  misc_feature (1)..(25): SEQ ID NO: 1208; WAN024G98; Start 132; Stop 156
tcacatttggacggctttcatagat

SEQ ID NO: 286832 - DNA, 25 bp, Artificial
  probe
  misc_feature (1)..(25): SEQ ID NO: 1208; WAN024G98; Start 55; Stop 79
tgtttgataggcatccttaccacta

SEQ ID NO: 286833 - DNA, 25 bp, Artificial
  probe
  misc_feature (1)..(25): SEQ ID NO: 1208; WAN024G98; Start 54; Stop 78
ttgtttgataggcatccttaccact

SEQ ID NO: 286834 - DNA, 25 bp, Artificial
  probe
  misc_feature (1)..(25): SEQ ID NO: 1208; WAN024G98; Start 53; Stop 77
gttgtttgataggcatccttaccac

SEQ ID NO: 286835 - DNA, 25 bp, Artificial
  probe
  misc_feature (1)..(25): SEQ ID NO: 1208; WAN024G98; Start 49; Stop 73
atgggttgtttgataggcatcctta

SEQ ID NO: 286836 - DNA, 25 bp, Artificial
  probe
  misc_feature (1)..(25): SEQ ID NO: 1208; WAN024G98; Start 57; Stop 81
tttgataggcatccttaccactacg

SEQ ID NO: 286837 - DNA, 25 bp, Artificial
  probe
  misc_feature (1)..(25): SEQ ID NO: 1208; WAN024G98; Start 83; Stop 107
agaacaaccgcatttccactcttaa

SEQ ID NO: 286838 - DNA, 25 bp, Artificial
  probe
  misc_feature (1)..(25): SEQ ID NO: 1208; WAN024G98; Start 154; Stop 178
gataataccgatgacacccatagct

SEQ ID NO: 286839 - DNA, 25 bp, Artificial
  probe
  misc_feature (1)..(25): SEQ ID NO: 1208; WAN024G98; Start 68; Stop 92
tccttaccactacgaagaacaaccg

SEQ ID NO: 286840 - DNA, 25 bp, Artificial
  probe
  misc_feature (1)..(25): SEQ ID NO: 1208; WAN024G98; Start 148; Stop 172
ttcatagataataccgatgacaccc

SEQ ID NO: 286841 - DNA, 25 bp, Artificial
  probe
  misc_feature (1)..(25): SEQ ID NO: 1208; WAN024G98; Start 149; Stop 173
tcatagataataccgatgacaccca

SEQ ID NO: 286842 - DNA, 25 bp, Artificial
  probe
  misc_feature (1)..(25): SEQ ID NO: 1208; WAN024G98; Start 72; Stop 96
taccactacgaagaacaaccgcatt

SEQ ID NO: 286843 - DNA, 25 bp, Artificial
  probe
  misc_feature (1)..(25): SEQ ID NO: 1208; WAN024G98; Start 71; Stop 95
ttaccactacgaagaacaaccgcat

SEQ ID NO: 286844 - DNA, 25 bp, Artificial
  probe
  misc_feature (1)..(25): SEQ ID NO: 1208; WAN024G98; Start 64; Stop 88
ggcatccttaccactacgaagaaca

SEQ ID NO: 286845 - DNA, 25 bp, Artificial
  probe
  misc_feature (1)..(25): SEQ ID NO: 1209; WAN024C82; Start 23; Stop 47
ggaatgtgttgattgaatggaataa

SEQ ID NO: 286846 - DNA, 25 bp, Artificial
  probe
  misc_feature (1)..(25): SEQ ID NO: 1209; WAN024C82; Start 514; Stop 538
gaagctgcaagaactctaggtatta

SEQ ID NO: 286847 - DNA, 25 bp, Artificial
  probe
  misc_feature (1)..(25): SEQ ID NO: 1209; WAN024C82; Start 515; Stop 539
aagctgcaagaactctaggtattaa

SEQ ID NO: 286848 - DNA, 25 bp, Artificial
  probe
  misc_feature (1)..(25): SEQ ID NO: 1209; WAN024C82; Start 18; Stop 42
tttagggaatgtgttgattgaatgg

SEQ ID NO: 286849 - DNA, 25 bp, Artificial
  probe
  misc_feature (1)..(25): SEQ ID NO: 1209; WAN024C82; Start 123; Stop 147
cttgtggattgatttggataatggt

SEQ ID NO: 286850 - DNA, 25 bp, Artificial
  probe
  misc_feature (1)..(25): SEQ ID NO: 1209; WAN024C82; Start 122; Stop 146
acttgtggattgatttggataatgg

SEQ ID NO: 286851 - DNA, 25 bp, Artificial
  probe
  misc_feature (1)..(25): SEQ ID NO: 1209; WAN024C82; Start 22; Stop 46
gggaatgtgttgattgaatggaata

SEQ ID NO: 286852 - DNA, 25 bp, Artificial
  probe
  misc_feature (1)..(25): SEQ ID NO: 1209; WAN024C82; Start 20; Stop 44
tagggaatgtgttgattgaatggaa

SEQ ID NO: 286853 - DNA, 25 bp, Artificial
  probe
  misc_feature (1)..(25): SEQ ID NO: 1209; WAN024C82; Start 19; Stop 43
ttagggaatgtgttgattgaatgga

SEQ ID NO: 286854 - DNA, 25 bp, Artificial
  probe
  misc_feature (1)..(25): SEQ ID NO: 1209; WAN024C82; Start 21; Stop 45
agggaatgtgttgattgaatggaat

SEQ ID NO: 286855 - DNA, 25 bp, Artificial
  probe
  misc_feature (1)..(25): SEQ ID NO: 1209; WAN024C82; Start 15; Stop 39
tgatttagggaatgtgttgattgaa

SEQ ID NO: 286856 - DNA, 25 bp, Artificial
  probe
  misc_feature (1)..(25): SEQ ID NO: 1209; WAN024C82; Start 14; Stop 38
ttgatttagggaatgtgttgattga

SEQ ID NO: 286857 - DNA, 25 bp, Artificial
  probe
  misc_feature (1)..(25): SEQ ID NO: 1209; WAN024C82; Start 186; Stop 210
tgaaatgggacatcaatatcaggat

SEQ ID NO: 286858 - DNA, 25 bp, Artificial
  probe
  misc_feature (1)..(25): SEQ ID NO: 1209; WAN024C82; Start 185; Stop 209
atgaaatgggacatcaatatcagga

SEQ ID NO: 286859 - DNA, 25 bp, Artificial
  probe
  misc_feature (1)..(25): SEQ ID NO: 1209; WAN024C82; Start 125; Stop 149
tgtggattgatttggataatggtaa

SEQ ID NO: 286860 - DNA, 25 bp, Artificial
  probe
  misc_feature (1)..(25): SEQ ID NO: 1209; WAN024C82; Start 124; Stop 148
ttgtggattgatttggataatggta

SEQ ID NO: 286861 - DNA, 25 bp, Artificial
  probe
  misc_feature (1)..(25): SEQ ID NO: 1209; WAN024C82; Start 513; Stop 537
agaagctgcaagaactctaggtatt

SEQ ID NO: 286862 - DNA, 25 bp, Artificial
  probe
  misc_feature (1)..(25): SEQ ID NO: 1209; WAN024C82; Start 520; Stop 544
gcaagaactctaggtattaaagcat

SEQ ID NO: 286863 - DNA, 25 bp, Artificial
  probe
  misc_feature (1)..(25): SEQ ID NO: 1209; WAN024C82; Start 191; Stop 215
tgggacatcaatatcaggatcaaat

SEQ ID NO: 286864 - DNA, 25 bp, Artificial
  probe
  misc_feature (1)..(25): SEQ ID NO: 1209; WAN024C82; Start 117; Stop 141
atctaacttgtggattgatttggat

SEQ ID NO: 286865 - DNA, 25 bp, Artificial
  probe
  misc_feature (1)..(25): SEQ ID NO: 1209; WAN024C82; Start 13; Stop 37
tttgatttagggaatgtgttgattg

SEQ ID NO: 286866 - DNA, 25 bp, Artificial
  probe
  misc_feature (1)..(25): SEQ ID NO: 1209; WAN024C82; Start 190; Stop 214
atgggacatcaatatcaggatcaaa

SEQ ID NO: 286867 - DNA, 25 bp, Artificial
  probe
  misc_feature (1)..(25): SEQ ID NO: 1209; WAN024C82; Start 189; Stop 213
aatgggacatcaatatcaggatcaa

SEQ ID NO: 286868 - DNA, 25 bp, Artificial
  probe
  misc_feature (1)..(25): SEQ ID NO: 1209; WAN024C82; Start 188; Stop 212
aaatgggacatcaatatcaggatca

SEQ ID NO: 286869 - DNA, 25 bp, Artificial
  probe
  misc_feature (1)..(25): SEQ ID NO: 1209; WAN024C82; Start 540; Stop 564
agcatttcaaattaaagagcgtaaa

SEQ ID NO: 286870 - DNA, 25 bp, Artificial
  probe
  misc_feature (1)..(25): SEQ ID NO: 1209; WAN024C82; Start 539; Stop 563
aagcatttcaaattaaagagcgtaa

SEQ ID NO: 286871 - DNA, 25 bp, Artificial
  probe
  misc_feature (1)..(25): SEQ ID NO: 1209; WAN024C82; Start 538; Stop 562
aaagcatttcaaattaaagagcgta

SEQ ID NO: 286872 - DNA, 25 bp, Artificial
  probe
  misc_feature (1)..(25): SEQ ID NO: 1209; WAN024C82; Start 537; Stop 561
taaagcatttcaaattaaagagcgt

SEQ ID NO: 286873 - DNA, 25 bp, Artificial
  probe
  misc_feature (1)..(25): SEQ ID NO: 1209; WAN024C82; Start 121; Stop 145
aacttgtggattgatttggataatg

SEQ ID NO: 286874 - DNA, 25 bp, Artificial
  probe
  misc_feature (1)..(25): SEQ ID NO: 1209; WAN024C82; Start 17; Stop 41
atttagggaatgtgttgattgaatg

SEQ ID NO: 286875 - DNA, 25 bp, Artificial
  probe
  misc_feature (1)..(25): SEQ ID NO: 1209; WAN024C82; Start 187; Stop 211
gaaatgggacatcaatatcaggatc

SEQ ID NO: 286876 - DNA, 25 bp, Artificial
  probe
  misc_feature (1)..(25): SEQ ID NO: 1209; WAN024C82; Start 192; Stop 216
gggacatcaatatcaggatcaaatt

SEQ ID NO: 286877 - DNA, 25 bp, Artificial
  probe
  misc_feature (1)..(25): SEQ ID NO: 1209; WAN024C82; Start 541; Stop 565
gcatttcaaattaaagagcgtaaag

SEQ ID NO: 286878 - DNA, 25 bp, Artificial
  probe
  misc_feature (1)..(25): SEQ ID NO: 1210; WAN024DLK; Start 457; Stop 481
ttatatccaagtcgcatagttgttg

SEQ ID NO: 286879 - DNA, 25 bp, Artificial
  probe
  misc_feature (1)..(25): SEQ ID NO: 1210; WAN024DLK; Start 481; Stop 505
ggagatgagacagttgaaggaagaa

SEQ ID NO: 286880 - DNA, 25 bp, Artificial
  probe
  misc_feature (1)..(25): SEQ ID NO: 1210; WAN024DLK; Start 472; Stop 496
atagttgttggagatgagacagttg

SEQ ID NO: 286881 - DNA, 25 bp, Artificial
  probe
  misc_feature (1)..(25): SEQ ID NO: 1210; WAN024DLK; Start 471; Stop 495
catagttgttggagatgagacagtt

SEQ ID NO: 286882 - DNA, 25 bp, Artificial
  probe
  misc_feature (1)..(25): SEQ ID NO: 1210; WAN024DLK; Start 576; Stop 600
tcctactgaagcagaagcaattaag

SEQ ID NO: 286883 - DNA, 25 bp, Artificial
  probe
  misc_feature (1)..(25): SEQ ID NO: 1210; WAN024DLK; Start 575; Stop 599
ctcctactgaagcagaagcaattaa

SEQ ID NO: 286884 - DNA, 25 bp, Artificial
  probe
  misc_feature (1)..(25): SEQ ID NO: 1210; WAN024DLK; Start 479; Stop 503
ttggagatgagacagttgaaggaag

SEQ ID NO: 286885 - DNA, 25 bp, Artificial
  probe
  misc_feature (1)..(25): SEQ ID NO: 1210; WAN024DLK; Start 473; Stop 497
tagttgttggagatgagacagttga

SEQ ID NO: 286886 - DNA, 25 bp, Artificial
  probe
  misc_feature (1)..(25): SEQ ID NO: 1210; WAN024DLK; Start 478; Stop 502
gttggagatgagacagttgaaggaa

SEQ ID NO: 286887 - DNA, 25 bp, Artificial
  probe
  misc_feature (1)..(25): SEQ ID NO: 1210; WAN024DLK; Start 574; Stop 598
tctcctactgaagcagaagcaatta

SEQ ID NO: 286888 - DNA, 25 bp, Artificial
  probe
  misc_feature (1)..(25): SEQ ID NO: 1210; WAN024DLK; Start 475; Stop 499
gttgttggagatgagacagttgaag

SEQ ID NO: 286889 - DNA, 25 bp, Artificial
  probe
  misc_feature (1)..(25): SEQ ID NO: 1210; WAN024DLK; Start 474; Stop 498
agttgttggagatgagacagttgaa

SEQ ID NO: 286890 - DNA, 25 bp, Artificial
  probe
  misc_feature (1)..(25): SEQ ID NO: 1210; WAN024DLK; Start 887; Stop 911
aacgaaagccaaagatagtaggaat

SEQ ID NO: 286891 - DNA, 25 bp, Artificial
  probe
  misc_feature (1)..(25): SEQ ID NO: 1210; WAN024DLK; Start 480; Stop 504
tggagatgagacagttgaaggaaga

SEQ ID NO: 286892 - DNA, 25 bp, Artificial
  probe
  misc_feature (1)..(25): SEQ ID NO: 1210; WAN024DLK; Start 888; Stop 912
acgaaagccaaagatagtaggaata

SEQ ID NO: 286893 - DNA, 25 bp, Artificial
  probe
  misc_feature (1)..(25): SEQ ID NO: 1210; WAN024DLK; Start 482; Stop 506
gagatgagacagttgaaggaagaaa

SEQ ID NO: 286894 - DNA, 25 bp, Artificial
  probe
  misc_feature (1)..(25): SEQ ID NO: 1210; WAN024DLK; Start 819; Stop 843
cccagtgatagaagcgattgatatt

SEQ ID NO: 286895 - DNA, 25 bp, Artificial
  probe
  misc_feature (1)..(25): SEQ ID NO: 1210; WAN024DLK; Start 239; Stop 263
cgcttccgacagattatgatgagaa

SEQ ID NO: 286896 - DNA, 25 bp, Artificial
  probe
  misc_feature (1)..(25): SEQ ID NO: 1210; WAN024DLK; Start 886; Stop 910
gaacgaaagccaaagatagtaggaa

SEQ ID NO: 286897 - DNA, 25 bp, Artificial
  probe
  misc_feature (1)..(25): SEQ ID NO: 1210; WAN024DLK; Start 465; Stop 489
aagtcgcatagttgttggagatgag

SEQ ID NO: 286898 - DNA, 25 bp, Artificial
  probe
  misc_feature (1)..(25): SEQ ID NO: 1210; WAN024DLK; Start 820; Stop 844
ccagtgatagaagcgattgatattt

SEQ ID NO: 286899 - DNA, 25 bp, Artificial
  probe
  misc_feature (1)..(25): SEQ ID NO: 1210; WAN024DLK; Start 748; Stop 772
tttggatttggaggatattgtcttc

SEQ ID NO: 286900 - DNA, 25 bp, Artificial
  probe
  misc_feature (1)..(25): SEQ ID NO: 1210; WAN024DLK; Start 577; Stop 601
cctactgaagcagaagcaattaagc

SEQ ID NO: 286901 - DNA, 25 bp, Artificial
  probe
  misc_feature (1)..(25): SEQ ID NO: 1210; WAN024DLK; Start 2; Stop 26
tgaatatagcagtaattggtttggg

SEQ ID NO: 286902 - DNA, 25 bp, Artificial
  probe
  misc_feature (1)..(25): SEQ ID NO: 1210; WAN024DLK; Start 470; Stop 494
gcatagttgttggagatgagacagt

SEQ ID NO: 286903 - DNA, 25 bp, Artificial
  probe
  misc_feature (1)..(25): SEQ ID NO: 1210; WAN024DLK; Start 240; Stop 264
gcttccgacagattatgatgagaaa

SEQ ID NO: 286904 - DNA, 25 bp, Artificial
  probe
  misc_feature (1)..(25): SEQ ID NO: 1210; WAN024DLK; Start 889; Stop 913
cgaaagccaaagatagtaggaatat

SEQ ID NO: 286905 - DNA, 25 bp, Artificial
  probe
  misc_feature (1)..(25): SEQ ID NO: 1210; WAN024DLK; Start 476; Stop 500
ttgttggagatgagacagttgaagg

SEQ ID NO: 286906 - DNA, 25 bp, Artificial
  probe
  misc_feature (1)..(25): SEQ ID NO: 1210; WAN024DLK; Start 564; Stop 588
tatgttagtttctcctactgaagca

SEQ ID NO: 286907 - DNA, 25 bp, Artificial
  probe
  misc_feature (1)..(25): SEQ ID NO: 1210; WAN024DLK; Start 464; Stop 488
caagtcgcatagttgttggagatga

SEQ ID NO: 286908 - DNA, 25 bp, Artificial
  probe
  misc_feature (1)..(25): SEQ ID NO: 1210; WAN024DLK; Start 606; Stop 630
ttctaacacattcttagctctccgt

SEQ ID NO: 286909 - DNA, 25 bp, Artificial
  probe
  misc_feature (1)..(25): SEQ ID NO: 1210; WAN024DLK; Start 456; Stop 480
tttatatccaagtcgcatagttgtt

SEQ ID NO: 286910 - DNA, 25 bp, Artificial
  probe
  misc_feature (1)..(25): SEQ ID NO: 1210; WAN024DLK; Start 565; Stop 589
atgttagtttctcctactgaagcag

SEQ ID NO: 286911 - DNA, 25 bp, Artificial
  probe
  misc_feature (1)..(25): SEQ ID NO: 1211; WAN024CDD; Start 438; Stop 462
aatgtttaatgctggagttatgctt

SEQ ID NO: 286912 - DNA, 25 bp, Artificial
  probe
  misc_feature (1)..(25): SEQ ID NO: 1211; WAN024CDD; Start 700; Stop 724
aatgccagagaacgtatagtcttac

SEQ ID NO: 286913 - DNA, 25 bp, Artificial
  probe
  misc_feature (1)..(25): SEQ ID NO: 1211; WAN024CDD; Start 440; Stop 464
tgtttaatgctggagttatgcttat

SEQ ID NO: 286914 - DNA, 25 bp, Artificial
  probe
  misc_feature (1)..(25): SEQ ID NO: 1211; WAN024CDD; Start 439; Stop 463
atgtttaatgctggagttatgctta

SEQ ID NO: 286915 - DNA, 25 bp, Artificial
  probe
  misc_feature (1)..(25): SEQ ID NO: 1211; WAN024CDD; Start 441; Stop 465
gtttaatgctggagttatgcttatt

SEQ ID NO: 286916 - DNA, 25 bp, Artificial
  probe
  misc_feature (1)..(25): SEQ ID NO: 1211; WAN024CDD; Start 273; Stop 297
tccatcttcaatgagtaaagttctt

SEQ ID NO: 286917 - DNA, 25 bp, Artificial
  probe
  misc_feature (1)..(25): SEQ ID NO: 1211; WAN024CDD; Start 445; Stop 469
aatgctggagttatgcttattaatt

SEQ ID NO: 286918 - DNA, 25 bp, Artificial
  probe
  misc_feature (1)..(25): SEQ ID NO: 1211; WAN024CDD; Start 399; Stop 423
agaatacaagcaggtgttgggtata

SEQ ID NO: 286919 - DNA, 25 bp, Artificial
  probe
  misc_feature (1)..(25): SEQ ID NO: 1211; WAN024CDD; Start 435; Stop 459
gccaatgtttaatgctggagttatg

SEQ ID NO: 286920 - DNA, 25 bp, Artificial
  probe
  misc_feature (1)..(25): SEQ ID NO: 1211; WAN024CDD; Start 713; Stop 737
gtatagtcttacgacatttcacaac

SEQ ID NO: 286921 - DNA, 25 bp, Artificial
  probe
  misc_feature (1)..(25): SEQ ID NO: 1211; WAN024CDD; Start 699; Stop 723
aaatgccagagaacgtatagtctta

SEQ ID NO: 286922 - DNA, 25 bp, Artificial
  probe
  misc_feature (1)..(25): SEQ ID NO: 1211; WAN024CDD; Start 397; Stop 421
aaagaatacaagcaggtgttgggta

SEQ ID NO: 286923 - DNA, 25 bp, Artificial
  probe
  misc_feature (1)..(25): SEQ ID NO: 1211; WAN024CDD; Start 396; Stop 420
taaagaatacaagcaggtgttgggt

SEQ ID NO: 286924 - DNA, 25 bp, Artificial
  probe
  misc_feature (1)..(25): SEQ ID NO: 1211; WAN024CDD; Start 274; Stop 298
ccatcttcaatgagtaaagttcttt

SEQ ID NO: 286925 - DNA, 25 bp, Artificial
  probe
  misc_feature (1)..(25): SEQ ID NO: 1211; WAN024CDD; Start 714; Stop 738
tatagtcttacgacatttcacaact

SEQ ID NO: 286926 - DNA, 25 bp, Artificial
  probe
  misc_feature (1)..(25): SEQ ID NO: 1211; WAN024CDD; Start 398; Stop 422
aagaatacaagcaggtgttgggtat

SEQ ID NO: 286927 - DNA, 25 bp, Artificial
  probe
  misc_feature (1)..(25): SEQ ID NO: 1211; WAN024CDD; Start 716; Stop 740
tagtcttacgacatttcacaactag

SEQ ID NO: 286928 - DNA, 25 bp, Artificial
  probe
  misc_feature (1)..(25): SEQ ID NO: 1211; WAN024CDD; Start 766; Stop 790
gaaggcagtaatgttgcacatatag

SEQ ID NO: 286929 - DNA, 25 bp, Artificial
  probe
  misc_feature (1)..(25): SEQ ID NO: 1211; WAN024CDD; Start 767; Stop 791
aaggcagtaatgttgcacatataga

SEQ ID NO: 286930 - DNA, 25 bp, Artificial
  probe
  misc_feature (1)..(25): SEQ ID NO: 1211; WAN024CDD; Start 765; Stop 789
agaaggcagtaatgttgcacatata

SEQ ID NO: 286931 - DNA, 25 bp, Artificial
  probe
  misc_feature (1)..(25): SEQ ID NO: 1211; WAN024CDD; Start 426; Stop 450
aattgacaagccaatgtttaatgct

SEQ ID NO: 286932 - DNA, 25 bp, Artificial
  probe
  misc_feature (1)..(25): SEQ ID NO: 1211; WAN024CDD; Start 771; Stop 795
cagtaatgttgcacatatagaccaa

SEQ ID NO: 286933 - DNA, 25 bp, Artificial
  probe
  misc_feature (1)..(25): SEQ ID NO: 1211; WAN024CDD; Start 768; Stop 792
aggcagtaatgttgcacatatagac

SEQ ID NO: 286934 - DNA, 25 bp, Artificial
  probe
  misc_feature (1)..(25): SEQ ID NO: 1211; WAN024CDD; Start 764; Stop 788
aagaaggcagtaatgttgcacatat

SEQ ID NO: 286935 - DNA, 25 bp, Artificial
  probe
  misc_feature (1)..(25): SEQ ID NO: 1211; WAN024CDD; Start 479; Stop 503
ggagaaataataacgtcgaagaaag

SEQ ID NO: 286936 - DNA, 25 bp, Artificial
  probe
  misc_feature (1)..(25): SEQ ID NO: 1211; WAN024CDD; Start 444; Stop 468
taatgctggagttatgcttattaat

SEQ ID NO: 286937 - DNA, 25 bp, Artificial
  probe
  misc_feature (1)..(25): SEQ ID NO: 1211; WAN024CDD; Start 434; Stop 458
agccaatgtttaatgctggagttat

SEQ ID NO: 286938 - DNA, 25 bp, Artificial
  probe
  misc_feature (1)..(25): SEQ ID NO: 1211; WAN024CDD; Start 770; Stop 794
gcagtaatgttgcacatatagacca

SEQ ID NO: 286939 - DNA, 25 bp, Artificial
  probe
  misc_feature (1)..(25): SEQ ID NO: 1211; WAN024CDD; Start 427; Stop 451
attgacaagccaatgtttaatgctg

SEQ ID NO: 286940 - DNA, 25 bp, Artificial
  probe
  misc_feature (1)..(25): SEQ ID NO: 1211; WAN024CDD; Start 433; Stop 457
aagccaatgtttaatgctggagtta

SEQ ID NO: 286941 - DNA, 25 bp, Artificial
  probe
  misc_feature (1)..(25): SEQ ID NO: 1211; WAN024CDD; Start 369; Stop 393
tctctatggggtgaatgatactttt

SEQ ID NO: 286942 - DNA, 25 bp, Artificial
  probe
  misc_feature (1)..(25): SEQ ID NO: 1211; WAN024CDD; Start 715; Stop 739
atagtcttacgacatttcacaacta

SEQ ID NO: 286943 - DNA, 25 bp, Artificial
  probe
  misc_feature (1)..(25): SEQ ID NO: 1211; WAN024CDD; Start 357; Stop 381
taagggtaaaattctctatggggtg

SEQ ID NO: 286944 - DNA, 25 bp, Artificial
  probe
  misc_feature (1)..(25): SEQ ID NO: 1212; WAN024CD3; Start 89; Stop 113
ctgaggaagtcttgattagtgatga

SEQ ID NO: 286945 - DNA, 25 bp, Artificial
  probe
  misc_feature (1)..(25): SEQ ID NO: 1212; WAN024CD3; Start 868; Stop 892
ttgtattggtcgttcaggtcatata

SEQ ID NO: 286946 - DNA, 25 bp, Artificial
  probe
  misc_feature (1)..(25): SEQ ID NO: 1212; WAN024CD3; Start 92; Stop 116
aggaagtcttgattagtgatgatgc

SEQ ID NO: 286947 - DNA, 25 bp, Artificial
  probe
  misc_feature (1)..(25): SEQ ID NO: 1212; WAN024CD3; Start 863; Stop 887
ataagttgtattggtcgttcaggtc

SEQ ID NO: 286948 - DNA, 25 bp, Artificial
  probe
  misc_feature (1)..(25): SEQ ID NO: 1212; WAN024CD3; Start 861; Stop 885
tcataagttgtattggtcgttcagg

SEQ ID NO: 286949 - DNA, 25 bp, Artificial
  probe
  misc_feature (1)..(25): SEQ ID NO: 1212; WAN024CD3; Start 860; Stop 884
atcataagttgtattggtcgttcag

SEQ ID NO: 286950 - DNA, 25 bp, Artificial
  probe
  misc_feature (1)..(25): SEQ ID NO: 1212; WAN024CD3; Start 90; Stop 114
tgaggaagtcttgattagtgatgat

SEQ ID NO: 286951 - DNA, 25 bp, Artificial
  probe
  misc_feature (1)..(25): SEQ ID NO: 1212; WAN024CD3; Start 867; Stop 891
gttgtattggtcgttcaggtcatat

SEQ ID NO: 286952 - DNA, 25 bp, Artificial
  probe
  misc_feature (1)..(25): SEQ ID NO: 1212; WAN024CD3; Start 91; Stop 115
gaggaagtcttgattagtgatgatg

SEQ ID NO: 286953 - DNA, 25 bp, Artificial
  probe
  misc_feature (1)..(25): SEQ ID NO: 1212; WAN024CD3; Start 862; Stop 886
cataagttgtattggtcgttcaggt

SEQ ID NO: 286954 - DNA, 25 bp, Artificial
  probe
  misc_feature (1)..(25): SEQ ID NO: 1212; WAN024CD3; Start 88; Stop 112
gctgaggaagtcttgattagtgatg

SEQ ID NO: 286955 - DNA, 25 bp, Artificial
  probe
  misc_feature (1)..(25): SEQ ID NO: 1212; WAN024CD3; Start 419; Stop 443
ataatagtgaggcagtgtatcaacc

SEQ ID NO: 286956 - DNA, 25 bp, Artificial
  probe
  misc_feature (1)..(25): SEQ ID NO: 1212; WAN024CD3; Start 373; Stop 397
tatgttggtgatggtgtcaagatta

SEQ ID NO: 286957 - DNA, 25 bp, Artificial
  probe
  misc_feature (1)..(25): SEQ ID NO: 1212; WAN024CD3; Start 87; Stop 111
tgctgaggaagtcttgattagtgat

SEQ ID NO: 286958 - DNA, 25 bp, Artificial
  probe
  misc_feature (1)..(25): SEQ ID NO: 1212; WAN024CD3; Start 374; Stop 398
atgttggtgatggtgtcaagattaa

SEQ ID NO: 286959 - DNA, 25 bp, Artificial
  probe
  misc_feature (1)..(25): SEQ ID NO: 1212; WAN024CD3; Start 372; Stop 396
ttatgttggtgatggtgtcaagatt

SEQ ID NO: 286960 - DNA, 25 bp, Artificial
  probe
  misc_feature (1)..(25): SEQ ID NO: 1212; WAN024CD3; Start 86; Stop 110
ttgctgaggaagtcttgattagtga

SEQ ID NO: 286961 - DNA, 25 bp, Artificial
  probe
  misc_feature (1)..(25): SEQ ID NO: 1212; WAN024CD3; Start 85; Stop 109
cttgctgaggaagtcttgattagtg

SEQ ID NO: 286962 - DNA, 25 bp, Artificial
  probe
  misc_feature (1)..(25): SEQ ID NO: 1212; WAN024CD3; Start 866; Stop 890
agttgtattggtcgttcaggtcata

SEQ ID NO: 286963 - DNA, 25 bp, Artificial
  probe
  misc_feature (1)..(25): SEQ ID NO: 1212; WAN024CD3; Start 869; Stop 893
tgtattggtcgttcaggtcatatat

SEQ ID NO: 286964 - DNA, 25 bp, Artificial
  probe
  misc_feature (1)..(25): SEQ ID NO: 1212; WAN024CD3; Start 873; Stop 897
ttggtcgttcaggtcatatattact

SEQ ID NO: 286965 - DNA, 25 bp, Artificial
  probe
  misc_feature (1)..(25): SEQ ID NO: 1212; WAN024CD3; Start 417; Stop 441
ggataatagtgaggcagtgtatcaa

SEQ ID NO: 286966 - DNA, 25 bp, Artificial
  probe
  misc_feature (1)..(25): SEQ ID NO: 1212; WAN024CD3; Start 415; Stop 439
ttggataatagtgaggcagtgtatc

SEQ ID NO: 286967 - DNA, 25 bp, Artificial
  probe
  misc_feature (1)..(25): SEQ ID NO: 1212; WAN024CD3; Start 864; Stop 888
taagttgtattggtcgttcaggtca

SEQ ID NO: 286968 - DNA, 25 bp, Artificial
  probe
  misc_feature (1)..(25): SEQ ID NO: 1212; WAN024CD3; Start 859; Stop 883
tatcataagttgtattggtcgttca

SEQ ID NO: 286969 - DNA, 25 bp, Artificial
  probe
  misc_feature (1)..(25): SEQ ID NO: 1212; WAN024CD3; Start 420; Stop 444
taatagtgaggcagtgtatcaacca

SEQ ID NO: 286970 - DNA, 25 bp, Artificial
  probe
  misc_feature (1)..(25): SEQ ID NO: 1212; WAN024CD3; Start 416; Stop 440
tggataatagtgaggcagtgtatca

SEQ ID NO: 286971 - DNA, 25 bp, Artificial
  probe
  misc_feature (1)..(25): SEQ ID NO: 1212; WAN024CD3; Start 418; Stop 442
gataatagtgaggcagtgtatcaac

SEQ ID NO: 286972 - DNA, 25 bp, Artificial
  probe
  misc_feature (1)..(25): SEQ ID NO: 1212; WAN024CD3; Start 872; Stop 896
attggtcgttcaggtcatatattac

SEQ ID NO: 286973 - DNA, 25 bp, Artificial
  probe
  misc_feature (1)..(25): SEQ ID NO: 1212; WAN024CD3; Start 870; Stop 894
gtattggtcgttcaggtcatatatt

SEQ ID NO: 286974 - DNA, 25 bp, Artificial
  probe
  misc_feature (1)..(25): SEQ ID NO: 1212; WAN024CD3; Start 197; Stop 221
aagagaatcaaggatggaagaataa

SEQ ID NO: 286975 - DNA, 25 bp, Artificial
  probe
  misc_feature (1)..(25): SEQ ID NO: 1212; WAN024CD3; Start 865; Stop 889
aagttgtattggtcgttcaggtcat

SEQ ID NO: 286976 - DNA, 25 bp, Artificial
  probe
  misc_feature (1)..(25): SEQ ID NO: 1212; WAN024CD3; Start 421; Stop 445
aatagtgaggcagtgtatcaaccaa

SEQ ID NO: 286977 - DNA, 25 bp, Artificial
  probe
  misc_feature (1)..(25): SEQ ID NO: 1213; WAN024CSP; Start 1005; Stop 1029
tactactatgatgctctatgctcag

SEQ ID NO: 286978 - DNA, 25 bp, Artificial
  probe
  misc_feature (1)..(25): SEQ ID NO: 1213; WAN024CSP; Start 1004; Stop 1028
atactactatgatgctctatgctca

SEQ ID NO: 286979 - DNA, 25 bp, Artificial
  probe
  misc_feature (1)..(25): SEQ ID NO: 1213; WAN024CSP; Start 335; Stop 359
aacttactacgcctattcttcaaca

SEQ ID NO: 286980 - DNA, 25 bp, Artificial
  probe
  misc_feature (1)..(25): SEQ ID NO: 1213; WAN024CSP; Start 336; Stop 360
acttactacgcctattcttcaacag

SEQ ID NO: 286981 - DNA, 25 bp, Artificial
  probe
  misc_feature (1)..(25): SEQ ID NO: 1213; WAN024CSP; Start 187; Stop 211
gacaagccgacaattacaacatata

SEQ ID NO: 286982 - DNA, 25 bp, Artificial
  probe
  misc_feature (1)..(25): SEQ ID NO: 1213; WAN024CSP; Start 909; Stop 933
atatgcttatgcttgtaacttacgc

SEQ ID NO: 286983 - DNA, 25 bp, Artificial
  probe
  misc_feature (1)..(25): SEQ ID NO: 1213; WAN024CSP; Start 186; Stop 210
agacaagccgacaattacaacatat

SEQ ID NO: 286984 - DNA, 25 bp, Artificial
  probe
  misc_feature (1)..(25): SEQ ID NO: 1213; WAN024CSP; Start 188; Stop 212
acaagccgacaattacaacatataa

SEQ ID NO: 286985 - DNA, 25 bp, Artificial
  probe
  misc_feature (1)..(25): SEQ ID NO: 1213; WAN024CSP; Start 185; Stop 209
aagacaagccgacaattacaacata

SEQ ID NO: 286986 - DNA, 25 bp, Artificial
  probe
  misc_feature (1)..(25): SEQ ID NO: 1213; WAN024CSP; Start 1001; Stop 1025
cacatactactatgatgctctatgc

SEQ ID NO: 286987 - DNA, 25 bp, Artificial
  probe
  misc_feature (1)..(25): SEQ ID NO: 1213; WAN024CSP; Start 1002; Stop 1026
acatactactatgatgctctatgct

SEQ ID NO: 286988 - DNA, 25 bp, Artificial
  probe
  misc_feature (1)..(25): SEQ ID NO: 1213; WAN024CSP; Start 337; Stop 361
cttactacgcctattcttcaacagc

SEQ ID NO: 286989 - DNA, 25 bp, Artificial
  probe
  misc_feature (1)..(25): SEQ ID NO: 1213; WAN024CSP; Start 679; Stop 703
ctggctcttgaatggtctgatattg

SEQ ID NO: 286990 - DNA, 25 bp, Artificial
  probe
  misc_feature (1)..(25): SEQ ID NO: 1213; WAN024CSP; Start 678; Stop 702
tctggctcttgaatggtctgatatt

SEQ ID NO: 286991 - DNA, 25 bp, Artificial
  probe
  misc_feature (1)..(25): SEQ ID NO: 1213; WAN024CSP; Start 1010; Stop 1034
ctatgatgctctatgctcaggttag

SEQ ID NO: 286992 - DNA, 25 bp, Artificial
  probe
  misc_feature (1)..(25): SEQ ID NO: 1213; WAN024CSP; Start 238; Stop 262
agttacaagaatacagttaagccaa

SEQ ID NO: 286993 - DNA, 25 bp, Artificial
  probe
  misc_feature (1)..(25): SEQ ID NO: 1213; WAN024CSP; Start 1009; Stop 1033
actatgatgctctatgctcaggtta

SEQ ID NO: 286994 - DNA, 25 bp, Artificial
  probe
  misc_feature (1)..(25): SEQ ID NO: 1213; WAN024CSP; Start 1008; Stop 1032
tactatgatgctctatgctcaggtt

SEQ ID NO: 286995 - DNA, 25 bp, Artificial
  probe
  misc_feature (1)..(25): SEQ ID NO: 1213; WAN024CSP; Start 680; Stop 704
tggctcttgaatggtctgatattga

SEQ ID NO: 286996 - DNA, 25 bp, Artificial
  probe
  misc_feature (1)..(25): SEQ ID NO: 1213; WAN024CSP; Start 1003; Stop 1027
catactactatgatgctctatgctc

SEQ ID NO: 286997 - DNA, 25 bp, Artificial
  probe
  misc_feature (1)..(25): SEQ ID NO: 1213; WAN024CSP; Start 191; Stop 215
agccgacaattacaacatataatga

SEQ ID NO: 286998 - DNA, 25 bp, Artificial
  probe
  misc_feature (1)..(25): SEQ ID NO: 1213; WAN024CSP; Start 1007; Stop 1031
ctactatgatgctctatgctcaggt

SEQ ID NO: 286999 - DNA, 25 bp, Artificial
  probe
  misc_feature (1)..(25): SEQ ID NO: 1213; WAN024CSP; Start 1006; Stop 1030
actactatgatgctctatgctcagg

SEQ ID NO: 287000 - DNA, 25 bp, Artificial
  probe
  misc_feature (1)..(25): SEQ ID NO: 1213; WAN024CSP; Start 677; Stop 701
ctctggctcttgaatggtctgatat

SEQ ID NO: 287001 - DNA, 25 bp, Artificial
  probe
  misc_feature (1)..(25): SEQ ID NO: 1213; WAN024CSP; Start 193; Stop 217
ccgacaattacaacatataatgagc

SEQ ID NO: 287002 - DNA, 25 bp, Artificial
  probe
  misc_feature (1)..(25): SEQ ID NO: 1213; WAN024CSP; Start 192; Stop 216
gccgacaattacaacatataatgag

SEQ ID NO: 287003 - DNA, 25 bp, Artificial
  probe
  misc_feature (1)..(25): SEQ ID NO: 1213; WAN024CSP; Start 339; Stop 363
tactacgcctattcttcaacagcaa

SEQ ID NO: 287004 - DNA, 25 bp, Artificial
  probe
  misc_feature (1)..(25): SEQ ID NO: 1213; WAN024CSP; Start 338; Stop 362
ttactacgcctattcttcaacagca

SEQ ID NO: 287005 - DNA, 25 bp, Artificial
  probe
  misc_feature (1)..(25): SEQ ID NO: 1213; WAN024CSP; Start 711; Stop 735
aagcggtgttatcagcatcaataag

SEQ ID NO: 287006 - DNA, 25 bp, Artificial
  probe
  misc_feature (1)..(25): SEQ ID NO: 1213; WAN024CSP; Start 161; Stop 185
ttgctgctaatggctatacagttaa

SEQ ID NO: 287007 - DNA, 25 bp, Artificial
  probe
  misc_feature (1)..(25): SEQ ID NO: 1213; WAN024CSP; Start 342; Stop 366
tacgcctattcttcaacagcaagta

SEQ ID NO: 287008 - DNA, 25 bp, Artificial
  probe
  misc_feature (1)..(25): SEQ ID NO: 1213; WAN024CSP; Start 714; Stop 738
cggtgttatcagcatcaataagaca

SEQ ID NO: 287009 - DNA, 25 bp, Artificial
  probe
  misc_feature (1)..(25): SEQ ID NO: 1213; WAN024CSP; Start 995; Stop 1019
gccatacacatactactatgatgct

SEQ ID NO: 287010 - DNA, 25 bp, Artificial
  probe
  misc_feature (1)..(25): SEQ ID NO: 1214; WAN024DXB; Start 586; Stop 610
caccaatatgtcttaccagccttat

SEQ ID NO: 287011 - DNA, 25 bp, Artificial
  probe
  misc_feature (1)..(25): SEQ ID NO: 1214; WAN024DXB; Start 587; Stop 611
accaatatgtcttaccagccttata

SEQ ID NO: 287012 - DNA, 25 bp, Artificial
  probe
  misc_feature (1)..(25): SEQ ID NO: 1214; WAN024DXB; Start 311; Stop 335
atattacaggtgtagcgattccatt

SEQ ID NO: 287013 - DNA, 25 bp, Artificial
  probe
  misc_feature (1)..(25): SEQ ID NO: 1214; WAN024DXB; Start 634; Stop 658
ttcttgacaggagagattcagttac

SEQ ID NO: 287014 - DNA, 25 bp, Artificial
  probe
  misc_feature (1)..(25): SEQ ID NO: 1214; WAN024DXB; Start 312; Stop 336
tattacaggtgtagcgattccattg

SEQ ID NO: 287015 - DNA, 25 bp, Artificial
  probe
  misc_feature (1)..(25): SEQ ID NO: 1214; WAN024DXB; Start 635; Stop 659
tcttgacaggagagattcagttact

SEQ ID NO: 287016 - DNA, 25 bp, Artificial
  probe
  misc_feature (1)..(25): SEQ ID NO: 1214; WAN024DXB; Start 636; Stop 660
cttgacaggagagattcagttacta

SEQ ID NO: 287017 - DNA, 25 bp, Artificial
  probe
  misc_feature (1)..(25): SEQ ID NO: 1214; WAN024DXB; Start 637; Stop 661
ttgacaggagagattcagttactag

SEQ ID NO: 287018 - DNA, 25 bp, Artificial
  probe
  misc_feature (1)..(25): SEQ ID NO: 1214; WAN024DXB; Start 582; Stop 606
attacaccaatatgtcttaccagcc

SEQ ID NO: 287019 - DNA, 25 bp, Artificial
  probe
  misc_feature (1)..(25): SEQ ID NO: 1214; WAN024DXB; Start 581; Stop 605
aattacaccaatatgtcttaccagc

SEQ ID NO: 287020 - DNA, 25 bp, Artificial
  probe
  misc_feature (1)..(25): SEQ ID NO: 1214; WAN024DXB; Start 310; Stop 334
aatattacaggtgtagcgattccat

SEQ ID NO: 287021 - DNA, 25 bp, Artificial
  probe
  misc_feature (1)..(25): SEQ ID NO: 1214; WAN024DXB; Start 579; Stop 603
ccaattacaccaatatgtcttacca

SEQ ID NO: 287022 - DNA, 25 bp, Artificial
  probe
  misc_feature (1)..(25): SEQ ID NO: 1214; WAN024DXB; Start 588; Stop 612
ccaatatgtcttaccagccttatat

SEQ ID NO: 287023 - DNA, 25 bp, Artificial
  probe
  misc_feature (1)..(25): SEQ ID NO: 1214; WAN024DXB; Start 638; Stop 662
tgacaggagagattcagttactagc

SEQ ID NO: 287024 - DNA, 25 bp, Artificial
  probe
  misc_feature (1)..(25): SEQ ID NO: 1214; WAN024DXB; Start 585; Stop 609
acaccaatatgtcttaccagcctta

SEQ ID NO: 287025 - DNA, 25 bp, Artificial
  probe
  misc_feature (1)..(25): SEQ ID NO: 1214; WAN024DXB; Start 584; Stop 608
tacaccaatatgtcttaccagcctt

SEQ ID NO: 287026 - DNA, 25 bp, Artificial
  probe
  misc_feature (1)..(25): SEQ ID NO: 1214; WAN024DXB; Start 583; Stop 607
ttacaccaatatgtcttaccagcct

SEQ ID NO: 287027 - DNA, 25 bp, Artificial
  probe
  misc_feature (1)..(25): SEQ ID NO: 1214; WAN024DXB; Start 578; Stop 602
tccaattacaccaatatgtcttacc

SEQ ID NO: 287028 - DNA, 25 bp, Artificial
  probe
  misc_feature (1)..(25): SEQ ID NO: 1214; WAN024DXB; Start 640; Stop 664
acaggagagattcagttactagctt

SEQ ID NO: 287029 - DNA, 25 bp, Artificial
  probe
  misc_feature (1)..(25): SEQ ID NO: 1214; WAN024DXB; Start 639; Stop 663
gacaggagagattcagttactagct

SEQ ID NO: 287030 - DNA, 25 bp, Artificial
  probe
  misc_feature (1)..(25): SEQ ID NO: 1214; WAN024DXB; Start 395; Stop 419
tcctttctttcttactctttgtggt

SEQ ID NO: 287031 - DNA, 25 bp, Artificial
  probe
  misc_feature (1)..(25): SEQ ID NO: 1214; WAN024DXB; Start 274; Stop 298
atgtatcggaatcttgagtttggaa

SEQ ID NO: 287032 - DNA, 25 bp, Artificial
  probe
  misc_feature (1)..(25): SEQ ID NO: 1214; WAN024DXB; Start 273; Stop 297
aatgtatcggaatcttgagtttgga

SEQ ID NO: 287033 - DNA, 25 bp, Artificial
  probe
  misc_feature (1)..(25): SEQ ID NO: 1214; WAN024DXB; Start 272; Stop 296
aaatgtatcggaatcttgagtttgg

SEQ ID NO: 287034 - DNA, 25 bp, Artificial
  probe
  misc_feature (1)..(25): SEQ ID NO: 1214; WAN024DXB; Start 580; Stop 604
caattacaccaatatgtcttaccag

SEQ ID NO: 287035 - DNA, 25 bp, Artificial
  probe
  misc_feature (1)..(25): SEQ ID NO: 1214; WAN024DXB; Start 394; Stop 418
ttcctttctttcttactctttgtgg

SEQ ID NO: 287036 - DNA, 25 bp, Artificial
  probe
  misc_feature (1)..(25): SEQ ID NO: 1214; WAN024DXB; Start 409; Stop 433
ctctttgtggtattcttagtcgctc

SEQ ID NO: 287037 - DNA, 25 bp, Artificial
  probe
  misc_feature (1)..(25): SEQ ID NO: 1214; WAN024DXB; Start 270; Stop 294
gcaaatgtatcggaatcttgagttt

SEQ ID NO: 287038 - DNA, 25 bp, Artificial
  probe
  misc_feature (1)..(25): SEQ ID NO: 1214; WAN024DXB; Start 396; Stop 420
cctttctttcttactctttgtggta

SEQ ID NO: 287039 - DNA, 25 bp, Artificial
  probe
  misc_feature (1)..(25): SEQ ID NO: 1214; WAN024DXB; Start 627; Stop 651
catttctttcttgacaggagagatt

SEQ ID NO: 287040 - DNA, 25 bp, Artificial
  probe
  misc_feature (1)..(25): SEQ ID NO: 1214; WAN024DXB; Start 460; Stop 484
attgttcgtcagtttgatttggaat

SEQ ID NO: 287041 - DNA, 25 bp, Artificial
  probe
  misc_feature (1)..(25): SEQ ID NO: 1214; WAN024DXB; Start 630; Stop 654
ttctttcttgacaggagagattcag

SEQ ID NO: 287042 - DNA, 25 bp, Artificial
  probe
  misc_feature (1)..(25): SEQ ID NO: 1214; WAN024DXB; Start 629; Stop 653
tttctttcttgacaggagagattca

SEQ ID NO: 287043 - DNA, 25 bp, Artificial
  probe
  misc_feature (1)..(25): SEQ ID NO: 1215; WAN024ES4; Start 559; Stop 583
tatattgaagaggtagagcatacgg

SEQ ID NO: 287044 - DNA, 25 bp, Artificial
  probe
  misc_feature (1)..(25): SEQ ID NO: 1215; WAN024ES4; Start 198; Stop 222
agtgacgagttctcagttagactat

SEQ ID NO: 287045 - DNA, 25 bp, Artificial
  probe
  misc_feature (1)..(25): SEQ ID NO: 1215; WAN024ES4; Start 199; Stop 223
gtgacgagttctcagttagactata

SEQ ID NO: 287046 - DNA, 25 bp, Artificial
  probe
  misc_feature (1)..(25): SEQ ID NO: 1215; WAN024ES4; Start 688; Stop 712
tacaaggaagtcattgagcagtcta

SEQ ID NO: 287047 - DNA, 25 bp, Artificial
  probe
  misc_feature (1)..(25): SEQ ID NO: 1215; WAN024ES4; Start 197; Stop 221
cagtgacgagttctcagttagacta

SEQ ID NO: 287048 - DNA, 25 bp, Artificial
  probe
  misc_feature (1)..(25): SEQ ID NO: 1215; WAN024ES4; Start 560; Stop 584
atattgaagaggtagagcatacggc

SEQ ID NO: 287049 - DNA, 25 bp, Artificial
  probe
  misc_feature (1)..(25): SEQ ID NO: 1215; WAN024ES4; Start 690; Stop 714
caaggaagtcattgagcagtctaac

SEQ ID NO: 287050 - DNA, 25 bp, Artificial
  probe
  misc_feature (1)..(25): SEQ ID NO: 1215; WAN024ES4; Start 699; Stop 723
cattgagcagtctaacttggttgaa

SEQ ID NO: 287051 - DNA, 25 bp, Artificial
  probe
  misc_feature (1)..(25): SEQ ID NO: 1215; WAN024ES4; Start 687; Stop 711
atacaaggaagtcattgagcagtct

SEQ ID NO: 287052 - DNA, 25 bp, Artificial
  probe
  misc_feature (1)..(25): SEQ ID NO: 1215; WAN024ES4; Start 686; Stop 710
catacaaggaagtcattgagcagtc

SEQ ID NO: 287053 - DNA, 25 bp, Artificial
  probe
  misc_feature (1)..(25): SEQ ID NO: 1215; WAN024ES4; Start 691; Stop 715
aaggaagtcattgagcagtctaact

SEQ ID NO: 287054 - DNA, 25 bp, Artificial
  probe
  misc_feature (1)..(25): SEQ ID NO: 1215; WAN024ES4; Start 558; Stop 582
ttatattgaagaggtagagcatacg

SEQ ID NO: 287055 - DNA, 25 bp, Artificial
  probe
  misc_feature (1)..(25): SEQ ID NO: 1215; WAN024ES4; Start 200; Stop 224
tgacgagttctcagttagactatat

SEQ ID NO: 287056 - DNA, 25 bp, Artificial
  probe
  misc_feature (1)..(25): SEQ ID NO: 1215; WAN024ES4; Start 689; Stop 713
acaaggaagtcattgagcagtctaa

SEQ ID NO: 287057 - DNA, 25 bp, Artificial
  probe
  misc_feature (1)..(25): SEQ ID NO: 1215; WAN024ES4; Start 737; Stop 761
aacaggatgctctacaagtagtcac

SEQ ID NO: 287058 - DNA, 25 bp, Artificial
  probe
  misc_feature (1)..(25): SEQ ID NO: 1215; WAN024ES4; Start 698; Stop 722
tcattgagcagtctaacttggttga

SEQ ID NO: 287059 - DNA, 25 bp, Artificial
  probe
  misc_feature (1)..(25): SEQ ID NO: 1215; WAN024ES4; Start 697; Stop 721
gtcattgagcagtctaacttggttg

SEQ ID NO: 287060 - DNA, 25 bp, Artificial
  probe
  misc_feature (1)..(25): SEQ ID NO: 1215; WAN024ES4; Start 696; Stop 720
agtcattgagcagtctaacttggtt

SEQ ID NO: 287061 - DNA, 25 bp, Artificial
  probe
  misc_feature (1)..(25): SEQ ID NO: 1215; WAN024ES4; Start 605; Stop 629
ataagggagagttgattcgtgatac

SEQ ID NO: 287062 - DNA, 25 bp, Artificial
  probe
  misc_feature (1)..(25): SEQ ID NO: 1215; WAN024ES4; Start 603; Stop 627
aaataagggagagttgattcgtgat

SEQ ID NO: 287063 - DNA, 25 bp, Artificial
  probe
  misc_feature (1)..(25): SEQ ID NO: 1215; WAN024ES4; Start 681; Stop 705
tctggcatacaaggaagtcattgag

SEQ ID NO: 287064 - DNA, 25 bp, Artificial
  probe
  misc_feature (1)..(25): SEQ ID NO: 1215; WAN024ES4; Start 680; Stop 704
ctctggcatacaaggaagtcattga

SEQ ID NO: 287065 - DNA, 25 bp, Artificial
  probe
  misc_feature (1)..(25): SEQ ID NO: 1215; WAN024ES4; Start 602; Stop 626
taaataagggagagttgattcgtga

SEQ ID NO: 287066 - DNA, 25 bp, Artificial
  probe
  misc_feature (1)..(25): SEQ ID NO: 1215; WAN024ES4; Start 554; Stop 578
ctcattatattgaagaggtagagca

SEQ ID NO: 287067 - DNA, 25 bp, Artificial
  probe
  misc_feature (1)..(25): SEQ ID NO: 1215; WAN024ES4; Start 604; Stop 628
aataagggagagttgattcgtgata

SEQ ID NO: 287068 - DNA, 25 bp, Artificial
  probe
  misc_feature (1)..(25): SEQ ID NO: 1215; WAN024ES4; Start 548; Stop 572
attcgtctcattatattgaagaggt

SEQ ID NO: 287069 - DNA, 25 bp, Artificial
  probe
  misc_feature (1)..(25): SEQ ID NO: 1215; WAN024ES4; Start 201; Stop 225
gacgagttctcagttagactatatt

SEQ ID NO: 287070 - DNA, 25 bp, Artificial
  probe
  misc_feature (1)..(25): SEQ ID NO: 1215; WAN024ES4; Start 250; Stop 274
gtcatcgttcagaaattaaaggtca

SEQ ID NO: 287071 - DNA, 25 bp, Artificial
  probe
  misc_feature (1)..(25): SEQ ID NO: 1215; WAN024ES4; Start 249; Stop 273
tgtcatcgttcagaaattaaaggtc

SEQ ID NO: 287072 - DNA, 25 bp, Artificial
  probe
  misc_feature (1)..(25): SEQ ID NO: 1215; WAN024ES4; Start 739; Stop 763
caggatgctctacaagtagtcacac

SEQ ID NO: 287073 - DNA, 25 bp, Artificial
  probe
  misc_feature (1)..(25): SEQ ID NO: 1215; WAN024ES4; Start 553; Stop 577
tctcattatattgaagaggtagagc

SEQ ID NO: 287074 - DNA, 25 bp, Artificial
  probe
  misc_feature (1)..(25): SEQ ID NO: 1215; WAN024ES4; Start 551; Stop 575
cgtctcattatattgaagaggtaga

SEQ ID NO: 287075 - DNA, 25 bp, Artificial
  probe
  misc_feature (1)..(25): SEQ ID NO: 1215; WAN024ES4; Start 550; Stop 574
tcgtctcattatattgaagaggtag

SEQ ID NO: 287076 - DNA, 25 bp, Artificial
  probe
  misc_feature (1)..(25): SEQ ID NO: 1216; WAN024CZG; Start 220; Stop 244
tggtgtgatgaatgtgatgagtatt

SEQ ID NO: 287077 - DNA, 25 bp, Artificial
  probe
  misc_feature (1)..(25): SEQ ID NO: 1216; WAN024CZG; Start 219; Stop 243
ctggtgtgatgaatgtgatgagtat

SEQ ID NO: 287078 - DNA, 25 bp, Artificial
  probe
  misc_feature (1)..(25): SEQ ID NO: 1216; WAN024CZG; Start 218; Stop 242
gctggtgtgatgaatgtgatgagta

SEQ ID NO: 287079 - DNA, 25 bp, Artificial
  probe
  misc_feature (1)..(25): SEQ ID NO: 1216; WAN024CZG; Start 221; Stop 245
ggtgtgatgaatgtgatgagtattt

SEQ ID NO: 287080 - DNA, 25 bp, Artificial
  probe
  misc_feature (1)..(25): SEQ ID NO: 1216; WAN024CZG; Start 342; Stop 366
gaatcgttcttgccgtatgaaatta

SEQ ID NO: 287081 - DNA, 25 bp, Artificial
  probe
  misc_feature (1)..(25): SEQ ID NO: 1216; WAN024CZG; Start 344; Stop 368
atcgttcttgccgtatgaaattaaa

SEQ ID NO: 287082 - DNA, 25 bp, Artificial
  probe
  misc_feature (1)..(25): SEQ ID NO: 1216; WAN024CZG; Start 343; Stop 367
aatcgttcttgccgtatgaaattaa

SEQ ID NO: 287083 - DNA, 25 bp, Artificial
  probe
  misc_feature (1)..(25): SEQ ID NO: 1216; WAN024CZG; Start 93; Stop 117
atttgaccagtattatgatgctctc

SEQ ID NO: 287084 - DNA, 25 bp, Artificial
  probe
  misc_feature (1)..(25): SEQ ID NO: 1216; WAN024CZG; Start 96; Stop 120
tgaccagtattatgatgctctcaaa

SEQ ID NO: 287085 - DNA, 25 bp, Artificial
  probe
  misc_feature (1)..(25): SEQ ID NO: 1216; WAN024CZG; Start 94; Stop 118
tttgaccagtattatgatgctctca

SEQ ID NO: 287086 - DNA, 25 bp, Artificial
  probe
  misc_feature (1)..(25): SEQ ID NO: 1216; WAN024CZG; Start 322; Stop 346
aaacaaaccagtcaggaaaggaatc

SEQ ID NO: 287087 - DNA, 25 bp, Artificial
  probe
  misc_feature (1)..(25): SEQ ID NO: 1216; WAN024CZG; Start 133; Stop 157
tgctggtttagattggaacaagaat

SEQ ID NO: 287088 - DNA, 25 bp, Artificial
  probe
  misc_feature (1)..(25): SEQ ID NO: 1216; WAN024CZG; Start 132; Stop 156
ttgctggtttagattggaacaagaa

SEQ ID NO: 287089 - DNA, 25 bp, Artificial
  probe
  misc_feature (1)..(25): SEQ ID NO: 1216; WAN024CZG; Start 129; Stop 153
aacttgctggtttagattggaacaa

SEQ ID NO: 287090 - DNA, 25 bp, Artificial
  probe
  misc_feature (1)..(25): SEQ ID NO: 1216; WAN024CZG; Start 92; Stop 116
aatttgaccagtattatgatgctct

SEQ ID NO: 287091 - DNA, 25 bp, Artificial
  probe
  misc_feature (1)..(25): SEQ ID NO: 1216; WAN024CZG; Start 97; Stop 121
gaccagtattatgatgctctcaaat

SEQ ID NO: 287092 - DNA, 25 bp, Artificial
  probe
  misc_feature (1)..(25): SEQ ID NO: 1216; WAN024CZG; Start 95; Stop 119
ttgaccagtattatgatgctctcaa

SEQ ID NO: 287093 - DNA, 25 bp, Artificial
  probe
  misc_feature (1)..(25): SEQ ID NO: 1216; WAN024CZG; Start 341; Stop 365
ggaatcgttcttgccgtatgaaatt

SEQ ID NO: 287094 - DNA, 25 bp, Artificial
  probe
  misc_feature (1)..(25): SEQ ID NO: 1216; WAN024CZG; Start 247; Stop 271
caacaataccattctttggctcttt

SEQ ID NO: 287095 - DNA, 25 bp, Artificial
  probe
  misc_feature (1)..(25): SEQ ID NO: 1216; WAN024CZG; Start 244; Stop 268
ttacaacaataccattctttggctc

SEQ ID NO: 287096 - DNA, 25 bp, Artificial
  probe
  misc_feature (1)..(25): SEQ ID NO: 1216; WAN024CZG; Start 245; Stop 269
tacaacaataccattctttggctct

SEQ ID NO: 287097 - DNA, 25 bp, Artificial
  probe
  misc_feature (1)..(25): SEQ ID NO: 1216; WAN024CZG; Start 134; Stop 158
gctggtttagattggaacaagaatc

SEQ ID NO: 287098 - DNA, 25 bp, Artificial
  probe
  misc_feature (1)..(25): SEQ ID NO: 1216; WAN024CZG; Start 243; Stop 267
tttacaacaataccattctttggct

SEQ ID NO: 287099 - DNA, 25 bp, Artificial
  probe
  misc_feature (1)..(25): SEQ ID NO: 1216; WAN024CZG; Start 223; Stop 247
tgtgatgaatgtgatgagtatttac

SEQ ID NO: 287100 - DNA, 25 bp, Artificial
  probe
  misc_feature (1)..(25): SEQ ID NO: 1216; WAN024CZG; Start 222; Stop 246
gtgtgatgaatgtgatgagtattta

SEQ ID NO: 287101 - DNA, 25 bp, Artificial
  probe
  misc_feature (1)..(25): SEQ ID NO: 1216; WAN024CZG; Start 246; Stop 270
acaacaataccattctttggctctt

SEQ ID NO: 287102 - DNA, 25 bp, Artificial
  probe
  misc_feature (1)..(25): SEQ ID NO: 1216; WAN024CZG; Start 98; Stop 122
accagtattatgatgctctcaaata

SEQ ID NO: 287103 - DNA, 25 bp, Artificial
  probe
  misc_feature (1)..(25): SEQ ID NO: 1216; WAN024CZG; Start 340; Stop 364
aggaatcgttcttgccgtatgaaat

SEQ ID NO: 287104 - DNA, 25 bp, Artificial
  probe
  misc_feature (1)..(25): SEQ ID NO: 1216; WAN024CZG; Start 242; Stop 266
atttacaacaataccattctttggc

SEQ ID NO: 287105 - DNA, 25 bp, Artificial
  probe
  misc_feature (1)..(25): SEQ ID NO: 1216; WAN024CZG; Start 339; Stop 363
aaggaatcgttcttgccgtatgaaa

SEQ ID NO: 287106 - DNA, 25 bp, Artificial
  probe
  misc_feature (1)..(25): SEQ ID NO: 1216; WAN024CZG; Start 338; Stop 362
aaaggaatcgttcttgccgtatgaa

SEQ ID NO: 287107 - DNA, 25 bp, Artificial
  probe
  misc_feature (1)..(25): SEQ ID NO: 1216; WAN024CZG; Start 224; Stop 248
gtgatgaatgtgatgagtatttaca

SEQ ID NO: 287108 - DNA, 25 bp, Artificial
  probe
  misc_feature (1)..(25): SEQ ID NO: 1216; WAN024CZG; Start 326; Stop 350
aaaccagtcaggaaaggaatcgttc

SEQ ID NO: 287109 - DNA, 25 bp, Artificial
  probe
  misc_feature (1)..(25): SEQ ID NO: 1217; WAN024DIJ; Start 238; Stop 262
ttggtagaatggttatatgattgga

SEQ ID NO: 287110 - DNA, 25 bp, Artificial
  probe
  misc_feature (1)..(25): SEQ ID NO: 1217; WAN024DIJ; Start 239; Stop 263
tggtagaatggttatatgattggat

SEQ ID NO: 287111 - DNA, 25 bp, Artificial
  probe
  misc_feature (1)..(25): SEQ ID NO: 1217; WAN024DIJ; Start 227; Stop 251
gtgaagaaagtttggtagaatggtt

SEQ ID NO: 287112 - DNA, 25 bp, Artificial
  probe
  misc_feature (1)..(25): SEQ ID NO: 1217; WAN024DIJ; Start 226; Stop 250
agtgaagaaagtttggtagaatggt

SEQ ID NO: 287113 - DNA, 25 bp, Artificial
  probe
  misc_feature (1)..(25): SEQ ID NO: 1217; WAN024DIJ; Start 35; Stop 59
gatgtgatgaaactgataggcaact

SEQ ID NO: 287114 - DNA, 25 bp, Artificial
  probe
  misc_feature (1)..(25): SEQ ID NO: 1217; WAN024DIJ; Start 265; Stop 289
tccacaaatcgttatgaacttccta

SEQ ID NO: 287115 - DNA, 25 bp, Artificial
  probe
  misc_feature (1)..(25): SEQ ID NO: 1217; WAN024DIJ; Start 263; Stop 287
tttccacaaatcgttatgaacttcc

SEQ ID NO: 287116 - DNA, 25 bp, Artificial
  probe
  misc_feature (1)..(25): SEQ ID NO: 1217; WAN024DIJ; Start 36; Stop 60
atgtgatgaaactgataggcaactg

SEQ ID NO: 287117 - DNA, 25 bp, Artificial
  probe
  misc_feature (1)..(25): SEQ ID NO: 1217; WAN024DIJ; Start 266; Stop 290
ccacaaatcgttatgaacttcctaa

SEQ ID NO: 287118 - DNA, 25 bp, Artificial
  probe
  misc_feature (1)..(25): SEQ ID NO: 1217; WAN024DIJ; Start 264; Stop 288
ttccacaaatcgttatgaacttcct

SEQ ID NO: 287119 - DNA, 25 bp, Artificial
  probe
  misc_feature (1)..(25): SEQ ID NO: 1217; WAN024DIJ; Start 225; Stop 249
tagtgaagaaagtttggtagaatgg

SEQ ID NO: 287120 - DNA, 25 bp, Artificial
  probe
  misc_feature (1)..(25): SEQ ID NO: 1217; WAN024DIJ; Start 134; Stop 158
ttgttcctcgtagtcaatttgtaga

SEQ ID NO: 287121 - DNA, 25 bp, Artificial
  probe
  misc_feature (1)..(25): SEQ ID NO: 1217; WAN024DIJ; Start 213; Stop 237
ccatcgtaatgatagtgaagaaagt

SEQ ID NO: 287122 - DNA, 25 bp, Artificial
  probe
  misc_feature (1)..(25): SEQ ID NO: 1217; WAN024DIJ; Start 133; Stop 157
tttgttcctcgtagtcaatttgtag

SEQ ID NO: 287123 - DNA, 25 bp, Artificial
  probe
  misc_feature (1)..(25): SEQ ID NO: 1217; WAN024DIJ; Start 228; Stop 252
tgaagaaagtttggtagaatggtta

SEQ ID NO: 287124 - DNA, 25 bp, Artificial
  probe
  misc_feature (1)..(25): SEQ ID NO: 1217; WAN024DIJ; Start 217; Stop 241
cgtaatgatagtgaagaaagtttgg

SEQ ID NO: 287125 - DNA, 25 bp, Artificial
  probe
  misc_feature (1)..(25): SEQ ID NO: 1217; WAN024DIJ; Start 212; Stop 236
tccatcgtaatgatagtgaagaaag

SEQ ID NO: 287126 - DNA, 25 bp, Artificial
  probe
  misc_feature (1)..(25): SEQ ID NO: 1217; WAN024DIJ; Start 207; Stop 231
tatcttccatcgtaatgatagtgaa

SEQ ID NO: 287127 - DNA, 25 bp, Artificial
  probe
  misc_feature (1)..(25): SEQ ID NO: 1217; WAN024DIJ; Start 206; Stop 230
ttatcttccatcgtaatgatagtga

SEQ ID NO: 287128 - DNA, 25 bp, Artificial
  probe
  misc_feature (1)..(25): SEQ ID NO: 1217; WAN024DIJ; Start 34; Stop 58
ggatgtgatgaaactgataggcaac

SEQ ID NO: 287129 - DNA, 25 bp, Artificial
  probe
  misc_feature (1)..(25): SEQ ID NO: 1217; WAN024DIJ; Start 21; Stop 45
ttctatcaagacaggatgtgatgaa

SEQ ID NO: 287130 - DNA, 25 bp, Artificial
  probe
  misc_feature (1)..(25): SEQ ID NO: 1217; WAN024DIJ; Start 33; Stop 57
aggatgtgatgaaactgataggcaa

SEQ ID NO: 287131 - DNA, 25 bp, Artificial
  probe
  misc_feature (1)..(25): SEQ ID NO: 1217; WAN024DIJ; Start 29; Stop 53
agacaggatgtgatgaaactgatag

SEQ ID NO: 287132 - DNA, 25 bp, Artificial
  probe
  misc_feature (1)..(25): SEQ ID NO: 1217; WAN024DIJ; Start 28; Stop 52
aagacaggatgtgatgaaactgata

SEQ ID NO: 287133 - DNA, 25 bp, Artificial
  probe
  misc_feature (1)..(25): SEQ ID NO: 1217; WAN024DIJ; Start 211; Stop 235
ttccatcgtaatgatagtgaagaaa

SEQ ID NO: 287134 - DNA, 25 bp, Artificial
  probe
  misc_feature (1)..(25): SEQ ID NO: 1217; WAN024DIJ; Start 137; Stop 161
ttcctcgtagtcaatttgtagacac

SEQ ID NO: 287135 - DNA, 25 bp, Artificial
  probe
  misc_feature (1)..(25): SEQ ID NO: 1217; WAN024DIJ; Start 136; Stop 160
gttcctcgtagtcaatttgtagaca

SEQ ID NO: 287136 - DNA, 25 bp, Artificial
  probe
  misc_feature (1)..(25): SEQ ID NO: 1217; WAN024DIJ; Start 135; Stop 159
tgttcctcgtagtcaatttgtagac

SEQ ID NO: 287137 - DNA, 25 bp, Artificial
  probe
  misc_feature (1)..(25): SEQ ID NO: 1217; WAN024DIJ; Start 222; Stop 246
tgatagtgaagaaagtttggtagaa

SEQ ID NO: 287138 - DNA, 25 bp, Artificial
  probe
  misc_feature (1)..(25): SEQ ID NO: 1217; WAN024DIJ; Start 30; Stop 54
gacaggatgtgatgaaactgatagg

SEQ ID NO: 287139 - DNA, 25 bp, Artificial
  probe
  misc_feature (1)..(25): SEQ ID NO: 1217; WAN024DIJ; Start 27; Stop 51
caagacaggatgtgatgaaactgat

SEQ ID NO: 287140 - DNA, 25 bp, Artificial
  probe
  misc_feature (1)..(25): SEQ ID NO: 1217; WAN024DIJ; Start 240; Stop 264
ggtagaatggttatatgattggatt

SEQ ID NO: 287141 - DNA, 25 bp, Artificial
  probe
  misc_feature (1)..(25): SEQ ID NO: 1217; WAN024DIJ; Start 267; Stop 291
cacaaatcgttatgaacttcctaaa

SEQ ID NO: 287142 - DNA, 25 bp, Artificial
  probe
  misc_feature (1)..(25): SEQ ID NO: 1218; WAN024C9T; Start 222; Stop 246
taacgacctcatctcctcaagtata

SEQ ID NO: 287143 - DNA, 25 bp, Artificial
  probe
  misc_feature (1)..(25): SEQ ID NO: 1218; WAN024C9T; Start 96; Stop 120
tataagtaggacagagaacgaggaa

SEQ ID NO: 287144 - DNA, 25 bp, Artificial
  probe
  misc_feature (1)..(25): SEQ ID NO: 1218; WAN024C9T; Start 95; Stop 119
atataagtaggacagagaacgagga

SEQ ID NO: 287145 - DNA, 25 bp, Artificial
  probe
  misc_feature (1)..(25): SEQ ID NO: 1218; WAN024C9T; Start 221; Stop 245
ataacgacctcatctcctcaagtat

SEQ ID NO: 287146 - DNA, 25 bp, Artificial
  probe
  misc_feature (1)..(25): SEQ ID NO: 1218; WAN024C9T; Start 223; Stop 247
aacgacctcatctcctcaagtatag

SEQ ID NO: 287147 - DNA, 25 bp, Artificial
  probe
  misc_feature (1)..(25): SEQ ID NO: 1218; WAN024C9T; Start 220; Stop 244
gataacgacctcatctcctcaagta

SEQ ID NO: 287148 - DNA, 25 bp, Artificial
  probe
  misc_feature (1)..(25): SEQ ID NO: 1218; WAN024C9T; Start 225; Stop 249
cgacctcatctcctcaagtatagaa

SEQ ID NO: 287149 - DNA, 25 bp, Artificial
  probe
  misc_feature (1)..(25): SEQ ID NO: 1218; WAN024C9T; Start 299; Stop 323
gagaatatctacgcatacaacaaga

SEQ ID NO: 287150 - DNA, 25 bp, Artificial
  probe
  misc_feature (1)..(25): SEQ ID NO: 1218; WAN024C9T; Start 298; Stop 322
agagaatatctacgcatacaacaag

SEQ ID NO: 287151 - DNA, 25 bp, Artificial
  probe
  misc_feature (1)..(25): SEQ ID NO: 1218; WAN024C9T; Start 300; Stop 324
agaatatctacgcatacaacaagaa

SEQ ID NO: 287152 - DNA, 25 bp, Artificial
  probe
  misc_feature (1)..(25): SEQ ID NO: 1218; WAN024C9T; Start 297; Stop 321
aagagaatatctacgcatacaacaa

SEQ ID NO: 287153 - DNA, 25 bp, Artificial
  probe
  misc_feature (1)..(25): SEQ ID NO: 1218; WAN024C9T; Start 224; Stop 248
acgacctcatctcctcaagtataga

SEQ ID NO: 287154 - DNA, 25 bp, Artificial
  probe
  misc_feature (1)..(25): SEQ ID NO: 1218; WAN024C9T; Start 94; Stop 118
tatataagtaggacagagaacgagg

SEQ ID NO: 287155 - DNA, 25 bp, Artificial
  probe
  misc_feature (1)..(25): SEQ ID NO: 1218; WAN024C9T; Start 391; Stop 415
cctgtaattaatcaacctgctatcg

SEQ ID NO: 287156 - DNA, 25 bp, Artificial
  probe
  misc_feature (1)..(25): SEQ ID NO: 1218; WAN024C9T; Start 296; Stop 320
taagagaatatctacgcatacaaca

SEQ ID NO: 287157 - DNA, 25 bp, Artificial
  probe
  misc_feature (1)..(25): SEQ ID NO: 1218; WAN024C9T; Start 392; Stop 416
ctgtaattaatcaacctgctatcga

SEQ ID NO: 287158 - DNA, 25 bp, Artificial
  probe
  misc_feature (1)..(25): SEQ ID NO: 1218; WAN024C9T; Start 97; Stop 121
ataagtaggacagagaacgaggaaa

SEQ ID NO: 287159 - DNA, 25 bp, Artificial
  probe
  misc_feature (1)..(25): SEQ ID NO: 1218; WAN024C9T; Start 824; Stop 848
gttctgttcctgtcataatttacca

SEQ ID NO: 287160 - DNA, 25 bp, Artificial
  probe
  misc_feature (1)..(25): SEQ ID NO: 1218; WAN024C9T; Start 226; Stop 250
gacctcatctcctcaagtatagaaa

SEQ ID NO: 287161 - DNA, 25 bp, Artificial
  probe
  misc_feature (1)..(25): SEQ ID NO: 1218; WAN024C9T; Start 227; Stop 251
acctcatctcctcaagtatagaaat

SEQ ID NO: 287162 - DNA, 25 bp, Artificial
  probe
  misc_feature (1)..(25): SEQ ID NO: 1218; WAN024C9T; Start 218; Stop 242
aagataacgacctcatctcctcaag

SEQ ID NO: 287163 - DNA, 25 bp, Artificial
  probe
  misc_feature (1)..(25): SEQ ID NO: 1218; WAN024C9T; Start 16; Stop 40
atagttggaaatggtttggatttgc

SEQ ID NO: 287164 - DNA, 25 bp, Artificial
  probe
  misc_feature (1)..(25): SEQ ID NO: 1218; WAN024C9T; Start 388; Stop 412
ctccctgtaattaatcaacctgcta

SEQ ID NO: 287165 - DNA, 25 bp, Artificial
  probe
  misc_feature (1)..(25): SEQ ID NO: 1218; WAN024C9T; Start 385; Stop 409
tctctccctgtaattaatcaacctg

SEQ ID NO: 287166 - DNA, 25 bp, Artificial
  probe
  misc_feature (1)..(25): SEQ ID NO: 1218; WAN024C9T; Start 382; Stop 406
acctctctccctgtaattaatcaac

SEQ ID NO: 287167 - DNA, 25 bp, Artificial
  probe
  misc_feature (1)..(25): SEQ ID NO: 1218; WAN024C9T; Start 383; Stop 407
cctctctccctgtaattaatcaacc

SEQ ID NO: 287168 - DNA, 25 bp, Artificial
  probe
  misc_feature (1)..(25): SEQ ID NO: 1218; WAN024C9T; Start 389; Stop 413
tccctgtaattaatcaacctgctat

SEQ ID NO: 287169 - DNA, 25 bp, Artificial
  probe
  misc_feature (1)..(25): SEQ ID NO: 1218; WAN024C9T; Start 384; Stop 408
ctctctccctgtaattaatcaacct

SEQ ID NO: 287170 - DNA, 25 bp, Artificial
  probe
  misc_feature (1)..(25): SEQ ID NO: 1218; WAN024C9T; Start 381; Stop 405
gacctctctccctgtaattaatcaa

SEQ ID NO: 287171 - DNA, 25 bp, Artificial
  probe
  misc_feature (1)..(25): SEQ ID NO: 1218; WAN024C9T; Start 295; Stop 319
ttaagagaatatctacgcatacaac

SEQ ID NO: 287172 - DNA, 25 bp, Artificial
  probe
  misc_feature (1)..(25): SEQ ID NO: 1218; WAN024C9T; Start 390; Stop 414
ccctgtaattaatcaacctgctatc

SEQ ID NO: 287173 - DNA, 25 bp, Artificial
  probe
  misc_feature (1)..(25): SEQ ID NO: 1218; WAN024C9T; Start 386; Stop 410
ctctccctgtaattaatcaacctgc

SEQ ID NO: 287174 - DNA, 25 bp, Artificial
  probe
  misc_feature (1)..(25): SEQ ID NO: 1218; WAN024C9T; Start 387; Stop 411
tctccctgtaattaatcaacctgct

SEQ ID NO: 287175 - DNA, 25 bp, Artificial
  probe
  misc_feature (1)..(25): SEQ ID NO: 1219; WAN024CRQ; Start 532; Stop 556
ggcttgtatgacctctataaccaac

SEQ ID NO: 287176 - DNA, 25 bp, Artificial
  probe
  misc_feature (1)..(25): SEQ ID NO: 1219; WAN024CRQ; Start 280; Stop 304
gaagatacctatcgtaccttgatgg

SEQ ID NO: 287177 - DNA, 25 bp, Artificial
  probe
  misc_feature (1)..(25): SEQ ID NO: 1219; WAN024CRQ; Start 276; Stop 300
ctcagaagatacctatcgtaccttg

SEQ ID NO: 287178 - DNA, 25 bp, Artificial
  probe
  misc_feature (1)..(25): SEQ ID NO: 1219; WAN024CRQ; Start 533; Stop 557
gcttgtatgacctctataaccaacg

SEQ ID NO: 287179 - DNA, 25 bp, Artificial
  probe
  misc_feature (1)..(25): SEQ ID NO: 1219; WAN024CRQ; Start 275; Stop 299
tctcagaagatacctatcgtacctt

SEQ ID NO: 287180 - DNA, 25 bp, Artificial
  probe
  misc_feature (1)..(25): SEQ ID NO: 1219; WAN024CRQ; Start 274; Stop 298
ttctcagaagatacctatcgtacct

SEQ ID NO: 287181 - DNA, 25 bp, Artificial
  probe
  misc_feature (1)..(25): SEQ ID NO: 1219; WAN024CRQ; Start 279; Stop 303
agaagatacctatcgtaccttgatg

SEQ ID NO: 287182 - DNA, 25 bp, Artificial
  probe
  misc_feature (1)..(25): SEQ ID NO: 1219; WAN024CRQ; Start 278; Stop 302
cagaagatacctatcgtaccttgat

SEQ ID NO: 287183 - DNA, 25 bp, Artificial
  probe
  misc_feature (1)..(25): SEQ ID NO: 1219; WAN024CRQ; Start 277; Stop 301
tcagaagatacctatcgtaccttga

SEQ ID NO: 287184 - DNA, 25 bp, Artificial
  probe
  misc_feature (1)..(25): SEQ ID NO: 1219; WAN024CRQ; Start 281; Stop 305
aagatacctatcgtaccttgatggc

SEQ ID NO: 287185 - DNA, 25 bp, Artificial
  probe
  misc_feature (1)..(25): SEQ ID NO: 1219; WAN024CRQ; Start 1507; Stop 1531
gacaagtatccagacgtagagttag

SEQ ID NO: 287186 - DNA, 25 bp, Artificial
  probe
  misc_feature (1)..(25): SEQ ID NO: 1219; WAN024CRQ; Start 1509; Stop 1533
caagtatccagacgtagagttagag

SEQ ID NO: 287187 - DNA, 25 bp, Artificial
  probe
  misc_feature (1)..(25): SEQ ID NO: 1219; WAN024CRQ; Start 1508; Stop 1532
acaagtatccagacgtagagttaga

SEQ ID NO: 287188 - DNA, 25 bp, Artificial
  probe
  misc_feature (1)..(25): SEQ ID NO: 1219; WAN024CRQ; Start 1518; Stop 1542
agacgtagagttagaggagaagatg

SEQ ID NO: 287189 - DNA, 25 bp, Artificial
  probe
  misc_feature (1)..(25): SEQ ID NO: 1219; WAN024CRQ; Start 1517; Stop 1541
cagacgtagagttagaggagaagat

SEQ ID NO: 287190 - DNA, 25 bp, Artificial
  probe
  misc_feature (1)..(25): SEQ ID NO: 1219; WAN024CRQ; Start 1510; Stop 1534
aagtatccagacgtagagttagagg

SEQ ID NO: 287191 - DNA, 25 bp, Artificial
  probe
  misc_feature (1)..(25): SEQ ID NO: 1219; WAN024CRQ; Start 189; Stop 213
tgggatttctgttacttcatctgtt

SEQ ID NO: 287192 - DNA, 25 bp, Artificial
  probe
  misc_feature (1)..(25): SEQ ID NO: 1219; WAN024CRQ; Start 151; Stop 175
tttgctaaatctgactggatggata

SEQ ID NO: 287193 - DNA, 25 bp, Artificial
  probe
  misc_feature (1)..(25): SEQ ID NO: 1219; WAN024CRQ; Start 152; Stop 176
ttgctaaatctgactggatggatat

SEQ ID NO: 287194 - DNA, 25 bp, Artificial
  probe
  misc_feature (1)..(25): SEQ ID NO: 1219; WAN024CRQ; Start 188; Stop 212
gtgggatttctgttacttcatctgt

SEQ ID NO: 287195 - DNA, 25 bp, Artificial
  probe
  misc_feature (1)..(25): SEQ ID NO: 1219; WAN024CRQ; Start 534; Stop 558
cttgtatgacctctataaccaacgt

SEQ ID NO: 287196 - DNA, 25 bp, Artificial
  probe
  misc_feature (1)..(25): SEQ ID NO: 1219; WAN024CRQ; Start 74; Stop 98
ccatcactgagcagttactctactt

SEQ ID NO: 287197 - DNA, 25 bp, Artificial
  probe
  misc_feature (1)..(25): SEQ ID NO: 1219; WAN024CRQ; Start 195; Stop 219
ttctgttacttcatctgttatgcaa

SEQ ID NO: 287198 - DNA, 25 bp, Artificial
  probe
  misc_feature (1)..(25): SEQ ID NO: 1219; WAN024CRQ; Start 908; Stop 932
gtattgcctttgtccgtatcgtatc

SEQ ID NO: 287199 - DNA, 25 bp, Artificial
  probe
  misc_feature (1)..(25): SEQ ID NO: 1219; WAN024CRQ; Start 190; Stop 214
gggatttctgttacttcatctgtta

SEQ ID NO: 287200 - DNA, 25 bp, Artificial
  probe
  misc_feature (1)..(25): SEQ ID NO: 1219; WAN024CRQ; Start 158; Stop 182
aatctgactggatggatatcgagaa

SEQ ID NO: 287201 - DNA, 25 bp, Artificial
  probe
  misc_feature (1)..(25): SEQ ID NO: 1219; WAN024CRQ; Start 196; Stop 220
tctgttacttcatctgttatgcaat

SEQ ID NO: 287202 - DNA, 25 bp, Artificial
  probe
  misc_feature (1)..(25): SEQ ID NO: 1219; WAN024CRQ; Start 72; Stop 96
aaccatcactgagcagttactctac

SEQ ID NO: 287203 - DNA, 25 bp, Artificial
  probe
  misc_feature (1)..(25): SEQ ID NO: 1219; WAN024CRQ; Start 71; Stop 95
caaccatcactgagcagttactcta

SEQ ID NO: 287204 - DNA, 25 bp, Artificial
  probe
  misc_feature (1)..(25): SEQ ID NO: 1219; WAN024CRQ; Start 159; Stop 183
atctgactggatggatatcgagaag

SEQ ID NO: 287205 - DNA, 25 bp, Artificial
  probe
  misc_feature (1)..(25): SEQ ID NO: 1219; WAN024CRQ; Start 187; Stop 211
cgtgggatttctgttacttcatctg

SEQ ID NO: 287206 - DNA, 25 bp, Artificial
  probe
  misc_feature (1)..(25): SEQ ID NO: 1219; WAN024CRQ; Start 460; Stop 484
gaattggaagaaatcttgggcattg

SEQ ID NO: 287207 - DNA, 25 bp, Artificial
  probe
  misc_feature (1)..(25): SEQ ID NO: 1219; WAN024CRQ; Start 459; Stop 483
agaattggaagaaatcttgggcatt

SEQ ID NO: 287208 - DNA, 25 bp, Artificial
  probe
  misc_feature (1)..(25): SEQ ID NO: 1220; WAN024F3T; Start 494; Stop 518
attctatctatgccattctcagtcc

SEQ ID NO: 287209 - DNA, 25 bp, Artificial
  probe
  misc_feature (1)..(25): SEQ ID NO: 1220; WAN024F3T; Start 409; Stop 433
cctattatcgccattattatcggtg

SEQ ID NO: 287210 - DNA, 25 bp, Artificial
  probe
  misc_feature (1)..(25): SEQ ID NO: 1220; WAN024F3T; Start 408; Stop 432
tcctattatcgccattattatcggt

SEQ ID NO: 287211 - DNA, 25 bp, Artificial
  probe
  misc_feature (1)..(25): SEQ ID NO: 1220; WAN024F3T; Start 413; Stop 437
ttatcgccattattatcggtgaagg

SEQ ID NO: 287212 - DNA, 25 bp, Artificial
  probe
  misc_feature (1)..(25): SEQ ID NO: 1220; WAN024F3T; Start 412; Stop 436
attatcgccattattatcggtgaag

SEQ ID NO: 287213 - DNA, 25 bp, Artificial
  probe
  misc_feature (1)..(25): SEQ ID NO: 1220; WAN024F3T; Start 495; Stop 519
ttctatctatgccattctcagtcca

SEQ ID NO: 287214 - DNA, 25 bp, Artificial
  probe
  misc_feature (1)..(25): SEQ ID NO: 1220; WAN024F3T; Start 496; Stop 520
tctatctatgccattctcagtccag

SEQ ID NO: 287215 - DNA, 25 bp, Artificial
  probe
  misc_feature (1)..(25): SEQ ID NO: 1220; WAN024F3T; Start 410; Stop 434
ctattatcgccattattatcggtga

SEQ ID NO: 287216 - DNA, 25 bp, Artificial
  probe
  misc_feature (1)..(25): SEQ ID NO: 1220; WAN024F3T; Start 407; Stop 431
ttcctattatcgccattattatcgg

SEQ ID NO: 287217 - DNA, 25 bp, Artificial
  probe
  misc_feature (1)..(25): SEQ ID NO: 1220; WAN024F3T; Start 497; Stop 521
ctatctatgccattctcagtccaga

SEQ ID NO: 287218 - DNA, 25 bp, Artificial
  probe
  misc_feature (1)..(25): SEQ ID NO: 1220; WAN024F3T; Start 414; Stop 438
tatcgccattattatcggtgaaggt

SEQ ID NO: 287219 - DNA, 25 bp, Artificial
  probe
  misc_feature (1)..(25): SEQ ID NO: 1220; WAN024F3T; Start 411; Stop 435
tattatcgccattattatcggtgaa

SEQ ID NO: 287220 - DNA, 25 bp, Artificial
  probe
  misc_feature (1)..(25): SEQ ID NO: 1220; WAN024F3T; Start 493; Stop 517
aattctatctatgccattctcagtc

SEQ ID NO: 287221 - DNA, 25 bp, Artificial
  probe
  misc_feature (1)..(25): SEQ ID NO: 1220; WAN024F3T; Start 406; Stop 430
gttcctattatcgccattattatcg

SEQ ID NO: 287222 - DNA, 25 bp, Artificial
  probe
  misc_feature (1)..(25): SEQ ID NO: 1220; WAN024F3T; Start 585; Stop 609
aatcacttcgcatgaactgttagaa

SEQ ID NO: 287223 - DNA, 25 bp, Artificial
  probe
  misc_feature (1)..(25): SEQ ID NO: 1220; WAN024F3T; Start 394; Stop 418
agtgacctgaaagttcctattatcg

SEQ ID NO: 287224 - DNA, 25 bp, Artificial
  probe
  misc_feature (1)..(25): SEQ ID NO: 1220; WAN024F3T; Start 390; Stop 414
aatgagtgacctgaaagttcctatt

SEQ ID NO: 287225 - DNA, 25 bp, Artificial
  probe
  misc_feature (1)..(25): SEQ ID NO: 1220; WAN024F3T; Start 389; Stop 413
aaatgagtgacctgaaagttcctat

SEQ ID NO: 287226 - DNA, 25 bp, Artificial
  probe
  misc_feature (1)..(25): SEQ ID NO: 1220; WAN024F3T; Start 736; Stop 760
gaagaacgctatcaacgatttagaa

SEQ ID NO: 287227 - DNA, 25 bp, Artificial
  probe
  misc_feature (1)..(25): SEQ ID NO: 1220; WAN024F3T; Start 399; Stop 423
cctgaaagttcctattatcgccatt

SEQ ID NO: 287228 - DNA, 25 bp, Artificial
  probe
  misc_feature (1)..(25): SEQ ID NO: 1220; WAN024F3T; Start 392; Stop 416
tgagtgacctgaaagttcctattat

SEQ ID NO: 287229 - DNA, 25 bp, Artificial
  probe
  misc_feature (1)..(25): SEQ ID NO: 1220; WAN024F3T; Start 391; Stop 415
atgagtgacctgaaagttcctatta

SEQ ID NO: 287230 - DNA, 25 bp, Artificial
  probe
  misc_feature (1)..(25): SEQ ID NO: 1220; WAN024F3T; Start 388; Stop 412
gaaatgagtgacctgaaagttccta

SEQ ID NO: 287231 - DNA, 25 bp, Artificial
  probe
  misc_feature (1)..(25): SEQ ID NO: 1220; WAN024F3T; Start 737; Stop 761
aagaacgctatcaacgatttagaaa

SEQ ID NO: 287232 - DNA, 25 bp, Artificial
  probe
  misc_feature (1)..(25): SEQ ID NO: 1220; WAN024F3T; Start 415; Stop 439
atcgccattattatcggtgaaggtg

SEQ ID NO: 287233 - DNA, 25 bp, Artificial
  probe
  misc_feature (1)..(25): SEQ ID NO: 1220; WAN024F3T; Start 419; Stop 443
ccattattatcggtgaaggtggttc

SEQ ID NO: 287234 - DNA, 25 bp, Artificial
  probe
  misc_feature (1)..(25): SEQ ID NO: 1220; WAN024F3T; Start 735; Stop 759
ggaagaacgctatcaacgatttaga

SEQ ID NO: 287235 - DNA, 25 bp, Artificial
  probe
  misc_feature (1)..(25): SEQ ID NO: 1220; WAN024F3T; Start 734; Stop 758
tggaagaacgctatcaacgatttag

SEQ ID NO: 287236 - DNA, 25 bp, Artificial
  probe
  misc_feature (1)..(25): SEQ ID NO: 1220; WAN024F3T; Start 733; Stop 757
ctggaagaacgctatcaacgattta

SEQ ID NO: 287237 - DNA, 25 bp, Artificial
  probe
  misc_feature (1)..(25): SEQ ID NO: 1220; WAN024F3T; Start 400; Stop 424
ctgaaagttcctattatcgccatta

SEQ ID NO: 287238 - DNA, 25 bp, Artificial
  probe
  misc_feature (1)..(25): SEQ ID NO: 1220; WAN024F3T; Start 393; Stop 417
gagtgacctgaaagttcctattatc

SEQ ID NO: 287239 - DNA, 25 bp, Artificial
  probe
  misc_feature (1)..(25): SEQ ID NO: 1220; WAN024F3T; Start 86; Stop 110
ttatccaattacatggtgaccgttc

SEQ ID NO: 287240 - DNA, 25 bp, Artificial
  probe
  misc_feature (1)..(25): SEQ ID NO: 1220; WAN024F3T; Start 385; Stop 409
atggaaatgagtgacctgaaagttc

SEQ ID NO: 287241 - DNA, 25 bp, Artificial
  probe
  misc_feature (1)..(25): SEQ ID NO: 1221; WAN024FPN; Start 171; Stop 195
tggtgcgttctatgactatctaatc

SEQ ID NO: 287242 - DNA, 25 bp, Artificial
  probe
  misc_feature (1)..(25): SEQ ID NO: 1221; WAN024FPN; Start 170; Stop 194
gtggtgcgttctatgactatctaat

SEQ ID NO: 287243 - DNA, 25 bp, Artificial
  probe
  misc_feature (1)..(25): SEQ ID NO: 1221; WAN024FPN; Start 172; Stop 196
ggtgcgttctatgactatctaatca

SEQ ID NO: 287244 - DNA, 25 bp, Artificial
  probe
  misc_feature (1)..(25): SEQ ID NO: 1221; WAN024FPN; Start 165; Stop 189
taatggtggtgcgttctatgactat

SEQ ID NO: 287245 - DNA, 25 bp, Artificial
  probe
  misc_feature (1)..(25): SEQ ID NO: 1221; WAN024FPN; Start 164; Stop 188
ataatggtggtgcgttctatgacta

SEQ ID NO: 287246 - DNA, 25 bp, Artificial
  probe
  misc_feature (1)..(25): SEQ ID NO: 1221; WAN024FPN; Start 116; Stop 140
aggaacttcgtaacagtattgtcat

SEQ ID NO: 287247 - DNA, 25 bp, Artificial
  probe
  misc_feature (1)..(25): SEQ ID NO: 1221; WAN024FPN; Start 115; Stop 139
aaggaacttcgtaacagtattgtca

SEQ ID NO: 287248 - DNA, 25 bp, Artificial
  probe
  misc_feature (1)..(25): SEQ ID NO: 1221; WAN024FPN; Start 169; Stop 193
ggtggtgcgttctatgactatctaa

SEQ ID NO: 287249 - DNA, 25 bp, Artificial
  probe
  misc_feature (1)..(25): SEQ ID NO: 1221; WAN024FPN; Start 117; Stop 141
ggaacttcgtaacagtattgtcatt

SEQ ID NO: 287250 - DNA, 25 bp, Artificial
  probe
  misc_feature (1)..(25): SEQ ID NO: 1221; WAN024FPN; Start 173; Stop 197
gtgcgttctatgactatctaatcaa

SEQ ID NO: 287251 - DNA, 25 bp, Artificial
  probe
  misc_feature (1)..(25): SEQ ID NO: 1221; WAN024FPN; Start 120; Stop 144
acttcgtaacagtattgtcattgaa

SEQ ID NO: 287252 - DNA, 25 bp, Artificial
  probe
  misc_feature (1)..(25): SEQ ID NO: 1221; WAN024FPN; Start 119; Stop 143
aacttcgtaacagtattgtcattga

SEQ ID NO: 287253 - DNA, 25 bp, Artificial
  probe
  misc_feature (1)..(25): SEQ ID NO: 1221; WAN024FPN; Start 163; Stop 187
aataatggtggtgcgttctatgact

SEQ ID NO: 287254 - DNA, 25 bp, Artificial
  probe
  misc_feature (1)..(25): SEQ ID NO: 1221; WAN024FPN; Start 118; Stop 142
gaacttcgtaacagtattgtcattg

SEQ ID NO: 287255 - DNA, 25 bp, Artificial
  probe
  misc_feature (1)..(25): SEQ ID NO: 1221; WAN024FPN; Start 123; Stop 147
tcgtaacagtattgtcattgaatgt

SEQ ID NO: 287256 - DNA, 25 bp, Artificial
  probe
  misc_feature (1)..(25): SEQ ID NO: 1221; WAN024FPN; Start 124; Stop 148
cgtaacagtattgtcattgaatgtc

SEQ ID NO: 287257 - DNA, 25 bp, Artificial
  probe
  misc_feature (1)..(25): SEQ ID NO: 1221; WAN024FPN; Start 166; Stop 190
aatggtggtgcgttctatgactatc

SEQ ID NO: 287258 - DNA, 25 bp, Artificial
  probe
  misc_feature (1)..(25): SEQ ID NO: 1221; WAN024FPN; Start 174; Stop 198
tgcgttctatgactatctaatcaat

SEQ ID NO: 287259 - DNA, 25 bp, Artificial
  probe
  misc_feature (1)..(25): SEQ ID NO: 1221; WAN024FPN; Start 168; Stop 192
tggtggtgcgttctatgactatcta

SEQ ID NO: 287260 - DNA, 25 bp, Artificial
  probe
  misc_feature (1)..(25): SEQ ID NO: 1221; WAN024FPN; Start 717; Stop 741
actggcaaacctaaacacatatcta

SEQ ID NO: 287261 - DNA, 25 bp, Artificial
  probe
  misc_feature (1)..(25): SEQ ID NO: 1221; WAN024FPN; Start 721; Stop 745
gcaaacctaaacacatatctaagcc

SEQ ID NO: 287262 - DNA, 25 bp, Artificial
  probe
  misc_feature (1)..(25): SEQ ID NO: 1221; WAN024FPN; Start 720; Stop 744
ggcaaacctaaacacatatctaagc

SEQ ID NO: 287263 - DNA, 25 bp, Artificial
  probe
  misc_feature (1)..(25): SEQ ID NO: 1221; WAN024FPN; Start 715; Stop 739
gaactggcaaacctaaacacatatc

SEQ ID NO: 287264 - DNA, 25 bp, Artificial
  probe
  misc_feature (1)..(25): SEQ ID NO: 1221; WAN024FPN; Start 716; Stop 740
aactggcaaacctaaacacatatct

SEQ ID NO: 287265 - DNA, 25 bp, Artificial
  probe
  misc_feature (1)..(25): SEQ ID NO: 1221; WAN024FPN; Start 634; Stop 658
tttagaaagggtggtggctataata

SEQ ID NO: 287266 - DNA, 25 bp, Artificial
  probe
  misc_feature (1)..(25): SEQ ID NO: 1221; WAN024FPN; Start 642; Stop 666
gggtggtggctataatagaaatgat

SEQ ID NO: 287267 - DNA, 25 bp, Artificial
  probe
  misc_feature (1)..(25): SEQ ID NO: 1221; WAN024FPN; Start 636; Stop 660
tagaaagggtggtggctataataga

SEQ ID NO: 287268 - DNA, 25 bp, Artificial
  probe
  misc_feature (1)..(25): SEQ ID NO: 1221; WAN024FPN; Start 284; Stop 308
atttaagaaagcccagtttacgaaa

SEQ ID NO: 287269 - DNA, 25 bp, Artificial
  probe
  misc_feature (1)..(25): SEQ ID NO: 1221; WAN024FPN; Start 122; Stop 146
ttcgtaacagtattgtcattgaatg

SEQ ID NO: 287270 - DNA, 25 bp, Artificial
  probe
  misc_feature (1)..(25): SEQ ID NO: 1221; WAN024FPN; Start 640; Stop 664
aagggtggtggctataatagaaatg

SEQ ID NO: 287271 - DNA, 25 bp, Artificial
  probe
  misc_feature (1)..(25): SEQ ID NO: 1221; WAN024FPN; Start 639; Stop 663
aaagggtggtggctataatagaaat

SEQ ID NO: 287272 - DNA, 25 bp, Artificial
  probe
  misc_feature (1)..(25): SEQ ID NO: 1221; WAN024FPN; Start 638; Stop 662
gaaagggtggtggctataatagaaa

SEQ ID NO: 287273 - DNA, 25 bp, Artificial
  probe
  misc_feature (1)..(25): SEQ ID NO: 1221; WAN024FPN; Start 635; Stop 659
ttagaaagggtggtggctataatag

SEQ ID NO: 287274 - DNA, 25 bp, Artificial
  probe
  misc_feature (1)..(25): SEQ ID NO: 1222; WAN024GGC; Start 775; Stop 799
gatgcttctggaccttatcactatg

SEQ ID NO: 287275 - DNA, 25 bp, Artificial
  probe
  misc_feature (1)..(25): SEQ ID NO: 1222; WAN024GGC; Start 593; Stop 617
ataaggaagagaagattgaattgcc

SEQ ID NO: 287276 - DNA, 25 bp, Artificial
  probe
  misc_feature (1)..(25): SEQ ID NO: 1222; WAN024GGC; Start 780; Stop 804
ttctggaccttatcactatgacttc

SEQ ID NO: 287277 - DNA, 25 bp, Artificial
  probe
  misc_feature (1)..(25): SEQ ID NO: 1222; WAN024GGC; Start 779; Stop 803
cttctggaccttatcactatgactt

SEQ ID NO: 287278 - DNA, 25 bp, Artificial
  probe
  misc_feature (1)..(25): SEQ ID NO: 1222; WAN024GGC; Start 690; Stop 714
ggtagtagaatatctggctgtggat

SEQ ID NO: 287279 - DNA, 25 bp, Artificial
  probe
  misc_feature (1)..(25): SEQ ID NO: 1222; WAN024GGC; Start 774; Stop 798
ggatgcttctggaccttatcactat

SEQ ID NO: 287280 - DNA, 25 bp, Artificial
  probe
  misc_feature (1)..(25): SEQ ID NO: 1222; WAN024GGC; Start 776; Stop 800
atgcttctggaccttatcactatga

SEQ ID NO: 287281 - DNA, 25 bp, Artificial
  probe
  misc_feature (1)..(25): SEQ ID NO: 1222; WAN024GGC; Start 357; Stop 381
aacttcttgccatgtctataaggat

SEQ ID NO: 287282 - DNA, 25 bp, Artificial
  probe
  misc_feature (1)..(25): SEQ ID NO: 1222; WAN024GGC; Start 358; Stop 382
acttcttgccatgtctataaggatg

SEQ ID NO: 287283 - DNA, 25 bp, Artificial
  probe
  misc_feature (1)..(25): SEQ ID NO: 1222; WAN024GGC; Start 691; Stop 715
gtagtagaatatctggctgtggata

SEQ ID NO: 287284 - DNA, 25 bp, Artificial
  probe
  misc_feature (1)..(25): SEQ ID NO: 1222; WAN024GGC; Start 194; Stop 218
atgtagatacgcttggtgctattgt

SEQ ID NO: 287285 - DNA, 25 bp, Artificial
  probe
  misc_feature (1)..(25): SEQ ID NO: 1222; WAN024GGC; Start 778; Stop 802
gcttctggaccttatcactatgact

SEQ ID NO: 287286 - DNA, 25 bp, Artificial
  probe
  misc_feature (1)..(25): SEQ ID NO: 1222; WAN024GGC; Start 937; Stop 961
ggtatagagtctagccattcctatg

SEQ ID NO: 287287 - DNA, 25 bp, Artificial
  probe
  misc_feature (1)..(25): SEQ ID NO: 1222; WAN024GGC; Start 686; Stop 710
ctcaggtagtagaatatctggctgt

SEQ ID NO: 287288 - DNA, 25 bp, Artificial
  probe
  misc_feature (1)..(25): SEQ ID NO: 1222; WAN024GGC; Start 760; Stop 784
tctatctgtgtcaaggatgcttctg

SEQ ID NO: 287289 - DNA, 25 bp, Artificial
  probe
  misc_feature (1)..(25): SEQ ID NO: 1222; WAN024GGC; Start 759; Stop 783
gtctatctgtgtcaaggatgcttct

SEQ ID NO: 287290 - DNA, 25 bp, Artificial
  probe
  misc_feature (1)..(25): SEQ ID NO: 1222; WAN024GGC; Start 689; Stop 713
aggtagtagaatatctggctgtgga

SEQ ID NO: 287291 - DNA, 25 bp, Artificial
  probe
  misc_feature (1)..(25): SEQ ID NO: 1222; WAN024GGC; Start 940; Stop 964
atagagtctagccattcctatgagc

SEQ ID NO: 287292 - DNA, 25 bp, Artificial
  probe
  misc_feature (1)..(25): SEQ ID NO: 1222; WAN024GGC; Start 687; Stop 711
tcaggtagtagaatatctggctgtg

SEQ ID NO: 287293 - DNA, 25 bp, Artificial
  probe
  misc_feature (1)..(25): SEQ ID NO: 1222; WAN024GGC; Start 777; Stop 801
tgcttctggaccttatcactatgac

SEQ ID NO: 287294 - DNA, 25 bp, Artificial
  probe
  misc_feature (1)..(25): SEQ ID NO: 1222; WAN024GGC; Start 758; Stop 782
tgtctatctgtgtcaaggatgcttc

SEQ ID NO: 287295 - DNA, 25 bp, Artificial
  probe
  misc_feature (1)..(25): SEQ ID NO: 1222; WAN024GGC; Start 359; Stop 383
cttcttgccatgtctataaggatgc

SEQ ID NO: 287296 - DNA, 25 bp, Artificial
  probe
  misc_feature (1)..(25): SEQ ID NO: 1222; WAN024GGC; Start 938; Stop 962
gtatagagtctagccattcctatga

SEQ ID NO: 287297 - DNA, 25 bp, Artificial
  probe
  misc_feature (1)..(25): SEQ ID NO: 1222; WAN024GGC; Start 781; Stop 805
tctggaccttatcactatgacttcc

SEQ ID NO: 287298 - DNA, 25 bp, Artificial
  probe
  misc_feature (1)..(25): SEQ ID NO: 1222; WAN024GGC; Start 193; Stop 217
catgtagatacgcttggtgctattg

SEQ ID NO: 287299 - DNA, 25 bp, Artificial
  probe
  misc_feature (1)..(25): SEQ ID NO: 1222; WAN024GGC; Start 935; Stop 959
ctggtatagagtctagccattccta

SEQ ID NO: 287300 - DNA, 25 bp, Artificial
  probe
  misc_feature (1)..(25): SEQ ID NO: 1222; WAN024GGC; Start 757; Stop 781
gtgtctatctgtgtcaaggatgctt

SEQ ID NO: 287301 - DNA, 25 bp, Artificial
  probe
  misc_feature (1)..(25): SEQ ID NO: 1222; WAN024GGC; Start 936; Stop 960
tggtatagagtctagccattcctat

SEQ ID NO: 287302 - DNA, 25 bp, Artificial
  probe
  misc_feature (1)..(25): SEQ ID NO: 1222; WAN024GGC; Start 195; Stop 219
tgtagatacgcttggtgctattgtc

SEQ ID NO: 287303 - DNA, 25 bp, Artificial
  probe
  misc_feature (1)..(25): SEQ ID NO: 1222; WAN024GGC; Start 939; Stop 963
tatagagtctagccattcctatgag

SEQ ID NO: 287304 - DNA, 25 bp, Artificial
  probe
  misc_feature (1)..(25): SEQ ID NO: 1222; WAN024GGC; Start 688; Stop 712
caggtagtagaatatctggctgtgg

SEQ ID NO: 287305 - DNA, 25 bp, Artificial
  probe
  misc_feature (1)..(25): SEQ ID NO: 1222; WAN024GGC; Start 685; Stop 709
gctcaggtagtagaatatctggctg

SEQ ID NO: 287306 - DNA, 25 bp, Artificial
  probe
  misc_feature (1)..(25): SEQ ID NO: 1222; WAN024GGC; Start 683; Stop 707
ctgctcaggtagtagaatatctggc

SEQ ID NO: 287307 - DNA, 25 bp, Artificial
  probe
  misc_feature (1)..(25): SEQ ID NO: 1223; WAN024DC9; Start 228; Stop 252
taagtacatcatcggagttaccatc

SEQ ID NO: 287308 - DNA, 25 bp, Artificial
  probe
  misc_feature (1)..(25): SEQ ID NO: 1223; WAN024DC9; Start 227; Stop 251
ctaagtacatcatcggagttaccat

SEQ ID NO: 287309 - DNA, 25 bp, Artificial
  probe
  misc_feature (1)..(25): SEQ ID NO: 1223; WAN024DC9; Start 226; Stop 250
cctaagtacatcatcggagttacca

SEQ ID NO: 287310 - DNA, 25 bp, Artificial
  probe
  misc_feature (1)..(25): SEQ ID NO: 1223; WAN024DC9; Start 518; Stop 542
cttcattgattattggagcgattat

SEQ ID NO: 287311 - DNA, 25 bp, Artificial
  probe
  misc_feature (1)..(25): SEQ ID NO: 1223; WAN024DC9; Start 525; Stop 549
gattattggagcgattattattggt

SEQ ID NO: 287312 - DNA, 25 bp, Artificial
  probe
  misc_feature (1)..(25): SEQ ID NO: 1223; WAN024DC9; Start 524; Stop 548
tgattattggagcgattattattgg

SEQ ID NO: 287313 - DNA, 25 bp, Artificial
  probe
  misc_feature (1)..(25): SEQ ID NO: 1223; WAN024DC9; Start 246; Stop 270
taccatcggttgtatgattgctaat

SEQ ID NO: 287314 - DNA, 25 bp, Artificial
  probe
  misc_feature (1)..(25): SEQ ID NO: 1223; WAN024DC9; Start 245; Stop 269
ttaccatcggttgtatgattgctaa

SEQ ID NO: 287315 - DNA, 25 bp, Artificial
  probe
  misc_feature (1)..(25): SEQ ID NO: 1223; WAN024DC9; Start 222; Stop 246
caatcctaagtacatcatcggagtt

SEQ ID NO: 287316 - DNA, 25 bp, Artificial
  probe
  misc_feature (1)..(25): SEQ ID NO: 1223; WAN024DC9; Start 247; Stop 271
accatcggttgtatgattgctaatt

SEQ ID NO: 287317 - DNA, 25 bp, Artificial
  probe
  misc_feature (1)..(25): SEQ ID NO: 1223; WAN024DC9; Start 229; Stop 253
aagtacatcatcggagttaccatcg

SEQ ID NO: 287318 - DNA, 25 bp, Artificial
  probe
  misc_feature (1)..(25): SEQ ID NO: 1223; WAN024DC9; Start 224; Stop 248
atcctaagtacatcatcggagttac

SEQ ID NO: 287319 - DNA, 25 bp, Artificial
  probe
  misc_feature (1)..(25): SEQ ID NO: 1223; WAN024DC9; Start 220; Stop 244
tacaatcctaagtacatcatcggag

SEQ ID NO: 287320 - DNA, 25 bp, Artificial
  probe
  misc_feature (1)..(25): SEQ ID NO: 1223; WAN024DC9; Start 85; Stop 109
actattcgtgatgttgcagatattg

SEQ ID NO: 287321 - DNA, 25 bp, Artificial
  probe
  misc_feature (1)..(25): SEQ ID NO: 1223; WAN024DC9; Start 244; Stop 268
gttaccatcggttgtatgattgcta

SEQ ID NO: 287322 - DNA, 25 bp, Artificial
  probe
  misc_feature (1)..(25): SEQ ID NO: 1223; WAN024DC9; Start 172; Stop 196
ggtgcttatcagtttcgtatttcag

SEQ ID NO: 287323 - DNA, 25 bp, Artificial
  probe
  misc_feature (1)..(25): SEQ ID NO: 1223; WAN024DC9; Start 170; Stop 194
atggtgcttatcagtttcgtatttc

SEQ ID NO: 287324 - DNA, 25 bp, Artificial
  probe
  misc_feature (1)..(25): SEQ ID NO: 1223; WAN024DC9; Start 219; Stop 243
ttacaatcctaagtacatcatcgga

SEQ ID NO: 287325 - DNA, 25 bp, Artificial
  probe
  misc_feature (1)..(25): SEQ ID NO: 1223; WAN024DC9; Start 173; Stop 197
gtgcttatcagtttcgtatttcaga

SEQ ID NO: 287326 - DNA, 25 bp, Artificial
  probe
  misc_feature (1)..(25): SEQ ID NO: 1223; WAN024DC9; Start 221; Stop 245
acaatcctaagtacatcatcggagt

SEQ ID NO: 287327 - DNA, 25 bp, Artificial
  probe
  misc_feature (1)..(25): SEQ ID NO: 1223; WAN024DC9; Start 519; Stop 543
ttcattgattattggagcgattatt

SEQ ID NO: 287328 - DNA, 25 bp, Artificial
  probe
  misc_feature (1)..(25): SEQ ID NO: 1223; WAN024DC9; Start 225; Stop 249
tcctaagtacatcatcggagttacc

SEQ ID NO: 287329 - DNA, 25 bp, Artificial
  probe
  misc_feature (1)..(25): SEQ ID NO: 1223; WAN024DC9; Start 171; Stop 195
tggtgcttatcagtttcgtatttca

SEQ ID NO: 287330 - DNA, 25 bp, Artificial
  probe
  misc_feature (1)..(25): SEQ ID NO: 1223; WAN024DC9; Start 368; Stop 392
attacctctttaacggattgattcg

SEQ ID NO: 287331 - DNA, 25 bp, Artificial
  probe
  misc_feature (1)..(25): SEQ ID NO: 1223; WAN024DC9; Start 223; Stop 247
aatcctaagtacatcatcggagtta

SEQ ID NO: 287332 - DNA, 25 bp, Artificial
  probe
  misc_feature (1)..(25): SEQ ID NO: 1223; WAN024DC9; Start 168; Stop 192
ctatggtgcttatcagtttcgtatt

SEQ ID NO: 287333 - DNA, 25 bp, Artificial
  probe
  misc_feature (1)..(25): SEQ ID NO: 1223; WAN024DC9; Start 167; Stop 191
gctatggtgcttatcagtttcgtat

SEQ ID NO: 287334 - DNA, 25 bp, Artificial
  probe
  misc_feature (1)..(25): SEQ ID NO: 1223; WAN024DC9; Start 24; Stop 48
cttctttcaccaagcatattacacg

SEQ ID NO: 287335 - DNA, 25 bp, Artificial
  probe
  misc_feature (1)..(25): SEQ ID NO: 1223; WAN024DC9; Start 241; Stop 265
ggagttaccatcggttgtatgattg

SEQ ID NO: 287336 - DNA, 25 bp, Artificial
  probe
  misc_feature (1)..(25): SEQ ID NO: 1223; WAN024DC9; Start 248; Stop 272
ccatcggttgtatgattgctaattt

SEQ ID NO: 287337 - DNA, 25 bp, Artificial
  probe
  misc_feature (1)..(25): SEQ ID NO: 1223; WAN024DC9; Start 251; Stop 275
tcggttgtatgattgctaatttctt

SEQ ID NO: 287338 - DNA, 25 bp, Artificial
  probe
  misc_feature (1)..(25): SEQ ID NO: 1223; WAN024DC9; Start 366; Stop 390
ggattacctctttaacggattgatt

SEQ ID NO: 287339 - DNA, 25 bp, Artificial
  probe
  misc_feature (1)..(25): SEQ ID NO: 1223; WAN024DC9; Start 80; Stop 104
aattaactattcgtgatgttgcaga

SEQ ID NO: 287340 - DNA, 25 bp, Artificial
  probe
  misc_feature (1)..(25): SEQ ID NO: 1224; WAN024FSM; Start 806; Stop 830
ataataatgttctctggtcactggc

SEQ ID NO: 287341 - DNA, 25 bp, Artificial
  probe
  misc_feature (1)..(25): SEQ ID NO: 1224; WAN024FSM; Start 805; Stop 829
aataataatgttctctggtcactgg

SEQ ID NO: 287342 - DNA, 25 bp, Artificial
  probe
  misc_feature (1)..(25): SEQ ID NO: 1224; WAN024FSM; Start 253; Stop 277
tcctttatcgttaccattctctcag

SEQ ID NO: 287343 - DNA, 25 bp, Artificial
  probe
  misc_feature (1)..(25): SEQ ID NO: 1224; WAN024FSM; Start 81; Stop 105
ctttgcctgtctttctttgatagtc

SEQ ID NO: 287344 - DNA, 25 bp, Artificial
  probe
  misc_feature (1)..(25): SEQ ID NO: 1224; WAN024FSM; Start 252; Stop 276
ttcctttatcgttaccattctctca

SEQ ID NO: 287345 - DNA, 25 bp, Artificial
  probe
  misc_feature (1)..(25): SEQ ID NO: 1224; WAN024FSM; Start 251; Stop 275
gttcctttatcgttaccattctctc

SEQ ID NO: 287346 - DNA, 25 bp, Artificial
  probe
  misc_feature (1)..(25): SEQ ID NO: 1224; WAN024FSM; Start 765; Stop 789
attaactatgggaattgggaacact

SEQ ID NO: 287347 - DNA, 25 bp, Artificial
  probe
  misc_feature (1)..(25): SEQ ID NO: 1224; WAN024FSM; Start 766; Stop 790
ttaactatgggaattgggaacactg

SEQ ID NO: 287348 - DNA, 25 bp, Artificial
  probe
  misc_feature (1)..(25): SEQ ID NO: 1224; WAN024FSM; Start 80; Stop 104
cctttgcctgtctttctttgatagt

SEQ ID NO: 287349 - DNA, 25 bp, Artificial
  probe
  misc_feature (1)..(25): SEQ ID NO: 1224; WAN024FSM; Start 79; Stop 103
acctttgcctgtctttctttgatag

SEQ ID NO: 287350 - DNA, 25 bp, Artificial
  probe
  misc_feature (1)..(25): SEQ ID NO: 1224; WAN024FSM; Start 255; Stop 279
ctttatcgttaccattctctcagcc

SEQ ID NO: 287351 - DNA, 25 bp, Artificial
  probe
  misc_feature (1)..(25): SEQ ID NO: 1224; WAN024FSM; Start 254; Stop 278
cctttatcgttaccattctctcagc

SEQ ID NO: 287352 - DNA, 25 bp, Artificial
  probe
  misc_feature (1)..(25): SEQ ID NO: 1224; WAN024FSM; Start 86; Stop 110
cctgtctttctttgatagtcatcct

SEQ ID NO: 287353 - DNA, 25 bp, Artificial
  probe
  misc_feature (1)..(25): SEQ ID NO: 1224; WAN024FSM; Start 219; Stop 243
taaagaatttggtgcccttcctatg

SEQ ID NO: 287354 - DNA, 25 bp, Artificial
  probe
  misc_feature (1)..(25): SEQ ID NO: 1224; WAN024FSM; Start 218; Stop 242
gtaaagaatttggtgcccttcctat

SEQ ID NO: 287355 - DNA, 25 bp, Artificial
  probe
  misc_feature (1)..(25): SEQ ID NO: 1224; WAN024FSM; Start 91; Stop 115
ctttctttgatagtcatccttgtgg

SEQ ID NO: 287356 - DNA, 25 bp, Artificial
  probe
  misc_feature (1)..(25): SEQ ID NO: 1224; WAN024FSM; Start 83; Stop 107
ttgcctgtctttctttgatagtcat

SEQ ID NO: 287357 - DNA, 25 bp, Artificial
  probe
  misc_feature (1)..(25): SEQ ID NO: 1224; WAN024FSM; Start 155; Stop 179
ccttctttgtcaatggtgtgaatat

SEQ ID NO: 287358 - DNA, 25 bp, Artificial
  probe
  misc_feature (1)..(25): SEQ ID NO: 1224; WAN024FSM; Start 82; Stop 106
tttgcctgtctttctttgatagtca

SEQ ID NO: 287359 - DNA, 25 bp, Artificial
  probe
  misc_feature (1)..(25): SEQ ID NO: 1224; WAN024FSM; Start 168; Stop 192
tggtgtgaatatctttgactttctt

SEQ ID NO: 287360 - DNA, 25 bp, Artificial
  probe
  misc_feature (1)..(25): SEQ ID NO: 1224; WAN024FSM; Start 84; Stop 108
tgcctgtctttctttgatagtcatc

SEQ ID NO: 287361 - DNA, 25 bp, Artificial
  probe
  misc_feature (1)..(25): SEQ ID NO: 1224; WAN024FSM; Start 764; Stop 788
tattaactatgggaattgggaacac

SEQ ID NO: 287362 - DNA, 25 bp, Artificial
  probe
  misc_feature (1)..(25): SEQ ID NO: 1224; WAN024FSM; Start 214; Stop 238
tctagtaaagaatttggtgcccttc

SEQ ID NO: 287363 - DNA, 25 bp, Artificial
  probe
  misc_feature (1)..(25): SEQ ID NO: 1224; WAN024FSM; Start 767; Stop 791
taactatgggaattgggaacactgt

SEQ ID NO: 287364 - DNA, 25 bp, Artificial
  probe
  misc_feature (1)..(25): SEQ ID NO: 1224; WAN024FSM; Start 167; Stop 191
atggtgtgaatatctttgactttct

SEQ ID NO: 287365 - DNA, 25 bp, Artificial
  probe
  misc_feature (1)..(25): SEQ ID NO: 1224; WAN024FSM; Start 223; Stop 247
gaatttggtgcccttcctatgattt

SEQ ID NO: 287366 - DNA, 25 bp, Artificial
  probe
  misc_feature (1)..(25): SEQ ID NO: 1224; WAN024FSM; Start 90; Stop 114
tctttctttgatagtcatccttgtg

SEQ ID NO: 287367 - DNA, 25 bp, Artificial
  probe
  misc_feature (1)..(25): SEQ ID NO: 1224; WAN024FSM; Start 89; Stop 113
gtctttctttgatagtcatccttgt

SEQ ID NO: 287368 - DNA, 25 bp, Artificial
  probe
  misc_feature (1)..(25): SEQ ID NO: 1224; WAN024FSM; Start 88; Stop 112
tgtctttctttgatagtcatccttg

SEQ ID NO: 287369 - DNA, 25 bp, Artificial
  probe
  misc_feature (1)..(25): SEQ ID NO: 1224; WAN024FSM; Start 158; Stop 182
tctttgtcaatggtgtgaatatctt

SEQ ID NO: 287370 - DNA, 25 bp, Artificial
  probe
  misc_feature (1)..(25): SEQ ID NO: 1224; WAN024FSM; Start 157; Stop 181
ttctttgtcaatggtgtgaatatct

SEQ ID NO: 287371 - DNA, 25 bp, Artificial
  probe
  misc_feature (1)..(25): SEQ ID NO: 1224; WAN024FSM; Start 92; Stop 116
tttctttgatagtcatccttgtggc

SEQ ID NO: 287372 - DNA, 25 bp, Artificial
  probe
  misc_feature (1)..(25): SEQ ID NO: 1224; WAN024FSM; Start 786; Stop 810
cactgtcatgggaactgtaaataat

SEQ ID NO: 287373 - DNA, 25 bp, Artificial
  probe
  misc_feature (1)..(25): SEQ ID NO: 1225; WAN024DJY; Start 269; Stop 293
tagaagtagcaaaggaaatgttagc

SEQ ID NO: 287374 - DNA, 25 bp, Artificial
  probe
  misc_feature (1)..(25): SEQ ID NO: 1225; WAN024DJY; Start 189; Stop 213
atacgcaagtggagtggaaattaaa

SEQ ID NO: 287375 - DNA, 25 bp, Artificial
  probe
  misc_feature (1)..(25): SEQ ID NO: 1225; WAN024DJY; Start 188; Stop 212
aatacgcaagtggagtggaaattaa

SEQ ID NO: 287376 - DNA, 25 bp, Artificial
  probe
  misc_feature (1)..(25): SEQ ID NO: 1225; WAN024DJY; Start 251; Stop 275
tgaccactatgacattattagaagt

SEQ ID NO: 287377 - DNA, 25 bp, Artificial
  probe
  misc_feature (1)..(25): SEQ ID NO: 1225; WAN024DJY; Start 187; Stop 211
gaatacgcaagtggagtggaaatta

SEQ ID NO: 287378 - DNA, 25 bp, Artificial
  probe
  misc_feature (1)..(25): SEQ ID NO: 1225; WAN024DJY; Start 254; Stop 278
ccactatgacattattagaagtagc

SEQ ID NO: 287379 - DNA, 25 bp, Artificial
  probe
  misc_feature (1)..(25): SEQ ID NO: 1225; WAN024DJY; Start 59; Stop 83
caaggtcagaaatacatgaagcatt

SEQ ID NO: 287380 - DNA, 25 bp, Artificial
  probe
  misc_feature (1)..(25): SEQ ID NO: 1225; WAN024DJY; Start 260; Stop 284
tgacattattagaagtagcaaagga

SEQ ID NO: 287381 - DNA, 25 bp, Artificial
  probe
  misc_feature (1)..(25): SEQ ID NO: 1225; WAN024DJY; Start 61; Stop 85
aggtcagaaatacatgaagcatttg

SEQ ID NO: 287382 - DNA, 25 bp, Artificial
  probe
  misc_feature (1)..(25): SEQ ID NO: 1225; WAN024DJY; Start 227; Stop 251
tggtacatgctcaagatcatttaat

SEQ ID NO: 287383 - DNA, 25 bp, Artificial
  probe
  misc_feature (1)..(25): SEQ ID NO: 1225; WAN024DJY; Start 226; Stop 250
atggtacatgctcaagatcatttaa

SEQ ID NO: 287384 - DNA, 25 bp, Artificial
  probe
  misc_feature (1)..(25): SEQ ID NO: 1225; WAN024DJY; Start 228; Stop 252
ggtacatgctcaagatcatttaatg

SEQ ID NO: 287385 - DNA, 25 bp, Artificial
  probe
  misc_feature (1)..(25): SEQ ID NO: 1225; WAN024DJY; Start 60; Stop 84
aaggtcagaaatacatgaagcattt

SEQ ID NO: 287386 - DNA, 25 bp, Artificial
  probe
  misc_feature (1)..(25): SEQ ID NO: 1225; WAN024DJY; Start 185; Stop 209
aagaatacgcaagtggagtggaaat

SEQ ID NO: 287387 - DNA, 25 bp, Artificial
  probe
  misc_feature (1)..(25): SEQ ID NO: 1225; WAN024DJY; Start 250; Stop 274
atgaccactatgacattattagaag

SEQ ID NO: 287388 - DNA, 25 bp, Artificial
  probe
  misc_feature (1)..(25): SEQ ID NO: 1225; WAN024DJY; Start 62; Stop 86
ggtcagaaatacatgaagcatttgc

SEQ ID NO: 287389 - DNA, 25 bp, Artificial
  probe
  misc_feature (1)..(25): SEQ ID NO: 1225; WAN024DJY; Start 186; Stop 210
agaatacgcaagtggagtggaaatt

SEQ ID NO: 287390 - DNA, 25 bp, Artificial
  probe
  misc_feature (1)..(25): SEQ ID NO: 1225; WAN024DJY; Start 255; Stop 279
cactatgacattattagaagtagca

SEQ ID NO: 287391 - DNA, 25 bp, Artificial
  probe
  misc_feature (1)..(25): SEQ ID NO: 1225; WAN024DJY; Start 268; Stop 292
ttagaagtagcaaaggaaatgttag

SEQ ID NO: 287392 - DNA, 25 bp, Artificial
  probe
  misc_feature (1)..(25): SEQ ID NO: 1225; WAN024DJY; Start 58; Stop 82
gcaaggtcagaaatacatgaagcat

SEQ ID NO: 287393 - DNA, 25 bp, Artificial
  probe
  misc_feature (1)..(25): SEQ ID NO: 1225; WAN024DJY; Start 52; Stop 76
ggaaatgcaaggtcagaaatacatg

SEQ ID NO: 287394 - DNA, 25 bp, Artificial
  probe
  misc_feature (1)..(25): SEQ ID NO: 1225; WAN024DJY; Start 221; Stop 245
ttatcatggtacatgctcaagatca

SEQ ID NO: 287395 - DNA, 25 bp, Artificial
  probe
  misc_feature (1)..(25): SEQ ID NO: 1225; WAN024DJY; Start 223; Stop 247
atcatggtacatgctcaagatcatt

SEQ ID NO: 287396 - DNA, 25 bp, Artificial
  probe
  misc_feature (1)..(25): SEQ ID NO: 1225; WAN024DJY; Start 222; Stop 246
tatcatggtacatgctcaagatcat

SEQ ID NO: 287397 - DNA, 25 bp, Artificial
  probe
  misc_feature (1)..(25): SEQ ID NO: 1225; WAN024DJY; Start 29; Stop 53
catttgaaattatcctgcattcggg

SEQ ID NO: 287398 - DNA, 25 bp, Artificial
  probe
  misc_feature (1)..(25): SEQ ID NO: 1225; WAN024DJY; Start 53; Stop 77
gaaatgcaaggtcagaaatacatga

SEQ ID NO: 287399 - DNA, 25 bp, Artificial
  probe
  misc_feature (1)..(25): SEQ ID NO: 1225; WAN024DJY; Start 55; Stop 79
aatgcaaggtcagaaatacatgaag

SEQ ID NO: 287400 - DNA, 25 bp, Artificial
  probe
  misc_feature (1)..(25): SEQ ID NO: 1225; WAN024DJY; Start 19; Stop 43
caggttgcagcatttgaaattatcc

SEQ ID NO: 287401 - DNA, 25 bp, Artificial
  probe
  misc_feature (1)..(25): SEQ ID NO: 1225; WAN024DJY; Start 261; Stop 285
gacattattagaagtagcaaaggaa

SEQ ID NO: 287402 - DNA, 25 bp, Artificial
  probe
  misc_feature (1)..(25): SEQ ID NO: 1225; WAN024DJY; Start 54; Stop 78
aaatgcaaggtcagaaatacatgaa

SEQ ID NO: 287403 - DNA, 25 bp, Artificial
  probe
  misc_feature (1)..(25): SEQ ID NO: 1225; WAN024DJY; Start 259; Stop 283
atgacattattagaagtagcaaagg

SEQ ID NO: 287404 - DNA, 25 bp, Artificial
  probe
  misc_feature (1)..(25): SEQ ID NO: 1225; WAN024DJY; Start 220; Stop 244
attatcatggtacatgctcaagatc

SEQ ID NO: 287405 - DNA, 25 bp, Artificial
  probe
  misc_feature (1)..(25): SEQ ID NO: 1225; WAN024DJY; Start 51; Stop 75
gggaaatgcaaggtcagaaatacat

SEQ ID NO: 287406 - DNA, 25 bp, Artificial
  probe
  misc_feature (1)..(25): SEQ ID NO: 1226; WAN024DKG; Start 403; Stop 427
aatgttcacttctatcctctagcag

SEQ ID NO: 287407 - DNA, 25 bp, Artificial
  probe
  misc_feature (1)..(25): SEQ ID NO: 1226; WAN024DKG; Start 656; Stop 680
atcaatggttagacatgcttacaga

SEQ ID NO: 287408 - DNA, 25 bp, Artificial
  probe
  misc_feature (1)..(25): SEQ ID NO: 1226; WAN024DKG; Start 655; Stop 679
catcaatggttagacatgcttacag

SEQ ID NO: 287409 - DNA, 25 bp, Artificial
  probe
  misc_feature (1)..(25): SEQ ID NO: 1226; WAN024DKG; Start 657; Stop 681
tcaatggttagacatgcttacagag

SEQ ID NO: 287410 - DNA, 25 bp, Artificial
  probe
  misc_feature (1)..(25): SEQ ID NO: 1226; WAN024DKG; Start 665; Stop 689
tagacatgcttacagaggatgactt

SEQ ID NO: 287411 - DNA, 25 bp, Artificial
  probe
  misc_feature (1)..(25): SEQ ID NO: 1226; WAN024DKG; Start 664; Stop 688
ttagacatgcttacagaggatgact

SEQ ID NO: 287412 - DNA, 25 bp, Artificial
  probe
  misc_feature (1)..(25): SEQ ID NO: 1226; WAN024DKG; Start 663; Stop 687
gttagacatgcttacagaggatgac

SEQ ID NO: 287413 - DNA, 25 bp, Artificial
  probe
  misc_feature (1)..(25): SEQ ID NO: 1226; WAN024DKG; Start 660; Stop 684
atggttagacatgcttacagaggat

SEQ ID NO: 287414 - DNA, 25 bp, Artificial
  probe
  misc_feature (1)..(25): SEQ ID NO: 1226; WAN024DKG; Start 659; Stop 683
aatggttagacatgcttacagagga

SEQ ID NO: 287415 - DNA, 25 bp, Artificial
  probe
  misc_feature (1)..(25): SEQ ID NO: 1226; WAN024DKG; Start 658; Stop 682
caatggttagacatgcttacagagg

SEQ ID NO: 287416 - DNA, 25 bp, Artificial
  probe
  misc_feature (1)..(25): SEQ ID NO: 1226; WAN024DKG; Start 608; Stop 632
tagatatagctgtagtcggaattgg

SEQ ID NO: 287417 - DNA, 25 bp, Artificial
  probe
  misc_feature (1)..(25): SEQ ID NO: 1226; WAN024DKG; Start 610; Stop 634
gatatagctgtagtcggaattggtg

SEQ ID NO: 287418 - DNA, 25 bp, Artificial
  probe
  misc_feature (1)..(25): SEQ ID NO: 1226; WAN024DKG; Start 609; Stop 633
agatatagctgtagtcggaattggt

SEQ ID NO: 287419 - DNA, 25 bp, Artificial
  probe
  misc_feature (1)..(25): SEQ ID NO: 1226; WAN024DKG; Start 612; Stop 636
tatagctgtagtcggaattggtgat

SEQ ID NO: 287420 - DNA, 25 bp, Artificial
  probe
  misc_feature (1)..(25): SEQ ID NO: 1226; WAN024DKG; Start 611; Stop 635
atatagctgtagtcggaattggtga

SEQ ID NO: 287421 - DNA, 25 bp, Artificial
  probe
  misc_feature (1)..(25): SEQ ID NO: 1226; WAN024DKG; Start 404; Stop 428
atgttcacttctatcctctagcagg

SEQ ID NO: 287422 - DNA, 25 bp, Artificial
  probe
  misc_feature (1)..(25): SEQ ID NO: 1226; WAN024DKG; Start 662; Stop 686
ggttagacatgcttacagaggatga

SEQ ID NO: 287423 - DNA, 25 bp, Artificial
  probe
  misc_feature (1)..(25): SEQ ID NO: 1226; WAN024DKG; Start 435; Stop 459
tagtcacatacacgctaaataccat

SEQ ID NO: 287424 - DNA, 25 bp, Artificial
  probe
  misc_feature (1)..(25): SEQ ID NO: 1226; WAN024DKG; Start 62; Stop 86
taaatcagtcacaaatagcagcaaa

SEQ ID NO: 287425 - DNA, 25 bp, Artificial
  probe
  misc_feature (1)..(25): SEQ ID NO: 1226; WAN024DKG; Start 60; Stop 84
cttaaatcagtcacaaatagcagca

SEQ ID NO: 287426 - DNA, 25 bp, Artificial
  probe
  misc_feature (1)..(25): SEQ ID NO: 1226; WAN024DKG; Start 61; Stop 85
ttaaatcagtcacaaatagcagcaa

SEQ ID NO: 287427 - DNA, 25 bp, Artificial
  probe
  misc_feature (1)..(25): SEQ ID NO: 1226; WAN024DKG; Start 661; Stop 685
tggttagacatgcttacagaggatg

SEQ ID NO: 287428 - DNA, 25 bp, Artificial
  probe
  misc_feature (1)..(25): SEQ ID NO: 1226; WAN024DKG; Start 872; Stop 896
ctgtcttgcgtgctaatttagtaaa

SEQ ID NO: 287429 - DNA, 25 bp, Artificial
  probe
  misc_feature (1)..(25): SEQ ID NO: 1226; WAN024DKG; Start 399; Stop 423
ccgaaatgttcacttctatcctcta

SEQ ID NO: 287430 - DNA, 25 bp, Artificial
  probe
  misc_feature (1)..(25): SEQ ID NO: 1226; WAN024DKG; Start 871; Stop 895
tctgtcttgcgtgctaatttagtaa

SEQ ID NO: 287431 - DNA, 25 bp, Artificial
  probe
  misc_feature (1)..(25): SEQ ID NO: 1226; WAN024DKG; Start 613; Stop 637
atagctgtagtcggaattggtgatt

SEQ ID NO: 287432 - DNA, 25 bp, Artificial
  probe
  misc_feature (1)..(25): SEQ ID NO: 1226; WAN024DKG; Start 434; Stop 458
ctagtcacatacacgctaaatacca

SEQ ID NO: 287433 - DNA, 25 bp, Artificial
  probe
  misc_feature (1)..(25): SEQ ID NO: 1226; WAN024DKG; Start 432; Stop 456
tcctagtcacatacacgctaaatac

SEQ ID NO: 287434 - DNA, 25 bp, Artificial
  probe
  misc_feature (1)..(25): SEQ ID NO: 1226; WAN024DKG; Start 431; Stop 455
gtcctagtcacatacacgctaaata

SEQ ID NO: 287435 - DNA, 25 bp, Artificial
  probe
  misc_feature (1)..(25): SEQ ID NO: 1226; WAN024DKG; Start 402; Stop 426
aaatgttcacttctatcctctagca

SEQ ID NO: 287436 - DNA, 25 bp, Artificial
  probe
  misc_feature (1)..(25): SEQ ID NO: 1226; WAN024DKG; Start 406; Stop 430
gttcacttctatcctctagcaggtg

SEQ ID NO: 287437 - DNA, 25 bp, Artificial
  probe
  misc_feature (1)..(25): SEQ ID NO: 1226; WAN024DKG; Start 433; Stop 457
cctagtcacatacacgctaaatacc

SEQ ID NO: 287438 - DNA, 25 bp, Artificial
  probe
  misc_feature (1)..(25): SEQ ID NO: 1226; WAN024DKG; Start 59; Stop 83
acttaaatcagtcacaaatagcagc

SEQ ID NO: 287439 - DNA, 25 bp, Artificial
  probe
  misc_feature (1)..(25): SEQ ID NO: 1227; WAN024E2K; Start 3; Stop 27
gaatcaagtaatcaatgctatgcgt

SEQ ID NO: 287440 - DNA, 25 bp, Artificial
  probe
  misc_feature (1)..(25): SEQ ID NO: 1227; WAN024E2K; Start 5; Stop 29
atcaagtaatcaatgctatgcgtaa

SEQ ID NO: 287441 - DNA, 25 bp, Artificial
  probe
  misc_feature (1)..(25): SEQ ID NO: 1227; WAN024E2K; Start 4; Stop 28
aatcaagtaatcaatgctatgcgta

SEQ ID NO: 287442 - DNA, 25 bp, Artificial
  probe
  misc_feature (1)..(25): SEQ ID NO: 1227; WAN024E2K; Start 147; Stop 171
ggattatgacgaattgacacctgaa

SEQ ID NO: 287443 - DNA, 25 bp, Artificial
  probe
  misc_feature (1)..(25): SEQ ID NO: 1227; WAN024E2K; Start 2; Stop 26
tgaatcaagtaatcaatgctatgcg

SEQ ID NO: 287444 - DNA, 25 bp, Artificial
  probe
  misc_feature (1)..(25): SEQ ID NO: 1227; WAN024E2K; Start 146; Stop 170
tggattatgacgaattgacacctga

SEQ ID NO: 287445 - DNA, 25 bp, Artificial
  probe
  misc_feature (1)..(25): SEQ ID NO: 1227; WAN024E2K; Start 1; Stop 25
atgaatcaagtaatcaatgctatgc

SEQ ID NO: 287446 - DNA, 25 bp, Artificial
  probe
  misc_feature (1)..(25): SEQ ID NO: 1227; WAN024E2K; Start 590; Stop 614
agatgaatcgctttacagaacaaat

SEQ ID NO: 287447 - DNA, 25 bp, Artificial
  probe
  misc_feature (1)..(25): SEQ ID NO: 1227; WAN024E2K; Start 7; Stop 31
caagtaatcaatgctatgcgtaaac

SEQ ID NO: 287448 - DNA, 25 bp, Artificial
  probe
  misc_feature (1)..(25): SEQ ID NO: 1227; WAN024E2K; Start 6; Stop 30
tcaagtaatcaatgctatgcgtaaa

SEQ ID NO: 287449 - DNA, 25 bp, Artificial
  probe
  misc_feature (1)..(25): SEQ ID NO: 1227; WAN024E2K; Start 148; Stop 172
gattatgacgaattgacacctgaaa

SEQ ID NO: 287450 - DNA, 25 bp, Artificial
  probe
  misc_feature (1)..(25): SEQ ID NO: 1227; WAN024E2K; Start 486; Stop 510
ggttgaagtaccaggaattgttgta

SEQ ID NO: 287451 - DNA, 25 bp, Artificial
  probe
  misc_feature (1)..(25): SEQ ID NO: 1227; WAN024E2K; Start 591; Stop 615
gatgaatcgctttacagaacaaatc

SEQ ID NO: 287452 - DNA, 25 bp, Artificial
  probe
  misc_feature (1)..(25): SEQ ID NO: 1227; WAN024E2K; Start 589; Stop 613
aagatgaatcgctttacagaacaaa

SEQ ID NO: 287453 - DNA, 25 bp, Artificial
  probe
  misc_feature (1)..(25): SEQ ID NO: 1227; WAN024E2K; Start 145; Stop 169
gtggattatgacgaattgacacctg

SEQ ID NO: 287454 - DNA, 25 bp, Artificial
  probe
  misc_feature (1)..(25): SEQ ID NO: 1227; WAN024E2K; Start 594; Stop 618
gaatcgctttacagaacaaatcaat

SEQ ID NO: 287455 - DNA, 25 bp, Artificial
  probe
  misc_feature (1)..(25): SEQ ID NO: 1227; WAN024E2K; Start 119; Stop 143
gtgtcattgttatcaaaccatcagg

SEQ ID NO: 287456 - DNA, 25 bp, Artificial
  probe
  misc_feature (1)..(25): SEQ ID NO: 1227; WAN024E2K; Start 112; Stop 136
gaactcggtgtcattgttatcaaac

SEQ ID NO: 287457 - DNA, 25 bp, Artificial
  probe
  misc_feature (1)..(25): SEQ ID NO: 1227; WAN024E2K; Start 593; Stop 617
tgaatcgctttacagaacaaatcaa

SEQ ID NO: 287458 - DNA, 25 bp, Artificial
  probe
  misc_feature (1)..(25): SEQ ID NO: 1227; WAN024E2K; Start 578; Stop 602
aggaagtatcaaagatgaatcgctt

SEQ ID NO: 287459 - DNA, 25 bp, Artificial
  probe
  misc_feature (1)..(25): SEQ ID NO: 1227; WAN024E2K; Start 396; Stop 420
tagtttgaccaaggacgaagtagaa

SEQ ID NO: 287460 - DNA, 25 bp, Artificial
  probe
  misc_feature (1)..(25): SEQ ID NO: 1227; WAN024E2K; Start 592; Stop 616
atgaatcgctttacagaacaaatca

SEQ ID NO: 287461 - DNA, 25 bp, Artificial
  probe
  misc_feature (1)..(25): SEQ ID NO: 1227; WAN024E2K; Start 365; Stop 389
attatttctacggttcaatcccttg

SEQ ID NO: 287462 - DNA, 25 bp, Artificial
  probe
  misc_feature (1)..(25): SEQ ID NO: 1227; WAN024E2K; Start 577; Stop 601
gaggaagtatcaaagatgaatcgct

SEQ ID NO: 287463 - DNA, 25 bp, Artificial
  probe
  misc_feature (1)..(25): SEQ ID NO: 1227; WAN024E2K; Start 576; Stop 600
agaggaagtatcaaagatgaatcgc

SEQ ID NO: 287464 - DNA, 25 bp, Artificial
  probe
  misc_feature (1)..(25): SEQ ID NO: 1227; WAN024E2K; Start 8; Stop 32
aagtaatcaatgctatgcgtaaacg

SEQ ID NO: 287465 - DNA, 25 bp, Artificial
  probe
  misc_feature (1)..(25): SEQ ID NO: 1227; WAN024E2K; Start 10; Stop 34
gtaatcaatgctatgcgtaaacgag

SEQ ID NO: 287466 - DNA, 25 bp, Artificial
  probe
  misc_feature (1)..(25): SEQ ID NO: 1227; WAN024E2K; Start 366; Stop 390
ttatttctacggttcaatcccttgc

SEQ ID NO: 287467 - DNA, 25 bp, Artificial
  probe
  misc_feature (1)..(25): SEQ ID NO: 1227; WAN024E2K; Start 11; Stop 35
taatcaatgctatgcgtaaacgagt

SEQ ID NO: 287468 - DNA, 25 bp, Artificial
  probe
  misc_feature (1)..(25): SEQ ID NO: 1227; WAN024E2K; Start 9; Stop 33
agtaatcaatgctatgcgtaaacga

SEQ ID NO: 287469 - DNA, 25 bp, Artificial
  probe
  misc_feature (1)..(25): SEQ ID NO: 1227; WAN024E2K; Start 667; Stop 691
cgtaaacatggaccaaatgcttatt

SEQ ID NO: 287470 - DNA, 25 bp, Artificial
  probe
  misc_feature (1)..(25): SEQ ID NO: 1227; WAN024E2K; Start 395; Stop 419
gtagtttgaccaaggacgaagtaga

SEQ ID NO: 287471 - DNA, 25 bp, Artificial
  probe
  misc_feature (1)..(25): SEQ ID NO: 1227; WAN024E2K; Start 487; Stop 511
gttgaagtaccaggaattgttgtac

SEQ ID NO: 287472 - DNA, 25 bp, Artificial
  probe
  misc_feature (1)..(25): SEQ ID NO: 1228; WAN024C3R; Start 79; Stop 103
atttgtcgtcatgtcctatcctttc

SEQ ID NO: 287473 - DNA, 25 bp, Artificial
  probe
  misc_feature (1)..(25): SEQ ID NO: 1228; WAN024C3R; Start 78; Stop 102
gatttgtcgtcatgtcctatccttt

SEQ ID NO: 287474 - DNA, 25 bp, Artificial
  probe
  misc_feature (1)..(25): SEQ ID NO: 1228; WAN024C3R; Start 85; Stop 109
cgtcatgtcctatcctttcttgata

SEQ ID NO: 287475 - DNA, 25 bp, Artificial
  probe
  misc_feature (1)..(25): SEQ ID NO: 1228; WAN024C3R; Start 81; Stop 105
ttgtcgtcatgtcctatcctttctt

SEQ ID NO: 287476 - DNA, 25 bp, Artificial
  probe
  misc_feature (1)..(25): SEQ ID NO: 1228; WAN024C3R; Start 80; Stop 104
tttgtcgtcatgtcctatcctttct

SEQ ID NO: 287477 - DNA, 25 bp, Artificial
  probe
  misc_feature (1)..(25): SEQ ID NO: 1228; WAN024C3R; Start 84; Stop 108
tcgtcatgtcctatcctttcttgat

SEQ ID NO: 287478 - DNA, 25 bp, Artificial
  probe
  misc_feature (1)..(25): SEQ ID NO: 1228; WAN024C3R; Start 10; Stop 34
ctccacctcatcaaagctattatag

SEQ ID NO: 287479 - DNA, 25 bp, Artificial
  probe
  misc_feature (1)..(25): SEQ ID NO: 1228; WAN024C3R; Start 237; Stop 261
tgactggcttctttcaactgtctaa

SEQ ID NO: 287480 - DNA, 25 bp, Artificial
  probe
  misc_feature (1)..(25): SEQ ID NO: 1228; WAN024C3R; Start 82; Stop 106
tgtcgtcatgtcctatcctttcttg

SEQ ID NO: 287481 - DNA, 25 bp, Artificial
  probe
  misc_feature (1)..(25): SEQ ID NO: 1228; WAN024C3R; Start 83; Stop 107
gtcgtcatgtcctatcctttcttga

SEQ ID NO: 287482 - DNA, 25 bp, Artificial
  probe
  misc_feature (1)..(25): SEQ ID NO: 1228; WAN024C3R; Start 12; Stop 36
ccacctcatcaaagctattatagga

SEQ ID NO: 287483 - DNA, 25 bp, Artificial
  probe
  misc_feature (1)..(25): SEQ ID NO: 1228; WAN024C3R; Start 11; Stop 35
tccacctcatcaaagctattatagg

SEQ ID NO: 287484 - DNA, 25 bp, Artificial
  probe
  misc_feature (1)..(25): SEQ ID NO: 1228; WAN024C3R; Start 86; Stop 110
gtcatgtcctatcctttcttgatat

SEQ ID NO: 287485 - DNA, 25 bp, Artificial
  probe
  misc_feature (1)..(25): SEQ ID NO: 1228; WAN024C3R; Start 29; Stop 53
ttataggaacttttctgctcaaggg

SEQ ID NO: 287486 - DNA, 25 bp, Artificial
  probe
  misc_feature (1)..(25): SEQ ID NO: 1228; WAN024C3R; Start 14; Stop 38
acctcatcaaagctattataggaac

SEQ ID NO: 287487 - DNA, 25 bp, Artificial
  probe
  misc_feature (1)..(25): SEQ ID NO: 1228; WAN024C3R; Start 13; Stop 37
cacctcatcaaagctattataggaa

SEQ ID NO: 287488 - DNA, 25 bp, Artificial
  probe
  misc_feature (1)..(25): SEQ ID NO: 1228; WAN024C3R; Start 28; Stop 52
attataggaacttttctgctcaagg

SEQ ID NO: 287489 - DNA, 25 bp, Artificial
  probe
  misc_feature (1)..(25): SEQ ID NO: 1228; WAN024C3R; Start 231; Stop 255
aaatcttgactggcttctttcaact

SEQ ID NO: 287490 - DNA, 25 bp, Artificial
  probe
  misc_feature (1)..(25): SEQ ID NO: 1228; WAN024C3R; Start 230; Stop 254
caaatcttgactggcttctttcaac

SEQ ID NO: 287491 - DNA, 25 bp, Artificial
  probe
  misc_feature (1)..(25): SEQ ID NO: 1228; WAN024C3R; Start 9; Stop 33
gctccacctcatcaaagctattata

SEQ ID NO: 287492 - DNA, 25 bp, Artificial
  probe
  misc_feature (1)..(25): SEQ ID NO: 1228; WAN024C3R; Start 25; Stop 49
gctattataggaacttttctgctca

SEQ ID NO: 287493 - DNA, 25 bp, Artificial
  probe
  misc_feature (1)..(25): SEQ ID NO: 1228; WAN024C3R; Start 15; Stop 39
cctcatcaaagctattataggaact

SEQ ID NO: 287494 - DNA, 25 bp, Artificial
  probe
  misc_feature (1)..(25): SEQ ID NO: 1228; WAN024C3R; Start 232; Stop 256
aatcttgactggcttctttcaactg

SEQ ID NO: 287495 - DNA, 25 bp, Artificial
  probe
  misc_feature (1)..(25): SEQ ID NO: 1228; WAN024C3R; Start 227; Stop 251
ctgcaaatcttgactggcttctttc

SEQ ID NO: 287496 - DNA, 25 bp, Artificial
  probe
  misc_feature (1)..(25): SEQ ID NO: 1228; WAN024C3R; Start 92; Stop 116
tcctatcctttcttgatataagagc

SEQ ID NO: 287497 - DNA, 25 bp, Artificial
  probe
  misc_feature (1)..(25): SEQ ID NO: 1228; WAN024C3R; Start 236; Stop 260
ttgactggcttctttcaactgtcta

SEQ ID NO: 287498 - DNA, 25 bp, Artificial
  probe
  misc_feature (1)..(25): SEQ ID NO: 1228; WAN024C3R; Start 30; Stop 54
tataggaacttttctgctcaagggc

SEQ ID NO: 287499 - DNA, 25 bp, Artificial
  probe
  misc_feature (1)..(25): SEQ ID NO: 1228; WAN024C3R; Start 229; Stop 253
gcaaatcttgactggcttctttcaa

SEQ ID NO: 287500 - DNA, 25 bp, Artificial
  probe
  misc_feature (1)..(25): SEQ ID NO: 1228; WAN024C3R; Start 87; Stop 111
tcatgtcctatcctttcttgatata

SEQ ID NO: 287501 - DNA, 25 bp, Artificial
  probe
  misc_feature (1)..(25): SEQ ID NO: 1228; WAN024C3R; Start 77; Stop 101
cgatttgtcgtcatgtcctatcctt

SEQ ID NO: 287502 - DNA, 25 bp, Artificial
  probe
  misc_feature (1)..(25): SEQ ID NO: 1228; WAN024C3R; Start 54; Stop 78
catagaggatatgctcgtccttacg

SEQ ID NO: 287503 - DNA, 25 bp, Artificial
  probe
  misc_feature (1)..(25): SEQ ID NO: 1228; WAN024C3R; Start 233; Stop 257
atcttgactggcttctttcaactgt

SEQ ID NO: 287504 - DNA, 25 bp, Artificial
  probe
  misc_feature (1)..(25): SEQ ID NO: 1228; WAN024C3R; Start 16; Stop 40
ctcatcaaagctattataggaactt

SEQ ID NO: 287505 - DNA, 25 bp, Artificial
  probe
  misc_feature (1)..(25): SEQ ID NO: 1229; WAN024FZ3; Start 140; Stop 164
caatggcgacttcacgtaagaatta

SEQ ID NO: 287506 - DNA, 25 bp, Artificial
  probe
  misc_feature (1)..(25): SEQ ID NO: 1229; WAN024FZ3; Start 141; Stop 165
aatggcgacttcacgtaagaattac

SEQ ID NO: 287507 - DNA, 25 bp, Artificial
  probe
  misc_feature (1)..(25): SEQ ID NO: 1229; WAN024FZ3; Start 142; Stop 166
atggcgacttcacgtaagaattact

SEQ ID NO: 287508 - DNA, 25 bp, Artificial
  probe
  misc_feature (1)..(25): SEQ ID NO: 1229; WAN024FZ3; Start 194; Stop 218
ataaccgcgatcacttcttcatatt

SEQ ID NO: 287509 - DNA, 25 bp, Artificial
  probe
  misc_feature (1)..(25): SEQ ID NO: 1229; WAN024FZ3; Start 143; Stop 167
tggcgacttcacgtaagaattactt

SEQ ID NO: 287510 - DNA, 25 bp, Artificial
  probe
  misc_feature (1)..(25): SEQ ID NO: 1229; WAN024FZ3; Start 139; Stop 163
acaatggcgacttcacgtaagaatt

SEQ ID NO: 287511 - DNA, 25 bp, Artificial
  probe
  misc_feature (1)..(25): SEQ ID NO: 1229; WAN024FZ3; Start 138; Stop 162
aacaatggcgacttcacgtaagaat

SEQ ID NO: 287512 - DNA, 25 bp, Artificial
  probe
  misc_feature (1)..(25): SEQ ID NO: 1229; WAN024FZ3; Start 193; Stop 217
gataaccgcgatcacttcttcatat

SEQ ID NO: 287513 - DNA, 25 bp, Artificial
  probe
  misc_feature (1)..(25): SEQ ID NO: 1229; WAN024FZ3; Start 151; Stop 175
tcacgtaagaattactttgtcctca

SEQ ID NO: 287514 - DNA, 25 bp, Artificial
  probe
  misc_feature (1)..(25): SEQ ID NO: 1229; WAN024FZ3; Start 146; Stop 170
cgacttcacgtaagaattactttgt

SEQ ID NO: 287515 - DNA, 25 bp, Artificial
  probe
  misc_feature (1)..(25): SEQ ID NO: 1229; WAN024FZ3; Start 152; Stop 176
cacgtaagaattactttgtcctcaa

SEQ ID NO: 287516 - DNA, 25 bp, Artificial
  probe
  misc_feature (1)..(25): SEQ ID NO: 1229; WAN024FZ3; Start 148; Stop 172
acttcacgtaagaattactttgtcc

SEQ ID NO: 287517 - DNA, 25 bp, Artificial
  probe
  misc_feature (1)..(25): SEQ ID NO: 1229; WAN024FZ3; Start 145; Stop 169
gcgacttcacgtaagaattactttg

SEQ ID NO: 287518 - DNA, 25 bp, Artificial
  probe
  misc_feature (1)..(25): SEQ ID NO: 1229; WAN024FZ3; Start 150; Stop 174
ttcacgtaagaattactttgtcctc

SEQ ID NO: 287519 - DNA, 25 bp, Artificial
  probe
  misc_feature (1)..(25): SEQ ID NO: 1229; WAN024FZ3; Start 149; Stop 173
cttcacgtaagaattactttgtcct

SEQ ID NO: 287520 - DNA, 25 bp, Artificial
  probe
  misc_feature (1)..(25): SEQ ID NO: 1229; WAN024FZ3; Start 157; Stop 181
aagaattactttgtcctcaataagg

SEQ ID NO: 287521 - DNA, 25 bp, Artificial
  probe
  misc_feature (1)..(25): SEQ ID NO: 1229; WAN024FZ3; Start 192; Stop 216
agataaccgcgatcacttcttcata

SEQ ID NO: 287522 - DNA, 25 bp, Artificial
  probe
  misc_feature (1)..(25): SEQ ID NO: 1229; WAN024FZ3; Start 153; Stop 177
acgtaagaattactttgtcctcaat

SEQ ID NO: 287523 - DNA, 25 bp, Artificial
  probe
  misc_feature (1)..(25): SEQ ID NO: 1229; WAN024FZ3; Start 144; Stop 168
ggcgacttcacgtaagaattacttt

SEQ ID NO: 287524 - DNA, 25 bp, Artificial
  probe
  misc_feature (1)..(25): SEQ ID NO: 1229; WAN024FZ3; Start 147; Stop 171
gacttcacgtaagaattactttgtc

SEQ ID NO: 287525 - DNA, 25 bp, Artificial
  probe
  misc_feature (1)..(25): SEQ ID NO: 1229; WAN024FZ3; Start 154; Stop 178
cgtaagaattactttgtcctcaata

SEQ ID NO: 287526 - DNA, 25 bp, Artificial
  probe
  misc_feature (1)..(25): SEQ ID NO: 1229; WAN024FZ3; Start 95; Stop 119
acatgaatattccattgaccttcct

SEQ ID NO: 287527 - DNA, 25 bp, Artificial
  probe
  misc_feature (1)..(25): SEQ ID NO: 1229; WAN024FZ3; Start 94; Stop 118
aacatgaatattccattgaccttcc

SEQ ID NO: 287528 - DNA, 25 bp, Artificial
  probe
  misc_feature (1)..(25): SEQ ID NO: 1229; WAN024FZ3; Start 176; Stop 200
ataaggaaaagtccagagataaccg

SEQ ID NO: 287529 - DNA, 25 bp, Artificial
  probe
  misc_feature (1)..(25): SEQ ID NO: 1229; WAN024FZ3; Start 171; Stop 195
cctcaataaggaaaagtccagagat

SEQ ID NO: 287530 - DNA, 25 bp, Artificial
  probe
  misc_feature (1)..(25): SEQ ID NO: 1229; WAN024FZ3; Start 191; Stop 215
gagataaccgcgatcacttcttcat

SEQ ID NO: 287531 - DNA, 25 bp, Artificial
  probe
  misc_feature (1)..(25): SEQ ID NO: 1229; WAN024FZ3; Start 195; Stop 219
taaccgcgatcacttcttcatattt

SEQ ID NO: 287532 - DNA, 25 bp, Artificial
  probe
  misc_feature (1)..(25): SEQ ID NO: 1229; WAN024FZ3; Start 68; Stop 92
ttgaacgtgacttctaccgctactc

SEQ ID NO: 287533 - DNA, 25 bp, Artificial
  probe
  misc_feature (1)..(25): SEQ ID NO: 1229; WAN024FZ3; Start 137; Stop 161
aaacaatggcgacttcacgtaagaa

SEQ ID NO: 287534 - DNA, 25 bp, Artificial
  probe
  misc_feature (1)..(25): SEQ ID NO: 1229; WAN024FZ3; Start 175; Stop 199
aataaggaaaagtccagagataacc

SEQ ID NO: 287535 - DNA, 25 bp, Artificial
  probe
  misc_feature (1)..(25): SEQ ID NO: 1229; WAN024FZ3; Start 61; Stop 85
caagattttgaacgtgacttctacc

SEQ ID NO: 287536 - DNA, 25 bp, Artificial
  probe
  misc_feature (1)..(25): SEQ ID NO: 1229; WAN024FZ3; Start 60; Stop 84
ccaagattttgaacgtgacttctac

SEQ ID NO: 287537 - DNA, 25 bp, Artificial
  probe
  misc_feature (1)..(25): SEQ ID NO: 1229; WAN024FZ3; Start 57; Stop 81
ctaccaagattttgaacgtgacttc

SEQ ID NO: 287538 - DNA, 25 bp, Artificial
  probe
  misc_feature (1)..(25): SEQ ID NO: 1230; WAN024CLT; Start 46; Stop 70
tcttgtgttctttgtttattagact

SEQ ID NO: 287539 - DNA, 25 bp, Artificial
  probe
  misc_feature (1)..(25): SEQ ID NO: 1230; WAN024CLT; Start 47; Stop 71
cttgtgttctttgtttattagactt

SEQ ID NO: 287540 - DNA, 25 bp, Artificial
  probe
  misc_feature (1)..(25): SEQ ID NO: 1230; WAN024CLT; Start 45; Stop 69
ttcttgtgttctttgtttattagac

SEQ ID NO: 287541 - DNA, 25 bp, Artificial
  probe
  misc_feature (1)..(25): SEQ ID NO: 1230; WAN024CLT; Start 42; Stop 66
agtttcttgtgttctttgtttatta

SEQ ID NO: 287542 - DNA, 25 bp, Artificial
  probe
  misc_feature (1)..(25): SEQ ID NO: 1230; WAN024CLT; Start 41; Stop 65
tagtttcttgtgttctttgtttatt

SEQ ID NO: 287543 - DNA, 25 bp, Artificial
  probe
  misc_feature (1)..(25): SEQ ID NO: 1230; WAN024CLT; Start 38; Stop 62
ttatagtttcttgtgttctttgttt

SEQ ID NO: 287544 - DNA, 25 bp, Artificial
  probe
  misc_feature (1)..(25): SEQ ID NO: 1230; WAN024CLT; Start 37; Stop 61
tttatagtttcttgtgttctttgtt

SEQ ID NO: 287545 - DNA, 25 bp, Artificial
  probe
  misc_feature (1)..(25): SEQ ID NO: 1230; WAN024CLT; Start 43; Stop 67
gtttcttgtgttctttgtttattag

SEQ ID NO: 287546 - DNA, 25 bp, Artificial
  probe
  misc_feature (1)..(25): SEQ ID NO: 1230; WAN024CLT; Start 40; Stop 64
atagtttcttgtgttctttgtttat

SEQ ID NO: 287547 - DNA, 25 bp, Artificial
  probe
  misc_feature (1)..(25): SEQ ID NO: 1230; WAN024CLT; Start 44; Stop 68
tttcttgtgttctttgtttattaga

SEQ ID NO: 287548 - DNA, 25 bp, Artificial
  probe
  misc_feature (1)..(25): SEQ ID NO: 1230; WAN024CLT; Start 36; Stop 60
ttttatagtttcttgtgttctttgt

SEQ ID NO: 287549 - DNA, 25 bp, Artificial
  probe
  misc_feature (1)..(25): SEQ ID NO: 1230; WAN024CLT; Start 34; Stop 58
tgttttatagtttcttgtgttcttt

SEQ ID NO: 287550 - DNA, 25 bp, Artificial
  probe
  misc_feature (1)..(25): SEQ ID NO: 1230; WAN024CLT; Start 33; Stop 57
ttgttttatagtttcttgtgttctt

SEQ ID NO: 287551 - DNA, 25 bp, Artificial
  probe
  misc_feature (1)..(25): SEQ ID NO: 1230; WAN024CLT; Start 32; Stop 56
tttgttttatagtttcttgtgttct

SEQ ID NO: 287552 - DNA, 25 bp, Artificial
  probe
  misc_feature (1)..(25): SEQ ID NO: 1230; WAN024CLT; Start 35; Stop 59
gttttatagtttcttgtgttctttg

SEQ ID NO: 287553 - DNA, 25 bp, Artificial
  probe
  misc_feature (1)..(25): SEQ ID NO: 1230; WAN024CLT; Start 31; Stop 55
ttttgttttatagtttcttgtgttc

SEQ ID NO: 287554 - DNA, 25 bp, Artificial
  probe
  misc_feature (1)..(25): SEQ ID NO: 1231; WAN024CZP; Start 126; Stop 150
ctatgaagtgattacaatcggtgga

SEQ ID NO: 287555 - DNA, 25 bp, Artificial
  probe
  misc_feature (1)..(25): SEQ ID NO: 1231; WAN024CZP; Start 127; Stop 151
tatgaagtgattacaatcggtggac

SEQ ID NO: 287556 - DNA, 25 bp, Artificial
  probe
  misc_feature (1)..(25): SEQ ID NO: 1231; WAN024CZP; Start 122; Stop 146
aaggctatgaagtgattacaatcgg

SEQ ID NO: 287557 - DNA, 25 bp, Artificial
  probe
  misc_feature (1)..(25): SEQ ID NO: 1231; WAN024CZP; Start 239; Stop 263
ctatcaagacagtattaccgctgaa

SEQ ID NO: 287558 - DNA, 25 bp, Artificial
  probe
  misc_feature (1)..(25): SEQ ID NO: 1231; WAN024CZP; Start 125; Stop 149
gctatgaagtgattacaatcggtgg

SEQ ID NO: 287559 - DNA, 25 bp, Artificial
  probe
  misc_feature (1)..(25): SEQ ID NO: 1231; WAN024CZP; Start 124; Stop 148
ggctatgaagtgattacaatcggtg

SEQ ID NO: 287560 - DNA, 25 bp, Artificial
  probe
  misc_feature (1)..(25): SEQ ID NO: 1231; WAN024CZP; Start 123; Stop 147
aggctatgaagtgattacaatcggt

SEQ ID NO: 287561 - DNA, 25 bp, Artificial
  probe
  misc_feature (1)..(25): SEQ ID NO: 1231; WAN024CZP; Start 155; Stop 179
atggaacagtcgatgaagtagatac

SEQ ID NO: 287562 - DNA, 25 bp, Artificial
  probe
  misc_feature (1)..(25): SEQ ID NO: 1231; WAN024CZP; Start 153; Stop 177
ttatggaacagtcgatgaagtagat

SEQ ID NO: 287563 - DNA, 25 bp, Artificial
  probe
  misc_feature (1)..(25): SEQ ID NO: 1231; WAN024CZP; Start 128; Stop 152
atgaagtgattacaatcggtggact

SEQ ID NO: 287564 - DNA, 25 bp, Artificial
  probe
  misc_feature (1)..(25): SEQ ID NO: 1231; WAN024CZP; Start 162; Stop 186
agtcgatgaagtagatacggagaag

SEQ ID NO: 287565 - DNA, 25 bp, Artificial
  probe
  misc_feature (1)..(25): SEQ ID NO: 1231; WAN024CZP; Start 172; Stop 196
gtagatacggagaagggaacaatag

SEQ ID NO: 287566 - DNA, 25 bp, Artificial
  probe
  misc_feature (1)..(25): SEQ ID NO: 1231; WAN024CZP; Start 136; Stop 160
attacaatcggtggactttatggaa

SEQ ID NO: 287567 - DNA, 25 bp, Artificial
  probe
  misc_feature (1)..(25): SEQ ID NO: 1231; WAN024CZP; Start 173; Stop 197
tagatacggagaagggaacaatagt

SEQ ID NO: 287568 - DNA, 25 bp, Artificial
  probe
  misc_feature (1)..(25): SEQ ID NO: 1231; WAN024CZP; Start 171; Stop 195
agtagatacggagaagggaacaata

SEQ ID NO: 287569 - DNA, 25 bp, Artificial
  probe
  misc_feature (1)..(25): SEQ ID NO: 1231; WAN024CZP; Start 154; Stop 178
tatggaacagtcgatgaagtagata

SEQ ID NO: 287570 - DNA, 25 bp, Artificial
  probe
  misc_feature (1)..(25): SEQ ID NO: 1231; WAN024CZP; Start 161; Stop 185
cagtcgatgaagtagatacggagaa

SEQ ID NO: 287571 - DNA, 25 bp, Artificial
  probe
  misc_feature (1)..(25): SEQ ID NO: 1231; WAN024CZP; Start 192; Stop 216
aatagttcttgacgtagatggagtt

SEQ ID NO: 287572 - DNA, 25 bp, Artificial
  probe
  misc_feature (1)..(25): SEQ ID NO: 1231; WAN024CZP; Start 170; Stop 194
aagtagatacggagaagggaacaat

SEQ ID NO: 287573 - DNA, 25 bp, Artificial
  probe
  misc_feature (1)..(25): SEQ ID NO: 1231; WAN024CZP; Start 191; Stop 215
caatagttcttgacgtagatggagt

SEQ ID NO: 287574 - DNA, 25 bp, Artificial
  probe
  misc_feature (1)..(25): SEQ ID NO: 1231; WAN024CZP; Start 190; Stop 214
acaatagttcttgacgtagatggag

SEQ ID NO: 287575 - DNA, 25 bp, Artificial
  probe
  misc_feature (1)..(25): SEQ ID NO: 1231; WAN024CZP; Start 189; Stop 213
aacaatagttcttgacgtagatgga

SEQ ID NO: 287576 - DNA, 25 bp, Artificial
  probe
  misc_feature (1)..(25): SEQ ID NO: 1231; WAN024CZP; Start 137; Stop 161
ttacaatcggtggactttatggaac

SEQ ID NO: 287577 - DNA, 25 bp, Artificial
  probe
  misc_feature (1)..(25): SEQ ID NO: 1231; WAN024CZP; Start 238; Stop 262
gctatcaagacagtattaccgctga

SEQ ID NO: 287578 - DNA, 25 bp, Artificial
  probe
  misc_feature (1)..(25): SEQ ID NO: 1231; WAN024CZP; Start 236; Stop 260
ctgctatcaagacagtattaccgct

SEQ ID NO: 287579 - DNA, 25 bp, Artificial
  probe
  misc_feature (1)..(25): SEQ ID NO: 1231; WAN024CZP; Start 166; Stop 190
gatgaagtagatacggagaagggaa

SEQ ID NO: 287580 - DNA, 25 bp, Artificial
  probe
  misc_feature (1)..(25): SEQ ID NO: 1231; WAN024CZP; Start 159; Stop 183
aacagtcgatgaagtagatacggag

SEQ ID NO: 287581 - DNA, 25 bp, Artificial
  probe
  misc_feature (1)..(25): SEQ ID NO: 1231; WAN024CZP; Start 158; Stop 182
gaacagtcgatgaagtagatacgga

SEQ ID NO: 287582 - DNA, 25 bp, Artificial
  probe
  misc_feature (1)..(25): SEQ ID NO: 1231; WAN024CZP; Start 229; Stop 253
gaactagctgctatcaagacagtat

SEQ ID NO: 287583 - DNA, 25 bp, Artificial
  probe
  misc_feature (1)..(25): SEQ ID NO: 1231; WAN024CZP; Start 233; Stop 257
tagctgctatcaagacagtattacc

SEQ ID NO: 287584 - DNA, 25 bp, Artificial
  probe
  misc_feature (1)..(25): SEQ ID NO: 1231; WAN024CZP; Start 230; Stop 254
aactagctgctatcaagacagtatt

SEQ ID NO: 287585 - DNA, 25 bp, Artificial
  probe
  misc_feature (1)..(25): SEQ ID NO: 1231; WAN024CZP; Start 133; Stop 157
gtgattacaatcggtggactttatg

SEQ ID NO: 287586 - DNA, 25 bp, Artificial
  probe
  misc_feature (1)..(25): SEQ ID NO: 1231; WAN024CZP; Start 121; Stop 145
aaaggctatgaagtgattacaatcg

SEQ ID NO: 287587 - DNA, 25 bp, Artificial
  probe
  misc_feature (1)..(25): SEQ ID NO: 1232; WAN024D9I; Start 324; Stop 348
tcgtatcaaagaaatccgtcgttaa

SEQ ID NO: 287588 - DNA, 25 bp, Artificial
  probe
  misc_feature (1)..(25): SEQ ID NO: 1232; WAN024D9I; Start 323; Stop 347
ctcgtatcaaagaaatccgtcgtta

SEQ ID NO: 287589 - DNA, 25 bp, Artificial
  probe
  misc_feature (1)..(25): SEQ ID NO: 1232; WAN024D9I; Start 287; Stop 311
aattgtactacttgcgtgctcttca

SEQ ID NO: 287590 - DNA, 25 bp, Artificial
  probe
  misc_feature (1)..(25): SEQ ID NO: 1232; WAN024D9I; Start 288; Stop 312
attgtactacttgcgtgctcttcaa

SEQ ID NO: 287591 - DNA, 25 bp, Artificial
  probe
  misc_feature (1)..(25): SEQ ID NO: 1232; WAN024D9I; Start 286; Stop 310
aaattgtactacttgcgtgctcttc

SEQ ID NO: 287592 - DNA, 25 bp, Artificial
  probe
  misc_feature (1)..(25): SEQ ID NO: 1232; WAN024D9I; Start 285; Stop 309
gaaattgtactacttgcgtgctctt

SEQ ID NO: 287593 - DNA, 25 bp, Artificial
  probe
  misc_feature (1)..(25): SEQ ID NO: 1232; WAN024D9I; Start 26; Stop 50
ctgaaggtcaacttcgtacagatat

SEQ ID NO: 287594 - DNA, 25 bp, Artificial
  probe
  misc_feature (1)..(25): SEQ ID NO: 1232; WAN024D9I; Start 25; Stop 49
actgaaggtcaacttcgtacagata

SEQ ID NO: 287595 - DNA, 25 bp, Artificial
  probe
  misc_feature (1)..(25): SEQ ID NO: 1232; WAN024D9I; Start 36; Stop 60
acttcgtacagatatcccatcattc

SEQ ID NO: 287596 - DNA, 25 bp, Artificial
  probe
  misc_feature (1)..(25): SEQ ID NO: 1232; WAN024D9I; Start 34; Stop 58
caacttcgtacagatatcccatcat

SEQ ID NO: 287597 - DNA, 25 bp, Artificial
  probe
  misc_feature (1)..(25): SEQ ID NO: 1232; WAN024D9I; Start 35; Stop 59
aacttcgtacagatatcccatcatt

SEQ ID NO: 287598 - DNA, 25 bp, Artificial
  probe
  misc_feature (1)..(25): SEQ ID NO: 1232; WAN024D9I; Start 37; Stop 61
cttcgtacagatatcccatcattcc

SEQ ID NO: 287599 - DNA, 25 bp, Artificial
  probe
  misc_feature (1)..(25): SEQ ID NO: 1232; WAN024D9I; Start 32; Stop 56
gtcaacttcgtacagatatcccatc

SEQ ID NO: 287600 - DNA, 25 bp, Artificial
  probe
  misc_feature (1)..(25): SEQ ID NO: 1232; WAN024D9I; Start 33; Stop 57
tcaacttcgtacagatatcccatca

SEQ ID NO: 287601 - DNA, 25 bp, Artificial
  probe
  misc_feature (1)..(25): SEQ ID NO: 1232; WAN024D9I; Start 24; Stop 48
gactgaaggtcaacttcgtacagat

SEQ ID NO: 287602 - DNA, 25 bp, Artificial
  probe
  misc_feature (1)..(25): SEQ ID NO: 1232; WAN024D9I; Start 269; Stop 293
gtaaagtacgtcgtgcgaaattgta

SEQ ID NO: 287603 - DNA, 25 bp, Artificial
  probe
  misc_feature (1)..(25): SEQ ID NO: 1232; WAN024D9I; Start 27; Stop 51
tgaaggtcaacttcgtacagatatc

SEQ ID NO: 287604 - DNA, 25 bp, Artificial
  probe
  misc_feature (1)..(25): SEQ ID NO: 1232; WAN024D9I; Start 326; Stop 350
gtatcaaagaaatccgtcgttaact

SEQ ID NO: 287605 - DNA, 25 bp, Artificial
  probe
  misc_feature (1)..(25): SEQ ID NO: 1232; WAN024D9I; Start 325; Stop 349
cgtatcaaagaaatccgtcgttaac

SEQ ID NO: 287606 - DNA, 25 bp, Artificial
  probe
  misc_feature (1)..(25): SEQ ID NO: 1232; WAN024D9I; Start 102; Stop 126
aggtaaccgtgaacgtatccagatt

SEQ ID NO: 287607 - DNA, 25 bp, Artificial
  probe
  misc_feature (1)..(25): SEQ ID NO: 1232; WAN024D9I; Start 101; Stop 125
aaggtaaccgtgaacgtatccagat

SEQ ID NO: 287608 - DNA, 25 bp, Artificial
  probe
  misc_feature (1)..(25): SEQ ID NO: 1232; WAN024D9I; Start 31; Stop 55
ggtcaacttcgtacagatatcccat

SEQ ID NO: 287609 - DNA, 25 bp, Artificial
  probe
  misc_feature (1)..(25): SEQ ID NO: 1232; WAN024D9I; Start 29; Stop 53
aaggtcaacttcgtacagatatccc

SEQ ID NO: 287610 - DNA, 25 bp, Artificial
  probe
  misc_feature (1)..(25): SEQ ID NO: 1232; WAN024D9I; Start 28; Stop 52
gaaggtcaacttcgtacagatatcc

SEQ ID NO: 287611 - DNA, 25 bp, Artificial
  probe
  misc_feature (1)..(25): SEQ ID NO: 1232; WAN024D9I; Start 38; Stop 62
ttcgtacagatatcccatcattccg

SEQ ID NO: 287612 - DNA, 25 bp, Artificial
  probe
  misc_feature (1)..(25): SEQ ID NO: 1232; WAN024D9I; Start 329; Stop 353
tcaaagaaatccgtcgttaactaat

SEQ ID NO: 287613 - DNA, 25 bp, Artificial
  probe
  misc_feature (1)..(25): SEQ ID NO: 1232; WAN024D9I; Start 328; Stop 352
atcaaagaaatccgtcgttaactaa

SEQ ID NO: 287614 - DNA, 25 bp, Artificial
  probe
  misc_feature (1)..(25): SEQ ID NO: 1232; WAN024D9I; Start 148; Stop 172
cgtaaaggtgctggaatctcagaaa

SEQ ID NO: 287615 - DNA, 25 bp, Artificial
  probe
  misc_feature (1)..(25): SEQ ID NO: 1232; WAN024D9I; Start 322; Stop 346
gctcgtatcaaagaaatccgtcgtt

SEQ ID NO: 287616 - DNA, 25 bp, Artificial
  probe
  misc_feature (1)..(25): SEQ ID NO: 1232; WAN024D9I; Start 203; Stop 227
taggtgttgagcgtatcttcccaat

SEQ ID NO: 287617 - DNA, 25 bp, Artificial
  probe
  misc_feature (1)..(25): SEQ ID NO: 1232; WAN024D9I; Start 128; Stop 152
ttgaaggtgttgttatcgcacgtaa

SEQ ID NO: 287618 - DNA, 25 bp, Artificial
  probe
  misc_feature (1)..(25): SEQ ID NO: 1232; WAN024D9I; Start 41; Stop 65
gtacagatatcccatcattccgtcc

SEQ ID NO: 287619 - DNA, 25 bp, Artificial
  probe
  misc_feature (1)..(25): SEQ ID NO: 1232; WAN024D9I; Start 275; Stop 299
tacgtcgtgcgaaattgtactactt

SEQ ID NO: 287620 - DNA, 25 bp, Artificial
  probe
  misc_feature (1)..(25): SEQ ID NO: 1233; WAN024GJO; Start 1262; Stop 1286
aactcatccaatatggcttacaagg

SEQ ID NO: 287621 - DNA, 25 bp, Artificial
  probe
  misc_feature (1)..(25): SEQ ID NO: 1233; WAN024GJO; Start 1264; Stop 1288
ctcatccaatatggcttacaaggtc

SEQ ID NO: 287622 - DNA, 25 bp, Artificial
  probe
  misc_feature (1)..(25): SEQ ID NO: 1233; WAN024GJO; Start 949; Stop 973
ccaagtaaaggtatcgttcatctga

SEQ ID NO: 287623 - DNA, 25 bp, Artificial
  probe
  misc_feature (1)..(25): SEQ ID NO: 1233; WAN024GJO; Start 968; Stop 992
atctgaacagcgaatttgaaggtaa

SEQ ID NO: 287624 - DNA, 25 bp, Artificial
  probe
  misc_feature (1)..(25): SEQ ID NO: 1233; WAN024GJO; Start 1263; Stop 1287
actcatccaatatggcttacaaggt

SEQ ID NO: 287625 - DNA, 25 bp, Artificial
  probe
  misc_feature (1)..(25): SEQ ID NO: 1233; WAN024GJO; Start 592; Stop 616
atcataaataacagagcacgcttac

SEQ ID NO: 287626 - DNA, 25 bp, Artificial
  probe
  misc_feature (1)..(25): SEQ ID NO: 1233; WAN024GJO; Start 969; Stop 993
tctgaacagcgaatttgaaggtaaa

SEQ ID NO: 287627 - DNA, 25 bp, Artificial
  probe
  misc_feature (1)..(25): SEQ ID NO: 1233; WAN024GJO; Start 590; Stop 614
ctatcataaataacagagcacgctt

SEQ ID NO: 287628 - DNA, 25 bp, Artificial
  probe
  misc_feature (1)..(25): SEQ ID NO: 1233; WAN024GJO; Start 595; Stop 619
ataaataacagagcacgcttaccaa

SEQ ID NO: 287629 - DNA, 25 bp, Artificial
  probe
  misc_feature (1)..(25): SEQ ID NO: 1233; WAN024GJO; Start 128; Stop 152
aagaaattactgttacttcccaagg

SEQ ID NO: 287630 - DNA, 25 bp, Artificial
  probe
  misc_feature (1)..(25): SEQ ID NO: 1233; WAN024GJO; Start 967; Stop 991
catctgaacagcgaatttgaaggta

SEQ ID NO: 287631 - DNA, 25 bp, Artificial
  probe
  misc_feature (1)..(25): SEQ ID NO: 1233; WAN024GJO; Start 593; Stop 617
tcataaataacagagcacgcttacc

SEQ ID NO: 287632 - DNA, 25 bp, Artificial
  probe
  misc_feature (1)..(25): SEQ ID NO: 1233; WAN024GJO; Start 594; Stop 618
cataaataacagagcacgcttacca

SEQ ID NO: 287633 - DNA, 25 bp, Artificial
  probe
  misc_feature (1)..(25): SEQ ID NO: 1233; WAN024GJO; Start 950; Stop 974
caagtaaaggtatcgttcatctgaa

SEQ ID NO: 287634 - DNA, 25 bp, Artificial
  probe
  misc_feature (1)..(25): SEQ ID NO: 1233; WAN024GJO; Start 220; Stop 244
catttagtggcaaatcaagtagttg

SEQ ID NO: 287635 - DNA, 25 bp, Artificial
  probe
  misc_feature (1)..(25): SEQ ID NO: 1233; WAN024GJO; Start 596; Stop 620
taaataacagagcacgcttaccaac

SEQ ID NO: 287636 - DNA, 25 bp, Artificial
  probe
  misc_feature (1)..(25): SEQ ID NO: 1233; WAN024GJO; Start 35; Stop 59
atcagagacgttaccataactatgc

SEQ ID NO: 287637 - DNA, 25 bp, Artificial
  probe
  misc_feature (1)..(25): SEQ ID NO: 1233; WAN024GJO; Start 776; Stop 800
tcggaagtgtagcaacttatgataa

SEQ ID NO: 287638 - DNA, 25 bp, Artificial
  probe
  misc_feature (1)..(25): SEQ ID NO: 1233; WAN024GJO; Start 219; Stop 243
tcatttagtggcaaatcaagtagtt

SEQ ID NO: 287639 - DNA, 25 bp, Artificial
  probe
  misc_feature (1)..(25): SEQ ID NO: 1233; WAN024GJO; Start 775; Stop 799
atcggaagtgtagcaacttatgata

SEQ ID NO: 287640 - DNA, 25 bp, Artificial
  probe
  misc_feature (1)..(25): SEQ ID NO: 1233; WAN024GJO; Start 774; Stop 798
tatcggaagtgtagcaacttatgat

SEQ ID NO: 287641 - DNA, 25 bp, Artificial
  probe
  misc_feature (1)..(25): SEQ ID NO: 1233; WAN024GJO; Start 773; Stop 797
gtatcggaagtgtagcaacttatga

SEQ ID NO: 287642 - DNA, 25 bp, Artificial
  probe
  misc_feature (1)..(25): SEQ ID NO: 1233; WAN024GJO; Start 547; Stop 571
aaagttcaacaacaaattggagaat

SEQ ID NO: 287643 - DNA, 25 bp, Artificial
  probe
  misc_feature (1)..(25): SEQ ID NO: 1233; WAN024GJO; Start 214; Stop 238
gctaatcatttagtggcaaatcaag

SEQ ID NO: 287644 - DNA, 25 bp, Artificial
  probe
  misc_feature (1)..(25): SEQ ID NO: 1233; WAN024GJO; Start 218; Stop 242
atcatttagtggcaaatcaagtagt

SEQ ID NO: 287645 - DNA, 25 bp, Artificial
  probe
  misc_feature (1)..(25): SEQ ID NO: 1233; WAN024GJO; Start 591; Stop 615
tatcataaataacagagcacgctta

SEQ ID NO: 287646 - DNA, 25 bp, Artificial
  probe
  misc_feature (1)..(25): SEQ ID NO: 1233; WAN024GJO; Start 1265; Stop 1289
tcatccaatatggcttacaaggtcg

SEQ ID NO: 287647 - DNA, 25 bp, Artificial
  probe
  misc_feature (1)..(25): SEQ ID NO: 1233; WAN024GJO; Start 1214; Stop 1238
atctctttaaattaaccgctcttgc

SEQ ID NO: 287648 - DNA, 25 bp, Artificial
  probe
  misc_feature (1)..(25): SEQ ID NO: 1233; WAN024GJO; Start 1004; Stop 1028
caactggtacagaaattgctcaaat

SEQ ID NO: 287649 - DNA, 25 bp, Artificial
  probe
  misc_feature (1)..(25): SEQ ID NO: 1233; WAN024GJO; Start 772; Stop 796
ggtatcggaagtgtagcaacttatg

SEQ ID NO: 287650 - DNA, 25 bp, Artificial
  probe
  misc_feature (1)..(25): SEQ ID NO: 1233; WAN024GJO; Start 1037; Stop 1061
tcatcacagatacaagagaagtact

SEQ ID NO: 287651 - DNA, 25 bp, Artificial
  probe
  misc_feature (1)..(25): SEQ ID NO: 1233; WAN024GJO; Start 771; Stop 795
tggtatcggaagtgtagcaacttat

SEQ ID NO: 287652 - DNA, 25 bp, Artificial
  probe
  misc_feature (1)..(25): SEQ ID NO: 1233; WAN024GJO; Start 1005; Stop 1029
aactggtacagaaattgctcaaata

SEQ ID NO: 287653 - DNA, 25 bp, Artificial
  probe
  misc_feature (1)..(25): SEQ ID NO: 1234; WAN024FAU; Start 199; Stop 223
ctactactgctgttacggacttatc

SEQ ID NO: 287654 - DNA, 25 bp, Artificial
  probe
  misc_feature (1)..(25): SEQ ID NO: 1234; WAN024FAU; Start 200; Stop 224
tactactgctgttacggacttatct

SEQ ID NO: 287655 - DNA, 25 bp, Artificial
  probe
  misc_feature (1)..(25): SEQ ID NO: 1234; WAN024FAU; Start 198; Stop 222
tctactactgctgttacggacttat

SEQ ID NO: 287656 - DNA, 25 bp, Artificial
  probe
  misc_feature (1)..(25): SEQ ID NO: 1234; WAN024FAU; Start 197; Stop 221
ttctactactgctgttacggactta

SEQ ID NO: 287657 - DNA, 25 bp, Artificial
  probe
  misc_feature (1)..(25): SEQ ID NO: 1234; WAN024FAU; Start 201; Stop 225
actactgctgttacggacttatctt

SEQ ID NO: 287658 - DNA, 25 bp, Artificial
  probe
  misc_feature (1)..(25): SEQ ID NO: 1234; WAN024FAU; Start 146; Stop 170
tacttcaactccattctcaattacc

SEQ ID NO: 287659 - DNA, 25 bp, Artificial
  probe
  misc_feature (1)..(25): SEQ ID NO: 1234; WAN024FAU; Start 204; Stop 228
actgctgttacggacttatctttat

SEQ ID NO: 287660 - DNA, 25 bp, Artificial
  probe
  misc_feature (1)..(25): SEQ ID NO: 1234; WAN024FAU; Start 202; Stop 226
ctactgctgttacggacttatcttt

SEQ ID NO: 287661 - DNA, 25 bp, Artificial
  probe
  misc_feature (1)..(25): SEQ ID NO: 1234; WAN024FAU; Start 117; Stop 141
ttatccaccatatcaaggcttcaaa

SEQ ID NO: 287662 - DNA, 25 bp, Artificial
  probe
  misc_feature (1)..(25): SEQ ID NO: 1234; WAN024FAU; Start 116; Stop 140
tttatccaccatatcaaggcttcaa

SEQ ID NO: 287663 - DNA, 25 bp, Artificial
  probe
  misc_feature (1)..(25): SEQ ID NO: 1234; WAN024FAU; Start 203; Stop 227
tactgctgttacggacttatcttta

SEQ ID NO: 287664 - DNA, 25 bp, Artificial
  probe
  misc_feature (1)..(25): SEQ ID NO: 1234; WAN024FAU; Start 156; Stop 180
ccattctcaattacccgataagtct

SEQ ID NO: 287665 - DNA, 25 bp, Artificial
  probe
  misc_feature (1)..(25): SEQ ID NO: 1234; WAN024FAU; Start 155; Stop 179
tccattctcaattacccgataagtc

SEQ ID NO: 287666 - DNA, 25 bp, Artificial
  probe
  misc_feature (1)..(25): SEQ ID NO: 1234; WAN024FAU; Start 154; Stop 178
ctccattctcaattacccgataagt

SEQ ID NO: 287667 - DNA, 25 bp, Artificial
  probe
  misc_feature (1)..(25): SEQ ID NO: 1234; WAN024FAU; Start 153; Stop 177
actccattctcaattacccgataag

SEQ ID NO: 287668 - DNA, 25 bp, Artificial
  probe
  misc_feature (1)..(25): SEQ ID NO: 1234; WAN024FAU; Start 152; Stop 176
aactccattctcaattacccgataa

SEQ ID NO: 287669 - DNA, 25 bp, Artificial
  probe
  misc_feature (1)..(25): SEQ ID NO: 1234; WAN024FAU; Start 151; Stop 175
caactccattctcaattacccgata

SEQ ID NO: 287670 - DNA, 25 bp, Artificial
  probe
  misc_feature (1)..(25): SEQ ID NO: 1234; WAN024FAU; Start 205; Stop 229
ctgctgttacggacttatctttatt

SEQ ID NO: 287671 - DNA, 25 bp, Artificial
  probe
  misc_feature (1)..(25): SEQ ID NO: 1234; WAN024FAU; Start 194; Stop 218
aatttctactactgctgttacggac

SEQ ID NO: 287672 - DNA, 25 bp, Artificial
  probe
  misc_feature (1)..(25): SEQ ID NO: 1234; WAN024FAU; Start 193; Stop 217
caatttctactactgctgttacgga

SEQ ID NO: 287673 - DNA, 25 bp, Artificial
  probe
  misc_feature (1)..(25): SEQ ID NO: 1234; WAN024FAU; Start 192; Stop 216
tcaatttctactactgctgttacgg

SEQ ID NO: 287674 - DNA, 25 bp, Artificial
  probe
  misc_feature (1)..(25): SEQ ID NO: 1234; WAN024FAU; Start 157; Stop 181
cattctcaattacccgataagtctg

SEQ ID NO: 287675 - DNA, 25 bp, Artificial
  probe
  misc_feature (1)..(25): SEQ ID NO: 1234; WAN024FAU; Start 147; Stop 171
acttcaactccattctcaattaccc

SEQ ID NO: 287676 - DNA, 25 bp, Artificial
  probe
  misc_feature (1)..(25): SEQ ID NO: 1234; WAN024FAU; Start 195; Stop 219
atttctactactgctgttacggact

SEQ ID NO: 287677 - DNA, 25 bp, Artificial
  probe
  misc_feature (1)..(25): SEQ ID NO: 1234; WAN024FAU; Start 191; Stop 215
atcaatttctactactgctgttacg

SEQ ID NO: 287678 - DNA, 25 bp, Artificial
  probe
  misc_feature (1)..(25): SEQ ID NO: 1234; WAN024FAU; Start 196; Stop 220
tttctactactgctgttacggactt

SEQ ID NO: 287679 - DNA, 25 bp, Artificial
  probe
  misc_feature (1)..(25): SEQ ID NO: 1234; WAN024FAU; Start 206; Stop 230
tgctgttacggacttatctttattt

SEQ ID NO: 287680 - DNA, 25 bp, Artificial
  probe
  misc_feature (1)..(25): SEQ ID NO: 1234; WAN024FAU; Start 160; Stop 184
tctcaattacccgataagtctgatt

SEQ ID NO: 287681 - DNA, 25 bp, Artificial
  probe
  misc_feature (1)..(25): SEQ ID NO: 1234; WAN024FAU; Start 159; Stop 183
ttctcaattacccgataagtctgat

SEQ ID NO: 287682 - DNA, 25 bp, Artificial
  probe
  misc_feature (1)..(25): SEQ ID NO: 1234; WAN024FAU; Start 158; Stop 182
attctcaattacccgataagtctga

SEQ ID NO: 287683 - DNA, 25 bp, Artificial
  probe
  misc_feature (1)..(25): SEQ ID NO: 1234; WAN024FAU; Start 150; Stop 174
tcaactccattctcaattacccgat

SEQ ID NO: 287684 - DNA, 25 bp, Artificial
  probe
  misc_feature (1)..(25): SEQ ID NO: 1234; WAN024FAU; Start 148; Stop 172
cttcaactccattctcaattacccg

SEQ ID NO: 287685 - DNA, 25 bp, Artificial
  probe
  misc_feature (1)..(25): SEQ ID NO: 1234; WAN024FAU; Start 161; Stop 185
ctcaattacccgataagtctgattt

SEQ ID NO: 287686 - DNA, 25 bp, Artificial
  probe
  misc_feature (1)..(25): SEQ ID NO: 1235; WAN024G5S; Start 145; Stop 169
ctcgtcacatctattctcgtcaatc

SEQ ID NO: 287687 - DNA, 25 bp, Artificial
  probe
  misc_feature (1)..(25): SEQ ID NO: 1235; WAN024G5S; Start 356; Stop 380
ctatcataactgaagtggtggagaa

SEQ ID NO: 287688 - DNA, 25 bp, Artificial
  probe
  misc_feature (1)..(25): SEQ ID NO: 1235; WAN024G5S; Start 622; Stop 646
ttacactatatctggcatcagcaag

SEQ ID NO: 287689 - DNA, 25 bp, Artificial
  probe
  misc_feature (1)..(25): SEQ ID NO: 1235; WAN024G5S; Start 621; Stop 645
gttacactatatctggcatcagcaa

SEQ ID NO: 287690 - DNA, 25 bp, Artificial
  probe
  misc_feature (1)..(25): SEQ ID NO: 1235; WAN024G5S; Start 146; Stop 170
tcgtcacatctattctcgtcaatcc

SEQ ID NO: 287691 - DNA, 25 bp, Artificial
  probe
  misc_feature (1)..(25): SEQ ID NO: 1235; WAN024G5S; Start 623; Stop 647
tacactatatctggcatcagcaaga

SEQ ID NO: 287692 - DNA, 25 bp, Artificial
  probe
  misc_feature (1)..(25): SEQ ID NO: 1235; WAN024G5S; Start 355; Stop 379
gctatcataactgaagtggtggaga

SEQ ID NO: 287693 - DNA, 25 bp, Artificial
  probe
  misc_feature (1)..(25): SEQ ID NO: 1235; WAN024G5S; Start 266; Stop 290
taaggaatgatagctggatgattgg

SEQ ID NO: 287694 - DNA, 25 bp, Artificial
  probe
  misc_feature (1)..(25): SEQ ID NO: 1235; WAN024G5S; Start 624; Stop 648
acactatatctggcatcagcaagaa

SEQ ID NO: 287695 - DNA, 25 bp, Artificial
  probe
  misc_feature (1)..(25): SEQ ID NO: 1235; WAN024G5S; Start 144; Stop 168
gctcgtcacatctattctcgtcaat

SEQ ID NO: 287696 - DNA, 25 bp, Artificial
  probe
  misc_feature (1)..(25): SEQ ID NO: 1235; WAN024G5S; Start 265; Stop 289
ataaggaatgatagctggatgattg

SEQ ID NO: 287697 - DNA, 25 bp, Artificial
  probe
  misc_feature (1)..(25): SEQ ID NO: 1235; WAN024G5S; Start 239; Stop 263
ggattctttgtctggctatttcttt

SEQ ID NO: 287698 - DNA, 25 bp, Artificial
  probe
  misc_feature (1)..(25): SEQ ID NO: 1235; WAN024G5S; Start 150; Stop 174
cacatctattctcgtcaatcccttt

SEQ ID NO: 287699 - DNA, 25 bp, Artificial
  probe
  misc_feature (1)..(25): SEQ ID NO: 1235; WAN024G5S; Start 67; Stop 91
gattatggaaatagtgtctggttgg

SEQ ID NO: 287700 - DNA, 25 bp, Artificial
  probe
  misc_feature (1)..(25): SEQ ID NO: 1235; WAN024G5S; Start 612; Stop 636
caaggatgggttacactatatctgg

SEQ ID NO: 287701 - DNA, 25 bp, Artificial
  probe
  misc_feature (1)..(25): SEQ ID NO: 1235; WAN024G5S; Start 611; Stop 635
tcaaggatgggttacactatatctg

SEQ ID NO: 287702 - DNA, 25 bp, Artificial
  probe
  misc_feature (1)..(25): SEQ ID NO: 1235; WAN024G5S; Start 264; Stop 288
cataaggaatgatagctggatgatt

SEQ ID NO: 287703 - DNA, 25 bp, Artificial
  probe
  misc_feature (1)..(25): SEQ ID NO: 1235; WAN024G5S; Start 247; Stop 271
tgtctggctatttctttcataagga

SEQ ID NO: 287704 - DNA, 25 bp, Artificial
  probe
  misc_feature (1)..(25): SEQ ID NO: 1235; WAN024G5S; Start 227; Stop 251
atcttgtttgtgggattctttgtct

SEQ ID NO: 287705 - DNA, 25 bp, Artificial
  probe
  misc_feature (1)..(25): SEQ ID NO: 1235; WAN024G5S; Start 76; Stop 100
aatagtgtctggttggcttctatgg

SEQ ID NO: 287706 - DNA, 25 bp, Artificial
  probe
  misc_feature (1)..(25): SEQ ID NO: 1235; WAN024G5S; Start 238; Stop 262
gggattctttgtctggctatttctt

SEQ ID NO: 287707 - DNA, 25 bp, Artificial
  probe
  misc_feature (1)..(25): SEQ ID NO: 1235; WAN024G5S; Start 242; Stop 266
ttctttgtctggctatttctttcat

SEQ ID NO: 287708 - DNA, 25 bp, Artificial
  probe
  misc_feature (1)..(25): SEQ ID NO: 1235; WAN024G5S; Start 241; Stop 265
attctttgtctggctatttctttca

SEQ ID NO: 287709 - DNA, 25 bp, Artificial
  probe
  misc_feature (1)..(25): SEQ ID NO: 1235; WAN024G5S; Start 68; Stop 92
attatggaaatagtgtctggttggc

SEQ ID NO: 287710 - DNA, 25 bp, Artificial
  probe
  misc_feature (1)..(25): SEQ ID NO: 1235; WAN024G5S; Start 620; Stop 644
ggttacactatatctggcatcagca

SEQ ID NO: 287711 - DNA, 25 bp, Artificial
  probe
  misc_feature (1)..(25): SEQ ID NO: 1235; WAN024G5S; Start 66; Stop 90
tgattatggaaatagtgtctggttg

SEQ ID NO: 287712 - DNA, 25 bp, Artificial
  probe
  misc_feature (1)..(25): SEQ ID NO: 1235; WAN024G5S; Start 246; Stop 270
ttgtctggctatttctttcataagg

SEQ ID NO: 287713 - DNA, 25 bp, Artificial
  probe
  misc_feature (1)..(25): SEQ ID NO: 1235; WAN024G5S; Start 149; Stop 173
tcacatctattctcgtcaatccctt

SEQ ID NO: 287714 - DNA, 25 bp, Artificial
  probe
  misc_feature (1)..(25): SEQ ID NO: 1235; WAN024G5S; Start 353; Stop 377
aagctatcataactgaagtggtgga

SEQ ID NO: 287715 - DNA, 25 bp, Artificial
  probe
  misc_feature (1)..(25): SEQ ID NO: 1235; WAN024G5S; Start 617; Stop 641
atgggttacactatatctggcatca

SEQ ID NO: 287716 - DNA, 25 bp, Artificial
  probe
  misc_feature (1)..(25): SEQ ID NO: 1235; WAN024G5S; Start 151; Stop 175
acatctattctcgtcaatccctttg

SEQ ID NO: 287717 - DNA, 25 bp, Artificial
  probe
  misc_feature (1)..(25): SEQ ID NO: 1235; WAN024G5S; Start 240; Stop 264
gattctttgtctggctatttctttc

SEQ ID NO: 287718 - DNA, 25 bp, Artificial
  probe
  misc_feature (1)..(25): SEQ ID NO: 1235; WAN024G5S; Start 248; Stop 272
gtctggctatttctttcataaggaa

SEQ ID NO: 287719 - DNA, 25 bp, Artificial
  probe
  misc_feature (1)..(25): SEQ ID NO: 1236; WAN024AWF; Start 3; Stop 27
gaatcgtgtgaaagaatttcgcaag

SEQ ID NO: 287720 - DNA, 25 bp, Artificial
  probe
  misc_feature (1)..(25): SEQ ID NO: 1236; WAN024AWF; Start 1; Stop 25
atgaatcgtgtgaaagaatttcgca

SEQ ID NO: 287721 - DNA, 25 bp, Artificial
  probe
  misc_feature (1)..(25): SEQ ID NO: 1236; WAN024AWF; Start 2; Stop 26
tgaatcgtgtgaaagaatttcgcaa

SEQ ID NO: 287722 - DNA, 25 bp, Artificial
  probe
  misc_feature (1)..(25): SEQ ID NO: 1236; WAN024AWF; Start 95; Stop 119
ttgaaaacgacaagtacaatccaac

SEQ ID NO: 287723 - DNA, 25 bp, Artificial
  probe
  misc_feature (1)..(25): SEQ ID NO: 1236; WAN024AWF; Start 4; Stop 28
aatcgtgtgaaagaatttcgcaagg

SEQ ID NO: 287724 - DNA, 25 bp, Artificial
  probe
  misc_feature (1)..(25): SEQ ID NO: 1236; WAN024AWF; Start 94; Stop 118
attgaaaacgacaagtacaatccaa

SEQ ID NO: 287725 - DNA, 25 bp, Artificial
  probe
  misc_feature (1)..(25): SEQ ID NO: 1236; WAN024AWF; Start 5; Stop 29
atcgtgtgaaagaatttcgcaagga

SEQ ID NO: 287726 - DNA, 25 bp, Artificial
  probe
  misc_feature (1)..(25): SEQ ID NO: 1236; WAN024AWF; Start 6; Stop 30
tcgtgtgaaagaatttcgcaaggaa

SEQ ID NO: 287727 - DNA, 25 bp, Artificial
  probe
  misc_feature (1)..(25): SEQ ID NO: 1236; WAN024AWF; Start 89; Stop 113
atatgattgaaaacgacaagtacaa

SEQ ID NO: 287728 - DNA, 25 bp, Artificial
  probe
  misc_feature (1)..(25): SEQ ID NO: 1236; WAN024AWF; Start 88; Stop 112
aatatgattgaaaacgacaagtaca

SEQ ID NO: 287729 - DNA, 25 bp, Artificial
  probe
  misc_feature (1)..(25): SEQ ID NO: 1236; WAN024AWF; Start 90; Stop 114
tatgattgaaaacgacaagtacaat

SEQ ID NO: 287730 - DNA, 25 bp, Artificial
  probe
  misc_feature (1)..(25): SEQ ID NO: 1236; WAN024AWF; Start 87; Stop 111
caatatgattgaaaacgacaagtac

SEQ ID NO: 287731 - DNA, 25 bp, Artificial
  probe
  misc_feature (1)..(25): SEQ ID NO: 1236; WAN024AWF; Start 153; Stop 177
ccaaactgacctcaacagtctcttt

SEQ ID NO: 287732 - DNA, 25 bp, Artificial
  probe
  misc_feature (1)..(25): SEQ ID NO: 1236; WAN024AWF; Start 152; Stop 176
tccaaactgacctcaacagtctctt

SEQ ID NO: 287733 - DNA, 25 bp, Artificial
  probe
  misc_feature (1)..(25): SEQ ID NO: 1236; WAN024AWF; Start 155; Stop 179
aaactgacctcaacagtctcttttg

SEQ ID NO: 287734 - DNA, 25 bp, Artificial
  probe
  misc_feature (1)..(25): SEQ ID NO: 1236; WAN024AWF; Start 154; Stop 178
caaactgacctcaacagtctctttt

SEQ ID NO: 287735 - DNA, 25 bp, Artificial
  probe
  misc_feature (1)..(25): SEQ ID NO: 1236; WAN024AWF; Start 151; Stop 175
ctccaaactgacctcaacagtctct

SEQ ID NO: 287736 - DNA, 25 bp, Artificial
  probe
  misc_feature (1)..(25): SEQ ID NO: 1236; WAN024AWF; Start 156; Stop 180
aactgacctcaacagtctcttttgg

SEQ ID NO: 287737 - DNA, 25 bp, Artificial
  probe
  misc_feature (1)..(25): SEQ ID NO: 1236; WAN024AWF; Start 150; Stop 174
cctccaaactgacctcaacagtctc

SEQ ID NO: 287738 - DNA, 25 bp, Artificial
  probe
  misc_feature (1)..(25): SEQ ID NO: 1236; WAN024AWF; Start 85; Stop 109
atcaatatgattgaaaacgacaagt

SEQ ID NO: 287739 - DNA, 25 bp, Artificial
  probe
  misc_feature (1)..(25): SEQ ID NO: 1236; WAN024AWF; Start 86; Stop 110
tcaatatgattgaaaacgacaagta

SEQ ID NO: 287740 - DNA, 25 bp, Artificial
  probe
  misc_feature (1)..(25): SEQ ID NO: 1237; WAN024FFZ; Start 1863; Stop 1887
agagttccaagtggctgatattatc

SEQ ID NO: 287741 - DNA, 25 bp, Artificial
  probe
  misc_feature (1)..(25): SEQ ID NO: 1237; WAN024FFZ; Start 1864; Stop 1888
gagttccaagtggctgatattatcg

SEQ ID NO: 287742 - DNA, 25 bp, Artificial
  probe
  misc_feature (1)..(25): SEQ ID NO: 1237; WAN024FFZ; Start 1862; Stop 1886
cagagttccaagtggctgatattat

SEQ ID NO: 287743 - DNA, 25 bp, Artificial
  probe
  misc_feature (1)..(25): SEQ ID NO: 1237; WAN024FFZ; Start 192; Stop 216
gactcctgctagtgtccagtattat

SEQ ID NO: 287744 - DNA, 25 bp, Artificial
  probe
  misc_feature (1)..(25): SEQ ID NO: 1237; WAN024FFZ; Start 1869; Stop 1893
ccaagtggctgatattatcgaagat

SEQ ID NO: 287745 - DNA, 25 bp, Artificial
  probe
  misc_feature (1)..(25): SEQ ID NO: 1237; WAN024FFZ; Start 193; Stop 217
actcctgctagtgtccagtattatg

SEQ ID NO: 287746 - DNA, 25 bp, Artificial
  probe
  misc_feature (1)..(25): SEQ ID NO: 1237; WAN024FFZ; Start 793; Stop 817
ttaactgatatgaagtccgaccacc

SEQ ID NO: 287747 - DNA, 25 bp, Artificial
  probe
  misc_feature (1)..(25): SEQ ID NO: 1237; WAN024FFZ; Start 1870; Stop 1894
caagtggctgatattatcgaagatt

SEQ ID NO: 287748 - DNA, 25 bp, Artificial
  probe
  misc_feature (1)..(25): SEQ ID NO: 1237; WAN024FFZ; Start 1867; Stop 1891
ttccaagtggctgatattatcgaag

SEQ ID NO: 287749 - DNA, 25 bp, Artificial
  probe
  misc_feature (1)..(25): SEQ ID NO: 1237; WAN024FFZ; Start 1866; Stop 1890
gttccaagtggctgatattatcgaa

SEQ ID NO: 287750 - DNA, 25 bp, Artificial
  probe
  misc_feature (1)..(25): SEQ ID NO: 1237; WAN024FFZ; Start 1868; Stop 1892
tccaagtggctgatattatcgaaga

SEQ ID NO: 287751 - DNA, 25 bp, Artificial
  probe
  misc_feature (1)..(25): SEQ ID NO: 1237; WAN024FFZ; Start 96; Stop 120
cttgctctactttcctttccgttat

SEQ ID NO: 287752 - DNA, 25 bp, Artificial
  probe
  misc_feature (1)..(25): SEQ ID NO: 1237; WAN024FFZ; Start 275; Stop 299
tgaatttctttaaccagccctatct

SEQ ID NO: 287753 - DNA, 25 bp, Artificial
  probe
  misc_feature (1)..(25): SEQ ID NO: 1237; WAN024FFZ; Start 274; Stop 298
gtgaatttctttaaccagccctatc

SEQ ID NO: 287754 - DNA, 25 bp, Artificial
  probe
  misc_feature (1)..(25): SEQ ID NO: 1237; WAN024FFZ; Start 1549; Stop 1573
ttcaaggagagaaagacggatattc

SEQ ID NO: 287755 - DNA, 25 bp, Artificial
  probe
  misc_feature (1)..(25): SEQ ID NO: 1237; WAN024FFZ; Start 103; Stop 127
tactttcctttccgttatgaagact

SEQ ID NO: 287756 - DNA, 25 bp, Artificial
  probe
  misc_feature (1)..(25): SEQ ID NO: 1237; WAN024FFZ; Start 104; Stop 128
actttcctttccgttatgaagactt

SEQ ID NO: 287757 - DNA, 25 bp, Artificial
  probe
  misc_feature (1)..(25): SEQ ID NO: 1237; WAN024FFZ; Start 102; Stop 126
ctactttcctttccgttatgaagac

SEQ ID NO: 287758 - DNA, 25 bp, Artificial
  probe
  misc_feature (1)..(25): SEQ ID NO: 1237; WAN024FFZ; Start 97; Stop 121
ttgctctactttcctttccgttatg

SEQ ID NO: 287759 - DNA, 25 bp, Artificial
  probe
  misc_feature (1)..(25): SEQ ID NO: 1237; WAN024FFZ; Start 1865; Stop 1889
agttccaagtggctgatattatcga

SEQ ID NO: 287760 - DNA, 25 bp, Artificial
  probe
  misc_feature (1)..(25): SEQ ID NO: 1237; WAN024FFZ; Start 100; Stop 124
ctctactttcctttccgttatgaag

SEQ ID NO: 287761 - DNA, 25 bp, Artificial
  probe
  misc_feature (1)..(25): SEQ ID NO: 1237; WAN024FFZ; Start 99; Stop 123
gctctactttcctttccgttatgaa

SEQ ID NO: 287762 - DNA, 25 bp, Artificial
  probe
  misc_feature (1)..(25): SEQ ID NO: 1237; WAN024FFZ; Start 101; Stop 125
tctactttcctttccgttatgaaga

SEQ ID NO: 287763 - DNA, 25 bp, Artificial
  probe
  misc_feature (1)..(25): SEQ ID NO: 1237; WAN024FFZ; Start 191; Stop 215
tgactcctgctagtgtccagtatta

SEQ ID NO: 287764 - DNA, 25 bp, Artificial
  probe
  misc_feature (1)..(25): SEQ ID NO: 1237; WAN024FFZ; Start 1392; Stop 1416
tgtcatctctcctttgattgaagaa

SEQ ID NO: 287765 - DNA, 25 bp, Artificial
  probe
  misc_feature (1)..(25): SEQ ID NO: 1237; WAN024FFZ; Start 1391; Stop 1415
atgtcatctctcctttgattgaaga

SEQ ID NO: 287766 - DNA, 25 bp, Artificial
  probe
  misc_feature (1)..(25): SEQ ID NO: 1237; WAN024FFZ; Start 948; Stop 972
acactttgagagtttacagaacctt

SEQ ID NO: 287767 - DNA, 25 bp, Artificial
  probe
  misc_feature (1)..(25): SEQ ID NO: 1237; WAN024FFZ; Start 947; Stop 971
aacactttgagagtttacagaacct

SEQ ID NO: 287768 - DNA, 25 bp, Artificial
  probe
  misc_feature (1)..(25): SEQ ID NO: 1237; WAN024FFZ; Start 946; Stop 970
caacactttgagagtttacagaacc

SEQ ID NO: 287769 - DNA, 25 bp, Artificial
  probe
  misc_feature (1)..(25): SEQ ID NO: 1237; WAN024FFZ; Start 1502; Stop 1526
tacatggtaggatgaagagtgacga

SEQ ID NO: 287770 - DNA, 25 bp, Artificial
  probe
  misc_feature (1)..(25): SEQ ID NO: 1237; WAN024FFZ; Start 196; Stop 220
cctgctagtgtccagtattatggtt

SEQ ID NO: 287771 - DNA, 25 bp, Artificial
  probe
  misc_feature (1)..(25): SEQ ID NO: 1237; WAN024FFZ; Start 95; Stop 119
tcttgctctactttcctttccgtta

SEQ ID NO: 287772 - DNA, 25 bp, Artificial
  probe
  misc_feature (1)..(25): SEQ ID NO: 1237; WAN024FFZ; Start 949; Stop 973
cactttgagagtttacagaaccttt

SEQ ID NO: 287773 - DNA, 25 bp, Artificial
  probe
  misc_feature (1)..(25): SEQ ID NO: 1238; WAN024C79; Start 60; Stop 84
cttaacgctttcgcatcctatctta

SEQ ID NO: 287774 - DNA, 25 bp, Artificial
  probe
  misc_feature (1)..(25): SEQ ID NO: 1238; WAN024C79; Start 61; Stop 85
ttaacgctttcgcatcctatcttac

SEQ ID NO: 287775 - DNA, 25 bp, Artificial
  probe
  misc_feature (1)..(25): SEQ ID NO: 1238; WAN024C79; Start 160; Stop 184
agtgttgttagcagcatccaagatt

SEQ ID NO: 287776 - DNA, 25 bp, Artificial
  probe
  misc_feature (1)..(25): SEQ ID NO: 1238; WAN024C79; Start 74; Stop 98
atcctatcttaccaacggaagtgtg

SEQ ID NO: 287777 - DNA, 25 bp, Artificial
  probe
  misc_feature (1)..(25): SEQ ID NO: 1238; WAN024C79; Start 73; Stop 97
catcctatcttaccaacggaagtgt

SEQ ID NO: 287778 - DNA, 25 bp, Artificial
  probe
  misc_feature (1)..(25): SEQ ID NO: 1238; WAN024C79; Start 233; Stop 257
attgttaccaaccaacgaagtccaa

SEQ ID NO: 287779 - DNA, 25 bp, Artificial
  probe
  misc_feature (1)..(25): SEQ ID NO: 1238; WAN024C79; Start 57; Stop 81
tttcttaacgctttcgcatcctatc

SEQ ID NO: 287780 - DNA, 25 bp, Artificial
  probe
  misc_feature (1)..(25): SEQ ID NO: 1238; WAN024C79; Start 56; Stop 80
ctttcttaacgctttcgcatcctat

SEQ ID NO: 287781 - DNA, 25 bp, Artificial
  probe
  misc_feature (1)..(25): SEQ ID NO: 1238; WAN024C79; Start 165; Stop 189
tgttagcagcatccaagatttcttt

SEQ ID NO: 287782 - DNA, 25 bp, Artificial
  probe
  misc_feature (1)..(25): SEQ ID NO: 1238; WAN024C79; Start 114; Stop 138
cttcagccatacggtgagtatcttc

SEQ ID NO: 287783 - DNA, 25 bp, Artificial
  probe
  misc_feature (1)..(25): SEQ ID NO: 1238; WAN024C79; Start 164; Stop 188
ttgttagcagcatccaagatttctt

SEQ ID NO: 287784 - DNA, 25 bp, Artificial
  probe
  misc_feature (1)..(25): SEQ ID NO: 1238; WAN024C79; Start 163; Stop 187
gttgttagcagcatccaagatttct

SEQ ID NO: 287785 - DNA, 25 bp, Artificial
  probe
  misc_feature (1)..(25): SEQ ID NO: 1238; WAN024C79; Start 232; Stop 256
gattgttaccaaccaacgaagtcca

SEQ ID NO: 287786 - DNA, 25 bp, Artificial
  probe
  misc_feature (1)..(25): SEQ ID NO: 1238; WAN024C79; Start 46; Stop 70
ttctctgggactttcttaacgcttt

SEQ ID NO: 287787 - DNA, 25 bp, Artificial
  probe
  misc_feature (1)..(25): SEQ ID NO: 1238; WAN024C79; Start 45; Stop 69
tttctctgggactttcttaacgctt

SEQ ID NO: 287788 - DNA, 25 bp, Artificial
  probe
  misc_feature (1)..(25): SEQ ID NO: 1238; WAN024C79; Start 162; Stop 186
tgttgttagcagcatccaagatttc

SEQ ID NO: 287789 - DNA, 25 bp, Artificial
  probe
  misc_feature (1)..(25): SEQ ID NO: 1238; WAN024C79; Start 159; Stop 183
cagtgttgttagcagcatccaagat

SEQ ID NO: 287790 - DNA, 25 bp, Artificial
  probe
  misc_feature (1)..(25): SEQ ID NO: 1238; WAN024C79; Start 59; Stop 83
tcttaacgctttcgcatcctatctt

SEQ ID NO: 287791 - DNA, 25 bp, Artificial
  probe
  misc_feature (1)..(25): SEQ ID NO: 1238; WAN024C79; Start 58; Stop 82
ttcttaacgctttcgcatcctatct

SEQ ID NO: 287792 - DNA, 25 bp, Artificial
  probe
  misc_feature (1)..(25): SEQ ID NO: 1238; WAN024C79; Start 234; Stop 258
ttgttaccaaccaacgaagtccaag

SEQ ID NO: 287793 - DNA, 25 bp, Artificial
  probe
  misc_feature (1)..(25): SEQ ID NO: 1238; WAN024C79; Start 161; Stop 185
gtgttgttagcagcatccaagattt

SEQ ID NO: 287794 - DNA, 25 bp, Artificial
  probe
  misc_feature (1)..(25): SEQ ID NO: 1238; WAN024C79; Start 62; Stop 86
taacgctttcgcatcctatcttacc

SEQ ID NO: 287795 - DNA, 25 bp, Artificial
  probe
  misc_feature (1)..(25): SEQ ID NO: 1238; WAN024C79; Start 353; Stop 377
tccatagctgtttcaaatacttcaa

SEQ ID NO: 287796 - DNA, 25 bp, Artificial
  probe
  misc_feature (1)..(25): SEQ ID NO: 1238; WAN024C79; Start 352; Stop 376
ttccatagctgtttcaaatacttca

SEQ ID NO: 287797 - DNA, 25 bp, Artificial
  probe
  misc_feature (1)..(25): SEQ ID NO: 1238; WAN024C79; Start 357; Stop 381
tagctgtttcaaatacttcaagtgc

SEQ ID NO: 287798 - DNA, 25 bp, Artificial
  probe
  misc_feature (1)..(25): SEQ ID NO: 1238; WAN024C79; Start 47; Stop 71
tctctgggactttcttaacgctttc

SEQ ID NO: 287799 - DNA, 25 bp, Artificial
  probe
  misc_feature (1)..(25): SEQ ID NO: 1238; WAN024C79; Start 354; Stop 378
ccatagctgtttcaaatacttcaag

SEQ ID NO: 287800 - DNA, 25 bp, Artificial
  probe
  misc_feature (1)..(25): SEQ ID NO: 1238; WAN024C79; Start 115; Stop 139
ttcagccatacggtgagtatcttca

SEQ ID NO: 287801 - DNA, 25 bp, Artificial
  probe
  misc_feature (1)..(25): SEQ ID NO: 1238; WAN024C79; Start 55; Stop 79
actttcttaacgctttcgcatccta

SEQ ID NO: 287802 - DNA, 25 bp, Artificial
  probe
  misc_feature (1)..(25): SEQ ID NO: 1238; WAN024C79; Start 72; Stop 96
gcatcctatcttaccaacggaagtg

SEQ ID NO: 287803 - DNA, 25 bp, Artificial
  probe
  misc_feature (1)..(25): SEQ ID NO: 1238; WAN024C79; Start 363; Stop 387
tttcaaatacttcaagtgcatcgtt

SEQ ID NO: 287804 - DNA, 25 bp, Artificial
  probe
  misc_feature (1)..(25): SEQ ID NO: 1238; WAN024C79; Start 364; Stop 388
ttcaaatacttcaagtgcatcgttg

SEQ ID NO: 287805 - DNA, 25 bp, Artificial
  probe
  misc_feature (1)..(25): SEQ ID NO: 1238; WAN024C79; Start 362; Stop 386
gtttcaaatacttcaagtgcatcgt

SEQ ID NO: 287806 - DNA, 25 bp, Artificial
  probe
  misc_feature (1)..(25): SEQ ID NO: 1239; WAN024D3N; Start 783; Stop 807
gcaagagagtattcaagaaggtgta

SEQ ID NO: 287807 - DNA, 25 bp, Artificial
  probe
  misc_feature (1)..(25): SEQ ID NO: 1239; WAN024D3N; Start 283; Stop 307
ttcaagacggacttacttcatcaag

SEQ ID NO: 287808 - DNA, 25 bp, Artificial
  probe
  misc_feature (1)..(25): SEQ ID NO: 1239; WAN024D3N; Start 540; Stop 564
tacttatcaccagattccaatcacg

SEQ ID NO: 287809 - DNA, 25 bp, Artificial
  probe
  misc_feature (1)..(25): SEQ ID NO: 1239; WAN024D3N; Start 282; Stop 306
gttcaagacggacttacttcatcaa

SEQ ID NO: 287810 - DNA, 25 bp, Artificial
  probe
  misc_feature (1)..(25): SEQ ID NO: 1239; WAN024D3N; Start 171; Stop 195
attactgaaggtcaacaagaagtct

SEQ ID NO: 287811 - DNA, 25 bp, Artificial
  probe
  misc_feature (1)..(25): SEQ ID NO: 1239; WAN024D3N; Start 577; Stop 601
gttctaggtgtccgtactattatgg

SEQ ID NO: 287812 - DNA, 25 bp, Artificial
  probe
  misc_feature (1)..(25): SEQ ID NO: 1239; WAN024D3N; Start 1150; Stop 1174
cgtacaggtctggatgataagttat

SEQ ID NO: 287813 - DNA, 25 bp, Artificial
  probe
  misc_feature (1)..(25): SEQ ID NO: 1239; WAN024D3N; Start 578; Stop 602
ttctaggtgtccgtactattatggt

SEQ ID NO: 287814 - DNA, 25 bp, Artificial
  probe
  misc_feature (1)..(25): SEQ ID NO: 1239; WAN024D3N; Start 173; Stop 197
tactgaaggtcaacaagaagtctaa

SEQ ID NO: 287815 - DNA, 25 bp, Artificial
  probe
  misc_feature (1)..(25): SEQ ID NO: 1239; WAN024D3N; Start 172; Stop 196
ttactgaaggtcaacaagaagtcta

SEQ ID NO: 287816 - DNA, 25 bp, Artificial
  probe
  misc_feature (1)..(25): SEQ ID NO: 1239; WAN024D3N; Start 1082; Stop 1106
cagaagagattattcctcgttggta

SEQ ID NO: 287817 - DNA, 25 bp, Artificial
  probe
  misc_feature (1)..(25): SEQ ID NO: 1239; WAN024D3N; Start 579; Stop 603
tctaggtgtccgtactattatggtc

SEQ ID NO: 287818 - DNA, 25 bp, Artificial
  probe
  misc_feature (1)..(25): SEQ ID NO: 1239; WAN024D3N; Start 170; Stop 194
aattactgaaggtcaacaagaagtc

SEQ ID NO: 287819 - DNA, 25 bp, Artificial
  probe
  misc_feature (1)..(25): SEQ ID NO: 1239; WAN024D3N; Start 529; Stop 553
gcagaattacttacttatcaccaga

SEQ ID NO: 287820 - DNA, 25 bp, Artificial
  probe
  misc_feature (1)..(25): SEQ ID NO: 1239; WAN024D3N; Start 528; Stop 552
agcagaattacttacttatcaccag

SEQ ID NO: 287821 - DNA, 25 bp, Artificial
  probe
  misc_feature (1)..(25): SEQ ID NO: 1239; WAN024D3N; Start 1250; Stop 1274
tggtacgcttagtagaagtctatga

SEQ ID NO: 287822 - DNA, 25 bp, Artificial
  probe
  misc_feature (1)..(25): SEQ ID NO: 1239; WAN024D3N; Start 1249; Stop 1273
ttggtacgcttagtagaagtctatg

SEQ ID NO: 287823 - DNA, 25 bp, Artificial
  probe
  misc_feature (1)..(25): SEQ ID NO: 1239; WAN024D3N; Start 539; Stop 563
ttacttatcaccagattccaatcac

SEQ ID NO: 287824 - DNA, 25 bp, Artificial
  probe
  misc_feature (1)..(25): SEQ ID NO: 1239; WAN024D3N; Start 1251; Stop 1275
ggtacgcttagtagaagtctatgat

SEQ ID NO: 287825 - DNA, 25 bp, Artificial
  probe
  misc_feature (1)..(25): SEQ ID NO: 1239; WAN024D3N; Start 280; Stop 304
gagttcaagacggacttacttcatc

SEQ ID NO: 287826 - DNA, 25 bp, Artificial
  probe
  misc_feature (1)..(25): SEQ ID NO: 1239; WAN024D3N; Start 784; Stop 808
caagagagtattcaagaaggtgtac

SEQ ID NO: 287827 - DNA, 25 bp, Artificial
  probe
  misc_feature (1)..(25): SEQ ID NO: 1239; WAN024D3N; Start 520; Stop 544
aatcgcttagcagaattacttactt

SEQ ID NO: 287828 - DNA, 25 bp, Artificial
  probe
  misc_feature (1)..(25): SEQ ID NO: 1239; WAN024D3N; Start 621; Stop 645
cggacaggttcagattattattgtt

SEQ ID NO: 287829 - DNA, 25 bp, Artificial
  probe
  misc_feature (1)..(25): SEQ ID NO: 1239; WAN024D3N; Start 922; Stop 946
ttgattgacgcttattgtggagttg

SEQ ID NO: 287830 - DNA, 25 bp, Artificial
  probe
  misc_feature (1)..(25): SEQ ID NO: 1239; WAN024D3N; Start 133; Stop 157
cagattacttctattagacgcaact

SEQ ID NO: 287831 - DNA, 25 bp, Artificial
  probe
  misc_feature (1)..(25): SEQ ID NO: 1239; WAN024D3N; Start 132; Stop 156
tcagattacttctattagacgcaac

SEQ ID NO: 287832 - DNA, 25 bp, Artificial
  probe
  misc_feature (1)..(25): SEQ ID NO: 1239; WAN024D3N; Start 538; Stop 562
cttacttatcaccagattccaatca

SEQ ID NO: 287833 - DNA, 25 bp, Artificial
  probe
  misc_feature (1)..(25): SEQ ID NO: 1239; WAN024D3N; Start 537; Stop 561
acttacttatcaccagattccaatc

SEQ ID NO: 287834 - DNA, 25 bp, Artificial
  probe
  misc_feature (1)..(25): SEQ ID NO: 1239; WAN024D3N; Start 1254; Stop 1278
acgcttagtagaagtctatgatctt

SEQ ID NO: 287835 - DNA, 25 bp, Artificial
  probe
  misc_feature (1)..(25): SEQ ID NO: 1239; WAN024D3N; Start 580; Stop 604
ctaggtgtccgtactattatggtcc

SEQ ID NO: 287836 - DNA, 25 bp, Artificial
  probe
  misc_feature (1)..(25): SEQ ID NO: 1239; WAN024D3N; Start 1086; Stop 1110
agagattattcctcgttggtacaag

SEQ ID NO: 287837 - DNA, 25 bp, Artificial
  probe
  misc_feature (1)..(25): SEQ ID NO: 1239; WAN024D3N; Start 1084; Stop 1108
gaagagattattcctcgttggtaca

SEQ ID NO: 287838 - DNA, 25 bp, Artificial
  probe
  misc_feature (1)..(25): SEQ ID NO: 1239; WAN024D3N; Start 1083; Stop 1107
agaagagattattcctcgttggtac

SEQ ID NO: 287839 - DNA, 25 bp, Artificial
  probe
  misc_feature (1)..(25): SEQ ID NO: 1240; WAN024DXP; Start 147; Stop 171
cgatggcattagcaataggatgata

SEQ ID NO: 287840 - DNA, 25 bp, Artificial
  probe
  misc_feature (1)..(25): SEQ ID NO: 1240; WAN024DXP; Start 148; Stop 172
gatggcattagcaataggatgataa

SEQ ID NO: 287841 - DNA, 25 bp, Artificial
  probe
  misc_feature (1)..(25): SEQ ID NO: 1240; WAN024DXP; Start 146; Stop 170
acgatggcattagcaataggatgat

SEQ ID NO: 287842 - DNA, 25 bp, Artificial
  probe
  misc_feature (1)..(25): SEQ ID NO: 1240; WAN024DXP; Start 143; Stop 167
ttgacgatggcattagcaataggat

SEQ ID NO: 287843 - DNA, 25 bp, Artificial
  probe
  misc_feature (1)..(25): SEQ ID NO: 1240; WAN024DXP; Start 10; Stop 34
ctcatcctgcatcaagacataattc

SEQ ID NO: 287844 - DNA, 25 bp, Artificial
  probe
  misc_feature (1)..(25): SEQ ID NO: 1240; WAN024DXP; Start 11; Stop 35
tcatcctgcatcaagacataattcc

SEQ ID NO: 287845 - DNA, 25 bp, Artificial
  probe
  misc_feature (1)..(25): SEQ ID NO: 1240; WAN024DXP; Start 145; Stop 169
gacgatggcattagcaataggatga

SEQ ID NO: 287846 - DNA, 25 bp, Artificial
  probe
  misc_feature (1)..(25): SEQ ID NO: 1240; WAN024DXP; Start 9; Stop 33
gctcatcctgcatcaagacataatt

SEQ ID NO: 287847 - DNA, 25 bp, Artificial
  probe
  misc_feature (1)..(25): SEQ ID NO: 1240; WAN024DXP; Start 144; Stop 168
tgacgatggcattagcaataggatg

SEQ ID NO: 287848 - DNA, 25 bp, Artificial
  probe
  misc_feature (1)..(25): SEQ ID NO: 1240; WAN024DXP; Start 142; Stop 166
cttgacgatggcattagcaatagga

SEQ ID NO: 287849 - DNA, 25 bp, Artificial
  probe
  misc_feature (1)..(25): SEQ ID NO: 1240; WAN024DXP; Start 191; Stop 215
gcactgattctgagaatatcttcct

SEQ ID NO: 287850 - DNA, 25 bp, Artificial
  probe
  misc_feature (1)..(25): SEQ ID NO: 1240; WAN024DXP; Start 189; Stop 213
aggcactgattctgagaatatcttc

SEQ ID NO: 287851 - DNA, 25 bp, Artificial
  probe
  misc_feature (1)..(25): SEQ ID NO: 1240; WAN024DXP; Start 188; Stop 212
caggcactgattctgagaatatctt

SEQ ID NO: 287852 - DNA, 25 bp, Artificial
  probe
  misc_feature (1)..(25): SEQ ID NO: 1240; WAN024DXP; Start 76; Stop 100
cttgcttgcgatatattggagtttc

SEQ ID NO: 287853 - DNA, 25 bp, Artificial
  probe
  misc_feature (1)..(25): SEQ ID NO: 1240; WAN024DXP; Start 113; Stop 137
tcatgttcaattccctctatctcag

SEQ ID NO: 287854 - DNA, 25 bp, Artificial
  probe
  misc_feature (1)..(25): SEQ ID NO: 1240; WAN024DXP; Start 112; Stop 136
ctcatgttcaattccctctatctca

SEQ ID NO: 287855 - DNA, 25 bp, Artificial
  probe
  misc_feature (1)..(25): SEQ ID NO: 1240; WAN024DXP; Start 109; Stop 133
ttcctcatgttcaattccctctatc

SEQ ID NO: 287856 - DNA, 25 bp, Artificial
  probe
  misc_feature (1)..(25): SEQ ID NO: 1240; WAN024DXP; Start 150; Stop 174
tggcattagcaataggatgataaat

SEQ ID NO: 287857 - DNA, 25 bp, Artificial
  probe
  misc_feature (1)..(25): SEQ ID NO: 1240; WAN024DXP; Start 149; Stop 173
atggcattagcaataggatgataaa

SEQ ID NO: 287858 - DNA, 25 bp, Artificial
  probe
  misc_feature (1)..(25): SEQ ID NO: 1240; WAN024DXP; Start 108; Stop 132
tttcctcatgttcaattccctctat

SEQ ID NO: 287859 - DNA, 25 bp, Artificial
  probe
  misc_feature (1)..(25): SEQ ID NO: 1240; WAN024DXP; Start 107; Stop 131
atttcctcatgttcaattccctcta

SEQ ID NO: 287860 - DNA, 25 bp, Artificial
  probe
  misc_feature (1)..(25): SEQ ID NO: 1240; WAN024DXP; Start 111; Stop 135
cctcatgttcaattccctctatctc

SEQ ID NO: 287861 - DNA, 25 bp, Artificial
  probe
  misc_feature (1)..(25): SEQ ID NO: 1240; WAN024DXP; Start 18; Stop 42
gcatcaagacataattcccaataag

SEQ ID NO: 287862 - DNA, 25 bp, Artificial
  probe
  misc_feature (1)..(25): SEQ ID NO: 1240; WAN024DXP; Start 190; Stop 214
ggcactgattctgagaatatcttcc

SEQ ID NO: 287863 - DNA, 25 bp, Artificial
  probe
  misc_feature (1)..(25): SEQ ID NO: 1240; WAN024DXP; Start 186; Stop 210
gacaggcactgattctgagaatatc

SEQ ID NO: 287864 - DNA, 25 bp, Artificial
  probe
  misc_feature (1)..(25): SEQ ID NO: 1240; WAN024DXP; Start 110; Stop 134
tcctcatgttcaattccctctatct

SEQ ID NO: 287865 - DNA, 25 bp, Artificial
  probe
  misc_feature (1)..(25): SEQ ID NO: 1240; WAN024DXP; Start 166; Stop 190
atgataaatgtgttcctcaagacag

SEQ ID NO: 287866 - DNA, 25 bp, Artificial
  probe
  misc_feature (1)..(25): SEQ ID NO: 1240; WAN024DXP; Start 165; Stop 189
gatgataaatgtgttcctcaagaca

SEQ ID NO: 287867 - DNA, 25 bp, Artificial
  probe
  misc_feature (1)..(25): SEQ ID NO: 1240; WAN024DXP; Start 187; Stop 211
acaggcactgattctgagaatatct

SEQ ID NO: 287868 - DNA, 25 bp, Artificial
  probe
  misc_feature (1)..(25): SEQ ID NO: 1240; WAN024DXP; Start 185; Stop 209
agacaggcactgattctgagaatat

SEQ ID NO: 287869 - DNA, 25 bp, Artificial
  probe
  misc_feature (1)..(25): SEQ ID NO: 1240; WAN024DXP; Start 114; Stop 138
catgttcaattccctctatctcagc

SEQ ID NO: 287870 - DNA, 25 bp, Artificial
  probe
  misc_feature (1)..(25): SEQ ID NO: 1240; WAN024DXP; Start 192; Stop 216
cactgattctgagaatatcttcctc

SEQ ID NO: 287871 - DNA, 25 bp, Artificial
  probe
  misc_feature (1)..(25): SEQ ID NO: 1240; WAN024DXP; Start 184; Stop 208
aagacaggcactgattctgagaata

SEQ ID NO: 287872 - DNA, 25 bp, Artificial
  probe
  misc_feature (1)..(25): SEQ ID NO: 1241; WAN024CEF; Start 603; Stop 627
aagtgatgaatggaagtctattggt

SEQ ID NO: 287873 - DNA, 25 bp, Artificial
  probe
  misc_feature (1)..(25): SEQ ID NO: 1241; WAN024CEF; Start 602; Stop 626
taagtgatgaatggaagtctattgg

SEQ ID NO: 287874 - DNA, 25 bp, Artificial
  probe
  misc_feature (1)..(25): SEQ ID NO: 1241; WAN024CEF; Start 682; Stop 706
ctgattgtttctcttgttcctttgt

SEQ ID NO: 287875 - DNA, 25 bp, Artificial
  probe
  misc_feature (1)..(25): SEQ ID NO: 1241; WAN024CEF; Start 12; Stop 36
tttagtctcaccctttgtttacctt

SEQ ID NO: 287876 - DNA, 25 bp, Artificial
  probe
  misc_feature (1)..(25): SEQ ID NO: 1241; WAN024CEF; Start 686; Stop 710
ttgtttctcttgttcctttgtttga

SEQ ID NO: 287877 - DNA, 25 bp, Artificial
  probe
  misc_feature (1)..(25): SEQ ID NO: 1241; WAN024CEF; Start 681; Stop 705
tctgattgtttctcttgttcctttg

SEQ ID NO: 287878 - DNA, 25 bp, Artificial
  probe
  misc_feature (1)..(25): SEQ ID NO: 1241; WAN024CEF; Start 683; Stop 707
tgattgtttctcttgttcctttgtt

SEQ ID NO: 287879 - DNA, 25 bp, Artificial
  probe
  misc_feature (1)..(25): SEQ ID NO: 1241; WAN024CEF; Start 6; Stop 30
tcttagtttagtctcaccctttgtt

SEQ ID NO: 287880 - DNA, 25 bp, Artificial
  probe
  misc_feature (1)..(25): SEQ ID NO: 1241; WAN024CEF; Start 791; Stop 815
ctatcttactgattattgccctcgt

SEQ ID NO: 287881 - DNA, 25 bp, Artificial
  probe
  misc_feature (1)..(25): SEQ ID NO: 1241; WAN024CEF; Start 13; Stop 37
ttagtctcaccctttgtttaccttg

SEQ ID NO: 287882 - DNA, 25 bp, Artificial
  probe
  misc_feature (1)..(25): SEQ ID NO: 1241; WAN024CEF; Start 11; Stop 35
gtttagtctcaccctttgtttacct

SEQ ID NO: 287883 - DNA, 25 bp, Artificial
  probe
  misc_feature (1)..(25): SEQ ID NO: 1241; WAN024CEF; Start 10; Stop 34
agtttagtctcaccctttgtttacc

SEQ ID NO: 287884 - DNA, 25 bp, Artificial
  probe
  misc_feature (1)..(25): SEQ ID NO: 1241; WAN024CEF; Start 786; Stop 810
acaagctatcttactgattattgcc

SEQ ID NO: 287885 - DNA, 25 bp, Artificial
  probe
  misc_feature (1)..(25): SEQ ID NO: 1241; WAN024CEF; Start 792; Stop 816
tatcttactgattattgccctcgtt

SEQ ID NO: 287886 - DNA, 25 bp, Artificial
  probe
  misc_feature (1)..(25): SEQ ID NO: 1241; WAN024CEF; Start 762; Stop 786
tgcgattatgtttggtagtttggta

SEQ ID NO: 287887 - DNA, 25 bp, Artificial
  probe
  misc_feature (1)..(25): SEQ ID NO: 1241; WAN024CEF; Start 5; Stop 29
atcttagtttagtctcaccctttgt

SEQ ID NO: 287888 - DNA, 25 bp, Artificial
  probe
  misc_feature (1)..(25): SEQ ID NO: 1241; WAN024CEF; Start 691; Stop 715
tctcttgttcctttgtttgaatctg

SEQ ID NO: 287889 - DNA, 25 bp, Artificial
  probe
  misc_feature (1)..(25): SEQ ID NO: 1241; WAN024CEF; Start 687; Stop 711
tgtttctcttgttcctttgtttgaa

SEQ ID NO: 287890 - DNA, 25 bp, Artificial
  probe
  misc_feature (1)..(25): SEQ ID NO: 1241; WAN024CEF; Start 760; Stop 784
cttgcgattatgtttggtagtttgg

SEQ ID NO: 287891 - DNA, 25 bp, Artificial
  probe
  misc_feature (1)..(25): SEQ ID NO: 1241; WAN024CEF; Start 680; Stop 704
ttctgattgtttctcttgttccttt

SEQ ID NO: 287892 - DNA, 25 bp, Artificial
  probe
  misc_feature (1)..(25): SEQ ID NO: 1241; WAN024CEF; Start 679; Stop 703
tttctgattgtttctcttgttcctt

SEQ ID NO: 287893 - DNA, 25 bp, Artificial
  probe
  misc_feature (1)..(25): SEQ ID NO: 1241; WAN024CEF; Start 793; Stop 817
atcttactgattattgccctcgttg

SEQ ID NO: 287894 - DNA, 25 bp, Artificial
  probe
  misc_feature (1)..(25): SEQ ID NO: 1241; WAN024CEF; Start 685; Stop 709
attgtttctcttgttcctttgtttg

SEQ ID NO: 287895 - DNA, 25 bp, Artificial
  probe
  misc_feature (1)..(25): SEQ ID NO: 1241; WAN024CEF; Start 487; Stop 511
ctcatttggcttgttcggatagtaa

SEQ ID NO: 287896 - DNA, 25 bp, Artificial
  probe
  misc_feature (1)..(25): SEQ ID NO: 1241; WAN024CEF; Start 7; Stop 31
cttagtttagtctcaccctttgttt

SEQ ID NO: 287897 - DNA, 25 bp, Artificial
  probe
  misc_feature (1)..(25): SEQ ID NO: 1241; WAN024CEF; Start 684; Stop 708
gattgtttctcttgttcctttgttt

SEQ ID NO: 287898 - DNA, 25 bp, Artificial
  probe
  misc_feature (1)..(25): SEQ ID NO: 1241; WAN024CEF; Start 790; Stop 814
gctatcttactgattattgccctcg

SEQ ID NO: 287899 - DNA, 25 bp, Artificial
  probe
  misc_feature (1)..(25): SEQ ID NO: 1241; WAN024CEF; Start 690; Stop 714
ttctcttgttcctttgtttgaatct

SEQ ID NO: 287900 - DNA, 25 bp, Artificial
  probe
  misc_feature (1)..(25): SEQ ID NO: 1241; WAN024CEF; Start 761; Stop 785
ttgcgattatgtttggtagtttggt

SEQ ID NO: 287901 - DNA, 25 bp, Artificial
  probe
  misc_feature (1)..(25): SEQ ID NO: 1241; WAN024CEF; Start 692; Stop 716
ctcttgttcctttgtttgaatctgc

SEQ ID NO: 287902 - DNA, 25 bp, Artificial
  probe
  misc_feature (1)..(25): SEQ ID NO: 1241; WAN024CEF; Start 488; Stop 512
tcatttggcttgttcggatagtaag

SEQ ID NO: 287903 - DNA, 25 bp, Artificial
  probe
  misc_feature (1)..(25): SEQ ID NO: 1241; WAN024CEF; Start 601; Stop 625
ttaagtgatgaatggaagtctattg

SEQ ID NO: 287904 - DNA, 25 bp, Artificial
  probe
  misc_feature (1)..(25): SEQ ID NO: 1241; WAN024CEF; Start 4; Stop 28
aatcttagtttagtctcaccctttg

SEQ ID NO: 287905 - DNA, 25 bp, Artificial
  probe
  misc_feature (1)..(25): SEQ ID NO: 1242; WAN024G94; Start 38; Stop 62
ccagtagcgataaccgtaataacat

SEQ ID NO: 287906 - DNA, 25 bp, Artificial
  probe
  misc_feature (1)..(25): SEQ ID NO: 1242; WAN024G94; Start 41; Stop 65
gtagcgataaccgtaataacatctg

SEQ ID NO: 287907 - DNA, 25 bp, Artificial
  probe
  misc_feature (1)..(25): SEQ ID NO: 1242; WAN024G94; Start 40; Stop 64
agtagcgataaccgtaataacatct

SEQ ID NO: 287908 - DNA, 25 bp, Artificial
  probe
  misc_feature (1)..(25): SEQ ID NO: 1242; WAN024G94; Start 39; Stop 63
cagtagcgataaccgtaataacatc

SEQ ID NO: 287909 - DNA, 25 bp, Artificial
  probe
  misc_feature (1)..(25): SEQ ID NO: 1242; WAN024G94; Start 53; Stop 77
gtaataacatctgtcggcaattctg

SEQ ID NO: 287910 - DNA, 25 bp, Artificial
  probe
  misc_feature (1)..(25): SEQ ID NO: 1242; WAN024G94; Start 42; Stop 66
tagcgataaccgtaataacatctgt

SEQ ID NO: 287911 - DNA, 25 bp, Artificial
  probe
  misc_feature (1)..(25): SEQ ID NO: 1242; WAN024G94; Start 36; Stop 60
gaccagtagcgataaccgtaataac

SEQ ID NO: 287912 - DNA, 25 bp, Artificial
  probe
  misc_feature (1)..(25): SEQ ID NO: 1242; WAN024G94; Start 43; Stop 67
agcgataaccgtaataacatctgtc

SEQ ID NO: 287913 - DNA, 25 bp, Artificial
  probe
  misc_feature (1)..(25): SEQ ID NO: 1242; WAN024G94; Start 37; Stop 61
accagtagcgataaccgtaataaca

SEQ ID NO: 287914 - DNA, 25 bp, Artificial
  probe
  misc_feature (1)..(25): SEQ ID NO: 1242; WAN024G94; Start 52; Stop 76
cgtaataacatctgtcggcaattct

SEQ ID NO: 287915 - DNA, 25 bp, Artificial
  probe
  misc_feature (1)..(25): SEQ ID NO: 1242; WAN024G94; Start 57; Stop 81
taacatctgtcggcaattctgtaat

SEQ ID NO: 287916 - DNA, 25 bp, Artificial
  probe
  misc_feature (1)..(25): SEQ ID NO: 1242; WAN024G94; Start 56; Stop 80
ataacatctgtcggcaattctgtaa

SEQ ID NO: 287917 - DNA, 25 bp, Artificial
  probe
  misc_feature (1)..(25): SEQ ID NO: 1242; WAN024G94; Start 55; Stop 79
aataacatctgtcggcaattctgta

SEQ ID NO: 287918 - DNA, 25 bp, Artificial
  probe
  misc_feature (1)..(25): SEQ ID NO: 1242; WAN024G94; Start 54; Stop 78
taataacatctgtcggcaattctgt

SEQ ID NO: 287919 - DNA, 25 bp, Artificial
  probe
  misc_feature (1)..(25): SEQ ID NO: 1242; WAN024G94; Start 35; Stop 59
ggaccagtagcgataaccgtaataa

SEQ ID NO: 287920 - DNA, 25 bp, Artificial
  probe
  misc_feature (1)..(25): SEQ ID NO: 1242; WAN024G94; Start 82; Stop 106
ttcatcacgaaccacttcaatcaag

SEQ ID NO: 287921 - DNA, 25 bp, Artificial
  probe
  misc_feature (1)..(25): SEQ ID NO: 1242; WAN024G94; Start 58; Stop 82
aacatctgtcggcaattctgtaatt

SEQ ID NO: 287922 - DNA, 25 bp, Artificial
  probe
  misc_feature (1)..(25): SEQ ID NO: 1242; WAN024G94; Start 34; Stop 58
aggaccagtagcgataaccgtaata

SEQ ID NO: 287923 - DNA, 25 bp, Artificial
  probe
  misc_feature (1)..(25): SEQ ID NO: 1242; WAN024G94; Start 77; Stop 101
gtaatttcatcacgaaccacttcaa

SEQ ID NO: 287924 - DNA, 25 bp, Artificial
  probe
  misc_feature (1)..(25): SEQ ID NO: 1242; WAN024G94; Start 72; Stop 96
attctgtaatttcatcacgaaccac

SEQ ID NO: 287925 - DNA, 25 bp, Artificial
  probe
  misc_feature (1)..(25): SEQ ID NO: 1242; WAN024G94; Start 79; Stop 103
aatttcatcacgaaccacttcaatc

SEQ ID NO: 287926 - DNA, 25 bp, Artificial
  probe
  misc_feature (1)..(25): SEQ ID NO: 1242; WAN024G94; Start 75; Stop 99
ctgtaatttcatcacgaaccacttc

SEQ ID NO: 287927 - DNA, 25 bp, Artificial
  probe
  misc_feature (1)..(25): SEQ ID NO: 1242; WAN024G94; Start 74; Stop 98
tctgtaatttcatcacgaaccactt

SEQ ID NO: 287928 - DNA, 25 bp, Artificial
  probe
  misc_feature (1)..(25): SEQ ID NO: 1242; WAN024G94; Start 73; Stop 97
ttctgtaatttcatcacgaaccact

SEQ ID NO: 287929 - DNA, 25 bp, Artificial
  probe
  misc_feature (1)..(25): SEQ ID NO: 1242; WAN024G94; Start 78; Stop 102
taatttcatcacgaaccacttcaat

SEQ ID NO: 287930 - DNA, 25 bp, Artificial
  probe
  misc_feature (1)..(25): SEQ ID NO: 1242; WAN024G94; Start 76; Stop 100
tgtaatttcatcacgaaccacttca

SEQ ID NO: 287931 - DNA, 25 bp, Artificial
  probe
  misc_feature (1)..(25): SEQ ID NO: 1242; WAN024G94; Start 80; Stop 104
atttcatcacgaaccacttcaatca

SEQ ID NO: 287932 - DNA, 25 bp, Artificial
  probe
  misc_feature (1)..(25): SEQ ID NO: 1242; WAN024G94; Start 81; Stop 105
tttcatcacgaaccacttcaatcaa

SEQ ID NO: 287933 - DNA, 25 bp, Artificial
  probe
  misc_feature (1)..(25): SEQ ID NO: 1242; WAN024G94; Start 33; Stop 57
aaggaccagtagcgataaccgtaat

SEQ ID NO: 287934 - DNA, 25 bp, Artificial
  probe
  misc_feature (1)..(25): SEQ ID NO: 1242; WAN024G94; Start 83; Stop 107
tcatcacgaaccacttcaatcaagg

SEQ ID NO: 287935 - DNA, 25 bp, Artificial
  probe
  misc_feature (1)..(25): SEQ ID NO: 1242; WAN024G94; Start 69; Stop 93
gcaattctgtaatttcatcacgaac

SEQ ID NO: 287936 - DNA, 25 bp, Artificial
  probe
  misc_feature (1)..(25): SEQ ID NO: 1242; WAN024G94; Start 68; Stop 92
ggcaattctgtaatttcatcacgaa

SEQ ID NO: 287937 - DNA, 25 bp, Artificial
  probe
  misc_feature (1)..(25): SEQ ID NO: 1242; WAN024G94; Start 71; Stop 95
aattctgtaatttcatcacgaacca

SEQ ID NO: 287938 - DNA, 25 bp, Artificial
  probe
  misc_feature (1)..(25): SEQ ID NO: 1243; WAN024C8L; Start 238; Stop 262
acaggattcttattggatggttacc

SEQ ID NO: 287939 - DNA, 25 bp, Artificial
  probe
  misc_feature (1)..(25): SEQ ID NO: 1243; WAN024C8L; Start 237; Stop 261
aacaggattcttattggatggttac

SEQ ID NO: 287940 - DNA, 25 bp, Artificial
  probe
  misc_feature (1)..(25): SEQ ID NO: 1243; WAN024C8L; Start 469; Stop 493
gaagatgataagcctgagacagtaa

SEQ ID NO: 287941 - DNA, 25 bp, Artificial
  probe
  misc_feature (1)..(25): SEQ ID NO: 1243; WAN024C8L; Start 169; Stop 193
gaattggttcctgacgaagttacaa

SEQ ID NO: 287942 - DNA, 25 bp, Artificial
  probe
  misc_feature (1)..(25): SEQ ID NO: 1243; WAN024C8L; Start 468; Stop 492
tgaagatgataagcctgagacagta

SEQ ID NO: 287943 - DNA, 25 bp, Artificial
  probe
  misc_feature (1)..(25): SEQ ID NO: 1243; WAN024C8L; Start 305; Stop 329
ctgaacttggcattgaactagaagg

SEQ ID NO: 287944 - DNA, 25 bp, Artificial
  probe
  misc_feature (1)..(25): SEQ ID NO: 1243; WAN024C8L; Start 167; Stop 191
gtgaattggttcctgacgaagttac

SEQ ID NO: 287945 - DNA, 25 bp, Artificial
  probe
  misc_feature (1)..(25): SEQ ID NO: 1243; WAN024C8L; Start 507; Stop 531
tgttaatattgctcaaggagaacca

SEQ ID NO: 287946 - DNA, 25 bp, Artificial
  probe
  misc_feature (1)..(25): SEQ ID NO: 1243; WAN024C8L; Start 503; Stop 527
tggatgttaatattgctcaaggaga

SEQ ID NO: 287947 - DNA, 25 bp, Artificial
  probe
  misc_feature (1)..(25): SEQ ID NO: 1243; WAN024C8L; Start 168; Stop 192
tgaattggttcctgacgaagttaca

SEQ ID NO: 287948 - DNA, 25 bp, Artificial
  probe
  misc_feature (1)..(25): SEQ ID NO: 1243; WAN024C8L; Start 508; Stop 532
gttaatattgctcaaggagaaccaa

SEQ ID NO: 287949 - DNA, 25 bp, Artificial
  probe
  misc_feature (1)..(25): SEQ ID NO: 1243; WAN024C8L; Start 306; Stop 330
tgaacttggcattgaactagaaggt

SEQ ID NO: 287950 - DNA, 25 bp, Artificial
  probe
  misc_feature (1)..(25): SEQ ID NO: 1243; WAN024C8L; Start 521; Stop 545
aaggagaaccaatcattgctcacta

SEQ ID NO: 287951 - DNA, 25 bp, Artificial
  probe
  misc_feature (1)..(25): SEQ ID NO: 1243; WAN024C8L; Start 457; Stop 481
tactaccaacgtgaagatgataagc

SEQ ID NO: 287952 - DNA, 25 bp, Artificial
  probe
  misc_feature (1)..(25): SEQ ID NO: 1243; WAN024C8L; Start 506; Stop 530
atgttaatattgctcaaggagaacc

SEQ ID NO: 287953 - DNA, 25 bp, Artificial
  probe
  misc_feature (1)..(25): SEQ ID NO: 1243; WAN024C8L; Start 502; Stop 526
ttggatgttaatattgctcaaggag

SEQ ID NO: 287954 - DNA, 25 bp, Artificial
  probe
  misc_feature (1)..(25): SEQ ID NO: 1243; WAN024C8L; Start 304; Stop 328
gctgaacttggcattgaactagaag

SEQ ID NO: 287955 - DNA, 25 bp, Artificial
  probe
  misc_feature (1)..(25): SEQ ID NO: 1243; WAN024C8L; Start 504; Stop 528
ggatgttaatattgctcaaggagaa

SEQ ID NO: 287956 - DNA, 25 bp, Artificial
  probe
  misc_feature (1)..(25): SEQ ID NO: 1243; WAN024C8L; Start 429; Stop 453
cccaccagttgactataaagaagaa

SEQ ID NO: 287957 - DNA, 25 bp, Artificial
  probe
  misc_feature (1)..(25): SEQ ID NO: 1243; WAN024C8L; Start 136; Stop 160
ggtgttcttgctaagtcatatattg

SEQ ID NO: 287958 - DNA, 25 bp, Artificial
  probe
  misc_feature (1)..(25): SEQ ID NO: 1243; WAN024C8L; Start 467; Stop 491
gtgaagatgataagcctgagacagt

SEQ ID NO: 287959 - DNA, 25 bp, Artificial
  probe
  misc_feature (1)..(25): SEQ ID NO: 1243; WAN024C8L; Start 132; Stop 156
aatgggtgttcttgctaagtcatat

SEQ ID NO: 287960 - DNA, 25 bp, Artificial
  probe
  misc_feature (1)..(25): SEQ ID NO: 1243; WAN024C8L; Start 131; Stop 155
aaatgggtgttcttgctaagtcata

SEQ ID NO: 287961 - DNA, 25 bp, Artificial
  probe
  misc_feature (1)..(25): SEQ ID NO: 1243; WAN024C8L; Start 133; Stop 157
atgggtgttcttgctaagtcatata

SEQ ID NO: 287962 - DNA, 25 bp, Artificial
  probe
  misc_feature (1)..(25): SEQ ID NO: 1243; WAN024C8L; Start 512; Stop 536
atattgctcaaggagaaccaatcat

SEQ ID NO: 287963 - DNA, 25 bp, Artificial
  probe
  misc_feature (1)..(25): SEQ ID NO: 1243; WAN024C8L; Start 513; Stop 537
tattgctcaaggagaaccaatcatt

SEQ ID NO: 287964 - DNA, 25 bp, Artificial
  probe
  misc_feature (1)..(25): SEQ ID NO: 1243; WAN024C8L; Start 430; Stop 454
ccaccagttgactataaagaagaag

SEQ ID NO: 287965 - DNA, 25 bp, Artificial
  probe
  misc_feature (1)..(25): SEQ ID NO: 1243; WAN024C8L; Start 427; Stop 451
aacccaccagttgactataaagaag

SEQ ID NO: 287966 - DNA, 25 bp, Artificial
  probe
  misc_feature (1)..(25): SEQ ID NO: 1243; WAN024C8L; Start 428; Stop 452
acccaccagttgactataaagaaga

SEQ ID NO: 287967 - DNA, 25 bp, Artificial
  probe
  misc_feature (1)..(25): SEQ ID NO: 1243; WAN024C8L; Start 235; Stop 259
gaaacaggattcttattggatggtt

SEQ ID NO: 287968 - DNA, 25 bp, Artificial
  probe
  misc_feature (1)..(25): SEQ ID NO: 1243; WAN024C8L; Start 300; Stop 324
attggctgaacttggcattgaacta

SEQ ID NO: 287969 - DNA, 25 bp, Artificial
  probe
  misc_feature (1)..(25): SEQ ID NO: 1243; WAN024C8L; Start 426; Stop 450
taacccaccagttgactataaagaa

SEQ ID NO: 287970 - DNA, 25 bp, Artificial
  probe
  misc_feature (1)..(25): SEQ ID NO: 1243; WAN024C8L; Start 425; Stop 449
ttaacccaccagttgactataaaga

SEQ ID NO: 287971 - DNA, 25 bp, Artificial
  probe
  misc_feature (1)..(25): SEQ ID NO: 1244; WAN024CUJ; Start 664; Stop 688
ttatctctggaatctcgtatggctt

SEQ ID NO: 287972 - DNA, 25 bp, Artificial
  probe
  misc_feature (1)..(25): SEQ ID NO: 1244; WAN024CUJ; Start 512; Stop 536
taacgacagatgatggttcttatgg

SEQ ID NO: 287973 - DNA, 25 bp, Artificial
  probe
  misc_feature (1)..(25): SEQ ID NO: 1244; WAN024CUJ; Start 511; Stop 535
gtaacgacagatgatggttcttatg

SEQ ID NO: 287974 - DNA, 25 bp, Artificial
  probe
  misc_feature (1)..(25): SEQ ID NO: 1244; WAN024CUJ; Start 606; Stop 630
ggctccaggaatgatgaagtatatc

SEQ ID NO: 287975 - DNA, 25 bp, Artificial
  probe
  misc_feature (1)..(25): SEQ ID NO: 1244; WAN024CUJ; Start 665; Stop 689
tatctctggaatctcgtatggcttg

SEQ ID NO: 287976 - DNA, 25 bp, Artificial
  probe
  misc_feature (1)..(25): SEQ ID NO: 1244; WAN024CUJ; Start 509; Stop 533
ttgtaacgacagatgatggttctta

SEQ ID NO: 287977 - DNA, 25 bp, Artificial
  probe
  misc_feature (1)..(25): SEQ ID NO: 1244; WAN024CUJ; Start 510; Stop 534
tgtaacgacagatgatggttcttat

SEQ ID NO: 287978 - DNA, 25 bp, Artificial
  probe
  misc_feature (1)..(25): SEQ ID NO: 1244; WAN024CUJ; Start 778; Stop 802
cgcacaggaacagttgtattataac

SEQ ID NO: 287979 - DNA, 25 bp, Artificial
  probe
  misc_feature (1)..(25): SEQ ID NO: 1244; WAN024CUJ; Start 662; Stop 686
atttatctctggaatctcgtatggc

SEQ ID NO: 287980 - DNA, 25 bp, Artificial
  probe
  misc_feature (1)..(25): SEQ ID NO: 1244; WAN024CUJ; Start 658; Stop 682
gcctatttatctctggaatctcgta

SEQ ID NO: 287981 - DNA, 25 bp, Artificial
  probe
  misc_feature (1)..(25): SEQ ID NO: 1244; WAN024CUJ; Start 491; Stop 515
ctcagtatggtcaggtctttgtaac

SEQ ID NO: 287982 - DNA, 25 bp, Artificial
  probe
  misc_feature (1)..(25): SEQ ID NO: 1244; WAN024CUJ; Start 657; Stop 681
agcctatttatctctggaatctcgt

SEQ ID NO: 287983 - DNA, 25 bp, Artificial
  probe
  misc_feature (1)..(25): SEQ ID NO: 1244; WAN024CUJ; Start 663; Stop 687
tttatctctggaatctcgtatggct

SEQ ID NO: 287984 - DNA, 25 bp, Artificial
  probe
  misc_feature (1)..(25): SEQ ID NO: 1244; WAN024CUJ; Start 529; Stop 553
tcttatggcatcaagggaaatgttt

SEQ ID NO: 287985 - DNA, 25 bp, Artificial
  probe
  misc_feature (1)..(25): SEQ ID NO: 1244; WAN024CUJ; Start 528; Stop 552
ttcttatggcatcaagggaaatgtt

SEQ ID NO: 287986 - DNA, 25 bp, Artificial
  probe
  misc_feature (1)..(25): SEQ ID NO: 1244; WAN024CUJ; Start 515; Stop 539
cgacagatgatggttcttatggcat

SEQ ID NO: 287987 - DNA, 25 bp, Artificial
  probe
  misc_feature (1)..(25): SEQ ID NO: 1244; WAN024CUJ; Start 656; Stop 680
gagcctatttatctctggaatctcg

SEQ ID NO: 287988 - DNA, 25 bp, Artificial
  probe
  misc_feature (1)..(25): SEQ ID NO: 1244; WAN024CUJ; Start 530; Stop 554
cttatggcatcaagggaaatgtttc

SEQ ID NO: 287989 - DNA, 25 bp, Artificial
  probe
  misc_feature (1)..(25): SEQ ID NO: 1244; WAN024CUJ; Start 513; Stop 537
aacgacagatgatggttcttatggc

SEQ ID NO: 287990 - DNA, 25 bp, Artificial
  probe
  misc_feature (1)..(25): SEQ ID NO: 1244; WAN024CUJ; Start 666; Stop 690
atctctggaatctcgtatggcttgt

SEQ ID NO: 287991 - DNA, 25 bp, Artificial
  probe
  misc_feature (1)..(25): SEQ ID NO: 1244; WAN024CUJ; Start 527; Stop 551
gttcttatggcatcaagggaaatgt

SEQ ID NO: 287992 - DNA, 25 bp, Artificial
  probe
  misc_feature (1)..(25): SEQ ID NO: 1244; WAN024CUJ; Start 79; Stop 103
ccagcaatctttgaattagtcctag

SEQ ID NO: 287993 - DNA, 25 bp, Artificial
  probe
  misc_feature (1)..(25): SEQ ID NO: 1244; WAN024CUJ; Start 78; Stop 102
gccagcaatctttgaattagtccta

SEQ ID NO: 287994 - DNA, 25 bp, Artificial
  probe
  misc_feature (1)..(25): SEQ ID NO: 1244; WAN024CUJ; Start 607; Stop 631
gctccaggaatgatgaagtatatca

SEQ ID NO: 287995 - DNA, 25 bp, Artificial
  probe
  misc_feature (1)..(25): SEQ ID NO: 1244; WAN024CUJ; Start 220; Stop 244
cagtgtcacctcatttatcggattg

SEQ ID NO: 287996 - DNA, 25 bp, Artificial
  probe
  misc_feature (1)..(25): SEQ ID NO: 1244; WAN024CUJ; Start 508; Stop 532
tttgtaacgacagatgatggttctt

SEQ ID NO: 287997 - DNA, 25 bp, Artificial
  probe
  misc_feature (1)..(25): SEQ ID NO: 1244; WAN024CUJ; Start 605; Stop 629
gggctccaggaatgatgaagtatat

SEQ ID NO: 287998 - DNA, 25 bp, Artificial
  probe
  misc_feature (1)..(25): SEQ ID NO: 1244; WAN024CUJ; Start 507; Stop 531
ctttgtaacgacagatgatggttct

SEQ ID NO: 287999 - DNA, 25 bp, Artificial
  probe
  misc_feature (1)..(25): SEQ ID NO: 1244; WAN024CUJ; Start 506; Stop 530
tctttgtaacgacagatgatggttc

SEQ ID NO: 288000 - DNA, 25 bp, Artificial
  probe
  misc_feature (1)..(25): SEQ ID NO: 1244; WAN024CUJ; Start 545; Stop 569
gaaatgtttccgttgttatcaatga

SEQ ID NO: 288001 - DNA, 25 bp, Artificial
  probe
  misc_feature (1)..(25): SEQ ID NO: 1244; WAN024CUJ; Start 490; Stop 514
gctcagtatggtcaggtctttgtaa

SEQ ID NO: 288002 - DNA, 25 bp, Artificial
  probe
  misc_feature (1)..(25): SEQ ID NO: 1244; WAN024CUJ; Start 80; Stop 104
cagcaatctttgaattagtcctaga

SEQ ID NO: 288003 - DNA, 25 bp, Artificial
  probe
  misc_feature (1)..(25): SEQ ID NO: 1244; WAN024CUJ; Start 646; Stop 670
gatcacccaagagcctatttatctc

SEQ ID NO: 288004 - DNA, 25 bp, Artificial
  probe
  misc_feature (1)..(25): SEQ ID NO: 1245; WAN024DFW; Start 467; Stop 491
atgaacctatgaatgccttggataa

SEQ ID NO: 288005 - DNA, 25 bp, Artificial
  probe
  misc_feature (1)..(25): SEQ ID NO: 1245; WAN024DFW; Start 466; Stop 490
gatgaacctatgaatgccttggata

SEQ ID NO: 288006 - DNA, 25 bp, Artificial
  probe
  misc_feature (1)..(25): SEQ ID NO: 1245; WAN024DFW; Start 306; Stop 330
catacgaggagtagttggtaatcag

SEQ ID NO: 288007 - DNA, 25 bp, Artificial
  probe
  misc_feature (1)..(25): SEQ ID NO: 1245; WAN024DFW; Start 95; Stop 119
ttataggaattactggtgcgaatgg

SEQ ID NO: 288008 - DNA, 25 bp, Artificial
  probe
  misc_feature (1)..(25): SEQ ID NO: 1245; WAN024DFW; Start 307; Stop 331
atacgaggagtagttggtaatcagg

SEQ ID NO: 288009 - DNA, 25 bp, Artificial
  probe
  misc_feature (1)..(25): SEQ ID NO: 1245; WAN024DFW; Start 464; Stop 488
tagatgaacctatgaatgccttgga

SEQ ID NO: 288010 - DNA, 25 bp, Artificial
  probe
  misc_feature (1)..(25): SEQ ID NO: 1245; WAN024DFW; Start 166; Stop 190
ccgtcttatggagaagtgttaatca

SEQ ID NO: 288011 - DNA, 25 bp, Artificial
  probe
  misc_feature (1)..(25): SEQ ID NO: 1245; WAN024DFW; Start 462; Stop 486
actagatgaacctatgaatgccttg

SEQ ID NO: 288012 - DNA, 25 bp, Artificial
  probe
  misc_feature (1)..(25): SEQ ID NO: 1245; WAN024DFW; Start 94; Stop 118
attataggaattactggtgcgaatg

SEQ ID NO: 288013 - DNA, 25 bp, Artificial
  probe
  misc_feature (1)..(25): SEQ ID NO: 1245; WAN024DFW; Start 303; Stop 327
aagcatacgaggagtagttggtaat

SEQ ID NO: 288014 - DNA, 25 bp, Artificial
  probe
  misc_feature (1)..(25): SEQ ID NO: 1245; WAN024DFW; Start 167; Stop 191
cgtcttatggagaagtgttaatcaa

SEQ ID NO: 288015 - DNA, 25 bp, Artificial
  probe
  misc_feature (1)..(25): SEQ ID NO: 1245; WAN024DFW; Start 463; Stop 487
ctagatgaacctatgaatgccttgg

SEQ ID NO: 288016 - DNA, 25 bp, Artificial
  probe
  misc_feature (1)..(25): SEQ ID NO: 1245; WAN024DFW; Start 461; Stop 485
tactagatgaacctatgaatgcctt

SEQ ID NO: 288017 - DNA, 25 bp, Artificial
  probe
  misc_feature (1)..(25): SEQ ID NO: 1245; WAN024DFW; Start 460; Stop 484
ttactagatgaacctatgaatgcct

SEQ ID NO: 288018 - DNA, 25 bp, Artificial
  probe
  misc_feature (1)..(25): SEQ ID NO: 1245; WAN024DFW; Start 304; Stop 328
agcatacgaggagtagttggtaatc

SEQ ID NO: 288019 - DNA, 25 bp, Artificial
  probe
  misc_feature (1)..(25): SEQ ID NO: 1245; WAN024DFW; Start 465; Stop 489
agatgaacctatgaatgccttggat

SEQ ID NO: 288020 - DNA, 25 bp, Artificial
  probe
  misc_feature (1)..(25): SEQ ID NO: 1245; WAN024DFW; Start 305; Stop 329
gcatacgaggagtagttggtaatca

SEQ ID NO: 288021 - DNA, 25 bp, Artificial
  probe
  misc_feature (1)..(25): SEQ ID NO: 1245; WAN024DFW; Start 308; Stop 332
tacgaggagtagttggtaatcagga

SEQ ID NO: 288022 - DNA, 25 bp, Artificial
  probe
  misc_feature (1)..(25): SEQ ID NO: 1245; WAN024DFW; Start 165; Stop 189
tccgtcttatggagaagtgttaatc

SEQ ID NO: 288023 - DNA, 25 bp, Artificial
  probe
  misc_feature (1)..(25): SEQ ID NO: 1245; WAN024DFW; Start 160; Stop 184
tatagtccgtcttatggagaagtgt

SEQ ID NO: 288024 - DNA, 25 bp, Artificial
  probe
  misc_feature (1)..(25): SEQ ID NO: 1245; WAN024DFW; Start 164; Stop 188
gtccgtcttatggagaagtgttaat

SEQ ID NO: 288025 - DNA, 25 bp, Artificial
  probe
  misc_feature (1)..(25): SEQ ID NO: 1245; WAN024DFW; Start 93; Stop 117
aattataggaattactggtgcgaat

SEQ ID NO: 288026 - DNA, 25 bp, Artificial
  probe
  misc_feature (1)..(25): SEQ ID NO: 1245; WAN024DFW; Start 302; Stop 326
caagcatacgaggagtagttggtaa

SEQ ID NO: 288027 - DNA, 25 bp, Artificial
  probe
  misc_feature (1)..(25): SEQ ID NO: 1245; WAN024DFW; Start 162; Stop 186
tagtccgtcttatggagaagtgtta

SEQ ID NO: 288028 - DNA, 25 bp, Artificial
  probe
  misc_feature (1)..(25): SEQ ID NO: 1245; WAN024DFW; Start 170; Stop 194
cttatggagaagtgttaatcaatgg

SEQ ID NO: 288029 - DNA, 25 bp, Artificial
  probe
  misc_feature (1)..(25): SEQ ID NO: 1245; WAN024DFW; Start 159; Stop 183
atatagtccgtcttatggagaagtg

SEQ ID NO: 288030 - DNA, 25 bp, Artificial
  probe
  misc_feature (1)..(25): SEQ ID NO: 1245; WAN024DFW; Start 161; Stop 185
atagtccgtcttatggagaagtgtt

SEQ ID NO: 288031 - DNA, 25 bp, Artificial
  probe
  misc_feature (1)..(25): SEQ ID NO: 1245; WAN024DFW; Start 309; Stop 333
acgaggagtagttggtaatcaggaa

SEQ ID NO: 288032 - DNA, 25 bp, Artificial
  probe
  misc_feature (1)..(25): SEQ ID NO: 1245; WAN024DFW; Start 163; Stop 187
agtccgtcttatggagaagtgttaa

SEQ ID NO: 288033 - DNA, 25 bp, Artificial
  probe
  misc_feature (1)..(25): SEQ ID NO: 1245; WAN024DFW; Start 468; Stop 492
tgaacctatgaatgccttggataaa

SEQ ID NO: 288034 - DNA, 25 bp, Artificial
  probe
  misc_feature (1)..(25): SEQ ID NO: 1245; WAN024DFW; Start 313; Stop 337
ggagtagttggtaatcaggaaatca

SEQ ID NO: 288035 - DNA, 25 bp, Artificial
  probe
  misc_feature (1)..(25): SEQ ID NO: 1245; WAN024DFW; Start 312; Stop 336
aggagtagttggtaatcaggaaatc

SEQ ID NO: 288036 - DNA, 25 bp, Artificial
  probe
  misc_feature (1)..(25): SEQ ID NO: 1245; WAN024DFW; Start 311; Stop 335
gaggagtagttggtaatcaggaaat

SEQ ID NO: 288037 - DNA, 25 bp, Artificial
  probe
  misc_feature (1)..(25): SEQ ID NO: 1246; WAN024F2V; Start 150; Stop 174
gagaggtaagcgtcaagtgagaatt

SEQ ID NO: 288038 - DNA, 25 bp, Artificial
  probe
  misc_feature (1)..(25): SEQ ID NO: 1246; WAN024F2V; Start 196; Stop 220
gccaacaacctgctgaaatataata

SEQ ID NO: 288039 - DNA, 25 bp, Artificial
  probe
  misc_feature (1)..(25): SEQ ID NO: 1246; WAN024F2V; Start 88; Stop 112
attgatatgaaatctgtctttgggc

SEQ ID NO: 288040 - DNA, 25 bp, Artificial
  probe
  misc_feature (1)..(25): SEQ ID NO: 1246; WAN024F2V; Start 89; Stop 113
ttgatatgaaatctgtctttgggca

SEQ ID NO: 288041 - DNA, 25 bp, Artificial
  probe
  misc_feature (1)..(25): SEQ ID NO: 1246; WAN024F2V; Start 111; Stop 135
gcagataaaggtttgtttgggttat

SEQ ID NO: 288042 - DNA, 25 bp, Artificial
  probe
  misc_feature (1)..(25): SEQ ID NO: 1246; WAN024F2V; Start 151; Stop 175
agaggtaagcgtcaagtgagaattg

SEQ ID NO: 288043 - DNA, 25 bp, Artificial
  probe
  misc_feature (1)..(25): SEQ ID NO: 1246; WAN024F2V; Start 110; Stop 134
ggcagataaaggtttgtttgggtta

SEQ ID NO: 288044 - DNA, 25 bp, Artificial
  probe
  misc_feature (1)..(25): SEQ ID NO: 1246; WAN024F2V; Start 120; Stop 144
ggtttgtttgggttataagagatgt

SEQ ID NO: 288045 - DNA, 25 bp, Artificial
  probe
  misc_feature (1)..(25): SEQ ID NO: 1246; WAN024F2V; Start 119; Stop 143
aggtttgtttgggttataagagatg

SEQ ID NO: 288046 - DNA, 25 bp, Artificial
  probe
  misc_feature (1)..(25): SEQ ID NO: 1246; WAN024F2V; Start 106; Stop 130
tttgggcagataaaggtttgtttgg

SEQ ID NO: 288047 - DNA, 25 bp, Artificial
  probe
  misc_feature (1)..(25): SEQ ID NO: 1246; WAN024F2V; Start 48; Stop 72
tttatcttccaagggtagacaaatt

SEQ ID NO: 288048 - DNA, 25 bp, Artificial
  probe
  misc_feature (1)..(25): SEQ ID NO: 1246; WAN024F2V; Start 90; Stop 114
tgatatgaaatctgtctttgggcag

SEQ ID NO: 288049 - DNA, 25 bp, Artificial
  probe
  misc_feature (1)..(25): SEQ ID NO: 1246; WAN024F2V; Start 197; Stop 221
ccaacaacctgctgaaatataataa

SEQ ID NO: 288050 - DNA, 25 bp, Artificial
  probe
  misc_feature (1)..(25): SEQ ID NO: 1246; WAN024F2V; Start 149; Stop 173
tgagaggtaagcgtcaagtgagaat

SEQ ID NO: 288051 - DNA, 25 bp, Artificial
  probe
  misc_feature (1)..(25): SEQ ID NO: 1246; WAN024F2V; Start 124; Stop 148
tgtttgggttataagagatgtcatc

SEQ ID NO: 288052 - DNA, 25 bp, Artificial
  probe
  misc_feature (1)..(25): SEQ ID NO: 1246; WAN024F2V; Start 117; Stop 141
aaaggtttgtttgggttataagaga

SEQ ID NO: 288053 - DNA, 25 bp, Artificial
  probe
  misc_feature (1)..(25): SEQ ID NO: 1246; WAN024F2V; Start 122; Stop 146
tttgtttgggttataagagatgtca

SEQ ID NO: 288054 - DNA, 25 bp, Artificial
  probe
  misc_feature (1)..(25): SEQ ID NO: 1246; WAN024F2V; Start 141; Stop 165
atgtcatctgagaggtaagcgtcaa

SEQ ID NO: 288055 - DNA, 25 bp, Artificial
  probe
  misc_feature (1)..(25): SEQ ID NO: 1246; WAN024F2V; Start 118; Stop 142
aaggtttgtttgggttataagagat

SEQ ID NO: 288056 - DNA, 25 bp, Artificial
  probe
  misc_feature (1)..(25): SEQ ID NO: 1246; WAN024F2V; Start 123; Stop 147
ttgtttgggttataagagatgtcat

SEQ ID NO: 288057 - DNA, 25 bp, Artificial
  probe
  misc_feature (1)..(25): SEQ ID NO: 1246; WAN024F2V; Start 121; Stop 145
gtttgtttgggttataagagatgtc

SEQ ID NO: 288058 - DNA, 25 bp, Artificial
  probe
  misc_feature (1)..(25): SEQ ID NO: 1246; WAN024F2V; Start 135; Stop 159
taagagatgtcatctgagaggtaag

SEQ ID NO: 288059 - DNA, 25 bp, Artificial
  probe
  misc_feature (1)..(25): SEQ ID NO: 1246; WAN024F2V; Start 146; Stop 170
atctgagaggtaagcgtcaagtgag

SEQ ID NO: 288060 - DNA, 25 bp, Artificial
  probe
  misc_feature (1)..(25): SEQ ID NO: 1246; WAN024F2V; Start 112; Stop 136
cagataaaggtttgtttgggttata

SEQ ID NO: 288061 - DNA, 25 bp, Artificial
  probe
  misc_feature (1)..(25): SEQ ID NO: 1246; WAN024F2V; Start 136; Stop 160
aagagatgtcatctgagaggtaagc

SEQ ID NO: 288062 - DNA, 25 bp, Artificial
  probe
  misc_feature (1)..(25): SEQ ID NO: 1246; WAN024F2V; Start 200; Stop 224
acaacctgctgaaatataataagag

SEQ ID NO: 288063 - DNA, 25 bp, Artificial
  probe
  misc_feature (1)..(25): SEQ ID NO: 1246; WAN024F2V; Start 134; Stop 158
ataagagatgtcatctgagaggtaa

SEQ ID NO: 288064 - DNA, 25 bp, Artificial
  probe
  misc_feature (1)..(25): SEQ ID NO: 1246; WAN024F2V; Start 132; Stop 156
ttataagagatgtcatctgagaggt

SEQ ID NO: 288065 - DNA, 25 bp, Artificial
  probe
  misc_feature (1)..(25): SEQ ID NO: 1246; WAN024F2V; Start 74; Stop 98
tcgctaaacgtaagattgatatgaa

SEQ ID NO: 288066 - DNA, 25 bp, Artificial
  probe
  misc_feature (1)..(25): SEQ ID NO: 1246; WAN024F2V; Start 73; Stop 97
ttcgctaaacgtaagattgatatga

SEQ ID NO: 288067 - DNA, 25 bp, Artificial
  probe
  misc_feature (1)..(25): SEQ ID NO: 1246; WAN024F2V; Start 148; Stop 172
ctgagaggtaagcgtcaagtgagaa

SEQ ID NO: 288068 - DNA, 25 bp, Artificial
  probe
  misc_feature (1)..(25): SEQ ID NO: 1246; WAN024F2V; Start 145; Stop 169
catctgagaggtaagcgtcaagtga

SEQ ID NO: 288069 - DNA, 25 bp, Artificial
  probe
  misc_feature (1)..(25): SEQ ID NO: 1246; WAN024F2V; Start 144; Stop 168
tcatctgagaggtaagcgtcaagtg

SEQ ID NO: 288070 - DNA, 25 bp, Artificial
  probe
  misc_feature (1)..(25): SEQ ID NO: 1247; WAN024GI7; Start 632; Stop 656
aatggttgttccgtgtagttaatga

SEQ ID NO: 288071 - DNA, 25 bp, Artificial
  probe
  misc_feature (1)..(25): SEQ ID NO: 1247; WAN024GI7; Start 631; Stop 655
gaatggttgttccgtgtagttaatg

SEQ ID NO: 288072 - DNA, 25 bp, Artificial
  probe
  misc_feature (1)..(25): SEQ ID NO: 1247; WAN024GI7; Start 633; Stop 657
atggttgttccgtgtagttaatgaa

SEQ ID NO: 288073 - DNA, 25 bp, Artificial
  probe
  misc_feature (1)..(25): SEQ ID NO: 1247; WAN024GI7; Start 378; Stop 402
tcctaatcttaatgttgttggctat

SEQ ID NO: 288074 - DNA, 25 bp, Artificial
  probe
  misc_feature (1)..(25): SEQ ID NO: 1247; WAN024GI7; Start 377; Stop 401
atcctaatcttaatgttgttggcta

SEQ ID NO: 288075 - DNA, 25 bp, Artificial
  probe
  misc_feature (1)..(25): SEQ ID NO: 1247; WAN024GI7; Start 376; Stop 400
tatcctaatcttaatgttgttggct

SEQ ID NO: 288076 - DNA, 25 bp, Artificial
  probe
  misc_feature (1)..(25): SEQ ID NO: 1247; WAN024GI7; Start 131; Stop 155
ttaatcagtgccatgaagatgagaa

SEQ ID NO: 288077 - DNA, 25 bp, Artificial
  probe
  misc_feature (1)..(25): SEQ ID NO: 1247; WAN024GI7; Start 130; Stop 154
attaatcagtgccatgaagatgaga

SEQ ID NO: 288078 - DNA, 25 bp, Artificial
  probe
  misc_feature (1)..(25): SEQ ID NO: 1247; WAN024GI7; Start 129; Stop 153
aattaatcagtgccatgaagatgag

SEQ ID NO: 288079 - DNA, 25 bp, Artificial
  probe
  misc_feature (1)..(25): SEQ ID NO: 1247; WAN024GI7; Start 375; Stop 399
atatcctaatcttaatgttgttggc

SEQ ID NO: 288080 - DNA, 25 bp, Artificial
  probe
  misc_feature (1)..(25): SEQ ID NO: 1247; WAN024GI7; Start 578; Stop 602
tattatcaggacacattaaacgagc

SEQ ID NO: 288081 - DNA, 25 bp, Artificial
  probe
  misc_feature (1)..(25): SEQ ID NO: 1247; WAN024GI7; Start 539; Stop 563
ttaatgctgtctttatgggtgttgg

SEQ ID NO: 288082 - DNA, 25 bp, Artificial
  probe
  misc_feature (1)..(25): SEQ ID NO: 1247; WAN024GI7; Start 379; Stop 403
cctaatcttaatgttgttggctata

SEQ ID NO: 288083 - DNA, 25 bp, Artificial
  probe
  misc_feature (1)..(25): SEQ ID NO: 1247; WAN024GI7; Start 538; Stop 562
attaatgctgtctttatgggtgttg

SEQ ID NO: 288084 - DNA, 25 bp, Artificial
  probe
  misc_feature (1)..(25): SEQ ID NO: 1247; WAN024GI7; Start 537; Stop 561
gattaatgctgtctttatgggtgtt

SEQ ID NO: 288085 - DNA, 25 bp, Artificial
  probe
  misc_feature (1)..(25): SEQ ID NO: 1247; WAN024GI7; Start 532; Stop 556
aatgggattaatgctgtctttatgg

SEQ ID NO: 288086 - DNA, 25 bp, Artificial
  probe
  misc_feature (1)..(25): SEQ ID NO: 1247; WAN024GI7; Start 132; Stop 156
taatcagtgccatgaagatgagaaa

SEQ ID NO: 288087 - DNA, 25 bp, Artificial
  probe
  misc_feature (1)..(25): SEQ ID NO: 1247; WAN024GI7; Start 533; Stop 557
atgggattaatgctgtctttatggg

SEQ ID NO: 288088 - DNA, 25 bp, Artificial
  probe
  misc_feature (1)..(25): SEQ ID NO: 1247; WAN024GI7; Start 577; Stop 601
gtattatcaggacacattaaacgag

SEQ ID NO: 288089 - DNA, 25 bp, Artificial
  probe
  misc_feature (1)..(25): SEQ ID NO: 1247; WAN024GI7; Start 527; Stop 551
tggataatgggattaatgctgtctt

SEQ ID NO: 288090 - DNA, 25 bp, Artificial
  probe
  misc_feature (1)..(25): SEQ ID NO: 1247; WAN024GI7; Start 526; Stop 550
atggataatgggattaatgctgtct

SEQ ID NO: 288091 - DNA, 25 bp, Artificial
  probe
  misc_feature (1)..(25): SEQ ID NO: 1247; WAN024GI7; Start 525; Stop 549
catggataatgggattaatgctgtc

SEQ ID NO: 288092 - DNA, 25 bp, Artificial
  probe
  misc_feature (1)..(25): SEQ ID NO: 1247; WAN024GI7; Start 524; Stop 548
tcatggataatgggattaatgctgt

SEQ ID NO: 288093 - DNA, 25 bp, Artificial
  probe
  misc_feature (1)..(25): SEQ ID NO: 1247; WAN024GI7; Start 540; Stop 564
taatgctgtctttatgggtgttggt

SEQ ID NO: 288094 - DNA, 25 bp, Artificial
  probe
  misc_feature (1)..(25): SEQ ID NO: 1247; WAN024GI7; Start 536; Stop 560
ggattaatgctgtctttatgggtgt

SEQ ID NO: 288095 - DNA, 25 bp, Artificial
  probe
  misc_feature (1)..(25): SEQ ID NO: 1247; WAN024GI7; Start 579; Stop 603
attatcaggacacattaaacgagct

SEQ ID NO: 288096 - DNA, 25 bp, Artificial
  probe
  misc_feature (1)..(25): SEQ ID NO: 1247; WAN024GI7; Start 437; Stop 461
agattcaggaagatattaaaggagg

SEQ ID NO: 288097 - DNA, 25 bp, Artificial
  probe
  misc_feature (1)..(25): SEQ ID NO: 1247; WAN024GI7; Start 523; Stop 547
ttcatggataatgggattaatgctg

SEQ ID NO: 288098 - DNA, 25 bp, Artificial
  probe
  misc_feature (1)..(25): SEQ ID NO: 1247; WAN024GI7; Start 528; Stop 552
ggataatgggattaatgctgtcttt

SEQ ID NO: 288099 - DNA, 25 bp, Artificial
  probe
  misc_feature (1)..(25): SEQ ID NO: 1247; WAN024GI7; Start 576; Stop 600
tgtattatcaggacacattaaacga

SEQ ID NO: 288100 - DNA, 25 bp, Artificial
  probe
  misc_feature (1)..(25): SEQ ID NO: 1247; WAN024GI7; Start 128; Stop 152
aaattaatcagtgccatgaagatga

SEQ ID NO: 288101 - DNA, 25 bp, Artificial
  probe
  misc_feature (1)..(25): SEQ ID NO: 1247; WAN024GI7; Start 535; Stop 559
gggattaatgctgtctttatgggtg

SEQ ID NO: 288102 - DNA, 25 bp, Artificial
  probe
  misc_feature (1)..(25): SEQ ID NO: 1247; WAN024GI7; Start 474; Stop 498
tgtatttgtagggattacttctcct

SEQ ID NO: 288103 - DNA, 25 bp, Artificial
  probe
  misc_feature (1)..(25): SEQ ID NO: 1248; WAN024FJ2; Start 372; Stop 396
tcttgttatctaccgttacttgtca

SEQ ID NO: 288104 - DNA, 25 bp, Artificial
  probe
  misc_feature (1)..(25): SEQ ID NO: 1248; WAN024FJ2; Start 373; Stop 397
cttgttatctaccgttacttgtcag

SEQ ID NO: 288105 - DNA, 25 bp, Artificial
  probe
  misc_feature (1)..(25): SEQ ID NO: 1248; WAN024FJ2; Start 367; Stop 391
cgtgttcttgttatctaccgttact

SEQ ID NO: 288106 - DNA, 25 bp, Artificial
  probe
  misc_feature (1)..(25): SEQ ID NO: 1248; WAN024FJ2; Start 370; Stop 394
gttcttgttatctaccgttacttgt

SEQ ID NO: 288107 - DNA, 25 bp, Artificial
  probe
  misc_feature (1)..(25): SEQ ID NO: 1248; WAN024FJ2; Start 369; Stop 393
tgttcttgttatctaccgttacttg

SEQ ID NO: 288108 - DNA, 25 bp, Artificial
  probe
  misc_feature (1)..(25): SEQ ID NO: 1248; WAN024FJ2; Start 368; Stop 392
gtgttcttgttatctaccgttactt

SEQ ID NO: 288109 - DNA, 25 bp, Artificial
  probe
  misc_feature (1)..(25): SEQ ID NO: 1248; WAN024FJ2; Start 375; Stop 399
tgttatctaccgttacttgtcagaa

SEQ ID NO: 288110 - DNA, 25 bp, Artificial
  probe
  misc_feature (1)..(25): SEQ ID NO: 1248; WAN024FJ2; Start 374; Stop 398
ttgttatctaccgttacttgtcaga

SEQ ID NO: 288111 - DNA, 25 bp, Artificial
  probe
  misc_feature (1)..(25): SEQ ID NO: 1248; WAN024FJ2; Start 376; Stop 400
gttatctaccgttacttgtcagaac

SEQ ID NO: 288112 - DNA, 25 bp, Artificial
  probe
  misc_feature (1)..(25): SEQ ID NO: 1248; WAN024FJ2; Start 378; Stop 402
tatctaccgttacttgtcagaactt

SEQ ID NO: 288113 - DNA, 25 bp, Artificial
  probe
  misc_feature (1)..(25): SEQ ID NO: 1248; WAN024FJ2; Start 377; Stop 401
ttatctaccgttacttgtcagaact

SEQ ID NO: 288114 - DNA, 25 bp, Artificial
  probe
  misc_feature (1)..(25): SEQ ID NO: 1248; WAN024FJ2; Start 371; Stop 395
ttcttgttatctaccgttacttgtc

SEQ ID NO: 288115 - DNA, 25 bp, Artificial
  probe
  misc_feature (1)..(25): SEQ ID NO: 1248; WAN024FJ2; Start 336; Stop 360
tgaataccgtaatgttgaagaaagc

SEQ ID NO: 288116 - DNA, 25 bp, Artificial
  probe
  misc_feature (1)..(25): SEQ ID NO: 1248; WAN024FJ2; Start 360; Stop 384
cttggaacgtgttcttgttatctac

SEQ ID NO: 288117 - DNA, 25 bp, Artificial
  probe
  misc_feature (1)..(25): SEQ ID NO: 1248; WAN024FJ2; Start 379; Stop 403
atctaccgttacttgtcagaacttt

SEQ ID NO: 288118 - DNA, 25 bp, Artificial
  probe
  misc_feature (1)..(25): SEQ ID NO: 1248; WAN024FJ2; Start 361; Stop 385
ttggaacgtgttcttgttatctacc

SEQ ID NO: 288119 - DNA, 25 bp, Artificial
  probe
  misc_feature (1)..(25): SEQ ID NO: 1248; WAN024FJ2; Start 359; Stop 383
gcttggaacgtgttcttgttatcta

SEQ ID NO: 288120 - DNA, 25 bp, Artificial
  probe
  misc_feature (1)..(25): SEQ ID NO: 1248; WAN024FJ2; Start 204; Stop 228
aatggatgagtacatggaagctctt

SEQ ID NO: 288121 - DNA, 25 bp, Artificial
  probe
  misc_feature (1)..(25): SEQ ID NO: 1248; WAN024FJ2; Start 409; Stop 433
aaaggtttggatgtcactgatgaag

SEQ ID NO: 288122 - DNA, 25 bp, Artificial
  probe
  misc_feature (1)..(25): SEQ ID NO: 1248; WAN024FJ2; Start 415; Stop 439
ttggatgtcactgatgaagaaggtg

SEQ ID NO: 288123 - DNA, 25 bp, Artificial
  probe
  misc_feature (1)..(25): SEQ ID NO: 1248; WAN024FJ2; Start 413; Stop 437
gtttggatgtcactgatgaagaagg

SEQ ID NO: 288124 - DNA, 25 bp, Artificial
  probe
  misc_feature (1)..(25): SEQ ID NO: 1248; WAN024FJ2; Start 412; Stop 436
ggtttggatgtcactgatgaagaag

SEQ ID NO: 288125 - DNA, 25 bp, Artificial
  probe
  misc_feature (1)..(25): SEQ ID NO: 1248; WAN024FJ2; Start 205; Stop 229
atggatgagtacatggaagctcttg

SEQ ID NO: 288126 - DNA, 25 bp, Artificial
  probe
  misc_feature (1)..(25): SEQ ID NO: 1248; WAN024FJ2; Start 337; Stop 361
gaataccgtaatgttgaagaaagct

SEQ ID NO: 288127 - DNA, 25 bp, Artificial
  probe
  misc_feature (1)..(25): SEQ ID NO: 1248; WAN024FJ2; Start 275; Stop 299
gaagcccattctctacattgacaga

SEQ ID NO: 288128 - DNA, 25 bp, Artificial
  probe
  misc_feature (1)..(25): SEQ ID NO: 1248; WAN024FJ2; Start 414; Stop 438
tttggatgtcactgatgaagaaggt

SEQ ID NO: 288129 - DNA, 25 bp, Artificial
  probe
  misc_feature (1)..(25): SEQ ID NO: 1248; WAN024FJ2; Start 411; Stop 435
aggtttggatgtcactgatgaagaa

SEQ ID NO: 288130 - DNA, 25 bp, Artificial
  probe
  misc_feature (1)..(25): SEQ ID NO: 1248; WAN024FJ2; Start 410; Stop 434
aaggtttggatgtcactgatgaaga

SEQ ID NO: 288131 - DNA, 25 bp, Artificial
  probe
  misc_feature (1)..(25): SEQ ID NO: 1248; WAN024FJ2; Start 310; Stop 334
aatagtgaaatcgaagaagaagctg

SEQ ID NO: 288132 - DNA, 25 bp, Artificial
  probe
  misc_feature (1)..(25): SEQ ID NO: 1248; WAN024FJ2; Start 311; Stop 335
atagtgaaatcgaagaagaagctgg

SEQ ID NO: 288133 - DNA, 25 bp, Artificial
  probe
  misc_feature (1)..(25): SEQ ID NO: 1248; WAN024FJ2; Start 358; Stop 382
agcttggaacgtgttcttgttatct

SEQ ID NO: 288134 - DNA, 25 bp, Artificial
  probe
  misc_feature (1)..(25): SEQ ID NO: 1248; WAN024FJ2; Start 309; Stop 333
aaatagtgaaatcgaagaagaagct

SEQ ID NO: 288135 - DNA, 25 bp, Artificial
  probe
  misc_feature (1)..(25): SEQ ID NO: 1248; WAN024FJ2; Start 362; Stop 386
tggaacgtgttcttgttatctaccg

SEQ ID NO: 288136 - DNA, 25 bp, Artificial
  probe
  misc_feature (1)..(25): SEQ ID NO: 1249; WAN024FEY; Start 976; Stop 1000
ggtgaattggttgaaggatatgaag

SEQ ID NO: 288137 - DNA, 25 bp, Artificial
  probe
  misc_feature (1)..(25): SEQ ID NO: 1249; WAN024FEY; Start 975; Stop 999
tggtgaattggttgaaggatatgaa

SEQ ID NO: 288138 - DNA, 25 bp, Artificial
  probe
  misc_feature (1)..(25): SEQ ID NO: 1249; WAN024FEY; Start 977; Stop 1001
gtgaattggttgaaggatatgaagc

SEQ ID NO: 288139 - DNA, 25 bp, Artificial
  probe
  misc_feature (1)..(25): SEQ ID NO: 1249; WAN024FEY; Start 974; Stop 998
gtggtgaattggttgaaggatatga

SEQ ID NO: 288140 - DNA, 25 bp, Artificial
  probe
  misc_feature (1)..(25): SEQ ID NO: 1249; WAN024FEY; Start 973; Stop 997
agtggtgaattggttgaaggatatg

SEQ ID NO: 288141 - DNA, 25 bp, Artificial
  probe
  misc_feature (1)..(25): SEQ ID NO: 1249; WAN024FEY; Start 972; Stop 996
cagtggtgaattggttgaaggatat

SEQ ID NO: 288142 - DNA, 25 bp, Artificial
  probe
  misc_feature (1)..(25): SEQ ID NO: 1249; WAN024FEY; Start 77; Stop 101
aattacaagacttagcagaagcgag

SEQ ID NO: 288143 - DNA, 25 bp, Artificial
  probe
  misc_feature (1)..(25): SEQ ID NO: 1249; WAN024FEY; Start 971; Stop 995
tcagtggtgaattggttgaaggata

SEQ ID NO: 288144 - DNA, 25 bp, Artificial
  probe
  misc_feature (1)..(25): SEQ ID NO: 1249; WAN024FEY; Start 978; Stop 1002
tgaattggttgaaggatatgaagct

SEQ ID NO: 288145 - DNA, 25 bp, Artificial
  probe
  misc_feature (1)..(25): SEQ ID NO: 1249; WAN024FEY; Start 78; Stop 102
attacaagacttagcagaagcgagg

SEQ ID NO: 288146 - DNA, 25 bp, Artificial
  probe
  misc_feature (1)..(25): SEQ ID NO: 1249; WAN024FEY; Start 12; Stop 36
aacagaggtaaatatgacaatcggt

SEQ ID NO: 288147 - DNA, 25 bp, Artificial
  probe
  misc_feature (1)..(25): SEQ ID NO: 1249; WAN024FEY; Start 715; Stop 739
tgtttccacttgccttatcctaaat

SEQ ID NO: 288148 - DNA, 25 bp, Artificial
  probe
  misc_feature (1)..(25): SEQ ID NO: 1249; WAN024FEY; Start 713; Stop 737
tttgtttccacttgccttatcctaa

SEQ ID NO: 288149 - DNA, 25 bp, Artificial
  probe
  misc_feature (1)..(25): SEQ ID NO: 1249; WAN024FEY; Start 714; Stop 738
ttgtttccacttgccttatcctaaa

SEQ ID NO: 288150 - DNA, 25 bp, Artificial
  probe
  misc_feature (1)..(25): SEQ ID NO: 1249; WAN024FEY; Start 211; Stop 235
ttaactgagcaagaaagacaagaag

SEQ ID NO: 288151 - DNA, 25 bp, Artificial
  probe
  misc_feature (1)..(25): SEQ ID NO: 1249; WAN024FEY; Start 13; Stop 37
acagaggtaaatatgacaatcggta

SEQ ID NO: 288152 - DNA, 25 bp, Artificial
  probe
  misc_feature (1)..(25): SEQ ID NO: 1249; WAN024FEY; Start 11; Stop 35
aaacagaggtaaatatgacaatcgg

SEQ ID NO: 288153 - DNA, 25 bp, Artificial
  probe
  misc_feature (1)..(25): SEQ ID NO: 1249; WAN024FEY; Start 716; Stop 740
gtttccacttgccttatcctaaatt

SEQ ID NO: 288154 - DNA, 25 bp, Artificial
  probe
  misc_feature (1)..(25): SEQ ID NO: 1249; WAN024FEY; Start 719; Stop 743
tccacttgccttatcctaaattagc

SEQ ID NO: 288155 - DNA, 25 bp, Artificial
  probe
  misc_feature (1)..(25): SEQ ID NO: 1249; WAN024FEY; Start 210; Stop 234
tttaactgagcaagaaagacaagaa

SEQ ID NO: 288156 - DNA, 25 bp, Artificial
  probe
  misc_feature (1)..(25): SEQ ID NO: 1249; WAN024FEY; Start 712; Stop 736
gtttgtttccacttgccttatccta

SEQ ID NO: 288157 - DNA, 25 bp, Artificial
  probe
  misc_feature (1)..(25): SEQ ID NO: 1249; WAN024FEY; Start 74; Stop 98
tgaaattacaagacttagcagaagc

SEQ ID NO: 288158 - DNA, 25 bp, Artificial
  probe
  misc_feature (1)..(25): SEQ ID NO: 1249; WAN024FEY; Start 75; Stop 99
gaaattacaagacttagcagaagcg

SEQ ID NO: 288159 - DNA, 25 bp, Artificial
  probe
  misc_feature (1)..(25): SEQ ID NO: 1249; WAN024FEY; Start 76; Stop 100
aaattacaagacttagcagaagcga

SEQ ID NO: 288160 - DNA, 25 bp, Artificial
  probe
  misc_feature (1)..(25): SEQ ID NO: 1249; WAN024FEY; Start 212; Stop 236
taactgagcaagaaagacaagaagt

SEQ ID NO: 288161 - DNA, 25 bp, Artificial
  probe
  misc_feature (1)..(25): SEQ ID NO: 1249; WAN024FEY; Start 537; Stop 561
taataatgacaatgtagctcagacc

SEQ ID NO: 288162 - DNA, 25 bp, Artificial
  probe
  misc_feature (1)..(25): SEQ ID NO: 1249; WAN024FEY; Start 936; Stop 960
ttatagttacggaagtggagctgtg

SEQ ID NO: 288163 - DNA, 25 bp, Artificial
  probe
  misc_feature (1)..(25): SEQ ID NO: 1249; WAN024FEY; Start 718; Stop 742
ttccacttgccttatcctaaattag

SEQ ID NO: 288164 - DNA, 25 bp, Artificial
  probe
  misc_feature (1)..(25): SEQ ID NO: 1249; WAN024FEY; Start 218; Stop 242
agcaagaaagacaagaagttgacat

SEQ ID NO: 288165 - DNA, 25 bp, Artificial
  probe
  misc_feature (1)..(25): SEQ ID NO: 1249; WAN024FEY; Start 14; Stop 38
cagaggtaaatatgacaatcggtat

SEQ ID NO: 288166 - DNA, 25 bp, Artificial
  probe
  misc_feature (1)..(25): SEQ ID NO: 1249; WAN024FEY; Start 428; Stop 452
tcattgccagtgatattgccaaata

SEQ ID NO: 288167 - DNA, 25 bp, Artificial
  probe
  misc_feature (1)..(25): SEQ ID NO: 1249; WAN024FEY; Start 1079; Stop 1103
ttgaggaagtaaacttggatgaaac

SEQ ID NO: 288168 - DNA, 25 bp, Artificial
  probe
  misc_feature (1)..(25): SEQ ID NO: 1249; WAN024FEY; Start 215; Stop 239
ctgagcaagaaagacaagaagttga

SEQ ID NO: 288169 - DNA, 25 bp, Artificial
  probe
  misc_feature (1)..(25): SEQ ID NO: 1250; WAN024GFL; Start 1021; Stop 1045
cgttactgtatcaatagcctctcta

SEQ ID NO: 288170 - DNA, 25 bp, Artificial
  probe
  misc_feature (1)..(25): SEQ ID NO: 1250; WAN024GFL; Start 620; Stop 644
gctactgccatatcaatgttaatca

SEQ ID NO: 288171 - DNA, 25 bp, Artificial
  probe
  misc_feature (1)..(25): SEQ ID NO: 1250; WAN024GFL; Start 577; Stop 601
gctgaggattaccatcaagactatc

SEQ ID NO: 288172 - DNA, 25 bp, Artificial
  probe
  misc_feature (1)..(25): SEQ ID NO: 1250; WAN024GFL; Start 581; Stop 605
aggattaccatcaagactatctcaa

SEQ ID NO: 288173 - DNA, 25 bp, Artificial
  probe
  misc_feature (1)..(25): SEQ ID NO: 1250; WAN024GFL; Start 578; Stop 602
ctgaggattaccatcaagactatct

SEQ ID NO: 288174 - DNA, 25 bp, Artificial
  probe
  misc_feature (1)..(25): SEQ ID NO: 1250; WAN024GFL; Start 582; Stop 606
ggattaccatcaagactatctcaag

SEQ ID NO: 288175 - DNA, 25 bp, Artificial
  probe
  misc_feature (1)..(25): SEQ ID NO: 1250; WAN024GFL; Start 795; Stop 819
cggtatctatgtggatatagcaact

SEQ ID NO: 288176 - DNA, 25 bp, Artificial
  probe
  misc_feature (1)..(25): SEQ ID NO: 1250; WAN024GFL; Start 580; Stop 604
gaggattaccatcaagactatctca

SEQ ID NO: 288177 - DNA, 25 bp, Artificial
  probe
  misc_feature (1)..(25): SEQ ID NO: 1250; WAN024GFL; Start 579; Stop 603
tgaggattaccatcaagactatctc

SEQ ID NO: 288178 - DNA, 25 bp, Artificial
  probe
  misc_feature (1)..(25): SEQ ID NO: 1250; WAN024GFL; Start 1025; Stop 1049
actgtatcaatagcctctctatccg

SEQ ID NO: 288179 - DNA, 25 bp, Artificial
  probe
  misc_feature (1)..(25): SEQ ID NO: 1250; WAN024GFL; Start 576; Stop 600
ggctgaggattaccatcaagactat

SEQ ID NO: 288180 - DNA, 25 bp, Artificial
  probe
  misc_feature (1)..(25): SEQ ID NO: 1250; WAN024GFL; Start 916; Stop 940
gaagataagtcctacaatatgacgc

SEQ ID NO: 288181 - DNA, 25 bp, Artificial
  probe
  misc_feature (1)..(25): SEQ ID NO: 1250; WAN024GFL; Start 1024; Stop 1048
tactgtatcaatagcctctctatcc

SEQ ID NO: 288182 - DNA, 25 bp, Artificial
  probe
  misc_feature (1)..(25): SEQ ID NO: 1250; WAN024GFL; Start 622; Stop 646
tactgccatatcaatgttaatcagg

SEQ ID NO: 288183 - DNA, 25 bp, Artificial
  probe
  misc_feature (1)..(25): SEQ ID NO: 1250; WAN024GFL; Start 797; Stop 821
gtatctatgtggatatagcaactgg

SEQ ID NO: 288184 - DNA, 25 bp, Artificial
  probe
  misc_feature (1)..(25): SEQ ID NO: 1250; WAN024GFL; Start 796; Stop 820
ggtatctatgtggatatagcaactg

SEQ ID NO: 288185 - DNA, 25 bp, Artificial
  probe
  misc_feature (1)..(25): SEQ ID NO: 1250; WAN024GFL; Start 583; Stop 607
gattaccatcaagactatctcaaga

SEQ ID NO: 288186 - DNA, 25 bp, Artificial
  probe
  misc_feature (1)..(25): SEQ ID NO: 1250; WAN024GFL; Start 915; Stop 939
ggaagataagtcctacaatatgacg

SEQ ID NO: 288187 - DNA, 25 bp, Artificial
  probe
  misc_feature (1)..(25): SEQ ID NO: 1250; WAN024GFL; Start 381; Stop 405
gcttcactatttccgcattatcaat

SEQ ID NO: 288188 - DNA, 25 bp, Artificial
  probe
  misc_feature (1)..(25): SEQ ID NO: 1250; WAN024GFL; Start 1019; Stop 1043
tacgttactgtatcaatagcctctc

SEQ ID NO: 288189 - DNA, 25 bp, Artificial
  probe
  misc_feature (1)..(25): SEQ ID NO: 1250; WAN024GFL; Start 387; Stop 411
ctatttccgcattatcaatccaacc

SEQ ID NO: 288190 - DNA, 25 bp, Artificial
  probe
  misc_feature (1)..(25): SEQ ID NO: 1250; WAN024GFL; Start 386; Stop 410
actatttccgcattatcaatccaac

SEQ ID NO: 288191 - DNA, 25 bp, Artificial
  probe
  misc_feature (1)..(25): SEQ ID NO: 1250; WAN024GFL; Start 385; Stop 409
cactatttccgcattatcaatccaa

SEQ ID NO: 288192 - DNA, 25 bp, Artificial
  probe
  misc_feature (1)..(25): SEQ ID NO: 1250; WAN024GFL; Start 384; Stop 408
tcactatttccgcattatcaatcca

SEQ ID NO: 288193 - DNA, 25 bp, Artificial
  probe
  misc_feature (1)..(25): SEQ ID NO: 1250; WAN024GFL; Start 763; Stop 787
ttctcaaaccgttactgggataaat

SEQ ID NO: 288194 - DNA, 25 bp, Artificial
  probe
  misc_feature (1)..(25): SEQ ID NO: 1250; WAN024GFL; Start 383; Stop 407
ttcactatttccgcattatcaatcc

SEQ ID NO: 288195 - DNA, 25 bp, Artificial
  probe
  misc_feature (1)..(25): SEQ ID NO: 1250; WAN024GFL; Start 903; Stop 927
tgtcacctacaaggaagataagtcc

SEQ ID NO: 288196 - DNA, 25 bp, Artificial
  probe
  misc_feature (1)..(25): SEQ ID NO: 1250; WAN024GFL; Start 1020; Stop 1044
acgttactgtatcaatagcctctct

SEQ ID NO: 288197 - DNA, 25 bp, Artificial
  probe
  misc_feature (1)..(25): SEQ ID NO: 1250; WAN024GFL; Start 762; Stop 786
tttctcaaaccgttactgggataaa

SEQ ID NO: 288198 - DNA, 25 bp, Artificial
  probe
  misc_feature (1)..(25): SEQ ID NO: 1250; WAN024GFL; Start 1026; Stop 1050
ctgtatcaatagcctctctatccgc

SEQ ID NO: 288199 - DNA, 25 bp, Artificial
  probe
  misc_feature (1)..(25): SEQ ID NO: 1250; WAN024GFL; Start 1018; Stop 1042
ttacgttactgtatcaatagcctct

SEQ ID NO: 288200 - DNA, 25 bp, Artificial
  probe
  misc_feature (1)..(25): SEQ ID NO: 1250; WAN024GFL; Start 388; Stop 412
tatttccgcattatcaatccaacca

SEQ ID NO: 288201 - DNA, 25 bp, Artificial
  probe
  misc_feature (1)..(25): SEQ ID NO: 1250; WAN024GFL; Start 764; Stop 788
tctcaaaccgttactgggataaatt

SEQ ID NO: 288202 - DNA, 25 bp, Artificial
  probe
  misc_feature (1)..(25): SEQ ID NO: 1251; WAN024DPK; Start 2; Stop 26
tgaatgatgtagcaataatccttga

SEQ ID NO: 288203 - DNA, 25 bp, Artificial
  probe
  misc_feature (1)..(25): SEQ ID NO: 1251; WAN024DPK; Start 3; Stop 27
gaatgatgtagcaataatccttgaa

SEQ ID NO: 288204 - DNA, 25 bp, Artificial
  probe
  misc_feature (1)..(25): SEQ ID NO: 1251; WAN024DPK; Start 1; Stop 25
atgaatgatgtagcaataatccttg

SEQ ID NO: 288205 - DNA, 25 bp, Artificial
  probe
  misc_feature (1)..(25): SEQ ID NO: 1251; WAN024DPK; Start 6; Stop 30
tgatgtagcaataatccttgaaaca

SEQ ID NO: 288206 - DNA, 25 bp, Artificial
  probe
  misc_feature (1)..(25): SEQ ID NO: 1251; WAN024DPK; Start 5; Stop 29
atgatgtagcaataatccttgaaac

SEQ ID NO: 288207 - DNA, 25 bp, Artificial
  probe
  misc_feature (1)..(25): SEQ ID NO: 1251; WAN024DPK; Start 7; Stop 31
gatgtagcaataatccttgaaacaa

SEQ ID NO: 288208 - DNA, 25 bp, Artificial
  probe
  misc_feature (1)..(25): SEQ ID NO: 1251; WAN024DPK; Start 35; Stop 59
cagaagaaagagatattagcaaaca

SEQ ID NO: 288209 - DNA, 25 bp, Artificial
  probe
  misc_feature (1)..(25): SEQ ID NO: 1251; WAN024DPK; Start 34; Stop 58
tcagaagaaagagatattagcaaac

SEQ ID NO: 288210 - DNA, 25 bp, Artificial
  probe
  misc_feature (1)..(25): SEQ ID NO: 1251; WAN024DPK; Start 8; Stop 32
atgtagcaataatccttgaaacaaa

SEQ ID NO: 288211 - DNA, 25 bp, Artificial
  probe
  misc_feature (1)..(25): SEQ ID NO: 1251; WAN024DPK; Start 4; Stop 28
aatgatgtagcaataatccttgaaa

SEQ ID NO: 288212 - DNA, 25 bp, Artificial
  probe
  misc_feature (1)..(25): SEQ ID NO: 1251; WAN024DPK; Start 36; Stop 60
agaagaaagagatattagcaaacaa

SEQ ID NO: 288213 - DNA, 25 bp, Artificial
  probe
  misc_feature (1)..(25): SEQ ID NO: 1251; WAN024DPK; Start 33; Stop 57
atcagaagaaagagatattagcaaa

SEQ ID NO: 288214 - DNA, 25 bp, Artificial
  probe
  misc_feature (1)..(25): SEQ ID NO: 1251; WAN024DPK; Start 32; Stop 56
aatcagaagaaagagatattagcaa

SEQ ID NO: 288215 - DNA, 25 bp, Artificial
  probe
  misc_feature (1)..(25): SEQ ID NO: 1251; WAN024DPK; Start 31; Stop 55
aaatcagaagaaagagatattagca

SEQ ID NO: 288216 - DNA, 25 bp, Artificial
  probe
  misc_feature (1)..(25): SEQ ID NO: 1251; WAN024DPK; Start 21; Stop 45
ccttgaaacaaaatcagaagaaaga

SEQ ID NO: 288217 - DNA, 25 bp, Artificial
  probe
  misc_feature (1)..(25): SEQ ID NO: 1251; WAN024DPK; Start 20; Stop 44
tccttgaaacaaaatcagaagaaag

SEQ ID NO: 288218 - DNA, 25 bp, Artificial
  probe
  misc_feature (1)..(25): SEQ ID NO: 1251; WAN024DPK; Start 37; Stop 61
gaagaaagagatattagcaaacaaa

SEQ ID NO: 288219 - DNA, 25 bp, Artificial
  probe
  misc_feature (1)..(25): SEQ ID NO: 1251; WAN024DPK; Start 12; Stop 36
agcaataatccttgaaacaaaatca

SEQ ID NO: 288220 - DNA, 25 bp, Artificial
  probe
  misc_feature (1)..(25): SEQ ID NO: 1251; WAN024DPK; Start 13; Stop 37
gcaataatccttgaaacaaaatcag

SEQ ID NO: 288221 - DNA, 25 bp, Artificial
  probe
  misc_feature (1)..(25): SEQ ID NO: 1251; WAN024DPK; Start 19; Stop 43
atccttgaaacaaaatcagaagaaa

SEQ ID NO: 288222 - DNA, 25 bp, Artificial
  probe
  misc_feature (1)..(25): SEQ ID NO: 1251; WAN024DPK; Start 18; Stop 42
aatccttgaaacaaaatcagaagaa

SEQ ID NO: 288223 - DNA, 25 bp, Artificial
  probe
  misc_feature (1)..(25): SEQ ID NO: 1251; WAN024DPK; Start 9; Stop 33
tgtagcaataatccttgaaacaaaa

SEQ ID NO: 288224 - DNA, 25 bp, Artificial
  probe
  misc_feature (1)..(25): SEQ ID NO: 1251; WAN024DPK; Start 23; Stop 47
ttgaaacaaaatcagaagaaagaga

SEQ ID NO: 288225 - DNA, 25 bp, Artificial
  probe
  misc_feature (1)..(25): SEQ ID NO: 1251; WAN024DPK; Start 24; Stop 48
tgaaacaaaatcagaagaaagagat

SEQ ID NO: 288226 - DNA, 25 bp, Artificial
  probe
  misc_feature (1)..(25): SEQ ID NO: 1251; WAN024DPK; Start 22; Stop 46
cttgaaacaaaatcagaagaaagag

SEQ ID NO: 288227 - DNA, 25 bp, Artificial
  probe
  misc_feature (1)..(25): SEQ ID NO: 1251; WAN024DPK; Start 17; Stop 41
taatccttgaaacaaaatcagaaga

SEQ ID NO: 288228 - DNA, 25 bp, Artificial
  probe
  misc_feature (1)..(25): SEQ ID NO: 1251; WAN024DPK; Start 38; Stop 62
aagaaagagatattagcaaacaaat

SEQ ID NO: 288229 - DNA, 25 bp, Artificial
  probe
  misc_feature (1)..(25): SEQ ID NO: 1251; WAN024DPK; Start 39; Stop 63
agaaagagatattagcaaacaaatt

SEQ ID NO: 288230 - DNA, 25 bp, Artificial
  probe
  misc_feature (1)..(25): SEQ ID NO: 1251; WAN024DPK; Start 10; Stop 34
gtagcaataatccttgaaacaaaat

SEQ ID NO: 288231 - DNA, 25 bp, Artificial
  probe
  misc_feature (1)..(25): SEQ ID NO: 1251; WAN024DPK; Start 11; Stop 35
tagcaataatccttgaaacaaaatc

SEQ ID NO: 288232 - DNA, 25 bp, Artificial
  probe
  misc_feature (1)..(25): SEQ ID NO: 1251; WAN024DPK; Start 14; Stop 38
caataatccttgaaacaaaatcaga

SEQ ID NO: 288233 - DNA, 25 bp, Artificial
  probe
  misc_feature (1)..(25): SEQ ID NO: 1251; WAN024DPK; Start 16; Stop 40
ataatccttgaaacaaaatcagaag

SEQ ID NO: 288234 - DNA, 25 bp, Artificial
  probe
  misc_feature (1)..(25): SEQ ID NO: 1251; WAN024DPK; Start 25; Stop 49
gaaacaaaatcagaagaaagagata

SEQ ID NO: 288235 - DNA, 25 bp, Artificial
  probe
  misc_feature (1)..(25): SEQ ID NO: 1252; WAN024FGS; Start 226; Stop 250
ctatccataagacgagtcataaggc

SEQ ID NO: 288236 - DNA, 25 bp, Artificial
  probe
  misc_feature (1)..(25): SEQ ID NO: 1252; WAN024FGS; Start 227; Stop 251
tatccataagacgagtcataaggct

SEQ ID NO: 288237 - DNA, 25 bp, Artificial
  probe
  misc_feature (1)..(25): SEQ ID NO: 1252; WAN024FGS; Start 239; Stop 263
gagtcataaggctcttgagattgat

SEQ ID NO: 288238 - DNA, 25 bp, Artificial
  probe
  misc_feature (1)..(25): SEQ ID NO: 1252; WAN024FGS; Start 225; Stop 249
actatccataagacgagtcataagg

SEQ ID NO: 288239 - DNA, 25 bp, Artificial
  probe
  misc_feature (1)..(25): SEQ ID NO: 1252; WAN024FGS; Start 240; Stop 264
agtcataaggctcttgagattgata

SEQ ID NO: 288240 - DNA, 25 bp, Artificial
  probe
  misc_feature (1)..(25): SEQ ID NO: 1252; WAN024FGS; Start 222; Stop 246
ctcactatccataagacgagtcata

SEQ ID NO: 288241 - DNA, 25 bp, Artificial
  probe
  misc_feature (1)..(25): SEQ ID NO: 1252; WAN024FGS; Start 270; Stop 294
cggactgataccattcataggagaa

SEQ ID NO: 288242 - DNA, 25 bp, Artificial
  probe
  misc_feature (1)..(25): SEQ ID NO: 1252; WAN024FGS; Start 221; Stop 245
cctcactatccataagacgagtcat

SEQ ID NO: 288243 - DNA, 25 bp, Artificial
  probe
  misc_feature (1)..(25): SEQ ID NO: 1252; WAN024FGS; Start 223; Stop 247
tcactatccataagacgagtcataa

SEQ ID NO: 288244 - DNA, 25 bp, Artificial
  probe
  misc_feature (1)..(25): SEQ ID NO: 1252; WAN024FGS; Start 219; Stop 243
aacctcactatccataagacgagtc

SEQ ID NO: 288245 - DNA, 25 bp, Artificial
  probe
  misc_feature (1)..(25): SEQ ID NO: 1252; WAN024FGS; Start 224; Stop 248
cactatccataagacgagtcataag

SEQ ID NO: 288246 - DNA, 25 bp, Artificial
  probe
  misc_feature (1)..(25): SEQ ID NO: 1252; WAN024FGS; Start 241; Stop 265
gtcataaggctcttgagattgatat

SEQ ID NO: 288247 - DNA, 25 bp, Artificial
  probe
  misc_feature (1)..(25): SEQ ID NO: 1252; WAN024FGS; Start 228; Stop 252
atccataagacgagtcataaggctc

SEQ ID NO: 288248 - DNA, 25 bp, Artificial
  probe
  misc_feature (1)..(25): SEQ ID NO: 1252; WAN024FGS; Start 238; Stop 262
cgagtcataaggctcttgagattga

SEQ ID NO: 288249 - DNA, 25 bp, Artificial
  probe
  misc_feature (1)..(25): SEQ ID NO: 1252; WAN024FGS; Start 236; Stop 260
gacgagtcataaggctcttgagatt

SEQ ID NO: 288250 - DNA, 25 bp, Artificial
  probe
  misc_feature (1)..(25): SEQ ID NO: 1252; WAN024FGS; Start 23; Stop 47
cctacacttacaactctgtccgatt

SEQ ID NO: 288251 - DNA, 25 bp, Artificial
  probe
  misc_feature (1)..(25): SEQ ID NO: 1252; WAN024FGS; Start 220; Stop 244
acctcactatccataagacgagtca

SEQ ID NO: 288252 - DNA, 25 bp, Artificial
  probe
  misc_feature (1)..(25): SEQ ID NO: 1252; WAN024FGS; Start 195; Stop 219
attagtcgccacaatcacttctgaa

SEQ ID NO: 288253 - DNA, 25 bp, Artificial
  probe
  misc_feature (1)..(25): SEQ ID NO: 1252; WAN024FGS; Start 237; Stop 261
acgagtcataaggctcttgagattg

SEQ ID NO: 288254 - DNA, 25 bp, Artificial
  probe
  misc_feature (1)..(25): SEQ ID NO: 1252; WAN024FGS; Start 245; Stop 269
taaggctcttgagattgatatcgtc

SEQ ID NO: 288255 - DNA, 25 bp, Artificial
  probe
  misc_feature (1)..(25): SEQ ID NO: 1252; WAN024FGS; Start 244; Stop 268
ataaggctcttgagattgatatcgt

SEQ ID NO: 288256 - DNA, 25 bp, Artificial
  probe
  misc_feature (1)..(25): SEQ ID NO: 1252; WAN024FGS; Start 243; Stop 267
cataaggctcttgagattgatatcg

SEQ ID NO: 288257 - DNA, 25 bp, Artificial
  probe
  misc_feature (1)..(25): SEQ ID NO: 1252; WAN024FGS; Start 229; Stop 253
tccataagacgagtcataaggctct

SEQ ID NO: 288258 - DNA, 25 bp, Artificial
  probe
  misc_feature (1)..(25): SEQ ID NO: 1252; WAN024FGS; Start 205; Stop 229
acaatcacttctgaaacctcactat

SEQ ID NO: 288259 - DNA, 25 bp, Artificial
  probe
  misc_feature (1)..(25): SEQ ID NO: 1252; WAN024FGS; Start 210; Stop 234
cacttctgaaacctcactatccata

SEQ ID NO: 288260 - DNA, 25 bp, Artificial
  probe
  misc_feature (1)..(25): SEQ ID NO: 1252; WAN024FGS; Start 207; Stop 231
aatcacttctgaaacctcactatcc

SEQ ID NO: 288261 - DNA, 25 bp, Artificial
  probe
  misc_feature (1)..(25): SEQ ID NO: 1252; WAN024FGS; Start 271; Stop 295
ggactgataccattcataggagaaa

SEQ ID NO: 288262 - DNA, 25 bp, Artificial
  probe
  misc_feature (1)..(25): SEQ ID NO: 1252; WAN024FGS; Start 214; Stop 238
tctgaaacctcactatccataagac

SEQ ID NO: 288263 - DNA, 25 bp, Artificial
  probe
  misc_feature (1)..(25): SEQ ID NO: 1252; WAN024FGS; Start 206; Stop 230
caatcacttctgaaacctcactatc

SEQ ID NO: 288264 - DNA, 25 bp, Artificial
  probe
  misc_feature (1)..(25): SEQ ID NO: 1252; WAN024FGS; Start 215; Stop 239
ctgaaacctcactatccataagacg

SEQ ID NO: 288265 - DNA, 25 bp, Artificial
  probe
  misc_feature (1)..(25): SEQ ID NO: 1252; WAN024FGS; Start 204; Stop 228
cacaatcacttctgaaacctcacta

SEQ ID NO: 288266 - DNA, 25 bp, Artificial
  probe
  misc_feature (1)..(25): SEQ ID NO: 1252; WAN024FGS; Start 217; Stop 241
gaaacctcactatccataagacgag

SEQ ID NO: 288267 - DNA, 25 bp, Artificial
  probe
  misc_feature (1)..(25): SEQ ID NO: 1252; WAN024FGS; Start 211; Stop 235
acttctgaaacctcactatccataa

SEQ ID NO: 288268 - DNA, 25 bp, Artificial
  probe
  misc_feature (1)..(25): SEQ ID NO: 1253; WAN024D3H; Start 273; Stop 297
cctagtctatgaggaggaagtctta

SEQ ID NO: 288269 - DNA, 25 bp, Artificial
  probe
  misc_feature (1)..(25): SEQ ID NO: 1253; WAN024D3H; Start 113; Stop 137
ctcaggaagagttgacagagattgt

SEQ ID NO: 288270 - DNA, 25 bp, Artificial
  probe
  misc_feature (1)..(25): SEQ ID NO: 1253; WAN024D3H; Start 272; Stop 296
acctagtctatgaggaggaagtctt

SEQ ID NO: 288271 - DNA, 25 bp, Artificial
  probe
  misc_feature (1)..(25): SEQ ID NO: 1253; WAN024D3H; Start 114; Stop 138
tcaggaagagttgacagagattgtg

SEQ ID NO: 288272 - DNA, 25 bp, Artificial
  probe
  misc_feature (1)..(25): SEQ ID NO: 1253; WAN024D3H; Start 178; Stop 202
tatgttcaagtttacgaaagcagtc

SEQ ID NO: 288273 - DNA, 25 bp, Artificial
  probe
  misc_feature (1)..(25): SEQ ID NO: 1253; WAN024D3H; Start 271; Stop 295
gacctagtctatgaggaggaagtct

SEQ ID NO: 288274 - DNA, 25 bp, Artificial
  probe
  misc_feature (1)..(25): SEQ ID NO: 1253; WAN024D3H; Start 179; Stop 203
atgttcaagtttacgaaagcagtct

SEQ ID NO: 288275 - DNA, 25 bp, Artificial
  probe
  misc_feature (1)..(25): SEQ ID NO: 1253; WAN024D3H; Start 180; Stop 204
tgttcaagtttacgaaagcagtctg

SEQ ID NO: 288276 - DNA, 25 bp, Artificial
  probe
  misc_feature (1)..(25): SEQ ID NO: 1253; WAN024D3H; Start 181; Stop 205
gttcaagtttacgaaagcagtctgg

SEQ ID NO: 288277 - DNA, 25 bp, Artificial
  probe
  misc_feature (1)..(25): SEQ ID NO: 1253; WAN024D3H; Start 115; Stop 139
caggaagagttgacagagattgtgc

SEQ ID NO: 288278 - DNA, 25 bp, Artificial
  probe
  misc_feature (1)..(25): SEQ ID NO: 1253; WAN024D3H; Start 185; Stop 209
aagtttacgaaagcagtctggagag

SEQ ID NO: 288279 - DNA, 25 bp, Artificial
  probe
  misc_feature (1)..(25): SEQ ID NO: 1253; WAN024D3H; Start 182; Stop 206
ttcaagtttacgaaagcagtctgga

SEQ ID NO: 288280 - DNA, 25 bp, Artificial
  probe
  misc_feature (1)..(25): SEQ ID NO: 1253; WAN024D3H; Start 118; Stop 142
gaagagttgacagagattgtgcgag

SEQ ID NO: 288281 - DNA, 25 bp, Artificial
  probe
  misc_feature (1)..(25): SEQ ID NO: 1253; WAN024D3H; Start 184; Stop 208
caagtttacgaaagcagtctggaga
